(19) United States
(12) Patent Application Publication
(10) Pub. No.: US 2004/0009474 A1
(43) Pub. Date: Jan. 15, 2004

(54) Novel human polynucleotides and polypeptides encoded thereby

(76) Inventors: Martin D. Leach, Madison, CT (US); Richard A. Shimkets, Guilford, CT (US)

Correspondence Address: Ivor R. Elrifi, Esq., MIintz, Levin, Cohn, Ferris,, Glovsky and Popeo, P.C., One Financial Center, Boston, MA, 02111, US

(21) Appl. No.: 09/864,408

(22) Filed: May 24, 2001

Related U.S. Application Data
(60) Provisional application No. 60/206,690, filed on May 24, 2000.

(51) Int. Cl. C12Q 1/68; C07H 21/04; C12N 9/00; C12P 21/02; C12N 5/06; C07K 14/47

(52) U.S. Cl. 435/6; 435/69.1; 435/183; 435/320.1; 435/325; 530/350; 536/23.2

(57) ABSTRACT

The present invention provides ORFX, a novel isolated polypeptide, as well as a polynucleotide encoding ORFX and antibodies that immunospecifically bind to ORFX or any derivative, variant, mutant, or fragment of the ORFX polypeptide, polynucleotide or antibody. The invention additionally provides methods in which the ORFX polypeptide, polynucleotide and antibody are used in detection and treatment of a broad range of pathological states, as well as to others uses.

### RELATED APPLICATIONS

[0001] This application claims priority to U.S. Ser. No. 60/206,690 filed May 24, 2000, which is incorporated herein by reference in its entirety.

### BACKGROUND OF THE INVENTION

[0002] The invention relates generally to nucleic acids and polypeptides encoded thereby, and methods of using these nucleic acids and polypeptides.

### SUMMARY OF THE INVENTION

[0003] The invention is based in part on the discovery of nucleic acids that include open reading frames encoding novel polypeptides, and on the polypeptides encoded thereby. The nucleic acids and polypeptides are collectively referred to herein as “ORFX”.

[0004] Accordingly, in one aspect, the invention provides an isolated nucleic acid molecule (SEQ ID NO:2n−1, wherein n is an integer between 1-4534), that encodes novel polypeptide, or a fragment, homolog, analog or derivative thereof. The nucleic acid can include, e.g., a nucleic acid sequence encoding a polypeptide at least 85% identical to a polypeptide comprising the amino acid sequences of SEQ ID NO:2n, wherein n is an integer between 1-4534. The nucleic acid can be, e.g., a genomic DNA fragment, or a cDNA molecule.

[0005] Also included in the invention is a vector containing one or more of the nucleic acids described herein, and a cell containing the vectors or nucleic acids described herein.

[0006] The invention is also directed to host cells transformed with a recombinant expression vector comprising any of the nucleic acid molecules described above.

[0007] In another aspect, the invention includes a pharmaceutical composition that includes an ORFX nucleic acid and a pharmaceutically acceptable carrier or diluent.

[0008] In a further aspect, the invention includes a substantially purified ORF polypeptide, e.g., any of the ORFX polypeptides encoded by an ORFX nucleic acid, and fragments, homologs, analogs, and derivatives thereof. The invention also includes a pharmaceutical composition that includes a ORFX polypeptide and a pharmaceutically acceptable carrier or diluent.

[0009] In a still a further aspect, the invention provides an antibody that binds specifically to an ORFX polypeptide. The antibody can be, e.g., a monoclonal or polyclonal antibody, and fragments, homologs, analogs, and derivatives thereof. The invention also includes a pharmaceutical composition including ORFX antibody and a pharmaceutically acceptable carrier or diluent. The invention is also directed to isolated antibodies that bind to an epitope on a polypeptide encoded by any of the nucleic acid molecules described above.

[0010] The invention also includes kits comprising any of the pharmaceutical compositions described above.

[0011] The invention further provides a method for producing an ORFX polypeptide by providing a cell containing a ORFX nucleic acid, e.g., a vector that includes a ORFX nucleic acid, and culturing the cell under conditions sufficient to express the ORFX polypeptide encoded by the nucleic acid. The expressed ORFX polypeptide is then recovered from the cell. Preferably, the cell produces little or no endogenous ORFX polypeptide. The cell can be, e.g., a prokaryotic cell or eukaryotic cell.

[0012] The invention is also directed to methods of identifying an ORFX polypeptide or nucleic acids in a sample by contacting the sample with a compound that specifically binds to the polypeptide or nucleic acid, and detecting complex formation, if present.

[0013] The invention further provides methods of identifying a compound that modulates the activity of a ORFX polypeptide by contacting ORFX polypeptide with a compound and determining whether the ORFX polypeptide activity is modified.

[0014] The invention is also directed to compounds that modulate ORFX polypeptide activity identified by contacting a ORFX polypeptide with the compound and determining whether the compound modifies activity of the ORFX polypeptide, binds to the ORFX polypeptide, or binds to a nucleic acid molecule encoding a ORFX polypeptide.

[0015] In a another aspect, the invention provides a method of determining the presence of or predisposition of an ORFX-associated disorder in a subject. The method includes providing a sample from the subject and measuring the amount of ORFX polypeptide in the subject sample. The amount of ORFX polypeptide in the subject sample is then compared to the amount of ORFX polypeptide in a control sample. An alteration in the amount of ORFX polypeptide in the subject protein sample relative to the amount of ORFX polypeptide in the control protein sample indicates the subject has a tissue proliferation-associated condition. A control sample is preferably taken from a matched individual, i.e., an individual of similar age, sex, or other general condition but who is not suspected of having a tissue proliferation-associated condition. Alternatively, the control sample may be taken from the subject at a time when the subject is not suspected of having a tissue proliferation-associated disorder. In some embodiments, the ORFX is detected using a ORFX antibody.

[0016] In a further aspect, the invention provides a method of determining the presence of or predisposition of an ORFX-associated disorder in a subject. The method includes providing a nucleic acid sample, e.g., RNA or DNA, or both, from the subject and measuring the amount of the ORFX nucleic acid in the subject nucleic acid sample. The amount of ORFX nucleic acid sample in the subject nucleic acid is then compared to the amount of an ORFX nucleic acid in a control sample. An alteration in the amount of ORFX nucleic acid in the sample relative to the amount of ORFX in the control sample indicates the subject has a tissue proliferation-associated disorder.

[0017] In a still further aspect, the invention provides a method of treating or preventing or delaying a ORFX-associated disorder. The method includes administering to a subject in which such treatment or prevention or delay is desired a ORFX nucleic acid, a ORFX polypeptide, or an ORFX antibody in an amount sufficient to treat, prevent, or delay a tissue proliferation-associated disorder in the subject.

[0018] Unless otherwise defined, all technical and scientific terms used herein have the same meaning as commonly understood by one of ordinary skill in the art to which this invention belongs. Although methods and materials similar or equivalent to those described herein can be used in the practice or testing of the present invention, suitable methods and materials are described below. All publications, patent applications, patents, and other references mentioned herein are incorporated by reference in their entirety. In the case of conflict, the present specification, including definitions, will control. In addition, the materials, methods, and examples are illustrative only and not intended to be limiting. Other features and advantages of the invention will be apparent from the following detailed description and claims.

### DETAILED DESCRIPTION OF THE INVENTION

[0019] The invention provides novel polypeptides and nucleotides encoded thereby. The polynucleotides and their encoded polypeptides can be grouped according to the functions played by their gene products. Such functions include, structural proteins, proteins from which associated with metabolic pathways fatty acid metabolism, glycolysis, intermediary metabolism, calcium metabolism, proteases, and amino acid metabolism, etc.

[0020] Included in the invention are 4534 novel nucleic acid sequences and their encoded polypeptides. The sequences are collectively referred to as “ORFX nucleic acids” or ORFX polynucleotides” and the corresponding encoded polypeptides are referred to as “ORFX polypeptides” or ORFX proteins”. The ORFX polynucleotides and the encoded polypeptides are

[0021] To determine similarity to previously described proteins, polypeptides encoded by ORFX DNA sequences were tested using the Framesearch Algorithm against a nonredundant version of the GenPept Database from NCBI/Genbank. DNA sequences that had a score of ‘90’ or above (Framesearch algorithm score, Edelman et. al. GCG Genetics) to a known protein were selected. Open reading frames were extended beyond the region of the protein matched using standard DNA translation and codon tables. Novel proteins that lacked a protein match were translated against the standard genetic codons and proteins with an ORF at least 80 amino acids and containing a Methionine start are included in the Table.

[0022] Column 4 of Table 1, entitled “Protein Domain”, lists previously described protein domains, designated by pfam entries, that are present in the polypeptides encoded by the ORFs, Also included in column 3 are proteins in which these domains are present. The pfam entries can be retrieved from http://pfam.wustl.edu/. DNA sequences were translated in all six frames and tested using the Hmmer Algorithm against the Pfam Database (References to the algorithm and Pfam database can be found at http://pfam.wustl.edu). Translated DNA sequences that matched a protein domain entry in the Pfam database AND had a score of ‘7.5’ were selected.

[0023] Column 5 of Table 3, entitled “Protein Classification”, lists the classification assigned for the protein, based on its homology. Examples of proteins in the classification include the following:

[0024] Amylases

[0025] Amylase is responsible for endohydrolysis of 1,4-alpha-glucosidic linkages in oligosaccharides and polysaccharides. Variations in amylase gene may be indicative of delayed maturation and of various amylase producing neoplasms and carcinomas.

[0026] Amyloid

[0027] The serum amyloid A (SAA) proteins comprise a family of vertebrate proteins that associate predominantly with high density lipoproteins (HDL). The synthesis of certain members of the family is greatly increased in inflammation. Prolonged elevation of plasma SAA levels, as in chronic inflammation, 15 results in a pathological condition, called amyloidosis, which affects the liver, kidney and spleen and which is characterized by the highly insoluble accumulation of SAA in these tissues. Amyloid selectively inhibits insulin-stimulated glucose utilization and glycogen deposition in muscle, while not affecting adipocyte glucose metabolism. Deposition of fibrillar amyloid proteins intraneuronally, as neurofibrillary tangles, extracellularly, as plaques and in blood vessels, is characteristic of both Alzheimer's disease and aged Down's syndrome. Amyloid deposition is also associated with type II diabetes mellitus.

[0028] Angiopoeitin

[0029] Members of the angiopoeitin/fibrinogen family have been shown to stimulate the generation of new blood vessels, inhibit the generation of new blood vessels, and perform several roles in blood clotting. This generation of new blood vessels, called angiogenesis, is also an essential step in tumor growth in order for the tumor to get the blood supply it needs to expand. Variation in these genes may be predictive of any form of heart disease, numerous blood clotting disorders, stroke, hypertension and predisposition to tumor formation and metastasis. In particular, these variants may be predictive of the response to various antihypertensive drugs and chemotherapeutic and anti-tumor agents.

[0030] Apoptosis-related Proteins

[0031] Active cell suicide (apoptosis) is induced by events such as growth factor withdrawal and toxins. It is controlled by regulators, which have either an inhibitory effect on programmed cell death (anti-apoptotic) or block the protective effect of inhibitors (pro-apoptotic). Many viruses have found a way of countering defensive apoptosis by encoding their own anti-apoptosis genes preventing their target-cells from dying too soon. Variants of apoptosis related genes may be useful in formulation of anti-aging drugs.

[0032] Cadherin, Cyclin, Polymerase, Oncogenes, Histones, Kinases

[0033] Members of the cell division/cell cycle pathways such as cyclins, many transcription factors and kinases, DNA polymerases, histones, helicases and other oncogenes play a critical role in carcinogenesis where the uncontrolled proliferation of cells leads to tumor formation and eventually metastasis. Variation in these genes may be predictive of predisposition to any form of cancer, from increased risk of tumor formation to increased rate of metastasis. In particular, these variants may be predictive of the response to various chemotherapeutic and anti-tumor agents.

[0034] Colony-stimulating Factor-related Proteins

[0035] (Granulocyte/macrophage colony-stimulating factors are cytokines that act in hematopoiesis by controlling the production, differentiation, and function of 2 related white cell populations of the blood, the granulocytes and the monocytes-macrophages.

[0036] Complement-related Proteins

[0037] Complement proteins are immune associated cytotoxic agents, acting in a chain reaction to exterminate target cells to that were opsonized (primed) with antibodies, by forming a membrane attack complex (MAC). The mechanism of killing is by opening pores in the target cell membrane. Variations in 20 complement genes or their inhibitors are associated with many autoimmune disorders. Modified serum levels of complement products cause edemas of various tissues, lupus (SLE), vasculitis, glomerulonephritis, renal failure, hemolytic anemia, thrombocytopenia, and arthritis. They interfere with mechanisms of ADCC (antibody dependent cell cytotoxicity), severely impair immune competence and reduce phagocytic ability. Variants of complement genes may also be indicative of type I diabetes mellitus, meningitis neurological disorders such as nemaline myopathy, neonatal hypotonia, muscular disorders such as congenital myopathy and other diseases.

[0038] Cytochrome

[0039] The respiratory chain is a key biochemical pathway which is essential to all aerobic cells. There are five different cytochromes involved in the chain. These are heme bound proteins which serve as electron carriers. Modifications in these genes may be predictive of ataxia areflexia, dementia and myopathic and neuropathic changes in muscles. Also, association with various types of solid tumors.

[0040] Kinesins

[0041] Kinesins are tubulin molecular motors that function to transport organelles within cells and to move chromosomes along microtubules during cell division. Modifications of these genes may be indicative of neurological disorders such as Pick disease of the brain, tuberous sclerosis.

[0042] Cytokines, Interferon, Interleukin

[0043] Members of the cytokine families are known for their potent ability to stimulate cell growth and division even at low concentrations. Cytokines such as erythropoietin are cell-specific in their growth stimulation; erythropoietin is useful for the stimulation of the proliferation of erythroblasts. Variants in cytokines may be predictive for a wide variety of diseases, including cancer predisposition.

[0044] G-protein Coupled Receptors

[0045] G-protein coupled receptors (also called R7G) are an extensive group of hormones, neurotransmitters, odorants and light receptors which transduce extracellular signals by interaction with guanine nucleotide-binding (G) proteins. Alterations in genes coding for G-coupled proteins may be involved in and indicative of a vast number of physiological conditions. These include blood pressure regulation, renal dysfunctions, male infertility, dopamine associated cognitive, emotional, and endocrine functions, hypercalcemia, chondrodysplasia and osteoporosis, pseudohypoparathyroidism, growth retardation and dwarfism.

[0046] Thioesterases

[0047] Eukaryotic thiol proteases are a family of proteolytic enzymes which contain an active site cysteine. Catalysis proceeds through a thioester intermediate and is facilitated by a nearby histidine side chain; an asparagine completes the essential catalytic triad. Variants of thioester associated genes may be predictive of neuronal disorders and mental illnesses such as Ceroid Lipoffiscinosis, Neuronal 1, Infantile, Santavuori disease and more.

[0048] The key to the molecule type is as follows:

| Abbrev: | Title: |
|---|---|
| amylase | amylase protein |
| amylaseinhib | amylase inhibitor |
| amyloid | amyloid protein |
| apoptosis | apoptosis associated protein |
| apoptosisinhib | apoptosis inhibitors |
| apoptosisrecep | apoptosis receptors |
| ATPase_associated | ATPase associated protein |
| biotindep | biotin dependent enzyme/protein |
| cadherin | cadherin protein |
| calcium_channel | calcium channel protein |
| carboxylase | carboxylase protein |
| cathepsin | cathepsin/carboxypeptidases |
| cathepsininhib | cathepsin/carboxypeptidase inhibitor |
| chloride_channel | chloride channel protein |
| collagen | collagen |
| complement | complement protein |
| complementrecept | complement receptor protein |
| complementinhib | complement inhibitor |
| csf | colony stimulating factor |
| csfrecept | colony stimulating factor receptor |
| cyclin | cyclin protein |
| cyto450 | cytochrome p450 protein |
| cytochrome | cytochrome related protein |
| deaminase | deaminase |
| dehydrogenase | dehydrogenase |
| desaturase | desaturase |
| dna_rna_bind | DNA/RNA binding protein/factor |
| dna_rna_inhib | DNA/RNA binding protein/factor inhibitor |
| dynein | dynein |
| elastase | elastase |
| elastaseinhib | elastase inhibitor |
| eph | EPH family of tyrosine kinases |
| esterase | esterase |
| esteraseinhib | esterase inhibitor |
| fgf | fibroblast growth factor |
| fgfreceptor | fibroblast growth factor receptor |
| gaba | GABA receptor |
| glucoamylase | glucoamylase |
| glucoronidase | glucoronidase |
| glycoprotein | glycoprotein |
| Guanylyl | guanylylate cyclase |
| helicase | helicase |
| histone | histone |
| HOM | homologous |
| homeobox | homeobox protein |
| hydrolase | hydrolase |
| hydroxysteroid | hydroxysteroid associated protein |
| hypoxanthine | hypoxanthine associated protein |
| immunoglob | immunoglobulin |
| immunoglobrecept | immunoglobulin receptor |
| interferon | interferon |
| interleukin | interleukin |
| interleukinrecept | interleukin receptor |
| isomerase | isomerase |
| isomeraseinhibitor | isomerase inhibitor |
| isomerasereceptor | isomerase receptor |
| kinase | kinase |
| kinaseinhibitor | kinase inhibitor |
| kinasereceptor | kinase receptor |
| kinesin | kinesin |
| laminin | laminin associated protein |
| lipase | lipase |
| metallothionein | metallothionein |
| MHC | major histocompatability complex |
| misc_channel | miscellaneous channel |
| ngf | nerve growth factor |
| nuci_recpt | nuclear receptor |
| nuclease | nuclease |
| oncogene | oncogene associated protein |
| oxidase | oxidase |
| oxygenase | oxygenase |
| peptidase | peptidase |
| peroxidase | peroxidase |
| phosphatase | phosphatase |
| phosphataseinhib | phosphatase inhibitor |
| phosphorylase | phosphorylase |
| PIR | PIR DATABASE (release 56, |
| | 29 OCT. 1998) |
| polymerase | polymerase |
| potassium_channel | potassium channel protein |
| prostaglandin | prostaglandin |
| protease | protease |
| proteaseinhib | protease inhibitor |
| reductase | reductase |
| ribosomalprot | ribosomal associated protein |
| RTR | EMBLDATABASE translated entries not to |
| | be incorporated into SWISS-PROT |
| | (20 JUL. 1998) |
| SIM | similar |
| SPTR | EMBL DATABASE translated entries to be |
| | incorporated into SWISS-PROT |
| | (20 JUL. 1998) |
| struct | structural associated protein |
| sulfotransferase | sulfotransferase |
| SWP | SWISS-PROT DATABASE |
| | (release 18 OCT. 1998) |
| SWPN | SWISS-PROT Update |
| | (release 11 NOV. 1998) |
| synthase | synthase |
| tgf | transforming growth factor |
| tgfreceptor | transforming growth factor receptor |
| thioesterase | thioesterase |
| thiolase | thiolase |
| tm7 | seven transmembrane domain G-protein |
| | coupled receptor |
| tnf | necrosis factor receptor |
| traffic | tumor necrosis factor |
| tnfreceptor | tumor trafficking associated protein |
| TRN | EMBL DATABASE translated entries |
| | update (20 JUL. 1998) |
| transcriptfactor | transcription factor |
| transferase | transferase |
| transport | transport protein |
| tubulin | tubulin |
| ubiquitin | ubiquitin |
| unclassified | Protein not categorized into one of the |
| | aforementioned protein families |
| water channel | water channel protein |

[0049] from the disclosed sequence while still encoding a protein that maintains its ORFX-like activities and physiological functions. The invention further includes the complement of the nucleic acid sequence of any of SEQ ID NO:2n−1 (wherein n=1 to 4534), including fragments, derivatives, analogs and homolog thereof. The invention additionally includes nucleic acids or nucleic acid fragments, or complements thereto, whose structures include chemical modifications.

[0050] Also included are nucleic acid fragments sufficient for use as hybridization probes to identify ORFX-encoding nucleic acids (e.g., ORFX mRNA) and fragments for use as polymerase chain reaction (PCR) primers for the amplification or mutation of ORFX nucleic acid molecules. As used herein, the term “nucleic acid molecule” is intended to include DNA molecules (e.g, cDNA or genomic DNA), RNA molecules (e.g., mRNA), analogs of the DNA or RNA generated using nucleotide analogs, and derivatives, fragments and homologs thereof. The nucleic acid molecule can be single-stranded or double-stranded, but preferably is double-stranded DNA.

[0051] “Probes” refer to nucleic acid sequences of variable length, preferably between at least about 10 nucleotides (nt), 100 nt, or as many as about, e.g., 6,000 nt, depending on use. Probes are used in the detection of identical, similar, or complementary nucleic acid sequences. Longer length probes are usually obtained from a natural or recombinant source, are highly specific and much slower to hybridize than oligomers. Probes may be single- or double-stranded and designed to have specificity in PCR, membrane-based hybridization technologies, or ELISA-like technologies.

[0052] An “isolated” nucleic acid molecule is one that is separated from other nucleic acid molecules that are present in the natural source of the nucleic acid. Examples of isolated nucleic acid molecules include, but are not limited to, recombinant DNA molecules contained in a vector, recombinant DNA molecules maintained in a heterologous host cell, partially or substantially purified nucleic acid molecules, and synthetic DNA or RNA molecules. Preferably, an “isolated” nucleic acid is free of sequences which naturally flank the nucleic acid (i.e., sequences located at the 5′ and 3′ ends of the nucleic acid) in the genomic DNA of the organism from which the nucleic acid is derived. For example, in various embodiments, the isolated ORFX nucleic acid molecule can contain less than about 50 kb, 25 kb, 5 kb, 4 kb, 3 kb, 2 kb, 1 kb, 0.5 kb or 0.1 kb of nucleotide sequences which naturally flank the nucleic acid molecule in genomic DNA of the cell from which the nucleic acid is derived. Moreover, an “isolated” nucleic acid molecule, such as a cDNA molecule, can be substantially free of other cellular material or culture medium when produced by recombinant techniques, or of chemical precursors or other chemicals when chemically synthesized.

[0053] A nucleic acid molecule of the present invention, e.g., a nucleic acid molecule having the nucleotide sequence of SEQ ID NO:2n−1 (wherein n=1 to 4534), or a complement of any of this nucleotide sequence, can be isolated using standard molecular biology techniques and the sequence information provided herein. Using all or a portion of the nucleic acid sequence of any of SEQ ID NO:2n−1 (wherein n=1 to 4534) as a hybridization probe, ORFX nucleic acid sequences can be isolated using standard hybridization and cloning techniques (e.g., as described in Sambrook et al., eds., Molecular Cloning: A Laboratory Manual 2^{nd} Ed., Cold Spring Harbor Laboratory Press, Cold Spring Harbor, N.Y., 1989; and Ausubel, et al., eds., Current Protocols in Molecular Biology, John Wiley & Sons, New York, N.Y., 1993.)

[0054] A nucleic acid of the invention can be amplified using cDNA, mRNA or alternatively, genomic DNA, as a template and appropriate oligonucleotide primers according to standard PCR amplification techniques. The nucleic acid so amplified can be cloned into an appropriate vector and characterized by DNA sequence analysis. Furthermore, oligonucleotides corresponding to ORFX nucleotide sequences can be prepared by standard synthetic techniques, e.g., using an automated DNA synthesizer.

[0055] As used herein, the term “oligonucleotide” refers to a series of linked nucleotide residues, which oligonucleotide has a sufficient number of nucleotide bases to be used in a PCR reaction. A short oligonucleotide sequence may be based on, or designed from, a genomic or cDNA sequence and is used to amplify, confirm, or reveal the presence of an identical, similar or complementary DNA or RNA in a particular cell or tissue. Oligonucleotides comprise portions of a nucleic acid sequence having about 10 nt, 50 nt, or 100 nt in length, preferably about 15 nt to 30 nt in length. In one embodiment, an oligonucleotide comprising a nucleic acid molecule less than 100 nt in length would further comprise at lease 6 contiguous nucleotides of any of SEQ ID NO:2n−1 (wherein n=1 to 4534), or a complement thereof. Oligonucleotides may be chemically synthesized and may be used as probes.

[0056] In another embodiment, an isolated nucleic acid molecule of the invention comprises a nucleic acid molecule that is a complement of the nucleotide sequence shown in any of SEQ ID NO:2n−1 (wherein n=1 to 4534). In another embodiment, an isolated nucleic acid molecule of the invention comprises a nucleic acid molecule that is a complement of the nucleotide sequence shown in any of SEQ ID NO:2n−1 (wherein n=1 to 4534), or a portion of this nucleotide sequence. A nucleic acid molecule that is complementary to the nucleotide sequence shown in is one that is sufficiently complementary to the nucleotide sequence shown in of any of SEQ ID NO:2n−1 (wherein n=1 to 4534) that it can hydrogen bond with little or no mismatches to the nucleotide sequence shown in of any of SEQ ID NO:2n−1 (wherein n=1 to 4534), thereby forming a stable duplex.

[0057] As used herein, the term “complementary” refers to Watson-Crick or Hoogsteen base pairing between nucleotides units of a nucleic acid molecule, and the term “binding” means the physical or chemical interaction between two polypeptides or compounds or associated polypeptides or compounds or combinations thereof. Binding includes ionic, non-ionic, Von der Waals, hydrophobic interactions, etc. A physical interaction can be either direct or indirect. Indirect interactions may be through or due to the effects of another polypeptide or compound. Direct binding refers to interactions that do not take place through, or due to, the effect of another polypeptide or compound, but instead are without other substantial chemical intermediates.

[0058] Moreover, the nucleic acid molecule of the invention can comprise only a portion of the nucleic acid sequence of any of SEQ ID NO:2n−1 (wherein n=1 to 4534), e.g. a fragment that can be used as a probe or primer, or a fragment encoding a biologically active portion of ORFX. Fragments provided herein are defined as sequences of at least 6 (contiguous) nucleic acids or at least 4 (contiguous) amino acids, a length sufficient to allow for specific hybridization in the case of nucleic acids or for specific recognition of an epitope in the case of amino acids, respectively, and are at most some portion less than a full length sequence. Fragments may be derived from any contiguous portion of a nucleic acid or amino acid sequence of choice. Derivatives are nucleic acid sequences or amino acid sequences formed from the native compounds either directly or by modification or partial substitution. Analogs are nucleic acid sequences or amino acid sequences that have a structure similar to, but not identical to, the native compound but differs from it in respect to certain components or side chains. Analogs may be synthetic or from a different evolutionary origin and may have a similar or opposite metabolic activity compared to wild type.

[0059] Derivatives and analogs may be full length or other than full length, if the derivative or analog contains a modified nucleic acid or amino acid, as described below. Derivatives or analogs of the nucleic acids or proteins of the invention include, but are not limited to, molecules comprising regions that are substantially homologous to the nucleic acids or proteins of the invention, in various embodiments, by at least about 70%, 80%, 85%, 90%, 95%, 98%, or even 99% identity (with a preferred identity of 80-99%) over a nucleic acid or amino acid sequence of identical size or when compared to an aligned sequence in which the alignment is done by a computer homology program known in the art, or whose encoding nucleic acid is capable of hybridizing to the complement of a sequence encoding the aforementioned proteins under stringent, moderately stringent, or low stringent conditions. See e.g. Ausubel, et al., Current Protocols in Molecular Biology, John Wiley & Sons, New York, N.Y., 1993, and below. An exemplary program is the Gap program (Wisconsin Sequence Analysis Package, Version 8 for UNIX, Genetics Computer Group, University Research Park, Madison, Wis.) using the default settings, which uses the algorithm of Smith and Waterman (Adv. Appl. Math., 1981, 2: 482-489, which is incorporated herein by reference in its entirety).

[0060] A “homologous nucleic acid sequence” or “homologous amino acid sequence,” or variations thereof, refer to sequences characterized by a homology at the nucleotide level or amino acid level as discussed above. Homologous nucleotide sequences encode those sequences coding for isoforms of ORFX polypeptide. Isoforms can be expressed in different tissues of the same organism as a result of, for example, alternative splicing of RNA. Alternatively, isoforms can be encoded by different genes. In the present invention, homologous nucleotide sequences include nucleotide sequences encoding for a ORFX polypeptide of species other than humans, including, but not limited to, mammals, and thus can include, e.g., mouse, rat, rabbit, dog, cat cow, horse, and other organisms. Homologous nucleotide sequences also include, but are not limited to, naturally occurring allelic variations and mutations of the nucleotide sequences set forth herein. A homologous nucleotide sequence does not, however, include the nucleotide sequence encoding human ORFX protein. Homologous nucleic acid sequences include those nucleic acid sequences that encode conservative amino acid substitutions (see below) in any of SEQ ID NO:2n (wherein n=1 to 4534) as well as a polypeptide having ORFX activity. Biological activities of the ORFX proteins are described below. A homologous amino acid sequence does not encode the amino acid sequence of a human ORFX polypeptide.

[0061] The nucleotide sequence determined from the cloning of the human ORFX gene allows for the generation of probes and primers designed for use in identifying the cell types disclosed and/or cloning ORFX homologues in other cell types, e.g., from other tissues, as well as ORFX homologues from other mammals. The probe/primer typically comprises a substantially purified oligonucleotide. The oligonucleotide typically comprises a region of nucleotide sequence that hybridizes under stringent conditions to at least about 12, 25, 50, 100, 150, 200, 250, 300, 350 or 400 or more consecutive sense strand nucleotide sequence of SEQ ID NO:2n−1 (wherein n=1 to 4534); or an anti-sense strand nucleotide sequence of SEQ ID NO:2n−1 (wherein n=1 to 4534); or of a naturally occurring mutant of SEQ ID NO:2n−1 (wherein n=1 to 4534).

[0062] Probes based on the human ORFX nucleotide sequence can be used to detect transcripts or genomic sequences encoding the same or homologous proteins. In various embodiments, the probe further comprises a label group attached thereto, e.g., the label group can be a radioisotope, a fluorescent compound, an enzyme, or an enzyme co-factor. Such probes can be used as a part of a diagnostic test kit for identifying cells or tissue which misexpress a ORFX protein, such as by measuring a level of a ORFX-encoding nucleic acid in a sample of cells from a subject e.g., detecting ORFX mRNA levels or determining whether a genomic ORFX gene has been mutated or deleted.

[0063] “A polypeptide having a biologically active portion of ORFX” refers to polypeptides exhibiting activity similar, but not necessarily identical to, an activity of a polypeptide of the present invention, including mature forms, as measured in a particular biological assay, with or without dose dependency. A nucleic acid fragment encoding a “biologically active portion of ORFX” can be prepared by isolating a portion of SEQ ID NO:2n−1 (wherein n=1 to 4534), that encodes a polypeptide having a ORFX biological activity (biological activities of the ORFX proteins are summarized in Table 1), expressing the encoded portion of ORFX protein (e.g., by recombinant expression in vitro) and assessing the activity of the encoded portion of ORFX. For example, a nucleic acid fragment encoding a biologically active portion of ORFX can optionally include a domain as shown in Table 1, column 4.

[0064] ORFX Variants

[0065] The invention further encompasses nucleic acid molecules that differ from the disclosed ORFX nucleotide sequences due to degeneracy of the genetic code. These nucleic acids thus encode the same ORFX protein as that encoded by the nucleotide sequence shown in SEQ ID NO:2n−1 (wherein n=1 to 4534). In another embodiment, an isolated nucleic acid molecule of the invention has a nucleotide sequence encoding a protein having an amino acid sequence shown in any of SEQ ID NO:2n (wherein n=1 to 4534).

[0066] In addition to the human ORFX nucleotide sequence shown in any of SEQ ID NO:2n−1 (wherein n=1 to 4534), it will be appreciated by those skilled in the art that DNA sequence polymorphisms that lead to changes in the amino acid sequences of ORFX may exist within a population (e.g., the human population). Such genetic polymorphism in the ORFX gene may exist among individuals within a population due to natural allelic variation. As used herein, the terms “gene” and “recombinant gene” refer to nucleic acid molecules comprising an open reading frame encoding a ORFX protein, preferably a mammalian ORFX protein. Such natural allelic variations can typically result in 1-5% variance in the nucleotide sequence of the ORFX gene. Any and all such nucleotide variations and resulting amino acid polymorphisms in ORFX that are the result of natural allelic variation and that do not alter the functional activity of ORFX are intended to be within the scope of the invention.

[0067] Moreover, nucleic acid molecules encoding ORFX proteins from other species, and thus that have a nucleotide sequence that differs from the human sequence of any of SEQ ID NO:2n−1 (wherein n=1 to 4534), are intended to be within the scope of the invention. Nucleic acid molecules corresponding to natural allelic variants and homologues of the ORFX cDNAs of the invention can be isolated based on their homology to the human ORFX nucleic acids disclosed herein using the human cDNAs, or a portion thereof, as a hybridization probe according to standard hybridization techniques under stringent hybridization conditions.

[0068] In another embodiment, an isolated nucleic acid molecule of the invention is at least 6 nucleotides in length and hybridizes under stringent conditions to the nucleic acid molecule comprising the nucleotide sequence of any of SEQ ID NO:2n−1 (wherein n=1 to 4534). In another embodiment, the nucleic acid is at least 10, 25, 50, 100, 250, 500 or 750 nucleotides in length. In another embodiment, an isolated nucleic acid molecule of the invention hybridizes to the coding region. As used herein, the term “hybridizes under stringent conditions” is intended to describe conditions for hybridization and washing under which nucleotide sequences at least 60% homologous to each other typically remain hybridized to each other.

[0069] Homologs (i.e., nucleic acids encoding ORFX proteins derived from species other than human) or other related sequences (e.g., paralogs) can be obtained by low, moderate or high stringency hybridization with all or a portion of the particular human sequence as a probe using methods well known in the art for nucleic acid hybridization and cloning.

[0070] As used herein, the phrase “stringent hybridization conditions” refers to conditions under which a probe, primer or oligonucleotide will hybridize to its target sequence, but to no other sequences. Stringent conditions are sequence-dependent and will be different in different circumstances. Longer sequences hybridize specifically at higher temperatures than shorter sequences. Generally, stringent conditions are selected to be about 5° C. lower than the thermal melting point (Tm) for the specific sequence at a defined ionic strength and pH. The Tm is the temperature (under defined ionic strength, pH and nucleic acid concentration) at which 50% of the probes complementary to the target sequence hybridize to the target sequence at equilibrium. Since the target sequences are generally present at excess, at Tm, 50% of the probes are occupied at equilibrium. Typically, stringent conditions will be those in which the salt concentration is less than about 1.0 M sodium ion, typically about 0.01 to 1.0 M sodium ion (or other salts) at pH 7.0 to 8.3 and the temperature is at least about 30° C. for short probes, primers or oligonucleotides (e.g., 10 nt to 50 nt) and at least about 60° C. for longer probes, primers and oligonucleotides. Stringent conditions may also be achieved with the addition of destabilizing agents, such as formamide.

[0071] Stringent conditions are known to those skilled in the art and can be found in Current Protocols in Molecular Biology, John Wiley & Sons, N.Y. (1989), 6.3.1-6.3.6. Preferably, the conditions are such that sequences at least about 65%, 70%, 75%, 85%, 90%, 95%, 98%, or 99% homologous to each other typically remain hybridized to each other. A non-limiting example of stringent hybridization conditions is hybridization in a high salt buffer comprising 6×SSC, 50 mM Tris-HCl (pH 7.5), 1 mM EDTA, 0.02% PVP, 0.02% Ficoll, 0.02% BSA, and 500 mg/ml denatured salmon sperm DNA at 65° C. This hybridization is followed by one or more washes in 0.2×SSC, 0.01% BSA at 50° C. An isolated nucleic acid molecule of the invention that hybridizes under stringent conditions to the sequence of any of SEQ ID NO:2n−1 (wherein n=1 to 4534) corresponds to a naturally occurring nucleic acid molecule. As used herein, a “naturally-occurring” nucleic acid molecule refers to an RNA or DNA molecule having a nucleotide sequence that occurs in nature (e.g., encodes a natural protein).

[0072] In a second embodiment, a nucleic acid sequence that is hybridizable to the nucleic acid molecule comprising the nucleotide sequence of any of SEQ ID NO:2n−1 (wherein n=1 to 4534), or fragments, analogs or derivatives thereof, under conditions of moderate stringency is provided. A non-limiting example of moderate stringency hybridization conditions are hybridization in 6×SSC, 5×Denhardt's solution, 0.5% SDS and 100 mg/ml denatured salmon sperm DNA at 55° C., followed by one or more washes in 1×SSC, 0.1% SDS at 37° C. Other conditions of moderate stringency that may be used are well known in the art. See, e.g., Ausubel et al. (eds.), 1993, Current Protocols in Molecular Biology, John Wiley & Sons, NY, and Kriegler, 1990, Gene Transfer and Expression, A Laboratory Manual, Stockton Press, NY.

[0073] In a third embodiment, a nucleic acid that is hybridizable to the nucleic acid molecule comprising the nucleotide sequence of any of SEQ ID NO:2n−1 (wherein n=1 to 4534), or fragments, analogs or derivatives thereof, under conditions of low stringency, is provided. A non-limiting example of low stringency hybridization conditions are hybridization in 35% formamide, 5×SSC, 50 mM Tris-HCl (pH 7.5), 5 mM EDTA, 0.02% PVP, 0.02% Ficoll, 0.2% BSA, 100 mg/ml denatured salmon sperm DNA, 10% (wt/vol) dextran sulfate at 40° C., followed by one or more washes in 2×SSC, 25 mM Tris-HCl (pH 7.4), 5 mM EDTA, and 0.1% SDS at 50° C. Other conditions of low stringency that may be used are well known in the art (e.g., as employed for cross-species hybridizations). See, e.g., Ausubel et al. (eds.), 1993, Current Protocols in Molecular Biology, John Wiley & Sons, NY, and Kriegler, 1990, Gene Transfer and Expression, A Laboratory Manual, Stockton Press, NY; Shilo and Weinberg, 1981, Proc Natl Acad Sci USA 78: 6789-6792.

[0074] Conservative Mutations

[0075] In addition to naturally-occurring allelic variants of the ORFX sequence that may exist in the population, the skilled artisan will further appreciate that changes can be introduced by mutation into the nucleotide sequence of any of SEQ ID NO:2n−1 (wherein n=1 to 4534), thereby leading to changes in the amino acid sequence of the encoded ORFX protein, without altering the functional ability of the ORFX protein. For example, nucleotide substitutions leading to amino acid substitutions at “non-essential” amino acid residues can be made in the sequence of any of SEQ ID NO:2n−1 (wherein n=1 to 4534). A “non-essential” amino acid residue is a residue that can be altered from the wild-type sequence of ORFX without altering the biological activity, whereas an “essential” amino acid residue is required for biological activity. For example, amino acid residues that are conserved among the ORFX proteins of the present invention, are predicted to be particularly unamenable to alteration.

[0076] Amino acid residues that are conserved among members of an ORFX family members are predicted to be less amenable to alteration. For example, an ORFX protein according to the present invention can contain at least one domain (e.g., as shown in Table 1) that is a typically conserved region in an ORFX family member. As such, these conserved domains are not likely to be amenable to mutation. Other amino acid residues, however, (e.g., those that are not conserved or only semi-conserved among members of the ORFX family) may not be as essential for activity and thus are more likely to be amenable to alteration.

[0077] Another aspect of the invention pertains to nucleic acid molecules encoding ORFX proteins that contain changes in amino acid residues that are not essential for activity. Such ORFX proteins differ in amino acid sequence from any of any of SEQ ID NO:2n (wherein n=1 to 4534), yet retain biological activity. In one embodiment, the isolated nucleic acid molecule comprises a nucleotide sequence encoding a protein, wherein the protein comprises an amino acid sequence at least about 75% homologous to the amino acid sequence of any of SEQ ID NO:2n (wherein n=1 to 4534). Preferably, the protein encoded by the nucleic acid is at least about 80% homologous to any of SEQ ID NO:2n (wherein n=1 to 4534), more preferably at least about 90%, 95%, 98%, and most preferably at least about 99% homologous to SEQ ID NO:2.

[0078] An isolated nucleic acid molecule encoding a ORFX protein homologous to the protein of any of SEQ ID NO:2n (wherein n=1 to 4534) can be created by introducing one or more nucleotide substitutions, additions or deletions into the corresponding nucleotide sequence, i.e. SEQ ID NO:2n−1 for the corresponding n, such that one or more amino acid substitutions, additions or deletions are introduced into the encoded protein.

[0079] Mutations can be introduced into SEQ ID NO:2n−1 (wherein n=1 to 4534) by standard techniques, such as site-directed mutagenesis and PCR-mediated mutagenesis. Preferably, conservative amino acid substitutions are made at one or more predicted non-essential amino acid residues. A “conservative amino acid substitution” is one in which the amino acid residue is replaced with an amino acid residue having a similar side chain. Families of amino acid residues having similar side chains have been defined in the art. These families include amino acids with basic side chains (e.g., lysine, arginine, histidine), acidic side chains (e.g., aspartic acid, glutamic acid), uncharged polar side chains (e.g., glycine, asparagine, glutamine, serine, threonine, tyrosine, cysteine), nonpolar side chains (e.g., alanine, valine, leucine, isoleucine, proline, phenylalanine, methionine, tryptophan), beta-branched side chains (e.g., threonine, valine, isoleucine) and aromatic side chains (e.g., tyrosine, phenylalanine, tryptophan, histidine). Thus, a predicted nonessential amino acid residue in ORFX is replaced with another amino acid residue from the same side chain family. Alternatively, in another embodiment, mutations can be introduced randomly along all or part of a ORFX coding sequence, such as by saturation mutagenesis, and the resultant mutants can be screened for ORFX biological activity to identify mutants that retain activity. Following mutagenesis of SEQ ID NO:2n−1 (wherein n=1 to 4534). the encoded protein can be expressed by any recombinant technology known in the art and the activity of the protein can be determined.

[0080] In one embodiment, a mutant ORFX protein can be assayed for (1) the ability to form protein:protein interactions with other ORFX proteins, other cell-surface proteins, or biologically active portions thereof, (2) complex formation between a mutant ORFX protein and a ORFX receptor; (3) the ability of a mutant ORFX protein to bind to an intracellular target protein or biologically active portion thereof; (e.g., avidin proteins); (4) the ability to bind BRA protein; or (5) the ability to specifically bind an anti-ORFX protein antibody.

[0081] Antisense

[0082] Another aspect of the invention pertains to isolated antisense nucleic acid molecules that are hybridizable to or complementary to the nucleic acid molecule comprising the nucleotide sequence of SEQ ID NO:2n−1 (wherein n=1 to 4534), or fragments, analogs or derivatives thereof. An “antisense” nucleic acid comprises a nucleotide sequence that is complementary to a “sense” nucleic acid encoding a protein, e.g., complementary to the coding strand of a double-stranded cDNA molecule or complementary to an mRNA sequence. In specific aspects, antisense nucleic acid molecules are provided that comprise a sequence complementary to at least about 10, 25, 50, 100, 250 or 500 nucleotides or an entire ORFX coding strand, or to only a portion thereof. Nucleic acid molecules encoding fragments, homologs, derivatives and analogs of a ORFX protein of any of SEQ ID NO:2n (wherein n=1 to 4534) or antisense nucleic acids complementary to a ORFX nucleic acid sequence of SEQ ID NO:2n−1 (wherein n=1 to 4534) are additionally provided.

[0083] In one embodiment, an antisense nucleic acid molecule is antisense to a “coding region” of the coding strand of a nucleotide sequence encoding ORFX. The term “coding region” refers to the region of the nucleotide sequence comprising codons which are translated into amino acid residues (e.g., the protein coding region of a human ORFX that corresponds to any of SEQ ID NO:2n (wherein n=1 to 4534)). In another embodiment, the antisense nucleic acid molecule is antisense to a “noncoding region” of the coding strand of a nucleotide sequence encoding ORFX. The term “noncoding region” refers to 5′ and 3′ sequences which flank the coding region that are not translated into amino acids (i.e., also referred to as 5′ and 3′ untranslated regions).

[0084] Given the coding strand sequences encoding ORFX disclosed herein (e.g., SEQ ID NO:2n−1 (wherein n=1 to 4534)), antisense nucleic acids of the invention can be designed according to the rules of Watson and Crick or Hoogsteen base pairing. The antisense nucleic acid molecule can be complementary to the entire coding region of ORFX mRNA, but more preferably is an oligonucleotide that is antisense to only a portion of the coding or noncoding region of ORFX mRNA. For example, the antisense oligonucleotide can be complementary to the region surrounding the translation start site of ORFX mRNA. An antisense oligonucleotide can be, for example, about 5, 10, 15, 20, 25, 30, 35, 40, 45 or 50 nucleotides in length. An antisense nucleic acid of the invention can be constructed using chemical synthesis or enzymatic ligation reactions using procedures known in the art. For example, an antisense nucleic acid (e.g., an antisense oligonucleotide) can be chemically synthesized using naturally occurring nucleotides or variously modified nucleotides designed to increase the biological stability of the molecules or to increase the physical stability of the duplex formed between the antisense and sense nucleic acids, e.g., phosphorothioate derivatives and acridine substituted nucleotides can be used.

[0085] Examples of modified nucleotides that can be used to generate the antisense nucleic acid include: 5-fluorouracil, 5-bromouracil, 5-chlorouracil, 5-iodouracil, hypoxanthine, xanthine, 4-acetylcytosine, 5-(carboxyhydroxylmethyl) uracil, 5-carboxymethylaminomethyl-2-thiouridine, 5-carboxymethylaminomethyluracil, dihydrouracil, beta-D-galactosylqueosine, inosine, N6-isopentenyladenine, 1-methylguanine, 1-methylinosine, 2,2-dimethylguanine, 2-methyladenine, 2-methylguanine, 3-methylcytosine, 5-methylcytosine, N6-adenine, 7-methylguanine, 5-methylaminomethyluracil, 5-methoxyaminomethyl-2-thiouracil, beta-D-mannosylqueosine, 5′-methoxycarboxymethyluracil, 5-methoxyuracil, 2-methylthio-N6-isopentenyladenine, uracil-5-oxyacetic acid (v), wybutoxosine, pseudouracil, queosine, 2-thiocytosine, 5-methyl-2-thiouracil, 2-thiouracil, 4-thiouracil, 5-methyluracil, uracil-5-oxyacetic acid methylester, uracil-5-oxyacetic acid (v), 5-methyl-2-thiouracil, 3-(3-amino-3-N-2-carboxypropyl) uracil, (acp3)w, and 2,6-diaminopurine. Alternatively, the antisense nucleic acid can be produced biologically using an expression vector into which a nucleic acid has been subcloned in an antisense orientation (i.e., RNA transcribed from the inserted nucleic acid will be of an antisense orientation to a target nucleic acid of interest, described further in the following subsection).

[0086] The antisense nucleic acid molecules of the invention are typically administered to a subject or generated in situ such that they hybridize with or bind to cellular mRNA and/or genomic DNA encoding a ORFX protein to thereby inhibit expression of the protein, e.g., by inhibiting transcription and/or translation. The hybridization can be by conventional nucleotide complementarity to form a stable duplex, or, for example, in the case of an antisense nucleic acid molecule that binds to DNA duplexes, through specific interactions in the major groove of the double helix. An example of a route of administration of antisense nucleic acid molecules of the invention includes direct injection at a tissue site. Alternatively, antisense nucleic acid molecules can be modified to target selected cells and then administered systemically. For example, for systemic administration, antisense molecules can be modified such that they specifically bind to receptors or antigens expressed on a selected cell surface, e.g. by linking the antisense nucleic acid molecules to peptides or antibodies that bind to cell surface receptors or antigens. The antisense nucleic acid molecules can also be delivered to cells using the vectors described herein. To achieve sufficient intracellular concentrations of antisense molecules, vector constructs in which the antisense nucleic acid molecule is placed under the control of a strong pol II or pol III promoter are preferred.

[0087] In yet another embodiment, the antisense nucleic acid molecule of the invention is an α-anomeric nucleic acid molecule. An α-anomeric nucleic acid molecule forms specific double-stranded hybrids with complementary RNA in which, contrary to the usual β-units, the strands run parallel to each other (Gaultier et al. (1987) Nucleic Acids Res 15: 6625-6641). The antisense nucleic acid molecule can also comprise a 2′-o-methylibonucleotide (Inoue et al. (1987) Nucleic Acids Res 15: 6131-6148) or a chimeric RNA-DNA analogue (Inoue et al. (1987) FEBS Lett 215: 327-330).

[0088] Ribozymes and PNA Moieties

[0089] Such modifications include, by way of nonlimiting example, modified bases, and nucleic acids whose sugar phosphate backbones are modified or derivatized. These modifications are carried out at least in part to enhance the chemical stability of the modified nucleic acid, such that they may be used, for example, as antisense binding nucleic acids in therapeutic applications in a subject.

[0090] In still another embodiment, an antisense nucleic acid of the invention is a ribozyme. Ribozymes are catalytic RNA molecules with ribonuclease activity that are capable of cleaving a single-stranded nucleic acid, such as an mRNA, to which they have a complementary region. Thus, ribozymes (e.g., hammerhead ribozymes (described in Haselhoff and Gerlach (1988) Nature 334:585-591)) can be used to catalytically cleave ORFX mRNA transcripts to thereby inhibit translation of ORFX mRNA. A ribozyme having specificity for a ORFX-encoding nucleic acid can be designed based upon the nucleotide sequence of a ORFX DNA disclosed herein (i.e., SEQ ID NO:2n−1 (wherein n=1 to 4534)). For example, a derivative of a Tetrahymena L-19 IVS RNA can be constructed in which the nucleotide sequence of the active site is complementary to the nucleotide sequence to be cleaved in a ORFX-encoding mRNA. See, e.g., Cech et al. U.S. Pat. No. 4,987,071; and Cech et al. U.S. Pat. No. 5,116,742. Alternatively, ORFX mRNA can be used to select a catalytic RNA having a specific ribonuclease activity from a pool of RNA molecules. See, e.g., Bartel et al., (1993) Science 261:1411-1418.

[0091] Alternatively, ORFX gene expression can be inhibited by targeting nucleotide sequences complementary to the regulatory region of the ORFX (e.g., the ORFX promoter and/or enhancers) to form triple helical structures that prevent transcription of the ORFX gene in target cells. See generally, Helene. (1991) Anticancer Drug Des. 6: 569-84; Helene. et.al. (1992) Ann. N.Y. Acad. Sci. 660:27-36; and Maher (1992) Bioassays 14: 807-15.

[0092] In various embodiments, the nucleic acids of ORFX can be modified at the base moiety, sugar moiety or phosphate backbone to improve, e.g., the stability, hybridization, or solubility of the molecule. For example, the deoxyribose phosphate backbone of the nucleic acids can be modified to generate peptide nucleic acids (see Hyrup et al. (1996) Bioorg Med Chem 4: 5-23). As used herein, the terms “peptide nucleic acids” or “PNAs” refer to nucleic acid mimics, e.g., DNA mimics, in which the deoxyribose phosphate backbone is replaced by a pseudopeptide backbone and only the four natural nucleobases are retained. The neutral backbone of PNAs has been shown to allow for specific hybridization to DNA and RNA under conditions of low ionic strength. The synthesis of PNA oligomers can be performed using standard solid phase peptide synthesis protocols as described in Hyrup et al. (1996) above; Perry-O'Keefe et al. (1996) PNAS 93: 14670-675.

[0093] PNAs of ORFX can be used in therapeutic and diagnostic applications. For example, PNAs can be used as antisense or antigene agents for sequence-specific modulation of gene expression by, e.g., inducing transcription or translation arrest or inhibiting replication. PNAs of ORFX can also be used, e.g., in the analysis of single base pair mutations in a gene by, e.g., PNA directed PCR clamping; as artificial restriction enzymes when used in combination with other enzymes, e.g., S1 nucleases (Hyrup B. (1996) above); or as probes or primers for DNA sequence and hybridization (Hyrup et al. (1996), above; Perry-O'Keefe (1996), above).

[0094] In another embodiment, PNAs of ORFX can be modified, e.g., to enhance their stability or cellular uptake, by attaching lipophilic or other helper groups to PNA, by the formation of PNA-DNA chimeras, or by the use of liposomes or other techniques of drug delivery known in

[0095] In general, an ORFX-like variant that preserves ORFX-like function includes any variant in which residues at a particular position in the sequence have been substituted by other amino acids, and further include the possibility of inserting an additional residue or residues between two residues of the parent protein as well as the possibility of deleting one or more residues from the parent sequence. Any amino acid substitution, insertion, or deletion is encompassed by the invention. In favorable circumstances, the substitution is a conservative substitution as defined above. Furthermore, without limiting the scope of the invention, positions of any of SEQ ID NO:2n (wherein n=1 to 4534) may be substitute such that a mutant or variant protein may include one or more substitutions

[0096] The invention also includes isolated ORFX proteins, and biologically active portions thereof, or derivatives, fragments, analogs or homologs thereof Also provided are polypeptide fragments suitable for use as immunogens to raise anti-ORFX antibodies. In one embodiment, native ORFX proteins can be isolated from cells or tissue sources by an appropriate purification scheme using standard protein purification techniques. In another embodiment, ORFX proteins are produced by recombinant DNA techniques. Alternative to recombinant expression, a ORFX protein or polypeptide can be synthesized chemically using standard peptide synthesis techniques.

[0097] An “isolated” or “purified” protein or biologically active portion thereof is substantially free of cellular material or other contaminating proteins from the cell or tissue source from which the ORFX protein is derived, or substantially free from chemical precursors or other chemicals when chemically synthesized. The language “substantially free of cellular material” includes preparations of ORFX protein in which the protein is separated from cellular components of the cells from which it is isolated or recombinantly produced. In one embodiment, the language “substantially free of cellular material” includes preparations of ORFX protein having less than about 30% (by dry weight) of non-ORFX protein (also referred to herein as a “contaminating protein”), more preferably less than about 20% of non-ORFX protein, still more preferably less than about 10% of non-ORFX protein, and most preferably less than about 5% non-ORFX protein. When the ORFX protein or biologically active portion thereof is recombinantly produced, it is also preferably substantially free of culture medium, i.e., culture medium represents less than about 20%, more preferably less than about 10%, and most preferably less than about 5% of the volume of the protein preparation.

[0098] The language “substantially free of chemical precursors or other chemicals” includes preparations of ORFX protein in which the protein is separated from chemical precursors or other chemicals that are involved in the synthesis of the protein. In one embodiment, the language “substantially free of chemical precursors or other chemicals” includes preparations of ORFX protein having less than about 30% (by dry weight) of chemical precursors or non-ORFX chemicals, more preferably less than about 20% chemical precursors or non-ORFX chemicals, still more preferably less than about 10% chemical precursors or non-ORFX chemicals, and most preferably less than about 5% chemical precursors or non-ORFX chemicals.

[0099] Biologically active portions of a ORFX protein include peptides comprising amino acid sequences sufficiently homologous to or derived from the amino acid sequence of the ORFX protein, e.g., the amino acid sequence shown in SEQ ID NO:2 that include fewer amino acids than the full length ORFX proteins, and exhibit at least one activity of a ORFX protein. Typically, biologically active portions comprise a domain or motif with at least one activity of the ORFX protein. A biologically active portion of a ORFX protein can be a polypeptide which is, for example, 10, 25, 50, 100 or more amino acids in length.

[0100] A biologically active portion of a ORFX protein of the present invention may contain at least one of the above-identified domains conserved between the FGF family of proteins. Moreover, other biologically active portions, in which other regions of the protein are deleted, can be prepared by recombinant techniques and evaluated for one or more of the functional activities of a native ORFX protein.

[0101] In an embodiment, the ORFX protein has an amino acid sequence shown in any of SEQ ID NO:2n (wherein n=1 to 4534). In other embodiments, the ORFX protein is substantially homologous to any of SEQ ID NO:2n (wherein n=1 to 4534) and retains the functional activity of the protein of any of SEQ ID NO:2n (wherein n=1 to 4534), yet differs in amino acid sequence due to natural allelic variation or mutagenesis, as described in detail below. Accordingly, in another embodiment, the ORFX protein is a protein that comprises an amino acid sequence at least about 45% homologous, and more preferably about 55, 65, 70, 75, 80, 85, 90, 95, 98 or even 99% homologous to the amino acid sequence of any of SEQ ID NO:2n (wherein n=1 to 4534) and retains the functional activity of the ORFX proteins of the corresponding polypeptide having the sequence of SEQ ID NO:2n (wherein n=1 to 4534).

[0102] Determining Homology Between Two or More Sequences

[0103] To determine the percent homology of two amino acid sequences or of two nucleic acids, the sequences are aligned for optimal comparison purposes (e.g., gaps can be introduced in either of the sequences being compared for optimal alignment between the sequences). The amino acid residues or nucleotides at corresponding amino acid positions or nucleotide positions are then compared. When a position in the first sequence is occupied by the same amino acid residue or nucleotide as the corresponding position in the second sequence, then the molecules are homologous at that position (i.e., as used herein amino acid or nucleic acid “homology” is equivalent to amino acid or nucleic acid “identity”).

[0104] The nucleic acid sequence homology may be determined as the degree of identity between two sequences. The homology may be determined using computer programs known in the art, such as GAP software provided in the GCG program package. See, Needleman and Wunsch 1970 J Mol Biol 48: 443-453. Using GCG GAP software with the following settings for nucleic acid sequence comparison: GAP creation penalty of 5.0 and GAP extension penalty of 0.3, the coding region of the analogous nucleic acid sequences referred to above exhibits a degree of identity preferably of at least 70%, 75%, 80%, 85%, 90%, 95%, 98%, or 99%, with the CDS (encoding) part of the DNA sequence shown in SEQ ID NO:2n−1 (wherein n=1 to 4534).

[0105] The term “sequence identity” refers to the degree to which two polynucleotide or polypeptide sequences are identical on a residue-by-residue basis over a particular region of comparison. The term “percentage of sequence identity” is calculated by comparing two optimally aligned sequences over that region of comparison,determining the number of positions at which the identical nucleic acid base (e.g., A, T, C, G, U, or I, in the case of nucleic acids) occurs in both sequences to yield the number of matched positions, dividing the number of matched positions by the total number of positions in the region of comparison (i.e., the window size), and multiplying the result by 100 to yield the percentage of sequence identity. The term “substantial identity” as used herein denotes a characteristic of a polynucleotide sequence, wherein the polynucleotide comprises a sequence that has at least 80 percent sequence identity, preferably at least 85 percent identity and often 90 to 95 percent sequence identity, more usually at least 99 percent sequence identity as compared to a reference sequence over a comparison region. The term “percentage of positive residues” is calculated by comparing two optimally aligned sequences over that region of comparison, determining the number of positions at which the identical and conservative amino acid substitutions, as defined above, occur in both sequences to yield the number of matched positions, dividing the number of matched positions by the total number of positions in the region of comparison (i.e., the window size), and multiplying the result by 100 to yield the percentage of positive residues.

[0106] Chimeric and Fusion Proteins

[0107] The invention also provides ORFX chimeric or fusion proteins. As used herein, a ORFX “chimeric protein” or “fusion protein” includes a ORFX polypeptide operatively linked to a non-ORFX polypeptide. A “ORFX polypeptide” refers to a polypeptide having an amino acid sequence corresponding to ORFX, whereas a “non-ORFX polypeptide” refers to a polypeptide having an amino acid sequence corresponding to a protein that is not substantially homologous to the ORFX protein, e.g., a protein that is different from the ORFX protein and that is derived from the same or a different organism. Within a ORFX fusion protein the ORFX polypeptide can correspond to all or a portion of a ORFX protein. In one embodiment, a ORFX fusion protein comprises at least one biologically active portion of a ORFX protein. In another embodiment, a ORFX fusion protein comprises at least two biologically active portions of a ORFX protein. Within the fusion protein, the term “operatively linked” is intended to indicate that the ORFX polypeptide and the non-ORFX polypeptide are fused in-frame to each other. The non-ORFX polypeptide can be fused to the N-terminus or C-terminus of the ORFX polypeptide.

[0108] For example, in one embodiment a ORFX fusion protein comprises a ORFX polypeptide operably linked to the extracellular domain of a second protein. Such fusion proteins can be further utilized in screening assays for compounds that modulate ORFX activity (such assays are described in detail below).

[0109] In another embodiment, the fusion protein is a GST-ORFX fusion protein in which the ORFX sequences are fused to the C-terminus of the GST (i.e., glutathione S-transferase) sequences. Such fusion proteins can facilitate the purification of recombinant ORFX.

[0110] In yet another embodiment, the fusion protein is a ORFX protein containing a heterologous signal sequence at its N-terminus. For example, the native ORFX signal sequence can be removed and replaced with a signal sequence from another protein. In certain host cells (e.g., mammalian host cells), expression and/or secretion of ORFX can be increased through use of a heterologous signal sequence.

[0111] In another embodiment, the fusion protein is a ORFX-immunoglobulin fusion protein in which the ORFX sequences comprising one or more domains are fused to sequences derived from a member of the immunoglobulin protein family. The ORFX-immunoglobulin fusion proteins of the invention can be incorporated into pharmaceutical compositions and administered to a subject to inhibit an interaction between a ORFX ligand and a ORFX protein on the surface of a cell, to thereby suppress ORFX-mediated signal transduction in vivo. In one nonlimiting example, a contemplated ORFX ligand of the invention is an ORFX receptor. The ORFX-immunoglobulin fusion proteins can be used to modulate the bioavailability of a ORFX cognate ligand. Inhibition of the ORFX ligand/ORFX interaction may be useful therapeutically for both the treatment of proliferative and differentiative disorders, as well as modulating (e.g., promoting or inhibiting) cell survival. Moreover, the ORFX-immunoglobulin fusion proteins of the invention can be used as immunogens to produce anti-ORFX antibodies in a subject, to purify ORFX ligands, and in screening assays to identify molecules that inhibit the interaction of ORFX with a ORFX ligand.

[0112] A ORFX chimeric or fusion protein of the invention can be produced by standard recombinant DNA techniques. For example, DNA fragments coding for the different polypeptide sequences are ligated together in-frame in accordance with conventional techniques, e.g., by employing blunt-ended or stagger-ended termnini for ligation, restriction enzyme digestion to provide for appropriate termini, filling-in of cohesive ends as appropriate, alkaline phosphatase treatment to avoid undesirable joining, and enzymatic ligation. In another embodiment, the fusion gene can be synthesized by conventional techniques including automated DNA synthesizers. Alternatively, PCR amplification of gene fragments can be carried out using anchor primers that give rise to complementary overhangs between two consecutive gene fragments that can subsequently be annealed and reamplified to generate a chimeric gene sequence (see, for example, Ausubel et al. (eds.) Current Protocols in Molecular Biology, John Wiley & Sons, 1992). Moreover, many expression vectors are commercially available that already encode a fusion moiety (e.g., a GST polypeptide). A ORFX-encoding nucleic acid can be cloned into such an expression vector such that the fusion moiety is linked in-frame to the ORFX protein.

[0113] ORFX Agonists and Antagonists

[0114] The present invention also pertains to variants of the ORFX proteins that function as either ORFX agonists (mimetics) or as ORFX antagonists. Variants of the ORFX protein can be generated by mutagenesis, e.g., discrete point mutation or truncation of the ORFX protein. An agonist of the ORFX protein can retain substantially the same, or a subset of, the biological activities of the naturally occurring form of the ORFX protein. An antagonist of the ORFX protein can inhibit one or more of the activities of the naturally occurring form of the ORFX protein by, for example, competitively binding to a downstream or upstream member of a cellular signaling cascade which includes the ORFX protein. Thus, specific biological effects can be elicited by treatment with a variant of limited function. In one embodiment, treatment of a subject with a variant having a subset of the biological activities of the naturally occurring form of the protein has fewer side effects in a subject relative to treatment with the naturally occurring form of the ORFX proteins.

[0115] Variants of the ORFX protein that function as either ORFX agonists (mimetics) or as ORFX antagonists can be identified by screening combinatorial libraries of mutants, e.g., truncation mutants, of the ORFX protein for ORFX protein agonist or antagonist activity. In one embodiment, a variegated library of ORFX variants is generated by combinatorial mutagenesis at the nucleic acid level and is encoded by a variegated gene library. A variegated library of ORFX variants can be produced by, for example, enzymatically ligating a mixture of synthetic oligonucleotides into gene sequences such that a degenerate set of potential ORFX sequences is expressible as individual polypeptides, or alternatively, as a set of larger fusion proteins (e.g., for phage display) containing the set of ORFX sequences therein. There are a variety of methods which can be used to produce libraries of potential ORFX variants from a degenerate oligonucleotide sequence. Chemical synthesis of a degenerate gene sequence can be performed in an automatic DNA synthesizer, and the synthetic gene then ligated into an appropriate expression vector. Use of a degenerate set of genes allows for the provision, in one mixture, of all of the sequences encoding the desired set of potential ORFX sequences. Methods for synthesizing degenerate oligonucleotides are known in the art (see, e.g., Narang (1983) Tetrahedron 39:3; Itakura et al. (1984) Annu Rev Biochem 53:323; Itakura et al. (1984) Science 198:1056; Ike et al. (1983) Nucl Acid Res 11:477.

[0116] Polypeptide Libraries

[0117] In addition, libraries of fragments of the ORFX protein coding sequence can be used to generate a variegated population of ORFX fragments for screening and subsequent selection of variants of a ORFX protein. In one embodiment, a library of coding sequence fragments can be generated by treating a double stranded PCR fragment of a ORFX coding sequence with a nuclease under conditions wherein nicking occurs only about once per molecule, denaturing the double stranded DNA, renaturing the DNA to form double stranded DNA that can include sense/antisense pairs from different nicked products, removing single stranded portions from reformed duplexes by treatment with S1 nuclease, and ligating the resulting fragment library into an expression vector. By this method, an expression library can be derived which encodes N-terminal and internal fragments of various sizes of the ORFX protein.

[0118] Several techniques are known in the art for screening gene products of combinatorial libraries made by point mutations or truncation, and for screening cDNA libraries for gene products having a selected property. Such techniques are adaptable for rapid screening of the gene libraries generated by the combinatorial mutagenesis of ORFX proteins. The most widely used techniques, which are amenable to high throughput analysis, for screening large gene libraries typically include cloning the gene library into replicable expression vectors, transforming appropriate cells with the resulting library of vectors, and expressing the combinatorial genes under conditions in which detection of a desired activity facilitates isolation of the vector encoding the gene whose product was detected. Recrusive ensemble mutagenesis (REM), a new technique that enhances the frequency of functional mutants in the libraries, can be used in combination with the screening assays to identify ORFX variants (Arkin and Yourvan (1992) PNAS 89:7811-7815; Delgrave et al. (1993) Protein Engineering 6:327-331).

[0119] Anti-ORFX Antibodies

[0120] The invention further encompasses antibodies and antibody fragments, such as F_{ab} or (F_{ab})₂, that bind immunospecifically to any of the proteins of the invention.

[0121] An isolated ORFX protein, or a portion or fragment thereof, can be used as an immunogen to generate antibodies that bind ORFX using standard techniques for polyclonal and monoclonal antibody preparation. Full-length ORFX protein can be used. Alternatively, the invention provides antigenic peptide fragments of ORFX for use as immunogens. The antigenic peptide of ORFX comprises at least 4 amino acid residues of the amino acid sequence shown in any of SEQ ID NO:2n (wherein n=1 to 4534). The antigenic peptide encompasses an epitope of ORFX such that an antibody raised against the peptide forms a specific immune complex with ORFX. The antigenic peptide may comprise at least 6 aa residues, at least 8 aa residues, at least 10 aa residues, at least 15 aa residues, at least 20 aa residues, or at least 30 aa residues. In one embodiment of the invention, the antigenic peptide comprises a polypeptide comprising at least 6 contiguous amino acids of any of SEQ ID NO:2n (wherein n=1 to 4534).

[0122] In an embodiment of the invention, epitopes encompassed by the antigenic peptide are regions of ORFX that are located on the surface of the protein, e.g., hydrophilic regions. As a means for targeting antibody production, hydropathy plots showing regions of hydrophilicity and hydrophobicity may be generated by any method well known in the art, including, for example, the Kyte Doolittle or the Hopp Woods methods, either with or without Fourier transformation. See, e.g., Hopp and Woods, 1981, Proc. Nat. Acad. Sci. USA 78: 3824-3828; Kyte and Doolittle 1982, J. Mol. Biol. 157: 105-142, each incorporated herein by reference in their entirety.

[0123] As disclosed herein, an ORFX protein sequence of any of SEQ ID NO:2n (wherein n=1 to 4534), or derivatives, fragments, analogs or homologs thereof, may be utilized as immunogens in the generation of antibodies that immunospecifically-bind these protein components. The term “antibody” as used herein refers to immunoglobulin molecules and immunologically active portions of immunoglobulin molecules, i.e., molecules that contain an antigen binding site that specifically binds (immunoreacts with) an antigen, such as ORFX. Such antibodies include, but are not limited to, polyclonal, monoclonal, chimeric, single chain, F_{ab} and F_{(ab′)2} fragments, and an F_{ab} expression library. In a specific embodiment, antibodies to human ORFX proteins are disclosed. Various procedures known within the art may be used for the production of polyclonal or monoclonal antibodies to a ORFX protein sequence of any of SEQ ID NO:2n (wherein n=1 to 4534) or derivative, fragment, analog or homolog thereof. Some of these proteins are discussed below.

[0124] For the production of polyclonal antibodies, various suitable host animals (e.g., rabbit, goat, mouse or other mammal) may be immunized by injection with the native protein, or a synthetic variant thereof, or a derivative of the foregoing. An appropriate immunogenic preparation can contain, for example, recombinantly expressed ORFX protein or a chemically synthesized ORFX polypeptide. The preparation can further include an adjuvant. Various adjuvants used to increase the immunological response include, but are not limited to, Freund's (complete and incomplete), mineral gels (e.g., aluminum hydroxide), surface active substances (e.g., lysolecithin, pluronic polyols, polyanions, peptides, oil emulsions, dinitrophenol, etc.), human adjuvants such as Bacille Calmette-Guerin and Corynebacterium parvum, or similar immunostimulatory agents. If desired, the antibody molecules directed against ORFX can be isolated from the mammal (e.g., from the blood) and further purified by well known techniques, such as protein A chromatography to obtain the IgG fraction.

[0125] The term “monoclonal antibody” or “monoclonal antibody composition”, as used herein, refers to a population of antibody molecules that contain only one species of an antigen binding site capable of immunoreacting with a particular epitope of ORFX. A monoclonal antibody composition thus typically displays a single binding affinity for a particular ORFX protein with which it immunoreacts. For preparation of monoclonal antibodies directed towards a particular ORFX protein, or derivatives, fragments, analogs or homologs thereof, any technique that provides for the production of antibody molecules by continuous cell line culture may be utilized. Such techniques include, but are not limited to, the hybridoma technique (see Kohler & Milstein, 1975 Nature 256: 495-497); the trioma technique; the human B-cell hybridoma technique (see Kozbor, et al., 1983 Immunol Today 4: 72) and the EBV hybridoma technique to produce human monoclonal antibodies (see Cole, et al., 1985 In: Monoclonal Antibodies and Cancer Therapy, Alan R. Liss, Inc., pp. 77-96). Human monoclonal antibodies may be utilized in the practice of the present invention and may be produced by using human hybridomas (see Cote, et al., 1983. Proc Natl Acad Sci USA 80: 2026-2030) or by transforming human B-cells with Epstein Barr Virus in vitro (see Cole, et al., 1985 In: Monoclonal Antibodies and Cancer Therapy, Alan R. Liss, Inc., pp. 77-96). Each of the above citations are incorporated herein by reference in their entirety

[0126] According to the invention, techniques can be adapted for the production of single-chain antibodies specific to a ORFX protein (see e.g., U.S. Pat. No. 4,946,778). In addition, methods can be adapted for the construction of F_{ab} expression libraries (see e.g., Huse, et al., 1989 Science 246: 1275-1281) to allow rapid and effective identification of monoclonal F_{ab} fragments with the desired specificity for a ORFX protein or derivatives, fragments, analogs or homologs thereof. Non-human antibodies can be “humanized” by techniques well known in the art. See e.g., U.S. Pat. No. 5,225,539. Each of the above citations are incorporated herein by reference. Antibody fragments that contain the idiotypes to a ORFX protein may be produced by techniques known in the art including, but not limited to: (i) an F_{(ab′)2} fragment produced by pepsin digestion of an antibody molecule; (ii) an F_{ab} fragment generated by reducing the detect ORFX protein (e.g., in a cellular lysate or cell supernatant) in order to evaluate the abundance and pattern of expression of the ORFX protein. Anti-ORFX antibodies can be used diagnostically to monitor protein levels in tissue as part of a clinical testing procedure, e.g., to, for example, determine the efficacy of a given treatment regimen. Detection can be facilitated by coupling (i.e., physically linking) the antibody to a detectable substance. Examples of detectable substances include various enzymes, prosthetic groups, fluorescent materials, luminescent materials, bioluminescent materials, and radioactive materials. Examples of suitable enzymes include horseradish peroxidase, alkaline phosphatase, β-galactosidase, or acetylcholinesterase; examples of suitable prosthetic group complexes include streptavidin/biotin and avidintbiotin; examples of suitable fluorescent materials include umbelliferone, fluorescein, fluorescein isothiocyanate, rhodamine, dichlorotriazinylamine fluorescein, dansyl chloride or phycoerytlirin; an example of a luminescent material includes luminol; examples of bioluminescent materials include luciferase, luciferin, and aequorin, and examples of suitable radioactive material include ¹²⁵I, ¹³¹I, ³⁵S or ³H.

[0127] ORFX Recombinant Vectors and Host Cells

[0128] Another aspect of the invention pertains to vectors, preferably expression vectors, containing a nucleic acid encoding ORFX protein, or derivatives, fragments, analogs or homologs thereof. As used herein, the term “vector” refers to a nucleic acid molecule capable of transporting another nucleic acid to which it has been linked. One type of vector is a “plasmid”, which refers to a circular double stranded DNA loop into which additional DNA segments can be ligated. Another type of vector is a viral vector, wherein additional DNA segments can be ligated into the viral genome. Certain vectors are capable of autonomous replication in a host cell into which they are introduced (e.g., bacterial vectors having a bacterial origin of replication and episomal mammalian vectors). Other vectors (e.g., non-episomal mammalian vectors) are integrated into the genome of a host cell upon introduction into the host cell, and thereby are replicated along with the host genome. Moreover, certain vectors are capable of directing the expression of genes to which they are operatively linked. Such vectors are referred to herein as “expression vectors”. In general, expression vectors of utility in recombinant DNA techniques are often in the form of plasmids. In the present specification, “plasmid” and “vector” can be used interchangeably as the plasmid is the most commonly used form of vector. However, the invention is intended to include such other forms of expression vectors, such as viral vectors (e.g., replication defective retroviruses, adenoviruses and adeno-associated viruses), which serve equivalent functions.

[0129] The recombinant expression vectors of the invention comprise a nucleic acid of the invention in a form suitable for expression of the nucleic acid in a host cell, which means that the recombinant expression vectors include one or more regulatory sequences, selected on the basis of the host cells to be used for expression, that is operatively linked to the nucleic acid sequence to be expressed. Within a recombinant expression vector, “operably linked” is intended to mean that the nucleotide sequence of interest is linked to the regulatory sequence(s) in a manner that allows for expression of the nucleotide sequence (e.g., in an in vitro transcription/translation system or in a host cell when the vector is introduced into the host cell). The term “regulatory sequence” is intended to includes promoters, enhancers and other expression control elements (e.g., polyadenylation signals). Such regulatory sequences are described, for example, in Goeddel; Gene Expression Technology: Methods in Enzymology 185, Academic Press, San Diego, Calif. (1990). Regulatory sequences include those that direct constitutive expression of a nucleotide sequence in many types of host cell and those that direct expression of the nucleotide sequence only in certain host cells (e.g., tissue-specific regulatory sequences). It will be appreciated by those skilled in the art that the design of the expression vector can depend on such factors as the choice of the host cell to be transformed, the level of expression of protein desired, etc. The expression vectors of the invention can be introduced into host cells to thereby produce proteins or peptides, including fusion proteins or peptides, encoded by nucleic acids as described herein (e.g., ORFX proteins, mutant forms of ORFX, fusion proteins, etc.).

[0130] The recombinant expression vectors of the invention can be designed for expression of ORFX in prokaryotic or eukaryotic cells. For example, ORFX can be expressed in bacterial cells such as E. coli, insect cells (using baculovirus expression vectors) yeast cells or mammalian cells. Suitable host cells are discussed further in Goeddel, Gene Expression Technology: Methods in Enzymology 185, Academic Press, San Diego, Calif. (1990). Alternatively, the recombinant expression vector can be transcribed and translated in vitro, for example using T7 promoter regulatory sequences and T7 polymerase.

[0131] Expression of proteins in prokaryotes is most often carried out in E. coli with vectors containing constitutive or inducible promoters directing the expression of either fusion or non-fusion proteins. Fusion vectors add a number of amino acids to a protein encoded therein, usually to the amino terminus of the recombinant protein. Such fusion vectors typically serve three purposes: (1) to increase expression of recombinant protein; (2) to increase the solubility of the recombinant protein; and (3) to aid in the purification of the recombinant protein by acting as a ligand in affinity purification. Often, in fusion expression vectors, a proteolytic cleavage site is introduced at the junction of the fusion moiety and the recombinant protein to enable separation of the recombinant protein from the fusion moiety subsequent to purification of the fusion protein. Such enzymes, and their cognate recognition sequences, include Factor Xa, thrombin and enterokinase. Typical fusion expression vectors include pGEX (Pharmacia Biotech Inc; Smith and Johnson (1988) Gene 67:31-40), pMAL (New England Biolabs, Beverly, Mass.) and pRIT5 (Pharmacia, Piscataway, N.J.) that fuse glutathione S-transferase (GST), maltose E binding protein, or protein A, respectively, to the target recombinant protein.

[0132] Examples of suitable inducible non-fusion E. coli expression vectors include pTrc (Amrann et al., (1988) Gene 69:301-315) and pET 11d (Studier et al., Gene Expression Technology: Methods in Enzymology 185, Academic Press, San Diego, Calif. (1990) 60-89).

[0133] One strategy to maximize recombinant protein expression in E. coli is to express the protein in a host bacteria with an impaired capacity to proteolytically cleave the recombinant protein. See, Gottesman, Gene Expression Technology: Methods in Enzymology 185, Academic Press, San Diego, Calif. (1990) 119-128. Another strategy is to alter the nucleic acid sequence of the nucleic acid to be inserted into an expression vector so that the individual codons for each amino acid are those preferentially utilized in E. coli (Wada et al., (1992) Nucleic Acids Res. 20:2111-2118). Such alteration of nucleic acid sequences of the invention can be carried out by standard DNA synthesis techniques.

[0134] In another embodiment, the ORFX expression vector is a yeast expression vector. Examples of vectors for expression in yeast S. cerivisae include pYepSec1 (Baldari, et al., (1987) EMBO J 6:229-234), pMFa (Kurjan and Herskowitz, (1982) Cell 30:933-943), pJRY88 (Schultz et al., (1987) Gene 54:113-123), pYES2 (Invitrogen Corporation, San Diego, Calif.), and picZ (InVitrogen Corp, San Diego, Calif.).

[0135] Alternatively, ORFX can be expressed in insect cells using baculovirus expression vectors. Baculovirus vectors available for expression of proteins in cultured insect cells (e.g., SF9 cells) include the pAc series (Smith et al. (1983) Mol Cell Biol 3:2156-2165) and the pVL series (Lucklow and Summers (1989) Virology 170:31-39).

[0136] In yet another embodiment, a nucleic acid of the invention is expressed in mammalian cells using a mammalian expression vector. Examples of mammalian expression vectors include pCDM8 (Seed (1987) Nature 329:840) and pMT2PC (Kaufman et al. (1987) EMBO J 6: 187-195). When used in mammalian cells, the expression vector's control functions are often provided by viral regulatory elements. For example, commonly used promoters are derived from polyoma, Adenovirus 2, cytomegalovirus and Simian Virus 40. For other suitable expression systems for both prokaryotic and eukaryotic cells. See, e.g., Chapters 16 and 17 of Sambrook et al., Molecular Cloning: A Laboratory Manual. 2nd ed., Cold Spring Harbor Laboratory, Cold Spring Harbor Laboratory Press, Cold Spring Harbor, N.Y., 1989.

[0137] In another embodiment, the recombinant mammalian expression vector is capable of directing expression of the nucleic acid preferentially in a particular cell type (e.g., tissue-specific regulatory elements are used to express the nucleic acid). Tissue-specific regulatory elements are known in the art. Non-limiting examples of suitable tissue-specific promoters include the albumin promoter (liver-specific; Pinkert et al. (1987) Genes Dev 1:268-277), lymphoid-specific promoters (Calame and Eaton (1988) Adv Immunol 43:235-275), in particular promoters of T cell receptors (Winoto and Baltimore (1989) EMBO J 8:729-733) and immunoglobulins (Banerji et al. (1983) Cell 33:729-740; Queen and Baltimore (1983) Cell 33:741-748), neuron-specific promoters (e.g., the neurofilament promoter; Byrne and Ruddle (1989) PNAS 86:5473-5477), pancreas-specific promoters (Edlund et al. (1985) Science 230:912-916), and mammary gland-specific promoters (e.g.,.milk whey promoter; U.S. Pat. No. 4,873,316 and European Application Publication No. 264,166). Developmentally-regulated promoters are also encompassed, e.g., the murine hox promoters (Kessel and Gruss (1990) Science 249:374-379) and the α-fetoprotein promoter (Campes and Tilghman (1989) Genes Dev 3:537-546).

[0138] The invention further provides a recombinant expression vector comprising a DNA molecule of the invention cloned into the expression vector in an antisense orientation. That is, the DNA molecule is operatively linked to a regulatory sequence in a manner that allows for expression (by transcription of the DNA molecule) of an RNA molecule that is antisense to ORFX mRNA. Regulatory sequences operatively linked to a nucleic acid cloned in the antisense orientation can be chosen that direct the continuous expression of the antisense RNA molecule in a variety of cell types, for instance viral promoters and/or enhancers, or regulatory sequences can be chosen that direct constitutive, tissue specific, or cell type specific expression of antisense RNA. The antisense expression vector can be in the. form of a recombinant plasmid, phagemid or attenuated virus in which antisense nucleic acids are produced under the control of a high efficiency regulatory region, the activity of which can be determined by the cell type into which the vector is introduced. For a discussion of the regulation of gene expression using antisense genes see Weintraub et al., “Antisense RNA as a molecular tool for genetic analysis,” Reviews—Trends in Genetics, Vol. 1(1) 1986.

[0139] Another aspect of the invention pertains to host cells into which a recombinant expression vector of the invention has been introduced. The terms “host cell” and “recombinant host cell” are used interchangeably herein. It is understood that such terms refer not only to the particular subject cell but to the progeny or potential progeny of such a cell. Because certain modifications may occur in succeeding generations due to either mutation or environmental influences, such progeny may not, in fact, be identical to the parent cell, but are still included within the scope of the term as used herein.

[0140] A host cell can be any prokaryotic or eukaryotic cell. For example, ORFX protein can be expressed in bacterial cells such as E. coli, insect cells, yeast or mammalian cells (such as Chinese hamster ovary cells (CHO) or COS cells). Other suitable host cells are known to those skilled in the art.

[0141] Vector DNA can be introduced into prokaryotic or eukaryotic cells via conventional transformation or transfection techniques. As used herein, the terms “transformation” and “transfection” are intended to refer to a variety of art-recognized techniques for introducing foreign nucleic acid (e.g. DNA) into a host cell, including calcium phosphate or calcium chloride co-precipitation, DEAE-dextran-mediated transfection, lipofection, or electroporation. Suitable methods for transforming or transfecting host cells can be found in Sambrook, et al. (Molecular Cloning: A Laboratory Manual. 2nd ed., Cold Spring Harbor Laboratory, Cold Spring Harbor Laboratory Press, Cold Spring Harbor, N.Y., 1989), and other laboratory manuals.

[0142] For stable transfection of mammalian cells, it is known that, depending upon the expression vector and transfection technique used, only a small fraction of cells may integrate the foreign DNA into their genome. In order to identify and select these integrants, a gene that encodes a selectable marker (e.g., resistance to antibiotics) is generally introduced into the host cells along with the gene of interest. Various selectable markers include those that confer resistance to drugs, such as G418, hygromycin and methotrexate. Nucleic acid encoding a selectable marker can be introduced into a host cell on the same vector as that encoding ORFX or can be introduced on a separate vector. Cells stably transfected with the introduced nucleic acid can be identified by drug selection (e.g., cells that have incorporated the selectable marker gene will survive, while the other cells die).

[0143] A host cell of the invention, such as a prokaryotic or eukaryotic host cell in culture, can be used to produce (i.e., express) ORFX protein. Accordingly, the invention further provides methods for producing ORFX protein using the host cells of the invention. In one embodiment, the method comprises culturing the host cell of invention (into which a recombinant expression vector encoding ORFX has been introduced) in a suitable medium such that ORFX protein is produced. In another embodiment, the method further comprises isolating ORFX from the medium or the host cell.

[0144] Transgenic Animals

[0145] The host cells of the invention can also be used to produce nonhuman transgenic animals. For example, in one embodiment, a host cell of the invention is a fertilized oocyte or an embryonic stem cell into which ORFX-coding sequences have been introduced. Such host cells can then be used to create non-human transgenic animals in which exogenous ORFX sequences have been introduced into their genome or homologous recombinant animals in which endogenous ORFX sequences have been altered. Such animals are useful for studying the function and/or activity of ORFX and for identifying and/or evaluating modulators of ORFX activity. As used herein, a “transgenic animal” is a non-human animal, preferably a mammal, more preferably a rodent such as a rat or mouse, in which one or more of the cells of the animal includes a transgene. Other examples of transgenic animals include non-human primates, sheep, dogs, cows, goats, chickens, amphibians, etc. A transgene is exogenous DNA that is integrated into the genome of a cell from which a transgenic animal develops and that remains in the genome of the mature animal, thereby directing the expression of an encoded gene product in one or more cell types or tissues of the transgenic animal. As used herein, a “homologous recombinant animal” is a non-human animal, preferably a mammal, more preferably a mouse, in which an endogenous ORFX gene has been altered by homologous recombination between the endogenous gene and an exogenous DNA molecule introduced into a cell of the animal, e.g., an embryonic cell of the animal, prior to development of the animal.

[0146] A transgenic animal of the invention can be created by introducing ORFX-encoding nucleic acid into the male pronuclei of a fertilized oocyte, e.g., by microinjection, retroviral infection, and allowing the oocyte to develop in a pseudopregnant female foster animal. The human ORFX DNA sequence of SEQ ID NO:2n−1 (wherein n=1 to 4534) can be introduced as a transgene into the genome of a non-human animal. Alternatively, a nonhuman homologue of the human ORFX gene, such as a mouse ORFX gene, can be isolated based on hybridization to the human ORFX cDNA (described further above) and used as a transgene. Intronic sequences and polyadenylation signals can also be included in the transgene to increase the efficiency of expression of the transgene. A tissue-specific regulatory sequence(s) can be operably linked to the ORFX transgene to direct expression of ORFX protein to particular cells. Methods for generating transgenic animals via embryo manipulation and microinjection, particularly animals such as mice, have become conventional in the art and are described, for example, in U.S. Pat. Nos. 4,736,866; 4,870,009; and 4,873,191; and Hogan 1986, In: Manipulating the Mouse Embryo, Cold Spring Harbor Laboratory Press, Cold Spring Harbor, N.Y. Similar methods are used for production of other transgenic animals. A transgenic founder animal can be identified based upon the presence of the ORFX transgene in its genome and/or expression of ORFX mRNA in tissues or cells of the animals. A transgenic founder animal can then be used to breed additional animals carrying the transgene. Moreover, transgenic animals carrying a transgene encoding ORFX can further be bred to other transgenic animals carrying other transgenes.

[0147] To create a homologous recombinant animal, a vector is prepared which contains at least a portion of a ORFX gene into which a deletion, addition or substitution has been introduced to thereby alter, e.g., functionally disrupt, the ORFX gene. The ORFX gene can be a human gene (e.g., SEQ ID NO:2n−1 (wherein n=1 to 4534)), but more preferably, is a non-human homologue of a human ORFX gene. For example, a mouse homologue of human ORFX gene of SEQ ID NO:2n−1 (wherein n=1 to 4534) can be used to construct a homologous recombination vector suitable for altering an endogenous ORFX gene in the mouse genome. In one embodiment, the vector is designed such that, upon homologous recombination; the endogenous ORFX gene is functionally disrupted (i.e., no longer encodes a functional protein; also referred to as a “knock out” vector).

[0148] Alternatively, the vector can be designed such that, upon homologous recombination, the endogenous ORFX gene is mutated or otherwise altered but still encodes functional protein (e.g., the upstream regulatory region can be altered to thereby alter the expression of the endogenous ORFX protein). In the homologous recombination vector, the altered portion of the ORFX gene is flanked at its 5′ and 3′ ends by additional nucleic acid of the ORFX gene to allow for homologous recombination to occur between the exogenous ORFX gene carried by the vector and an endogenous ORFX gene in an embryonic stem cell. The additional flanking ORFX nucleic acid is of sufficient length for successful homologous recombination with the endogenous gene. Typically, several kilobases of flanking DNA (both at the 5′ and 3′ ends) are included in the vector. See e.g., Thomas et al. (1987) Cell 51:503 for a description of homologous recombination vectors. The vector is introduced into an embryonic stem cell line (e.g., by electroporation) and cells in which the introduced ORFX gene has homologously recombined with the endogenous ORFX gene are selected (see e.g., Li et al. (1992) Cell 69:915).

[0149] The selected cells are then injected into a blastocyst of an animal (e.g., a mouse) to form aggregation chimeras. See e.g., Bradley 1987, In: Teratocarcinomas and Embryonic Stem Cells: A Practical Approach, Robertson, ed. IRL, Oxford, pp. 113-152. A chimeric embryo can then be implanted into a suitable pseudopregnant female foster animal and the embryo brought to term. Progeny harboring the homologously recombined DNA in their germ cells can be used to breed animals in which all cells of the animal contain the homologously recombined DNA by germline transmission of the transgene. Methods for constructing homologous recombination vectors and homologous recombinant animals are described further in Bradley (1991) Curr Opin Biotechnol 2:823-829; PCT International Publication Nos.: WO 90/11354; WO 91/01140; WO 92/0968; and WO 93/04169.

[0150] In another embodiment, transgenic non-humans animals can be produced that contain selected systems that allow for regulated expression of the transgene. One example of such a

[0151] A pharmaceutical composition of the invention is formulated to be compatible with its intended route of administration. Examples of routes of administration include parenteral, e.g., intravenous, intradermal, subcutaneous, oral (e.g., inhalation), transdermal (topical), transmucosal, and rectal administration. Solutions or suspensions used for parenteral, intradermal, or subcutaneous application can include the following components: a sterile diluent such as water for injection, saline solution, fixed oils, polyethylene glycols, glycerine, propylene glycol or other synthetic solvents; antibacterial agents such as benzyl alcohol or methyl parabens; antioxidants such as ascorbic acid or sodium bisulfite; chelating agents such as ethylenediaminetetraacetic acid; buffers such as acetates, citrates or phosphates, and agents for the adjustment of tonicity such as sodium chloride or dextrose. The pH can be adjusted with acids or bases, such as hydrochloric acid or sodium hydroxide. The parenteral preparation can be enclosed in ampoules, disposable syringes or multiple dose vials made of glass or plastic.

[0152] Pharmaceutical compositions suitable for injectable use include sterile aqueous solutions (where water soluble) or dispersions and sterile powders for the extemporaneous preparation of sterile injectable solutions or dispersion. For intravenous administration, suitable carriers include physiological saline, bacteriostatic water, Cremophor EL™ (BASF, Parsippany, N.J.) or phosphate buffered saline (PBS). In all cases, the composition must be sterile and should be fluid to the extent that easy syringeability exists. It must be stable under the conditions of manufacture and storage and must be preserved against the contaminating action of microorganisms such as bacteria and fungi. The carrier can be a solvent or dispersion medium containing, for example, water, ethanol, polyol (for example, glycerol, propylene glycol, and liquid polyethylene glycol, and the like), and suitable mixtures thereof. The proper fluidity can be maintained, for example, by the use of a coating such as lecithin, by the maintenance of the required particle size in the case of dispersion and by the use of surfactants. Prevention of the action of microorganisms can be achieved by various antibacterial and antifungal agents, for example, parabens, chlorobutanol, phenol, ascorbic acid, thimerosal, and the like. In many cases, it will be preferable to include isotonic agents, for example, sugars, polyalcohols such as manitol, sorbitol, sodium chloride in the composition. Prolonged absorption of the injectable compositions can be brought about by including in the composition an agent which delays absorption, for example, aluminum monostearate and gelatin.

[0153] Sterile injectable solutions can be prepared by incorporating the active compound (e g., a ORFX protein or anti-ORFX antibody) in the required amount in an appropriate solvent with one or a combination of ingredients enumerated above, as required, followed by filtered sterilization. Generally, dispersions are prepared by incorporating the active compound into a sterile vehicle that contains a basic dispersion medium and the required other ingredients from those enumerated above. In the case of sterile powders for the preparation of sterile injectable solutions, methods of preparation are vacuum drying and freeze-drying that yields a powder of the active ingredient plus any additional desired ingredient from a previously sterile-filtered solution thereof.

[0154] Oral compositions generally include an inert diluent or an edible carrier. They can be enclosed in gelatin capsules or compressed into tablets. For the purpose of oral therapeutic administration, the active compound can be incorporated with excipients and used in the form of tablets, troches, or capsules. Oral compositions can also be prepared using a fluid carrier for use as a mouthwash, wherein the compound in the fluid carrier is applied orally and swished and expectorated or swallowed. Pharmaceutically compatible binding agents, and/or adjuvant materials can be included as part of the composition. The tablets, pills, capsules, troches and the like can contain any of the following ingredients, or compounds of a similar nature: a binder such as microcrystalline cellulose, gum tragacanth or gelatin; an excipient such as starch or lactose, a disintegrating agent such as alginic acid, Primogel, or corn starch; a lubricant such as magnesium stearate or Sterotes; a glidant such as colloidal silicon dioxide; a sweetening agent such as sucrose or saccharin; or a flavoring agent such as peppermint, methyl salicylate, or orange flavoring.

[0155] For administration by inhalation, the compounds are delivered in the form of an aerosol spray from pressured container or dispenser which contains a suitable propellant, e.g., a gas such as carbon dioxide, or a nebulizer.

[0156] Systemic administration can also be by transmucosal or transdermal means. For transmucosal or transdermal administration, penetrants appropriate to the barrier to be permeated are used in the formulation. Such penetrants are, generally known in the art, and include, for example, for transmucosal administration, detergents, bile salts, and fusidic acid derivatives. Transmucosal administration can be accomplished through the use of nasal sprays or suppositories. For transdermal administration, the active compounds are formulated into ointments, salves, gels, or creams as generally known in the art.

[0157] The compounds can also be prepared in the form of suppositories (e.g., with conventional suppository bases such as cocoa butter and other glycerides) or retention enemas for rectal delivery.

[0158] In one embodiment, the active compounds are prepared with carriers that will protect the compound against rapid elimination from the body, such as a controlled release formulation, including implants and microencapsulated delivery systems. Biodegradable, biocompatible polymers can be used, such as ethylene vinyl acetate, polyanhydrides, polyglycolic acid, collagen, polyorthoesters, and polylactic acid. Methods for preparation of such formulations will be apparent to those skilled in the art. The materials can also be obtained commercially from Alza Corporation and Nova Pharmaceuticals, Inc. Liposomal suspensions (including liposomes targeted to infected cells with monoclonal antibodies to viral antigens) can also be used as pharmaceutically acceptable carriers. These can be prepared according to methods known to those skilled in the art, for example, as described in U.S. Pat. No. 4,522,811.

[0159] It is especially advantageous to formulate oral or parenteral compositions in dosage unit form for ease of administration and uniformity of dosage. Dosage unit form as used herein refers to physically discrete units suited as unitary dosages for the subject to be treated; each unit containing a predetermined quantity of active compound calculated to produce the desired therapeutic effect in association with the required pharmaceutical carrier. The specification for the dosage unit forms of the invention are dictated by and directly dependent on the unique characteristics of the active compound and the particular therapeutic effect to be achieved.

[0160] The nucleic acid molecules of the invention can be inserted into vectors and used as gene therapy vectors. Gene therapy vectors can be delivered to a subject by any of a number of routes, e.g., as described in U.S. Pat. No. 5,703,055. Delivery can thus also include, e.g., intravenous injection, local administration (see U.S. Pat. No. 5,328,470) or stereotactic injection (see e.g., Chen et al. (1994) PNAS 91:3054-3057). The pharmaceutical preparation of the gene therapy vector can include the gene therapy vector in an acceptable diluent, or can comprise a slow release matrix in which the gene delivery vehicle is imbedded. Alternatively, where the complete gene delivery vector can be produced intact from recombinant cells, e.g., retroviral vectors, the pharmaceutical preparation can include one or more cells that produce the gene delivery system.

[0161] The pharmaceutical compositions can be included in a container, pack, or dispenser together with instructions for administration.

[0162] Additional Uses and Methods of the Invention

[0163] The nucleic acid molecules, proteins, protein homologues, and antibodies described herein can be used in one or more of the following methods: (a) screening assays; (b) detection assays (e.g., chromosomal mapping, cell and tissue typing, forensic biology), (c) predictive medicine (e.g., diagnostic assays, prognostic assays, monitoring clinical trials, and pharmacogenomics); and (d) methods of treatment (e.g., therapeutic and prophylactic).

[0164] The isolated nucleic acid molecules of the invention can be used to express ORFX protein (e.g., via a recombinant expression vector in a host cell in gene therapy applications), to detect ORFX mRNA (e.g., in a biological sample) or a genetic lesion in a ORFX gene, and to modulate ORFX activity, as described further below. In addition, the ORFX proteins can be used to screen drugs or compounds that modulate the ORFX activity or expression as well as to treat disorders characterized by insufficient or excessive production of ORFX protein, for example proliferative or differentiative disorders, or production of ORFX protein forms that have decreased or aberrant activity compared to ORFX wild type protein. In addition, the anti-ORFX antibodies of the invention can be used to detect and isolate ORFX proteins and modulate ORFX activity.

[0165] This invention further pertains to novel agents identified by the above described screening assays and uses thereof for treatments as described herein.

[0166] Screening Assays

[0167] The invention provides a method (also referred to herein as a “screening assay”) for identifying modulators, i.e., candidate or test compounds or agents (e.g., peptides, peptidomimetics, small molecules or other drugs) that bind to ORFX proteins or have a stimulatory or inhibitory effect on, for example, ORFX. expression or ORFX activity.

[0168] In one embodiment, the invention provides assays for screening candidate or test compounds which bind to or modulate the activity of a ORFX protein or polypeptide or biologically active portion thereof. The test compounds of the present invention can be obtained using any of the numerous approaches in combinatorial library methods known in the art, including: biological libraries; spatially addressable parallel solid phase or solution phase libraries; synthetic library methods requiring deconvolution; the “one-bead one-compound” library method; and synthetic library methods using affinity chromatography selection. The biological library approach is limited to peptide libraries, while the other four approaches are applicable to peptide, non-peptide oligomer or small molecule libraries of compounds (Lam (1997) Anticancer Drug Des 12:145).

[0169] Examples of methods for the synthesis of molecular libraries can be found in the art, for example in: DeWitt et al. (1993) Proc Natl Acad Sci U.S.A. 90:6909; Erb et al. (1994) Proc Natl Acad Sci U.S.A. 91:11422; Zuckermann et al. (1994) J Med Chem 37:2678; Cho et al. (1993) Science 261:1303; Carrell et.al. (1994) Angew Chem Int Ed Engl 33:2059; Carell et.al. (1994) Angew Chem Int Ed Engl 33:2061; and Gallop et al. (1994) J Med Chem 37:1233.

[0170] Libraries of compounds may be presented in solution (e.g., Houghten (1992) Biotechniques 13:412-421), or on beads (Lam (1991) Nature 354:82-84), on chips (Fodor (1993) Nature 364:555-556), bacteria (Ladner U.S. Pat. No. 5,223,409), spores (Ladner U.S. Pat. No. '409), plasmids (Cull et al. (1992) Proc Natl Acad Sci USA 89:1865-1869) or on phage (Scott and Smith (1990) Science 249:386-390; Devlin (1990) Science 249:404-406; Cwirla et.al. (1990) Proc Natl Acad Sci U.S.A. 87:6378-6382; Felici (1991) J Mol Biol 222:301-310; Ladner above.).

[0171] In one embodiment, an assay is a cell-based assay in which a cell which expresses a membrane-bound form of ORFX protein, or a biologically active portion thereof, on the cell surface is contacted with a test compound and the ability of the test compound to bind to a ORFX protein determined. The cell, for example, can of mammalian origin or a yeast cell. Determining the ability of the test compound to bind to the ORFX protein can be accomplished, for example, by coupling the test compound with a radioisotope or enzymatic label such that binding of the test compound to the ORFX protein or biologically active portion thereof can be determined by detecting the labeled compound in a complex. For example, test compounds can be labeled with ¹²⁵I, ³⁵S, ¹⁴C, or ³H, either directly or indirectly, and the radioisotope detected by direct counting of radioemission or by scintillation counting. Alternatively, test compounds can be enzymatically labeled with, for example, horseradish peroxidase, alkaline phosphatase, or luciferase, and the enzymatic label detected by determination of conversion of an appropriate substrate to product. In one embodiment, the assay comprises contacting a cell which expresses a membrane-bound form of ORFX protein, or a biologically active portion thereof, on the cell surface with a known compound which binds ORFX to form an assay mixture, contacting the assay mixture with a test compound, and determining the ability of the test compound to interact with a ORFX protein, wherein determining the ability of the test compound to interact with a ORFX protein comprises determining the ability of the test compound to preferentially bind to ORFX or a biologically active portion thereof as compared to the known compound.

[0172] In another embodiment, an assay is a cell-based assay comprising contacting a cell expressing a membrane-bound form of ORFX protein, or a biologically active portion thereof, on the cell surface with a test compound and determining the ability of the test compound to modulate (e.g., stimulate or inhibit) the activity of the ORFX protein or biologically active portion thereof. Determining the ability of the test compound to modulate the activity of ORFX or a biologically active portion thereof can be accomplished, for example, by determining the ability of the ORFX protein to bind to or interact with a ORFX target molecule. As used herein, a “target molecule” is a molecule with which a ORFX protein binds or interacts in nature, for example, a molecule on the surface of a cell which expresses a ORFX interacting protein, a molecule on the surface of a second cell, a molecule in the extracellular milieu, a molecule associated with the internal surface of a cell membrane or a cytoplasmic molecule. A ORFX target molecule can be a non-ORFX molecule or a ORFX protein or polypeptide of the present invention. In one embodiment, a ORFX target molecule is a component of a signal transduction pathway that facilitates transduction of an extracellular signal (e.g., a signal generated by binding of a compound to a membrane-bound ORFX molecule) through the cell membrane and into the cell. The target, for example, can be a second intercellular protein that has catalytic activity or a protein that facilitates the association of downstream signaling molecules with ORFX.

[0173] Determining the ability of the ORFX protein to bind to or interact with a ORFX target molecule can be accomplished by one of the methods described above for determining direct binding. In one embodiment, determining the ability of the ORFX protein to bind to or interact with a ORFX target molecule can be accomplished by determining the activity of the target molecule. For example, the activity of the target molecule can be determined by detecting induction of a cellular second messenger of the target (i.e. intracellular Ca²⁺, diacylglycerol, IP₃, etc.), detecting catalytic/enzymatic activity of the target an appropriate substrate, detecting the induction of a reporter gene (comprising a ORFX-responsive regulatory element operatively linked to a nucleic acid encoding a detectable marker, e.g., luciferase), or detecting a cellular response, for example, cell survival, cellular differentiation, or cell proliferation.

[0174] In yet another embodiment, an assay of the present invention is a cell-free assay comprising contacting a ORFX protein or biologically active portion thereof with a test compound and determining the ability of the test compound to bind to the ORFX protein or biologically active portion thereof. Binding of the test compound to the ORFX protein can be determined either directly or indirectly as described above. In one embodiment, the assay comprises contacting the ORFX protein or biologically active portion thereof with a known compound which binds ORFX to form an assay mixture, contacting the assay mixture with a test compound, and determining the, ability of the test compound to interact with a ORFX protein, wherein determining the ability of the test compound to interact with a ORFX protein comprises determining the ability of the test compound to preferentially bind to ORFX or biologically active portion thereof as compared to the known compound.

[0175] In another embodiment, an assay is a cell-free assay comprising contacting ORFX protein or biologically active portion thereof with a test compound and determining the ability of the test compound to modulate (e.g., stimulate or inhibit) the activity of the ORFX protein or biologically active portion thereof. Determining the ability of the test compound to modulate the activity of ORFX can be accomplished, for example, by determining the ability of the ORFX protein to bind to a ORFX target molecule by one of the methods described above for determining direct binding. In an alternative embodiment, determining the ability of the test compound to modulate the activity of ORFX can be accomplished by determining the ability of the ORFX protein further modulate a ORFX target molecule. For example, the catalytic/enzymatic activity of the target molecule on an appropriate substrate can be determined as previously described.

[0176] In yet another embodiment, the cell-free assay comprises contacting the ORFX protein or biologically active portion thereof with a known compound which binds ORFX to form an assay mixture, contacting the assay mixture with a test compound, and determining the ability of the test compound to interact with a ORFX protein, wherein determining the ability of the test compound to interact with a ORFX protein comprises determining the ability of the ORFX protein to preferentially bind to or modulate the activity of a ORFX target molecule.

[0177] The cell-free assays of the present invention are amenable to use of both the soluble form or the membrane-bound form of ORFX. In the case of cell-free assays comprising the membrane-bound form of ORFX, it may be desirable to utilize a solubilizing agent such that the membrane-bound form of ORFX is maintained in solution. Examples of such solubilizing agents include non-ionic detergents such as n-octylglucoside, n-dodecylglucoside, n-dodecylmaltoside, octanoyl-N-methylglucamide, decanoyl-N-methylglucamide, Triton® X-100, Tritono® X-114, Thesit®, Isotridecypoly(ethylene glycol ether)ₙ, N-dodecyl—N,N-dimethyl-3-ammonio-1-propane sulfonate, 3-(3-cholaridopropyl)dimethylamminiol-1-propane sulfonate (CHAPS), or 3-(3-cholamidopropyl)dimethylamminiol-2-hydroxy-1-propane sulfonate (CHAPSO).

[0178] In more than one embodiment of the above assay methods of the present invention, it may be desirable to immobilize either ORFX or its target molecule to facilitate separation of complexed from uncomplexed forms of one or both of the proteins, as well as to accommodate automation of the assay. Binding of a test compound to ORFX, or interaction of ORFX with a target molecule in the presence and absence of a candidate compound, can be accomplished in any vessel suitable for containing the reactants. Examples of such vessels include microtiter plates, test tubes, and micro-centrifuge tubes. In one embodiment, a fusion protein can be provided that adds a domain that allows one or both of the proteins to be bound to a matrix. For example, GST-ORFX fusion proteins or GST-target fusion proteins can be adsorbed onto glutathione sepharose beads (Sigmna Chemical, St. Louis, Mo.) or glutathione derivatized microtiter plates, that are then combined with the test compound or the test compound and either the non-adsorbed target protein or ORFX protein, and the mixture is incubated under conditions conducive to complex formation (e.g., at physiological conditions for salt and pH). Following incubation, the beads or microtiter plate wells are washed to remove any unbound components, the matrix immobilized in the case of beads, complex determined either directly or indirectly, for example, as described above. Alternatively, the complexes can be dissociated from the matrix, and the level of ORFX binding or activity determined using standard techniques.

[0179] Other techniques for immobilizing proteins on matrices can also be used in the screening assays of the invention. For example, either ORFX or its target molecule can be immobilized utilizing conjugation of biotin and streptavidin. Biotinylated ORFX or target molecules can be prepared from biotin-NHS (N-hydroxy-succinimide) using techniques well known in the art (e.g., biotinylation kit, Pierce Chemicals, Rockford, Ill.), and immobilized in the wells of streptavidin-coated 96 well plates (Pierce Chemical). Alternatively, antibodies reactive with ORFX or target molecules, but which do not interfere with binding of the ORFX protein to its target molecule, can be derivatized to the wells of the plate, and unbound target or ORFX trapped in the wells by antibody conjugation. Methods for detecting such complexes, in addition to those described above for the GST-immobilized complexes, include immunodetection of complexes using antibodies reactive with the ORFX or target molecule, as well as enzyme-linked assays that rely on detecting an enzymatic activity associated with the ORFX or target molecule.

[0180] In another embodiment, modulators of ORFX expression are identified in a method wherein a cell is contacted with a candidate compound and the expression of ORFX mRNA or protein in the cell is determined. The level of expression of ORFX mRNA or protein in the presence of the candidate compound is compared to the level of expression of ORFX mRNA or protein in the absence of the candidate compound. The candidate compound can then be identified as a modulator of ORFX expression based on this comparison. For example, when expression of ORFX mRNA or protein is greater (statistically significantly greater) in the presence of the candidate compound than in its absence, the candidate compound is identified as a stimulator of ORFX mRNA or protein expression. Alternatively, when expression of ORFX mRNA or protein is less (statistically significantly less) in the presence of the candidate compound than in its absence, the candidate compound is identified as an inhibitor of ORFX mRNA or protein expression. The level of ORFX mRNA or protein expression in the cells can be determined by methods described herein for detecting ORFX mRNA or protein.

[0181] In yet another aspect of the invention, the ORFX proteins can be used as “bait proteins” in a two-hybrid assay or three hybrid assay (see, e.g., U.S. Pat. No. 5,283,317; Zervos et al. (1993) Cell 72:223-232; Madura et al. (1993) J Biol Chem 268:12046-12054; Bartel et al. (1993) Biotechniques 14:920-924; Iwabuchi et al. (1993) Oncogene 8:1693-1696; and Brent WO94/10300), to identify other proteins that bind to or interact with ORFX (“ORFX-binding proteins” or “ORFX-bp”) and modulate ORFX activity. Such ORFX-binding proteins are also likely to be involved in the propagation of signals by the ORFX proteins as, for example, upstream or downstream elements of the ORFX pathway.

[0182] The two-hybrid system is based on the modular nature of most transcription factors, which consist of separable DNA-binding and activation domains. Briefly, the assay utilizes two different DNA constructs. In one construct, the gene that codes for ORFX is fused to a gene encoding the DNA binding domain of a known transcription factor (e.g., GAL-4). In the other construct, a DNA sequence, from a library of DNA sequences, that encodes an unidentified protein (“prey” or “sample”) is fused to a gene that codes for the activation domain of the known transcription factor. If the “bait” and the “prey” proteins are able to interact, in vivo, forming a ORFX-dependent complex, the DNA-binding and activation domains of the transcription factor are brought into close proximity. This proximity allows transcription of a reporter gene (e.g., LacZ) that is operably linked to a transcriptional regulatory site responsive to the transcription factor. Expression of the reporter gene can be detected and cell colonies containing the functional transcription factor can be isolated and used to obtain the cloned gene that encodes the protein which interacts with ORFX.

[0183] This invention further pertains to novel agents identified by the above-described screening assays and uses thereof for treatments as described herein.

[0184] Detection Assays

[0185] Portions or fragments of the cDNA sequences identified herein (and the corresponding complete gene sequences) can be used in numerous ways as polynucleotide reagents. For example, these sequences can be used to: (i) map their respective genes on a chromosome; and, thus, locate gene regions associated with genetic disease; (ii) identify an individual from a minute biological sample (tissue typing); and (iii) aid in forensic identification of a biological sample.

[0186] The ORFX sequences of the present invention can also be used to identify individuals from minute biological samples. In this technique, an individual's genomic DNA is digested with one or more restriction enzymes, and probed on a Southern blot to yield unique bands for identification. The sequences of the present invention are useful as additional DNA markers for RFLP (“restriction fragment length polymorphisms,” described in U.S. Pat. No. 5,272,057).

[0187] Furthermore, the sequences of the present invention can be used to provide an alternative technique that determines the actual base-by-base DNA sequence of selected portions of an individual's genome. Thus, the ORFX sequences described herein can be used to prepare two PCR primers from the 5′ and 3′ ends of the sequences. These primers can then be used to amplify an individual's DNA and subsequently sequence it.

[0188] Panels of corresponding DNA sequences from individuals, prepared in this manner, can provide unique individual identifications, as each individual will have a unique set of such DNA sequences due to allelic differences. The sequences of the present invention can be used to obtain such identification sequences from individuals and from tissue. The ORFX sequences of the invention uniquely represent portions of the human genome. Allelic variation occurs to some degree in the coding regions of these sequences, and to a greater degree in the noncoding regions. It is estimated that allelic variation between individual humans occurs with a frequency of about once per each 500 bases. Much of the allelic variation is due to single nucleotide polymorphisms (SNPs), which include restriction fragment length polymorphisms (RFLPs).

[0189] Each of the sequences described herein can, to some degree, be used as a standard against which DNA from an individual can be compared for identification purposes. Because greater numbers of polymorphisms occur in the noncoding regions, fewer sequences are necessary to differentiate individuals. The noncoding sequences of SEQ ID NO:2n−1 (wherein n=1 to 4534), as described above, can comfortably provide positive individual identification with a panel of perhaps 10 to 1,000 primers that each yield a noncoding amplified sequence of 100 bases. If predicted coding sequences are used, a more appropriate number of primers for positive individual identification would be 500-2,000.

[0190] Predictive Medicine

[0191] The present invention also pertains to the field of predictive medicine in which diagnostic assays, prognostic assays, pharmacogenomics, and monitoring clinical trials are used for prognostic (predictive) purposes to thereby treat an individual prophylactically. Accordingly, one aspect of the present invention relates to diagnostic assays for determining ORFX protein and/or nucleic acid expression as well as ORFX activity, in the context of a biological sample (e.g., blood, serum, cells, tissue) to thereby determine whether an individual is afflicted with a disease or disorder, or is at risk of developing a disorder, associated with aberrant ORFX expression or activity. The invention also provides for prognostic (or predictive) assays for determining whether an individual is at risk of developing a disorder associated with ORFX protein, nucleic acid expression or activity. For example, mutations in a ORFX gene can be assayed in a biological sample. Such assays can be used for prognostic or predictive purpose to thereby prophylactically treat an individual prior to the onset of a disorder characterized by or associated with ORFX protein, nucleic acid expression or activity.

[0192] Another aspect of the invention provides methods for determining ORFX protein, nucleic acid expression or ORFX activity in an individual to thereby. select appropriate therapeutic or prophylactic agents for that individual (referred to herein as “pharmacogenomics”). Pharmacogenomics allows for the selection of agents (e.g., drugs) for therapeutic or prophylactic treatment of an individual based on the genotype of the individual (e.g., the genotype of the individual examined to determine the ability of the individual to respond to a particular agent.)

[0193] Yet another aspect of the invention pertains to monitoring the influence of agents (e.g., drugs, compounds) on the expression or activity of ORFX in clinical trials.

[0194] Use of Partial ORFX Sequences in Forensic Biology

[0195] DNA-based identification techniques can also be used in forensic biology. Forensic biology is a scientific field employing genetic typing of biological evidence found at a crime scene as a means for positively identifying, for example, a perpetrator of a crime. To make such an identification, PCR technology can be used to amplify DNA sequences taken from very small biological samples such as tissues, e.g., hair or skin, or body fluids, e.g., blood, saliva, or semen found at a crime scene. The amplified sequence can then be compared to a standard, thereby allowing identification of the origin of the biological sample.

[0196] The sequences of the present invention can be used to provide polynucleotide reagents, e.g., PCR primers, targeted to specific loci in the human genome, that can enhance the reliability of DNA-based forensic identifications by, for example, providing another “identification marker” (i.e. another DNA sequence that is unique to a particular individual). As mentioned above, actual base sequence information can be used for identification as an accurate alternative to patterns formed by restriction enzyme generated fragments. Sequences targeted to noncoding regions of SEQ ID NOs:_ are particularly appropriate for this use as greater numbers of polymorphisms occur in the noncoding regions, making it easier to differentiate individuals using this technique. Examples of polynucleotide reagents include the ORFX sequences or portions thereof, e.g., fragments derived from the noncoding regions of one or more of SEQ ID NO:2n−1 (where n=1 to 4534), having a length of at least 20 bases, preferably at least 30 bases.

[0197] The ORFX sequences described herein can further be used to provide polynucleotide reagents, e.g., labeled or label-able probes that can be used, for example, in an in situ hybridization technique, to identify a specific tissue, e.g., brain tissue, etc. This can be very useful in cases where a forensic pathologist is presented with a tissue of unknown origin. Panels of such ORFX probes can be used to identify tissue by species and/or by organ type.

[0198] In a similar fashion, these reagents, e.g., ORFX primers or probes can be used to screen tissue culture for contamination (i.e. screen for the presence of a mixture of different types of cells in a culture).

[0199] Predictive Medicine

[0200] The present invention also pertains to the field of predictive medicine in which diagnostic assays, prognostic assays, pharmacogenomics, and monitoring clinical trials are used for prognostic (predictive) purposes to thereby treat an individual prophylactically. Accordingly, one aspect of the present invention relates to diagnostic assays for determining ORFX protein and/or nucleic acid expression as well as ORFX activity, in the context of a biological sample (e.g., blood, serum, cells, tissue) to thereby determine whether an individual is afflicted with a disease or disorder, or is at risk of developing a disorder, associated with aberrant ORFX expression or activity. The invention also provides for prognostic (or predictive) assays for determining whether an individual is at risk of developing a disorder associated with ORFX protein, nucleic acid expression or activity. For example, mutations in a ORFX gene can be assayed in a biological sample. Such assays can be used for prognostic or predictive purpose to thereby prophylactically treat an individual prior to the onset of a disorder characterized by or associated with ORFX protein, nucleic acid expression or activity.

[0201] Another aspect of the invention provides methods for determining ORFX protein, nucleic acid expression or ORFX activity in an individual to thereby select appropriate therapeutic or prophylactic agents for that individual (referred to herein as “pharmacogenomics”). Pharmacogenomics allows for the selection of agents (e.g., drugs) for therapeutic or prophylactic treatment of an individual based on the genotype of the individual (e.g., the genotype of the individual examined to determine the ability of the individual to respond to a particular agent.)

[0202] Yet another aspect of the invention pertains to monitoring the influence of agents (e.g., drugs, compounds) on the expression or activity of ORFX in clinical trials.

[0203] These and other agents are described in further detail in the following sections.

[0204] Diagnostic Assays

[0205] Other conditions in which proliferation of cells plays a role include tumors, restenosis, psoriasis, Dupuytren's contracture, diabetic complications, Kaposi's sarcoma and rheumatoid arthritis.

[0206] An ORFX polypeptide may be used to identify an interacting polypeptide a sample or tissue. The method comprises contacting the sample or tissue with ORFX, allowing formation of a complex between the ORFX polypeptide and the interacting polypeptide, and detecting the complex, if present.

[0207] The proteins of the invention may be used to stimulate production of antibodies specifically binding the proteins. Such antibodies may be used in immunodiagnostic procedures to detect the occurrence of the protein in a sample. The proteins of the invention may be used to stimulate cell growth and cell proliferation in conditions in which such growth would be favorable. An example would be to counteract toxic side effects of chemotherapeutic agents on, for example, hematopoiesis and platelet formation, linings of the gastrointestinal tract, and hair follicles. They may also be used to stimulate new cell growth in neurological disorders including, for example, Alzheimer's disease. Alternatively, antagonistic treatments may be administered in which an antibody specifically binding the ORFX-like proteins of the invention would abrogate the specific growth-inducing effects of the proteins. Such antibodies may be useful, for example, in the treatment of proliferative disorders including various tumors and benign hyperplasias.

[0208] Polynucleotides or oligonucleotides corresponding to any one portion of the ORFX nucleic acids of SEQ ID NO:²n−1 (wherein n=1 to 4534) may be used to detect DNA containing a corresponding ORF gene, or detect the expression of a corresponding ORFX gene, or ORFX-like gene. For example, an ORFX nucleic acid expressed in a particular cell or tissue, as noted in Table 2, can be used to identify the presence of that particular cell type.

[0209] An exemplary method for detecting the presence or absence of ORFX in a biological sample involves obtaining a biological sample from a test subject and contacting the biological sample with a compound or an agent capable of detecting ORFX protein or nucleic acid (e.g., mRNA, genomic DNA) that encodes ORFX protein such that the presence of ORFX is detected in the biological sample. An agent for detecting ORFX mRNA or genomic DNA is a labeled nucleic acid probe capable of hybridizing to ORFX mRNA or genomic DNA. The nucleic acid probe can be, for example, a full-length ORFX nucleic acid, such as the nucleic acid of SEQ ID NO:2n−1 (wherein n=1 to 4534), or a portion thereof, such as an oligonucleotide of at least 15, 30, 50, 100, 250 or 500 nucleotides in length and sufficient to specifically hybridize under stringent conditions to ORFX mRNA or genomic DNA, as described above. Other suitable probes for use in the diagnostic assays of the invention are described herein.

[0210] An agent for detecting ORFX protein is an antibody capable of binding to ORFX protein, preferably an antibody with a detectable label. Antibodies can be polyclonal, or more preferably, monoclonal. An intact antibody, or a fragment thereof (e.g., Fab or F(ab′)₂) can be used. The term “labeled”, with regard to the probe or antibody, is intended to encompass direct labeling of the probe or antibody by coupling (i.e., physically linking) a detectable substance to the probe or antibody, as well as indirect labeling of the probe or antibody by reactivity with another reagent that is directly labeled. Examples of indirect labeling include detection of a primary antibody using a fluorescently labeled secondary antibody and end-labeling of a DNA probe with biotin such that it can be detected with fluorescently labeled streptavidin. The term “biological sample” is intended to include tissues, cells and biological fluids isolated from a subject, as well as tissues, cells and fluids present within a subject. That is, the detection method of the invention can be used to detect ORFX mRNA, protein, or genomic DNA in a biological sample in vitro as well as in vivo. For example, in vitro techniques for detection of ORFX mRNA include Northern hybridizations and in situ hybridizations. In vitro techniques for detection of ORFX protein include enzyme linked immunosorbent assays (ELISAs), Western blots, immunoprecipitations and immunofluorescence. In vitro techniques for detection of ORFX genomic DNA include Southern hybridizations. Furthermore, in vivo techniques for detection of ORFX protein include introducing into a subject a labeled anti-ORFX antibody. For example, the antibody can be labeled with a radioactive marker whose presence and location in a subject can be detected by standard imaging techniques.

[0211] In one embodiment, the biological sample contains protein molecules from the test subject. Alternatively, the biological sample can contain mRNA molecules from the test subject or genomic DNA molecules from the test subject. A preferred biological sample is a peripheral blood leukocyte sample isolated by conventional means from a subject.

[0212] In another embodiment, the methods further involve obtaining a control biological sample from acontrol subject, contacting the control sample with a compound or agent capable of detecting ORFX protein, mRNA, or genomic DNA, such that the presence of ORFX protein, mRNA or genomic DNA is detected in the biological sample, and comparing the presence of ORFX protein, mRNA or genomic DNA in the control sample with the presence of ORFX protein, mRNA or genomic DNA in the test sample.

[0213] The invention also encompasses kits for detecting the presence of ORFX in a biological sample. For example, the kit can comprise: a labeled compound or agent capable of detecting ORFX protein or mRNA in a biological sample; means for determining the amount of ORFX in the sample; and means for comparing the amount of ORFX in the sample with a standard. The compound or agent can be packaged in a suitable container. The kit can further comprise instructions for using the kit to detect ORFX protein or nucleic acid.

[0214] Prognostic Assays

[0215] The diagnostic methods described herein can furthermore be utilized to identify subjects having or at risk of developing a disease or disorder associated with aberrant ORFX expression or activity. For example, the assays described herein, such as the preceding diagnostic assays or the following assays, can be utilized to identify a subject having or at risk of developing a disorder associated with ORFX protein, nucleic acid expression or activity in, e.g., proliferative or differentiative disorders such as hyperplasias, tumors, restenosis, psoriasis, Dupuytren's contracture, diabetic complications, or rheumatoid arthritis, etc.; and glia-associated disorders such as cerebral lesions, diabetic neuropathies, cerebral edema, senile dementia, Alzheimer's disease, etc. Alternatively, the prognostic assays can be utilized to identify a subject having or at risk for developing a disease or disorder. Thus, the present invention provides a method for identifying a disease or disorder associated with aberrant ORFX expression or activity in which a test sample is obtained from a subject and ORFX protein or nucleic acid (e.g., mRNA, genomic DNA) is detected, wherein the presence of ORFX protein or nucleic acid is diagnostic for a subject having or at risk of developing a disease or disorder associated with aberrant ORFX expression or activity. As used herein, a “test sample” refers to a biological sample obtained from a subject of interest. For example, a test sample can be a biological fluid (e.g., serum), cell sample, or tissue.

[0216] Furthermore, the prognostic assays described herein can be used to determine whether a subject can be administered an agent (e.g., an agonist, antagonist, peptidomimetic, protein, peptide, nucleic acid, small molecule, or other drug candidate) to treat a disease or disorder associated with aberrant ORFX expression or activity. For example, such methods can be used to determine whether a subject can be effectively treated with an agent for a disorder, such as a proliferative disorder, differentiative disorder, glia-associated disorders, etc. Thus, the present invention provides methods for determining whether a subject can be effectively treated with an agent for a disorder associated with aberrant ORFX expression or activity in which a test sample is obtained and ORFX protein or nucleic acid is detected (e.g., wherein the presence of ORFX protein or nucleic acid is diagnostic for a subject that can be administered the agent to treat a disorder associated with aberrant ORFX expression or activity.)

[0217] The methods of the invention can also be used to detect genetic lesions in a ORFX gene, thereby determining if a subject with the lesioned gene is at risk for, or suffers from, a proliferative disorder, differentiative disorder, glia-associated disorder, etc. In various embodiments, the methods include detecting, in a sample of cells from the subject, the presence or absence of a genetic lesion characterized by at least one of an alteration affecting the integrity of a gene encoding a ORFX-protein, or the mis-expression of the ORFX gene. For example, such genetic lesions can be detected by ascertaining the existence of at least one of (1) a deletion of one or more nucleotides from a ORFX gene; (2) an addition of one or more nucleotides to a ORFX gene; (3) a substitution of one or more nucleotides of a ORFX gene, (4) a chromosomal rearrangement of a ORFX gene; (5) an alteration in the level of a messenger RNA transcript of a ORFX gene, (6) aberrant modification of a ORFX gene, such as of the methylation pattern of the genomic DNA, (7) the presence of a non-wild type splicing pattern of a messenger RNA transcript of a ORFX gene, (8) a non-wild type level of a ORFX-protein, (9) allelic loss of a ORFX gene, and (10) inappropriate post-translational modification of a ORFX-protein. As described herein, there are a large number of assay techniques known in the art which can be used for detecting lesions in a ORFX gene. A preferred biological sample is a peripheral blood leukocyte sample isolated by conventional means from a subject. However, any biological sample containing nucleated cells may be used, including, for example, buccal mucosal cells.

[0218] In certain embodiments, detection of the lesion involves the use of a probe/primer in a polymerase chain reaction (PCR) (see, e.g., U.S. Pat. Nos. 4,683,195 and 4,683,202), such as anchor PCR or RACE PCR, or, alternatively, in a ligation chain reaction (LCR) (see, e.g, Landegran et al. (1988) Science 241:1077-1080; and Nakazawa et al. (1994) PNAS 91:360-364), the latter of which can be particularly useful for detecting point mutations in the ORFX-gene (see Abravaya et al. (1995) Nucl Acids Res 23:675-682). This method can include the steps of collecting a sample of cells from a patient, isolating nucleic acid (e.g., genomic, mRNA or both) from the cells of the sample, contacting the nucleic acid sample with one or more primers that specifically hybridize to a ORFX gene under conditions such that hybridization and amplification of the ORFX gene (if present) occurs, and detecting the presence or absence of an amplification product, or detecting the size of the amplification product and comparing the length to a control sample. It is anticipated that PCR and/or LCR may be desirable to use as a preliminary amplification step in conjunction with any of the techniques used for detecting mutations described herein.

[0219] Alternative amplification methods include: self sustained sequence replication (Guatelli et al., 1990, Proc Natl Acad Sci USA 87:1874-1878),transcriptional amplification system (Kwoh, et al., 1989, Proc Natl Acad Sci USA 86:1173-1177), Q-Beta Replicase (Lizardi et al, 1988, BioTechnology 6:1197), or any other nucleic acid amplification method, followed by the detection of the amplified molecules using techniques well known to those of skill in the art. These detection schemes are especially useful for the detection of nucleic acid molecules if such molecules are present in very low numbers.

[0220] In an alternative embodiment, mutations in a ORFX gene from a sample cell can be identified by alterations in restriction enzyme cleavage patterns. For example, sample and control DNA is isolated, amplified (optionally), digested with one or more restriction endonucleases, and fragment length sizes are determined by gel electrophoresis and compared. Differences in fragment length sizes between sample and control DNA indicates mutations in the sample DNA. Moreover, the use of sequence specific ribozymes (see, for example, U.S. Pat. No. 5,493,531) can be used to score for the presence of specific mutations by development or loss of a ribozyme cleavage site.

[0221] In other embodiments, genetic mutations in ORFX can be identified by hybridizing a sample and control nucleic acids, e.g., DNA or RNA, to high density arrays containing hundreds or thousands of oligonucleotides probes (Cronin et al. (1996) Human Mutation 7: 244-255; Kozal et al. (1996) Nature Medicine 2: 753-759). For example, genetic mutations in ORFX can be identified in two dimensional arrays containing light-generated DNA probes as described in Cronin et al. above. Briefly, a first hybridization array of probes can be used to scan through long stretches of DNA in a sample and control to identify base changes between the sequences by making linear arrays of sequential overlapping probes. This step allows the identification of point mutations. This step is followed by a second hybridization array that allows the characterization of specific mutations by using smaller, specialized probe arrays complementary to all variants or mutations detected. Each mutation array is composed of parallel probe sets, one complementary to the wild-type gene and the other complementary to the mutant gene.

[0222] In yet another embodiment, any of a variety of sequencing reactions known in the art can be used to directly sequence the ORFX gene and detect mutations by comparing the sequence of the sample ORFX with the corresponding wild-type (control) sequence. Examples of sequencing reactions include those based on techniques developed by Maxim and Gilbert (1977) PNAS 74:560 or Sanger (1977) PNAS 74:5463. It is also contemplated that any of a variety of automated sequencing procedures can be utilized when performing the diagnostic assays (Naeve et al., (1995) Biotechniques 19:448), including sequencing by mass spectrometry (see, e.g., PCT International Publ. No. WO 94/16101; Cohen et al. (1996) Adv Chromatogr 36:127-162; and Griffin et al. (1993) Appl Biochem Biotechnol 38:147-159).

[0223] Other methods for detecting mutations in the ORFX gene include methods in which protection from cleavage agents is used to detect mismatched bases in RNA/RNA or RNA/DNA heteroduplexes (Myers et al. (1985) Science 230:1242). In general, the art technique of “mismatch cleavage” starts by providing heteroduplexes of formed by hybridizing (labeled) RNA or DNA containing the wild-type ORFX sequence with potentially mutant RNA or DNA obtained from a tissue sample. The double-stranded duplexes are treated with an agent that cleaves single-stranded regions of the duplex such as which will exist due to basepair mismatches between the control and sample strands. For instance, RNA/DNA duplexes can be treated with RNase and DNA/DNA hybrids treated with SI nuclease to enzymatically digesting the mismatched regions. In other embodiments, either DNA/DNA or RNA/DNA duplexes can be treated with hydroxylamine or osmium tetroxide and with piperidine in order to digest mismatched regions. After digestion of the mismatched regions, the resulting material is then separated by size on denaturing polyacrylamide gels to determine the site of mutation. See, for example, Cotton et al (1988) Proc Natl Acad Sci USA 85:4397; Saleeba et al (1992) Methods Enzymol 217:286-295. In an embodiment, the control DNA or RNA can be labeled for detection.

[0224] In still another embodiment, the mismatch cleavage reaction employs one or more proteins that recognize mismatched base pairs in double-stranded DNA (so called “DNA mismatch repair” enzymes) in defined systems for detecting and mapping point mutations in ORFX cDNAs obtained from samples of cells. For example, the mutY enzyme of E. coli cleaves A at G/A mismatches and the thymidine DNA glycosylase from HeLa cells cleaves T at G/F mismatches (Hsu et al. (1994) Carcinogenesis 15:1657-1662). According to an exemplary embodiment, a probe based on a ORFX sequence, e.g., a wild-type ORFX sequence, is hybridized to a cDNA or other DNA product from a test cell(s). The duplex is treated with a DNA mismatch repair enzyme, and the cleavage products, if any, can be detected from electrophoresis protocols or the like. See, for example, U.S. Pat. No. 5,459,039.

[0225] In other embodiments, alterations in electrophoretic mobility will be used to identify mutations in ORFX genes. For example, single strand conformation polymorphism (SSCP) may be used to detect differences in electrophoretic mobility between mutant and wild type nucleic acids (Orita et al. (1989) Proc Natl Acad Sci USA: 86:2766, see also Cotton (1993) Mutat Res 285:125-144; Hayashi (1992) Genet Anal Tech Appl 9:73-79). Single-stranded DNA fragments of sample and control ORFX nucleic acids will be denatured and allowed to renature. The secondary structure of single-stranded nucleic acids varies according to sequence, the resulting alteration in electrophoretic mobility enables the detection of even a single base change. The DNA fragments may be labeled or detected with labeled probes. The sensitivity of the assay may be enhanced by using RNA, rather than DNA, in which the secondary structure is more sensitive to a change in sequence. In one embodiment, the subject method utilizes heteroduplex analysis to separate double stranded heteroduplex molecules on the basis of changes in electrophoretic mobility. See, e.g., Keen et al. (1991) Trends Genet 7:5.

[0226] In yet another embodiment the movement of mutant or wild-type fragments in polyacrylamide gels containing a gradient of denaturant is assayed using denaturing gradient gel electrophoresis (DGGE). See, e.g., Myers et al (1985) Nature 313:495. When DGGE is used as the method of analysis, DNA will be modified to insure that it does not completely denature, for example by adding a GC clamp of approximately 40 bp of high-melting GC-rich DNA by PCR. In a further embodiment, a temperature gradient is used in place of a denaturing gradient to identify differences in the mobility of control and sample DNA. See, e.g., Rosenbaum and Reissner (1987) Biophys Chem 265:12753.

[0227] Examples of other techniques for detecting point mutations include, but are not limited to, selective oligonucleotide hybridization, selective amplification, or. selective primer extension. For example, oligonucleotide primers may be prepared in which the known mutation is placed centrally and then hybridized to target DNA under conditions that permit hybridization only if a perfect match is found. See, e.g., Saiki et al. (1986) Nature 324:163); Saiki et al. (1989) Proc Natl Acad Sci USA 86:6230. Such allele specific oligonucleotides are hybridized to PCR amplified target DNA or a number of different mutations when the oligonucleotides are attached to the hybridizing membrane and hybridized with labeled target DNA.

[0228] Alternatively, allele specific amplification technology that depends on selective PCR amplification may be used in conjunction with the instant invention. Oligonucleotides used as primers for specific amplification may carry the mutation of interest in the center of the molecule (so that amplification depends on differential hybridization) (Gibbs et al. (1989) Nucleic Acids Res 17:2437-2448) or at the extreme 3′ end of one primer where, under appropriate conditions, mismatch can prevent, or reduce polymerase extension (Prossner (1993) Tibtech 11:238). In addition it may be desirable to introduce a novel restriction site in the region of the mutation to create cleavage-based detection. See, e.g., Gasparini et al (1992) Mol Cell Probes 6:1. It is anticipated that in certain embodiments amplification may also be performed using Taq ligase for amplification. See, e.g., Barany (1991) Proc Natl Acad Sci USA 88:189. In such cases, ligation will occur only if there is a perfect match at the 3′ end of the 5′ sequence, making it possible to detect the presence of a known mutation at a specific site by looking for the presence or absence of amplification.

[0229] The methods described herein may be performed, for example, by utilizing pre-packaged diagnostic kits comprising at least one probe nucleic acid or antibody reagent described herein, which may be conveniently used, e.g., in clinical settings to diagnose patients exhibiting symptoms or family history of a disease or illness involving a ORFX gene.

[0230] Furthermore, any cell type or tissue, preferably peripheral blood leukocytes, in which ORFX is expressed may be utilized in the prognostic assays described herein. However, any biological sample containing nucleated cells may be used, including, for example, buccal mucosal cells.

[0231] Pharmacogenomics

[0232] Agents, or modulators that have a stimulatory or inhibitory effect on ORFX activity (e.g., ORFX gene expression), as identified by a screening assay described herein can be administered to individuals to treat (prophylactically or therapeutically) disorders (e.g., neurological, cancer-related or gestational disorders) associated with aberrant ORFX activity. In conjunction with such treatment, the pharmacogenomics (i.e., the study of the relationship between an individual's genotype and that individual's response to a foreign compound or drug) of the individual may be considered. Differences in metabolism of therapeutics can lead to severe toxicity or therapeutic failure by altering the relation between dose and blood concentration of the pharmacologically active drug. Thus, the pharmacogenomics of the individual permits the selection of effective agents (e.g., drugs) for prophylactic or therapeutic treatments based on a consideration of the individual's genotype. Such pharmacogenomics can further be used to determine appropriate dosages and therapeutic regimens. Accordingly, the activity of ORFX protein, expression of ORFX nucleic acid, or mutation content of ORFX genes in an individual can be determined to thereby select appropriate agent(s) for therapeutic or prophylactic treatment of the individual.

[0233] Pharmacogenomics deals with clinically significant hereditary variations in the response to drugs due to altered drug disposition and abnormal action in affected persons. See e.g., Eichelbaum, 1996, Clin Exp Pharmacol Physiol, 23:983-985 and Linder, 1997, Clin Chem, 43:254-266. In general, two types of pharmacogenetic conditions can be differentiated. Genetic conditions transmitted as a single factor altering the way drugs act on the body (altered drug action) or genetic conditions transmitted as single factors altering the way the body acts on drugs (altered drug metabolism). These pharmacogenetic conditions can occur either as rare defects or as polymorphisms. For example, glucose-6-phosphate dehydrogenase (G6PD) deficiency is a common inherited enzymopathy in which the main clinical complication is haemolysis after ingestion of oxidant drugs (anti-malarials, sulfonamides, analgesics, nitrofurans) and consumption of fava beans.

[0234] As an illustrative embodiment, the activity of drug metabolizing enzymes is a major determinant of both the intensity and duration of drug action. The discovery of genetic polymorphisms of drug metabolizing enzymes (e.g., N-acetyltransferase 2 (NAT 2) and cytochrome P450 enzymes CYP2D6 and CYP2C19) has provided an explanation as to why some patients do not obtain the expected drug effects or show exaggerated drug response and serious toxicity after taking the standard and safe dose of a drug. These polymorphisms are expressed in two phenotypes in the population, the extensive metabolizer (EM) and poor metabolizer (PM). The prevalence of PM is different among different populations. For example, the gene coding for CYP2D6 is highly polymorphic and several mutations have been identified in PM, which all lead to the absence of functional CYP2D6. Poor metabolizers of CYP2D6 and CYP2C19 quite frequently experience exaggerated drug response and side effects when they receive standard doses. If a metabolite is the active therapeutic moiety, PM show no therapeutic response, as demonstrated for the analgesic effect of codeine mediated by its CYP2D6-formed metabolite morphine. The other extreme are the so called ultra-rapid metabolizers who do not respond to standard doses. Recently, the molecular basis of ultra-rapid metabolism has been identified to be due to CYP2D6 gene amplification.

[0235] Thus, the activity of ORFX protein, expression of ORFX nucleic acid, or mutation content of ORFX genes in an individual can be determined to thereby select appropriate agent(s) for therapeutic or prophylactic treatment of the individual. In addition, pharmacogenetic studies can be used to apply genotyping of polymorphic alleles encoding drug-metabolizing enzymes to the identification of an individual's drug responsiveness phenotype. This knowledge, when applied to dosing or drug selection, can avoid adverse reactions or therapeutic failure and thus enhance therapeutic or prophylactic efficiency when treating a subject with a ORFX modulator, such as a modulator identified by one of the exemplary screening assays described herein.

[0236] Monitoring Clinical Efficacy

[0237] Monitoring the influence of agents (e.g., drugs, compounds) on the expression or activity of ORFX (e.g., the ability to modulate aberrant cell proliferation and/or differentiation) can be applied in basic drug screening and in clinical trials. For example, the effectiveness of an agent determined by a screening assay as described herein to increase ORFX gene expression, protein levels, or upregulate ORFX activity, can be monitored in clinical trials of subjects exhibiting decreased ORFX gene expression, protein levels, or downregulated ORFX activity. Alternatively, the effectiveness of an agent determined by a screening assay to decrease ORFX gene expression, protein levels, or downregulate ORFX activity, can be monitored in clinical trials of subjects exhibiting increased ORFX gene expression, protein levels, or upregulated ORFX activity. In such clinical trials, the expression or activity of ORFX and, preferably, other genes that have been implicated in, for example, a proliferative or neurological disorder, can be used as a “read out” or marker of the responsiveness of a particular cell.

[0238] For example, genes, including ORFX, that are modulated in cells by treatment with an agent (e.g., compound, drug or small molecule) that modulates ORFX activity (e.g., identified in a screening assay as described herein) can be identified. Thus, to study the effect of agents on cellular proliferation disorders, for example, in a clinical trial, cells can be isolated and RNA prepared and analyzed for the levels of expression of ORFX and other genes implicated in the disorder. The levels of gene expression (i.e., a gene expression pattern) can be quantified by Northern blot analysis or RT-PCR, as described herein, or alternatively by measuring the amount of protein produced, by one of the methods as described herein, or by measuring the levels of activity of ORFX or other genes. In this way, the gene expression pattern can serve as a marker, indicative of the physiological response of the cells to the agent. Accordingly, this response state may be determined before, and at various points during, treatment of the individual with the agent.

[0239] In one embodiment, the invention provides a method for monitoring the effectiveness of treatment of a subject with an agent (e.g., an agonist, antagonist, protein, peptide, nucleic acid, peptidomimetic, small molecule, or other drug candidate identified by the screening assays described herein) comprising the steps of (i) obtaining a pre-administration sample from a subject prior to administration of the agent; (ii) detecting the level of expression of a ORFX protein, mRNA, or genomic DNA in the preadministration sample; (iii) obtaining one or more post-administration samples from the subject; (iv) detecting the level of expression or activity of the ORFX protein, mRNA, or genomic DNA in the post-administration samples; (v) comparing the level of expression or activity of the ORFX protein, mRNA, or genomic DNA in the pre-administration sample with the ORFX protein, mRNA, or genomic DNA in the post administration sample or samples; and (vi) altering the administration of the agent to the subject accordingly. For example, increased administration of the agent may be desirable to increase the expression or activity of ORFX to higher levels than detected, i.e., to increase the effectiveness of the agent. Alternatively, decreased administration of the agent may be desirable to decrease expression or activity of ORFX to lower levels than detected, i.e., to decrease the effectiveness of the agent.

[0240] Methods of Treatment

[0241] The present invention provides for both prophylactic and therapeutic methods of treating a subject at risk of (or susceptible to) a disorder or having a disorder associated with aberrant ORFX expression or activity.

[0242] Diseases and disorders that are characterized by increased (relative to a subject not suffering from the disease or disorder) levels or biological activity may be treated with Therapeutics that antagonize (i.e., reduce or inhibit) activity. Therapeutics that antagonize activity may be administered in a therapeutic or prophylactic manner. Therapeutics that may be utilized include, but are not limited to, (i) a ORFX polypeptide, or analogs, derivatives, fragments or homologs thereof; (it) antibodies to a ORFX peptide; (iii) nucleic acids encoding a ORFX peptide; (iv) administration of antisense nucleic acid and nucleic acids that are “dysfunctional” (i.e., due to a heterologous insertion within the coding sequences of coding sequences to a ORFX peptide) that are utilized to “knockout” endogenous function of a ORFX peptide by homologous recombination (see, e.g., Capecchi, 1989, Science 244: 1288-1292); or (v) modulators (i.e., inhibitors, agonists and antagonists, including additional peptide mimetic of the invention or antibodies specific to a peptide of the invention) that alter the interaction between a ORFX peptide and its binding partner.

[0243] Diseases and disorders that are characterized by decreased (relative to a subject not suffering from the disease or disorder) levels or biological activity may be treated with Therapeutics that increase (i.e., are agonists to) activity. Therapeutics that upregulate activity may be administered in a therapeutic or prophylactic manner. Therapeutics that may be utilized include, but are not limited to, a ORFX peptide, or analogs, derivatives, fragments or homologs thereof; or an agonist that increases bioavailability.

[0244] Increased or decreased levels can be readily detected by quantifying peptide and/or RNA, by obtaining a patient tissue sample (e.g., from biopsy tissue) and assaying it in vitro for RNA or peptide levels, structure and/or activity of the expressed peptides (or mRNAs of a ORFX peptide). Methods that are well-known within the art include, but are not limited to, immunoassays (e.g., by Western blot analysis, immunoprecipitation followed by sodium dodecyl sulfate (SDS) polyacrylamide gel electrophoresis, immunocytochemistry, etc.) and/or hybridization assays to detect expression of mRNAs (e.g., Northern assays, dot blots, in situ hybridization, etc.).

[0245] In one aspect, the invention provides a method for preventing, in a subject, a disease or condition associated with an aberrant ORFX expression or activity, by administering to the subject an agent that modulates ORFX expression or at least one ORFX activity. Subjects at risk for a disease that is caused or contributed to by aberrant ORFX expression or activity can be identified by, for example, any or a combination of diagnostic or prognostic assays as described herein. Administration of a prophylactic agent can occur prior to the manifestation of symptoms characteristic of the ORFX aberrancy, such that a disease or disorder is prevented or, alternatively, delayed in its progression. Depending on the type of ORFX aberrancy, for example, a ORFX agonist or ORFX antagonist agent can be used for treating the subject. The appropriate agent can be determined based on screening assays described herein.

[0246] Another aspect of the invention pertains to methods of modulating ORFX expression or activity for therapeutic purposes. The modulatory method of the invention involves contacting a cell with an agent that modulates one or more of the activities of ORFX protein activity associated with the cell. An agent that modulates ORFX protein activity can be an agent as described herein, such as a nucleic acid or a protein, a naturally-occurring cognate ligand of a ORFX protein, a peptide, a ORFX peptidomimetic, or other small molecule. In one embodiment, the agent stimulates one or more ORFX protein activity. Examples of such stimulatory agents include active ORFX protein and a nucleic acid molecule encoding ORFX that has been introduced into the cell. In another embodiment, the agent inhibits one or more ORFX protein activity. Examples of such inhibitory agents include antisense ORFX nucleic acid molecules and anti-ORFX antibodies. These modulatory methods can be performed in vitro (e.g., by culturing the cell with the agent) or, alternatively, in vivo (e.g., by administering the agent to a subject). As such, the present invention provides methods of treating an individual afflicted with a disease or disorder characterized by aberrant expression or activity of a ORFX protein or nucleic acid molecule. In one embodiment, the method involves administering an agent (e.g., an agent identified by a screening assay described herein), or combination of agents that modulates (e.g., upregulates or downregulates) ORFX expression or activity. In another embodiment, the method involves administering a ORFX protein or nucleic acid molecule as therapy to compensate for reduced or aberrant ORFX expression or activity.

[0247] Determination of the Biological Effect of a Therapeutic

[0248] In various embodiments of the present invention, suitable in vitro or in vivo assays are utilized to determine the effect of a specific Therapeutic and whether its administration is indicated for treatment of the affected tissue.

[0249] In various specific embodiments, in vitro assays may be performed with representative cells of the type(s) involved in the patient's disorder, to determine if a given Therapeutic exerts the desired effect upon the cell type(s). Compounds for use in therapy may be tested in suitable animal model systems including, but not limited to rats, mice, chicken, cows, monkeys, rabbits, and the like, prior to testing in human subjects. Similarly, for in vivo testing, any of the animal model system known in the art may be used prior to administration to human subjects.

[0250] Malignancies

[0251] Some ORFX polypeptides are expressed in cancerous cells (see, e.g., Tables 1 and 2). Accordingly, the corresponding ORF protein is involved in the regulation of cell proliferation. Accordingly, Therapeutics of the present invention may be useful in the therapeutic or prophylactic treatment of diseases or disorders that are associated with cell hyperproliferation and/or loss of control of cell proliferation (e.g., cancers, malignancies and tumors). For a review of such hyperproliferation disorders, see e.g., Fishman, et al., 1985. Medicine 2nd ed., J. B. Lippincott Co., Philadelphia, Pa.

[0252] Therapeutics of the present invention may be assayed by any method known within the art for efficacy in treating or preventing malignancies and related disorders. Such assays include, but are not limited to, in vitro assays utilizing transformed cells or cells derived from the patient's tumor, as well as in vivo assays using animal models of cancer or malignancies. Potentially effective Therapeutics are those that, for example, inhibit the proliferation of tumor-derived or transformed cells in culture or cause a regression of tumors in animal models, in comparison to the controls.

[0253] In the practice of the present invention, once a malignancy or cancer has been shown to be amenable to treatment by modulating (i.e., inhibiting, antagonizing or agonizing) activity, that cancer or malignancy may subsequently be treated or prevented by the administration of a Therapeutic that serves to modulate protein function.

[0254] Premalignant Conditions

[0255] The Therapeutics of the present invention that are effective in the therapeutic or prophylactic treatment of cancer or malignancies may also be administered for the treatment of pre-malignant conditions and/or to prevent the progression of a pre-malignancy to a neoplastic or malignant state. Such prophylactic or therapeutic use is indicated in conditions known or suspected of preceding progression to neoplasia or cancer, in particular, where non-neoplastic cell growth consisting of hyperplasia, metaplasia or, most particularly, dysplasia has occurred. For a review of such abnormal cell growth see e.g., Robbins & Angell, 1976. Basic Pathology, 2nd ed., W. B. Saunders Co., Philadelphia, Pa.

[0256] Hyperplasia is a form of controlled cell proliferation involving an increase in cell number in a tissue or organ, without significant alteration in its structure or function. For example, it has been demonstrated that endometrial hyperplasia often precedes endometrial cancer. Metaplasia is a form of controlled cell growth in which one type of mature or fully differentiated cell substitutes for another type of mature cell. Metaplasia may occur in epithelial or connective tissue cells. Dysplasia is generally considered a precursor of cancer, and is found mainly in the epithelia. Dysplasia is the most disorderly form of non-neoplastic cell growth, and involves a loss in individual cell uniformity and in the architectural orientation of cells. Dysplasia characteristically occurs where there exists chronic irritation or inflammation, and is often found in the cervix, respiratory passages, oral cavity, and gall bladder.

[0257] Alternatively, or in addition to the presence of abnormal cell growth characterized as hyperplasia, metaplasia, or dysplasia, the presence of one or more characteristics of a transformed or malignant phenotype displayed either in vivo or in vitro within a cell sample derived from a patient, is indicative of the desirability of prophylactic/therapeutic administration of a Therapeutic that possesses the ability to modulate activity of An aforementioned protein. Characteristics of a transformed phenotype include, but are not limited to: (i) morphological changes; (ii) looser substratum attachment; (iii) loss of cell-to-cell contact inhibition; (iv) loss of anchorage dependence; (v) protease release; (vi) increased sugar transport; (vii) decreased serum requirement; (viii) expression of fetal antigens, (ix) disappearance of the 250 kDal cell-surface protein, and the like. See e.g., Richards, et al., 1986. Molecular Pathology, W. B. Saunders Co., Philadelphia, Pa.

[0258] In a specific embodiment of the present invention, a patient that exhibits one or more of the following predisposing factors for malignancy is treated by administration of an effective amount of a Therapeutic: (i) a chromosomal translocation associated with a malignancy (e.g., the Philadelphia chromosome (bcr/abl) for chronic myelogenous leukemia and t(14;18) for follicular lymphoma, etc.); (ii) familial polyposis or Gardner's syndrome (possible forerunners of colon cancer); (iii) monoclonal gammopathy of undetermined significance (a possible precursor of multiple myeloma) and (iv) a first degree kinship with persons having a cancer or pre-cancerous disease showing a Mendelian (genetic) inheritance pattern (e.g., familial polyposis of the colon, Gardner's syndrome, hereditary exostosis, polyendocrine adenomatosis, Peutz-Jeghers syndrome, neurofibromatosis of Von Recklinghausen, medullary thyroid carcinoma with amyloid production and pheochromocytoma, retinoblastoma, carotid body tumor, cutaneous melanocarcinoma, intraocular melanocarcinoma, xeroderma pigmentosum, ataxia telangiectasia, Chediak-Higashi syndrome, albinism, Fanconi's aplastic anemia and Bloom's syndrome).

[0259] In another embodiment, a Therapeutic of the present invention is administered to a human patient to prevent the progression to breast, colon, lung, pancreatic, or uterine cancer, or melanoma or sarcoma.

[0260] Hyperproliferative and Dysproliferative Disorders

[0261] In one embodiment of the present invention, a Therapeutic is administered in the therapeutic or prophylactic treatment of hyperproliferative or benign dysproliferative disorders. The efficacy in treating or preventing hyperproliferative diseases or disorders of a Therapeutic of the present invention may be assayed by any method known within the art. Such assays include in vitro cell proliferation assays, in vitro or in vivo assays using animal models of hyperproliferative diseases or disorders, or the like. Potentially effective Therapeutics may, for example, promote cell proliferation in culture or cause growth or cell proliferation in animal models in comparison to controls.

[0262] Specific embodiments of the present invention are directed to the treatment or prevention of cirrhosis of the liver (a condition in which scarring has overtaken normal liver regeneration processes); treatment of keloid (hypertrophic scar) formation causing disfiguring of the skin in which the scarring process interferes with normal renewal; psoriasis (a common skin condition characterized by excessive proliferation of the skin and delay in proper cell fate determination); benign tumors; fibrocystic conditions and tissue hypertrophy (e.g., benign prostatic hypertrophy).

[0263] Neurodegenerative Disorders

[0264] Some ORFX proteins are found in cell types have been implicated in the deregulation of cellular maturation and apoptosis, which are both characteristic of neurodegenerative disease. Accordingly, Therapeutics of the invention, particularly but not limited to those that modulate (or supply) activity of an aforementioned protein, may be effective in treating or preventing neurodegenerative disease. Therapeutics of the present invention that modulate the activity of an aforementioned protein involved in neurodegenerative disorders can be assayed by any method known in the art for efficacy in treating or preventing such neurodegenerative diseases and disorders. Such assays include in vitro assays for regulated cell maturation or inhibition of apoptosis or in vivo assays using animal models of neurodegenerative diseases or disorders, or any of the assays described below. Potentially effective Therapeutics, for example but not by way of limitation, promote regulated cell maturation and prevent cell apoptosis in culture, or reduce neurodegeneration in animal models in comparison to controls.

[0265] Once a neurodegenerative disease or disorder has been shown to be amenable to treatment by modulation activity, that neurodegenerative disease or disorder can be treated or prevented by administration of a Therapeutic that modulates activity. Such diseases include all degenerative disorders involved with aging, especially osteoarthritis and neurodegenerative disorders.

[0266] Disorders Related to Organ Transplantation

[0267] Some ORFX can be associated with disorders related to organ transplantation, in particular but not limited to organ rejection. Therapeutics of the invention, particularly those that modulate (or supply) activity, may be effective in treating or preventing diseases or disorders related to organ transplantation. Therapeutics of the invention (particularly Therapeutics that modulate the levels or activity of an aforementioned protein) can be assayed by any method known in the art for efficacy in treating or preventing such diseases and disorders related to organ transplantation. Such assays include in vitro assays for using cell culture models as described below, or in vivo assays using animal models of diseases and disorders related to organ transplantation, see e.g., below. Potentially effective Therapeutics, for example but not by way of limitation, reduce immune rejection responses in animal models in comparison to controls.

[0268] Accordingly, once diseases and disorders related to organ transplantation are shown to be amenable to treatment by modulation of activity, such diseases or disorders can be treated or prevented by administration of a Therapeutic that modulates activity.

[0269] Cardiovascular Disease

[0270] GENX has been implicated in cardiovascular disorders, including in atherosclerotic plaque formation. Diseases such as cardiovascular disease, including cerebral thrombosis or hemorrhage, ischemic heart or renal disease, peripheral vascular disease, or thrombosis of other major vessel, and other diseases, including diabetes mellitus, hypertension, hypothyroidism, cholesterol ester storage disease, systemic lupus erythematosus, homocysteinemia, and familial protein or lipid processing diseases, and the like, are either directly or indirectly associated with atherosclerosis. Accordingly, Therapeutics of the invention, particularly those that modulate (or supply) activity or formation may be effective in treating or preventing atherosclerosis-associated diseases or disorders. Therapeutics of the invention (particularly Therapeutics that modulate the levels or activity) can be assayed by any method known in the art, including those described below, for efficacy in treating or preventing such diseases and disorders.

[0271] A vast array of animal and cell culture models exist for processes involved in atherosclerosis. A limited and non-exclusive list of animal models includes knockout mice for premature atherosclerosis (Kurabayashi and Yazaki, 1996, Int. Angiol. 15: 187-194), transgenic mouse models of atherosclerosis (Kappel et al., 1994, FASEB J. 8: 583-592), antisense oligonucleotide treatment of animal models (Callow, 1995, Curr. Opin. Cardiol. 10: 569-576), transgenic rabbit models for atherosclerosis (Taylor, 1997, Ann. N.Y. Acad. Sci 811: 146-152), hypercholesterolemic animal models (Rosenfeld, 1996, Diabetes Res. Clin. Pract. 30 Suppl.: 1-11), hyperlipidemic mice (Paigen et al., 1994, Curr. Opin. Lipidol. 5: 258-264), and inhibition of lipoxygenase in animals (Sigal et al., 1994, Ann. N.Y. Acad. Sci. 714: 211-224). In addition, in vitro cell models include but are not limited to monocytes exposed to low density lipoprotein (Frostegard et al., 1996, Atherosclerosis 121: 93-103), cloned vascular smooth muscle cells (Suttles et al., 1995, Exp. Cell Res. 218: 331-338), endothelial cell-derived chemoattractant exposed T cells (Katz et al., 1994, J. Leukoc. Biol. 55: 567-573), cultured human aortic endothelial cells (Farber et al., 1992, Am. J. Physiol. 262: H1088-1085), and foam cell cultures (Libby et al., 1996, Curr Opin Lipidol 7: 330-335). Potentially effective Therapeutics, for example but not by way of limitation, reduce foam cell formation in cell culture models, or reduce atherosclerotic plaque formation in hypercholesterolemic mouse models of atherosclerosis in comparison to controls.

[0272] Accordingly, once an atherosclerosis-associated disease or disorder has been shown to be amenable to treatment by modulation of activity or formation, that disease or disorder can be treated or prevented by administration of a Therapeutic that modulates activity.

[0273] Cytokine and Cell Proliferation/Differentiation Activity

[0274] A GENX protein of the present invention may exhibit cytokine, cell proliferation (either inducing or inhibiting) or cell differentiation (either inducing or inhibiting) activity or may induce production of other cytokines in certain cell populations. Many protein factors discovered to date, including all known cytokines, have exhibited activity in one or more factor dependent cell proliferation assays, and hence the assays serve as a convenient confirmation of cytokine activity. The activity of a protein of the present invention is evidenced by any one of a number of routine factor dependent cell proliferation assays for cell lines including, without limitation, 32D, DA2, DA1G, T10, B9, B9/11, BaF3, MC9/G, M+(preB M+), 2E8, RB5, DA1, 123, T1165, HT2, CTLL2, TF-1, Mo7e and CMK.

[0275] The activity of a protein of the invention may, among other means, be measured by the following methods: Assays for T-cell or thymocyte proliferation include without limitation those described in: Current Protocols in Immunology, Ed by Coligan et al., Greene Publishing Associates and Wiley-Interscience (Chapter 3 and Chapter 7); Takai et al, J Immunol 137:3494-3500, 1986; Bertagnoili et al., J Immunol 145:1706-1712, 1990; Bertagnolli et al., Cell Immunol 133:327-341, 1991; Bertagnolli, et al., J Immunol 149:3778-3783, 1992; Bowman et al., J Immunol 152:1756-1761, 1994.

[0276] Assays for cytokine production and/or proliferation of spleen cells, lymph node cells or thymocytes include, without limitation,those described by Kruisbeek and Shevach, In: Current Protocols in Immunology. Coligan et al., eds. Vol 1, pp. 3.12.1-14, John Wiley and Sons, Toronto 1994; and by Schreiber, In: Current Protocols in Immunology. Coligan eds. Vol 1 pp. 6.8.1-8, John Wiley and Sons, Toronto 1994.

[0277] Assays for proliferation and differentiation of hematopoietic and lymphopoietic cells include, without limitation, those described by Bottomly et al., In: Current Protocols in Immunology. Coligan et al., eds. Vol 1 pp. 6.3.1-6.3.12, John Wiley and Sons, Toronto 1991; deVries et al., J Exp Med 173:1205-1211, 1991; Moreau et al., Nature 336:690-692, 1988; Greenberger et al., Proc Natl Acad Sci U.S.A. 80:2931-2938, 1983; Nordan, In: Current Protocols in Immunology. Coligan et al., eds. Vol 1 pp. 6.6.1-5, John Wiley and Sons, Toronto 1991; Smith et al., Proc Natl Acad Sci U.S.A. 83:1857-1861, 1986; Measurement of human Interleukin 11-Bennett, et al. In: Current Protocols in Immunology. Coligan et al., eds. Vol 1 pp. 6.15.1 John Wiley and Sons, Toronto 1991; Ciarletta, et al., In: Current Protocols in Immunology. Coligan et al., eds. Vol 1 pp. 6.13.1, John Wiley and Sons, Toronto 1991.

[0278] Assays for T-cell clone responses to antigens (which will identify, among others, proteins that affect APC-T cell interactions as well as direct T-cell effects by measuring proliferation and cytokine production) include, without limitation, those described In: Current Protocols in Immunology. Coligan et al., eds., Greene Publishing Associates and Wiley-Interscience (Chapter 3Chapter 6, Chapter 7); Weinberger et al., Proc Natl Acad Sci USA 77:6091-6095, 1980; Weinberger et al., Eur J Immun 11:405-411, 1981; Takai et al., J Immunol 137:3494-3500, 1986; Takai et al., J Immunol 140:508-512, 1988.

[0279] Immune Stimulating or Suppressing Activity

[0280] A GENX protein of the present invention may also exhibit immune stimulating or immune suppressing activity, including without limitation the activities for which assays are described herein. A protein may be useful in the treatment of various immune deficiencies and disorders (including severe combined immunodeficiency (SCID)), e.g., in regulating (up or down) growth and proliferation of T and/or B lymphocytes, as well as effecting the cytolytic activity of NK cells and other cell populations. These immune deficiencies may be genetic or be caused by vital (e.g., HIV) as well as bacterial or fungal infections, or may result from autoimmune disorders. More specifically, infectious diseases causes by vital, bacterial, fungal or other infection may be treatable using a protein of the present invention, including infections by HIV, hepatitis viruses, herpesviruses, mycobacteria, Leishmania species., malaria species. and various fungal infections such as candidiasis. Of course, in this regard, a protein of the present invention may also be useful where a boost to the immune system generally may be desirable, i.e., in the treatment of cancer.

[0281] Autoimmune disorders which may be treated using a protein of the present invention include, for example, connective tissue disease, multiple sclerosis, systemic lupus erythematosus, rheumatoid arthritis, autoimmune pulmonary inflammation, Guillain-Barre syndrome, autoimmune thyroiditis, insulin dependent diabetes mellitus, myasthenia gravis, graft-versus-host disease and autoimmune inflammatory eye disease. Such a protein of the present invention may also to be useful in the treatment of allergic reactions and conditions, such as asthma (particularly allergic asthma) or other respiratory problems. Other conditions, in which immune suppression is desired (including, for example, organ transplantation), may also be treatable using a protein of the present invention.

[0282] Using the proteins of the invention it may also be possible to immune responses, in a number of ways. Down regulation may be in the form of inhibiting or blocking an immune response already in progress or may involve preventing the induction of an immune response. The functions of activated T cells may be inhibited by suppressing T cell responses or by inducing specific tolerance in T cells, or both. Immunosuppression of T cell responses is generally an active, non-antigen-specific, process which requires continuous exposure of the T cells to the suppressive agent. Tolerance, which involves inducing non-responsiveness or energy in T cells, is distinguishable from immunosuppression in that it is generally antigen-specific and persists after exposure to the tolerizing agent has ceased. Operationally, tolerance can be demonstrated by the lack of a T cell response upon re-exposure to specific antigen in the absence of the tolerizing agent.

[0283] Down regulating or preventing one or more antigen functions (including without limitation B lymphocyte antigen functions (such as, for example, B7), e.g., preventing high level lymphokine synthesis by activated T cells, will be useful in situations of tissue, skin and organ transplantation and in graft-versus-host disease (GVHD). For example, blockage of T cell function should result in reduced tissue destruction in tissue transplantation. Typically, in tissue transplants, rejection of the transplant is initiated through its recognition as foreign by T cells, followed by an immune reaction that destroys the transplant. The administration of a molecule which inhibits or blocks interaction of a B7 lymphocyte antigen with its natural ligand(s) on immune cells (such as a soluble, monomeric form of a peptide having B7-2 activity alone or in conjunction with a monomeric form of a peptide having an activity of another B lymphocyte antigen (e.g., B7-1, B7-3) or blocking antibody), prior to transplantation can lead to the binding of the molecule to the natural ligand(s) on the immune cells without transmitting the corresponding costimulatory signal. Blocking B lymphocyte antigen function in this matter prevents cytokine synthesis by immune cells, such as T cells, and thus acts as an immunosuppressant. Moreover, the lack of costimulation may also be sufficient to energize the T cells, thereby inducing tolerance in a subject. Induction of long-term tolerance by B lymphocyte antigen-blocking reagents may avoid the necessity of repeated administration of these blocking reagents. To achieve sufficient immunosuppression or tolerance in a subject, it may also be necessary to block the function of B lymphocyte antigens.

[0284] The efficacy of particular blocking reagents in preventing organ transplant rejection or GVHD can be assessed using animal models that are predictive of efficacy in humans. Examples of appropriate systems which can be used include allogeneic cardiac grafts in rats and xenogeneic pancreatic islet cell grafts in mice, both of which have been used to examine the immunosuppressive effects of CTLA4Ig fusion proteins in vivo as described in Lenschow et al., Science 257:789-792 (1992) and Turka et al., Proc Natl Acad Sci USA, 89:11102-11105 (1992). In addition, murine models of GVHD (see Paul ed., Fundamental Immunology, Raven Press, New York, 1989, pp. 846-847) can be used to determine the effect of blocking B lymphocyte antigen function in vivo on the development of that disease.

[0285] Blocking antigen function may also be therapeutically useful for treating autoimmune diseases. Many autoimmune disorders are the result of inappropriate activation of T cells that are reactive against self tissue and which promote the production of cytokines and auto-antibodies involved in the pathology of the diseases. Preventing the activation of autoreactive T cells may reduce or eliminate disease symptoms. Administration of reagents which block costimulation of T cells by disrupting receptor:ligand interactions of B lymphocyte antigens can be used to inhibit T cell activation and prevent production of auto-antibodies or T cell-derived cytokines which may be involved in the disease process. Additionally, blocking reagents may induce antigen-specific tolerance of autoreactive T cells which could lead to long-term relief from the disease. The efficacy of blocking reagents in preventing or alleviating autoimmune disorders can be determined using a number of well-characterized animal models of human autoimmune diseases. Examples include murine experimental autoimmune encephalitis, systemic lupus erythematosis in MRL/lpr/lpr mice or NZB hybrid mice, murine autoimmune collagen arthritis, diabetes mellitus in NOD mice and BB rats, and murine experimental myasthenia gravis (see Paul ed., Fundamental Immunology Raven Press, New York, 1989, pp. 840-856).

[0286] Upregulation of an antigen function (preferably a B lymphocyte antigen function), as a means of up regulating immune responses, may also be useful in therapy. Upregulation of immune responses may be in the form of enhancing an existing immune response or eliciting an initial immune response. For example, enhancing an immune response through stimulating B lymphocyte antigen function may be useful in cases of viral infection. In addition, systemic vital diseases such as influenza, the common cold, and encephalitis might be alleviated by the administration of stimulatory forms of B lymphocyte antigens systemically.

[0287] Alternatively, anti-viral immune responses may be enhanced in an infected patient by removing T cells from the patient, costimulating the T cells in vitro with viral antigen-pulsed APCs either expressing a peptide of the present invention or together with a stimulatory form of a soluble peptide of the present invention and reintroducing the in vitro activated T cells into the patient. Another method of enhancing anti-vital immune responses would be to isolate infected cells from a patient, transfect them with a nucleic acid encoding a protein of the present invention as described herein such that the cells express all or a portion of the protein on their surface, and reintroduce the transfected cells into the patient. The infected cells would now be capable of delivering a costimulatory signal to, and thereby activate, T cells in vivo.

[0288] In another application, up regulation or enhancement of antigen function (preferably B lymphocyte antigen function) may be useful in the induction of tumor immunity. Tumor cells (e.g., sarcoma, melanoma, lymphoma, leukemia, neuroblastoma, carcinoma) transfected with a nucleic acid encoding at least one peptide of the present invention can be administered to a subject to overcome tumor-specific tolerance in the. subject. If desired, the tumor cell can be transfected to express a combination of peptides. For example, tumor cells obtained from a patient can be transfected ex vivo with an expression vector directing the expression of a peptide having B7-2-like activity alone, or in conjunction with a peptide having B7-1-like activity and/or B7-3-like activity. The transfected tumor cells are returned to the patient to result in expression of the peptides on the surface of the transfected cell. Alternatively, gene therapy techniques can be used to target a tumor cell for transfection in vivo.

[0289] The presence of the peptide of the present invention having the activity of a B lymphocyte antigen(s) on the surface of the tumor cell provides the necessary costimulation signal to T cells to induce a T cell mediated immune response against the transfected tumor cells. In addition, tumor cells which lack MHC class I or MHC class II molecules, or which fail to reexpress sufficient amounts of MHC class I or MHC class II molecules, can be transfected with nucleic acid encoding all or a portion of (e.g., a cytoplasmic-domain truncated portion) of an MHC class I α chain protein and β₂ microglobulin protein or an MHC class II a chain protein and an MHC class II β chain protein to thereby express MHC class I or MHC class II proteins on the cell surface. Expression of the appropriate class I or class II MHC in conjunction with a peptide having the activity of a B lymphocyte antigen (e.g., B7-1, B7-2, B7-3) induces a T cell mediated immune response against the transfected tumor cell. Optionally, a gene encoding an antisense construct which blocks expression of an MHC class II associated protein, such as the invariant chain, can also be cotransfected with a DNA encoding a peptide having the activity of a B lymphocyte antigen to promote presentation of tumor associated antigens and induce tumor specific immunity. Thus, the induction of a T cell mediated immune response in a human subject may be sufficient to overcome tumor-specific tolerance in the subject.

[0290] The activity of a protein of the invention may, among other means, be measured by the following methods: Suitable assays for thymocyte or splenocyte cytotoxicity include, without limitation, those described In: Current Protocols in Immunology. Coligan et al., eds. Greene Publishing Associates and Wiley-Interscience (Chapter 3, Chapter 7); Herrmann et al., Proc Natl Acad Sci USA 78:2488-2492, 1981; Herrmann et al., J Immunol 128:1968-1974, 1982; Handa et al., J Immunol 135:1564-1572, 1985; Takai et al., J Immunol 137:3494-3500, 1986; Takai et al., J Immunol 140:508-512, 1988; Herrmann et al., Proc Natl Acad Sci USA 78:2488-2492, 1981; Herrmann et al., J Immunol 128:1968-1974, 1982; Handa et al., J Immunol 135:1564-1572, 1985; Takai et al., J Immunol 137:3494-3500, 1986; Bowman et al., J Virology 61:1992-1998; Takai et al, J Immunol 140:508-512, 1988; Bertagnolli et al., Cell Immunol 133:327-341, 1991; Brown et al., J Immunol 153:3079-3092, 1994.

[0291] Assays for T-cell-dependent immunoglobulin responses and isotype switching (which will identify, among others, proteins that modulate T-cell dependent antibody,responses and that affect Th1/Th2 profiles) include, without limitation, those described in: Maliszewski, J Immunol 144:3028-3033, 1990; and Mond and Brunswick In: Current Protocols in Immunology. Coligan et al., (eds.) Vol 1 pp. 3.8.1-3.8.16, John Wiley and Sons, Toronto 1994.

[0292] Mixed lymphocyte reaction (MLR) assays (which will identify, among others, proteins that generate predominantly Th1 and CTL responses) include, without limitation, those described In: Current Protocols in Immunology. Coligan et al., eds. Greene Publishing Associates and Wiley-Interscience (Chapter 3, Chapter 7); Takai et al., J Immunol 137:3494-3500, 1986; Takai et al., J Immunol 140:508-512, 1988; Bertagnolli et al., J Immunol 149:3778-3783, 1992.

[0293] Dendritic cell-dependent assays (which will identify, among others, proteins expressed by dendritic cells that activate naive T-cells) include, without limitation, those described in: Guery et al., J Immunol 134:536-544, 1995; Inaba et al, J Exp Med 173:549-559, 1991; Macatonia et al., J Immunol 154:5071-5079, 1995; Porgador et al, J Exp Med 182:255-260, 1995; Nair et al, J Virol 67:4062-4069, 1993; Huang et al., Science 264:961-965, 1994; Macatonia et al., J Exp Med 169:1255-1264, 1989; Bhardwaj et al, J Clin Investig 94:797-807, 1994; and Inaba et al., J Exp Med 172:631-640, 1990.

[0294] Assays for lymphocyte survival/apoptosis (which will identify, among others, proteins that prevent apoptosis after superantigen induction and proteins that regulate lymphocyte homeostasis) include, without limitation, those described in: Darzynkiewicz et al., Cytometry 13:795-808, 1992; Gorczyca et al., Leukemia 7:659-670, 1993; Gorczyca et al., Cancer Res 53:1945-1951, 1993; Itoh et al., Cell 66:233-243, 1991; Zacharchuk J Immunol 145:4037-4045, 1990; Zamai et al., Cytometry 14:891-897, 1993; Gorczyca et al., Internat J Oncol 1:639-648, 1992.

[0295] Assays for proteins that influence early steps of T-cell commitment and development include, without limitation, those described in: Antica et al, Blood 84:111-117, 1994; Fine et al., Cell Immunol 155: 111-122, 1994; Galy et al., Blood 85:2770-2778, 1995; Toki et al., Proc Nat Acad Sci USA 88:7548-7551, 1991.

[0296] Hematopoiesis Regulating Activity

[0297] A GENX protein of the present invention may be useful in regulation of hematopoiesis and, consequently, in the treatment of myeloid or lymphoid cell deficiencies. Even marginal biological activity in support of colony forming cells or of factor-dependent cell lines indicates involvement in regulating hematopoiesis, e.g. in supporting the growth and proliferation of erythroid progenitor cells alone or in combination with other cytokines, thereby indicating utility, for example, in treating various anemias or for use in conjunction with irradiation/chemotherapy to stimulate the production of erythroid precursors and/or erythroid cells; in supporting the growth and proliferation of myeloid cells such as granulocytes and monocytes/macrophages (i.e., traditional CSF activity) useful, for example, in conjunction with chemotherapy to prevent or treat consequent myelo-suppression; in supporting the growth and proliferation of megakaryocytes and consequently of platelets thereby allowing prevention or treatment of various platelet disorders such as thrombocytopenia, and generally for use in place of or complimentary to platelet transfusions; and/or in supporting the growth and proliferation of hematopoietic stem cells which are capable of maturing to any and all of the above-mentioned hematopoietic cells and therefore find therapeutic utility in various stem cell disorders (such as those usually treated with transplantation, including, without limitation, aplastic anemia and paroxysmal nocturnal hemoglobinuria), as well as in repopulating the stem cell compartment post irradiation/chemotherapy, either in-vivo or ex-vivo (i.e., in conjunction with bone marrow transplantation or with peripheral progenitor cell transplantation (homologous or heterologous)) as normal cells or genetically manipulated for gene therapy.

[0298] The activity of a protein of the invention may, among other means, be measured by the following methods:

[0299] Suitable assays for proliferation and differentiation of various hematopoietic lines are cited above.

[0300] Assays for embryonic stem cell differentiation (which will identify, among others, proteins that influence embryonic differentiation hematopoiesis) include, without limitation, those described in: Johansson et al. Cellular Biology 15:141-151, 1995; Keller et al., Mol. Cell. Biol. 13:473-486, 1993; McClanahan et al., Blood 81:2903-2915, 1993.

[0301] Assays for stem cell survival and differentiation (which will identify, among others, proteins that regulate lympho-hematopoiesis) include, without limitation, those described in: Methylcellulose colony forming assays, Freshney, In: Culture of Hematopoietic Cells. Freshney, et al. (eds.) Vol pp. 265-268, Wiley-Liss, Inc., New York, N.Y. 1994; Hirayama et al., Proc Natl Acad Sci USA 89:5907-5911, 1992; McNiece and Briddeli, In: Culture of Hematopoietic Cells. Freshney, et al. (eds.) Vol pp. 23-39, Wiley-Liss, Inc., New York, N.Y. 1994; Neben et al., Exp Hematol 22:353-359, 1994; Ploemacher, In: Culture of Hematopoietic Cells. Freshney, et al. eds. Vol pp. 1-21, Wiley-Liss, Inc., New York, N.Y. 1994; Spoonceret al., In: Culture of Hematopoietic Cells. Freshhey, et al., (eds.) Vol pp. 163-179, Wiley-Liss, Inc., New York, N.Y. 1994; Sutherland, In: Culture of Hematopoietic Cells. Freshney, et al., (eds.) Vol pp. 139-162, Wiley-Liss, Inc., New York, N.Y. 1994.

[0302] Tissue Growth Activity

[0303] A GENX protein of the present invention also may have utility in compositions used for bone, cartilage, tendon, ligament and/or nerve tissue growth or regeneration, as well as for wound healing and tissue repair and replacement, and in the treatment of burns, incisions and ulcers.

[0304] A protein of the present invention, which induces cartilage and/or bone growth in circumstances where bone is not normally formed, has application in the healing of bone fractures and cartilage damage or defects in humans and other animals. Such a preparation employing a protein of the invention may have prophylactic use in closed as well as open fracture reduction and also in the improved fixation of artificial joints. De novo bone formation induced by an osteogenic agent contributes to the repair of congenital, trauma induced, or oncologic resection induced craniofacial defects, and also is useful in cosmetic plastic surgery.

[0305] A protein of this invention may also be used in the treatment of periodontal disease, and in other tooth repair processes. Such agents may provide an environment to attract bone-forming cells, stimulate growth of bone-forming cells or induce differentiation of progenitors of bone-forming cells. A protein of the invention may also be useful in the treatment of osteoporosis or osteoarthritis, such as through stimulation of bone and/or cartilage repair or by blocking inflammation or processes of tissue destruction (collagenase activity, osteoclast activity, etc.) mediated by inflammatory processes.

[0306] Another category of tissue regeneration activity that may be attributable to the protein of the present invention is tendon/ligament formation. A protein of the present invention, which induces tendon/ligament-like tissue or other tissue formation in circumstances where such tissue is not normally formed, has application in the healing of tendon or ligament tears, deformities and other tendon or ligament defects in humans and other animals. Such a preparation employing a tendon/ligament-like tissue inducing protein may have prophylactic use in preventing damage to tendon or ligament tissue, as well as use in the improved fixation of tendon or ligament to bone or other tissues, and in repairing defects to tendon or ligament tissue. De novo tendon/ligament-like tissue formation induced by a composition of the present invention contributes to the repair of congenital, trauma induced, or other tendon or ligament defects of other origin, and is also useful in cosmetic plastic surgery for attachment or repair of tendons or ligaments. The compositions of the present invention may provide an environment to attract tendon- or ligament-forming cells, stimulate growth of tendon- or ligament-forming cells, induce differentiation of progenitors of tendon- or ligament-forming cells, or induce growth of tendon/ligament cells or progenitors ex vivo for return in vivo to effect tissue repair. The compositions of the invention may also be useful in the treatment of tendonitis, carpal tunnel syndrome and other tendon or ligament defects. The compositions may also include an appropriate matrix and/or sequestering agent as a career as is well known in the art.

[0307] The protein of the present invention may also be useful for proliferation of neural cells and for regeneration of nerve and brain tissue, i.e. for the treatment of central and peripheral nervous system diseases and neuropathies, as well as mechanical and traumatic disorders, which involve degeneration, death or trauma to neural cells or nerve tissue. More specifically, a protein may be used in the treatment of diseases of the peripheral nervous system, such as peripheral nerve injuries, peripheral neuropathy and localized neuropathies, and central nervous system diseases, such as Alzheimer's, Parkinson's disease, Huntington's disease, amyotrophic lateral sclerosis, and Shy-Drager syndrome. Further conditions which may be treated in accordance with the present invention include mechanical and traumatic disorders, such as spinal cord disorders, head trauma and cerebrovascular diseases such as stroke. Peripheral neuropathies resulting from chemotherapy or other medical therapies may also be treatable using a protein of the invention.

[0308] Proteins of the invention may also be useful to promote better or faster closure of non-healing wounds, including without limitation pressure ulcers, ulcers associated with vascular insufficiency, surgical and traumatic wounds, and the like.

[0309] It is expected that a protein of the present invention may also exhibit activity for generation or regeneration of other tissues, such as organs (including, for example, pancreas, liver, intestine, kidney, skin, endothelium), muscle (smooth, skeletal or cardiac) and vascular (including vascular endothelium) tissue, or for promoting the growth of cells comprising such tissues. Part of the desired effects may be by inhibition or modulation of fibrotic scarring to allow normal tissue to regenerate. A protein of the invention may also exhibit angiogenic activity.

[0310] A protein of the present invention may also be useful for gut protection or regeneration and treatment of lung or liver fibrosis, reperfusion injury in various tissues, and conditions resulting from systemic cytokine damage.

[0311] A protein of the present invention may also be useful for promoting or inhibiting differentiation of tissues described above from precursor tissues or cells; or for inhibiting the growth of tissues described above.

[0312] The activity of a protein of the invention may, among other means, be measured by the following methods:

[0313] Assays for tissue generation activity include, without limitation, those described in: International Patent Publication No. WO95/16035 (bone, cartilage, tendon); International Patent Publication No. WO95/05846 (nerve, neuronal); International Patent Publication No. WO91/07491 (skin, endothelium).

[0314] Assays for wound healing activity include, without limitation, those described in: Winter, Epidermal Wound Healing, pp. 71-112 (Maibach and Rovee, eds.), Year Book Medical Publishers, Inc., Chicago, as modified by Eaglstein and Menz, J Invest. Dermatol 71:382-84 (1978).

[0315] Activin/Inhibin Activity

[0316] A GENX protein of the present invention may also exhibit activin- or inhibin-related activities. Inhibins are characterized by their ability to inhibit the release of follicle stimulating hormone (FSH), while activins and are characterized by their ability to stimulate the release of follicle stimulating hormone (FSH). Thus, a protein of the present invention, alone or in heterodimers with a member of the inhibin a family, may be useful as a contraceptive based on the ability of inhibins to decrease fertility in female mammals and decrease spermatogenesis in male mammals. Administration of sufficient amounts of other inhibins can induce infertility in these mammals. Alternatively, the protein of the invention, as a homodimer or as a heterodimer with other protein subunits of the inhibin-b group, may be useful as a fertility inducing therapeutic, based upon the ability of activin molecules in stimulating FSH release from cells of the anterior pituitary. See, for example, U.S. Pat. No. 4,798,885. A protein of the invention may also be useful for advancement of the onset of fertility in sexually immature mammals, so as to increase the lifetime reproductive performance of domestic animals such as cows, sheep and pigs.

[0317] The activity of a protein of the invention may, among other means, be measured by the following methods:

[0318] Assays for activin/inhibin activity include, without limitation, those described in: Vale et al., Endocrinology 91:562-572, 1972; Ling et al., Nature 321:779-782, 1986; Vale et al., Nature 321:776-779, 1986; Mason et al., Nature 318:659-663, 1985; Forage et al., Proc Natl Acad Sci USA 83:3091-3095, 1986.

[0319] Chemotactic/Chemokinetic Activity

[0320] A protein of the present invention may have chemotactic or chemokinetic activity (e.g., act as a chemokine) for mammalian cells, including, for example, monocytes, fibroblasts, neutrophils, T-cells, mast cells, eosinophils, epithelial and/or endothelial cells. Chemotactic and chemokinetic proteins can be used to mobilize or attract a desired cell population to a desired site of action. Chemotactic or chemokinetic proteins provide particular advantages in treatment of wounds and other trauma to tissues, as well as in treatment of localized infections. For example, attraction of lymphocytes, monocytes or neutrophils to tumors or sites of infection may result in improved immune responses against the tumor or infecting agent.

[0321] A protein or peptide has chemotactic activity for a particular cell population if it can stimulate, directly or indirectly, the directed orientation or movement of such cell population. Preferably, the protein or peptide has the ability to directly stimulate directed movement of cells. Whether a particular protein has chemotactic activity for a population of cells can be readily determined by employing such protein or peptide in any known assay for cell chemotaxis.

[0322] The activity of a protein of the invention may, among other means, be measured by following methods:

[0323] Assays for chemotactic activity (which will identify proteins that induce or prevent chemotaxis) consist of assays that measure the ability of a protein to induce the migration of cells across a membrane as well as the ability of a protein to induce the adhesion of one cell population to another cell population. Suitable assays for movement and adhesion include, without limitation, those described in: Current Protocols in Immunology, Coligan et al., eds. (Chapter 6.12, Measurement of Alpha and Beta Chemokines 6.12.1-6.12.28); Taub et al. J Clin Invest 95:1370-1376, 1995; Lind et al. APMIS 103:140-146, 1995; Muller et al., Eur J Immunol 25: 1744-1748; Gruberet al. J Immunol 152:5860-5867, 1994; Johnston et al., J Immunol 153: 1762-1768, 1994.

[0324] Hemostatic and Thrombolytic Activity

[0325] A protein of the invention may also exhibit hemostatic or thrombolytic activity. As a result, such a protein is expected to be useful in treatment of various coagulation disorders (including hereditary disorders, such as hemophilias) or to enhance coagulation and other hemostatic events in treating wounds resulting from trauma, surgery or other causes. A protein of the invention may also be useful for dissolving or inhibiting formation of thromboses and for treatment and prevention of conditions resulting therefrom (such as, for example, infarction of cardiac and central nervous system vessels (e.g., stroke).

[0326] The activity of a protein of the invention may,: among other means, be measured by the following methods:

[0327] Assay for hemostatic and thrombolytic activity include, without limitation, those described in: Linet et al., J Clin. Pharmacol. 26:131-140, 1986; Burdick et al., Thrombosis Res. 45:413-419, 1987; Humphrey et al., Fibrinolysis 5:71-79 (1991); Schaub, Prostaglandins 35:467-474, 1988.

[0328] Receptor/Ligand Activity

[0329] A protein of the present invention may also demonstrate activity as receptors, receptor ligands or inhibitors or agonists of receptor/ligand interactions. Examples of such receptors and ligands include, without limitation, cytokine receptors and their ligands, receptor kinases and their ligands, receptor phosphatases and their ligands, receptors involved in cell-cell interactions and their ligands (including without limitation, cellular adhesion molecules (such as selectins, integrins and their ligands) and receptor/ligand pairs involved in antigen presentation, antigen recognition and development of cellular and humoral immune responses). Receptors and ligands are also useful for screening of potential peptide or small molecule inhibitors of the relevant receptor/ligand interaction. A protein of the present invention (including, without limitation, fragments of receptors and ligands) may themselves be useful as inhibitors of receptor/ligand interactions.

[0330] The activity of a protein of the invention may, among other means, be measured by the following methods:

[0331] Suitable assays for receptor-ligand activity include without limitation those described in: Current Protocols in Immunology, Ed by Coligan, et al., Greene Publishing Associates and Wiley-Interscience (Chapter 7.28, Measurement of Cellular Adhesion under static conditions 7.28.1-7.28.22), Takai et al., Proc Natl Acad Sci USA 84:6864-6868, 1987; Bierer et al., J. Exp. Med. 168:1145-1156, 1988; Rosenstein et al., J Exp. Med. 169:149-160 1989; Stoltenborg et al., J Immunol Methods 175:59-68, 1994; Stitt et al., Cell 80:661-670, 1995.

[0332] Anti-Inflammatory Activity

[0333] Proteins of the present invention may also exhibit anti-inflammatory activity. The anti-inflammatory activity may be achieved by providing a stimulus to cells involved in the inflammatory response, by inhibiting or promoting cell-cell interactions (such as, for example, cell adhesion), by inhibiting or promoting chemotaxis of cells involved in the inflammatory process, inhibiting or promoting cell extravasation, or by stimulating or suppressing production of other factors which more directly inhibit or promote an inflammatory response. Proteins exhibiting such activities can be used to treat inflammatory conditions including chronic or acute conditions), including without limitation inflammation associated with infection (such as septic shock, sepsis or systemic inflammatory response syndrome (SIRS)), ischemia-reperfusion injury, endotoxin lethality, arthritis, complement-mediated hyperacute rejection, nephritis, cytokine or chemokine-induced lung injury, inflammatory bowel disease, Crohn's disease or resulting from over production of cytokines such as TNF or IL-1. Proteins of the invention may also be useful to treat anaphylaxis and hypersensitivity to an antigenic substance or material.

[0334] Tumor Inhibition Activity

[0335] In addition to the activities described above for immunological treatment or prevention of tumors, a protein of the invention may exhibit other anti-tumor activities. A protein may inhibit tumor growth directly or indirectly (such as, for example, via ADCC). A protein may exhibit its tumor inhibitory activity by acting on tumor tissue or tumor precursor tissue, by inhibiting formation of tissues necessary to support tumor growth (such as, for example, by inhibiting angiogenesis), by causing production of other factors, agents or cell types which inhibit tumor growth, or by suppressing, eliminating or inhibiting factors,.agents or cell types which promote tumor growth.

[0336] Other Activities

[0337] A protein of the invention may also exhibit one or more of the following additional activities or effects: inhibiting the growth, infection or function of, or killing, infectious agents, including, without limitation, bacteria, viruses, fingi and other parasites; effecting (suppressing or enhancing) bodily characteristics, including, without limitation, height, weight, hair color, eye color, skin, fat to lean ratio or other tissue pigmentation, or organ or body part size or shape (such as, for example, breast augmentation or diminution, change in bone form or shape); effecting biorhythms or circadian cycles or rhythms; effecting the fertility of male or female subjects; effecting the metabolism, catabolism, anabolism, processing, utilization, storage or elimination of dietary fat, lipid, protein, carbohydrate, vitamins, minerals, cofactors or other nutritional factors or component(s); effecting behavioral characteristics, including, without limitation, appetite, libido, stress, cognition (including cognitive disorders), depression (including depressive disorders) and violent behaviors; providing analgesic effects or other pain reducing effects; promoting differentiation and growth of embryonic stem cells in lineages other than hematopoietic lineages; hormonal or endocrine activity; in the case of enzymes, correcting deficiencies of the enzyme and treating deficiency-related diseases; treatment of hyperproliferative disorders (such as, for example, psoriasis); immunoglobulin-like activity (such as, for example, the ability to bind antigens or complement); and the ability to act as an antigen in a vaccine composition to raise an immune response against such protein or another material or entity which is cross-reactive with such protein.

[0338] Neural disorders in general include Parkinson's disease, Alzheimer's disease, Huntington's disease, multiple sclerosis, amyotrophic lateral sclerosis (ALS), peripheral neuropathy, tumors of the nervous system, exposure to neurotoxins, acute brain injury, peripheral nerve trauma or injury, and other neuropathies, epilepsy, and/or tremors.

### EQUIVALENTS

[0339] From the foregoing detailed description of the specific embodiments of the invention, it should be apparent that particular novel compositions and methods involving nucleic acids, polypeptides, antibodies, detection and treatment have been described. Although these particular embodiments have been disclosed herein in detail, this has been done by way of example for purposes of illustration only, and is not intended to be limiting with respect to the scope of the appended claims that follow. In particular, it is contemplated by the inventors that various substitutions, alterations, and modifications may be made as a matter of routine for a person of ordinary skill in the art to the invention without departing from the spirit and scope of the invention as defined by the claims. Indeed, various modifications of the invention in addition to those described herein will become apparent to those skilled in the art from the foregoing description and accompanying figures. Such modifications are intended to fall within the scope of the appended claims.

TABLE 1

| Entry | Sequence Id | Protein Similarity | Protein Domain | Protein Classification | Tissue Expression |
|---|---|---|---|---|---|
| 1 | 13089485 (1957, 1958) | Novel Protein sim. GBank gi\|113764\|sp\|P25718\|AMY1_ECOLI-ALPHA- | | amylase | 1020 |
| | | AMYLASE PRECURSOR (1,4-ALPHA-D-GLUCAN | | | |
| | | GLUCANOHYDROLASE) | | | |
| 2 | 9862020 (493, 494) | Novel Protein sim. GBank gi\|2127400\|pir\|\|S65770 - maltooligosyltrehalose | | amylase | 1006 |
| | | trehalohydrolase - Arthrobacter sp. (strain Q36) | | | |
| 3 | 78963176 (609, 610) | Novel Protein sim. GBank gi\|4580331\|emb\|CAB40107.1\| - (AJ001206) | | amylase | 1024, 1038 |
| | | putative glycogen debranching enzyme [Streptomyces coellcolor] | | | |
| 4 | 19646712 (803, 804) | Novel Protein sim. GBank gi\|728851\|sp\|Q05884\|AMY_STRLI - ALPHA- | | amylase | 1008 |
| | | AMYLASE PRECURSOR (1,4-ALPHA-D-GLUCAN | | | |
| | | GLUCANOHYDROLASE) | | | |
| 5 | 80218543 (5115, 5116) | Novel Protein sim. GBank gi\|266398\|sp\|P01088\|ITRF_MAIZE - | | amylaseinhib | 1002, 1003, 1006, 1007, |
| | | TRYPSIN/FACTOR XIIA INHIBITOR PRECURSOR (HAGEMAN FACTOR | | | 1020, 1022, 1024, 1031 |
| | | INHIBITOR) (CHFI) | | | |
| 6 | 36996488 (6391, 6392) | Novel Protein sim. GBank gi\|4757752\|ref\|NP_004664.1\|pANGP - | Contains protein domain | angiopoietin | 1001, 1003 |
| | | angiopoietin 3 | (PF00147) - Fibrinogen beta and | | |
| | | | gamma chains, C-terminal | | |
| | | | globular domain | | |
| 7 | 19507966 (3275, 3276) | Novel Protein sim. GBank gi\|135809\|sp\|P18292\|THRB_RAT - | Contains protein domain | apolipoprotein | 1022 |
| | | PROTHROMBIN PRECURSOR | (PF00051) - Kringle domain | | |
| 8 | 78748816 (1433, 1434) | Novel Protein sim. GBank gi\|91984\|pir\|\|A24700 - apolipoprotein A-I | | apolipoprotein | 1041 |
| | | precursor - rat | | | |
| 9 | 65864934 (509, 510) | Novel Protein sim. GBank gi\|1449179\|dbj\|BAA13101\| - (D86506) N- | Contains protein domain | ATPase_associated | 1014 |
| | | ethylmaleimide sensitive fusion protein [Nicotiana tabacum] | (PF00004) - ATPases associated | | |
| | | | with various cellular activities | | |
| | | | (AAA) | | |
| 10 | 16835471 (1903, 1904) | Novel Protein sim. GBank gi\|295644 (J04421) - ATPase [Saccharomyces | Contains protein domain | ATPase_associated | 1015 |
| | | cerevislae] | (PF00122) - E1-E2 ATPase | | |
| 11 | 78669846 (6615, 6616) | Novel Protein sim. GBank gi\|295644 (J04421) - ATPase [Saccharomyces | Contains protein domain | ATPase_associated | 1007 |
| | | cerevislae] | (PF00122) - E1-E2 ATPase | | |
| 12 | 78696296 (219, 220) | Novel Protein sim. GBank gi\|417496\|sp\|P33158\|PMGY_STRCO - | Contains protein domain | ATPase_associated | 1015 |
| | | PHOSPHOGLYCERATE MUTASE (PHOSPHOGLYCEROMUTASE) | (PF00300) - Phosphoglycerate | | |
| | | (PGAM) (BPG-DEPENDENT PGAM) | mutase family | | |
| 13 | 78895589 (5555, 5556) | Novel Protein sim. GBank gi\|549614\|sp\|P36137\|YK24_YEAST - | Contains protein domain | ATPase_associated | 1015, 1036 |
| | | HYPOTHETICAL 51.0 KD PROTEIN IN GAP1-NAP1 INTERGENIC | (PF00300) - Phosphoglycerate | | |
| | | REGION | mutase family | | |
| 14 | 57303171 (5323, 5324) | Novel Protein sim. GBank gi\|1854476\|dbj\|BAA07458.1\| - (D38380) | Contains protein domain | ATPase_associated | 1003, 1004, 1006, 1007, |
| | | transferrin [Rattus norvegicus] | (PF00405) - Transferrin | | 1020, 1024 |
| 15 | 80248523 (3455, 3456) | Novel Protein sim. GBank gi\|2326751\|emb\|CAB10965\| - (Z98268) | Contains protein domain | ATPase_associated | 1002, 1004, 1008, 1020, |
| | | hypothetical protein Rv1708 [Mycobacterium tuberculosis] | (PF00991) - ParA family ATPase | | 1022, 1028, 1031, 1036 |
| 16 | 29202483 (2287, 2288) | Novel Protein sim. GBank gi\|124205\|sp\|P09064\|IF2B_YEAST - | | ATPase_associated | 1004, 1020, 1021, 1022, |
| | | EUKARYOTIC TRANSLATION INITIATION FACTOR 2 BETA SUBUNIT | | | 1031 |
| | | EIF-2-BETA | | | |
| 17 | 80237817 (1631, 1632) | Novel Protein sim. GBank gi\|171544 (M34709) - pot. ORF; putative | | ATPase_associated | 1004, 1006, 1022, 1035 |
| | | [Saccharomyces cerevisiae] | | | |
| 18 | 79874660 (4591, 4592) | Novel Protein sim. GBank gi\|1730836\|sp\|P23503\|YNY0_YEAST - | | ATPase_associated | 1001 |
| | | HYPOTHETICAL 54.2 KD PROTEIN IN ZWF1-BLH1/LAP3 INTERGENIC | | | |
| | | REGION | | | |
| 19 | 79829954 (1169, 1170) | Novel Protein sim. GBank gi\|2131333\|pir\|\|S67642 - hypothetical protein | | ATPase_associated | 1006, 1007, 1015, 1036 |
| | | YDL100c - yeast (Saccharomyces cerevisiae) | | | |
| 20 | 27838931 (7009, 7010) | Novel Protein sim. GBank gi\|2132688\|pir\|\|S64942 - probable membrane | | ATPase_associated | 1002, 1004, 1020, 1022, |
| | | protein YLR106c - yeast (Saccharomyces cerevisiae) | | | 1031 |
| 21 | 23308866 (1159, 1160) | Novel Protein sim. GBank gi\|2654870 (AF015302) - RbohAOsp [Oryza | | ATPase_associated | 1050 |
| | | sativa] | | | |
| 22 | 71229404 (5033, 5034) | Novel Protein sim. GBank gi\|2668599 (AF012537) - ATPase | | ATPase_associated | 1000 |
| | | [Pseudomonas aeruginosa] | | | |
| 23 | 80496778 (7757, 7758) | Novel Protein sim. GBank gi\|2895095 (AF011337) - putative E1-E2 | | ATPase_associated | 1002, 1006, 1008, 1010, |
| | | ATPase [Mus musculus] | | | 1041 |
| 24 | 20290015 (2341, 2342) | Novel Protein sim. GBank gi\|4585584\|emb\|CAB40852.1\| - (AL049628) | | ATPase_associated | 1031 |
| | | putative DNA-binding protein [Streptomyces coelicolor] | | | |
| 25 | 9945091 (4139, 4140) | Novel Protein sim. GBank gi\|461975\|sp\|P34036\|DYHC_DICDI - DYNEIN | | ATPase_associated | 1015 |
| | | HEAVY CHAIN, CYTOSOLIC (DYHC) | | | |
| 26 | 17940495 (4187, 4188) | Novel Protein sim. GBank gi\|465495\|sp\|P33595\|YABN_ECOLI - | | ATPase_associated | 1036 |
| | | HYPOTHETICAL 63.9 KD PROTEIN IN TBPA-LEUD INTERGENIC | | | |
| | | REGION (ORF103) | | | |
| 27 | 56285913 (1495, 1496) | Novel Protein sim. GBank gi\|4982470\|gb\|AAD31036.2\|AF14193 - | | ATPase_associated | 1002 |
| | | (AF141934) sodium bicarbonate cotransporter NBC1 [Mus musculus] | | | |
| 28 | 78963164 (8137, 8138) | Novel Protein sim. GBank gi\|4982470\|gb\|AAD31036.2\|AF14193 - | | ATPase_associated | 1022, 1027 |
| | | (AF141934) sodium bicarbonate cotransporter NBC1 [Mus musculus] | | | |
| 29 | 95105757 (7549, 7550) | Novel Protein sim. GBank gi\|5174779\|gb\|AAD40696.1\| - (U87804) 50 kDa | | ATPase_associated | 1008 |
| | | protein [Caulobacter crescentus] | | | |
| 30 | 50098031 (7163, 7164) | Novel Protein sim. GBank gi\|687204 (U03973) - dynein heavy chain | | ATPase_associated | 1033 |
| | | isotype 4 [Tripneustes gratilla] | | | |
| 31 | 80053071 (8477, 8478) | Novel Protein sim. GBank gi\|807957\|emb\|CAA89222\| - (Z49259) unknown | | ATPase_associated | 1001, 1003, 1007, 1015, |
| | | [Saccharomyces cerevisiae] | | | 1023, 1028, 1035 |
| 32 | 85813960 (6501, 6502) | Novel Protein sim. GBank gi\|118353\|sp\|P13187\|DCOA_KLEPN - | | biotindep | 1051 |
| | | OXALOACETATE DECARBOXYLASE ALPHA CHAIN | | | |
| 33 | 95104899 (3489, 3490) | Novel Protein sim. GBank gi\|1345960\|sp\|P33450\|FAT_DROME - | Contains protein domain | cadherin | 1004, 1007, 1008, 1046 |
| | | CADHERIN-RELATED TUMOR SUPPRESSOR PRECURSOR (FAT | (PF00028) - Cadherin domain | | |
| | | PROTEIN) | | | |
| 34 | 34405797 (565, 566) | Novel Protein sim. GBank gi\|2764994\|emb\|CAA69965\| - (Y08715) | Contains protein domain | cadherin | 1051 |
| | | vascular cadherin-2 [Mus musculus] | (PF00028) - Cadherin domain | | |
| 35 | 87898594 (6959, 6960) | Novel Protein sim. GBank gi\|1825710 (U88183) - ZK377.2 gene product | Contains protein domain | cadherin | 1013 |
| | | [Caenorhabditis elegans] | (PF00047) - Immunoglobulin | | |
| | | | domain | | |
| 36 | 80032194 (8345, 8346) | Novel Protein sim. GBank gi\|1345960\|sp\|P33450\|FAT_DROME - | | cadherin | 1050 |
| | | CADHERIN-RELATED TUMOR SUPPRESSOR PRECURSOR (FAT | | | |
| | | PROTEIN) | | | |
| 37 | 23209902 (3369, 3370) | Novel Protein sim. GBank gi\|2137142\|pir\|\|I61186 - alpha-7 integrin - | | cadherin | 1002 |
| | | mouse | | | |
| 38 | 8367741 (1853, 1854) | Novel Protein sim. GBank gi\|3095102 (AF043257) - beta5B integrin [Mus | | cadherin | 1008 |
| | | musculus] | | | |
| 39 | 79811289 (1929, 1930) | Novel Protein sim. GBank gi\|3122261\|sp\|Q12522\|IF6_YEAST - | | cadherin | 1006 |
| | | EUKARYOTIC TRANSLATION INITIATION FACTOR 6 (EIF-6) | | | |
| 40 | 78780522 (4215, 4216) | Novel Protein sim. GBank gi\|423613\|pir\|\|A46052 - vascular cell adhesion | | cadherin | 1020 |
| | | molecule 1, GPI-anchored splice form - mouse | | | |
| 41 | 78902729 (2379, 2380) | Novel Protein sim. GBank gi\|466085\|sp\|P34616\|YOG7_CAEEL - | | cadherin | 1006 |
| | | HYPOTHETICAL 375.7 KD PROTEIN ZK112.7 PRECURSOR IN | | | |
| | | CHROMOSOME III | | | |
| 42 | 29226009 (3259, 3260) | Novel Protein sim. GBank gi\|5456975\|gb\|AAD43730.1\| - (AF152336) | | cadherin | 1051 |
| | | protocadherin gamma B7 [Homo sapiens] | | | |
| 43 | 11090708 (8653, 8654) | Novel Protein sim. GBank gi\|902358\|emb\|CAA61165\| - (X87941) ORF | | calcium_channel | 1004 |
| | | 857 [Saccharomyces cerevisiae] | | | |
| 44 | 56945240 (1213, 1214) | Novel Protein sim. GBank gi\|515236\|pdb\|1PYD\|A - Saccharomyces | Contains protein domain | carboxylase | 1002, 1022, 1036 |
| | | bayanus | (PF00205) - Thiamine | | |
| | | | pyrophosphate enzymes | | |
| 45 | 78916253 (7447, 7448) | Novel Protein sim. GBank gi\|585765\|sp\|P32327\|PYC2_YEAST - | Contains protein domain | carboxylase | 1006, 1036 |
| | | PYRUVATE CARBOXYLASE 2 (PYRUVIC CARBOXYLASE 2) (PCB 2) | (PF00289) - Carbamoyl- | | |
| | | | phosphate synthase (CPSase) | | |
| 46 | 79829360 (1891, 1892) | Novel Protein sim. GBank gi\|2145998\|pir\|\|S73055 - pyc protein - | Contains protein domain | carboxylase | 1041 |
| | | Mycobacterium tuberculosis | (PF00364) - Biotin-requiring | | |
| | | | enzymes | | |
| 47 | 80503126 (6595, 6596) | Novel Protein sim. GBank gi\|1850108\|emb\|CAB06690\| - (Z86089) | | carboxylase | 1004, 1006, 1008, 1010, |
| | | hypothetical protein Rv0263c [Mycobacterium tuberculosis] | | | 1015, 1021, 1022, 1025, |
| | | | | | 1028, 1035 |
| 48 | 20725040 (8787, 8788) | Novel Protein sim. GBank gi\|2506124\|sp\|P08193\|ACCD_ECOLI - | | carboxylase | 1022 |
| | | ACETYL-COENZYME A CARBOXYLASE CARBOXYL TRANSFERASE | | | |
| | | SUBUNIT BETA | | | |
| 49 | 19881269 (2869, 2870) | Novel Protein sim. GBank gi\|2749948 (U94697) - propionyl-CoA | | carboxylase | 1031 |
| | | carboxylase beta chain homolog [Caulobacter crescentus] | | | |
| 50 | 37035436 (7151, 7152) | Novel Protein sim. GBank gi\|5019761\|gb\|AAD37851.1\|AF12642 - | | carboxylase | 1010 |
| | | (AF126429) JadJ [Streptomyces venezuelae] | | | |
| 51 | 8491135 (8343, 8344) | Novel Protein sim. GBank gi\|137120\|sp\|P11214\|UROT_MOUSE - | Contains protein domain | cathepsin | 1031 |
| | | TISSUE PLASMINOGEN ACTIVATOR PRECURSOR (TPA) (T- | (PF00051) - Kringle domain | | |
| | | PLASMINOGEN ACTIVATOR) | | | |
| 52 | 78478107 (1485, 1486) | Novel Protein sim. GBank gi\|4210355\|emb\|CAA18442\| - (AL022314) | Contains protein domain | cathepsin | 1002 |
| | | dJ1170K4.2 (novel Trypsin family protein with class A LDL receptor | (PF00089) - Trypsin | | |
| | | domains) [Homo sapiens] | | | |
| 53 | 57302877 (5459, 5460) | Novel Protein sim. GBank gi\|4506153\|ref\|NP_002764.1\|pPRSS - | Contains protein domain | cathepsin | 1004, 1007, 1024, 1041 |
| | | protease, serine, 8 (prostasin) | (PF00089) - Trypsin | | |
| 54 | 80239316 (6353, 6354) | Novel Protein sim. GBank gi\|134734\|sp\|P05044\|SORC_CRILO - SORCIN | | cathepsin | 1004, 1031 |
| | | (22 KD PROTEIN) (CP-22) (V19) | | | |
| 55 | 78753812 (4167, 4168) | Novel Protein sim. GBank gi\|1708879\|sp\|P51885\|LUM_MOUSE - | Contains protein domain | collagen | 1002 |
| | | LUMICAN PRECURSOR (LUM) (KERATAN SULFATE | (PF00560) - Leucine Rich Repeat | | |
| | | PROTEOGLYCAN) | | | |
| 56 | 77651711 (1825, 1826) | Novel Protein sim. GBank gi\|1705570\|sp\|P51942\|CAMA_MOUSE - | | collagen | 1035 |
| | | CARTILAGE MATRIX PROTEIN PRECURSOR (MATRILIN-1) | | | |
| 57 | 90936827 (1257, 1258) | Novel Protein sim. GBank gi\|387115 (M15832) - type IV collagen alpha-1 | | collagen | 1018 |
| | | [Mus musculus] | | | |
| 58 | 95419866 (2131, 2132) | Novel Protein sim. GBank gi\|4539386\|emb\|CAB37452.1\| - (AL035526) | | collagen | 1006, 1015, 1021, 1035, |
| | | extensin-like protein [Arabidopsis thaliana] | | | 1036, 1041, 1051 |
| 59 | 86380200 (5865, 5866) | Novel Protein sim. GBank gi\|4704417\|gb\|AAD28083.1\| - (AF056183) WS | | collagen | 1050 |
| | | beta-transducin repeats protein [Homo sapiens] | | | |
| 60 | 20756502 (199, 200) | Novel Protein sim. GBank gi\|765323\|bbs\|157676 - (S74439) silk fibroin | | collagen | 1020 |
| | | heavy chain (C-terminal) [Bombyx mori = silkworms, Peptide Partial, 633 | | | |
| | | aa] [Bombyx mori] | | | |
| 61 | 10297625 (1933, 1934) | | | collagen | 1023 |
| 62 | 95314273 (3611, 3612) | | | collagen | 1006, 1026, 1031, 1041 |
| 63 | 81953722 (8775, 8776) | Novel Protein sim. GBank gi\|204657 (K01933) - preprohaptoglobin | Contains protein domain | complement | 1007, 1008, 1014, 1020, |
| | | [Rattus norvegicus] | (PF00089) - Trypsin | | 1024, 1036 |
| 64 | 78835967 (3681, 3682) | Novel Protein sim. GBank gi\|116597\|sp\|P01026\|CO3_RAT - | Contains protein domain | complement | 1007 |
| | | COMPLEMENT C3 PRECURSOR (CONTAINS: C3A ANAPHYLATOXIN) | (PF00207) - Alpha-2- | | |
| | | | macroglobulin family | | |
| 65 | 90936839 (3791, 3792) | Novel Protein sim. GBank gi\|116597\|sp\|P01026\|CO3_RAT - | Contains protein domain | complement | 1004, 1008, 1015, 1018, |
| | | COMPLEMENT C3 PRECURSOR (CONTAINS: C3A ANAPHYLATOXIN) | (PF00207) - Alpha-2- | | 1020, 1024 |
| | | | macroglobulin family | | |
| 66 | 8522842 (1871, 1872) | Novel Protein sim. GBank gi\|116608\|sp\|P06684\|CO5_MOUSE - | Contains protein domain | complement | 1031 |
| | | COMPLEMENT C5 PRECURSOR (CONTAINS: C5A ANAPHYLATOXIN) | (PF00207) - Alpha-2- | | |
| | | | macroglobulin family | | |
| 67 | 8522050 (5503, 5504) | Novel Protein sim. GBank gi\|112893\|sp\|P14046\|A1I3_RAT - ALPHA-1- | Contains protein domain | complement | 1003 |
| | | INHIBITOR III PRECURSOR | (PF01835) - Alpha-2- | | |
| | | | macroglobulin family N-terminal | | |
| | | | region | | |
| 68 | 52563488 (3181, 3182) | Novel Protein sim. GBank gi\|129701\|sp\|P15873\|PCNA_YEAST - | | cyclin | 1002 |
| | | PROLIFERATING CELL NUCLEAR ANTIGEN (PCNA) | | | |
| 69 | 20738462 (1821, 1822) | Novel Protein sim. GBank gi\|1345736\|sp\|P20437\|CG11_YEAST - G1/S- | | cyclin | 1031 |
| | | SPECIFIC CYCLIN CLN1 | | | |
| 70 | 94143356 (5979, 5980) | Novel Protein sim. GBank gi\|117245\|sp\|P12939\|CPD5_RAT - | Contains protein domain | cyto450 | 1008, 1031 |
| | | CYTOCHROME P450 2D5 (CYPIID5) (P450-DB5) (P450-CMF1B) | (PF00067) - Cytochrome P450 | | |
| | | (DEBRISOQUINE 4-HYDROXYLASE) | | | |
| 71 | 29459361 (317, 318) | Novel Protein sim. GBank gi\|117254\|sp\|P24461 \|CPG1_RABIT - | Contains protein domain | cyto450 | 1020 |
| | | CYTOCHROME P450 2G1 (CYPIIG1) (P450-NMB) (OLFACTIVE) | (PF00067) - Cytochrome P450 | | |
| 72 | 16835554 (2401, 2402) | Novel Protein sim. GBank gi\|1706098\|sp\|P51590\|CPJ3_RAT - | Contains protein domain | cyto450 | 1015 |
| | | CYTOCHROME P450 2J3 (CYPIIJ3) | (PF00067) - Cytochrome P450 | | |
| 73 | 71228838 (7637, 7638) | Novel Protein sim. GBank gi\|2117409\|pir\|\|I49625 - testosterone 16a- | Contains protein domain | cyto450 | 1006, 1014, 1020 |
| | | hydroxylase type b - mouse | (PF00067) - Cytochrome P450 | | |
| 74 | 29246103 (1343, 1344) | Novel Protein sim. GBank gi\|2760837\|gb\|AAB95305.1\| - (AC003105) | Contains protein domain | cyto450 | 1007 |
| | | putative cytochrome P450 [Arabidopsis thaliana] | (PF00067) - Cytochrome P450 | | |
| 75 | 65460027 (6215, 6216) | Novel Protein sim. GBank gi\|320081\|pir\|\|A34272 - testosterone 7 alpha- | Contains protein domain | cyto450 | 1051 |
| | | hydroxylase (EC 1.14.14.—) cytochrome P450 2A1 - rat | (PF00067) - Cytochrome P450 | | |
| 76 | 25170872 (2171, 2172) | Novel Protein sim. GBank gi\|498858 (U09734) - testosterone 6-beta- | Contains protein domain | cyto450 | 1003, 1007 |
| | | hydroxylase [Rattus norvegicus] | (PF00067) - Cytochrome P450 | | |
| 77 | 8489815 (7075, 7076) | Novel Protein sim. GBank gi\|1421741 (U54770) - cytochrome P450 | | cyto450 | 1031 |
| | | homolog [Lycopersicon esculentum] | | | |
| 78 | 38927279 (1693, 1694) | Novel Protein sim. GBank gi\|4587057\|dbj\|BAA76602.1\| - (AB018596) | | cyto450 | 1006 |
| | | sterol 12-alpha hydroxylase [Rattus norvegicus] | | | |
| 96 | 78516862 (4847, 4848) | Novel Protein sim. GBank gi\|729306\|sp\|P06773\|DCTD_YEAST - | | deaminase | 1007 |
| | | DEOXYCYTIDYLATE DEAMINASE (DCMP DEAMINASE) | | | |
| 97 | 9367144 (3133, 3134) | Novel Protein sim. GBank gi\|2497263\|sp\|Q51375\|LEU3_PSEAE - 3- | Contains protein domain | dehydrogenase | 1015 |
| | | ISOPROPYLMALATE DEHYDROGENASE (BETA-IPM | (PF00180) - Isocitrate and | | |
| | | DEHYDROGENASE) (IMDH) (3-IPM-DH) | isopropylmalate dehydrogenases | | |
| 98 | 85530525 (7209, 7210) | Novel Protein sim. GBank gi\|3790552 (AF069035) - isocitrate | Contains protein domain | dehydrogenase | 1035 |
| | | dehydrogenase [Coxiella bumetii] | (PF00180) - Isocitrate and | | |
| | | | isopropylmalate dehydrogenases | | |
| 99 | 66396086 (4085, 4086) | Novel Protein sim. GBank gi\|4033783\|sp\|P42958\|YCSA_BACSU - | Contains protein domain | dehydrogenase | 1006 |
| | | HYPOTHETICAL 33.1 KD PROTEIN IN MTLD-SIPU INTERGENIC | (PF00180) - Isocitrate and | | |
| | | REGION | isopropylmalate dehydrogenases | | |
| 100 | 13022417 (2971, 2972) | Novel Protein sim. GBank gi\|1477946\|bbs\|177171 - (S81735) leucine | Contains protein domain | dehydrogenase | 1022 |
| | | dehydrogenase (EC 1.4.1.9) [Bacillus licheniformls, TSN9, Peptide, 364 | (PF00208) - | | |
| | | aa] [Bacillus licheniformis] | Glutamate/Leucine/Phenylalanine/ | | |
| | | | Valine dehydrogenase | | |
| 101 | 80249569 (1309, 1310) | Novel Protein sim. GBank gi\|322228\|pir\|\|S32227 - glutamate | Contains protein domain | dehydrogenase | 1004, 1051 |
| | | dehydrogenase (NADP+) (EC 1.4.1.4) - Corynebacterium glutamicum | (PF00208) - | | |
| | | | Glutamate/Leucine/Phenylalanine/ | | |
| | | | Valine dehydrogenase | | |
| 102 | 25261707 (2575, 2576) | Novel Protein sim. GBank gi\|3947740\|emb\|CAA77186\| - (Y18476) NADH | Contains protein domain | dehydrogenase | 1006 |
| | | dehydrogenase subunit 2 [Trichophyton rubrum] | (PF00361) - NADH- | | |
| | | | Ubiquinone/plastoquinone | | |
| | | | (complex I), various chains | | |
| 103 | 80083230 (2743, 2744) | Novel Protein sim. GBank gi\|1352619\|sp\|P19262\|ODO2_YEAST - | Contains protein domain | dehydrogenase | 1001, 1006, 1008, 1014, |
| | | DIHYDROLIPOAMIDE SUCCINYLTRANSFERASE COMPONENT OF 2- | (PF00364) - Biotin-requiring | | 1015, 1022, 1041 |
| | | OXOGLUTARATE DEHYDROGENASE COMPLEX PRECURSOR (E2) | enzymes | | |
| 104 | 82133796 (4013, 4014) | Novel Protein sim. GBank gi\|2132191\|pir\|\|S62008 - hypothetical protein | Contains protein domain | dehydrogenase | 1002, 1003, 1004, 1006, |
| | | YPL113c - yeast (Saccharomyces cerevisiae) | (PF00389) - D-isomer specific 2- | | 1014, 1020, 1024, 1031, |
| | | | hydroxyacid dehydrogenases | | 1041 |
| 105 | 27983417 (5005, 5006) | Novel Protein sim. GBank gi\|2708656 (AF037440) - D-3- | Contains protein domain | dehydrogenase | 1006 |
| | | phosphoglycerate dehydrogenase [Edwardsiella ictaluri] | (PF00389) - D-isomer specific 2- | | |
| | | | hydroxyacid dehydrogenases | | |
| 106 | 80080941 (8083, 8064) | Novel Protein sim. GBank gi\|3122346\|sp\|Q59642\|LDHD_PEDAC - D- | Contains protein domain | dehydrogenase | 1031 |
| | | LACTATE DEHYDROGENASE (D-LDH) | (PF00389) - D-Isomer specific 2- | | |
| | | | hydroxyacid dehydrogenases | | |
| 107 | 82442962 (6449, 6450) | Novel Protein sim. GBank gi\|3123275\|sp\|P35136\|SERA_BACSU - D-3- | Contains protein domain | dehydrogenase | 1001, 1020, 1025, 1031 |
| | | PHOSPHOGLYCERATE DEHYDROGENASE (PGDH) | (PF00389) - D-isomer specific 2- | | |
| | | | hydroxyacid dehydrogenases | | |
| 108 | 14218605 (5049, 5050) | Novel Protein sim. GBank gi\|4155559 (AE001527) - D-3- | Contains protein domain | dehydrogenase | 1050 |
| | | PHOSPHOGLYCERATE DEHYDROGENASE [Helicobacter pylori J99] | (PF00389) - D-Isomer specific 2- | | |
| | | | hydroxyacid dehydrogenases | | |
| 109 | 94745539 (8077, 8078) | Novel Protein sim. GBank gi\|205294 (M26594) - malic enzyme [Rattus | Contains protein domain | dehydrogenase | 1002 |
| | | norvegicus] | (PF00390) - Malic enzyme | | |
| 110 | 17673515 (8729, 8730) | Novel Protein sim. GBank gi\|3047125 (AF058919) - No definition line | Contains protein domain | dehydrogenase | 1006 |
| | | found [Arabidopsis thaliana] | (PF00390) - Malic enzyme | | |
| 111 | 12997849 (7605, 7606) | Novel Protein sim. GBank gi\|581228\|emb\|CAA39419\| - (X55956) | Contains protein domain | dehydrogenase | 1025 |
| | | altemative [Escherichia coli] | (PF00390) - Malic enzyme | | |
| 112 | 47656812 (3459, 3460) | Novel Protein sim. GBank gi\|1321895\|emb\|CAA63250\| - (X92503) gnd | Contains protein domain | dehydrogenase | 1026 |
| | | [Mycobacterium smegmatis] | (PF00393) - 6-phosphogluconate | | |
| | | | dehydrogenases | | |
| 113 | 39554838 (5427, 5428) | Novel Protein sim. GBank gi\|2117216\|emb\|CAB09054\| - (Z95585) gnd2 | Contains protein domain | dehydrogenase | 1036 |
| | | [Mycobacterium tuberculosis] | (PF00393) - 6-phosphogluconate | | |
| | | | dehydrogenases | | |
| 114 | 82443593 (4667, 4668) | Novel Protein sim. GBank gi\|2829816\|sp\|P95171\|NUOK_MYCTU - NADH | Contains protein domain | dehydrogenase | 1001, 1004, 1010, 1020, |
| | | DEHYDROGENASE I CHAIN K (NADH-UBIQUINONE | (PF00420) - NADH- | | 1022, 1031 |
| | | OXIDOREDUCTASE CHAIN 11) (NUO11) | ubiquinone/plastoquinone | | |
| | | | oxidoreductase chain 4L | | |
| 115 | 80419176 (2053, 2054) | Novel Protein sim. GBank gi\|1877329\|emb\|CAB07077\| - (Z92771) fadE25 | Contains protein domain | dehydrogenase | 1002, 1003, 1004, 1008, |
| | | [Mycobacterium tuberculosis] | (PF00441) - Acyl-CoA | | 1015, 1020, 1022, 1023, |
| | | | dehydrogenase | | 1031, 1050 |
| 116 | 79633434 (8485, 8486) | Novel Protein sim. GBank gi\|1073456\|pir\|\|S47810 - probable alcohol | Contains protein domain | dehydrogenase | 1036 |
| | | dehydrogenase (EC 1.1.1.1) - Escherichia coli | (PF00465) - Iron-containing | | |
| | | | alcohol dehydrogenases | | |
| 117 | 21427080 (6543, 6544) | Novel Protein sim. GBank gi\|1732040 (U55016) - alcohol dehydrogenase | Contains protein domain | dehydrogenase | 1020 |
| | | [Actinobacillus pleuropneumoniae] | (PF00465) - Iron-containing | | |
| | | | alcohol dehydrogenases | | |
| 118 | 80409743 (603, 604) | Novel Protein sim. GBank gi\|5459404\|emb\|CAB50762.1\| - (AL096839) | Contains protein domain | dehydrogenase | 1001, 1003, 1004, 1014, |
| | | putative glucose-6-phosphate 1-dehydrogenase [Streptomyces coelicolor] | (PF00479) - Glucose-6-phosphate | | 1020, 1022, 1024, 1026 |
| | | | dehydrogenase | | |
| 119 | 80060092 (6903, 6904) | Novel Protein sim. GBank gi\|1708477\|sp\|P50095\|IMH2_YEAST - | Contains protein domain | dehydrogenase | 1020, 1041 |
| | | PROBABLE INOSINE-5′-MONOPHOSPHATE DEHYDROGENASE (IMP | (PF00571) - CBS domain | | |
| | | DEHYDROGENASE) (IMPDH) (IMPD) | | | |
| 120 | 87454335 (4901, 4902) | Novel Protein sim. GBank gi\|5104022\|dbj\|BAA79338.1\| - (AP000059) | Contains protein domain | dehydrogenase | 1002, 1023, 1055 |
| | | 147aa long hypothetical protein [Aeropyrum pemix] | (PF00571) - CBS domain | | |
| 121 | 79489230 (6997, 6998) | Novel Protein sim. GBank gi\|3242279\|emb\|CAA16667\| - (AL021646) nuoL | Contains protein domain | dehydrogenase | 1035, 1036 |
| | | [Mycobacterium tuberculosis] | (PF00662) - NADH-Ubiquinone | | |
| | | | oxidoreductase (complex I), chain | | |
| | | | 5 N-terminus | | |
| 122 | 79624876 (785, 786) | Novel Protein sim. GBank gi\|231993\|sp\|Q00711\|DHSA_YEAST - | Contains protein domain | dehydrogenase | 1004, 1041 |
| | | SUCCINATE DEHYDROGENASE (UBIQUINONE) FLAVOPROTEIN | (PF00890) - FAD binding domain | | |
| | | SUBUNIT PRECURSOR (FP) (FLAVOPROTEIN SUBUNIT OF COMPLEX | | | |
| | | II) | | | |
| 123 | 20292751 (8493, 8494) | Novel Protein sim. GBank gi\|3329036 (AE001330) - Succinate | Contains protein domain | dehydrogenase | 1031 |
| | | Dehydrogenase [Chlamydia trachomatis] | (PF00890) - FAD binding domain | | |
| 124 | 20617170 (7759, 7760) | Novel Protein sim. GBank gi\|2506955\|sp\|P33601\|NUOE_ECOLI - NADH | Contains protein domain | dehydrogenase | 1003 |
| | | DEHYDROGENASE I CHAIN E (NADH-UBIQUINONE | (PF01257) - Respiratory-chain | | |
| | | OXIDOREDUCTASE CHAIN 5) (NUO5) | NADH dehydrogenase 24 Kd | | |
| | | | subunit | | |
| 125 | 20695817 (8371, 8372) | Novel Protein sim. GBank gi\|1041092 (L48550) - methylmalonic acid | | dehydrogenase | 1031 |
| | | semialdehyde dehydrogenase [Streptomyces coelicolor] | | | |
| 126 | 78484712 (515, 516) | Novel Protein sim. GBank gi\|1076668\|pir\|\|S52261 - NADH dehydrogenase | | dehydrogenase | 1024 |
| | | (EC 1.6.99.3) - potato | | | |
| 127 | 46850827 (3627, 3628) | Novel Protein sim. GBank gi\|1169602\|sp\|P45382\|FADH_PARDE - | | dehydrogenase | 1026 |
| | | GLUTATHIONE-DEPENDENT FORMALDEHYDE DEHYDROGENASE | | | |
| | | (FDH) (FALDH) (GD-FALDH) | | | |
| 128 | 25306971 (3101, 3102) | Novel Protein sim. GBank gi\|1170799\|sp\|P46454\|LLDD_HAEIN - L- | | dehydrogenase | 1020 |
| | | LACTATE DEHYDROGENASE (CYTOCHROME) | | | |
| 129 | 13526472 (2345, 2346) | Novel Protein sim. GBank gi\|1172706\|sp\|P45107\|PTA_HAEIN - | | dehydrogenase | 1025 |
| | | PHOSPHATE ACETYLTRANSFERASE (PHOSPHOTRANSACETYLASE) | | | |
| 130 | 80029007 (5997, 5998) | Novel Protein sim. GBank gi\|120777\|sp\|P25526\|GABD_ECOLI - | | dehydrogenase | 1004, 1017 |
| | | SUCCINATE-SEMIALDEHYDE DEHYDROGENASE (NADP+) (SSDH) | | | |
| 131 | 78805052 (8239, 8240) | Novel Protein sim. GBank gi\|1223606\|emb\|CAA65298\| - (X96434) moxR | | dehydrogenase | 1014 |
| | | [Borrelia burgdorferi] | | | |
| 132 | 5621309 (2895, 2896) | Novel Protein sim. GBank gi\|123178\|sp\|P24226\|HISX_BRAOC - | | dehydrogenase | 1055 |
| | | HISTIDINOL DEHYDROGENASE, CHLOROPLAST PRECURSOR (HDH) | | | |
| 133 | 79398232 (3271, 3272) | Novel Protein sim. GBank gi\|1262198 (U39263) - proline dehydrogenase | | dehydrogenase | 1004 |
| | | [Agrobacterium tumefaciens] | | | |
| 134 | 79580022 (5545, 5546) | Novel Protein sim. GBank gi\|128741\|sp\|P03910\|NU4M_BOVIN - NADH- | | dehydrogenase | 1008 |
| | | UBIQUINONE OXIDOREDUCTASE CHAIN 4 | | | |
| 135 | 5496494 (5075, 5076) | Novel Protein sim. GBank gi\|1346120\|sp\|P49095\|GCSP_YEAST - | | dehydrogenase | 1055 |
| | | GLYCINE DEHYDROGENASE (DECARBOXYLATING) PRECURSOR | | | |
| | | (GLYCINE DECARBOXYLASE) (GLYCINE CLEAVAGE SYSTEM P- | | | |
| | | PROTEIN) | | | |
| 136 | 66404023 (6207, 6208) | Novel Protein sim. GBank gi\|146177 (M20938) - glycerol-3-phosphate | | dehydrogenase | 1020 |
| | | dehydrogenase subunit A [Escherichia coli] | | | |
| 137 | 25264259 (2187, 2188) | Novel Protein sim. GBank gi\|1652865\|dbj\|BAA17783\| - (D90909) NADH | | dehydrogenase | 1002 |
| | | dehydrogenase [Synechocystis sp.] | | | |
| 138 | 80249306 (1565, 1566) | Novel Protein sim. GBank gi\|1658402 (U73807) - formate dehydrogenase | | dehydrogenase | 1004, 1020, 1028, 1039 |
| | | beta subunit [Moorella thermoacetica] | | | |
| 139 | 11100223 (3499, 3500) | Novel Protein sim. GBank gi\|1706887\|sp\|P51696\|FOLD_PHOPO - | | dehydrogenase | 1020 |
| | | METHYLENETETRAHYDROFOLATE DEHYDROGENASE/ | | | |
| | | METHENYLTETRAHYDROFOLATE CYCLOHYDROLASE | | | |
| 140 | 19881142 (8387, 8388) | Novel Protein sim. GBank gi\|1707879\|sp\|P54261\|GCST_SYNY3 - | | dehydrogenase | 1031 |
| | | PROBABLE AMINOMETHYL TRANSFERASE (GLYCINE CLEAVAGE | | | |
| | | SYSTEM T PROTEIN) | | | |
| 141 | 29463275 (7459, 7460) | Novel Protein sim. GBank gi\|1710631\|sp\|P55006\|ROH3_RAT - RETINOL | | dehydrogenase | 1020 |
| | | DEHYDROGENASE TYPE III (RODH III) | | | |
| 142 | 86475450 (2047, 2048) | Novel Protein sim. GBank gi\|1723372\|sp\|Q01333\|YCR4_ERWHE - | | dehydrogenase | 1045 |
| | | HYPOTHETICAL 11.2 KD PROTEIN IN CRTE 3′REGION (ORF4) | | | |
| 143 | 9524765 (7755, 7756) | Novel Protein sim. GBank gi\|1730163\|sp\|P51009\|G3P_XANFL - | | dehydrogenase | 1031 |
| | | GLYCERALDEHYDE 3-PHOSPHATE DEHYDROGENASE (GAPDH) | | | |
| 144 | 87456832 (6409, 6410) | Novel Protein sim. GBank gi\|1848283 (U87982) - Sorghum bicolor | | dehydrogenase | 1023 |
| | | aldehyde dehydrogenase (Dha1) mRNA, partial sequence | | | |
| 145 | 33202157 (3629, 3630) | Novel Protein sim. GBank gi\|2108268\|emb\|CAA63467\| - (X92868) NADP- | | dehydrogenase | 1024 |
| | | dependent alcohol dehydrogenase [Bacillus subtilis] | | | |
| 146 | 11070327 (8561, 8562) | Novel Protein sim. GBank gi\|2121110\|pir\|\|I69649 - dTDP-6-deoxy-L- | | dehydrogenase | 1022 |
| | | mannose-dehydrogenase - Escherichia coli | | | |
| 147 | 11355842 (8171, 8172) | Novel Protein sim. GBank gi\|2144098\|pir\|\|I56573 - SC2 - rat | | dehydrogenase | 1055 |
| 148 | 79182952 (7731, 7732) | Novel Protein sim. GBank gi\|2493994\|sp\|Q47945\|CYCA_GLUSU - | | dehydrogenase | 1003 |
| | | ALCOHOL DEHYDROGENASE CYTOCHROME C SUBUNIT | | | |
| | | PRECURSOR (CYTOCHROME C-553) (C553) (G3-ADH SUBUNIT II) | | | |
| 149 | 25165320 (5447, 5448) | Novel Protein sim. GBank gi\|2498413\|sp\|Q48485\|GLF1_KLEPN - | | dehydrogenase | 1002 |
| | | PROBABLE UDP-GALACTOPYRANOSE MUTASE | | | |
| 150 | 56307045 (1285, 1286) | Novel Protein sim. GBank gi\|2498557\|sp\|P77580\|MHPF_ECOLI - | | dehydrogenase | 1002, 1015, 1021 |
| | | ACETALDEHYDE DEHYDROGENASE (ACETALDEHYDE | | | |
| | | DEHYDROGENASE [ACETYLATING]) | | | |
| 151 | 79603387 (7911, 7912) | Novel Protein sim. GBank gi\|2578379\|emb\|CAA15464\| - (AL008609) | | dehydrogenase | 1031 |
| | | glycine dehydrogenase (decarboxylating) [Mycobacterium leprae] | | | |
| 152 | 80248682 (6327, 6328) | Novel Protein sim. GBank gi\|2624302\|emb\|CAA15575\| - (AL008967) aid | | dehydrogenase | 1004, 1008, 1010, 1028, |
| | | [Mycobacterium tuberculosis] | | | 1031 |
| 153 | 30422405 (2133, 2134) | Novel Protein sim. GBank gi\|2661213 (U89280) - oxidative 17 beta | | dehydrogenase | 1006 |
| | | hydroxysteroid dehydrogenase type 6 [Rattus norvegicus] | | | |
| 154 | 94315307 (4067, 4068) | Novel Protein sim. GBank gi\|2695834\|emb\|CAA15904\| - (AL021006) sucA | | dehydrogenase | 1003, 1007, 1008, 1021, |
| | | [Mycobacterium tuberculosis] | | | 1022, 1031, 1036 |
| 155 | 95289134 (1589, 1590) | Novel Protein sim. GBank gi\|2894186\|emb\|CAA11792.1\| - (AJ223999) | | dehydrogenase | 1003, 1004, 1008, 1022, |
| | | PCZA363.1 [Amycolatopsis orientalis] | | | 1036 |
| 156 | 44985946 (5867, 5868) | Novel Protein sim. GBank gi\|2894212\|emb\|CAA17075.1\| - (AL021841) | | dehydrogenase | 1026 |
| | | IpdA [Mycobacterium tuberculosis] | | | |
| 157 | 80027352 (6859, 6860) | Novel Protein sim. GBank gi\|2909538\|emb\|CAA17417\| - (AL021933) | | dehydrogenase | 1004, 1023, 1031 |
| | | hypothetical protein Rv0462 [Mycobacterium tuberculosis] | | | |
| 158 | 80217428 (6011, 6012) | Novel Protein sim. GBank gi\|297922\|emb\|CAA46852\| - (X66052) D- | | dehydrogenase | 1008, 1010, 1020, 1022, |
| | | lactate dehydrogenase (cytochrome) [Saccharomyces cerevisiae] | | | 1028 |
| 159 | 27362878 (7839, 7840) | Novel Protein sim. GBank gi\|297922\|emb\|CAA46852\| - (X66052) D- | | dehydrogenase | 1020 |
| | | lactate dehydrogenase (cytochrome) [Saccharomyces cerevisiae] | | | |
| 160 | 80306398 (5203, 5204) | Novel Protein sim. GBank gi\|2995297\|emb\|CAA18326\| - (AL022268) | | dehydrogenase | 1000, 1002, 1003, 1004, |
| | | hypothetical protein SC4H2.10c [Streptomyces coelicolor] | | | 1006, 1008, 1010, 1020, |
| | | | | | 1023, 1025, 1026, 1031, |
| | | | | | 1035, 1036 |
| 161 | 13085569 (3485, 3486) | Novel Protein sim. GBank gi\|3121992\|sp\|P81178\|DHAM_MESAU - | | dehydrogenase | 1025 |
| | | ALDEHYDE DEHYDROGENASE, MITOCHONDRIAL (CLASS 2) (ALDH1) | | | |
| | | (ALDH-E2) | | | |
| 162 | 11385242 (4991, 4992) | Novel Protein sim. GBank gi\|3122213\|sp\|O26327\|HISX_METTH - | | dehydrogenase | 1014 |
| | | HISTIDINOL DEHYDROGENASE (HDH) | | | |
| 163 | 12904364 (7385, 7386) | Novel Protein sim. GBank gi\|3122572\|sp\|Q43644\|NUAM_SOLTU - NADH- | | dehydrogenase | 1028, 1047 |
| | | UBIQUINONE OXIDOREDUCTASE 75 KD SUBUNIT PRECURSOR | | | |
| | | (COMPLEX I-75 KD) (CI-75 KD) (76 KD MITOCHONDRIAL COMPLEX I | | | |
| | | SUBUNIT) | | | |
| 164 | 87896233 (6323, 6324) | Novel Protein sim. GBank gi\|3273341\|dbj\|BAA31212\| - (AB015756) | | dehydrogenase | 1013 |
| | | succinate dehydrogenase flavoprotein subunit [Rhodospirillum rubrum] | | | |
| 165 | 27831414 (5715, 5716) | Novel Protein sim. GBank gi\|3879684\|emb\|CAA98524\| - (Z74042) | | dehydrogenase | 1003 |
| | | predicted using Genefinder; Similarity to Haemophilus 3-oxoacyl-(acyl- | | | |
| | | carrier protein) reductase (SW; FABG_HAEIN); cDNA EST yk470b2.3 | | | |
| | | comes from this gene; cDNA EST yk470b2.5 comes from this gene | | | |
| | | [Caenorhabditis elegans] | | | |
| 166 | 46857309 (7981, 7982) | Novel Protein sim. GBank gi\|3914212\|sp\|P97608\|OPLA_RAT - 5- | | dehydrogenase | 1000 |
| | | OXOPROLINASE (5-OXO-L-PROLINASE) (PYROGLUTAMASE) (5- | | | |
| | | OPASE) | | | |
| 167 | 78367967 (2079, 2080) | Novel Protein sim. GBank gi\|3928680\|gb\|AAC79659\| - (AF068264) NAD+ | | dehydrogenase | 1041 |
| | | dependent acetaldehyde dehydrogenase [Pseudomonas aeruginosa] | | | |
| 168 | 56151069 (639, 640) | Novel Protein sim. GBank gi\|4154555 (AE001444) - Proline/pyrroline-5- | | dehydrogenase | 1041 |
| | | carboxylate dehydrogenase [Helicobacter pylori J99] | | | |
| 169 | 10856009 (4565, 4566) | Novel Protein sim. GBank gi\|4512377\|dbj\|BAA75341.1\| - (AB011837) | | dehydrogenase | 1001 |
| | | sorbitol dehydrogenase [Bacillus halodurans] | | | |
| 170 | 17673620 (8087, 8088) | Novel Protein sim. GBank gi\|4574121\|gb\|AAD23901.1\|AF00941 - | | dehydrogenase | 1006 |
| | | (AF009415) choline dehydrogenase [Staphylococcus xylosus] | | | |
| 171 | 11122707 (1669, 1670) | Novel Protein sim. GBank gi\|464254\|sp\|P34942\|NUDM_BOVIN - NADH- | | dehydrogenase | 1031 |
| | | UBIQUINONE OXIDOREDUCTASE 42 KD SUBUNIT PRECURSOR | | | |
| | | (COMPLEX I-42 KD) (CI-42 KD) | | | |
| 172 | 20430075 (8617, 8618) | Novel Protein sim. GBank gi\|4835329\|emb\|CAB42951.1\| - (AL049863) | | dehydrogenase | 1008 |
| | | putative dehydrogenase/reductase [Streptomyces coelicolor] | | | |
| 173 | 66314518 (8277, 8278) | Novel Protein sim. GBank gi\|4894690\|gb\|AAD32592.1\|AF12672 - | | dehydrogenase | 1014 |
| | | (AF126720) homoserine dehydrogenase [Mycobacterium smegmatis] | | | |
| 174 | 35819353 (2899, 2900) | Novel Protein sim. GBank gi\|4982213\|gb\|AAD36707.1\|AE00180 - | | dehydrogenase | 1014 |
| | | (AE001806) glutamate synthase, beta subunit [Thermotoga maritima] | | | |
| 175 | 80059042 (6813, 6814) | Novel Protein sim. GBank gi\|5042272\|emb\|CAB44526.1\| - (AL078618) | | dehydrogenase | 1022 |
| | | nuoF, NADH dehydrogenase subunit [Streptomyces coelicolor] | | | |
| 176 | 19523405 (4467, 4468) | Novel Protein sim. GBank gi\|5042273\|emb\|CAB44527.1\| - (AL078618) | | dehydrogenase | 1020 |
| | | nuoE, NADH dehydrogenase subunit [Streptomyces coelicolor] | | | |
| 177 | 80248762 (1519, 1520) | Novel Protein sim. GBank gi\|5042274\|emb\|CAB44528.1\| - (AL078618) | | dehydrogenase | 1004, 1021, 1023, 1041, |
| | | nuoD, NADH dehydrogenase subunit [Streptomyces coelicolor] | | | 1046 |
| 178 | 80079093 (165, 166) | Novel Protein sim. GBank gi\|5139562\|emb\|CAB45580.1\| - (AL079355) | | dehydrogenase | 1031 |
| | | putative glutathione-dependent aldehyde dehydrogenase [Streptomyces | | | |
| | | coelicolor] | | | |
| 179 | 20285943 (1751, 1752) | Novel Protein sim. GBank gi\|544104\|sp\|Q02861\|CRTI_MYXXA - | | dehydrogenase | 1031 |
| | | PHYTOENE DEHYDROGENASE (PHYTOENE DESATURASE) | | | |
| 180 | 11686851 (8753, 8754) | Novel Protein sim. GBank gi\|5441779\|emb\|CAB46803.1\| - (AL096811) | | dehydrogenase | 1028 |
| | | putative alcohol dehydrogenase (zinc-binding) [Streptomyces coelicolor | | | |
| | | A3(2)] | | | |
| 181 | 52561186 (7085, 7086) | Novel Protein sim. GBank gi\|5459146\|emb\|CAB50632.1\| - (AJ248288) | | dehydrogenase | 1004, 1010, 1028 |
| | | PAB1214 [Pyrococcus abyssl] | | | |
| 182 | 29002226 (321, 322) | Novel Protein sim. GBank gi\|5508821\|gb\|AAD43988.1\|U59485_- | | dehydrogenase | 1036 |
| | | (U59485) AttK [Agrobacterium tumefaciens] | | | |
| 183 | 82448116 (6627, 6628) | Novel Protein sim. GBank gi\|584729\|sp\|P38113\|ADH5_YEAST - | | dehydrogenase | 1001, 1002, 1004, 1006, |
| | | ALCOHOL DEHYDROGENASE V | | | 1021, 1022, 1031, 1036 |
| 184 | 54995204 (7321, 7322) | Novel Protein sim. GBank gi\|585754\|sp\|P24217\|PTFA_ECOLI - PTS | | dehydrogenase | 1026 |
| | | SYSTEM, FRUCTOSE-SPECIFIC IIA/FPR COMPONENT (EIIA-FRU) | | | |
| | | (FRUCTOSE-PERMEASE IIA/FPR COMPONENT) | | | |
| | | (PHOSPHOTRANSFERASE ENZYME II, A/FPR COMPONENT) | | | |
| | | (PHOSPHOTRANSFERASE FPR PROTEIN) (PSEUDO-HPR) (EIII-FRU) | | | |
| | | (FRUCTOSE PTS DIPHO . . . | | | |
| 185 | 11073062 (8759, 8760) | Novel Protein sim. GBank gi\|699253 (U15183) - lipoamide dehydrogenase | | dehydrogenase | 1031 |
| | | [Mycobacterium leprae] | | | |
| 186 | 80478752 (5455, 5456) | Novel Protein sim. GBank gi\|731294\|sp\|P39713\|YAG1_YEAST - | | dehydrogenase | 1002, 1004, 1006, 1010, |
| | | HYPOTHETICAL ZINC-TYPE ALCOHOL DEHYDROGENASE-LIKE | | | 1020, 1021, 1024, 1031, |
| | | PROTEIN IN GDH3-CNE1 INTERGENIC REGION | | | 1041 |
| 187 | 86464887 (1413, 1414) | Novel Protein sim. GBank gi\|757827\|emb\|CAA86041\| - (Z37980) 5- | | dehydrogenase | 1026 |
| | | carboxy-2-hydroxymuconate semialdehyde dehydrogenase [Escherichia | | | |
| | | coli] | | | |
| 188 | 23307700 (1189, 1190) | Novel Protein sim. GBank gi\|1169601\|sp\|P46312\|FD6C_ARATH - | Contains protein domain | desaturase | 1015 |
| | | OMEGA-6 FATTY ACID DESATURASE, CHLOROPLAST PRECURSOR | (PF00487) - Fatty acid desaturase | | |
| 189 | 29000956 (7711, 7712) | Novel Protein sim. GBank gi\|1345970\|sp\|P48620\|FD3C_SESIN - OMEGA- | Contains protein domain | desaturase | 1015 |
| | | 3 FATTY ACID DESATURASE, CHLOROPLAST PRECURSOR | (PF00487) - Fatty acid desaturase | | |
| 190 | 28846340 (2499, 2500) | Novel Protein sim. GBank gi\|4240305\|dbj\|BAA74931.1\| - (AB020715) | | desaturase | 1024 |
| | | KIAA0908 protein [Homo sapiens] | | | |
| 191 | 35893288 (1739, 1740) | Novel Protein sim. GBank gi\|253181\|bbs\|110564 - NSR1=nucleolin | Contains protein domain | dna_ma_bind | 1050 |
| | | homolog [Saccharomyces cerevisiae, Peptide, 249 aa] | (PF00076) - RNA recognition | | |
| | | | motif. (a.k.a. RRM, RBD, or RNP | | |
| | | | domain) | | |
| 192 | 82460888 (5623, 5624) | Novel Protein sim. GBank gi\|1723819\|sp\|P53186\|YGD4_YEAST - | Contains protein domain | dna_ma_bind | 1001, 1004, 1006, 1021, |
| | | HYPOTHETICAL 13.6 KD PROTEIN IN MIG1-AGA2 INTERGENIC | (PF00096) - Zinc finger, C2H2 | | 1035 |
| | | REGION | type | | |
| 193 | 80039350 (5571, 5572) | Novel Protein sim. GBank gi\|2315332 (AF016437) - contains similarity to | Contains protein domain | dna_ma_bind | 1022, 1031 |
| | | a C2H2-type zinc finger [Caenorhabditis elegans] | (PF00096) - Zinc finger, C2H2 | | |
| | | | type | | |
| 194 | 27932691 (1633, 1634) | Novel Protein sim. GBank gi\|2645674 (AF031955) - krupple-related zinc | Contains protein domain | dna_ma_bind | 1003 |
| | | finger protein [Mus musculus] | (PF00096) - Zinc finger, C2H2 | | |
| | | | type | | |
| 195 | 80500321 (6689, 6690) | Novel Protein sim. GBank gi\|3437\|emb\|CAA39084\| - (X55442) MIG1 | Contains protein domain | dna_ma_bind | 1001, 1002, 1003, 1004, |
| | | [Saccharomyces cerevisiae] | (PF00096) - Zinc finger, C2H2 | | 1006, 1007, 1008, 1010, |
| | | | type | | 1015, 1020, 1021, 1022, |
| | | | | | 1024, 1028, 1031, 1036, |
| | | | | | 1041 |
| 196 | 33202227 (4465, 4466) | Novel Protein sim. GBank gi\|3808293 (AF072440) - nitrogen regulatory | Contains protein domain | dna_ma_bind | 1024 |
| | | protein [Enterobacter gergoviae] | (PF00158) - Sigma-54 | | |
| | | | transcription factors | | |
| 197 | 78761151 (8025, 8026) | Novel Protein sim. GBank gi\|729736\|sp\|P40619\|HMGL_PHANI - HMG1/2- | Contains protein domain | dna_ma_bind | 1015 |
| | | LIKE PROTEIN | (PF00505) - HMG (high mobility | | |
| | | | group) box | | |
| 198 | 80206269 (845, 846) | Novel Protein sim. GBank gi\|1082703\|pir\|\|S52491 - polyadenylate binding | | dna_ma_bind | 1031 |
| | | protein II - human | | | |
| 199 | 21146786 (471, 472) | Novel Protein sim. GBank gi\|1199536\|emb\|CAA64900\| - (X95644) ORF | | dna_ma_bind | 1020, 1055 |
| | | 2310 [Saccharomyces cerevisiae] | | | |
| 200 | 13517837 (1395, 1396) | Novel Protein sim. GBank gi\|131639\|sp\|P15639\|PUR9_ECOLI - | | dna_ma_bind | 1022 |
| | | PHOSPHORIBOSYLAMINOIMIDAZOLECARBOXAMIDE | | | |
| | | FORMYLTRANSFERASE (AICAR TRANSFORMYLASE)/IMP | | | |
| | | CYCLOHYDROLASE (INOSINICASE) (IMP SYNTHETASE) (ATIC) | | | |
| 201 | 27805718 (6373, 6374) | Novel Protein sim. GBank gi\|133144\|sp\|P25299\|RN15_YEAST - MRNA 3′- | | dna_ma_bind | 1003 |
| | | END PROCESSING PROTEIN RNA15 | | | |
| 202 | 78754079 (6227, 6228) | Novel Protein sim. GBank gi\|172372 (M58728) - DNA-binding protein | | dna_ma_bind | 1006 |
| | | [Saccharomyces cerevisiae] | | | |
| 203 | 10246066 (5745, 5746) | Novel Protein sim. GBank gi\|1723880\|sp\|P53152\|YGI7_YEAST - | | dna_ma_bind | 1004 |
| | | HYPOTHETICAL 15.5 KD PROTEIN IN MFAL2-MAD1 INTERGENIC | | | |
| | | REGION | | | |
| 204 | 78670380 (5097, 5098) | Novel Protein sim. GBank gi\|2072966 (U93570) - p40 [Homo sapiens] | | dna_ma_bind | 1024 |
| 205 | 20465780 (5303, 5304) | Novel Protein sim. GBank gi\|2506359\|sp\|P36659\|CBPA_ECOLI - | | dna_ma_bind | 1008 |
| | | CURVED DNA-BINDING PROTEIN | | | |
| 206 | 32291638 (7925, 7926) | Novel Protein sim. GBank gi\|3510645 (AF051348) - putative REX-2 [Mus | | dna_ma_bind | 1000 |
| | | musculus] | | | |
| 207 | 88098784 (8799, 8800) | Novel Protein sim. GBank gi\|4115925 (AF118222) - contains similarity to | | dna_ma_bind | 1022, 1023 |
| | | RNA recognition motifs (Pfam: PF00076, Score=5.5e−23, N=2) | | | |
| | | [Arabidopsis thaliana] | | | |
| 208 | 10885749 (733, 734) | Novel Protein sim. GBank gi\|4455696\|emb\|CAB36671\| - (AL035500) | | dna_ma_bind | 1022 |
| | | putative phosphoribosylaminoimidazolecarboxamide formyltransferase | | | |
| | | [Mycobacterium leprae] | | | |
| 209 | 10886522 (1471, 1472) | Novel Protein sim. GBank gi\|480289\|pir\|\|S36629 - polypyrimidine tract- | | dna_ma_bind | 1020 |
| | | binding protein - rat (fragment) | | | |
| 210 | 57295904 (5235, 5236) | Novel Protein sim. GBank gi\|5052081\|gb\|AAD38426.1\|AF08256 - | | dna_ma_bind | 1020 |
| | | (AF082568) zinc finger type transcription factor MZF-3 [Mus musculus] | | | |
| 211 | 80049357 (3737, 3738) | Novel Protein sim. GBank gi\|116230\|sp\|P28598\|CH60_BACSU - 60 KD | Contains protein domain | eph | 1006, 1008, 1015 |
| | | CHAPERONIN (PROTEIN CPN60) (GROEL PROTEIN) | (PF00118) - TCP-1/cpn60 | | |
| | | | chaperonin family | | |
| 212 | 79199664 (6883, 6884) | Novel Protein sim. GBank gi\|2980899\|dbj\|BAA25207\| - (AB008137) | Contains protein domain | eph | 1022 |
| | | similar to GroEL protein; stress protein [Enterobacter asburiae] | (PF00118) - TCP-1/cpn60 | | |
| | | | chaperonin family | | |
| 213 | 78916267 (287, 288) | Novel Protein sim. GBank gi\|116194\|sp\|P19422\|CH10_COXBU - 10 KD | Contains protein domain | eph | 1036 |
| | | CHAPERONIN (PROTEIN CPN10) (PROTEIN GROES) (HEAT SHOCK | (PF00166) - Chaperonins 10 Kd | | |
| | | PROTEIN A) | subunit | | |
| 214 | 16792310 (3929, 3930) | Novel Protein sim. GBank gi\|2267597 (AF009413) - 10 kDa chaperonin | Contains protein domain | eph | 1041 |
| | | [Oryza sativa] | (PF00166) - Chaperonins 10 Kd | | |
| | | | subunit | | |
| 215 | 20730763 (5597, 5598) | Novel Protein sim. GBank gi\|123726\|sp\|P10413\|HTPG_ECOLI - HEAT | Contains protein domain | eph | 1004 |
| | | SHOCK PROTEIN HTPG (HIGH TEMPERATURE PROTEIN G) (HEAT | (PF00183) - Hsp90 protein | | |
| | | SHOCK PROTEIN C62.5) | | | |
| 216 | 47652740 (7019, 7020) | Novel Protein sim. GBank gi\|298028\|emb\|CAA50548\| - (X71416) TOR2 | Contains protein domain | eph | 1026 |
| | | [Saccharomyces cerevisiae] | (PF00454) - Phosphatidylinositol | | |
| | | | 3-and 4-kinases | | |
| 217 | 27835670 (4727, 4728) | Novel Protein sim. GBank gi\|586048\|sp\|P37297\|STT4_YEAST - | Contains protein domain | eph | 1004 |
| | | PHOSPHATIDYLINOSITOL 4-KINASE STT4 (PI4-KINASE) (PTDINS-4- | (PF00454) - Phosphatidylinositol | | |
| | | KINASE) | 3-and 4-kinases | | |
| 218 | 36852700 (8573, 8574) | Novel Protein sim. GBank gi\|138852\|sp\|P26537\|VL1_HPV5B - MAJOR | Contains protein domain | eph | 1050 |
| | | CAPSID PROTEIN L1 | (PF00500) - L1 (late) protein | | |
| 219 | 27847138 (2963, 2964) | Novel Protein sim. GBank gi\|1778689\|dbj\|BAA07344\| - (D38146) B61 | Contains protein domain | eph | 1003 |
| | | [Mus musculus] | (PF00812) - Ephrin | | |
| 220 | 17226904 (6837, 6838) | Novel Protein sim. GBank gi\|1076758\|pir\|\|S49340 - heat-shock protein | | eph | 1036 |
| | | precursor - rye | | | |
| 221 | 57292707 (2473, 2474) | Novel Protein sim. GBank gi\|134975\|sp\|P15705\|STI1_YEAST - HEAT | | eph | 1002, 1003, 1004, 1020, |
| | | SHOCK PROTEIN STI1 | | | 1022, 1031 |
| 222 | 78391154 (4957, 4958) | Novel Protein sim. GBank gi\|139216\|sp\|P22543\|VP34_YEAST - | | eph | 1024 |
| | | PHOSPHATIDYLINOSITOL 3-KINASE VPS34 (PI3-KINASE) (PTDINS-3- | | | |
| | | KINASE) (PI3K) (VACUOLAR SORTING PROTEIN 34) | | | |
| 223 | 20385928 (6571, 6572) | Novel Protein sim. GBank gi\|2314540\|gb\|AAD08413.1\| - (AE000637) type | | eph | 1003 |
| | | III restriction enzyme M protein (mod) [Helicobacter pylori 26695] | | | |
| 224 | 23227180 (1995, 1996) | Novel Protein sim. GBank gi\|298028\|emb\|CAA50548\| - (X71416) TOR2 | | eph | 1006 |
| | | [Saccharomyces cerevisiae] | | | |
| 225 | 11076446 (1791, 1792) | Novel Protein sim. GBank gi\|3261784\|emb\|CAB08997\| - (Z95558) htpX | | eph | 1008 |
| | | [Mycobacterium tuberculosis] | | | |
| 226 | 10309804 (7423, 7424) | Novel Protein sim. GBank gi\|4001713\|dbj\|BAA35087.1\| - (AB015879) | | eph | 1036 |
| | | DnaK [Porphyromonas gingivalis] | | | |
| 227 | 29346941 (241, 242) | Novel Protein sim. GBank gi\|450880\|emb\|CAA54419\| - (X77199) heat | | eph | 1020 |
| | | shock cognate 70-1 [Arabidopsis thaliana] | | | |
| 228 | 19903931 (1717, 1718) | Novel Protein sim. GBank gi\|462047\|sp\|P34756\|FAB1_YEAST - | | eph | 1004, 1008 |
| | | PROBABLE PHOSPHATIDYLINOSITOL-4-PHOSPHATE 5-KINASE FAB1 | | | |
| | | (1-PHOSPHATIDYLINOSITOL-4-PHOSPHATE KINASE) (PIP5K) | | | |
| | | (PTDINS(4)P-5-KINASE) (DIPHOSPHOINOSITIDE KINASE) | | | |
| 229 | 39371506 (271, 272) | Novel Protein sim. GBank gi\|493719\|dbj\|BAA02869\| - (D13716) ‘multicopy | | eph | 1031 |
| | | suppressor of stt4 mutation (MSS4)’ [Saccharomyces cerevisiae] | | | |
| 230 | 8489130 (5273, 5274) | Novel Protein sim. GBank gi\|729924\|sp\|P39518\|LCF2_YEAST - LONG- | | eph | 1020 |
| | | CHAIN-FATTY-ACID - COA LIGASE 2 (LONG-CHAIN ACYL-COA | | | |
| | | SYNTHETASE 2) (FATTY ACID ACTIVATOR 2) | | | |
| 231 | 79619722 (7805, 7806) | Novel Protein sim. GBank gi\|295642 (L13036) - phospholipase C | Contains protein domain | esterase | 1023 |
| | | [Saccharomyces cerevisiae] | (PF00388) - Phosphatidytlinositol- | | |
| | | | specific phospholipase C, X | | |
| | | | domain | | |
| 232 | 20289969 (5309, 5310) | Novel Protein sim. GBank gi\|1151158 (U43145) - repeat organellar protein | | esterase | 1031 |
| | | [Plasmodium chabaudi] | | | |
| 233 | 14999633 (4685, 4686) | Novel Protein sim. GBank gi\|2619052 (AF027868)—acyl carrier protein | | esterase | 1025 |
| | | phosphodiesterase [Bacillus subtilis] | | | |
| 234 | 79863644 (1899, 1900) | Novel Protein sim. GBank gi\|2895717\|emb\|CAA04932\| - (AJ001694) | | esterase | 1010 |
| | | esterase [Thermotoga maritima] | | | |
| 235 | 71116588 (7275, 7276) | Novel Protein sim. GBank gi\|3445486\|dbj\|BAA32434\| - (AB010428) acyl- | | esterase | 1020, 1031 |
| | | CoA hydrolase [Rattus norvegicus] | | | |
| 236 | 65645802 (5277, 5278) | Novel Protein sim. GBank gi\|3880999\|emb\|CAA16386.1\| - (AL021492) | | esterase | 1038, 1055 |
| | | Y45F10D.11 [Caenorhabditis elegans] | | | |
| 237 | 80248787 (5233, 5234) | Novel Protein sim. GBank gi\|5360854\|dbj\|BAA82224.1\| - (D86934) | | esterase | 1004, 1020, 1021, 1022, |
| | | glycerophosphoryldiester phosphodiesterase [Staphylococcus aureus] | | | 1024 |
| 238 | 42942441 (3449, 3450) | Novel Protein sim. GBank gi\|5689908\|emb\|CAB52071.1\| - (AL109732) | | esterase | 1001 |
| | | putative nucleotidase [Streptomyces coellcolor A3(2)] | | | |
| 239 | 79579759 (9009, 9010) | | | esterase | 1020 |
| 240 | 79574436(799, 800) | Novel Protein sim. GBank gi\|2113986\|emb\|CAB08991\| - (Z95558) hemL | Contains protein domain | gaba | 1028 |
| | | [Mycobacterium tuberculosis] | (PF00202) - Aminotransferases | | |
| | | | class-III pyridoxal-phosphate | | |
| 241 | 80029128 (3813, 3814) | Novel Protein sim. GBank gi\|4007739\|emb\|CAA22423\| - (AL034447) | Contains protein domain | glucoamylase | 1008, 1015, 1020, 1022, |
| | | putative prokaryotic docking protein [Streptomyces coelicolor] | (PF00448) - SRP54-type protein | | 1024, 1031 |
| 242 | 70949031 (5719, 5720) | Novel Protein sim. GBank gi\|584839\|sp\|P05804\|BGLR_ECOLI - BETA- | | glucuronidase | 1026 |
| | | GLUCURONIDASE (GUS) (BETA-D-GLUCURONOSIDE | | | |
| | | GLUCURONOSOHYDROLASE) | | | |
| 243 | 37815363 (5439, 5440) | Novel Protein sim. GBank gi\|2315985 (U83139) - mucin [Rattus | Contains protein domain | glycoprotein | 1055 |
| | | norvegicus] | (PF00007) - Cystine-knot domain | | |
| 244 | 78510710 (2077, 2078) | Novel Protein sim. GBank gi\|1172451\|sp\|Q05793\|PGBM_MOUSE - | Contains protein domain | glycoprotein | 1006 |
| | | BASEMENT MEMBRANE-SPECIFIC HEPARAN SULFATE | (PF00047) - Immunoglobulin | | |
| | | PROTEOGLYCAN CORE PROTEIN PRECURSOR (HSPG) (PERLECAN) | domain | | |
| | | (PLC) | | | |
| 245 | 29443439 (8925, 8926) | Novel Protein sim. GBank gi\|112881\|sp\|P02764\|A1AG_RAT - ALPHA-1- | Contains protein domain | glycoprotein | 1024 |
| | | ACID GLYCOPROTEIN PRECURSOR (OROSOMUCOID) (OMD) | (PF00061) - lipocalin | | |
| 246 | 80241641 (3061, 3062) | Novel Protein sim. GBank gi\|5032197\|ref\|NP_005718.1\|pTSPA - | Contains protein domain | glycoprotein | 1003, 1041 |
| | | tetraspan 1; Tspan-1 | (PF00335) - 4 transmembrane | | |
| | | | segments integral membrane | | |
| | | | proteins | | |
| 247 | 78722615 (3757, 3758) | Novel Protein sim. GBank gi\|28501\|pir\|\|S27879 - secretory protein YM-1 | Contains protein domain | glycoprotein | 1020 |
| | | precursor - mouse | (PF00704) - Glycosyl hydrolases | | |
| | | | family 18 | | |
| 248 | 80068413 (5297, 5298) | Novel Protein sim. GBank gi\|1076802\|pir\|\|S49915 - extensin-like protein- | | glycoprotein | 1031 |
| | | maize | | | |
| 249 | 15001403 (6307, 6308) | Novel Protein sim. GBank gi\|116918\|sp\|P12960\|CONT_MOUSE - | | glycoprotein | 1025 |
| | | CONTACTIN PRECURSOR (NEURAL CELL SURFACE PROTEIN F3) | | | |
| 250 | 10344766 (5399, 5400) | Novel Protein sim. GBank gi\|1169730\|sp\|P42512\|FPTA_PSEAE - FE(III)- | | glycoprotein | 1035 |
| | | PYOCHELIN RECEPTOR PRECURSOR | | | |
| 251 | 65691921 (1673, 1674) | Novel Protein sim. GBank gi\|1172555\|sp\|P42055\|POR4_SOLTU - 34 KD | | glycoprotein | 1007, 1055 |
| | | OUTER MITOCHONDRIAL MEMBRANE PROTEIN PORIN (VOLTAGE- | | | |
| | | DEPENDENT ANION-SELECTIVE CHANNEL PROTEIN) (VDAC) (POM | | | |
| | | 34) | | | |
| 252 | 6419932 (2115, 2116) | Novel Protein sim. GBank gi\|117437\|sp\|P08369\|CRED_ECOLI - INNER | | glycoprotein | 1055 |
| | | MEMBRANE PROTEIN CRED | | | |
| 253 | 80098114 (2265,2266) | Novel Protein sim. GBank gi\|1175955\|sp\|P43553\|ALR2_YEAST - | | glycoprotein | 1003,1007,1015, 1023, |
| | | ALUMINIUM RESISTANCE PROTEIN 2 | | | 1031 |
| 254 | 79793962 (8399, 8400) | Novel Protein sim. GBank gi\|1176192\|sp\|P45420\|YHCD_ECOLI - | | glycoprotein | 1002, 1021, 1036, 1041, |
| | | HYPOTHETICAL OUTER MEMBRANE USHER PROTEIN IN GLTF- | | | 1055 |
| | | NANT INTERGENIC REGION PRECURSOR | | | |
| 255 | 79614536 (1639, 1640) | Novel Protein sim. GBank gi\|119111\|sp\|P12978\|EBN2_EBV - EBNA-2 | | glycoprotein | 1021 |
| | | NUCLEAR PROTEIN | | | |
| 256 | 28979568 (8159, 8160) | Novel Protein sim. GBank gi\|121534\|sp\|P11654\|GP21_RAT - INTEGRAL | | glycoprotein | 1002, 1041 |
| | | MEMBRANE GLYCOPROTEIN GP210 PRECURSOR | | | |
| 257 | 29347857 (1099, 1100) | Novel Protein sim. GBank gi\|123036\|sp\|P20059\|HEMO_RAT - | | glycoprotein | 1007 |
| | | HEMOPEXIN PRECURSOR | | | |
| 258 | 17942317 (851, 852) | Novel Protein sim. GBank gi\|124905\|sp\|P27772\|IRGA_VIBCH - IRON- | | glycoprotein | 1036 |
| | | REGULATED OUTER MEMBRANE VIRULENCE PROTEIN | | | |
| | | PRECURSOR | | | |
| 259 | 20603835 (3013, 3014) | Novel Protein sim. GBank gi\|1262291 (U51683) - OMP1 precursor | | glycoprotein | 1003 |
| | | [Bruceila abortus] | | | |
| 260 | 10029936 (8657, 8658) | Novel Protein sim. GBank gi\|128372\|sp\|P04846\|NLPA_ECOLI - | | glycoprotein | 1036 |
| | | LIPOPROTEIN-28 PRECURSOR | | | |
| 261 | 87115944 (6453, 6454) | Novel Protein sim. GBank gi\|129115\|sp\|P23231\|OM70_NEUCR - | | glycoprotein | 1023 |
| | | MITOCHONDRIAL PRECURSOR PROTEINS IMPORT RECEPTOR (72 KD | | | |
| | | MITOCHONDRIAL OUTER MEMBRANE PROTEIN) | | | |
| | | (MITOCHONDRIAL IMPORT RECEPTOR FOR THE ADP/ATP CARRIER) | | | |
| | | (TRANSLOCASE OF OUTER MEMBRANE TOM70) | | | |
| 262 | 66259299 (7819, 7820) | Novel Protein sim. GBank gi\|131411\|sp\|P23853\|PSPA_ECOLI - PHAGE | | glycoprotein | 1008 |
| | | SHOCK PROTEIN A | | | |
| 263 | 80062518 (6119, 6120) | Novel Protein sim. GBank gi\|1742866\|dbj\|BAA15547\| - (D90819) Inner | | glycoprotein | 1008, 1022 |
| | | membrane protein MalK [Escherichia coli] | | | |
| 264 | 27824060 (3059, 3060) | Novel Protein sim. GBank gi\|185498 (M99609) - immunoglobulin heavy | | glycoprotein | 1003 |
| | | chain [Homo sapiens] | | | |
| 265 | 80049539 (1207, 1208) | Novel Protein sim. GBank gi\|2408014\|emb\|CAB16212.1\| - (Z99162) | | glycoprotein | 1008 |
| | | putative membrane protein [Schizosaccharomyces pombe] | | | |
| 266 | 78788165 (2821, 2822) | Novel Protein sim. GBank gi\|2498489\|sp\|Q12328\|IM22_YEAST - | | glycoprotein | 1007 |
| | | MITOCHONDRIAL IMPORT INNER MEMBRANE TRANSLOCASE | | | |
| | | SUBUNIT TIM22 | | | |
| 267 | 79457147 (2021, 2022) | Novel Protein sim. GBank gi\|2498901\|sp\|Q53956\|SECF_STRCO - | | glycoprotein | 1021, 1028, 1051 |
| | | PROTEIN-EXPORT MEMBRANE PROTEIN SECF | | | |
| 268 | 13084379 (1575, 1576) | Novel Protein sim. GBank gi\|2645844 (AF033849) - oprD2-like porin | | glycoprotein | 1022 |
| | | precursor [Pseudomonas aeruginosa] | | | |
| 269 | 79859532 (41, 42) | Novel Protein sim. GBank gi\|2695967\|emb\|CAA15860\| - (AL010186) | | glycoprotein | 1041 |
| | | mmpL10 [Mycobacterium tuberculosis] | | | |
| 270 | 79569245 (5011, 5012) | Novel Protein sim. GBank gi\|3004655 (AF017777) - waclaw [Drosophila | | glycoprotein | 1031 |
| | | melanogaster] | | | |
| 271 | 28856491 (33, 34) | Novel Protein sim. GBank gi\|3089614 (AF086791) - unknown | | glycoprotein | 1024 |
| | | [Zymomonas mobllis] | | | |
| 272 | 65900245 (1671, 1672) | Novel Protein sim. GBank gi\|3283166 (AF057526) - erythrocyte | | glycoprotein | 1014, 1015, 1021, 1035, |
| | | membrane protein Rh50 [Mus musculus] | | | 1051 |
| 273 | 11356069 (8367, 8368) | Novel Protein sim. GBank gi\|3329386 (AF038958) - synaptic glycoprotein | | glycoprotein | 1055 |
| | | SC2 spliced variant [Homo sapiens] | | | |
| 274 | 4556646 (5729, 5730) | Novel Protein sim. GBank gi\|3522943\|gb\|AAC34225.1\| - (AC004411) | | glycoprotein | 1055 |
| | | putative p-glycoprotein [Arabidopsis thaliana] | | | |
| 275 | 66052607 (6817, 6818) | Novel Protein sim. GBank gi\|3914250\|sp\|Q51487\|OPRM_PSEAE - | | glycoprotein | 1008 |
| | | OUTER MEMBRANE PROTEIN OPRM PRECURSOR | | | |
| 276 | 79765225 (3775, 3776) | Novel Protein sim. GBank gi\|3915996\|sp\|P77196\|YFCU_ECOLI - | | glycoprotein | 1006, 1015, 1041 |
| | | HYPOTHETICAL OUTER MEMBRANE USHER PROTEIN IN AROC- | | | |
| | | FADL INTERGENIC REGION PRECURSOR | | | |
| 277 | 13076403 (707, 708) | Novel Protein sim. GBank gi\|399000\|sp\|P31223\|ACRA_ECOLI - | | glycoprotein | 1022 |
| | | ACRIFLAVIN RESISTANCE PROTEIN A PRECURSOR | | | |
| 278 | 78794717 (1361, 1362) | Novel Protein sim. GBank gi\|417231\|sp\|P32486\|KRE6_YEAST - BETA- | | glycoprotein | 1007 |
| | | GLUCAN SYNTHESIS-ASSOCIATED PROTEIN KRE6 (KILLER TOXIN- | | | |
| | | RESISTANCE PROTEIN 6) | | | |
| 279 | 78470378 (5251, 5252) | Novel Protein sim. GBank gi\|4467970\|emb\|CAB37973\| - (X76640) | | glycoprotein | 1024 |
| | | hypothetical protein [Myxococcus xanthus] | | | |
| 280 | 79617709 (3657, 3658) | Novel Protein sim. GBank gi\|464504\|sp\|P33221\|PURT_ECOLI- | | glycoprotein | 1001 |
| | | PHOSPHORIBOSYLGLYCINAMIDE FORMYLTRANSFERASE 2 (GART | | | |
| | | 2) (GAR TRANSFORMYLASE 2) (5′-PHOSPHORIBOSYLGLYCINAMIDE | | | |
| | | TRANSFORMYLASE 2) (FORMATE-DEPENDENT GAR | | | |
| | | TRANSFORMYLASE) | | | |
| 281 | 78965170 (1401, 1402) | Novel Protein sim. GBank gi\|479628\|pir\|\|S34969 - porin E1 - | | glycoprotein | 1036 |
| | | Pseudomonas aeruginosa | | | |
| 282 | 39539204 (1335, 1336) | Novel Protein sim. GBank gi\|485956\|emb\|CAA83635\| - (Z32686) mrpC | | glycoprotein | 1021, 1041 |
| | | [Proteus mirabilis] | | | |
| 283 | 20294672 (4173, 4174) | Novel Protein sim. GBank gi\|5453178\|gb\|AAD43467.1\|AF11360 - | | glycoprotein | 1031 |
| | | (AF113608) UspA1 [Moraxella catarrhalis] | | | |
| 284 | 78381117 (993, 994) | Novel Protein sim. GBank gi\|548514\|sp\|Q03180\|PIR3_YEAST - PIR3 | | glycoprotein | 1036 |
| | | PROTEIN PRECURSOR (COVALENTLY-LINKED CELL WALL PROTEIN | | | |
| | | 8) | | | |
| 285 | 88094402 (6145, 6146) | Novel Protein sim. GBank gi\|729491\|sp\|P30130\|FIMD_ECOLI - OUTER | | glycoprotein | 1004 |
| | | MEMBRANE USHER PROTEIN FIMD PRECURSOR | | | |
| 286 | 78368900 (4929, 4930) | Novel Protein sim. GBank gi\|887638\|emb\|CAA56302\| - (X79979) CDS2 | | glycoprotein | 1006 |
| | | [Streptomyces griseus] | | | |
| 287 | 71766874 (1869, 1870) | | | glycoprotein | 1021, 1036 |
| 288 | 79627730 (6423, 6424) | | | glycoprotein | 1023,1035 |
| 289 | 79262445 (2447, 2448) | Novel Protein sim. GBank gi\|2132124\|pir\|\|S67208 - hypothetical protein | Contains protein domain | helicase | 1036 |
| | | YOR304w - yeast (Saccharomyces cerevisiae) | (PF00176) - SNF2 and others N- | | |
| | | | terminal domain | | |
| 290 | 77801272 (2849, 2850) | Novel Protein sim. GBank gi\|3158516 (AF067617) - contains similarity to | Contains protein domain | helicase | 1051 |
| | | chromo (chromatin organization modifier) domains (Pfam: chromo.hmm. | (PF00176) - SNF2 and others N- | | |
| | | score: 17.76 and 27.94) and to helicases conserved C-terminal domain | terminal domain | | |
| | | (Pfam: helicase_C.hmm, score: 67.00) [Caenorhabditis elegans] | | | |
| 291 | 79179202 (8791, 8792) | Novel Protein sim. GBank gi\|1172894\|sp\|P43809\|RECG_HAEIN - ATP- | Contains protein domain | helicase | 1025 |
| | | DEPENDENT DNA HELICASE RECG | (PF00270) - DEAD/DEAH box | | |
| | | | helicase | | |
| 292 | 20465793 (7775, 7776) | Novel Protein sim. GBank gi\|1351656\|sp\|Q09903\|YAJ3_SCHPO - | Contains protein domain | helicase | 1008 |
| | | PUTATIVE ATP-DEPENDENT RNA HELICASE C30D11.03 | (PF00270) - DEAD/DEAH box | | |
| | | | helicase | | |
| 293 | 30265520 (7737, 7738) | Novel Protein sim. GBank gi\|4579744\|dbj\|BAA75085.1\| - (AB017104) | Contains protein domain | helicase | 1024 |
| | | DNA helicase Q1 [Mus musculus] | (PF00270) - DEAD/DEAH box | | |
| | | | helicase | | |
| 294 | 80045298 (2723, 2724) | Novel Protein sim. GBank gi\|5042262\|emb\|CAB44516.1\| - (AL078618) | Contains protein domain | helicase | 1008 |
| | | putative helicase [Streptomyces coelicolor] | (PF00270) - DEAD/DEAH box | | |
| | | | helicase | | |
| 295 | 78674774 (4129, 4130) | Novel Protein sim. GBank gi\|731740\|sp\|P38719\|DBP8_YEAST - | Contains protein domain | helicase | 1007 |
| | | PROBABLE ATP-DEPENDENT RNA HELICASE DBP8 | (PF00270) - DEAD/DEAH box | | |
| | | | helicase | | |
| 296 | 28489738 (7945, 7946) | Novel Protein sim. GBank gi\|118411\|sp\|P06634\|DED1_YEAST - | Contains protein domain | helicase | 1006, 1020 |
| | | PUTATIVE ATP-DEPENDENT RNA HELICASE DED1 | (PF00271) - Helicases conserved | | |
| | | | C-terminal domain | | |
| 297 | 27370970 (1179, 1180) | Novel Protein sim. GBank gi\|4454799\|gb\|AAD20980\| - (AF079782) | Contains protein domain | helicase | 1001, 1007 |
| | | translation initiation factor 4A2 [Zea mays] | (PF00271) - Helicases conserved | | |
| | | | C-terminal domain | | |
| 298 | 8518066 (4179, 4180) | Novel Protein sim. GBank gi\|2625021 (AF028736) - DNA helicase II | Contains protein domain | helicase | 1020 |
| | | [Serratia marcescens] | (PF00430) - ATP synthase B/B' | | |
| | | | CF(0) | | |
| 299 | 86462670 (7079, 7080) | Novel Protein sim. GBank gi\|1084084\|pir\|\|S55811 - hrpA protein - | | helicase | 1023 |
| | | Escherichia coli | | | |
| 300 | 21437178 (7027, 7028) | Novel Protein sim. GBank gi\|130804\|sp\|P20095\|PR02_YEAST - PRE- | | helicase | 1020 |
| | | MRNA SPLICING FACTOR RNA HELICASE PRP2 | | | |
| 301 | 94657426 (7855, 7856) | Novel Protein sim. GBank gi\|130830\|sp\|P24384\|PR22_YEAST - PRE- | | helicase | 1031 |
| | | MRNA SPLICING FACTOR RNA HELICASE PRP22 | | | |
| 302 | 52561605 (8625, 8626) | Novel Protein sim. Gbank gi\|132252\|sp\|P24230\|RECG_ECOLI - ATP- | | helicase | 1002 |
| | | DEPENDENT DNA HELICASE RECG | | | |
| 303 | 80062482 (7, 8) | Novel Protein sim. GBank gi\|134124\|sp\|P08577\|RUVB_ECOLI - | | helicase | 1008 |
| | | HOLLIDAY JUNCTION DNA HELICASE RUVB | | | |
| 304 | 80062519 (6217, 6218) | Novel Protein sim. GBank gi\|1718065\|sp\|P53528\|UVRD_MYCLE - | | helicase | 1008, 1015, 1023, 1025, |
| | | PUTATIVE DNA HELICASE II HOMOLOG | | | 1028 |
| 305 | 19874303 (3989, 3990) | Novel Protein sim. GBank gi\|172270 (M31524) - PRP16 peptide (put. | | helicase | 1020 |
| | | helicase): putative [Saccharomyces cerevisiae] | | | |
| 306 | 78488722 (3263, 3264) | Novel Protein sim. GBank gi\|1742299\|dbj\|BAA15025\| - (D90779) ATP- | | helicase | 1007 |
| | | dependent helicase HrpA homolog. [Escherichia coli] | | | |
| 307 | 13883890 (7339, 7340) | Novel Protein sim. GBank gi\|2314653\|gb\|AAD08516.1\| - (AE000647) DNA | | helicase | 1050 |
| | | helicase II (uvrD) [Helicobacter pylori 26695] | | | |
| 308 | 13886313 (7791, 7792) | Novel Protein sim. GBank gi\|3121983\|sp\|O25916\|DNAB_HELPY - | | helicase | 1050 |
| | | REPLICATIVE DNA HELICASE | | | |
| 309 | 78372173 (5241, 5242) | Novel Protein sim. GBank gi\|3158516 (AF067617) - contains similarity to | | helicase | 1041 |
| | | chromo (chromatin organization modifier) domains (Pfam: chromo.hmm. | | | |
| | | score: 17.76 and 27.94) and to helicases conserved C-terminal domain | | | |
| | | (Pfam: helicase_C.hmm, score: 67.00) [Caenorhabditis elegans] | | | |
| 310 | 19464841 (3699, 3700) | Novel Protein sim. GBank gi\|3249557 (AF010185) - DNA helicase II UvrD | | helicase | 1021 |
| | | [Pseudomonas aeruginosa] | | | |
| 311 | 80256570 (6075, 6076) | Novel Protein sim. GBank gi\|4007725\|emb\|CAA22409\| - (AL034447) | | helicase | 1004 |
| | | putative ATP-dependent DNA helicase [Streptomyces coellcolor] | | | |
| 312 | 32745469 (6609, 6610) | Novel Protein sim. GBank gi\|407992 (L25125) - RNA helicase [Mus | | helicase | 1001 |
| | | musculus] | | | |
| 313 | 85818219 (6929, 6930) | Novel Protein sim. GBank gi\|4104820\|gb\|AAD02177.1\| - (AF040045) | | helicase | 1017 |
| | | DEAD box RNA helicase homolog [Anabaena variabilis] | | | |
| 314 | 78459902 (1355, 1356) | Novel Protein sim. GBank gi\|416592\|sp\|P32323\|AGA1_YEAST - A- | | helicase | 1024 |
| | | AGGLUTININ ATTACHMENT SUBUNIT PRECURSOR | | | |
| 315 | 82362354 (4511, 4512) | Novel Protein sim. GBank gi\|417308\|sp\|P32333\|MOT1_YEAST - | | helicase | 1001, 1002, 1003, 1004, |
| | | PROBABLE HELICASE MOT1 | | | 1006, 1007, 1008, 1010, |
| | | | | | 1015, 1020, 1021, 1022, |
| | | | | | 1024, 1031, 1036, 1041, |
| | | | | | 1047, 1051 |
| 316 | 65503301 (6055, 6056) | Novel Protein sim. GBank gi\|4455689\|emb\|CAB36663\| - (AL035500) | | helicase | 1046 |
| | | probable ATP-dependent DNA helicase [Mycobacterium leprae] | | | |
| 317 | 28489378 (7043, 7044) | Novel Protein sim. GBank gi\|5102733\|emb\|CAB45191.1\| - (AL079292) | | hellcase | 1024 |
| | | hypothetical protein, similar to (AC007017) putative RNA helicase A | | | |
| | | [Arabidopsis thaliana] [Homo sapiens] | | | |
| 318 | 10236105 (1505, 1506) | Novel Protein sim. GBank gi\|548730\|sp\|P25888\|RHLE_ECOLI - | | helicase | 1036 |
| | | PUTATIVE ATP-DEPENDENT RNA HELICASE RHLE | | | |
| 319 | 23285347 (4343, 4344) | Novel Protein sim. GBank gi\|5689893\|emb\|CAB52056.1\| - (AL109732) | | helicase | 1024 |
| | | putative ATP-bindlng RNA helicase [Streptomyces coelicolor A3(2)] | | | |
| 320 | 8492058 (6697, 6698) | Novel Protein sim. GBank gi\|586550\|sp\|P38112\|MAK5_YEAST - ATP- | | helicase | 1020 |
| | | DEPENDENT RNA HELICASE MAK5 | | | |
| 321 | 80216307 (1237, 1238) | Novel Protein sim. GBank gi\|731738\|sp\|P38859\|DNA2_YEAST - DNA | | helicase | 1002, 1003, 1004, 1015, |
| | | REPLICATION HELICASE DNA2 | | | 1020, 1022, 1031, 1036 |
| 322 | 21428417 (6511, 6512) | Novel Protein sim. GBank gi\|95749\|pir\|\|S12698 - probable RNA helicase - | | helicase | 1004 |
| | | Escherichia coli | | | |
| 323 | 25267355 (2597, 2598) | Novel Protein sim. GBank gi\|4240299\|dbj\|BAA74928.1\| - (AB020712) | Contains protein domain | histone | 1002 |
| | | KIAA0905 protein [Homo sapiens] | (PF00400) - WD domain, G-beta | | |
| | | | repeat | | |
| 324 | 78781427 (7147, 7148) | Novel Protein sim. GBank gi\|1710013\|sp\|P01119\|RAS1_YEAST - RAS- | | histone | 1020 |
| | | LIKE PROTEIN 1 | | | |
| 325 | 95292938 (149, 150) | Novel Protein sim. GBank gi\|2984320 (AE000773) - acetoin utilization | | histone | 1008, 1022, 1031 |
| | | protein [Aquifex aeolicus] | | | |
| 326 | 80258853 (2643, 2644) | Novel Protein sim. GBank gi\|3023317\|sp\|Q48935\|APHA_MYCRA - | | histone | 1004 |
| | | ACETYLPOLYAMINE AMINOHYDROLASE | | | |
| 327 | 30190917 (299, 300) | Novel Protein sim. GBank gi\|417103\|sp\|P11105\|H32_MEDSA - HISTONE | | histone | 1007 |
| | | H3.2, MINOR | | | |
| 328 | 80223141 (5477, 5478) | Novel Protein sim. GBank gi\|728956\|sp\|P35817\|BDF1_YEAST - BDF1 | Contains protein domain | homeobox | 1003, 1004, 1020, 1031 |
| | | PROTEIN | (PF00439) - Bromodomain | | |
| 329 | 11691396 (6919, 6920) | Novel Protein sim. GBank gi\|127089\|sp\|P25336\|MSH3_YEAST - MUTS | Contains protein domain | homeobox | 1031 |
| | | PROTEIN HOMOLOG 3 (MISMATCH BINDING PROTEIN) (MBP) | (PF00488) - DNA mismatch repair | | |
| | | | proteins, mutS family | | |
| 330 | 36756499 (2805, 2806) | Novel Protein sim. GBank gi\|2494503\|sp\|Q63244\|HFH1_RAT - | | homeobox | 1021, 1031 |
| | | HEPATOCYTE NUCLEAR FACTOR 3 FORKHEAD HOMOLOG 1 (HFH-1) | | | |
| 331 | 79178980 (1959, 1960) | Novel Protein sim. GBank gi\|547726\|sp\|P35640\|INVA_BARBA - | Contains protein domain | hydrolase | 1025 |
| | | INVASION PROTEIN A | (PF00293) - Bacterial mutT | | |
| | | | protein | | |
| 332 | 30578333 (7005, 7006) | Novel Protein sim. GBank gi\|2880049 (AC002340) - hypothetical protein | Contains protein domain | hydrolase | 1024 |
| | | [Arabidopsis thaliana] | (PF01662) - Cytosolic long-chain | | |
| | | | acyl-CoA thioester hydrolase | | |
| 333 | 78477734 (5577, 5578) | Novel Protein sim. GBank gi\|1130507 (L41670) - fumarylacetoacetate | | hydrolase | 1002 |
| | | hydrolase [Emericella nidulans] | | | |
| 334 | 86475776 (7507, 7508) | Novel Protein sim. GBank gi\|115890\|sp\|P06621\|CBPG_PSES6 - | | hydrolase | 1045 |
| | | CARBOXYPEPTIDASE G2 PRECURSOR (FOLATE HYDROLASE G2) | | | |
| | | (PTEROYLMONOGLUTAMIC ACID HYDROLASE G2) (GLUTAMATE | | | |
| | | CARBOXYPEPTIDASE) | | | |
| 335 | 86693482 (127, 128) | Novel Protein sim. GBank gi\|1169528\|sp\|P42895\|ENO2_MAIZE - | | hydrolase | 1005 |
| | | ENOLASE 2 (2-PHOSPHOGLYCERATE DEHYDRATASE 2) (2- | | | |
| | | PHOSPHO-D-GLYCERATE HYDRO-LYASE 2) | | | |
| 336 | 14999668 (6275, 6276) | Novel Protein sim. GBank gi\|1169528\|sp\|P42895\|ENO2_MAIZE - | | hydrolase | 1025 |
| | | ENOLASE 2 (2-PHOSPHOGLYCERATE DEHYDRATASE 2) (2- | | | |
| | | PHOSPHO-D-GLYCERATE HYDRO-LYASE 2) | | | |
| 337 | 79824931 (463, 464) | Novel Protein sim. GBank gi\|1175303\|sp\|P44049\|MLTC_HAEIN - | | hydrolase | 1006, 1020, 1041 |
| | | MEMBRANE-BOUND LYTIC MUREIN TRANSGLYCOSYLASE C | | | |
| | | PRECURSOR (MUREIN HYDROLASE C) | | | |
| 338 | 79565170 (5587, 5588) | Novel Protein sim. GBank gi\|1175620\|sp\|P42241\|YCBI_BACSU - | | hydrolase | 1021 |
| | | HYPOTHETICAL 32.4 KD PROTEIN IN PCP 5′REGION (ORF8) | | | |
| 339 | 80218214 (183, 184) | Novel Protein sim. GBank gi\|1708850\|sp\|Q10740\|LKHA_YEAST - | | hydrolase | 1003, 1004, 1020, 1023, |
| | | PROBABLE LEUKOTRIENE A-4 HYDROLASE (LTA-4 HYDROLASE) | | | 1028 |
| | | (LEUKOTRIENE A(4) HYDROLASE) | | | |
| 340 | 27956251 (2771, 2772) | Novel Protein sim. GBank gi\|1754515\|dbj\|BAA13413.1\| - (D87515) | | hydrolase | 1003 |
| | | aminopeptidase-B [Rattus norvegicus] | | | |
| 341 | 17022381 (7037, 7038) | Novel Protein sim. GBank gi\|2118299\|pir\|\|S67305 - ERR1 protein - yeast | | hydrolase | 1021 |
| | | (Saccharomyces cerevisiae) | | | |
| 342 | 56324337 (15, 16) | Novel Protein sim. GBank gi\|2143818\|pir\|\|S59898 - kynureninase (EC | | hydrolase | 1024 |
| | | 3.7.1.3) - rat | | | |
| 343 | 78934465 (3801, 3802) | Novel Protein sim. GBank gi\|216807\|dbj\|BAA01524\| - (D10678) 6- | | hydrolase | 1015 |
| | | aminohexanoate-dimer hydrolase [Pseudomonas sp.] | | | |
| 344 | 19886695 (363, 364) | Novel Protein sim. GBank gi\|2842689\|sp\|Q92342\|YDI4_SCHPO - | | hydrolase | 1031 |
| | | HYPOTHETICAL 50.4 KD PROTEIN C1F8.04C IN CHROMOSOME I | | | |
| 345 | 79557816 (3231, 3232) | Novel Protein sim. GBank gi\|4467250\|emb\|CAB37575\| - (AL035569) | | hydrolase | 1004, 1006, 1015, 1022 |
| | | probable Glu-tRNA Gln amidotransferase subunit [Streptomyces | | | |
| | | coelicolor] | | | |
| 346 | 29208398 (4199, 4200) | Novel Protein sim. GBank gi\|4503585\|ref\|NP_001970.1\|pEPHX - epoxide | | hydrolase | 1015 |
| | | hydrolase 2, cytoplasmic | | | |
| 347 | 80258207 (51, 52) | Novel Protein sim. GBank gi\|4753869\|emb\|CAB42032.1\| - (AL049754) | | hydrolase | 1004 |
| | | putative hydrolase [Streptomyces coelicolor] | | | |
| 348 | 17881519 (3397, 3398) | Novel Protein sim. GBank gi\|5545316\|dbj\|BAA82531.1\| - (AB030032) | | hydrolase | 1036 |
| | | putative transglycosylase [Actinobacillus actinomycetemcomitans] | | | |
| 349 | 25151365 (6343, 6344) | Novel Protein sim. GBank gi\|5545316\|dbj\|BAA82531.1\| - (AB030032) | | hydrolase | 1007 |
| | | putative transglycosylase [Actinobacillus actinomycetemcomitans] | | | |
| 350 | 17936810 (3529, 3530) | Novel Protein sim. GBank gi\|731088\|sp\|P24215\|UXUA_ECOLI - | | hydrolase | 1035 |
| | | MANNONATE DEHYDRATASE (D-MANNONATE HYDROLASE) | | | |
| 351 | 7415018 (1947, 1948) | Novel Protein sim. GBank gi\|80437\|pir\|\|S18811 - urocanate hydratase | | hydrolase | 1055 |
| | | (EC 4.2.1.49) - Bacillus subtills (fragment) | | | |
| 352 | 55506625 (6841, 6842) | Novel Protein sim. GBank gi\|4512301\|dbj\|BAA75048.1\| - (AB019440) | Contains protein domain | immunoglob | 1019 |
| | | immunogloblin heavy chain variable region [Homo sapiens] | (PF00047) - Immunoglobulin | | |
| | | | domain | | |
| 353 | 80216144 (1887, 1888) | Novel Protein sim. GBank gi\|619440 (M94115) - This CDS feature is | Contains protein domain | immunoglob | 1022 |
| | | included to show the translation of the corresponding V_region. Presently | (PF00047) - Immunoglobulin | | |
| | | translation qualifiers on V_region features are illegal. [Homo sapiens] | domain | | |
| 354 | 10311869 (5331, 5332) | Novel Protein sim. GBank gi\|3046410 (AF044419) - anti-Rh(D) antibody | | immunoglob | 1023 |
| | | VH segment [synthetic construct] | | | |
| 355 | 20405293 (4415, 4416) | Novel Protein sim. GBank gi\|346088\|pir\|\|PH1282 - Ig heavy chain V | | immunoglob | 1022 |
| | | region (clone PBL13) - human (fragment) | | | |
| 356 | 80047082 (1441, 1442) | Novel Protein sim. GBank gi\|481342\|pir\|\|S38489 - Ig heavy chain - human | | immunoglob | 1022 |
| | | (fragment) | | | |
| 357 | 94325418 (745, 746) | Novel Protein sim. GBank gi\|4837863\|gb\|AAD30723.1\| - (AF103163) | | immunoglob | 1041 |
| | | immunoglobulin heavy chain variable region [Homo sapiens] | | | |
| 358 | 80047715 (6499, 6500) | Novel Protein sim. GBank gi\|3885336 (AC005623) - receptor-like protein | Contains protein domain | interleukinrecept | 1002, 1020 |
| | | kinase [Arabidopsis thaliana] | (PF00069) - Eukaryotic protein | | |
| | | | kinase domain | | |
| 359 | 80059851 (6101, 6102) | Novel Protein sim. GBank gi\|4557753\|ref\|NP_000372.1\|pMID1 - midline 1 | Contains protein domain | interleukinrecept | 1001, 1020 |
| | | protein | (PF00097) - Zinc finger, C3HC4 | | |
| | | | type (RING finger) | | |
| 360 | 80218527 (995, 996) | Novel Protein sim. GBank gi\|416977\|sp\|P32474\|EUG1_YEAST - | Contains protein domain | isomerase | 1003, 1004, 1006, 1020, |
| | | ENDOPLASMIC RETICULUM PROTEIN EUG1 PRECURSOR | (PF00085) - Thioredoxin | | 1022, 1031, 1041 |
| | | (POSSIBLE PROTEIN DISULFIDE ISOMERASE (PDI)) | | | |
| 361 | 56013085 (4183, 4184) | Novel Protein sim. GBank gi\|456013 (L28174) - disulfide-like protein | Contains protein domain | isomerase | 1050 |
| | | [Acanthamoeba castellanli] | (PF00085) - Thioredoxin | | |
| 362 | 78025291 (8709, 8710) | Novel Protein sim. GBank gi\|1351280\|sp\|P48500\|TPIS_RAT - | Contains protein domain | isomerase | 1006 |
| | | TRIOSEPHOSPHATE ISOMERASE (TIM) | (PF00121) - Triosephosphate | | |
| | | | isomerase | | |
| 363 | 66050272 (4971, 4972) | Novel Protein sim. GBank gi\|1730003\|sp\|P50920\|TPIS_MYCHY - | Contains protein domain | isomerase | 1005 |
| | | TRIOSEPHOSPHATE ISOMERASE (TIM) | (PF00121) - Triosephosphate | | |
| | | | isomerase | | |
| 364 | 11777004 (8235, 8236) | Novel Protein sim. GBank gi\|1490397\|emb\|CAA91553\| - (Z67740) DNA | Contains protein domain | isomerase | 1020 |
| | | gyrase [Streptococcus pneumoniae] | (PF00204) - DNA topoisomerase | | |
| | | | II (N-terminal region) | | |
| 365 | 87461104 (5413, 5414) | Novel Protein sim. GBank gi\|4468641\|emb\|CAB38179\| - (Y16286) gyrB | Contains protein domain | isomerase | 1023 |
| | | [Pseudomonas aeruginosa] | (PF00204) - DNA topoisomerase | | |
| | | | II (N-terminal region) | | |
| 366 | 86477775 (6527, 6528) | Novel Protein sim. GBank gi\|1652134\|dbj\|BAA17058\| - (D90903) FKBP- | Contains protein domain | isomerase | 1017 |
| | | type peptidyl-prolyl cis-trans isomerase [Synechocystis sp.] | (PF00254) - FKBP-type peptidyl- | | |
| | | | prolyl cis-trans isomerases | | |
| 367 | 10355882 (541, 542) | Novel Protein sim. GBank gi\|478318\|pir\|\|JN0873 - immunophilin p59 - | Contains protein domain | isomerase | 1036 |
| | | mouse | (PF00254) - FKBP-type peptidyl- | | |
| | | | prolyl cis-trans isomerases | | |
| 368 | 79872191 (5327, 5328) | Novel Protein sim. GBank gi\|239790\|bbs\|68264 - (S68257) D-xylulose | Contains protein domain | isomerase | 1015 |
| | | keto-isomerase, D-glucose isomerase, D-xylose isomerase (EC 5.3.1.5) | (PF00259) - Xylose isomerase | | |
| | | [Escherichia coli, Peptide, 440 aa] [Escherichia coli] | | | |
| 369 | 80105757 (4213, 4214) | Novel Protein sim. GBank gi\|113158\|sp\|P25516\|ACO1_ECOLI - | Contains protein domain | isomerase | 1011 |
| | | ACONITATE HYDRATASE 1 (CITRATE HYDRO-LYASE 1) (ACONITASE | (PF00330) - Aconitase family | | |
| | | 1) | (aconitate hydratase) | | |
| 370 | 32164388 (2025, 2026) | Novel Protein sim. GBank gi\|1786259 (AE000117) - 3-isopropylmalate | Contains protein domain | isomerase | 1021 |
| | | isomerase (dehydratase) subunit [Escherichia coli] | (PF00330) - Aconitase family | | |
| | | | (aconitate hydratase) | | |
| 371 | 78980291 (8967, 8968) | Novel Protein sim. GBank gi\|4406814\|gb\|AAD20122\| - (AC006201) | Contains protein domain | isomerase | 1002 |
| | | putative peptidyl-prolyl isomerase [Arabidopsis thaliana] | (PF00639) - PPIC-type PPIASE | | |
| | | | domain. | | |
| 372 | 65327341 (2415, 2416) | Novel Protein sim. GBank gi\|400187\|sp\|Q02144\|LEUD_LACLA - 3- | Contains protein domain | isomerase | 1020 |
| | | ISOPROPYLMALATE DEHYDRATASE SMALL SUBUNIT | (PF00694) - Aconitase C-terminal | | |
| | | (ISOPROPYLMALATE ISOMERASE) (ALPHA-IPM ISOMERASE) | domain | | |
| 373 | 16388095 (2969, 2970) | Novel Protein sim. GBank gi\|2126788\|pir\|\|I40190 - DNA topoisomerase I - | Contains protein domain | isomerase | 1002 |
| | | Bacillus firmus (fragment) | (PF01131) - Prokaryotic DNA | | |
| | | | topoisomerase | | |
| 374 | 80491857 (3457, 3458) | Novel Protein sim. GBank gi\|1174735\|sp\|P43012\|TOP1_HAEIN - DNA | Contains protein domain | isomerase | 1010 |
| | | TOPOISOMERASE I (OMEGA-PROTEIN) (RELAXING ENZYME) | (PF01398) - Topoisomerase DNA | | |
| | | (UNTWISTING ENZYME) (SWIVELASE) | binding C4 zinc finger | | |
| 375 | 79316780 (887, 888) | Novel Protein sim. GBank gi\|114100\|sp\|P08203\|ARAD_ECOLI - L- | | isomerase | 1004, 1020 |
| | | RIBULOSE-5-PHOSPHATE 4-EPIMERASE | | | |
| 376 | 79312879 (6797, 6798) | Novel Protein sim. GBank gi\|116841\|sp\|P21640\|COBJ_PSEDE - | | isomerase | 1008 |
| | | PRECORRIN-3B C17-METHYLTRANSFERASE (PRECORRIN-3 | | | |
| | | METHYLTRANSFERASE) (PRECORRIN-3 METHYLASE) | | | |
| 377 | 79193215 (7677, 7678) | Novel Protein sim. GBank gi\|1169225\|sp\|P44859\|DAPF_HAEIN - | | isomerase | 1022 |
| | | DIAMINOPIMELATE EPIMERASE | | | |
| 378 | 90936817 (25, 26) | Novel Protein sim. GBank gi\|119120\|sp\|P07896\|ECHP_RAT - ENOYL- | | isomerase | 1018 |
| | | COA HYDRATASE/3,2-TRANS-ENOYL-COA ISOMERASE/3- | | | |
| | | HYDROXYACYL-COA DEHYDROGENASE , PEROXISOMAL | | | |
| | | (PEROXISOMAL BIFUNCTONAL ENZYME) (PBE) (PBFE) | | | |
| 379 | 79244172 (7479, 7480) | Novel Protein sim. GBank gi\|1353104\|sp\|P48561\|TRF5_YEAST - | | isomerase | 1006 |
| | | TOPOISOMERASE 1-RELATED PROTEIN TRF5 | | | |
| 380 | 80429067 (8217, 8218) | Novel Protein sim. GBank gi\|1706568\|sp\|Q10533\|ECHH_MYCTU - | | isomerase | 1000, 1004, 1008, 1010, |
| | | PUTATIVE ENOYL-COA HYDRATASE | | | 1035 |
| 381 | 20385447 (3541, 3542) | Novel Protein sim. GBank gi\|1706702\|sp\|P52641\|EPSC_BURSO - | | isomerase | 1003 |
| | | PUTATIVE UDP-N-ACETYLGLUCOSAMINE 2-EPIMERASE (UDP- | | | |
| | | GLCNAC-2-EPIMERASE) | | | |
| 382 | 80481824 (377, 378) | Novel Protein sim. GBank gi\|1929095\|emb\|CAA72944\| - (Y12268) DapF | | isomerase | 1010 |
| | | protein [Pseudomonas fluorescens] | | | |
| 383 | 33202071 (3873, 3874) | Novel Protein sim. GBank gi\|2231748 (U92221) - macrophage infectivity | | isomerase | 1024 |
| | | potentiator [Legionella shakespearei] | | | |
| 384 | 78907625 (2455, 2456) | Novel Protein sim. GBank gi2494040\|sp\|Q51564\|DAPF_PSEAE - | | isomerase | 1036 |
| | | DIAMINOPIMELATE EPIMERASE | | | |
| 385 | 54992976 (1259, 1260) | Novel Protein sim. GBank gi\|2501240\|sp\|Q59567\|TOP1_MYCTU - DNA | | isomerase | 1026 |
| | | TOPOISOMERASE I (OMEGA-PROTEIN) (RELAXING ENZYME) | | | |
| | | (UNTWISTING ENZYME) (SWIVELASE) | | | |
| 386 | 82450231 (8827, 8828) | Novel Protein sim. GBank gi\|2621713 (AE000844) - UDP-glucose 4- | | isomerase | 1001, 1003, 1004, 1008, |
| | | epimerase [Methanobacterium thermoautotrophicum] | | | 1010, 1020, 1021, 1031 |
| 387 | 16837298 (1907, 1908) | Novel Protein sim. GBank gi\|2739168 (AF032386) - aldose-1-epimerase- | | isomerase | 1021 |
| | | like protein [Nicotiana tabacum] | | | |
| 388 | 10187377 (6783, 6784) | Novel Protein sim. GBank gi\|3309243 (AF073507) - aconitase-iron | | isomerase | 1002 |
| | | regulated protein 1 [Citrus limon] | | | |
| 389 | 80215263 (7477, 7478) | Novel Protein sim. GBank gi\|4502327\|ref\|NP_001689.1\|pAUH\| - AU RNA- | | isomerase | 1002, 1008, 1024 |
| | | binding protein/enoyl-Coenzyme A hydratase precursor | | | |
| 390 | 78792960 (7867, 7868) | Novel Protein sim. GBank gi\|4520378\|dbj\|BAA75914.1\| - (AB024602) | | isomerase | 1020 |
| | | NIFS-like protein [Pseudomonas putida] | | | |
| 391 | 17087020 (2905, 2906) | Novel Protein sim. GBank gi\|728783\|sp\|P39533\|ACOX_YEAST - | | isomerase | 1036 |
| | | PUTATIVE ACONITASE IN PRP21-UBP12 INTERGENIC REGION | | | |
| 392 | 79864827 (1301, 1302) | Novel Protein sim. GBank gi\|1170625\|sp\|P27466\|KCC1_YEAST - | Contains protein domain | kinase | 1015, 1022, 1035, 1036 |
| | | CALCIUM/CALMODULIN-DEPENDENT PROTEIN KINASE I | (PF00069) - Eukaryotic protein | | |
| | | | kinase domain | | |
| 393 | 78781757 (5949, 5950) | Novel Protein sim. GBank gi\|1170714\|sp\|P43289\|KSGG_ARATH - | Contains protein domain | kinase | 1006 |
| | | SHAGGY RELATED PROTEIN KINASE ASK-GAMMA | (PF00069) - Eukaryotic protein | | |
| | | | kinase domain | | |
| 394 | 82136936 (5067, 5068) | Novel Protein sim. GBank gi\|1173459\|sp\|P41808\|SMK1_YEAST - | Contains protein domain | kinase | 1014 |
| | | SPORULATION-SPECIFIC MITOGEN-ACTIVATED PROTEIN KINASE | (PF00069) - Eukaryotic protein | | |
| | | SMK1 (MAP KINASE SMK1) | kinase domain | | |
| 395 | 16383607 (5269, 5270) | Novel Protein sim. GBank gi\|125288\|sp\|P15791\|KCCD_RAT - | Contains protein domain | kinase | 1015 |
| | | CALCIUM/CALMODULIN-DEPENDENT PROTEIN KINASE TYPE II | (PF00069) - Eukaryotic protein | | |
| | | DELTA CHAIN (CAM-KINASE II DELTA CHAIN) (CAMK-II, DELTA | kinase domain | | |
| | | SUBUNIT) | | | |
| 396 | 56660366 (2363, 2364) | Novel Protein sim. GBank gi\|2062399 (U78857) - protein serine/threonine | Contains protein domain | kinase | 1037, 1039 |
| | | kinase CPG16 [Rattus norvegicus] | (PF00069) - Eukaryotic protein | | |
| | | | kinase domain | | |
| 397 | 13089154 (6433, 6434) | Novel Protein sim. GBank gi\|2078052\|emb\|CAB08487.1\| - (Z95209) pknD | Contains protein domain | kinase | 1025 |
| | | [Mycobacterium tuberculosis] | (PF00069) - Eukaryotic protein | | |
| | | | kinase domain | | |
| 398 | 79601611 (3255, 3256) | Novel Protein sim. GBank gi\|2131510\|pir\|\|S69634 - hypothetical protein | Contains protein domain | kinase | 1004 |
| | | YDR466w - yeast (Saccharomyces cerevisiae) | (PF00069) - Eukaryotic protein | | |
| | | | kinase domain | | |
| 399 | 79817329 (5083, 5084) | Novel Protein sim. GBank gi\|2392895 (AF017056) - brassinosteroid | Contains protein domain | kinase | 1036 |
| | | insensitive 1 [Arabidopsis thaliana] | (PF00069) - Eukaryotic protein | | |
| | | | kinase domain | | |
| 400 | 65691019 (367, 368) | Novel Protein sim. GBank gi\|2781357 (AC003113) - F24O1.13 | Contains protein domain | kinase | 1007 |
| | | [Arabidopsis thaliana] | (PF00069) - Eukaryotic protein | | |
| | | | kinase domain | | |
| 401 | 79250602 (9037, 9038) | Novel Protein sim. GBank gi\|3522961\|gb\|AAC34243.1\| - (AC004411) | Contains protein domain | kinase | 1036 |
| | | putative pto kinase [Arabidopsis thaliana] | (PF00069) - Eukaryotic protein | | |
| | | | kinase domain | | |
| 402 | 20432709 (8947, 8948) | Novel Protein sim. GBank gi\|3522970 (U42390) - Trio [Homo sapiens] | Contains protein domain | kinase | 1020 |
| | | | (PF00069) - Eukaryotic protein | | |
| | | | kinase domain | | |
| 403 | 29510031 (6243, 6244) | Novel Protein sim. GBank gi\|3600036 (AF080119) - contains similarity to | Contains protein domain | kinase | 1006 |
| | | protein kinase domains (Pfam: pkinase.hmm, score: 227.04) [Arabidopsis | (PF00069) - Eukaryotic protein | | |
| | | thaliana] | kinase domain | | |
| 404 | 95414355 (2403, 2404) | Novel Protein sim. GBank gi\|4210753\|emb\|CAA10713\| - (AJ132604) | Contains protein domain | kinase | 1020, 1022, 1040, 1055 |
| | | hypothetical protein [Lactococcus lactis] | (PF00069) - Eukaryotic protein | | |
| | | | kinase domain | | |
| 405 | 78825843 (7951, 7952) | Novel Protein sim. GBank gi\|4467134\|emb\|CAB37503\| - (AL035540) | Contains protein domain | kinase | 1015 |
| | | protein kinase like protein [Arabidopsis thaliana] | (PF00069) - Eukaryotic protein | | |
| | | | kinase domain | | |
| 406 | 37001545 (7189, 7190) | Novel Protein sim. GBank gi\|4490638\|emb\|CAA92266.2\| - (Z68144) | Contains protein domain | kinase | 1001 |
| | | serine/threonine protein kinase [Schizosaccharomyces pombe] | (PF00069) - Eukaryotic protein | | |
| | | | kinase domain | | |
| 407 | 65891548 (6585, 6586) | Novel Protein sim. GBank gi\|4506537\|ref\|NP_003812.1\|pRIP2 - | Contains protein domain | kinase | 1035 |
| | | UNKNOWN | (PF00069) - Eukaryotic protein | | |
| | | | kinase domain | | |
| 408 | 29221338 (6491, 6492) | Novel Protein sim. GBank gi\|4512667\|gb\|AAD21721.1\| - (AC006931) | Contains protein domain | kinase | 1027 |
| | | putative MAP kinase [Arabidopsis thaliana] | (PF00069) - Eukaryotic protein | | |
| | | | kinase domain | | |
| 409 | 25258544 (2657, 2658) | Novel Protein sim. GBank gi\|4539601\|emb\|CAB40012.1\| - (AL049522) | Contains protein domain | kinase | 1006 |
| | | serine/threonine-protein kinase [Schizosaccharomyces pombe] | (PF00069) - Eukaryotic protein | | |
| | | | kinase domain | | |
| 410 | 30661640 (867, 868) | Novel Protein sim. GBank gi\|465483\|sp\|P33886\|WIS1_SCHPO - | Contains protein domain | kinase | 1020 |
| | | PROTEIN KINASE WIS1 | (PF00069) - Eukaryotic protein | | |
| | | | kinase domain | | |
| 411 | 78960407 (4385, 4386) | Novel Protein sim. GBank gi\|547785\|sp\|P36003\|KKR1_YEAST - | Contains protein domain | kinase | 1002 |
| | | PROBABLE SERINE/THREONINE-PROTEIN KINASE YKL171W | (PF00069) - Eukaryotic protein | | |
| | | | kinase domain | | |
| 412 | 29685105 (349, 350) | Novel Protein sim. GBank gi\|585793\|sp\|P38622\|RCK1_YEAST - | Contains protein domain | kinase | 1007 |
| | | SERINE/THREONINE-PROTEIN KINASE RCK1 | (PF00069) - Eukaryotic protein | | |
| | | | kinase domain | | |
| 413 | 87454473 (375, 376) | Novel Protein sim. GBank gi\|3935168 (AC004557) - F17L21.11 | Contains protein domain | kinase | 1023 |
| | | [Arabidopsis thaliana] | (PF00072) - Response regulator | | |
| | | | receiver domain | | |
| 414 | 80470074 (7573, 7574) | Novel Protein sim. GBank gi\|4468682\|emb\|CAB38136.1\| - (AL035591) | Contains protein domain | kinase | 1003, 1004, 1008, 1010, |
| | | phosphoglycerate kinase [Streptomyces coelicolor] | (PF00162) - Phosphoglycerate | | 1022, 1031 |
| | | | kinases | | |
| 415 | 77901754 (123, 124) | Novel Protein sim. GBank gi\|2661698\|emb\|CAA15802\| - (AL009204) | Contains protein domain | kinase | 1008, 1037 |
| | | putative thimidine kinase [Streptomyces coelicolor] | (PF00265) - Thymidine kinases | | |
| 416 | 16394057 (5823, 5824) | Novel Protein sim. GBank gi\|125390\|sp\|P07128\|KHSE_BRELA - | Contains protein domain | kinase | 1021 |
| | | HOMOSERINE KINASE (HK) | (PF00288) - GHMP kinases | | |
| | | | putative ATP-binding proteins | | |
| 417 | 39537520 (293, 294) | Novel Protein sim. GBank gi\|1073282\|pir\|\|C55215 - 2-dehydro-3- | Contains protein domain | kinase | 1006 |
| | | deoxygluconokinase (EC 2.7.1.45) - Erwinla chrysanthemi | (PF00294) - pfkB family | | |
| | | | carbohydrate kinase | | |
| 418 | 36738408 (7691, 7692) | Novel Protein sim. GBank gi\|2127192\|pir\|\|40463 - ribokinase (EC | Contains protein domain | kinase | 1031 |
| | | 2.7.1.15) - Bacillus subtilis | (PF00294) - pfkB family | | |
| | | | carbohydrate kinase | | |
| 419 | 71088701 (6033, 6034) | | Contains protein domain | kinase | 1050 |
| | | | (PF00294) - pfkB family | | |
| | | | carbohydrate kinase | | |
| 420 | 80218550 (6387, 6388) | Novel Protein sim. GBank gi\|548341\|sp\|P36010\|NDK_YEAST - | Contains protein domain | kinase | 1002, 1004, 1006, 1007, |
| | | NUCLEOSIDE DIPHOSPHATE KINASE (NDK) (NDP KINASE) | (PF00334) - Nucleoside | | 1015, 1020, 1024 |
| | | | diphosphate kinases | | |
| 421 | 25260297(6719, 6720) | Novel Protein sim. GBank gi\|171735 (M11181) - hexokinase P-II peptide | Contains protein domain | kinase | 1006 |
| | | [Saccharomyces cerevisiae] | (PF00349) - Hexokinase | | |
| 422 | 29445916 (6313, 6314) | Novel Protein sim. GBank gi\|125121\|sp\|P16861\|K6P1_YEAST - 6- | Contains protein domain | kinase | 1020 |
| | | PHOSPHOFRUCTOKINASE ALPHA SUBUNIT | (PF00365) - Phosphofructokinase | | |
| | | (PHOSPHOFRUCTOKINASE 1) (PHOSPHOHEXOKINASE) (6PF-1-K | | | |
| | | ALPHA SUBUNIT) | | | |
| 423 | 80248665 (1687, 1688) | Novel Protein sim. GBank gi\|3122305\|sp\|Q27778\|K6PF_SCHMA - 6- | Contains protein domain | kinase | 1004, 1020, 1023 |
| | | PHOSPHOFRUCTOKINASE (PHOSPHOFRUCTOKINASE) | (PF00365) - Phosphofructokinase | | |
| | | (PHOSPHOHEXOKINASE) | | | |
| 424 | 25259137 (7451, 7452) | Novel Protein sim. GBank gi\|3122594\|sp\|Q59126\|PFP_AMYME - | Contains protein domain | kinase | 1021 |
| | | PYROPHOSPHATE-FRUCTOSE 6-PHOSPHATE 1- | (PF00365) - Phosphofructokinase | | |
| | | PHOSPHOTRANSFERASE (6-PHOSPHOFRUCTOKINASE | | | |
| | | (PYROPHOSPHATE)) (PYROPHOSPHATE-DEPENDENT 6- | | | |
| | | PHOSPHOFRUCTOSE-1-KINASE) (PPI-PFK) | | | |
| 425 | 82060206 (6711, 6712) | Novel Protein sim. GBank gi\|2960120\|emb\|CAA18018.1\| - (AL022121) | Contains protein domain | kinase | 1001, 1003, 1004, 1007, |
| | | glpK [Mycobacterium tuberculosis] | (PF00370) - FGGY family of | | 1008, 1010, 1014, 1020, |
| | | | carbohydrate kinases | | 1021, 1022, 1024, 1025, |
| | | | | | 1035 |
| 426 | 80249154 (7825, 7826) | Novel Protein sim. GBank gi\|3122139\|sp\|Q63060\|GLPK_RAT - | Contains protein domain | kinase | 1004 |
| | | GLYCEROL KINASE (ATP: GLYCEROL 3-PHOSPHOTRANSFERASE) | (PF00370) - FGGY family of | | |
| | | (GLYCEROKINASE) (GK) (ATP-STIMULATED GLUCOCORTICOID- | carbohydrate kinases | | |
| | | RECEPTOR TRANSLOCATON PROMOTER) (ASTP) | | | |
| 427 | 80055278 (653, 654) | Novel Protein sim. GBank gi\|3358091\|dbj\|BAA31995\| - (AB015974) | Contains protein domain | kinase | 1020, 1022 |
| | | glycerol kinase [Pseudomonas tolaasil] | (PF00370) - FGGY family of | | |
| | | | carbohydrate kinases | | |
| 428 | 80047548 (7383, 7384) | Novel Protein sim. GBank gi\|4204896 (U57100) - erythritol kinase | Contains protein domain | kinase | 1003, 1015 |
| | | [Brucella abortus] | (PF00370) - FGGY family of | | |
| | | | carbohydrate kinases | | |
| 429 | 78769251 (7003, 7004) | Novel Protein sim. GBank gi\|4980782\|gb\|AAD35372.1\|AE00171 - | Contains protein domain | kinase | 1015 |
| | | (AE001710) sugar kinase, FGGY family [Thermotoga maritima] | (PF00370) - FGGY family of | | |
| | | | carbohydrate kinases | | |
| 430 | 79611230 (4121, 4122) | Novel Protein sim. GBank gi\|1077378\|pir\|\|S51445 - probable membrane | Contains protein domain | kinase | 1004 |
| | | protein YLR222c - yeast (Saccharomyces cerevisiae) | (PF00400) - WD domain, G-beta | | |
| | | | repeat | | |
| 431 | 80081455 (7721, 7722) | Novel Protein sim. GBank gi\|2497146\|sp\|Q04305\|YMY3_YEAST - | Contains protein domain | kinase | 1003, 1020 |
| | | HYPOTHETICAL 57.7 KD PROTEIN IN AIP1-CTF13 INTERGENIC | (PF00400) - WD domain, G-beta | | |
| | | REGION | repeat | | |
| 432 | 56010654 (8637, 8638) | Novel Protein sim. GBank gi\|1170646\|sp\|P43565\|RI15_YEAST - | Contains protein domain | kinase | 1041 |
| | | SERINE/THREONINE-PROTEIN KINASE RIM15 | (PF00433) - Protein kinase C | | |
| | | | terminal domain | | |
| 433 | 25246073 (7699, 7700) | Novel Protein sim. GBank gi\|5031439\|gb\|AAD38172.1\|AF15259 - | Contains protein domain | kinase | 1041 |
| | | (AF152598) TadA [Actinobacillus actinomycetemcomitans] | (PF00437) - Bacterial type II | | |
| | | | secretion system protein | | |
| 434 | 85533226 (7263, 7264) | Novel Protein sim. GBank gi\|4982035\|gb\|AAD36537.1\|AE00179 - | Contains protein domain | kinase | 1024, 1046 |
| | | (AE001798) glucokinase [Thermotoga maritima] | (PF00480) - ROK family | | |
| 435 | 94845347 (7933, 7934) | Novel Protein sim. GBank gi\|4455704\|emb\|CAB36689\| - (AL035500) | Contains protein domain | kinase | 1024, 1027, 1041, 1046 |
| | | putative two-component system sensor [Mycobacterium leprae] | (PF00512) - Histidine kinase | | |
| 436 | 78796199 (4913, 4914) | Novel Protein sim. GBank gi\|1077386\|pir\|\|S51348 - hypothetical protein | | kinase | 1024 |
| | | YLR345w - yeast (Saccharomyces cerevisiae) | | | |
| 437 | 11072203 (5567, 5568) | Novel Protein sim. GBank gi\|113559\|sp\|P10869\|AK_YEAST - | | kinase | 1031 |
| | | ASPARTOKINASE (ASPARTATE KINASE) | | | |
| 438 | 80219067 (7127, 7128) | Novel Protein sim. GBank gi\|1169289\|sp\|P43550\|DHAK_YEAST - | | kinase | 1003, 1004, 1015, 1022 |
| | | DIHYDROXYACETONE KINASE 2 (GLYCERONE KINASE) | | | |
| 439 | 10174239 (2089, 2090) | Novel Protein sim. GBank gi\|1176152\|sp\|P44507\|YHAD_HAEIN - | | kinase | 1003 |
| | | HYPOTHETICAL PROTEIN HI0091 | | | |
| 440 | 85811009 (5659, 5660) | Novel Protein sim. GBank gi\|140977\|sp\|P18961\|YPK2_YEAST - | | kinase | 1017 |
| | | SERINE/THREONINE-PROTEIN KINASE YPK2/YKR2 | | | |
| 441 | 9061533 (3861, 3862) | Novel Protein sim. GBank gi\|146923 (M24910) - nitrogenase reductase | | kinase | 1004 |
| | | [Escherichia coli] | | | |
| 442 | 15023387 (5237, 5238) | Novel Protein sim. GBank gi\|1480174 (U56773) - pelle-like protein kinase | | kinase | 1001, 1022 |
| | | [Mus musculus] | | | |
| 443 | 47660080 (4719, 4720) | Novel Protein sim. GBank gi\|1651932\|dbj\|BAA16858\| - (D90901) nitrogen | | kinase | 1026 |
| | | fixation positive activator protein [Synechocystis sp.] | | | |
| 444 | 88095282 (6513, 6514) | Novel Protein sim. GBank gi\|1652968\|dbj\|BAA17885\| - (D90910) sensory | | kinase | 1031 |
| | | transduction histidine kinase [Synechocystis sp.] | | | |
| 445 | 79570150 (3697, 3698) | Novel Protein sim. GBank gi\|1653309\|dbj\|BAA18224\| - (D90912) | | kinase | 1015 |
| | | regulatory components of sensory transduction system [Synechocystis | | | |
| | | sp.] | | | |
| 446 | 79565494 (5593, 5594) | Novel Protein sim. GBank gi\|1709963\|sp\|Q10791\|PYRH_MYCTU - | | kinase | 1015 |
| | | URIDYLATE KINASE (UK) (URIDINE MONOPHOSPHATE KINASE) | | | |
| | | (UMP KINASE) | | | |
| 447 | 37802513 (1095, 1096) | Novel Protein sim. GBank gi\|1711416\|sp\|P53351\|SNK_MOUSE - | | kinase | 1055 |
| | | SERINE/THREONINE-PROTEIN KINASE SNK (SERUM INDUCIBLE | | | |
| | | KINASE) | | | |
| 448 | 87452635 (6847, 6848) | Novel Protein sim. GBank gi\|172986 (K02116) - thymidylate kinase | | kinase | 1020, 1023 |
| | | [Saccharomyces cerevisiae] | | | |
| 449 | 80234034 (3939, 3940) | Novel Protein sim. GBank gi\|1730060\|sp\|P53894\|KNQ1_YEAST - | | kinase | 1001, 1003, 1004, 1006, |
| | | PROBABLE SERINE/THREONINE-PROTEIN KINASE YNL161W | | | 1008, 1020, 1021, 1022, |
| | | | | | 1023, 1036 |
| 450 | 25322315 (6143, 6144) | Novel Protein sim. GBank gi\|173179 (M59835) - protein kinase | | kinase | 1015 |
| | | [Saccharomyces cerevisiae] | | | |
| 451 | 20728597 (2219, 2220) | Novel Protein sim. GBank gi\|1839006\|emb\|CAB06648\| - (Z85982) argB | | kinase | 1004, 1010 |
| | | [Mycobacterium tuberculosis] | | | |
| 452 | 8219595 (693, 694) | Novel Protein sim. GBank gi\|231831\|sp\|P29931\|COBP_PSEDE - | | kinase | 1020 |
| | | COBINAMIDE KINASE/COBINAMIDE PHOSPHATE | | | |
| | | GUANYLYLTRANSFERASE | | | |
| 453 | 23333334 (6951, 6952) | Novel Protein sim. GBank gi\|2499489\|sp\|Q41141\|PFPB_RICCO - | | kinase | 1050 |
| | | PYROPHOSPHATE-FRUCTOSE 6-PHOSPHATE 1- | | | |
| | | PHOSPHOTRANSFERASE BETA SUBUNIT (PFP) (6- | | | |
| | | PHOSPHOFRUCTOKINASE (PYROPHOSPHATE)) (PYROPHOSPHATE- | | | |
| | | DEPENDENT 6-PHOSPHOFRUCTOSE-1-KINASE) (PPI-PFK) | | | |
| 454 | 66051893 (7349, 7350) | Novel Protein sim. GBank gi\|2499558\|sp\|Q55168\|Y473_SYNY3- | | kinase | 1007, 1046 |
| | | HYPOTHETICAL 84.2 KD PROTEIN SLR0473 | | | |
| 455 | 27368121 (6569, 6570) | Novel Protein sim. GBank gi\|2499624\|sp\|Q08217\|KOE5_YEAST - | | kinase | 1007 |
| | | PROBABLE SERINE/THREONINE-PROTEIN KINASE YOL045W | | | |
| 456 | 21413329 (5531, 5532) | Novel Protein sim. GBank gi\|2624308\|emb\|CAA15581\| - (AL008967) ribF | | kinase | 1003 |
| | | [Mycobacterium tuberculosis] | | | |
| 457 | 66770442 (2755, 2756) | Novel Protein sim. GBank gi\|2665722 (AF035608) - ATP sulfurylase GTP- | | kinase | 1046 |
| | | binding subunit/ApS kinase [Pseudomonas aeruginosa] | | | |
| 458 | 32118574 (5557, 5558) | Novel Protein sim. GBank gi\|281611\|pir\|\|B41863 - two-component | | kinase | 1004 |
| | | regulatory protein lemA - Pseudomonas syringae | | | |
| 459 | 25261297 (8675, 8676) | Novel Protein sim. GBank gi\|2853031\|gb\|AAC02225.1\| - (AF045252) | | kinase | 1002, 1020 |
| | | tousled-like kinase [Mus musculus] | | | |
| 460 | 78395482 (2427, 2428) | Novel Protein sim. GBank gi\|3002527 (AF010144) - neuronal thread | | kinase | 1027 |
| | | protein AD7c-NTP [Homo sapiens] | | | |
| 461 | 78676108 (627, 628) | Novel Protein sim. GBank gi\|3192019\|emb\|CAA19418\| - (AL023797) | | kinase | 1006, 1024 |
| | | uridylate kinase [Streptomyces coelicolor] | | | |
| 462 | 65678114 (8507, 8508) | Novel Protein sim. GBank gi\|3417448\|dbj\|BAA32344.1\| - (AB010087) | | kinase | 1008 |
| | | UMP kinase [Pseudomonas aeruginosa] | | | |
| 463 | 79562897 (7993, 7994) | Novel Protein sim. GBank gi\|3721570\|dbj\|BAA33549\| - (AB012767) CheA | | kinase | 1001 |
| | | Pseudomonas aeruginosa] | | | |
| 464 | 57300008 (5529, 5530) | Novel Protein sim. GBank gi\|3876090\|emb\|CAA93459.1\| - (Z69635) | | kinase | 1003 |
| | | Similarity to Yeast uridine kinase (SW: URK1_YEAST); cDNA EST | | | |
| | | EMBL: Z14695 comes from this gene; cDNA EST CEMSE17F comes from | | | |
| | | this gene; cDNA EST EMBL: D67355 comes from this gene; cDNA EST | | | |
| | | yk209h1.5 comes from this gen . . . | | | |
| 465 | 23308597 (1307, 1308) | Novel Protein sim. GBank gi\|4263521\|gb\|AAD15347\| - (AC004044) | | kinase | 1050 |
| | | putative WD-repeat protein [Arabidopsis thaliana] | | | |
| 466 | 79569260 (8601, 8602) | Novel Protein sim. GBank gi\|4417286\|gb\|AAD20411\| - (AC007019) | | kinase | 1031 |
| | | putative shikimate kinase [Arabidopsis thaliana] | | | |
| 467 | 55286491 (4309, 4310) | Novel Protein sim. GBank gi\|4464269\|emb\|CAB37472\| - (AL035559) | | kinase | 1026, 1050 |
| | | probable riboflavin kinase (FAD synthetase) [Streptomyces coelicolor] | | | |
| 468 | 11103781 (403, 404) | Novel Protein sim. GBank gi\|462451\|sp\|P34244\|KKK1_YEAST - | | kinase | 1004 |
| | | PROBABLE SERINE/THREONINE-PROTEIN KINASE YKL101W | | | |
| 469 | 8343449 (6465, 6466) | Novel Protein sim. GBank gi\|464393\|sp\|P33639\|PILS_PSEAE - SENSOR | | kinase | 1008 |
| | | PROTEIN PILS | | | |
| 470 | 66441099 (661, 662) | Novel Protein sim. GBank gi\|464401\|sp\|P33973\|PKN1_MYXXA - | | kinase | 1020 |
| | | SERINE/THREONINE-PROTEIN KINASE PKN1 | | | |
| 471 | 80219209 (2449, 2450) | Novel Protein sim. GBank gi\|464800\|sp\|P34164\|SIP2_YEAST - SIP2 | | kinase | 1008, 1020 |
| | | PROTEIN (SPM2 PROTEIN) | | | |
| 472 | 79822217 (4453, 4454) | Novel Protein sim. GBank gi\|4768862\|gb\|AAD29656.1\|AF12475 - | | kinase | 1031 |
| | | (AF124757) uridylate kinase [Zymomonas mobilis] | | | |
| 473 | 11130500 (2149, 2150) | Novel Protein sim. GBank gi\|4980976\|gb\|AAD35552.1\|AE00172 - | | kinase | 1004 |
| | | (AE001724) response regulator [Thermotoga maritima] | | | |
| 474 | 30239675 (1713, 1714) | Novel Protein sim. GBank gi\|5019771\|gb\|AAD37857.1\|AF13326 - | | kinase | 1041 |
| | | (AF133263) histidine protein kinase-response regulator hybrid protein | | | |
| | | CvgSY [Pseudomonas syringae pv. syringae] | | | |
| 475 | 9906368 (7487, 7488) | Novel Protein sim. GBank gi\|5458972\|emb\|CAB50458.1\| - (AJ248288) | | kinase | 1002 |
| | | PAB1332 [Pyrococcus abyssi] | | | |
| 476 | 25139201 (8207, 8208) | Novel Protein sim. GBank gi\|5702015\|emb\|CAB52141.1\| - (AJ012215) | | kinase | 1002 |
| | | GAL83 protein [Solanum tuberosum] | | | |
| 477 | 17958199 (8639, 8640) | Novel Protein sim. GBank gi\|585348\|sp\|P38080\|KBQ9_YEAST - | | kinase | 1015, 1041 |
| | | PROBABLE SERINE/THREONINE-PROTEIN KINASE YBR059C | | | |
| 478 | 19513267 (6921, 6922) | Novel Protein sim. GBank gi\|629283\|pir\|\|S48579 - hypothetical protein - | | kinase | 1021 |
| | | Mycoplasma capricolum (SGC3) (fragment) | | | |
| 479 | 77655106 (1987, 1988) | Novel Protein sim. GBank gi\|728831\|sp\|P39188\|ALU1_HUMAN - !!!! ALU | | kinase | 1050 |
| | | SUBFAMILY J WARNING ENTRY !!!! | | | |
| 480 | 78090999 (8789, 8790) | Novel Protein sim. GBank gi\|728831\|sp\|P39188\|ALU1_HUMAN - !!!! ALU | | kinase | 1034 |
| | | SUBFAMILY J WARNING ENTRY !!!! | | | |
| 481 | 55309229 (8945, 8946) | Novel Protein sim. GBank gi\|728831\|sp\|P39188\|ALU1_HUMAN - !!!! ALU | | kinase | 1017 |
| | | SUBFAMILY J WARNING ENTRY !!!! | | | |
| 482 | 29682073 (7539, 7540) | Novel Protein sim. GBank gi\|729900\|sp\|Q01919\|KIN4_YEAST - | | kinase | 1007 |
| | | SERINE/THREONINE-PROTEIN KINASE KIN4 | | | |
| 483 | 30259891 (6619, 6620) | Novel Protein sim. GBank gi\|730745\|sp\|P39928\|SLN1_YEAST - | | kinase | 1006 |
| | | OSMOLARITY TWO-COMPONENT SYSTEM PROTEIN SLN1 | | | |
| 484 | 32290853 (2671, 2672) | Novel Protein sim. GBank gi\|76183\|pir\|\|QQECIL - hypothetical 35K protein | | kinase | 1000, 1003, 1008, 1010 |
| | | (ileS-Isp operon) - Escherichia coli | | | |
| 485 | 65481433 (5521, 5522) | Novel Protein sim. GBank gi\|953191\|emb\|CAA62365\| - (X90856) | | kinase | 1046 |
| | | aminoglycoside phosphotransferase (3′)IIps [Pseudomonas aeruginosa] | | | |
| 486 | 29462591 (3841, 3842) | Novel Protein sim. GBank gi\|1345587\|sp\|P49106\|1431_MAIZE - 14-3-3- | Contains protein domain | kinaseinhibitor | 1024 |
| | | LIKE PROTEIN GF14-6 | (PF00244) - 14-3-3 proteins | | |
| 487 | 80432144 (6789, 6790) | Novel Protein sim. GBank gi\|1724020\|sp\|P49774\|YHIT_MYCLE - | | kinaseinhibitor | 1035 |
| | | HYPOTHETICAL HIT-LIKE PROTEIN U296A | | | |
| 488 | 29492267 (2929, 2930) | Novel Protein sim. GBank gi\|1176807\|sp\|Q09564\|YR71_CAEEL - | Contains protein domain | kinasereceptor | 1035 |
| | | HYPOTHETICAL 118.2 KD PROTEIN F43C1.1 IN CHROMOSOME III | (PF00560) - Leucine Rich Repeat | | |
| 489 | 78362875 (4495, 4496) | Novel Protein sim. GBank gi\|101398\|pir\|\|B28097 - TyB protein - yeast | | kinasereceptor | 1006 |
| | | (Saccharomyces cerevisiae) transposon Ty1-H3 | | | |
| 490 | 20295815 (8007, 8008) | Novel Protein sim. GBank gi\|4758676\|ref\|NP_004181.1\|pLIPF - lipase, | | lipase | 1020 |
| | | gastric | | | |
| 491 | 25267855 (4647, 4648) | Novel Protein sim. GBank gi\|1022734 (U36277) - I-kappa B alpha chain | Contains protein domain | MHC | 1021 |
| | | [Mus musculus] | (PF00023) - Ank repeat | | |
| 492 | 13889767 (8155, 8156) | | | MHC | 1031 |
| 493 | 41090826 (8385, 8386) | Novel Protein sim. GBank gi\|4539520\|emb\|CAB39994.1\| - (AL035424) | Contains protein domain | nucl_recpt | 1034 |
| | | dA22D12.1 (novel protein similar to Drosophila Kelch (Ring Canal protein, | (PF00651) - BTB/POZ domain | | |
| | | KEL) and a heterogenous set of other types of proteins) [Homo sapiens] | | | |
| 494 | 13075804 (6425, 6426) | Novel Protein sim. GBank gi\|2529416 (U73935) - unknown [Shewanella | | nucl_recpt | 1022 |
| | | sp. SCRC-2738] | | | |
| 495 | 40379402 (7751, 7752) | Novel Protein sim. GBank gi\|3036883\|emb\|CAA18516\| - (AL022374) | | nucl_recpt | 1034 |
| | | putative ABC transporter [Streptomyces coelicolor] | | | |
| 496 | 87453786 (4771, 4772) | Novel Protein sim. GBank gi\|5360230\|dbj\|BAA81911.1\| - (AB015287) Ran | | nucl_recpt | 1002, 1006, 1015, 1023 |
| | | [Oryza sativa] | | | |
| 497 | 13872373 (6931, 6932) | Novel Protein sim. GBank gi\|5453555\|ref\|NP_006316.1\|pARA2 - RAN, | | nucl_recpt | 1031 |
| | | member RAS oncogene family | | | |
| 498 | 27957653 (7881, 7882) | Novel Protein sim. GBank gi\|4050093 (AF110520) - NG28 [Mus | Contains protein domain | nuclease | 1003, 1022 |
| | | musculus] | (PF00023) - Ank repeat | | |
| 499 | 85800159 (5591, 5592) | Novel Protein sim. GBank gi\|2500086\|sp\|Q59560\|RECA_MYCSM - RECA | Contains protein domain | nuclease | 1007, 1014, 1023 |
| | | PROTEIN | (PF00154) - recA bacterium DNA | | |
| | | | recombination proteins | | |
| 500 | 78676017 (4051, 4052) | Novel Protein sim. GBank gi\|1171033\|sp\|P43247\|MSH2_MOUSE - DNA | Contains protein domain | nuclease | 1006 |
| | | MISMATCH REPAIR PROTEIN MSH2 | (PF00488) - DNA mismatch repair | | |
| | | | proteins, mutS family | | |
| 501 | 35900336 (1943, 1944) | Novel Protein sim. GBank gi\|79102\|pir\|\|A28668 - DNA mismatch repair | Contains protein domain | nuclease | 1050 |
| | | protein mutS - Salmonella typhimurium | (PF00488) - DNA mismatch repair | | |
| | | | proteins, mutS family | | |
| 502 | 79648614 (5663, 5664) | Novel Protein sim. GBank gi\|887620\|emb\|CAA90210\| - (Z49939) unknown | Contains protein domain | nuclease | 1002, 1021, 1035 |
| | | [Saccharomyces cerevislae] | (PF00636) - RNase3 domain | | |
| 503 | 79818359 (4553, 4554) | Novel Protein sim. GBank gi\|140964\|sp\|P26793\|RA27_YEAST - | Contains protein domain | nuclease | 1004 |
| | | STRUCTURE SPECIFIC ENDONUCLEASE RAD27 | (PF00752) - XPG N-terminal | | |
| | | | domain | | |
| 504 | 66258516 (1831, 1832) | Novel Protein sim. GBank gi\|1710612\|sp\|Q10793\|RNH2_MYCTU - | Contains protein domain | nuclease | 1008, 1015 |
| | | PROBABLE RIBONUCLEASE HII (RNASE HII) | (PF01351) - Ribonuclease HII | | |
| 505 | 28962172 (7273, 7274) | Novel Protein sim. GBank gi\|134579\|sp\|P24554\|RADA_ECOLI - DNA | Contains protein domain | nuclease | 1002 |
| | | REPAIR PROTEIN RADA (DNA REPAIR PROTEIN SMS) | (PF01443) - Viral (Superfamily 1) | | |
| | | | RNA helicase | | |
| 506 | 78317604 (1805, 1806) | Novel Protein sim. GBank gi\|106322\|pir\|\|B34087 - hypothetical protein | | nuclease | 1024 |
| | | (L1H 3′ region) - human | | | |
| 507 | 79113849 (2893, 2894) | Novel Protein sim. GBank gi\|106322\|pir\|\|B34087 - hypothetical protein | | nuclease | 1006 |
| | | (L1H 3′ region) - human | | | |
| 508 | 11814919 (1113, 1114) | Novel Protein sim. GBank gi\|111811\|pir\|\|S16788 - probable reverse | | nuclease | 1022 |
| | | transcriptase - rat | | | |
| 509 | 10340226 (1591, 1592) | Novel Protein sim. GBank gi\|1174917\|sp\|P44410\|UVRA_HAEIN - | | nuclease | 1002 |
| | | EXCINUCLEASE ABC SUBUNIT A | | | |
| 510 | 79959371 (8569, 8570) | Novel Protein sim. GBank gi\|1176326\|sp\|PP44608\|RBN_HAEIN - | | nuclease | 1014 |
| | | RIBONUCLEASE BN (RNASE BN) | | | |
| 511 | 57284222 (6893, 6894) | Novel Protein sim. GBank gi\|118921\|sp\|P21704\|DRN1_RAT - | | nuclease | 1003, 1004, 1008, 1020, |
| | | DEOXYRIBONUCLEASE I PRECURSOR (DNASE I) | | | 1022, 1031 |
| 512 | 12797175 (1623, 1624) | Novel Protein sim. GBank gi\|119669\|sp\|P07648\|EX5C_ECOLI - | | nuclease | 1003 |
| | | EXODEOXYRIBONUCLEASE V 125 KD POLYPEPTIDE | | | |
| | | (EXONUCLEASE V GAMMA CHAIN) | | | |
| 513 | 29896989 (105, 106) | Novel Protein sim. GBank gi\|126295\|sp\|P08547\|LIN1_HUMAN - LINE-1 | | nuclease | 1022 |
| | | REVERSE TRANSCRIPTASE HOMOLOG | | | |
| 514 | 95087970 (1815, 1816) | Novel Protein sim. GBank gi\|126295\|sp\|P08547\|LIN1_HUMAN - LINE-1 | | nuclease | 1041 |
| | | REVERSE TRANSCRIPTASE HOMOLOG | | | |
| 515 | 33207232 (441, 442) | Novel Protein sim. GBank gi\|126296\|sp\|P08548\|LIN1_NYCCO - LINE-1 | | nuclease | 1024 |
| | | REVERSE TRANSCRIPTASE HOMOLOG | | | |
| 516 | 86471727 (761, 762) | Novel Protein sim. GBank gi\|126296\|sp\|P08548\|LIN1_NYCCO - LINE-1 | | nuclease | 1026 |
| | | REVERSE TRANSCRIPTASE HOMOLOG | | | |
| 517 | 79634315 (2057, 2058) | Novel Protein sim. GBank gi\|126296\|sp\|P08548\|LIN1_NYCCO - LINE-1 | | nuclease | 1023 |
| | | REVERSE TRANSCRIPTASE HOMOLOG | | | |
| 518 | 56155730 (7725, 7726) | Novel Protein sim. GBank gi\|126296\|sp\|P08548\|LIN1_NYCCO - LINE-1 | | nuclease | 1019 |
| | | REVERSE TRANSCRIPTASE HOMOLOG | | | |
| 519 | 46873742 (7985, 7986) | Novel Protein sim. GBank gi\|1335205\|emb\|CAA36480\| - (X52235) ORFII | | nuclease | 1026 |
| | | [Homo sapiens] | | | |
| 520 | 11818060 (1117, 1118) | Novel Protein sim. GBank gi\|1553037 (U68235) - RecN [Bacillus subtilis] | | nuclease | 1004 |
| 521 | 66727335 (5549, 5550) | Novel Protein sim. GBank gi\|1890658 (U70046) - UV endonuclease | | nuclease | 1046 |
| | | [Pseudomonas aeruginosa] | | | |
| 522 | 36902869 (8153, 8154) | Novel Protein sim. GBank gi\|2072951 (U93564) - putative p150 [Homo | | nuclease | 1024 |
| | | sapiens] | | | |
| 523 | 58090567 (7577, 7578) | Novel Protein sim. GBank gi\|2072964 (U93569) - putative p150 [Homo | | nuclease | 1051 |
| | | sapiens] | | | |
| 524 | 88098361 (8017, 8018) | Novel Protein sim. GBank gi\|2072967 (U93570) - putative p150 [Homo | | nuclease | 1017 |
| | | sapiens] | | | |
| 525 | 94853626 (1931, 1932) | Novel Protein sim. GBank gi\|2193870\|dbj\|BAA20419\| - (D84391) reverse | | nuclease | 1008 |
| | | transcriptase [Mus musculus] | | | |
| 526 | 21433107 (2223, 2224) | Novel Protein sim. GBank gi\|2443320\|dbj\|BAA22288\| - (D85597) | | nuclease | 1008 |
| | | polyprotein [Oryza australiensis] | | | |
| 527 | 11588373 (7217, 7218) | Novel Protein sim. GBank gi\|2979589 (AC004416) - | | nuclease | 1031 |
| | | WUGSC: H_RG013N12.gw.1335199.a gene product [Homo sapiens] | | | |
| 528 | 35003877 (5019, 5020) | Novel Protein sim. GBank gi\|2981631\|dbj\|BAA25253.1\| - (AB012223) | | nuclease | 1047 |
| | | ORF2 [Canis familiaris] | | | |
| 529 | 9845639 (5731, 5732) | Novel Protein sim. GBank gi\|2981631\|dbj\|BAA25253.1\| - (AB012223) | | nuclease | 1002 |
| | | ORF2 [Canis familiaris] | | | |
| 530 | 35100184 (7789, 7790) | Novel Protein sim. GBank gi\|2981631\|dbj\|BAA25253.1\| - (AB012223) | | nuclease | 1022 |
| | | ORF2 [Canis familiaris] | | | |
| 531 | 20728368 (1567, 1568) | Novel Protein sim. GBank gi\|3329275 (AE001353) - Axial Filament Protein | | nuclease | 1004 |
| | | [Chlamydia trachomatis] | | | |
| 532 | 95001722 (7419, 7420) | Novel Protein sim. GBank gi\|417577\|sp\|P32863\|RA54_YEAST - DNA | | nuclease | 1015, 1020, 1022, 1035 |
| | | REPAIR AND RECOMBINATION PROTEIN RAD54 | | | |
| 533 | 70945419 (5279, 5280) | Novel Protein sim. GBank gi\|4468694\|emb\|CAB38148.1\| - (AL035591) | | nuclease | 1026 |
| | | ABC excision nuclease subunit A [Streptomyces coelicolor] | | | |
| 534 | 79756492 (3559, 3560) | Novel Protein sim. GBank gi\|4585583\|emb\|CAB40851.1\| - (AL049628) | | nuclease | 1020 |
| | | putative DNA repair protein [Streptomyces coelicolor] | | | |
| 535 | 71793553 (3885, 3886) | Novel Protein sim. GBank gi\|465488\|sp\|P33301\|XRS2_YEAST - DNA | | nuclease | 1007 |
| | | REPAIR PROTEIN XRS2 | | | |
| 536 | 71059951 (2151, 2152) | Novel Protein sim. GBank gi\|465736\|sp\|P34280\|YKK3_CAEEL - | | nuclease | 1030 |
| | | HYPOTHETICAL 64.3 KD GTP-BINDING PROTEIN C02F5.3 IN | | | |
| | | CHROMOSOME III | | | |
| 537 | 24116094 (3991, 3992) | Novel Protein sim. GBank gi\|5031889\|ref\|NP_005570.1\|pLRE1 - LINE | | nuclease | 1002 |
| | | retrotransposable element 1 | | | |
| 538 | 78269359 (6701, 6702) | Novel Protein sim. GBank gi\|5031889\|ref\|NP_005570.1\|pLRE1 - LINE | | nuclease | 1026 |
| | | retrotransposable element 1 | | | |
| 539 | 79620600 (4693, 4694) | Novel Protein sim. GBank gi\|536873 (M34549) - POL3 gene product | | nuclease | 1023 |
| | | [Saccharomyces cerevisiae] | | | |
| 540 | 78385400 (5471, 5472) | Novel Protein sim. GBank gi\|5678922\|gb\|AAD46808.1\|AF15764 - | | nuclease | 1024 |
| | | (AF157643) RecB [Mycobacterium smegmatis] | | | |
| 541 | 80218357 (17, 18) | Novel Protein sim. GBank gi\|731301\|sp\|P39707\|SE34_YEAST - TRNA- | | nuclease | 1002, 1004, 1006, 1008, |
| | | SPLICING ENDONUCLEASE SUBUNIT SEN34 (TRNA-INTRON | | | 1010, 1015, 1020, 1021, |
| | | ENDONUCLEASE) | | | 1022, 1028, 1031, 1035 |
| 542 | 78739907 (257, 258) | Novel Protein sim. GBank gi\|807677 (M13101) - unknown protein [Rattus | | nuclease | 1024 |
| | | norvegicus] | | | |
| 543 | 79654125 (6053, 6054) | Novel Protein sim. GBank gi\|87765\|pir\|\|JU0033 - hypothetical L1 protein | | nuclease | 1050 |
| | | (third Intron of gene TS) - human | | | |
| 544 | 86476034 (8003, 8004) | Novel Protein sim. GBank gi\|87765\|pir\|\|JU0033 - hypothetical L1 protein | | nuclease | 1026 |
| | | (third Intron of gene TS) - human | | | |
| 545 | 71770950 (2443, 2444) | | | nuclease | 1024 |
| 546 | 46905681 (4497, 4498) | | | nuclease | 1037 |
| 547 | 79113846 (2735, 2736) | Novel Protein sim. GBank gi\|2132474\|pir\|\|S58091 - probable membrane | | nucleaseinhib | 1021, 1036 |
| | | protein YDR091c - yeast (Saccharomyces cerevisiae) | | | |
| 548 | 79211727 (8029, 8030) | Novel Protein sim. GBank gi\|499686 (L33861) - fibropellin Ia [Heliocidaris | Contains protein domain | oncogene | 1051 |
| | | erythrogramma] | (PF00008) - EGF-like domain | | |
| 549 | 25266562 (2359, 2360) | Novel Protein sim. GBank gi\|5650780\|gb\|AAD45948.1\|AF15196 - | Contains protein domain | oncogene | 1006 |
| | | (AF151968) RGS protein RGS-17 [Gallus gallus] | (PF00615) - Regulator of G | | |
| | | | protein signaling domain | | |
| 550 | 79800908 (8519, 8520) | Novel Protein sim. GBank gi\|135914\|sp\|P17408\|TLM_MOUSE - TLM | | oncogene | 1001, 1002, 1006, 1015, |
| | | PROTEIN (TLM ONCOGENE) | | | 1020, 1022, 1024, 1025, |
| | | | | | 1031, 1035, 1041, 1051 |
| 551 | 27846133 (7651, 7652) | Novel Protein sim. GBank gi\|2137470\|pir\|\|49342 - Ifc - mouse | | oncogene | 1004 |
| 552 | 14995192 (3049, 3050) | Novel Protein sim. GBank gi\|2462824 (AF000657) - similar to Jun | | oncogene | 1022 |
| | | activation domain binding protein [Arabidopsis thaliana] | | | |
| 553 | 49524780 (1273, 1274) | Novel Protein sim. GBank gi\|2516239\|dbj\|BAA22654\| - (AB004664) | | oncogene | 1022, 1033, 1055 |
| | | Rab33B [Mus musculus] | | | |
| 554 | 29689163 (4623, 4624) | Novel Protein sim. GBank gi\|313261\|emb\|CAA51936\| - (X73532) TEF1 | | oncogene | 1007 |
| | | [Saccharomyces cerevisiae] | | | |
| 555 | 25255728 (1573, 1574) | Novel Protein sim. GBank gi\|4586338\|dbj\|BAA76357.1\| - (AB016787) | Contains protein domain | oxidase | 1002 |
| | | cytochrome o ubiquinol oxidase B [Pseudomonas putida] | (PF00115) - Cytochrome C and | | |
| | | | Quinol oxidase polypeptide I | | |
| 556 | 80232185 (2119, 2120) | Novel Protein sim. GBank gi\|117135\|sp\|P21592\|COXX_YEAST - | | oxidase | 1015, 1020, 1022 |
| | | CYTOCHROME C OXIDASE ASSEMBLY PROTEIN COX10 | | | |
| | | PRECURSOR | | | |
| 557 | 94631702 (4875, 4876) | Novel Protein sim. GBank gi\|1176480\|sp\|P44453\|YJJT_HAEIN - | | oxidase | 1002, 1028 |
| | | HYPOTHETICAL PROTEIN HI0012 | | | |
| 558 | 78949661 (4455, 4456) | Novel Protein sim. GBank gi\|129736\|sp\|P28225\|PDXH_ECOLI - | | oxidase | 1021 |
| | | PYRIDOXAMINE 5′-PHOSPHATE OXIDASE (PNP/PMP OXIDASE) | | | |
| 559 | 90936753 (197, 198) | Novel Protein sim. GBank gi\|3024323\|sp\|O35078\|OXDA_RAT - D-AMINO | | oxidase | 1018 |
| | | ACID OXIDASE (DAMOX) (DAO) (DAAO) | | | |
| 560 | 78368526 (7411, 7412) | Novel Protein sim. GBank gi\|3402239\|emb\|CAA20175\| - (AL031184) | | oxidase | 1002, 1026 |
| | | aminomethyltransferase [Streptomyces coelicolor] | | | |
| 561 | 79618286 (5795, 5796) | Novel Protein sim. GBank gi\|520754 (L27797) - putative [Bacillus subtilis] | | oxidase | 1003 |
| 562 | 27980141 (2865, 2866) | Novel Protein sim. GBank gi\|547994\|sp\|P37061\|NAOX_ENTFA - NADH | | oxidase | 1004 |
| | | OXIDASE (NOXASE) | | | |
| 563 | 20414038 (8695, 8696) | Novel Protein sim. GBank gi\|5578703\|gb\|AAD17377.2\| - (U65001) | Contains protein domain | oxygenase | 1008 |
| | | putative aromatic-ring hydroxylating dioxygenase alpha-subunit | (PF00355) - Rieske [2Fe-2S] | | |
| | | [Sphingomonas sp.] | domain | | |
| 564 | 10200183 (1625, 1626) | Novel Protein sim. GBank gi\|3043760\|dbj\|BAA25544\| - (AB012759) rPOP | Contains protein domain | peptidase | 1004 |
| | | [Rattus norvegicus] | (PF00326) - Prolyl oligopeptidase | | |
| | | | family | | |
| 565 | 78680263 (6917, 6918) | Novel Protein sim. GBank gi\|1651216\|dbj\|BAA13561.1\| - (D88209) Pz- | | peptidase | 1002 |
| | | peptidase [Bacillus IIchenlformis] | | | |
| 566 | 80079434 (1155, 1156) | Novel Protein sim. GBank gi\|2415396 (AF015775) - carboxypeptidase | | peptidase | 1031 |
| | | [Bacillus subtilis] | | | |
| 567 | 79853412 (107, 108) | Novel Protein sim. GBank gi\|2688962 (AF027768) - LspA [Serratia | | peptidase | 1002, 1004 |
| | | marcescens] | | | |
| 568 | 86477781 (7743, 7744) | Novel Protein sim. GBank gi\|2911008\|emb\|CAA17501\| - (AL021958) map' | | peptidase | 1017 |
| | | [Mycobacterium tuberculosis] | | | |
| 569 | 28828156 (5349, 5350) | Novel Protein sim. GBank gi\|461915\|sp\|P33894\|DAP1_YEAST - | | peptidase | 1001, 1006, 1020 |
| | | DIPEPTIDYL AMINOPEPTIDASE A (DPAP A) (YSCIV) | | | |
| 570 | 88098768 (5321, 5322) | Novel Protein sim. GBank gi\|477819\|pir\|\|B48529 - mitochondrial | | peptidase | 1005, 1020, 1023 |
| | | processing peptidase (EC 3.4.99.41) beta chain precursor - potato | | | |
| 571 | 14998912 (6635, 6636) | Novel Protein sim. GBank gi\|5139244\|gb\|AAD40473.1\|AF11653 - | | peptidase | 1022 |
| | | (AF116532) endopeptidase O [Streptococcus parasanguinis] | | | |
| 572 | 55926145 (1305, 1306) | Novel Protein sim. GBank gi\|731481\|sp\|P40051\|YEQ8_YEAST - | | peptidase | 1019, 1020, 1031 |
| | | HYPOTHETICAL 58.0 KD PEPTIDASE IN PTP3-ILV1 INTERGENIC | | | |
| | | REGION | | | |
| 573 | 20436220 (229, 230) | Novel Protein sim. GBank gi\|1085007\|pir\|\|S49465 - catalase (EC 1.11.1.6) - | Contains protein domain | peroxidase | 1022 |
| | | nematode (Onchocerca volvulus) | (PF00199) - Catalase | | |
| 574 | 46693063 (6349, 6350) | Novel Protein sim. GBank gi\|231692\|sp\|P29422\|CATA_MICLU - | Contains protein domain | peroxidase | 1031 |
| | | CATALASE | (PF00199) - Catalase | | |
| 575 | 80384348 (6741, 6742) | Novel Protein sim. GBank gi\|3608\|emb\|CAA28298\| - (X04625) catalase T | Contains protein domain | peroxidase | 1002, 1003, 1004, 1006, |
| | | (AA 1-562) [Saccharomyces cerevisiae] | (PF00199) - Catalase | | 1007, 1008, 1015, 1020, |
| | | | | | 1021, 1022, 1024, 1026, |
| | | | | | 1028, 1031, 1035, 1036 |
| | | | | | 1041 |
| 576 | 79256928 (8821, 8822) | Novel Protein sim. GBank gi\|2598550\|emb\|CAA03927\| - (AJ000109) | Contains protein domain | peroxidase | 1020, 1024, 1036, 1041 |
| | | gluthatione peroxidase [Lactococcus lactis] | (PF00255) - Glutathione | | |
| | | | peroxidases | | |
| 577 | 78760632 (5285, 5286) | Novel Protein sim. GBank gi\|464970\|sp\|P34760\|TSA1_YEAST - THIOL- | | peroxidase | 1041 |
| | | SPECIFIC ANTIOXIDANT PROTEIN (PRP) | | | |
| 578 | 78736927 (6541, 6542) | Novel Protein sim. GBank gi\|465521\|sp\|P34227\|YBG4_YEAST - | | peroxidase | 1020 |
| | | HYPOTHETICAL 29.5 KD PROTEIN IN SEF1-KIP1 INTERGENIC | | | |
| | | REGION | | | |
| 579 | 86471554 (7799, 7800) | Novel Protein sim. GBank gi\|1001298\|dbj\|BAA10785\| - (D64006) | Contains protein domain | phosphatase | 1017 |
| | | chemotaxis protein CheA [Synechocystis sp.] | (PF00072 - Response regulator | | |
| | | | receiver domain | | |
| 580 | 94997571 (7845, 7846) | Novel Protein sim. GBank gi\|2815358\|emb\|CAA16481\| - (AL021530) | Contains protein domain | phosphatase | 1004 |
| | | puative turgor pressure regulator [Streptomyces coelicolor] | (PF00072) - Response regulator | | |
| | | | receiver domain | | |
| 581 | 95292942 (2279, 2280) | Novel Protein sim. GBank gi\|2916942\|emb\|CAA17580\| - (AL021999) | Contains protein domain | phosphatase | 1003, 1010, 1014, 1020, |
| | | hypothetical protein Rv0981 [Mycobacterium tuberculosis] | (PF00072) - Response regulator | | 1022, 1031, 1036 |
| | | | receiver domain | | |
| 582 | 11692257 (7489, 7490) | Novel Protein sim. GBank gi\|1172700\|sp\|P43922\|PT1_HAEIN - | Contains protein domain | phosphatase | 1031 |
| | | PHOSPHOENOLPYRUVATE- PROTEIN PHOSPHOTRANSFERASE | (PF00391) - PEP-utilizing | | |
| | | (PHOSPHOTRANSFERASE SYSTEM, ENZYME I) | enzymes | | |
| 583 | 23308875 (2679, 2680) | Novel Protein sim. GBank gi\|3281853\|emb\|CAA19748\| - (AL031004) | Contains protein domain | phosphatase | 1050 |
| | | putative protein [Arabidopsis thaliana] | (PF00481) - Protein phosphatase | | |
| | | | 2C | | |
| 584 | 79168027 (4989, 4990) | Novel Protein sim. GBank gi\|499301\|emb\|CAA54383\| - (X77116) ABI1 | Contains protein domain | phosphatase | 1028, 1047 |
| | | [Arabidopsis thaliana] | (PF00481) - Protein phosphatase | | |
| | | | 2C | | |
| 585 | 20293956 (5551, 5552) | Novel Protein sim. GBank gi\|2960189\|emb\|CAA18087.1\| - (AL022121) | Contains protein domain | phosphatase | 1001 |
| | | hypothetical protein Rv3765c [Mycobacterium tuberculosis] | (PF00486) - Transcriptional | | |
| | | | regulatory protein, C terminal | | |
| 586 | 36990550 (8281, 8282) | Novel Protein sim. GBank gi\|509815 (U01971) - MtrA [Mycobacterium | Contains protein domain | phosphatase | 1014 |
| | | tuberculosis] | (PF00486) - Transcriptional | | |
| | | | regulatory protein, C terminal | | |
| 587 | 80241814 (3833, 3834) | Novel Protein sim. GBank gi\|586390\|sp\|P38148\|YB9T_YEAST - | Contains protein domain | phosphatase | 1004, 1006, 1023 |
| | | PROBABLE PROTEIN-TYROSINE PHOSPHATASE YBR276C | (PF00782) - Dual specificity | | |
| | | | phosphatase, catalytic domain | | |
| 588 | 87898935 (5933, 5934) | Novel Protein sim. GBank gi\|3128356 (AF010496) - hypothetical protein | | phosphatase | 1013 |
| | | [Rhodobacter capsulatus] | | | |
| 589 | 29455367 (3715, 3716) | Novel Protein sim. GBank gi\|4091129\|gb\|AAC98973\| - (AF050165) protein | | phosphatase | 1024 |
| | | phosphatase 2A regulatory subunit PR59; PP2A regulatory subunit PR59 | | | |
| | | [Mus musculus] | | | |
| 590 | 10868760 (5779, 5780) | Novel Protein sim. GBank gi\|141240\|sp\|P23139\|YPE2_RHORU - | | phosphorylase | 1031 |
| | | HYPOTHETICAL 25.8 KD PROTEIN IN PETC 3′REGION | | | |
| 591 | 79181916 (7997, 7998) | Novel Protein sim. GBank gi\|118829\|sp\|P21189\|DPO2_ECOLI - DNA | Contains protein domain | polymerase | 1020 |
| | | POLYMERASE II (POL II) | (PF00136) - DNA polymerase | | |
| | | | family B | | |
| 592 | 8364885 (779, 780) | Novel Protein sim. GBank gi\|5002704\|emb\|CAB44358.1\| - (AJ242630) | Contains protein domain | polymerase | 1008 |
| | | DNA polymerase I [Methylobacterium sp. DM4] | (PF00476) - DNA polymerase | | |
| | | | family A | | |
| 593 | 79639300 (3001, 3002) | Novel Protein sim. GBank gi\|4982191\|gb\|AAD36686.1\|AE00180 - | Contains protein domain | polymerase | 1035 |
| | | (AE001805) DNA-directed DNA polymerase I [Thermotoga maritima] | (PF01367) - 5′-3′exonuclease | | |
| 594 | 86474933 (3183, 3184) | Novel Protein sim. GBank gi\|123452\|sp\|P28630\|HOLA_ECOLI - DNA | | polymerase | 1035 |
| | | POLYMERASE III, DELTA SUBUNIT | | | |
| 595 | 79612944 (7821, 7822) | Novel Protein sim. GBank gi\|171412 (M61710) - DNA polymerase II | | polymerase | 1004 |
| | | subunit-B [Saccharomyces cerevislae] | | | |
| 596 | 27845712 (809, 810) | Novel Protein sim. GBank gi\|1723953\|sp\|P53091\|MCM6_YEAST - | | polymerase | 1008 |
| | | MINICHROMOSOME MAINTENANCE PROTEIN 6 | | | |
| 597 | 35112033 (1855, 1856) | Novel Protein sim. GBank gi\|2506368\|sp\|P28631\|HOLB_ECOLI - DNA | | polymerase | 1000 |
| | | POLYMERASE III, DELTA'SUBUNIT | | | |
| 598 | 79626110 (7599, 7600) | Novel Protein sim. GBank gi\|2664208\|emb\|CAA10903\| - (AJ222643) | | polymerase | 1008, 1036 |
| | | Glycyl-tRNA synthetase [Thermus thermophilus] | | | |
| 599 | 80237241 (413, 414) | Novel Protein sim. GBank gi\|2960145\|emb\|CAA18043.1\| - (AL022121) | | polymerase | 1001, 1008, 1020, 1022, |
| | | dnaZX [Mycobacterium tuberculosis] | | | 1025 |
| 600 | 20474435 (1219, 1220) | Novel Protein sim. GBank gi\|4102990 (AF019254) - DNA polymerase | | polymerase | 1031 |
| | | epsilon homolog [Emericella nidulans] | | | |
| 601 | 33039786 (8615, 8616) | Novel Protein sim. GBank gi\|4102990 (AF019254) - DNA polymerase | | polymerase | 1000 |
| | | epsilon homolog [Emericella nidulans] | | | |
| 602 | 20610414 (1915, 1916) | Novel Protein sim. GBank gi\|585062\|sp\|Q07700\|DPO1_MYCTU - DNA | | polymerase | 1003 |
| | | POLYMERASE I (POL I) | | | |
| 603 | 30407410 (5247, 5248) | Novel Protein sim. GBank gi\|730382\|sp\|P10363\|PRI1_YEAST - DNA | | polymerase | 1047 |
| | | PRIMASE SMALL SUBUNIT (DNA PRIMASE 48 KD SUBUNIT) (P48) | | | |
| 604 | 79835306 (1879,1880) | Novel Protein sim. GBank gi\|730503\|sp\|P40339\|RFC4_YEAST - | | polymerase | 1021 |
| | | ACTIVATOR 1.37 KD SUBUNIT (REPLICATION FACTOR C 37 KD | | | |
| | | SUBUNIT) | | | |
| 605 | 86660271 (2327, 2328) | Novel Protein sim. GBank gi\|2104908\|emb\|CAA68912\| - (Y07632) | Contains protein domain | potassium_channel | 1041 |
| | | potassium channel [Zea mays] | (PF00023) - Ank repeat | | |
| 606 | 34129572 (6721, 6722) | Novel Protein sim. GBank gi\|4103749 (AF027166) - aspartic protease | Contains protein domain | protease | 1024 |
| | | precursor [Strongyloides stercoralis] | (PF00026) - Eukaryotic aspartyl | | |
| | | | protease | | |
| 607 | 94140127 (7575, 7576) | Novel Protein sim. GBank gi\|4455705\|emb\|CAB36690\| - (AL035500) | Contains protein domain | protease | 1002 |
| | | putative serine protease [Mycobacterium leprae] | (PF00089) - Trypsin | | |
| 608 | 27969651 (607, 608) | Novel Protein sim. GBank gi\|4506153\|ref\|NP_002764.1\|pPRSS - | Contains protein domain | protease | 1031 |
| | | protease, serine, 8 (prostasin) | (PF00089) - Trypsin | | |
| 609 | 78738795 (7611, 7612) | Novel Protein sim. GBank gi\|91949\|pir\|\|S15904 - alpha-1 proteinase | Contains protein domain | protease | 1020, 1024 |
| | | inhibitor III, variant 1 precursor - rat | (PF00207) - Alpha-2- | | |
| | | | macroglobulin family | | |
| 610 | 79834611 (5999, 6000) | Novel Protein sim. GBank gi\|130858\|sp\|P21243\|PRCI_YEAST - | Contains protein domain | protease | 1015, 1021 |
| | | PROTEASOME COMPONENT C7-ALPHA (MACROPAIN SUBUNIT C7- | (PF00227) - Proteasome A-type | | |
| | | ALPHA) (PROTEINASE YSCE SUBUNIT 7) (MULTICATALYTIC | and B-type | | |
| | | ENDOPEPTIDASE COMPLEX C7) (COMPONENT Y8) (SCL1 | | | |
| | | SUPPRESSOR PROTEIN) | | | |
| 611 | 10186498 (6507, 6508) | Novel Protein sim. GBank gi\|130880\|sp\|P23639\|PRC3_YEAST - | Contains protein domain | protease | 1023 |
| | | PROTEASOME COMPONENT Y7 (MACROPAIN SUBUNIT Y7) | (PF00227) - Proteasome A-type | | |
| | | (PROTEINASE YSCE SUBUNIT 7) (MULTICATALYTIC | and B-type | | |
| | | ENDOPEPTIDASE COMPLEX SUBUNIT Y7) | | | |
| 612 | 65674029 (8585, 8586) | Novel Protein sim. GBank gi\|2252790 (U77784) - Lmp10 proteasome | Contains protein domain | protease | 1008, 1014, 1020, 1035 |
| | | subunit [Mus musculus] | (PF00227) - Proteasome A-type | | |
| | | | and B-type | | |
| 613 | 20696442 (559, 560) | Novel Protein sim. GBank gi\|575457 (U17018) - Cdc40p [Saccharomyces | Contains protein domain | protease | 1003 |
| | | cerevisiae] | (PF00400) - WD domain, G-beta | | |
| | | | repeat | | |
| 614 | 94119776 (1269, 1270) | Novel Protein sim. GBank gi\|1167860\|emb\|CAA93116\| - (Z68888) | | protease | 1014 |
| | | Endoprotease FURIN [Spodoptera frugiperda] | | | |
| 615 | 10210483 (2673, 2674) | Novel Protein sim. GBank gi\|2293464 (AF009645) - proteasome alpha | | protease | 1003 |
| | | subunit [Mycobacterium smegmatis] | | | |
| 616 | 65900232 (3531, 3532) | Novel Protein sim. GBank gi\|2351374 (U54560) - putative 26S | | protease | 1014 |
| | | proteasome subunit athMOV34 [Arabidopsis thaliana] | | | |
| 617 | 80209080 (7199, 7200) | Novel Protein sim. GBank gi\|2499849\|sp\|P55995\|LON_HELPY - ATP- | | protease | 1050 |
| | | DEPENDENT PROTEASE LA | | | |
| 618 | 24140149 (495, 496) | Novel Protein sim. GBank gi\|2499891\|sp\|P76403\|YEGQ_ECOLI - | | protease | 1002 |
| | | PUTATIVE PROTEASE IN BAER-OGRK INTERGENIC REGION | | | |
| 619 | 11611585 (4063, 4064) | Novel Protein sim. GBank gi\|4416302\|gb\|AAD20307\| - (AF105716) copia- | | protease | 1022 |
| | | type pol polyprotein [Zea mays] | | | |
| 620 | 27964421 (5119, 5120) | Novel Protein sim. GBank gi\|464859\|sp\|P33297\|PRSA_YEAST - 26S | | protease | 1020, 1031 |
| | | PROTEASE REGULATORY SUBUNIT 6A (TAT-BINDING PROTEIN | | | |
| | | HOMOLOG 1) (TBP-1) | | | |
| 621 | 19518929 (919, 920) | Novel Protein sim. GBank gi\|731574\|sp\|P38886\|SUN1_YEAST - 26S | | protease | 1008 |
| | | PROTEASOME REGULATORY SUBUNIT SUN1 | | | |
| 622 | 79842773 (8641, 8642) | Novel Protein sim. GBank gi\|899394\|emb\|CAA90367\| - (Z50048) unknown | | protease | 1004, 1006, 1024, 1035 |
| | | [Saccharomyces cerevislae] | | | |
| 623 | 20469812 (7119, 7120) | | | protease | 1031 |
| 624 | 27975288 (7229, 7230) | | | porotease | 1050 |
| 625 | 65891387 (8965, 8966) | Novel Protein sim. GBank gi\|125520\|sp\|P01048\|KNT1_RAT - T- | Contains protein domain | proteaseinhib | 1007, 1051 |
| | | KININOGEN I PRECURSOR (MAJOR ACUTE PHASE PROTEIN) | (PF00031) - Cystatin domain | | |
| | | (ALPHA-1-MAP) (THIOSTATIN) (CONTAINS: T-KININ) | | | |
| 626 | 17248503 (4639, 4640) | Novel Protein sim. GBank gi\|772998\|emb\|CAA71412\| - (Y10386) C1 | Contains protein domain | proteaseinhib | 1036 |
| | | inhibitor [Mus musculus] | (PF00079) - Serpins (serine | | |
| | | | protease inhibitors) | | |
| 627 | 30659605 (5931, 5932) | Novel Protein sim. GBank gi\|2507387\|sp\|P05544\|CPI3_RAT - | Contains protein domain | proteaseinhib | 1020 |
| | | CONTRAPSIN-LIKE PROTEASE INHIBITOR 3 PRECURSOR (CPI-23) | (PF00079) - Serpins (serine | | |
| | | (SERINE PROTEASE INHIBITOR 1) (SPI-1) | protease inhibitors) | | |
| 628 | 78741102 (2337, 2338) | Novel Protein sim. GBank gi\|54173\|emb\|CAA40106\| - (X56786) | Contains protein domain | proteaseinhib | 1015, 1041 |
| | | contraspin [Mus musculus] | (PF00079) - Serpins (serine | | |
| | | | protease inhibitors) | | |
| 629 | 78719449 (8877, 8878) | Novel Protein sim. GBank gi\|285190\|pir\|\|A42210 - alpha-1-macroglobulin | Contains protein domain | proteaseinhib | 1002, 1006, 1020, 1024 |
| | | precursor - rat | (PF00207) - Alpha-2- | | |
| | | macroglobulin family | | | |
| 630 | 95087262 (339, 340) | Novel Protein sim. GBank gi\|91949\|pir\|\|S15904 - alpha-1 proteinase | Contains protein domain | proteaseinhib | 1003, 1004, 1006, 1007, |
| | | inhibitor III, variant 1 precursor - rat | (PF00207) - Alpha-2- | | 1015, 1020, 1024 |
| | | | macroglobulin family | | |
| 631 | 78742120 (8441, 8442) | Novel Protein sim. GBank gi\|112913\|sp\|P06238\|A2MG_RAT - ALPHA-2- | Contains protein domain | proteaseinhib | 1020 |
| | | MACROGLOBULIN PRECURSOR (ALPHA-2-M) | (PF01835) - Alpha-2- | | |
| | | | macroglobulin family N-terminal | | |
| | | | region | | |
| 632 | 8483614 (6277, 6278) | Novel Protein sim. GBank gi\|4539683\|gb\|AAD22172.1\|AF09901 - | proteaseinhib | | 1020, 1022 |
| | | (AF099016) hepatocyte growth factor activator inhibitor type 2 [Mus | | | |
| | | musculus] | | | |
| 633 | 80499864 (4777, 4778) | Novel Protein sim. GBank gi\|1174866\|sp\|P00127\|UCRH_YEAST - | Contains protein domain | reductase | 1002, 1003, 1004, 1006, |
| | | UBIQUINOL-CYTOCHROME C REDUCTASE COMPLEX 17 KD | (PF00010) - Helix-loop-helix DNA- | | 1010, 1020, 1021, 1022, |
| | | PROTEIN (MITOCHONDRIAL HINGE PROTEIN) (COMPLEX III | binding domain | | 1024, 1028, 1031, 1035, |
| | | POLYPEPTIDE VI) | | | 1036, 1041 |
| 634 | 82178166 (4109, 4110) | Novel Protein sim. GBank gi\|2498064\|sp\|Q12746\|YMM5_YEAST - | Contains protein domain | reductase | 1001, 1002, 1003, 1004, |
| | | HYPOTHETICAL 35.3 KD PROTEIN IN HMGS-TUB3 INTERGENIC | (PF00175) - Oxidoreductase | | 1006, 1007, 1014, 1020, |
| | | REGION | FAD/NAD-binding domain | | 1021, 1022, 1031, 1041 |
| 635 | 80227721 (3483, 3484) | Novel Protein sim. GBank gi\|585542\|sp\|P38626\|NC5R_YEAST - | Contains protein domain | reductase | 1020, 1031 |
| | | PUTATIVE NADH-CYTOCHROME B5 REDUCTASE (P35) | (PF00175) - Oxidoreductase | | |
| | | | FAD/NAD-binding domain | | |
| 636 | 79570706 (1655, 1656) | Novel Protein sim. GBank gi\|4007669\|emb\|CAA22355\| - (AL034443) | Contains protein domain | reductase | 1015 |
| | | putative oxidoreductase [Streptomyces coelicolor] | (PF00248) - Aldo/keto reductase | | |
| | | | family | | |
| 637 | 80192761 (2631, 2632) | Novel Protein sim. GBank gi\|401472\|sp\|P308631\|YAFB_ECOLI - | Contains protein domain | reductase | 1055 |
| | | HYPOTHETICAL OXIDOREDUCTASE IN ASPU-MLTD INTERGENIC | (PF00248) - Aldo/keto reductase | | |
| | | REGION | family | | |
| 638 | 79581728 (6427, 6428) | Novel Protein sim. GBank gi\|3329298 (AE001355) - Ribonucleoside | Contains protein domain | reductase | 1014, 1020, 1028, 1051 |
| | | Reductase, Small Chain [Chlamydia trachomatis] | (PF00268) - Ribonucleotide | | |
| | | | reductases | | |
| 639 | 78739067 (2989, 2990) | Novel Protein sim. GBank gi\|1075225\|pir\|\|B64135 - ribonucleoside - | Contains protein domain | reductase | 1020 |
| | | diphosphate reductase 1 alpha chain (nrdA) homolog - Haemophilus | (PF00317) - Ribonucleotide | | |
| | | influenzae (strain Rd KW20) | reductase | | |
| 640 | 79183351 (3167, 3168) | Novel Protein sim. GBank gi\|417657\|sp\|Q03604\|RIR1_CAEEL - | Contains protein domain | reductase | 1022 |
| | | PROBABLE RIBONUCLEOSIDE-DIPHOSPHATE REDUCTASE LARGE | (PF00317) - Ribonucleotide | | |
| | | CHAIN (RIBONUCLEOTIDE REDUCTASE) | reductase | | |
| 641 | 80080919 (3257, 3258) | Novel Protein sim. GBank gi\|66408\|pir\|\|RDEC1R - ribonucleoside- | Contains protein domain | reductase | 1004, 1031 |
| | | diphosphate reductase (EC 1.17.4.1) alpha chain - Escherichia coli | (PF00317) - Ribonucleotide | | |
| | | | reductase | | |
| 642 | 21426814 (3225, 3226) | Novel Protein sim. GBank gi\|1502421 (U59433) - 3-ketoacyl-acyl carrier | Contains protein domain | reductase | 1020 |
| | | protein reductase [Bacillus subtilis] | (PF00516) - Envelope | | |
| | | | glycoprotein GP120 | | |
| 643 | 20296124 (903, 904) | Novel Protein sim. GBank gi\|421256\|pir\|\|S34724 - probable | Contains protein domain | reductase | 1031 |
| | | oxidoreductase - Serratia marcescens | (PF00678) - Short chain | | |
| | | | dehydrogenase/reductase C- | | |
| | | | terminus | | |
| 644 | 80071440 (1701, 1702) | Novel Protein sim. GBank gi\|114049\|sp\|P19480\|AHPF_SALTY - ALKYL | | reductase | 1003, 1004, 1022, 1046 |
| | | HYDROPEROXIDE REDUCTASE SUBUNIT F (ALKYL | | | |
| | | HYDROPEROXIDE REDUCTASE F52A PROTEIN) | | | |
| 645 | 79885703 (2011, 2012) | Novel Protein sim. GBank gi\|1351892\|sp\|P48360\|ADRO_YEAST - | | reductase | 1015 |
| | | NADPH: ADRENODOXIN OXIDOREDUCTASE HOMOLOG PRECURSOR | | | |
| | | (ADRENODOXIN REDUCTASE HOMOLOG) | | | |
| 646 | 65679723 (3281, 3282) | Novel Protein sim. GBank gi\|140583\|sp\|P18579\|MURB_BACSU - UDP-N- | | reductase | 1014 |
| | | ACETYLENOLPYRUVOYLGLUCOSAMINE REDUCTASE (UDP-N | | | |
| | | ACETYLMURAMATE DEHYDROGENASE) | | | |
| 647 | 17293190 (1, 2) | Novel Protein sim. GBank gi\|1655954 (U68759) - pentaerythritol | | reductase | 1036 |
| | | tetranitrate reductase [Enterobacter cloacae] | | | |
| 648 | 12999132 (8383, 8384) | Novel Protein sim. GBank gi\|1730037\|sp\|P50171\|KE6_MOUSE - KE6 | | reductase | 1022 |
| | | PROTEIN (KE-6) | | | |
| 649 | 23329071 (1535, 1536) | Novel Protein sim. GBank gi\|2078012\|emb\|CAB08443\| - (Z95207) cysG2 | | reductase | 1024 |
| | | [Mycobacterium tuberculosis] | | | |
| 650 | 11753877 (2129, 2130) | Novel Protein sim. GBank gi\|2182004\|emb\|CAB09473\| - (Z96072) | | reductase | 1020 |
| | | hypothetical protein Rv2713 [Mycobacterium tuberculosis] | | | |
| 651 | 79967649 (6803, 6804) | Novel Protein sim. GBank gi\|2443331\|dbj\|BAA22375\| - (D86491) Nfrl | | reductase | 1031 |
| | | [Xenopus laevis] | | | |
| 652 | 35608122 (8335, 8336) | Novel Protein sim. GBank gi\|2851634\|sp\|Q50591\|Y0D1_MYCTU - | | reductase | 1010, 1050 |
| | | HYPOTHETICAL 50.0 KD PROTEIN CY1A11.01 | | | |
| 653 | 78786556 (6879, 6880) | Novel Protein sim. GBank gi\|2909446\|emb\|CAA17334\| - (AL021929) | | reductase | 1006 |
| | | fabG4 [Mycobacterium tuberculosis] | | | |
| 654 | 66726810 (5515, 5516) | Novel Protein sim. GBank gi\|2995313\|emb\|CAA18341\| - (AL022268) | | reductase | 1007 |
| | | ribonucleotide reductase [Streptomyces coelicolor] | | | |
| 655 | 11611599 (5991, 5992) | Novel Protein sim. GBank gi\|3128336 (AF010496) - precorrin-6x | | reductase | 1022 |
| | | reductase [Rhodobacter capsulatus] | | | |
| 656 | 79821280 (5765, 5766) | Novel Protein sim. GBank gi\|3243170 (AF060489) - initial dioxygenase | | reductase | 1041 |
| | | reductase subunit [Sphingomonas sp. CB3] | | | |
| 657 | 80052438 (7591, 7592) | Novel Protein sim. GBank gi\|3402836\|emb\|CAA76082\| - (Y16136) 2- | | reductase | 1008 |
| | | enoate reductase [Moorella thermoacetica] | | | |
| 658 | 30790620 (7347, 7348) | Novel Protein sim. GBank gi\|34138841dbj\|BAA32306\| - (AB007930) | | reductase | 1002 |
| | | KIAA0461 perotein [Homo sapiens] | | | |
| 659 | 57523089 (7899, 7900) | Novel Protein sim. GBank gi\|3659621 (AF052519) - c-di-GMP | | reductase | 1008, 1023 |
| | | phosphodiesterase A [Acetobacter xylinus] | | | |
| 660 | 80080009 (4441, 4442) | Novel Protein sim. GBank gi\|3913675\|sp\|Q08908\|FRE5_YEAST - | | reductase | 1006, 1015, 1020, 1024, |
| | | FERRIC REDUCTASE TRANSMEMBRANE COMPONENT 5 | | | 1031 |
| | | PRECURSOR | | | |
| 661 | 94141225 (3089, 3090) | Novel Protein sim. GBank gi\|4008535\|emb\|CAA22504\| - (AL034492) | | reductase | 1002 |
| | | putative oxidoreductase subunit [Streptomyces coelicolor] | | | |
| 662 | 78374813 (4175, 4176) | Novel Protein sim. GBank gi\|4581047\|gb\|AAD24584.1\|AF13480 - | | reductase | 1002 |
| | | (AF134807) putative dihydroflavonol reductase [Oryza sativa] | | | |
| 663 | 79910083 (5023, 5024) | Novel Protein sim. GBank gi\|465606\|sp\|P33029\|YEIQ_ECOLI - | | reductase | 1021 |
| | | HYPOTHETICAL 54.0 KD PROTEIN IN FRUB-RTN INTERGENIC | | | |
| | | REGION | | | |
| 664 | 56121079 (4625, 4626) | Novel Protein sim. GBank gi\|4666287\|dbj\|BAA77214.1\| - (D85764) | | reductase | 1006, 1007 |
| | | cytosolic monodehydroascorbate reductase [Oryza sativa] | | | |
| 665 | 20467312 (2713, 2714) | Novel Protein sim. GBank gi\|4755082\|gb\|AAA25100.2\| - (L06800) nitrate | | reductase | 1008 |
| | | reductase large subunit [Klebsiella oxytoca] | | | |
| 666 | 65472462 (2701, 2702) | Novel Protein sim. GBank gi\|4803683\|emb\|CAB42663.1\| - (AL049819) | | reductase | 1006, 1021, 1026 |
| | | pyrroline-5-carboxylate reductase [Streptomyces coelicolor] | | | |
| 667 | 86723714 (9053, 9054) | Novel Protein sim. GBank gi\|5002128\|gb\|AAD37319.1\|AF13517 - | | reductase | 1016, 1022 |
| | | (AF135170) dimethyl sulfoxide reductase subunit A [Yersinia pestis] | | | |
| 668 | 21436461 (6897, 6898) | Novel Protein sim. GBank gi\|586489\|sp\|P38230\|QOR_YEAST - | | reductase | 1020 |
| | | PROBABLE QUINONE OXIDOREDUCTASE (NADPH: QUINONE | | | |
| | | REDUCTASE) | | | |
| 669 | 34400197 (765, 766) | Novel Protein sim. GBank gi\|797336 (U19620) - MocA [Agrobacterium | | reductase | 1047 |
| | | tumefaciens] | | | |
| 670 | 82483471 (6905, 6906) | | | reductase | 1001 |
| 671 | 87451956 (1621, 1622) | Novel Protein sim. GBank gi\|131770\|sp\|P14132\|RS9_DICDI - 40S | Contains protein domain | ribosomalprot | 1023, 1055 |
| | | RIBOSOMAL PROTEIN S9 (40S RIBOSOMAL PROTEIN 1024) | (PF00163) - Ribosomal protein | | |
| | | VEGETATIVE SPECIFIC PROTEIN V12) | S4/S9 N-terminal domain | | |
| 672 | 23333338 (7195, 7196) | Novel Protein sim. GBank gi\|1173189\|sp\|P12340\|RR12_MAIZE - | Contains protein domain | ribosomalprot | 1050 |
| | | CHLOROPLAST 30S RIBOSOMAL PROTEIN S12 | (PF00164) - Ribosomal protein | | |
| | | | S12 | | |
| 673 | 57529660 (47, 48) | Novel Protein sim. GBank gi\|132854\|sp\|P02387\|RL2_ECOLI - 50S | Contains protein domain | ribosomalprot | 1010 |
| | | RIBOSOMAL PROTEIN L2 | (PF00181) - Ribosomal Proteins | | |
| | | | L2 | | |
| 674 | 20446881 (3675, 3676) | Novel Protein sim. GBank gi\|132869\|sp\|P11255\|RL2_YERPS - 50S | Contains protein domain | ribosomalprot | 1022 |
| | | RIBOSOMAL PROTEIN L2 | (PF00181) - Ribosomal Proteins | | |
| | | | L2 | | |
| 675 | 20446870 (971, 972) | Novel Protein sim. GBank gi\|2500275\|sp\|P55837\|RL16_ACTAC - 50S | Contains protein domain | ribosomalprot | 1022 |
| | | RIBOSOMAL PROTEIN L16 | (PF00252) - Ribosomal protein | | |
| | | | L16 | | |
| 676 | 79328715 (899, 900) | Novel Protein sim. GBank gi\|4506717\|ref\|NP_001023.1\|pRPS2 - | Contains protein domain | ribosomalprot | 1020, 1024, 1031 |
| | | ribosomal protein S29 | (PF00253) - Ribosomal protein | | |
| | | | S14p/S29e | | |
| 677 | 80235795 (585, 586) | Novel Protein sim. GBank gi\|4808369\|emb\|CAB42783.1\| - (AL049841) | Contains protein domain | ribosomalprot | 1020, 1024, 1046, 1051 |
| | | putative 30S ribosomal protein S14 [Streptomyces coelicolor] | (PF00253) - Ribosomal protein | | |
| | | | S14p/S29e | | |
| 678 | 66259277 (3993, 3994) | Novel Protein sim. GBank gi\|134409\|sp\|P16336\|SECY_BACSU - | Contains protein domain | ribosomalprot | 1008 |
| | | PREPROTEIN TRANSLOCASE SECY SUBUNIT | (PF00256) - Ribosomal protein | | |
| | | | L15 | | |
| 679 | 28782039 (1319, 1320) | Novel Protein sim. GBank gi\|132656\|sp\|P17079\|RL12_YEAST - 60S | Contains protein domain | ribosomalprot | 1020 |
| | | RIBOSOMAL PROTEIN L12 (YL15) (YL23) | (PF00298) - Ribosomal protein | | |
| | | | L11 | | |
| 680 | 39506897 (6867, 6868) | Novel Protein sim. GBank gi\|3915843\|sp\|O31212\|RS2_STRCO - 30S | Contains protein domain | ribosomalprot | 1003 |
| | | RIBOSOMAL PROTEIN S2 | (PF00318) - Ribosomal protein S2 | | |
| 681 | 71845367 (3025, 3026) | Novel Protein sim. GBank gi\|417336\|sp\|P32905\|NABA_YEAST - 40S | Contains protein domain | ribosomalprot | 1020, 1022 |
| | | RIBOSOMAL PROTEIN SA HOMOLOG A (NUCLEIC ACID-BINDING | (PF00318) - Ribosomal protein S2 | | |
| | | PROTEIN NAB1A) | | | |
| 682 | 11764585 (4411, 4412) | Novel Protein sim. GBank gi\|1173281\|sp\|P44377\|RS8_HAEIN - 30S | Contains protein domain | ribosomalprot | 1004 |
| | | RIBOSOMAL PROTEIN S8 | (PF00410) - Ribosomal protein S8 | | |
| 683 | 79574512 (1263, 1264) | Novel Protein sim. GBank gi\|282575\|pir\|\|S27686 - tcmR protein - | Contains protein domain | ribosomalprot | 1028 |
| | | Streptomyces glaucescens | (PF00440) - Bacterial regulatory | | |
| | | | proteins, tetR family | | |
| 684 | 20117349 (641, 642) | Novel Protein sim. GBank gi\|4981571\|gb\|AAD36107.1\|AE00176 - | Contains protein domain | ribosomalprot | 1008 |
| | | (AE001764) transcriptional regulator, TetR family [Thermotoga maritima] | (PF00440) - Bacterial regulatory | | |
| | | | proteins, tetR family | | |
| 685 | 77644732 (2041, 2042) | Novel Protein sim. GBank gi\|4981571\|gb\|AAD36107.1\|AE00176 - | Contains protein domain | ribosomalprot | 1020 |
| | | (AE001764) transcriptional regulator, TetR family [Thermotoga maritima] | (PF00440) - Bacterial regulatory | | |
| | | | proteins, tetR family | | |
| 686 | 16777917 (8423, 8424) | Novel Protein sim. GBank gi\|585949\|sp\|P21468\|RS6_BACSU - 30S | Contains protein domain | ribosomalprot | 1041 |
| | | RIBOSOMAL PROTEIN S6 (BS9) | (PF01250) - Ribosomal protein S6 | | |
| 687 | 16307733 (3357, 3358) | Novel Protein sim. GBank gi\|730459\|sp\|P39939\|R26B_YEAST - 40S | Contains protein domain | ribosomalprot | 1050 |
| | | RIBOSOMAL PROTEIN S26E-B | (PF01283) - Ribosomal protein | | |
| | | | S26e | | |
| 688 | 95294566 (4501, 4502) | Novel Protein sim. GBank gi\|3581854\|emb\|CAA20810\| - (AL031541) 50S | Contains protein domain | ribosomalprot | 1008, 1010, 1021, 1028, |
| | | ribosomal protein L35 [Streptomyces coelicolor] | (PF01632) - Ribosomal protein | | 1031, 1035 |
| | | | L35 | | |
| 689 | 78904615 (7431, 7432) | Novel Protein sim. GBank gi\|4506635\|ref\|NP_000985.1\|pRPL3 - | Contains protein domain | ribosomalprot | 1006 |
| | | ribosomal protein L32 | (PF01655) - Ribosomal protein | | |
| | | | L32 | | |
| 690 | 71088544 (8127, 8128) | Novel Protein sim. GBank gi\|4007730\|emb\|CAA22414\| - (AL034447) 50S | Contains protein domain | ribosomalprot | 1026, 1050 |
| | | ribosomal protein L32 [Streptomyces coelicolor] | (PF01783) - Ribosomal L32p | | |
| | | | protein family | | |
| 691 | 80079735 (6531, 6532) | Novel Protein sim. GBank gi\|129021\|sp\|P20964\|OBG_BACSU - SPO0B- | | ribosomalprot | 1024, 1031 |
| | | ASSOCIATED GTP-BINDING PROTEIN | | | |
| 692 | 24119415 (879, 880) | Novel Protein sim. GBank gi\|1321944\|emb\|CAA66033\| - (X97346) FCYX | | ribosomalprot | 1041 |
| | | [Saccharomyces cerevislae] | | | |
| 693 | 82439815 (3063, 3064) | Novel Protein sim. GBank gi\|133030\|sp\|P02418\|RL9_ECOLI - 50S | | ribosomalprot | 1001 |
| | | RIBOSOMAL PROTEIN L9 | | | |
| 694 | 28375899 (1001, 1002) | Novel Protein sim. GBank gi\|1351010\|sp\|P48164\|RS7_YEAST - | | ribosomalprot | 1041 |
| | | PROBABLE 40S RIBOSOMAL PROTEIN S7 | | | |
| 695 | 29017613 (2725, 2726) | Novel Protein sim. GBank gi\|1352915\|sp\|P47151\|YJ84_YEAST - | | ribosomalprot | 1041 |
| | | HYPOTHETICAL 14.0 KD PROTEIN IN NNF1-STE24 INTERGENIC | | | |
| | | REGION | | | |
| 696 | 30402257 (2563, 2564) | Novel Protein sim. GBank gi\|1710566\|sp\|P51998\|RL4P_YEAST - | | ribosomalprot | 1006 |
| | | PUTATIVE L4P LIKE RIBOSOMAL PROTEIN | | | |
| 697 | 78466595 (5189, 5190) | Novel Protein sim. GBank gi\|2500312\|sp\|P96385\|RL25_MYCTU - | | ribosomalprot | 1006 |
| | | PROBABLE 50S RIBOSOMAL PROTEIN L25 | | | |
| 698 | 17294099 (4153, 4154) | Novel Protein sim. GBank gi\|3024573\|sp\|P56355\|RR7_CHLVU - | | ribosomalprot | 1006 |
| | | CHLOROPLAST 30S RIBOSOMAL PROTEIN S7 | | | |
| 699 | 56321652 (7115, 7116) | Novel Protein sim. GBank gi\|3212879 (AC004005) - putative ribosomal | | ribosomalprot | 1041 |
| | | protein L7 [Arabidopsis thaliana] | | | |
| 700 | 86684973 (769, 770) | Novel Protein sim. GBank gi\|3377797 (AF075597) - Similar to 60S | | ribosomalprot | 1016 |
| | | ribosome protein L19; coded for by A. thaliana cDNA T04719; coded for | | | |
| | | by A. thaliana cDNA H36046; coded for by A. thaliana cDNA T44067; | | | |
| | | coded for by A. thaliana cDNA T14056; coded for by A. thaliana cDNA | | | |
| | | R90691 [Ara . . . | | | |
| 701 | 81079398 (285, 286) | Novel Protein sim. GBank gi\|3982\|emb\|CAA37834\| - (X53841) | | ribosomalprot | 1001, 1004, 1010, 1015, |
| | | mitochondrial ribosomal protein YmL8 [Saccharomyces cerevisiae] | | | 1020, 1021, 1022, 1024, |
| | | | | | 1028, 1031, 1035, 1036, |
| | | | | | 1051 |
| 702 | 13081834 (6335, 6336) | Novel Protein sim. GBank gi\|4680695\|gb\|AAD27737.1\|AF13296 - | | ribosomalprot | 1022 |
| | | (AF132962) CGI-28 protein [Homo sapiens] | | | |
| 703 | 20736808 (2933, 2934) | Novel Protein sim. GBank gi\|4808405\|emb\|CAB42737.1\| - (AL049826) | | ribosomalprot | 1020 |
| | | putative 50S ribosomal protein L9 [Streptomyces coelicolor] | | | |
| 704 | 87454340 (6057, 6058) | Novel Protein sim. GBank gi\|548774\|sp\|P35685\|RL7A_ORYSA - 60S | | ribosomalprot | 1015, 1022, 1023 |
| | | RIBOSOMAL PROTEIN L7A | | | |
| 705 | 27824087 (6421, 6422) | Novel Protein sim. GBank gi\|548791\|sp\|P22354\|RM20_YEAST - | | ribosomalprot | 1003, 1004, 1022, 1031 |
| | | MITOCHONDRIAL 60S RIBOSOMAL PROTEIN L20 PRECURSOR | | | |
| | | (YML20) | | | |
| 706 | 80082633 (2067, 2068) | Novel Protein sim. GBank gi\|606342 (U18997) - ORF_o622; reading | | ribosomalprot | 1020, 1031 |
| | | frame open far upstream of start; possible frameshift, linking to previous | | | |
| | | ORF [Escherichia coli] | | | |
| 707 | 11101408 (2085, 2086) | Novel Protein sim. GBank gi\|2506239\|sp\|P23852\|HEPA_ECOLI - RNA | Contains protein domain | mapolymerase | 1004 |
| | | POLYMERASE ASSOCIATED PROTEIN (ATP-DEPENDENT HELICASE | (PF00271) - Helicases conserved | | |
| | | HEPA) | C-terminal domain | | |
| 708 | 21398399 (3437, 3438) | Novel Protein sim. GBank gi\|133370\|sp\|P17890\|RPC8_YEAST - DNA- | | mapolymerase | 1020 |
| | | DIRECTED RNA POLYMERASE III 31 KD POLYPEPTIDE (C31) | | | |
| 709 | 79834964 (3895, 3896) | Novel Protein sim. GBank gi\|133418\|sp\|P19175\|RPOB_PSEPU - DNA- | | mapolymerase | 1036 |
| | | DIRECTED RNA POLYMERASE BETA CHAIN (TRANSCRIPTASE BETA | | | |
| | | CHAIN) (RNA POLYMERASE BETA SUBUNIT) | | | |
| 710 | 80065066 (5839, 5840) | Novel Protein sim. GBank gi\|133418\|sp\|P19175\|RPOB_PSEPU - DNA- | | mapolymerase | 1007, 1022 |
| | | DIRECTED RNA POLYMERASE BETA CHAIN (TRANSCRIPTASE BETA | | | |
| | | CHAIN) (RNA POLYMERASE BETA SUBUNIT) | | | |
| 711 | 80219418 (4987, 4988) | Novel Protein sim. GBank gi\|133457\|sp\|P13433\|RPOM_YEAST - DNA- | | mapolymerase | 1003, 1004, 1020, 1022, |
| | | DIRECTED RNA POLYMERASE MITOCHONDRIAL PRECURSOR | | | 1031 |
| 712 | 11077563 (2329, 2330) | Novel Protein sim. GBank gi\|1350855\|sp\|P19176\|RPOC_PSEPU - DNA- | | mapolymerase | 1022 |
| | | DIRECTED RNA POLYMERASE BETA' CHAIN (TRANSCRIPTASE | | | |
| | | BETA' CHAIN) (RNA POLYMERASE BETA' SUBUNIT) | | | |
| 713 | 80255174 (4695, 4696) | Novel Protein sim. GBank gi\|1711571\|sp\|P54000\|SUB1_YEAST - SUB1 | | mapolymerase | 1020 |
| | | PROTEIN | | | |
| 714 | 20293171 (445, 446) | Novel Protein sim. GBank gi\|1938356 (U82763) - RpoD [Xanthomonas | | mapolymerase | 1031 |
| | | campestris pv. campestris] | | | |
| 715 | 65681535 (1317, 1318) | Novel Protein sim. GBank gi\|2317257\|dbj\|BAA21740\| - (AB005891) ORF2 | | mapolymerase | 1022 |
| | | [Platemys spixli] | | | |
| 716 | 80420315 (8057, 8058) | Novel Protein sim. GBank gi\|2500608\|sp\|Q51561\|RPOB_PSEAE - DNA- | | mapolymerase | 1023 |
| | | DIRECTED RNA POLYMERASE BETA CHAIN (TRANSCRIPTASE BETA | | | |
| | | CHAIN) (RNA POLYMERASE BETA SUBUNIT) | | | |
| 717 | 9906510 (1205, 1206) | Novel Protein sim. GBank gi\|2506239\|sp\|P23852\|HEPA_ECOLI - RNA | | mapolymerase | 1002 |
| | | POLYMERASE ASSOCIATED PROTEIN (ATP-DEPENDENT HELICASE | | | |
| | | HEPA) | | | |
| 718 | 80026079 (1373, 1374) | Novel Protein sim. GBank gi\|3249729 (AF071795) - RNA polymerase | | mapolymerase | 1003, 1004, 1008, 1010, |
| | | sigma-like factor [Streptomyces bluensis] | | | 1022, 1031 |
| 719 | 79835134 (2757, 2758) | Novel Protein sim. GBank gi\|3549149 (AF087812) - RNA polymerase B- | | mapolymerase | 1036 |
| | | subunit [Legionella Pneumophila] | | | |
| 720 | 88094878 (3445, 3446) | Novel Protein sim. GBank gi\|3660649 (U86688) - RNA polymerase beta- | | mapolymerase | 1022 |
| | | subunit [Coxiella bumetil] | | | |
| 721 | 21147471 (4015, 4016) | Novel Protein sim. GBank gi\|3878613\|emb\|CAB05571\| - (Z83117) similar | | mapolymerase | 1055 |
| | | to reverse transcriptase [Caenorhabditis elegans] | | | |
| 722 | 30654004 (6891, 6892) | Novel Protein sim. GBank gi\|3914808\|sp\|O35134\|RPA1_MOUSE - DNA- | | mapolymerase | 1008 |
| | | DIRECTED RNA POLYMERASE I LARGEST SUBUNIT (RNA | | | |
| | | POLYMERASE I 194 KD SUBUNIT) (RPA194) | | | |
| 723 | 5498584 (4869, 4870) | Novel Protein sim. GBank gi\|401019\|sp\|P30761\|RPOC_MYCLE - DNA- | | mapolymerase | 1055 |
| | | DIRECTED RNA POLYMERASE BETA' CHAIN (TRANSCRIPTASE | | | |
| | | BETA' CHAIN) (RNA POLYMERASE BETA' SUBUNIT) | | | |
| 724 | 20447155 (8529, 8530) | Novel Protein sim. GBank gi\|401019\|sp\|P30761\|RPOC_MYCLE - DNA- | | mapolymerase | 1022 |
| | | DIRECTED RNA POLYMERASE BETA' CHAIN (TRANSCRIPTASE | | | |
| | | BETA' CHAIN) (RNA POLYMERASE BETA' SUBUNIT) | | | |
| 725 | 19882932 (6519, 6520) | Novel Protein sim. GBank gi\|4539660\|gb\|AAD22153.1\|AF06128 - | | mapolymerase | 1001 |
| | | (AF061282) polyprotein [Sorghum bicolor] | | | |
| 726 | 13528587 (2445, 2446) | Novel Protein sim. GBank gi\|5305777\|gb\|AAD41810.1\|AF14409 - | | mapolymerase | 1022 |
| | | (AF144091) sigma factor SigH [Mycobacterium smegmatis] | | | |
| 727 | 30263251 (2035, 2036) | Novel Protein sim. GBank gi\|57255\|emb\|CAA48786\| - (X69021) | | mapolymerase | 1006 |
| | | senescence marker protein-30 [Rattus norvegicus] | | | |
| 728 | 21662065 (6459, 6460) | Novel Protein sim. GBank gi\|3136057\|emb\|CAA19116\| - (AL023592) actin | Contains protein domain | struct | 1008 |
| | | like protein [Schizosaccharomyces pombe] | (PF00022) - Actin | | |
| 729 | 54968624 (6467, 6468) | Novel Protein sim. GBank gi\|1839052\|emb\|CAA69604\| - (Y08296) | Contains protein domain | struct | 1034 |
| | | integumentary mucin B.1 [Xenopus laevis] | (PF00084) - Sushi domain (SCR | | |
| | | | repeat) | | |
| 730 | 52559797 (6733, 6734) | Novel Protein sim. GBank gi\|285329\|pir\|\|A42112 - mucin-like peptide MLP | Contains protein domain | struct | 1020, 1022 |
| | | 2677 - rat | (PF00093) - von Willebrand factor | | |
| | | | type C domain | | |
| 731 | 80431450 (1217, 1218) | Novel Protein sim. GBank gi\|1703701\|bbs\|178462 - KRP5 = kinesin-related | Contains protein domain | struct | 1002, 1015, 1022, 1035, |
| | | protein [rats, testes, Peptide Partial, 167 aa] | (PF00225) - Kinesin motor | | 1036 |
| | | | domain | | |
| 732 | 80053179 (1435, 1436) | Novel Protein sim. GBank gi\|2062752 (U92845) - kinesin motor protein | Contains protein domain | struct | 1008 |
| | | [Ustilago maydis] | (PF00225) - Kinesin motor | | |
| | | | domain | | |
| 733 | 10247640 (111, 112) | Novel Protein sim. GBank gi\|3413892\|dbj\|BAA32310\| - (AB007934) | Contains protein domain | struct | 1036 |
| | | KIAA0465 protein [Homo sapiens] | (PF00435) - Spectrin repeat | | |
| 734 | 80419225 (435, 436) | Novel Protein sim. GBank gi\|127736\|sp\|P19524\|MYS2_YEAST - MYOSIN | Contains protein domain | struct | 1004, 1006, 1010, 1023 |
| | | 2 ISOFORM | (PF00612) - IQ calmodulin | | |
| | | | binding motif | | |
| 735 | 10199185 (7473, 7474) | Novel Protein sim. GBank gi\|311159 (L16243) - synaptobrevin | Contains protein domain | struct | 1004 |
| | | [Saccharomyces cerevisiae] | (PF00957) - Synaptobrevin | | |
| 736 | 78903874 (7203, 7204) | Novel Protein sim. GBank gi\|1017427\|emb\|CAA62189\| - (X90569) elastic | | struct | 1041 |
| | | titin [Homo sapiens] | | | |
| 737 | 11131571 (7401, 7402) | Novel Protein sim. GBank gi\|1079451\|pir\|\|A55463 - tropomodulin, skeletal | | struct | 1022 |
| | | muscle - chicken | | | |
| 738 | 95010667 (1195, 1196) | Novel Protein sim. GBank gi\|1091582\|prf\|\|2021268A - elongation factor | | struct | 1002, 1004, 1010, 1015, |
| | | [Streptomyces coelicolor] | | | 1022, 1031, 1036, 1046 |
| 739 | 32149138 (611, 612) | Novel Protein sim. GBank gi\|112958\|sp\|P18091\|AACT_DROME - ALPHA- | | struct | 1002, 1041, 1051 |
| | | ACTININ, SARCOMERIC (F-ACTIN CROSS LINKING PROTEIN) | | | |
| 740 | 80239644 (7415, 7416) | Novel Protein sim. GBank gi\|2143863\|pir\|\|B57431 - myosin-binding C- | | struct | 1003, 1004 |
| | | protein - rat (fragment) | | | |
| 741 | 19464113 (177, 178) | Novel Protein sim. GBank gi\|2808506\|emb\|CAA12536.1\| - (AJ225561) | | struct | 1021 |
| | | ExsG protein [Sinorhizobium meliloti] | | | |
| 742 | 27843681 (2955, 2956) | Novel Protein sim. GBank gi\|285329\|pir\|\|A42112 - mucin-like peptide MLP | | struct | 1003, 1022 |
| | | 2677 - rat | | | |
| 743 | 80252997 (8005, 8006) | Novel Protein sim. GBank gi\|2950347\|emb\|CAA04492\| - (AJ001038) M- | | struct | 1015, 1020 |
| | | protein [Mus musculus] | | | |
| 744 | 20372385 (4239, 4240) | Novel Protein sim. GBank gi\|3649753\|emb\|CAB11102.1\| - (Z98547) | | struct | 1020 |
| | | predicted using hexExon; MAL3P3.2 (PFC0330w), PDZ domain protein, | | | |
| | | len: 700 aa [Plasmodium falciparum] | | | |
| 745 | 23206163 (1537, 1538) | Novel Protein sim. GBank gi\|399308\|sp\|Q01377\|CSP1_CORGL - PS1 | | struct | 1024 |
| | | PROTEIN PRECURSOR | | | |
| 746 | 88085671 (5081, 5082) | Novel Protein sim. GBank gi\|4503581\|ref\|NP_001969.1\|pEPB4 - | | struct | 1020 |
| | | erythrocyte membrane protein band 4.9 (dematin) | | | |
| 747 | 85801312 (947, 948) | | | struct | 1023 |
| 748 | 78680455 (7527, 7528) | Novel Protein sim. GBank gi\|1711601\|sp\|P49889\|SUO3_RAT - | | sulfotransferase | 1007 |
| | | ESTROGEN SULFOTRANSFERASE, ISOFORM 3 (EST-3) | | | |
| | | (SULFOTRANSFERASE, ESTROGEN-PREFERRING) (ESTRONE | | | |
| | | SULFOTRANSFERASE) | | | |
| 749 | 56465618 (5803, 5804) | Novel Protein sim. GBank gi\|3449294\|dbj\|BAA32462\| - (AB011532) | Contains protein domain | synthase | 1015 |
| | | MEGF6 [Rattus norvegicus] | (PF00008) - EGF-like domain | | |
| 750 | 80105992 (3361, 3362) | Novel Protein sim. GBank gi\|477532\|pir\|\|A49175 - Motch B protein - | Contains protein domain | synthase | 1036 |
| | | mouse (fragment) | (PF00008) - EGF-like domain | | |
| 751 | 37799246 (6091, 6092) | Novel Protein sim. GBank gi\|1493807 (U35068) - PtxR [Pseudomonas | Contains protein domain | synthase | 1010 |
| | | aeruginosa] | (PF00126) - Bacterial regulatory | | |
| | | | helix-turn-helix protein, lysR family | | |
| 752 | 80086821 (1281, 1282) | Novel Protein sim. GBank gi\|1881244\|dbj\|BAA19271\| - (AB001488) | Contains protein domain | synthase | 1031 |
| | | SIMILAR TO PYRUVATE OXIDASE AND ACETOLACTATE SYNTHASE. | (PF00205) - Thiamine | | |
| | | [Bacillus subtilis] | pyrophosphate enzymes | | |
| 753 | 80248088 (4907, 4908) | Novel Protein sim. GBank gi\|1881244\|dbj\|BAA19271\| - (AB001488) | Contains protein domain | synthase | 1004, 1020 |
| | | SIMILAR TO PYRUVATE OXIDASE AND ACETOLACTATE SYNTHASE. | (PF00205) - Thiamine | | |
| | | [Bacillus subtilis] | pyrophosphate enzymes | | |
| 754 | 20292172 (1615, 1616) | Novel Protein sim. GBank gi\|114580\|sp\|P00831\|ATPD_ECOLI - ATP | Contains protein domain | synthase | 1031 |
| | | SYNTHASE DELTA CHAIN | (PF00213) - ATP synthase delta | | |
| | | | (OSCP) subunit | | |
| 755 | 11356059 (6911, 6912) | Novel Protein sim. GBank gi\|173045 (K01386) - anthranilate synthase | Contains protein domain | synthase | 1055 |
| | | Component II: Indole-3-glycerol phosphate synthase (TRP3) | (PF00218) - Indole-3-glycerol | | |
| | | [Saccharomyces cerevisiae] | phosphate synthases | | |
| 756 | 86685863 (5129, 5130) | Novel Protein sim. GBank gi\|3722219\|gb\|AAC63500.1\| - (AF054585) | Contains protein domain | synthase | 1024, 1026 |
| | | indoleglycerol phosphate synthase [Streptomyces coelicolor] | (PF00218) - Indole-3-glycerol | | |
| | | | phosphate synthases | | |
| 757 | 20465640 (1757, 1758) | Novel Protein sim. GBank gi\|2126911\|pir\|\|40381 - citrate synthase II - | Contains protein domain | synthase | 1008 |
| | | Bacillus subtilis | (PF00285) - Citrate synthase | | |
| 758 | 38335891 (8183, 8184) | Novel Protein sim. GBank gi\|5441892\|dbj\|BAA82390.1\| - (AP000367) | Contains protein domain | synthase | 1006 |
| | | ESTs C96653(C10531), C96654(C10531), C28571(C61641) correspond to | (PF00285) - Citrate synthase | | |
| | | a region of the predicted gene.; Similar to citrate synthetase. (AC004521) | | | |
| | | [Oryza sativa] | | | |
| 759 | 20294369 (7221, 7222) | Novel Protein sim. GBank gi\|1750387 (U81259) - carbamoylphosphate | Contains protein domain | synthase | 1031 |
| | | synthetase large subunit [Pseudomonas aeruginosa] | (PF00289) - Carbamoyl- | | |
| | | | phosphate synthase (CPSase) | | |
| 760 | 94631714 (5533, 5534) | Novel Protein sim. GBank gi\|417496\|sp\|P33158\|PMGY_STRCO - | Contains protein domain | synthase | 1028 |
| | | PHOSPHOGLYCERATE MUTASE (PHOSPHOGLYCEROMUTASE) | (PF00300) - Phosphoglycerate | | |
| | | (PGAM) (BPG-DEPENDENT PGAM) | mutase family | | |
| 761 | 17891833 (6613, 6614) | Novel Protein sim. GBank g\|136618\|sp\|P06785\|TYSY_YEAST - | Contains protein domain | synthase | 1021 |
| | | THYMIDYLATE SYNTHASE (TS) | (PF00303) - Thymidylate | | |
| | | | synthase | | |
| 762 | 71095141 (3041, 3042) | Novel Protein sim. GBank gi\|3449252\|emb\|CAA20396\| - (AL031317) | Contains protein domain | synthase | 1050 |
| | | glucosamine-fructose-6-phosphate aminotransferase [Streptomyces | (PF00310) - Glutamine | | |
| | | coelicolor] | amidotransferases class-II | | |
| 763 | 82471218 (4409, 4410) | Novel Protein sim. GBank gi\|114954\|sp\|P15703\|BGL2_YEAST - GLUCAN | Contains protein domain | synthase | 1001, 1003, 1004, 1006, |
| | | 1,3-BETA-GLUCOSIDASE PRECURSOR (EXO-1,3-BETA-GLUCANASE) | (PF00332) - Glycosyl hydrolases | | 1007,1008, 1010, 1015, |
| | | (GP29) | family 17 | | 1020, 1022, 1035, 1041 |
| 764 | 9537334 (973, 974) | Novel Protein sim. GBank gi\|3927835 (AC005727) - similar to | Contains protein domain | synthase | 1020 |
| | | Streptomyces PapA [Arabidopsis thaliana] | (PF00425) - chorismate binding | | |
| | | | enzyme | | |
| 765 | 79968318 (8287, 8288) | Novel Protein sim. GBank gi\|477849\|pir\|\|B48967 - anthranilate synthase | Contains protein domain | synthase | 1020 |
| | | (EC 4.1.3.27) component I - Corynebacterium glutamicum | (PF00425) - chorismate binding | | |
| | | | enzyme | | |
| 766 | 82052429 (7033, 7034) | Novel Protein sim. GBank gi\|1170939\|sp\|P43282\|METM_LYCES - S- | Contains protein domain | synthase | 1014, 1024 |
| | | ADENOSYLMETHIONINE SYNTHETASE 3 (METHIONINE | (PF00438) - S- | | |
| | | ADENOSYLTRANSFERASE 3) (ADOMET SYNTHETASE 3) | adenosylmethionine synthetase | | |
| 767 | 80043700 (3103, 3104) | Novel Protein sim. GBank gi\|2498499\|sp\|P56060\|KDSA_HELPY - 2- | Contains protein domain | synthase | 1050 |
| | | DEHYDRO-3-DEOXYPHOSPHOOCTONATE ALDOLASE (PHOSPHO-2- | (PF00484) - Prokaryotic-type | | |
| | | DEHYDRO-3-DEOXYOCTONATE ALDOLASE) (3-DEOXY-D-MANNO- | carbonic anhydrases | | |
| | | OCTULOSONIC ACID 8-PHOSPHATE SYNTHETASE) (KDO 8-P | | | |
| | | SYNTHASE) | | | |
| 768 | 79562866 (3031, 3032) | Novel Protein sim. GBank gi\|4884830\|gb\|AAD31824.1\|AF13119 - | Contains protein domain | synthase | 1021 |
| | | (AF131199) porphobilinogen deaminase [Pseudomonas syringae pv. | (PF00487) - Fatty acid desaturase | | |
| | | syringae] | | | |
| 769 | 11394712 (5465, 5466) | Novel Protein sim. GBank gi\|3660334\|pdb\|2GAR\| - A Ph-Dependent | Contains protein domain | synthase | 1020 |
| | | Stabilzation Of An Active Site Loop Observed From Low And High Ph | (PF00551) - Formyl transferase | | |
| | | Crystal Structures Of Mutant Monomeric Glycinamide Ribonucleotide | | | |
| | | Transformylase | | | |
| 770 | 78459786 (1771, 1772) | Novel Protein sim. GBank gi\|119783\|sp\|P14926\|FABB_ECOLI - 3- | Contains protein domain | synthase | 1024 |
| | | OXOACYL-[ACYL-CARRIER-PROTEIN] SYNTHASE I (BETA-KETOACYL | (PF00553) - Cellulose binding | | |
| | | ACP SYNTHASE I) (KAS I) | domain | | |
| 771 | 80252645 (2153, 2154) | Novel Protein sim. GBank gi\|1144520 (U34956) - | Contains protein domain | synthase | 1004, 1008, 1021, 1022 |
| | | phosphoribosylformylglycinamidine synthase [Mycobacterium | (PF00586) - AIR synthase related | | |
| | | tuberculosis] | protein | | |
| 772 | 13085297 (8811, 8812) | Novel Protein sim. GBank gi\|2494764\|sp\|Q50729\|GUAA_MYCTU - GMP | Contains protein domain | synthase | 1010, 1022 |
| | | SYNTHASE (GLUTAMINE-HYDROLYZING) (GLUTAMINE | (PF00958) - GMP synthase C | | |
| | | AMIDOTRANSFERASE) (GMP SYNTHETASE) | terminal domain | | |
| 773 | 79846152 (4969, 4970) | Novel Protein sim. GBank gi\|2687651 (AF036932) - 3-dehydroquinate | Contains protein domain | synthase | 1031 |
| | | dehydratase [Corynebacterium glutamicum] | (PF01220) - Dehydroquinase | | |
| | | | class II | | |
| 774 | 80235940 (3679, 3680) | Novel Protein sim. GBank gi\|115944\|sp\|P06182\|CCHL_YEAST - | Contains protein domain | synthase | 1004, 1020 |
| | | CYTOCHROME C HEME LYASE (CCHL) (HOLOCYTOCHROME-C | (PF01265) - Cytochrome c/c1 | | |
| | | SYNTHASE) | heme lyase | | |
| 775 | 80040519 (7139, 7140) | Novel Protein sim. GBank gi\|461698\|sp\|P33322\|CBF5_YEAST - | Contains protein domain | synthase | 1002, 1003 |
| | | CENTROMERE/MICROTUBULE BINDING PROTEIN CBF5 | (PF01472) - PUA domain | | |
| | | (CENTROMERE-BINDING FACTOR 5) (NUCLEOLAR PROTEIN CBF5) | | | |
| | | (P64′) | | | |
| 776 | 80250627 (7905, 7906) | Novel Protein sim. GBank gi\|2687633 (AF035756) - 2-dehydro-3- | Contains protein domain | synthase | 1003, 1006, 1008, 1020, |
| | | deoxyphosphoheptonate aldolase; phospho-2-dehydro-3-deoxyheptonate | (PF01474) - Class-II DAHP | | 1022, 1024, 1026, 1031, |
| | | aldolase [Streptomyces sp.] | synthetase family | | 1050 |
| 777 | 20438343 (3123, 3124) | Novel Protein sim. GBank gi\|1850941 (U54794) - Orp [Pseudomonas | Contains protein domain | synthase | 1008 |
| | | aeruginosa] | (PF01509) - TruB family | | |
| | | | pseudouridylate synthase (N | | |
| | | | terminal domain) | | |
| 778 | 80216341 (7071, 7072) | Novel Protein sim. GBank gi\|116382\|sp\|P14180\|CHS2_YEAST - CHITIN | Contains protein domain | synthase | 1001, 1002, 1003, 1004, |
| | | SYNTHASE 2 (CHITIN-UDP ACETYL-GLUCOSAMINYL TRANSFERASE | (PF01644) - Chitin synthase | | 1006, 1020, 1021, 1022, |
| | | 2) | | | 1036, 1041 |
| 779 | 66770266 (4779, 4780) | Novel Protein sim. GBank gi\|114179\|sp\|P07637\|AROA_SALTY - 3- | | synthase | 1046 |
| | | PHOSPHOSHIKIMATE 1-CARBOXYVINYLTRANSFERASE (5- | | | |
| | | ENOLPYRUVYLSHIKIMATE-3-PHOSPHATE SYNTHASE) (EPSP | | | |
| | | SYNTHASE) | | | |
| 780 | 86471563 (573, 574) | Novel Protein sim. GBank gi\|114421\|sp\|P17614\|ATP2_NICPL - ATP | | synthase | 1017 |
| | | SYNTHASE BETA CHAIN, MITOCHONDRIAL PRECURSOR | | | |
| 781 | 95288987 (1877, 1878) | Novel Protein sim. GBank gi\|1144520 (U34956) - | | synthase | 1002, 1003, 1004, 1008, |
| | | phosphoribosylformylglycinamidine synthase [Mycobacterium | | | 1020, 1022, 1031 |
| | | tuberculosis] | | | |
| 782 | 78676796 (5225, 5226) | Novel Protein sim. GBank gi\|1144522 (U34957) - | | synthase | 1006 |
| | | phosphoribosylaminoimidazolesuccinocarboxamide synthase | | | |
| | | [Mycobacterium tuberculosis] | | | |
| 783 | 79378861 (8781, 8782) | Novel Protein sim. GBank gi\|114511\|sp\|P19482\|ATPA_BOVIN - ATP | | synthase | 1020, 1022, 1024 |
| | | SYNTHASE ALPHA CHAIN, LIVER ISOFORM, MITOCHONDRIAL | | | |
| | | PRECURSOR | | | |
| 784 | 8489430 (781, 782) | Novel Protein sim. GBank gi\|115208\|sp\|P07245\|C1TC_YEAST - C-1- | | synthase | 1020 |
| | | TETRAHYDROFOLATE SYNTHASE, CYTOPLASMIC (C1-THF | | | |
| | | SYNTHASE) (METHYLENETETRAHYDROFOLATE DEHYDROGENASE/ | | | |
| | | METHENYLTETRAHYDROFOLATE CYCLOHYDROLASE/ | | | |
| | | FORMYLTETRAHYDROFOLATE SYNTHETASE | | | |
| 785 | 78793853 (2391, 2392) | Novel Protein sim. GBank gi\|115208\|sp\|P07245\|C1TC_YEAST - C-1- | | synthase | 1025, 1041 |
| | | TETRAHYDROFOLATE SYNTHASE, CYTOPLASMIC (C1 -THF | | | |
| | | SYNTHASE) (METHYLENETETRAHYDROFOLATE DEHYDROGENASE/ | | | |
| | | METHENYLTETRAHYDROFOLATE CYCLOHYDROLASE/ | | | |
| | | FORMYLTETRAHYDROFOLATE SYNTHETASE | | | |
| 786 | 78760458 (7255, 7256) | Novel Protein sim. GBank gi\|115208\|sp\|P07245\|C1TC_YEAST - C-1- | | synthase | 1041 |
| | | TETRAHYDROFOLATE SYNTHASE, CYTOPLASMIC (C1-THF | | | |
| | | SYNTHASE) (METHYLENETETRAHYDROFOLATE DEHYDROGENASE/ | | | |
| | | METHENYLTETRAHYDROFOLATE CYCLOHYDROLASE/ | | | |
| | | FORMYLTETRAHYDROFOLATE SYNTHETASE | | | |
| 787 | 78523866 (7525, 7526) | Novel Protein sim. GBank gi\|115620\|sp\|P25993\|CARA_BACSU - | | synthase | 1006, 1024 |
| | | CARBAMOYL-PHOSPHATE SYNTHASE, PYRIMIDINE-SPECIFIC, | | | |
| | | SMALL CHAIN (CARBAMOYL-PHOSPHATE SYNTHETASE | | | |
| | | GLUTAMINE CHAIN) | | | |
| 788 | 15019489 (411, 412) | Novel Protein sim. GBank gi\|1169215\|sp\|P43797\|DAPA_HAEIN - | | synthase | 1051 |
| | | DIHYDRODIPICOLINATE SYNTHASE (DHDPS) | | | |
| 789 | 78778172 (3465, 3466) | Novel Protein sim. GBank gi\|1170917\|sp\|P44612\|MEND_HAEIN - 2- | | synthase | 1007 |
| | | SUCCINYL-6-HYDROXY-2,4-CYCLOHEXADIENE-1-CARBOXYLATE | | | |
| | | SYNTHASE (SHCHC SYNTHASE)/2-OXOGLUTARATE | | | |
| | | DECARBOXYLASE (ALPHA-KETOGLUTARATE DECARBOXYLASE) | | | |
| | | (KDC) | | | |
| 790 | 13085914 (3913, 3914) | Novel Protein sim. GBank gi\|1172792\|sp\|P44341\|PYRG_HAEIN - CTP | | synthase | 1020 |
| | | SYNTHASE (UTP-AMMONIA LIGASE) (CTP SYNTHETASE) | | | |
| 791 | 25256587 (8259, 8260) | Novel Protein sim. GBank gi\|1174692\|sp\|P45837\|THRC_MYCLE - | | synthase | 1002 |
| | | PROBABLE THREONINE SYNTHASE | | | |
| 792 | 9873395 (5667, 5668) | Novel Protein sim. GBank gi\|1175639\|sp\|P44433\|RLUC_HAEIN - | | synthase | 1041 |
| | | RIBOSOMAL LARGE SUBUNIT PSEUDOURIDINE SYNTHASE C | | | |
| | | (PSEUDOURIDYLATE SYNTHASE) (URACIL HYDROLYASE) | | | |
| 793 | 82063898 (1737, 1738) | Novel Protein sim. GBank gi\|119832\|sp\|P19097\|FAS2_YEAST - FATTY | | synthase | 1001, 1002, 1003, 1004, |
| | | ACID SYNTHASE, SUBUNIT ALPHA [CONTAINS: EC 1.1.1.100; EC | | | 1006, 1007, 1008, 1010, |
| | | 2.3.1.41] | | | 1014, 1015, 1020, 1021, |
| | | | | | 1022, 1024, 1025, 1028, |
| | | | | | 1031, 1035, 1036, 1041, |
| | | | | | 1046 |
| 794 | 80241674 (8587, 8588) | Novel Protein sim. GBank gi\|123330\|sp\|P22791\|HMCM_RAT - | | synthase | 1003, 1022 |
| | | HYDROXYMETHYLGLUTARYL-COA SYNTHASE, MITOCHONDRIAL | | | |
| | | PRECURSOR (HMG-COA SYNTHASE) (3-HYDROXY-3- | | | |
| | | METHYLGLUTARYL COENZYME A SYNTHASE) | | | |
| 795 | 65460215 (6121, 6122) | Novel Protein sim. GBank gi\|1346930\|sp\|P48795\|PYRC_LACLE - | | synthase | 1014 |
| | | DIHYDROOROTASE (DHOASE) | | | |
| 796 | 79862380 (8803, 8804) | Novel Protein sim. GBank gi\|135108\|sp\|P15189\|SYE_RHIME - | | synthase | 1010, 1028 |
| | | GLUTAMYL-TRNA SYNTHETASE (GLUTAMATE-TRNA LIGASE) | | | |
| | | (GLURS) | | | |
| 797 | 80250273 (6225, 6226) | Novel Protein sim. GBank gi\|1360669\|pir\|\|CGHU1V - collagen alpha 1(V) | | synthase | 1050 |
| | | chain precursor - human | | | |
| 798 | 78389393 (7121, 7122) | Novel Protein sim. GBank gi\|136753\|sp\|P23337\|UGS1_YEAST - | | synthase | 1020 |
| | | GLYCOGEN (STARCH) SYNTHASE, ISOFORM 1 | | | |
| 799 | 8365947 (2349, 2350) | Novel Protein sim. GBank gi\|1709961\|sp\|P53529\|PYRG_MYCLE - CTP | | synthase | 1022 |
| | | SYNTHASE (UTP-AMMONIA LIGASE) (CTP SYNTHETASE) | | | |
| 800 | 88095289 (905, 906) | Novel Protein sim. GBank gi\|1731277\|sp\|Q10807\|YX12_MYCTU - | | synthase | 1031 |
| | | HYPOTHETICAL 32.0 KD PROTEIN CY274.12C | | | |
| 801 | 3377208 (3279, 3280) | Novel Protein sim. GBank gi\|1781097\|emb\|CAB06231\| - (Z83864) gltB | | synthase | 1010 |
| | | [Mycobacterium tuberculosis] | | | |
| 802 | 19887737 (1531, 1532) | Novel Protein sim. GBank gi\|2326953 (U55242) - alpha-D-glucose-1- | | synthase | 1001 |
| | | phosphate thymidylyltransferase [Mycobacterium tuberculosis] | | | |
| 803 | 10871801 (5453, 5454) | Novel Protein sim. GBank gi\|2384564 (U70470) - beta-ketoacyl-ACP | | synthase | 1028 |
| | | synthase I [Pseudomonas aeruginosa] | | | |
| 804 | 35893282 (1313, 1314) | Novel Protein sim. GBank gi\|2493569\|sp\|Q50611\|PGSA_MYCTU - | | synthase | 1050 |
| | | PUTATIVE CDP-DIACYLGLYCEROL-GLYCEROL-3-PHOSPHATE 3- | | | |
| | | PHOSPHATIDYL-TRANSFERASE | | | |
| | | (PHOSPHATIDYLGLYCEROPHOSPHATE SYNTHASE) (PGP | | | |
| | | SYNTHASE) | | | |
| 805 | 9398464 (7211, 7212) | Novel Protein sim. GBank gi\|2493894\|sp\|Q59966\|SRPG_SYNP7 - | | synthase | 1015 |
| | | CYSTEINE SYNTHASE, PLASMID (O-ACETYLSERINE | | | |
| | | SULFHYDRYLASE) (O-ACETYLSERINE (THIOL)-LYASE) (CSASE) | | | |
| 806 | 33202587 (2411, 2412) | Novel Protein sim. GBank gi\|2498245\|sp\|Q51983\|CMTG_PSEPU - 4- | | synthase | 1024 |
| | | HYDROXY-2-OXOVALERATE ALDOLASE (HOA) | | | |
| 807 | 20446202 (8103, 8104) | Novel Protein sim. GBank gi\|2501040\|sp\|O05814\|SYP_MYCTU - | | synthase | 1022 |
| | | PROLYL-TRNA SYNTHETASE (PROLINE-TRNA LIGASE) (PRORS) | | | |
| 808 | 79830747 (1181, 1182) | Novel Protein sim. GBank gi\|2582531 (AF026444) - 2-isopropylmalate | | synthase | 1025, 1036 |
| | | synthase [Streptomyces coelicolor] | | | |
| 809 | 80065038 (1617, 1618) | Novel Protein sim. GBank gi\|2582531 (AF026444) - 2-isopropylmalate | | synthase | 1022, 1024, 1031 |
| | | synthase [Streptomyces coelicolor] | | | |
| 810 | 70949027 (3945, 3946) | Novel Protein sim. GBank gi\|2582531 (AF026444) - 2-isopropylmalate | | synthase | 1026 |
| | | synthase [Streptomyces coelicolor] | | | |
| 811 | 80053048 (2255, 2256) | Novel Protein sim. GBank gi\|2661608\|emb\|CAA15716\| - (AL009197) | | synthase | 1003 |
| | | hypothetical ctp synthase [Schizosaccharomyces pombe] | | | |
| 812 | 80507844 (8917, 8918) | Novel Protein sim. GBank gi\|2746079 (AF015310) - BTH1 [Brassica | | synthase | 1003, 1004, 1010, 1015 |
| | | napus] | | | |
| 813 | 80046498 (7427, 7428) | Novel Protein sim. GBank gi\|2791487\|emb\|CAA16024\| - (AL021246) folC | | synthase | 1002, 1004, 1006, 1015, |
| | | [Mycobacterium tuberculosis] | | | 1024 |
| 814 | 79168037 (6815, 6816) | Novel Protein sim. GBank gi\|2829688\|sp\|P80608\|CYSK_MAlZE - | | synthase | 1028, 1047 |
| | | CYSTEINE SYNTHASE (O-ACETYLSERINE SULFHYDRYLASE) (O- | | | |
| | | ACETYLSERINE (THIOL)-LYASE) (CSASE) | | | |
| 815 | 78360263 (2257, 2258) | Novel Protein sim. GBank gi\|2916867\|emb\|CAA17615.1\| - (AL022004) | | synthase | 1006 |
| | | purM [Mycobacterium tuberculosis] | | | |
| 816 | 32735522 (7325, 7326) | Novel Protein sim. GBank gi\|2924399\|emb\|CAA12103\| - (AJ224731) | | synthase | 1001 |
| | | peptide synthetase [Chroococcus dispersus] | | | |
| 817 | 27978092 (3551, 3552) | Novel Protein sim. GBank gi\|2950419\|emb\|CAA17864.1\| - (AL022076) | | synthase | 1004 |
| | | pks13 [Mycobacterium tuberculosis] | | | |
| 818 | 20457035 (4371, 4372) | Novel Protein sim. GBank gi\|3122391\|sp\|O33465\|METH_PSEPU - 5- | | synthase | 1008 |
| | | METHYLTETRAHYDROFOLATE-HOMOCYSTEINE | | | |
| | | METHYLTRANSFERASE (METHIONINE SYNTHASE, VITAMIN-B12 | | | |
| | | DEPENDENT ISOZYME) (MS) | | | |
| 819 | 33206031 (6163, 6164) | Novel Protein sim. GBank gi\|3378523\|emb\|CAA08867\| - (AJ009832) | | synthase | 1004, 1024 |
| | | cyclomaltodextrinase glucanotransferase [Thermotoga neapolitana] | | | |
| 820 | 11073229 (4517, 4518) | Novel Protein sim. GBank gi\|3386354 (AF074705) - pyochelin synthetase | | synthase | 1031 |
| | | [Pseudomonas aeruginosa] | | | |
| 821 | 78787522 (7529, 7530) | Novel Protein sim. GBank gi\|3913105\|sp\|O50468\|AROB_NEIGO - 3- | | synthase | 1020 |
| | | DEHYDROQUINATE SYNTHASE | | | |
| 822 | 78459905 (1775, 1776) | Novel Protein sim. GBank gi\|3915158\|sp\|O06322\|TRUA_MYCTU - TRNA | | synthase | 1024 |
| | | PSEUDOURIDINE SYNTHASE A (PSEUDOURIDYLATE SYNTHASE I) | | | |
| | | (PSEUDOURIDINE SYNTHASE I) (URACIL HYDROLYASE) | | | |
| 823 | 35892891 (8109, 8110) | Novel Protein sim. GBank gi\|400182\|sp\|Q02141\|LEU1_LACLA - 2- | | synthase | 1050 |
| | | ISOPROPYLMALATE SYNTHASE (ALPHA-ISOPROPYLMALATE | | | |
| | | SYNTHASE) (ALPHA-IPM SYNTHETASE) | | | |
| 824 | 29188808 (8993, 8994) | Novel Protein sim. GBank gi\|4467263\|emb\|CAB37588\| - (AL035569) | | synthase | 1003, 1004, 1020, 1024, |
| | | acetolactate synthase [Streptomyces coelicolor] | | | 1031, 1036, 1055 |
| 825 | 17282497 (5223, 5224) | Novel Protein sim. GBank gi\|4521156\|dbj\|BAA75929.1\| - (AB024708) | | synthase | 1008, 1036 |
| | | glutamine 2-oxoglutarate aminotransferase large subunit | | | |
| | | [Corynebacterium glutamicum] | | | |
| 826 | 80248428 (5475, 5476) | Novel Protein sim. GBank gi\|4521156\|dbj\|BAA75929.1\| - (AB024708) | | synthase | 1004, 1008, 1020, 1021, |
| | | glutamine 2-oxoglutarate aminotransferase large subunit | | | 1022, 1031, 1035 |
| | | [Corynebacterium glutamicum] | | | |
| 827 | 79194674 (2913, 2914) | Novel Protein sim. GBank gi\|460064\|emb\|CAA49847\| - (X70397) GMP | | synthase | 1022 |
| | | synthase [Saccharomyces cerevisiae] | | | |
| 828 | 95201692 (7021, 7022) | Novel Protein sim. GBank gi\|461586\|sp\|Q06185\|ATPJ_MOUSE - ATP | | synthase | 1022, 1035 |
| | | SYNTHASE E CHAIN, MITOCHONDRIAL | | | |
| 829 | 37036243 (6479, 6480) | Novel Protein sim. GBank gi\|4633807\|gb\|AAD26859.1\|AF12779 - | | synthase | 1010 |
| | | (AF127795) trehalose biosynthetic enzyme TreY [Rhizobium | | | |
| | | leguminosarum bv. viciae] | | | |
| 830 | 94647887 (6153, 6154) | Novel Protein sim. GBank gi\|536873 (M34549) - POL3 gene product | | synthase | 1001, 1004, 1006, 1007, |
| | | [Saccharomyces cerevisiae] | | | 1008, 1010, 1015, 1020, |
| | | | | | 1021, 1022, 1024, 1027, |
| | | | | | 1028, 1031, 1035, 1051 |
| 831 | 86474099 (6545, 6546) | Novel Protein sim. GBank gi\|541849\|pir\|\|JQ2340 - anthranilate synthase | | synthase | 1031, 1051 |
| | | (EC 4.1.3.27) beta chain - Arabidopsis thaliana | | | |
| 832 | 79572886 (2509, 2510) | Novel Protein sim. GBank gi\|543955\|sp\|Q05597\|CBIP_SALTY - | | synthase | 1015 |
| | | COBYRIC ACID SYNTHASE | | | |
| 833 | 79473028 (1445, 1446) | Novel Protein sim. GBank gi\|547900\|sp\|Q02251\|MCAS_MYCBO - | | synthase | 1020 |
| | | MYCOCEROSIC ACID SYNTHASE | | | |
| 834 | 29499363 (1559, 1560) | Novel Protein sim. GBank gi\|549690\|sp\|P36087\|YKH0_YEAST - | | synthase | 1007 |
| | | HYPOTHETICAL 19.8 KD PROTEIN IN LHS1-NUP100 INTERGENIC | | | |
| | | REGION | | | |
| 835 | 80503288 (1547, 1548) | Novel Protein sim. GBank gi\|585097\|sp\|P10377\|ENTC_ECOLI - | | synthase | 1002, 1010 |
| | | ISOCHORISMATE SYNTHASE ENTC | | | |
| 836 | 79582160 (2947, 2948) | Novel Protein sim. GBank gi\|585763\|sp\|Q07296\|PUR7_STRPN - | | synthase | 1028 |
| | | PHOSPHORIBOSYLAMINOIMIDAZOLE-SUCCINOCARBOXAMIDE | | | |
| | | SYNTHASE (SAICAR SYNTHETASE) | | | |
| 837 | 12891628 (4683, 4684) | Novel Protein sim. GBank gi\|628702\|pir\|\|S45213 - glutamate-tRNA ligase | | synthase | 1028 |
| | | homolog - Escherichia coli | | | |
| 838 | 79829998 (699, 700) | Novel Protein sim. GBank gi\|728896\|sp\|P39198\|AROC_VIBAN - | | synthase | 1002 |
| | | CHORISMATE SYNTHASE (5-ENOLPYRUVYLSHIKIMATE-3- | | | |
| | | PHOSPHATE PHOSPHOLYASE) | | | |
| 839 | 29005610 (8539, 8540) | Novel Protein sim. GBank gi\|731489\|sp\|P39965\|SYPC_YEAST - | | synthase | 1002, 1015 |
| | | PROBABLE PROLYL-TRNA SYNTHETASE, CYTOPLASMIC (PROLINE- | | | |
| | | TRNA LIGASE) (PRORS) | | | |
| 840 | 20751472 (221, 222) | Novel Protein sim. GBank gi\|731699\|sp\|P38820\|YHR1_YEAST - | | synthase | 1020, 1022, 1041 |
| | | HYPOTHETICAL 49.4 KD PROTEIN IN CDC12-ORC6 INTERGENIC | | | |
| | | REGION | | | |
| 841 | 78082227 (2943, 2944) | Novel Protein sim. GBank gi\|887839 (U28375) - ORF_o182 [Escherichia | | synthase | 1026 |
| | | coli] | | | |
| 842 | 79606198 (5693, 5694) | Novel Protein sim. GBank gi\|135753\|sp\|P27796\|THIK_YEAST - 3- | | thiolase | 1004, 1020 |
| | | KETOACYL-COA THIOLASE PEROXISOMAL PRECURSOR (BETA- | | | |
| | | KETOTHIOLASE) (ACETYL-COA ACYLTRANSFERASE) | | | |
| | | (PEROXISOMAL 3-OXOACYL-COA THIOLASE) | | | |
| 843 | 9383851 (425, 426) | Novel Protein sim. GBank gi\|135762\|sp\|P13437\|THIM_RAT - 3- | | thiolase | 1015 |
| | | KETOACYL-COA THIOLASE MITOCHONDRIAL (BETA- | | | |
| | | KETOTHIOLASE) (ACETYL-COA ACYLTRANSFERASE) | | | |
| | | (MITOCHONDRIAL 3-OXOACYL-COA THIOLASE) | | | |
| 844 | 70336380 (3653, 3654) | Novel Protein sim. GBank gi\|3063884\|emb\|CAA1 8569\| - (AL022486) | | thiolase | 1007 |
| | | putative acetyltransferase [Mycobacterium leprae] | | | |
| 845 | 17300401 (7049, 7050) | Novel Protein sim. GBank gi\|477788\|pir\|\|B48376 - beta- | | thiolase | 1041 |
| | | ketothiolase = poly(3-hydroxyalkanoate) synthase - Thiocystis violacea | | | |
| 846 | 33202597 (5463, 5464) | Novel Protein sim. GBank gi\|1617235\|emb\|CAA69629\| - (Y08343) | | tm7 | 1024 |
| | | olfactory receptor [Xenopus laevis] | | | |
| 847 | 87893328 (589, 590) | Novel Protein sim. GBank gi\|3289999 (AC005255) - BC85395_1 [Homo | | tm7 | 1023 |
| | | sapiens] | | | |
| 848 | 86474087 (4457, 4458) | Novel Protein sim. GBank gi\|4512653\|gb\|AAD21708.1\| - (AC007048) | | tnfreceptor | 1051 |
| | | unknown protein [Arabidopsis thaliana] | | | |
| 849 | 25258728 (2465, 2466) | Novel Protein sim. GBank gi\|4759086\|ref\|NP_004883.1\|pSEC2 - vesicle | | traffic | 1002, 1024 |
| | | trafficking protein sec22b | | | |
| 850 | 80502259 (2775, 2776) | Novel Protein sim. GBank gi\|586350\|sp\|P38151\|YB83_YEAST - | Contains protein domain | transcriptfactor | 1002, 1004, 1006, 1010, |
| | | HYPOTHETICAL 45.8 KD PROTEIN IN PCS60-ABD1 INTERGENIC | (PF00013) - KH domain | | 1015, 1023, 1036, 1041 |
| | | REGION | | | |
| 851 | 80043835 (1919, 1920) | Novel Protein sim. GBank gi\|115157\|sp\|P16574\|BVGA_BORPE - | Contains protein domain | transcriptfactor | 1015, 1020, 1031 |
| | | VIRULENCE FACTORS PUTATIVE POSITIVE TRANSCRIPTION | (PF00072) - Response regulator | | |
| | | REGULATOR BVGA | receiver domain | | |
| 852 | 95198193 (5939, 5940) | Novel Protein sim. GBank gi\|4218542\|emb\|CAA09631.1\| - (AJ011500) | Contains protein domain | transcriptfactor | 1001, 1004, 1010, 1015, |
| | | putative two-component response regulator [Streptomyces violaceoruber] | (PF00072) - Response regulator | | 1019, 1035 |
| | | | receiver domain | | |
| 853 | 86668923 (8195, 8196) | Novel Protein sim. GBank gi\|2501714\|sp\|Q61967\|ZF90_MOUSE - ZINC | Contains protein domain | transcriptfactor | 1006, 1024, 1035, 1039 |
| | | FINGER PROTEIN ZFP-90 (ZINC FINGER PROTEIN NK10) | (PF00096) - Zinc finger, C2H2 | | |
| | | | type | | |
| 854 | 80438888 (4761, 4762) | Novel Protein sim. GBank gi\|538413 (L36315) - zinc finger protein [Mus | Contains protein domain | transcriptfactor | 1035 |
| | | musculus] | (PF00096) - Zinc finger, C2H2 | | |
| | | | type | | |
| 855 | 95294772 (675, 676) | Novel Protein sim. GBank gi\|4507081\|ref\|NP_003066.1\|pSMAR - | Contains protein domain | transcriptfactor | 1022 |
| | | SWI/SNF related, matrix associated, actin dependent regulator of | (PF00249) - Myb-like DNA- | | |
| | | chromatin, subfamily c, member 2 | binding domain | | |
| 856 | 38923775 (1681, 1682) | Novel Protein sim. GBank gi\|1170943\|sp\|P45128\|MFD_HAEIN - | Contains protein domain | transcriptfactor | 1006, 1020, 1036 |
| | | TRANSCRIPTION-REPAIR COUPLING FACTOR (TRCF) | (PF00271) - Helicases conserved | | |
| | | | C-terminal domain | | |
| 857 | 79618896 (7835, 7836) | Novel Protein sim. GBank gi\|2131747\|pir\|\|S64835 - hypothetical protein | Contains protein domain | transcriptfactor | 1004, 1015, 1036 |
| | | YLR013w - yeast (Saccharomyces cerevisiae) | (PF00320) - GATA zinc finger | | |
| 858 | 78459290 (8247, 8248) | Novel Protein sim. GBank gi\|130805\|sp\|P20053\|PR04_YEAST - U4/U6 | Contains protein domain | transcriptfactor | 1024 |
| | | SMALL NUCLEAR RIBONUCLEOPROTEIN PRP4 | (PF00400) - WD domain, G-beta | | |
| | | | repeat | | |
| 859 | 20292176 (2543, 2544) | Novel Protein sim. GBank gi\|1353001\|sp\|P47025\|YJL2_YEAST - | Contains protein domain | transcriptfactor | 1031 |
| | | HYPOTHETICAL 80.0 KD TRP-ASP REPEATS CONTAINING PROTEIN | (PF00400) - WD domain, G-beta | | |
| | | IN ASF1-CCT7 INTERGENIC REGION | repeat | | |
| 860 | 78782931 (643, 644) | Novel Protein sim. GBank gi\|416288\|dbj\|BAA03957\| - (D16506) ORF1 | Contains protein domain | transcriptfactor | 1020, 1036 |
| | | [Saccharomyces cerevisiae] | (PF00400) - WD domain, G-beta | | |
| | | | repeat | | |
| 861 | 79876409 (8359, 8360) | Novel Protein sim. GBank gi\|128183\|sp\|P11633\|NHPB_YEAST - | Contains protein domain | transcriptfactor | 1003, 1015, 1020 |
| | | NONHISTONE CHROMOSOMAL PROTEIN 6B | (PF00505) - HMG (high mobility | | |
| | | | group) box | | |
| 862 | 36623022 (4819, 4820) | Novel Protein sim. GBank gi\|548719\|sp\|Q04863\|RELB_MOUSE - | Contains protein domain | transcriptfactor | 1031 |
| | | TRANSCRIPTION FACTOR RELB | (PF00554) - Rel homology | | |
| | | | domain (RHD). | | |
| 863 | 98753100 (201, 202) | Novel Protein sim. GBank gi\|107909\|pir\|\|JC1235 - transcription factor | | transcriptfactor | 1055 |
| | | BTF3a - human | | | |
| 864 | 39562855 (5267, 5268) | Novel Protein sim. GBank gi\|114814\|sp\|P14164\|BAF1_YEAST - | | transcriptfactor | 1004, 1020 |
| | | TRANSCRIPTION FACTOR BAF1 (ARS BINDING FACTOR 1) (PROTEIN | | | |
| | | ABF1) (BIDIRECTIONALLY ACTING FACTOR) (SFB-B) (DNA | | | |
| | | REPLICATION ENHANCER-BINDING PROTEIN OBF1) | | | |
| 865 | 21425075 (855, 856) | Novel Protein sim. GBank gi\|128915\|sp\|P16921\|NUSG_ECOLI - | | transcriptfactor | 1006, 1020 |
| | | TRANSCRIPTION ANTITERMINATION PROTEIN NUSG | | | |
| 866 | 27806915 (2985, 2986) | Novel Protein sim. GBank gi\|3914014\|sp\|P96380\|MFD_MYCTU - | | transcriptfactor | 1020 |
| | | TRANSCRIPTION-REPAIR COUPLING FACTOR (TRCF) | | | |
| 867 | 20457127 (4899, 4900) | Novel Protein sim. GBank gi\|3914014\|sp\|P96380\|MFD_MYCTU - | | transcriptfactor | 1008, 1020, 1031 |
| | | TRANSCRIPTION-REPAIR COUPLING FACTOR (TRCF) | | | |
| 868 | 13526955 (2271, 2272) | Novel Protein sim. GBank gi\|416737\|sp\|P24813\|CAD1_YEAST - | | transcriptfactor | 1022 |
| | | TRANSCRIPTION FACTOR CAD1 (YAP-2 PROTEIN) | | | |
| 869 | 29246127 (5381, 5382) | Novel Protein sim. GBank gi\|548394\|sp\|P36264\|NUSG_STACA - | | transcriptfactor | 1003, 1006, 1014 |
| | | TRANSCRIPTION ANTITERMINATION PROTEIN NUSG | | | |
| 870 | 80234879 (2501, 2502) | Novel Protein sim. GBank gi\|549671 \|sp\|P36093\|PHD1_YEAST - | | transcriptfactor | 1002, 1003, 1025 |
| | | PUTATIVE TRANSCRIPTION FACTOR PHD1 | | | |
| 871 | 78674899 (7025, 7026) | Novel Protein sim. GBank gi\|606946 (U13878) - neural-restrictive silencer | | transcriptfactor | 1015 |
| | | factor [Mus musculus] | | | |
| 872 | 70948976 (7963, 7964) | Novel Protein sim. GBank gi\|1864151 (U88875) - hypoxanthine-guanine | Contains protein domain | transferase | 1026 |
| | | phosphoribosyl transferase [Mycobacterium avium] | (PF00156) - Phosphoribosyl | | |
| | | | transferase domain | | |
| 873 | 39507571 (7337, 7338) | Novel Protein sim. GBank gi\|129273\|sp\|P16964\|OTCX_STRPY - | Contains protein domain | transferase | 1004 |
| | | PROBABLE ORNITHINE CARBAMOYLTRANSFERASE (OTC) | (PF00185) - Aspartate/omithine | | |
| | | | carbamoyltransferase | | |
| 874 | 80484113 (6211, 6212) | Novel Protein sim. GBank gi\|2764612\|emb\|CAA04683\| - (AJ001330) | Contains protein domain | transferase | 1010 |
| | | omithine transcarbamoylase [Lactobacillus sakei] | (PF00185) - Aspartate/omithine | | |
| | | | carbamoyltransferase | | |
| 875 | 20457620 (1429, 1430) | Novel Protein sim. GBank gi\|2052147\|emb\|CAB08137\| - (Z94752) ksgA | Contains protein domain | transferase | 1008 |
| | | [Mycobacterium tuberculosis] | (PF00398) - Ribosomal RNA | | |
| | | | adenine dimethylases | | |
| 876 | 20285868 (2397, 2398) | Novel Protein sim. GBank gi\|2052147\|emb\|CAB08137\| - (Z94752) ksgA | Contains protein domain | transferase | 1031 |
| | | [Mycobacterium tuberculosis] | (PF00398) - Ribosomal RNA | | |
| | | | adenine dimethylases | | |
| 877 | 5392182 (7617, 7618) | Novel Protein sim. GBank gi\|808857 (M29585) - unknown protein | Contains protein domain | transferase | 1055 |
| | | [Saccharomyces cerevisiae] | (PF00432) - Prenyltransferase | | |
| | | | and squalene oxidase repeats | | |
| 878 | 36997687 (5079, 5080) | Novel Protein sim. GBank gi\|135908\|sp\|P29277\|TKT_RHOSH - | Contains protein domain | transferase | 1001 |
| | | TRANSKETOLASE (TK) | (PF00456) - Transketolase | | |
| 879 | 11689874 (1605, 1606) | Novel Protein sim. GBank gi\|2984067 (AE000755) - transketolase | Contains protein domain | transferase | 1028 |
| | | [Aquifex aeolicus] | (PF00456) - Transketolase | | |
| 880 | 80217795 (8027, 8028) | Novel Protein sim. GBank gi\|464894\|sp\|P33315\|TKT2_YEAST - | Contains protein domain | transferase | 1004, 1008, 1020, 1022, |
| | | TRANSKETOLASE 2 (TK 2) | (PF00456) - Transketolase | | 1031 |
| 881 | 39444044 (8085, 8086) | Novel Protein sim. GBank gi\|2137763\|pir\|\|JC4958 - serine | Contains protein domain | transferase | 1003 |
| | | hydroxymethyltransferase (EC 2.1.2.—) 1 - mouse | (PF00464) - Serine | | |
| | | | hydroxymethyltransferase | | |
| 882 | 32191727 (5047, 5048) | Novel Protein sim. GBank gi\|462189\|sp\|P34895\|GLYA_HYPME - SERINE | Contains protein domain | transferase | 1021 |
| | | HYDROXYMETHYLTRANSFERASE (SERINE METHYLASE) (SHMT) | (PF00464) - Serine | | |
| | | | hydroxymethyltransferase | | |
| 883 | 30790797 (5799, 5800) | Novel Protein sim. GBank gi\|1001478\|dbj\|BAA10104\| - (D63999) | Contains protein domain | transferase | 1002 |
| | | hypothetical protein [Synechocystis sp.] | (PF00534) - Glycosyl transferases | | |
| | | | group 1 | | |
| 884 | 80496423 (7013, 7014) | Novel Protein sim. GBank gi\|4981142\|gb\|AAD35706.1\|AE00173 - | Contains protein domain | transferase | 1004, 1010, 1031 |
| | | (AE001736) lipopolysaccharide biosynthesis protein, putative | (PF00534) - Glycosyl transferases | | |
| | | [Thermotoga maritima] | group 1 | | |
| 885 | 87453436 (8039, 8040) | Novel Protein sim. GBank gi\|2078350 (U95923) - transaldolase [Solanum | Contains protein domain | transferase | 1023 |
| | | tuberosum] | (PF00923) - Transaldolase | | |
| 886 | 95292599 (1939, 1940) | Novel Protein sim. GBank gi\|2995299\|emb\|CAA18328\| - (AL022268) | Contains protein domain | transferase | 1003, 1004, 1008, 1014, |
| | | putative tRNA delta(2)-isopentenylpyrophosphate transferase | (PF01715) - IPP transferase | | 1020, 1021, 1022, 1023, |
| | | [Streptomyces coelicolor] | | | 1031, 1038, 1051 |
| 887 | 86477759 (2921, 2922) | Novel Protein sim. GBank gi\|1169910\|sp\|P45177\|GLGB_HAEIN - 1,4- | | transferase | 1017 |
| | | ALPHA-GLUCAN BRANCHING ENZYME (GLYCOGEN BRANCHING | | | |
| | | ENZYME) | | | |
| 888 | 80430807 (1017, 1018) | Novel Protein sim. GBank gi\|1171637\|sp\|P43619\|NADC_YEAST - | | transferase | 1003, 1004, 1006, 1008, |
| | | PUTATIVE NICOTINATE-NUCLEOTIDE PYROPHOSPHORYLASE | | | 1010, 1020, 1022, 1027, |
| | | (CARBOXYLATING) (QUINOLINATE | | | 1031, 1035, 1041 |
| | | PHOSPHORIBOSYLTRANSFERASE (DECARBOXYLATING)) | | | |
| | | (QAPRTASE) | | | |
| 889 | 50843641 (2313, 2314) | Novel Protein sim. GBank gi\|117289\|sp\|P18886\|CPT2_RAT - | | transferase | 1033 |
| | | MITOCHONDRIAL CARNITINE O-PALMITOYLTRANSFERASE II | | | |
| | | PRECURSOR (CPT II) | | | |
| 890 | 24128661 (4113, 4114) | Novel Protein sim. GBank gi\|121741\|sp\|P08011\|GTMI_RAT - | | transferase | 1050 |
| | | GLUTATHIONE S-TRANSFERASE, MICROSOMAL | | | |
| 891 | 80219043 (3121, 3122) | Novel Protein sim. GBank gi\|1352650\|sp\|P48439\|OSTG_YEAST - | | transferase | 1002, 1003, 1004, 1006, |
| | | DOLICHYL-DIPHOSPHOOLIGOSACCHARIDE-PROTEIN | | | 1015, 1020, 1031, 1036 |
| | | GLYCOSYLTRANSFERASE GAMMA SUBUNIT PRECURSOR | | | |
| | | (OLIGOSACCHARYL TRANSFERASE GAMMA SUBUNIT) | | | |
| | | (OLIGOSACCHARYL TRANSFERASE 34 KD SUBUNIT) | | | |
| 892 | 13525870 (4797, 4798) | Novel Protein sim. GBank gi\|1929426\|emb\|CAA69124\| - (Y07788) | | transferase | 1025 |
| | | ORF35x7 [Vibrio cholerae] | | | |
| 893 | 79613528 (3881, 3882) | Novel Protein sim. GBank gi\|2290999 (AF006000) - unknown [Bordetella | | transferase | 1002 |
| | | pertussis] | | | |
| 894 | 80062512 (5871, 5872) | Novel Protein sim. GBank gi\|232167\|sp\|P30537\|GLGB_BACCL - 1,4- | | transferase | 1008 |
| | | ALPHA-GLUCAN BRANCHING ENZYME (GLYCOGEN BRANCHING | | | |
| | | ENZYME) | | | |
| 895 | 80240791 (6127, 6128) | Novel Protein sim. GBank gi\|2808801\|emb\|CAA04602.1\| - (AJ001205) | | transferase | 1014, 1020 |
| | | pep2 [Streptomyces coelicolor] | | | |
| 896 | 17942321 (1963, 1964) | Novel Protein sim. GBank gi\|3128321 (AF010496) - nicotinate-nucleotide- | | transferase | 1036 |
| | | dimethylbenzimidazole phosphoribosyltransferase [Rhodobacter | | | |
| | | capsulatus] | | | |
| 897 | 20438324 (3475, 3476) | Novel Protein sim. GBank gi\|417329\|sp\|P33038\|MURA_ENTCL - UDP-N- | | transferase | 1022 |
| | | ACETYLGLUCOSAMINE 1-CARBOXYVINYLTRANSFERASE | | | |
| | | (ENOYLPYRUVATE TRANSFERASE) (UDP-N-ACETYLGLUCOSAMINE | | | |
| | | (ENOLPYRUVYL TRANSFERASE) (EPT) | | | |
| 898 | 20724532 (595, 596) | Novel Protein sim. GBank gi\|421646\|pir\|\|S34218 - 1,4-alpha-glucan | | transferase | 1004 |
| | | branching enzyme (EC 2.4.1.18) - Streptomyces coelicolor | | | |
| 899 | 86671251 (3403, 3404) | Novel Protein sim. GBank gi\|4850383\|gb\|AAD31053.1\|AC00735 - | | transferase | 1005 |
| | | (AC007357) Contains similarity to gi\|4417304 F15O11.7 putative beta-1,4- | | | |
| | | mannosyl-glycoprotein beta-1,4-N-acetylglucosaminyltransferase from | | | |
| | | Arabidopsis thaliana BAC gb\|AC006446. | | | |
| 900 | 79421170 (6037, 6038) | Novel Protein sim. GBank gi\|4981038\|gb\|AAD35610.1\|AE00172 - | | transferase | 1004 |
| | | (AE001728) tRNA delta-2-isopentenylpyrophosphate transferase | | | |
| | | [Thermotoga maritima] | | | |
| 901 | 79827474 (3925, 3926) | Novel Protein sim. GBank gi\|2340075\|gb\|AAB67299.1\| - (U59485) AttE | Contains protein domain | transport | 1041 |
| | | [Agrobacterium tumefaciens] | (PF00005) - ABC transporter | | |
| 902 | 86465157 (7803, 7804) | Novel Protein sim. GBank gi\|3128283 (AF010496) - iron(iii) dicitrate | Contains protein domain | transport | 1002, 1004, 1008, 1020, |
| | | transport ATP-binding protein [Rhodobacter capsulatus] | (PF00005) - ABC transporter | | 1026, 1027 |
| 903 | 78406956 (2421, 2422) | Novel Protein sim. GBank gi\|4001826 (AF063016) - G protein-coupled | Contains protein domain | transport | 1004 |
| | | receptor kinase GRK7 [Spermophilus tridecemlineatus] | (PF00069) - Eukaryotic protein | | |
| | | | kinase domain | | |
| 904 | 25323825 (597, 598) | Novel Protein sim. GBank gi\|114301\|sp\|P13586\|ATC1_YEAST - | Contains protein domain | transport | 1002 |
| | | CALCIUM-TRANSPORTING ATPASE 1 (GOLGI CA2+-ATPASE) | (PF00122) - E1-E2 ATPase | | |
| 905 | 80543836 (8851, 8852) | Novel Protein sim. GBank gi\|114301\|sp\|P13586\|ATC1_YEAST - | Contains protein domain | transport | 1041, 1055 |
| | | CALCIUM-TRANSPORTING ATPASE 1 (GOLGI CA2+-ATPASE) | (PF00122) - E1-E2 ATPase | | |
| 906 | 39434986 (6081, 6082) | Novel Protein sim. GBank gi\|114302\|sp\|P13587\|ATN1_YEAST - SODIUM | Contains protein domain | transport | 1004 |
| | | TRANSPORT ATPASE 1 | (PF00122) - E1-E2 ATPase | | |
| 907 | 13086008 (9021, 9022) | Novel Protein sim. GBank gi\|1353678 (U42410) - heavy-metal | Contains protein domain | transport | 1025 |
| | | transporting P-type ATPase [Proteus mirabilis] | (PF00122) - E1-E2 ATPase | | |
| 908 | 30673742 (741, 742) | Novel Protein sim. GBank gi\|1731256\|sp\|Q10866\|YW27_MYCTU - | Contains protein domain | transport | 1006 |
| | | PROBABLE CATION-TRANSPORTING ATPASE CY39.27 | (PF00122) - E1-E2 ATPase | | |
| 909 | 17121073 (2925, 2926) | Novel Protein sim. GBank gi\|728935\|sp\|P38995\|ATU2_YEAST - | Contains protein domain | transport | 1036 |
| | | PROBABLE COPPER-TRANSPORTING ATPASE (CU2+-ATPASE) | (PF00122) - E1-E2 ATPase | | |
| 910 | 23303892 (8623, 8624) | Novel Protein sim. GBank gi\|1175298\|sp\|P44849\|Y736_HAEIN - | Contains protein domain | transport | 1035 |
| | | HYPOTHETICAL SODIUM-DEPENDENT TRANSPORTER HI0736 | (PF00209) - | | |
| | | | Sodium: neurotransmitter | | |
| | | | symporter family | | |
| 911 | 90937131 (4161, 4162) | Novel Protein sim. GBank gi\|3347922 (AF075262) - orphan transporter | Contains protein domain | transport | 1018 |
| | | isoform A12 [Mus musculus] | (PF00209) - | | |
| | | | Sodium: neurotransmitter | | |
| | | | symporter family | | |
| 912 | 90935315 (4493, 4494) | Novel Protein sim. GBank gi\|3347922 (AF075262) - orphan transporter | Contains protein domain | transport | 1017, 1018, 1051 |
| | | isoform A12 [Mus musculus] | (PF00209) - | | |
| | | | Sodium: neurotransmitter | | |
| | | | symporter family | | |
| 913 | 78996347 (5607, 5608) | Novel Protein sim. GBank gi\|131515\|sp\|P02908\|PTGA_SALTY - PTS | Contains protein domain | transport | 1001 |
| | | SYSTEM, GLUCOSE-SPECIFIC IIA COMPONENT (EIIA-GLC) | (PF00358) - phosphoenolpyruvate | | |
| | | (GLUCOSE-PERMEASE IIA COMPONENT) (PHOSPHOTRANSFERASE | dependent sugar | | |
| | | ENZYME II, A COMPONENT) (EIII-GLC) | phosphotransferase system, EIIA 1 | | |
| 914 | 65487496 (8841, 8842) | Novel Protein sim. GBank gi\|585754\|sp\|P24217\|PTFA_ECOLI - PTS | Contains protein domain | transport | 1021 |
| | | SYSTEM, FRUCTOSE-SPECIFIC IIA/FPR COMPONENT (EIIA-FRU) | (PF00359) - phosphoenolpyruvate | | |
| | | (FRUCTOSE-PERMEASE IIA/FPR COMPONENT) | dependent sugar | | |
| | | (PHOSPHOTRANSFERASE ENZYME II, A/FPR COMPONENT) | phosphotransferase system, EIIA 2 | | |
| | | (PHOSPHOTRANSFERASE FPR PROTEIN) (PSEUDO-HPR) (EIII-FRU) | | | |
| | | (FRUCTOSE PTS DIPHO . . . | | | |
| 915 | 10194015 (5935, 5936) | Novel Protein sim. GBank gi\|118906\|sp\|P23847\|DPPA_ECOLI - | Contains protein domain | transport | 1002 |
| | | PERIPLASMIC DIPEPTIDE TRANSPORT PROTEIN PRECURSOR | (PF00496) - Bacterial extracellular | | |
| | | (DIPEPTIDE-BINDING PROTEIN) (DBP) | solute-binding proteins, family 5 | | |
| 916 | 78468887 (5353, 5354) | Novel Protein sim. GBank gi\|1827807\|pdb\|1DPE\| - Dipeptide-Binding | Contains protein domain | transport | 1024 |
| | | Protein | (PF00496) - Bacterial extracellular | | |
| | | | solute-binding proteins, family 5 | | |
| 917 | 80055575 (2185, 2186) | Novel Protein sim. GBank gi\|2960090\|emb\|CAA17988.1\| - (AL022121) | Contains protein domain | transport | 1003 |
| | | dppA [Mycobacterium tuberculosis] | (PF00496) - Bacterial extracellular | | |
| | | | solute-binding proteins, family 5 | | |
| 918 | 10879734 (1841, 1842) | Novel Protein sim. GBank gi\|400831\|sp\|P31135\|POTH_ECOLI - | Contains protein domain | transport | 1022 |
| | | PUTRESCINE TRANSPORT SYSTEM PERMEASE PROTEIN POTH | (PF00528) - Binding-protein- | | |
| | | | dependent transport systems | | |
| | | | inner membrane component | | |
| 919 | 85520849 (1131, 1132) | Novel Protein sim. GBank gi\|5458693\|emb\|CAB50180.1\| - (AJ248287) | Contains protein domain | transport | 1046 |
| | | PAB1535 [Pyrococcus abyssi] | (PF00706) - Anenome neuroloxin | | |
| 920 | 11700068 (677, 678) | Novel Protein sim. GBank gi\|529013 (U12598) - multidrug resistance | Contains protein domain | transport | 1028 |
| | | protein [Escherichia coli] | (PF00873) - AcrB/AcrD/AcrF | | |
| | | | family | | |
| 921 | 17087174 (3747, 3748) | Novel Protein sim. GBank gi\|5031697\|ref\|NP_005594.1\|pFIC1 - familial | Contains protein domain | transport | 1021 |
| | | intrahepatic cholestasis 1, (progressive, Byler disease and benign | (PF01581) - FMRFamide related | | |
| | | recurrent) | peptide family | | |
| 922 | 20452390 (2267, 2268) | Novel Protein sim. GBank gi\|2632049\|emb\|CAA05608\| - (AJ002571) | Contains protein domain | transport | 1022 |
| | | YkoK [Bacillus subtilis] | (PF01769) - Divalent cation | | |
| | | | transporter | | |
| 923 | 10103979 (3641, 3642) | Novel Protein sim. GBank gi\|1001500\|dbj\|BAA10125\| - (D64000) high- | | transport | 1015 |
| | | affinity branched-chain amino acid transport ATP-binding protein | | | |
| | | [Synechocystis sp.] | | | |
| 924 | 11359786 (335, 336) | Novel Protein sim. GBank gi\|1019379\|dbj\|BAA05387\| - (D26358) CmpB | | transport | 1004, 1010 |
| | | [Synechococcus sp.] | | | |
| 925 | 20434142 (5473, 5474) | Novel Protein sim. GBank gi\|1073007\|pir\|\|S54001 - pyoverdine | | transport | 1001, 1008 |
| | | synthetase E - Pseudomonas aeruginosa | | | |
| 926 | 10106248 (4789, 4790) | Novel Protein sim. GBank gi\|1073439\|pir\|\|S47706 - hypothetical protein | | transport | 1010 |
| | | f231 - Escherichia coli | | | |
| 927 | 17937351 (7315, 7316) | Novel Protein sim. GBank gi\|114921\|sp\|P17447\|BETT_ECOLI \|HIGH- | | transport | 1035 |
| | | AFFINITY CHOLINE TRANSPORT PROTEIN | | | |
| 928 | 79793961 (8075, 8076) | Novel Protein sim. GBank gi\|115122\|sp\|P21627\|BRAD_PSEAE - HIGH- | | transport | 1002, 1015 |
| | | AFFINITY BRANCHED-CHAIN AMINO ACID TRANSPORT PROTEIN | | | |
| | | BRAD | | | |
| 929 | 79565972 (2845, 2846) | Novel Protein sim. GBank gi\|116370\|sp\|P14285\|CHRA_PSEAE - | | transport | 1015 |
| | | CHROMATE TRANSPORT PROTEIN | | | |
| 930 | 16730012 (1585, 1586) | Novel Protein sim. GBank gi\|1170991\|sp\|P45321\|MODC_HAEIN - | | transport | 1036 |
| | | MOLYBDENUM TRANSPORT ATP-BINDING PROTEIN MODC | | | |
| 931 | 85800685 (8989, 8990) | Novel Protein sim. GBank gi\|1171029\|sp\|P44407\|MSBA_HAEIN - | | transport | 1023 |
| | | PROBABLE TRANSPORT ATP-BINDING PROTEIN MSBA | | | |
| 932 | 29358991 (3919, 3920) | Novel Protein sim. GBank gi\|1173364\|sp\|P45380\|SAT1_RAT - SULFATE | | transport | 1020 |
| | | ANION TRANSPORTER 1 (CANALICULAR SULFATE TRANSPORTER) | | | |
| | | (SULFATE/CARBONATE ANTIPORTER) | | | |
| 933 | 80440616 (8793, 8794) | Novel Protein sim. GBank gi\|1173421\|sp\|P43416\|SECY_STRSC - | | transport | 1002, 1003, 1004, 1008, |
| | | PREPROTEIN TRANSLOCASE SECY SUBUNIT | | | 1010, 1031, 1035 |
| 934 | 79247343 (1321, 1322) | Novel Protein sim. GBank gi\|1176165\|sp\|P42613\|YHAU_ECOLI - | | transport | 1036 |
| | | HYPOTHETICAL 49.0 KD PROTEIN IN RNPB-SOHA INTERGENIC | | | |
| | | REGION | | | |
| 935 | 56616185 (6083, 6084) | Novel Protein sim. GBank gi\|120593\|sp\|P11551\|FUCP_ECOLI - L - | | transport | 1020, 1033 |
| | | FUCOSE PERMEASE | | | |
| 936 | 65448630 (8855, 8856) | Novel Protein sim. GBank gi\|127339\|sp\|P27299\|MSBA_ECOLI - | | transport | 1046 |
| | | PROBABLE TRANSPORT ATP-BINDING PROTEIN MSBA | | | |
| 937 | 77601022 (9043, 9044) | Novel Protein sim. GBank gi\|130093\|sp\|P16677\|PHNC_ECOLI - | | transport | 1046 |
| | | PHOSPHONATES TRANSPORT ATP-BINDING PROTEIN PHNC | | | |
| 938 | 19536664 (5351, 5352) | Novel Protein sim. GBank gi\|1345859\|sp\|P49573\|CTR1_YEAST - | | transport | 1020 |
| | | COPPER TRANSPORT PROTEIN CTR1 (COPPER TRANSPORTER 1) | | | |
| 939 | 80063108 (2017, 2018) | Novel Protein sim. GBank gi\|1346493\|sp\|P47186\|MAXT_YEAST - | | transport | 1002, 1006, 1015, 1020, |
| | | PUTATIVE MALTOSE PERMEASE (MALTOSE TRANSPORT PROTEIN) | | | 1022, 1041 |
| 940 | 20481264 (8307, 8308) | Novel Protein sim. GBank gi\|1352948\|sp\|P47185\|HXTF_YEAST - | | transport | 1020, 1055 |
| | | HEXOSE TRANSPORTER HXTI6 | | | |
| 941 | 79245587 (8685, 8686) | Novel Protein sim. GBank gi\|140681\|sp\|P03813\|YGEA_ECOLI - | | transport | 1036 |
| | | HYPOTHETICAL 25.2 KD PROTEIN IN LYSR-ARAE INTERGENIC | | | |
| | | REGION | | | |
| 942 | 13523176 (679, 680) | Novel Protein sim. GBank gi\|1514530\|emb\|CAA65825\| - (X97187) ABC-C | | transport | 1022 |
| | | transporter [Homo sapiens] | | | |
| 943 | 70451588 (8693, 8694) | Novel Protein sim. GBank gi\|1526981\|emb\|CAA68204\| - (X99945) amino | | transport | 1021, 1046 |
| | | acid permease YeeF like protein [Salmonella typhimurium] | | | |
| 944 | 80067879 (6901, 6902) | Novel Protein sim. GBank gi\|1532204 (U68036) - putative ABC | | transport | 1020 |
| | | transporter intracellular ATPase subunit BldkD [Streptomyces coelicolor] | | | |
| 945 | 80053078 (8943, 8944) | Novel Protein sim. GBank gi\|1651664\|dbj\|BAA16592\| - (D90899) Iron(III) | | transport | 1003 |
| | | dicitrate transport system permease protein FecE [Synechocystis sp.] | | | |
| 946 | 27803590 (4607, 4608) | Novel Protein sim. GBank gi\|1654041\|emb\|CAB03701\| - (Z81360) | | transport | 1050 |
| | | hypothetical protein Rv1739c [Mycobacterium tuberculosis] | | | |
| 947 | 78770592 (6231, 6232) | Novel Protein sim. GBank gi\|1708002\|sp\|P48813\|GNP1_YEAST - HIGH- | | transport | 1007, 1020, 1024 |
| | | AFFINITY GLUTAMINE PERMEASE | | | |
| 948 | 34083080 (135, 136) | Novel Protein sim. GBank gi\|171263 (M88252) - COT1 protein | | transport | 1000 |
| | | [Saccharomyces cerevisiae] | | | |
| 949 | 95292787 (67, 68) | Novel Protein sim. GBank gi\|1723081\|sp\|Q11046\|Y089_MYCTU - | | transport | 1022 |
| | | HYPOTHETICAL ABC TRANSPORTER ATP-BINDING PROTEIN | | | |
| | | CY50.09 | | | |
| 950 | 79189803 (137, 138) | Novel Protein sim. GBank gi\|1723081\|sp\|Q11046\|Y089_MYCTU - | | transport | 1025 |
| | | HYPOTHETICAL ABC TRANSPORTER ATP-BINDING PROTEIN | | | |
| | | CY50.09 | | | |
| 951 | 11422022 (8971, 8972) | Novel Protein sim. GBank gi\|1723082\|sp\|Q11047\|Y08A_MYCTU - | | transport | 1015 |
| | | HYPOTHETICAL ABC TRANSPORTER ATP-BINDING PROTEIN | | | |
| | | CY50.10 | | | |
| 952 | 10013989 (4219, 4220) | Novel Protein sim. GBank gi\|2113938\|emb\|CAB08923\| - (Z95556) fadD35 | | transport | 1021 |
| | | [Mycobacterium tuberculosis] | | | |
| 953 | 20759081 (1381, 1382) | Novel Protein sim. GBank gi\|2126200\|pir\|\|S54438 - hemin permease - | | transport | 1020 |
| | | Yersinia enterocolitica | | | |
| 954 | 20552734 (1209, 1210) | Novel Protein sim. GBank gi\|2132318\|pir\|\|S69476 - hypothetical protein | | transport | 1055 |
| | | YPR202w - yeast (Saccharomyces cerevisiae) | | | |
| 955 | 28473433 (7449, 7450) | Novel Protein sim. GBank gi\|2143756\|pir\|\|S68362 - glucose transport | | transport | 1041 |
| | | protein type 2 - rat (fragment) | | | |
| 956 | 10369659 (8173, 8174) | Novel Protein sim. GBank gi\|2144965\|pir\|\|QRECFA - iron(lll) dicitrate | | transport | 1015, 1021 |
| | | transport system outer membrane receptor precursor - Escherichia coli | | | |
| 957 | 47656103(4649, 4650) | Novel Protein sim. GBank gi\|2492534\|sp\|P77327\|PROY_ECOLI - | | transport | 1026 |
| | | PROLINE-SPECIFIC PERMEASE PROY | | | |
| 958 | 79262992 (8035, 8036) | Novel Protein sim. GBank gi\|2492558\|sp\|Q47538\|TAUB_ECOLI - | | transport | 1036 |
| | | TAURINE TRANSPORT ATP-BINDING PROTEIN TAUB | | | |
| 959 | 80473481 (7847, 7848) | Novel Protein sim. GBank gi\|2492595\|sp\|Q53193\|Y4TR_RHISN - | | transport | 1010 |
| | | PROBABLE PEPTIDE ABC TRANSPORTER ATP-BINDING PROTEIN | | | |
| | | Y4TR | | | |
| 960 | 10126820 (939, 940) | Novel Protein sim. GBank gi\|2492597\|sp\|Q55774\|Y182_SYNY3 - | | transport | 1041 |
| | | HYPOTHETICAL ABC TRANSPORTER ATP-BINDING PROTEIN | | | |
| | | SLL0182 | | | |
| 961 | 80219898 (3135, 3136) | Novel Protein sim. GBank gi\|2492606\|sp\|Q08234\|YOH5_YEAST - | | transport | 1002, 1024, 1031, 1035, |
| | | PROBABLE ATP-DEPENDENT TRANSPORTER YOL075C | | | 1036, 1041 |
| 962 | 10082311 (7463, 7464) | Novel Protein sim. GBank gi\|2495513\|sp\|P77221\|YAHG_ECOLI - | | transport | 1041 |
| | | HYPOTHETICAL 50.4 KD PROTEIN IN BETT-PRPR INTERGENIC | | | |
| | | REGION | | | |
| 963 | 79833887 (7239, 7240) | Novel Protein sim. GBank gi\|2501165\|sp\|Q03263\|YM8M_YEAST - | | transport | 1006, 1023 |
| | | HYPOTHETICAL 59.6 KD PROTEIN IN DSK2-CAT8 INTERGENIC | | | |
| | | REGION | | | |
| 964 | 86474209 (7453, 7454) | Novel Protein sim. GBank gi\|2501669\|sp\|P75892\|YCDG_ECOLI - | | transport | 1006, 1020, 1024, 1026 |
| | | HYPOTHETICAL 48.1 KD PROTEIN IN WRBA-PUTA INTERGENIC | | | |
| | | REGION | | | |
| 965 | 80020242 (6329, 6330) | Novel Protein sim. GBank gi\|2506110\|sp\|P31219\|YBBA_ECOLI - | | transport | 1006, 1007, 1008, 1020 |
| | | HYPOTHETICAL ABC TRANSPORTER ATP-BINDING PROTEIN YBBA | | | |
| 966 | 79551943 (5489, 5490) | Novel Protein sim. GBank gi\|2507365\|sp\|P37902\|YBEJ_ECOLI - AMINO- | | transport | 1002, 1036 |
| | | ACID ABC TRANSPORTER BINDING PROTEIN IN GLTJ-CUTE | | | |
| | | INTERGENIC REGION PRECURSOR | | | |
| 967 | 55284087 (6637, 6638) | Novel Protein sim. GBank gi\|2584767\|emb\|CAA03994.1\| - (AJ000327) | | transport | 1050 |
| | | adrenoleukodystrophy related protein [Homo sapiens] | | | |
| 968 | 13525866 (3015, 3016) | Novel Protein sim. GBank gi\|2624376\|emb\|CAA04762\| - (AJ001437) | | transport | 1025 |
| | | putative P-type cation-translocating membrane ATPase [Proteus mirabilis] | | | |
| 969 | 11398575 (8873, 8874) | Novel Protein sim. GBank gi\|2633814\|emb\|CAB13316\| - (Z99111) similar | | transport | 1004 |
| | | to ABC transporter (ATP-binding protein) [Bacillus subtillis] | | | |
| 970 | 80060854 (3601, 3602) | Novel Protein sim. GBank gi\|2649950 (AE001058) - glutamine ABC | | transport | 1003, 1022 |
| | | transporter, ATP-binding protein (glnQ) [Archaeoglobus fulgidus] | | | |
| 971 | 95292975 (8113, 8114) | Novel Protein sim. GBank gi\|2649950 (AE001058) - glutamine ABC | | transport | 1003, 1006, 1008, 1015, |
| | | transporter, ATP-binding protein (glnQ) [Archaeoglobus fulgidus] | | | 1020, 1041 |
| 972 | 55650325 (557, 558) | Novel Protein sim. GBank gi\|2650420 (AE001090) - branched-chain | | transport | 1000, 1001, 1026 |
| | | amino acid ABC transporter, ATP-binding protein (braG-1) | | | |
| | | [Archaeoglobus fulgidus] | | | |
| 973 | 79560269 (3409, 3410) | Novel Protein sim. GBank gi\|2661836\|emb\|CAA75187\| - (Y14964) | | transport | 1035 |
| | | putative transport protein [Methylophllus methylotrophus] | | | |
| 974 | 91013413 (7903, 7904) | Novel Protein sim. GBank gi\|2665707\|gb\|AAB88467\| - (AF035413) AgaB | | transport | 1008, 1036 |
| | | [Agrobacterium tumefaciens] | | | |
| 975 | 55766952 (5543, 5544) | Novel Protein sim. GBank gi\|2695825\|emb\|CAA15895\| - (AL021006) corA | | transport | 1004, 1051 |
| | | [Mycobacterium tuberculosis] | | | |
| 976 | 20293885 (2325, 2326) | Novel Protein sim. GBank gi\|2695836\|emb\|CAA15906\| - (AL021006) | | transport | 1031 |
| | | hypothetical protein Rv1250 [Mycobacterium tuberculosis] | | | |
| 977 | 80499399 (3303, 3304) | Novel Protein sim. GBank gi\|2791517\|emb\|CAA16054\| - (AL021246) | | transport | 1004, 1008, 1010, 1020, |
| | | hypothetical protein Rv2477c [Mycobacterium tuberculosis] | | | 1021, 1031, 1041 |
| 978 | 77887171 (8679, 8680) | Novel Protein sim. GBank gi\|2791517\|emb\|CAA16054\| - (AL021246) | | transport | 1019 |
| | | hypothetical protein Rv2477c [Mycobacterium tuberculosis] | | | |
| 979 | 79629161 (1297, 1298) | Novel Protein sim. GBank gi\|290801\|gb\|AAD152371\| - (L17003) member of | | transport | 1036 |
| | | super-family of ABC protein [Frencisella tularensis (var. novicida)] | | | |
| 980 | 70514622 (8339, 8340) | Novel Protein sim. GBank gi\|3128315 (AF010496) - potential secretion | | transport | 1007 |
| | | ATP - binding protein [Rhodobacter capsulatus] | | | |
| 981 | 77579839 (8421, 8422) | Novel Protein sim. GBank gi\|3218373\|emb\|CAA19625\| - (AL023862) ABC | | transport | 1007, 1008 |
| | | transporter ATP binding protein [Streptomyces coelicolor] | | | |
| 982 | 5602936 (6455, 6456) | Novel Protein sim. GBank gi\|3402246\|emb\|CAA20182\| - (AL031184) | | transport | 1055 |
| | | oligopeptide ABC transporter ATP-binding protein [Streptomyces | | | |
| | | coelicolor] | | | |
| 983 | 79644200 (6537, 6538) | Novel Protein sim. GBank gi\|3483045\|emb\|CAA20556\| - (AL031371) | | transport | 1035 |
| | | putative transport system permease protein [Streptomyces coelicolor] | | | |
| 984 | 88097234 (8909, 8910) | Novel Protein sim. GBank gi\|3582213 (AE001272) - Potential ABC | | transport | 1016 |
| | | transporter [Lactococcus lactis] | | | |
| 985 | 35106817 (6357, 6358) | Novel Protein sim. GBank gi\|3913092\|sp\|Q46170\|ARCD_CLOPE - | | transport | 1004, 1015, 1020, 1024 |
| | | ARGININE/ORNITHINE ANTIPORTER | | | |
| 986 | 80062914 (6045, 6046) | Novel Protein sim. GBank gi\|3915963\|sp\|P32386\|YBT1_YEAST - ATP- | | transport | 1008, 1015 |
| | | DEPENDENT BILE ACID PERMEASE | | | |
| 987 | 11818289 (3461, 3462) | Novel Protein sim. GBank gi\|4007737\|emb\|CAA22421\| - (AL034447) | | transport | 1004 |
| | | putative sugar transporter [Streptomyces coelicolor] | | | |
| 988 | 79859550 (3639, 3640) | Novel Protein sim. GBank gi\|400961\|sp\|P04982\|RBSD_ECOLI - HIGH | | transport | 1015, 1024 |
| | | AFFINITY RIBOSE TRANSPORT PROTEIN RBSD | | | |
| 989 | 79830774 (7999, 8000) | Novel Protein sim. GBank gi\|409547 (L07492) - sugar transport protein | | transport | 1021 |
| | | [Saccharomyces cerevisiae] | | | |
| 990 | 78951434 (7149, 7150) | Novel Protein sim. GBank gi\|4240130\|dbj\|BAA74845.1\| - (AB020629) | | transport | 1041 |
| | | KIAA0822 protein [Homo sapiens] | | | |
| 991 | 20288787 (347, 348) | Novel Protein sim. GBank gi\|4584481\|emb\|CAB40684.1\| - (AL049587) | | transport | 1020 |
| | | putative L-asparagine permease [Streptomyces coelicolor] | | | |
| 992 | 78378350 (5605, 5606) | Novel Protein sim. GBank gi\|4584481\|emb\|CAB40684.1\| - (AL049587) | | transport | 1006, 1024 |
| | | putative L-asparagine permease [Streptomyces coelicolor] | | | |
| 993 | 11397491 (5343, 5344) | Novel Protein sim. GBank gi\|4928292\|gb\|AAD33527.1\|AF13211 - | | transport | 1003 |
| | | (AF132117) FhuA [Staphylococcus aureus] | | | |
| 994 | 11686972 (3233, 3234) | Novel Protein sim. GBank gi\|4981111\|gb\|AAD35677.1\|AE00173 - | | transport | 1028 |
| | | (AE001734) amino acid ABC transporter, permease protein [Thermotoga | | | |
| | | maritima] | | | |
| 995 | 65478887 (571, 572) | Novel Protein sim. GBank gi\|5354185\|gb\|AAD42394.1\|AF15749 - | | transport | 1014 |
| | | (AF157493) hypothetical ABC transporter ATP-binding protein | | | |
| | | [Zymomonas mobilis] | | | |
| 996 | 70945398 (4025, 4026) | Novel Protein sim. GBank gi\|5441754\|emb\|CAB46778.1\| - (AL096811) | | transport | 1026 |
| | | putative gluconate permease [Streptomyces coelicolor A3(2)] | | | |
| 997 | 94646492 (6023, 6024) | Novel Protein sim. GBank gi\|5456701\|gb\|AAD43626.1\|AF07141 - | | transport | 1028 |
| | | (AF071411) multidrug resistance protein MDR [Emericella nidulans] | | | |
| 998 | 79317345 (6835, 6836) | Novel Protein sim. GBank gi\|5457576\|emb\|CAB49067.1\| - (AJ248283) | | transport | 1002, 1020 |
| | | PAB0092 [Pyrococcus abyssi] | | | |
| 999 | 80420613 (4809, 4810) | Novel Protein sim. GBank gi\|5459396\|emb\|CAB50754.1\| - (AL096839) | | transport | 1003, 1004, 1008, 1015, |
| | | putative integral membrane transport protein [Streptomyces coelicolor] | | | 1020, 1021, 1023, 1024, |
| | | | | | 1031, 1036 |
| 1000 | 79921598 (681, 682) | Novel Protein sim. GBank gi\|558389\|emb\|CAA86236\| - (Z38113) len: 888, | | transport | 1001 |
| | | CAI: 0.19 incomplete orf similar to SNQ2_YEAST P32568 SNQ2 | | | |
| | | PROTEIN [Saccharomyces cerevisiae] | | | |
| 1001 | 10332112 (7097, 7098) | Novel Protein sim. GBank gi\|585410\|sp\|P22730\|LIVG_ECOLI - HIGH- | | transport | 1002 |
| | | AFFINITY BRANCHED-CHAIN AMINO ACID TRANSPORT ATP- | | | |
| | | BINDING PROTEIN LIVG (LIV-I PROTEIN G) | | | |
| 1002 | 79970000 (7393, 7394) | Novel Protein sim. GBank gi\|585957\|sp\|P38377\|S61A_CANFA - | | transport | 1031, 1047 |
| | | PROTEIN TRANSPORT PROTEIN SEC61 ALPHA SUBUNIT | | | |
| 1003 | 78760805 (5633, 5634) | Novel Protein sim. GBank gi\|586361\|sp\|P38358\|YB8G_YEAST - | | transport | 1014, 1036, 1041 |
| | | HYPOTHETICAL 51.7 KD PROTEIN IN CTP1-SUL2 INTERGENIC | | | |
| | | REGION | | | |
| 1004 | 80219743 (7581, 7582) | Novel Protein sim. GBank gi\|586361\|sp\|P38358\|YB8G_YEAST - | | transport | 1001, 1003, 1004, 1006, |
| | | HYPOTHETICAL 51.7 KD PROTEIN IN CTP1-SUL2 INTERGENIC | | | 1020, 1028, 1031 |
| | | REGION | | | |
| 1005 | 54534688 (5357, 5358) | Novel Protein sim. GBank gi\|586685\|sp\|P37643\|YHJE_ECOLI - | | transport | 1038 |
| | | HYPOTHETICAL METABOLITE TRANSPORT PROTEIN IN TREF-KDGK | | | |
| | | INTERGENIC REGION (O440) | | | |
| 1006 | 71088508 (169, 170) | Novel Protein sim. GBank gi\|606163 (U18997) - ORF_1506 [Escherichia | | transport | 1026, 1050 |
| | | coli] | | | |
| 1007 | 77504621 (8303, 8304) | Novel Protein sim. GBank gi\|628013\|pir\|\|A54892 - Na+-dependent | | transport | 1014 |
| | | nucleoside transport protein cNT1 - rat | | | |
| 1008 | 27981977 (4865, 4866) | Novel Protein sim. GBank gi\|729606\|sp\|P41076\|GLTL_ECOLI - | | transport | 1050 |
| | | GLUTAMATE/ASPARTATE TRANSPORT ATP-BINDING PROTEIN GLTL | | | |
| 1009 | 27827777 (5989, 5990) | Novel Protein sim. GBank gi\|731347\|sp\|P39109\|YCF1_YEAST - METAL | | transport | 1022 |
| | | RESISTANCE PROTEIN YCF1 (YEAST CADMIUM FACTOR 1) | | | |
| 1010 | 80029924 (8097, 8098) | Novel Protein sim. GBank gi\|731415\|sp\|P39986\|ATC6_YEAST - | | transport | 1003, 1004, 1020, 1028, |
| | | PROBABLE CALCIUM-TRANSPORTING ATPASE 6 | | | 1031, 1041 |
| 1011 | 78791424 (505, 506) | Novel Protein sim. GBank gi\|731687\|sp\|P38809\|YHP7_YEAST - | | transport | 1020 |
| | | HYPOTHETICAL 40.7 KD PROTEIN IN HXT5-NRK1 INTERGENIC | | | |
| | | REGION | | | |
| 1012 | 17661691 (4543, 4544) | Novel Protein sim. GBank gi\|731689\|sp\|P38811\|YHP9_YEAST - | | transport | 1041 |
| | | HYPOTHETICAL 433.2 KD PROTEIN IN HXT5-NRK1 INTERGENIC | | | |
| | | REGION | | | |
| 1013 | 80238737 (6063, 6064) | Novel Protein sim. GBank gi\|731689\|sp\|P38811\|YHP9_YEAST - | | transport | 1002, 1004, 1008, 1024, |
| | | HYPOTHETICAL 433.2 KD PROTEIN IN HXT5-NRK1 INTERGENIC | | | 1031 |
| | | REGION | | | |
| 1014 | 32119870 (6109, 6110) | Novel Protein sim. GBank gi\|77980\|pir\|\|B33586 - C4-dicarboxylate | | transport | 1041 |
| | | transport system regulatory protein DctB - Rhizobium melilotl | | | |
| 1015 | 11397943 (7161, 7162) | Novel Protein sim. GBank gi\|83036\|pir\|\|A31928 - glucose transport | | transport | 1020 |
| | | protein, high affinity - yeast [Saccharomyces cerevisiae] | | | |
| 1016 | 79263011 (3423, 3424) | Novel Protein sim. GBank gi\|95819\|pir\|\|S16298 - ferric enterobactin | | transport | 1002, 1036 |
| | | transport protein fepC - Escherichia coli | | | |
| 1017 | 38036706 (1457, 1458) | | | transport | 1022, 1031 |
| 1018 | 80080600 (4197, 4198) | Novel Protein sim. GBank gi\|135419\|sp\|P09734\|TBA3_YEAST - TUBULIN | | tubulin | 1031 |
| | | ALPHA-3 CHAIN | | | |
| 1019 | 80234579 (3165, 3166) | Novel Protein sim. GBank gi\|1729859\|sp\|P53378\|TBG_YEAST - | | tubulin | 1004, 1015, 1020 |
| | | TUBULIN GAMMA CHAIN | | | |
| 1020 | 11360183 (7501, 7502) | Novel Protein sim. GBank gi\|4139493\|pdb\|1BT0\| - Rub1 | Contains protein domain | ubiquitin | 1004 |
| | | | (PF00240) - Ubiquitin family | | |
| 1021 | 35104003 (4679, 4680) | Novel Protein sim. GBank gi\|3800760 (AF064248) - ubiquitin specific | Contains protein domain | ubiquitin | 1047 |
| | | protease 46 [Gallus gallus] | (PF00442) - Ubiquitin carboxyl- | | |
| | | | terminal hydrolases family 2 | | |
| 1022 | 28351078 (7135, 7136) | Novel Protein sim. GBank gi\|136684\|sp\|P19812\|UBR1_YEAST - N-END- | | ubiquitin | 1006, 1035 |
| | | RECOGNIZING PROTEIN (UBIQUITIN-PROTEIN LIGASE E3 | | | |
| | | COMPONENT) (N-RECOGNIN) | | | |
| 1023 | 98964873 (3363, 3364) | Novel Protein sim. GBank gi\|1717965\|sp\|P54860\|UFD2_YEAST - | | ubiquitin | 1001, 1002, 1003, 1004, |
| | | UBIQUITIN FUSION DEGRADATION PROTEIN 2 (UB FUSION PROTEIN | | | 1006, 1008, 1010, 1020, |
| | | 2) | | | 1022, 1025, 1031, 1035, |
| | | | | | 1036, 1041 |
| 1024 | 79569225 (1385, 1386) | Novel Protein sim. GBank gi\|3334400\|sp\|Q24574\|UBPE_DROME - | | ubiquitin | 1031 |
| | | UBIQUITIN CARBOXYL-TERMINAL HYDROLASE 64E (UBIQUITIN | | | |
| | | THIOLESTERASE 64E) (UBIQUITIN-SPECIFIC PROCESSING | | | |
| | | PROTEASE 64E) (DEUBIQUITINATING ENZYME 64E) | | | |
| 1025 | 80217599 (5243, 5244) | Novel Protein sim. GBank gi\|586433\|sp\|P38187\|UBPD_YEAST - | | ubiqudin | 1004, 1020, 1022, 1024, |
| | | UBIQUITIN CARBOXYL-TERMINAL HYDROLASE 13 (UBIQUITIN | | | 1041 |
| | | THIOLESTERASE 13) (UBIQUITIN-SPECIFIC PROCESSING | | | |
| | | PROTEASE 13) (DEUBIQUITINATING ENZYME 13) | | | |
| 1026 | 80231869 (399, 400) | Novel Protein sim. GBank gi\|731042\|sp\|P39944\|UBP5_YEAST - | | ubiquitin | 1003, 1006, 1008, 1015, |
| | | UBIQUITIN CARBOXYL-TERMINAL HYDROLASE 5 (UBIQUITIN | | | 1020, 1021, 1024, 1031 |
| | | THIOLESTERASE 5) (UBIQUITIN-SPECIFIC PROCESSING PROTEASE | | | |
| | | 5) (DEUBIQUITINATING ENZYME 5) | | | |
| 1027 | 86473844 (2999, 3000) | Novel Protein sim. GBank gi\|4768911\|gb\|AAD29676.1\|AF13120 - | Contains protein domain | water_channel | 1002, 1010, 1026, 1051, |
| | | (AF131201) plasma membrane MIP protein [Zea mays] | (PF00230) - Major intrinsic protein | | 1055 |
| 1028 | 39587959 (77, 78) | Novel Protein sim. GBank gi\|1176900\|sp\|Q09665\|YS57_CAEEL - | Contains protein domain | UNCLASSIFIED | 1022 |
| | | HYPOTHETICAL CALCIUM-BINDING PROTEIN ZK673.7 IN | (PF00036) - EF hand | | |
| | | CHROMOSOME II | | | |
| 1029 | 57447926 (8409, 8410) | Novel Protein sim. GBank gi\|2506252\|sp\|P12815\|ALG2_MOUSE - | Contains protein domain | UNCLASSIFIED | 1055 |
| | | PROBABLE CALCIUM-BINDING PROTEIN ALG-2 (PMP41) (ALG-257) | (PF00036) - EF hand | | |
| 1030 | 80586402 (2773, 2774) | Novel Protein sim. GBank gi\|119810\|sp\|P02692\|FABL_RAT - FATTY | Contains protein domain | UNCLASSIFIED | 1006, 1014, 1055 |
| | | ACID-BINDING PROTEIN, LIVER (L-FABP) (Z-PROTEIN) (SQUALENE- | (PF00061) - lipocalin | | |
| | | AND STEROL-CARRIER PROTEIN) (SCP) (P14) | | | |
| 1031 | 11101997 (397, 398) | Novel Protein sim. GBank gi\|1621285 (U64519) - CheAY [Rhodospirillum | Contains protein domain | UNCLASSIFIED | 1004 |
| | | centenum] | (PF00072) - Response regulator | | |
| | | | receiver domain | | |
| 1032 | 20440722 (8721, 8722) | Novel Protein sim. GBank gi\|5457253\|emb\|CAB46941.1\| - (AL096822) | Contains protein domain | UNCLASSIFIED | 1022 |
| | | putative two-component system response transcriptional regulator | (PF00072) - Response regulator | | |
| | | [Streptomyces coelicolor] | receiver domain | | |
| 1033 | 80499566 (2105, 2106) | Novel Protein sim. GBank gi\|464776\|sp\|P80293\|SODM_PROFR - | Contains protein domain | UNCLASSIFIED | 1004, 1010, 1026 |
| | | SUPEROXIDE DISMUTASE (MN-FE) | (PF00081) - iron/manganese | | |
| | | | superoxide dismutases (SODM) | | |
| 1034 | 20189728 (5805, 5806) | Novel Protein sim. GBank gi\|4156104 (AE001569) - putative Outer | Contains protein domain | UNCLASSIFIED | 1022 |
| | | membrane protein [Helicobacter pylori J99] | (PF00098) - Zinc finger, C2H2 | | |
| | | | type | | |
| 1035 | 30402847 (2487, 2488) | | Contains protein domain | UNCLASSIFIED | 1024 |
| | | | (PF00096) - Zinc finger, C2H2 | | |
| | | | type | | |
| 1036 | 54533415 (7041, 7042) | | Contains protein domain | UNCLASSIFIED | 1038 |
| | | | (PF00103) - Somatotropin | | |
| | | | hormone family | | |
| 1037 | 80020711 (6965, 6966) | Novel Protein sim. GBank gi\|121383\|sp\|P19904\|GLNA_VIBAL - | Contains protein domain | UNCLASSIFIED | 1004, 1020, 1022 |
| | | GLUTAMINE SYNTHETASE (GLUTAMATE-AMMONIA LIGASE) | (PF00120) - Glutamine | | |
| | | | synthetase | | |
| 1038 | 85527155 (373, 374) | Novel Protein sim. GBank gi\|1707958\|sp\|Q10378\|GLN2_MYCTU - | Contains protein domain | UNCLASSIFIED | 1035 |
| | | PROBABLE GLUTAMINE SYNTHETASE 2 (GLUTAMATE-AMMONIA | (PF00120) - Glutamine | | |
| | | LIGASE 2) | synthetase | | |
| 1039 | 79817849 (7333, 7334) | Novel Protein sim. GBank gi\|3183245\|sp\|P78061\|YCJK_ECOLI - | Contains protein domain | UNCLASSIFIED | 1015 |
| | | PUTATIVE GLUTAMINE SYNTHETASE (GLUTAMATE-AMMONIA | (PF00120) - Glutamine | | |
| | | LIGASE) | synthetase | | |
| 1040 | 82300051 (861, 862) | Novel Protein sim. GBank gi\|127420\|sp\|P19888\|MTBA_BACAR - | Contains protein domain | UNCLASSIFIED | 1001, 1002, 1003, 1004, |
| | | MODIFICATION METHYLASE BANI (CYTOSINE-SPECIFIC | (PF00145) - C-5 cytosine-specific | | 1006, 1007, 1008, 1014, |
| | | METHYLTRANSFERASE BANI) (M.BANI) | DNA methylase | | 1015, 1020, 1021, 1022, |
| | | | | | 1023,1024, 1026, 1031, |
| | | | | | 1035, 1036, 1041, 1055 |
| 1041 | 78383654 (6941, 6942) | Novel Protein sim. GBank gi\|3876012\|emb\|CAA90761\| - (Z50873) | Contains protein domain | UNCLASSIFIED | 1002 |
| | | Similarity to N.crassa ADP/ATP carrier protein (SW: ADT_NEUCR) | (PF00153) - Mitochondrial carrier | | |
| | | [Caenorhabditis elegans] | proteins | | |
| 1042 | 36997517 (8895, 8896) | Novel Protein sim. GBank gi\|1346014\|sp\|P17899\|FLBD_CAUCR - | Contains protein domain | UNCLASSIFIED | 1001 |
| | | TRANSCRIPTIONAL REGULATORY PROTEIN FLBD | (PF00158) - Sigma-54 | | |
| | | | transcription factors | | |
| 1043 | 82062100 (1683, 1684) | Novel Protein sim. GBank gi\|2501738\|sp\|Q06639\|YD03_YEAST - | Contains protein domain | UNCLASSIFIED | 1002, 1003, 1004, 1010, |
| | | PUTATIVE 101.7 KD TRANSCRIPTIONAL REGULATORY PROTEIN IN | (PF00172) - Fungal Zn(2)-Cys(6) | | 1014, 1020, 1022 |
| | | PRO1-CPR5 INTERGENIC REGION | binuclear cluster domain | | |
| 1044 | 77912099 (2459, 2460) | | Contains protein domain | UNCLASSIFIED | 1014, 1033 |
| | | | (PF00185) - Aspartate/omithine | | |
| | | | carbamoyltransferase | | |
| 1045 | 79600852 (1363, 1364) | Novel Protein sim. GBank gi\|2506199\|sp\|P25739\|PUR8_ECOLI - | Contains protein domain | UNCLASSIFIED | 1020, 1031 |
| | | ADENYLOSUCCINATE LYASE (ADENYLOSUCCINASE) (ASL) | (PF00206) - Lyase | | |
| 1046 | 15017854 (5505, 5506) | Novel Protein sim. GBank gi\|18358\|sp\|P25971\|DCOP_BACSU - | Contains protein domain | UNCLASSIFIED | 1025 |
| | | OROTIDINE 5′-PHOSPHATE DECARBOXYLASE (OMP | (PF00215) - Orotidine 5′- | | |
| | | DECARBOXYLASE) | phosphate decarboxylases | | |
| 1047 | 79244158 (4073, 4074) | Novel Protein sim. GBank gi\|5596784\|emb\|CAB51431.1\| - (AL096884) | Contains protein domain | UNCLASSIFIED | 1035 |
| | | indoleglycerol phosphate synthase [Streptomyces coelicolor A3(2)] | (PF00218) - Indole-3-glycerol | | |
| | | | phosphate synthases | | |
| 1048 | 20458135 (5183, 5184) | | Contains protein domain | UNCLASSIFIED | 1008 |
| | | | (PF00220) - Neurohypophysial | | |
| | | | hormones, N-terminal Domain | | |
| 1049 | 20285883 (6235, 6236) | Novel Protein sim. GBank gi\|123761\|sp\|P24221\|HUTH_STRGR - | Contains protein domain | UNCLASSIFIED | 1031 |
| | | HISTIDINE AMMONIA-LYASE (HISTIDASE) | (PF00221) - Phenylalanine and | | |
| | | | histidine ammonia-lyases | | |
| 1050 | 91212160 (163, 164) | Novel Protein sim. GBank gi\|2429094 (U58632) - acetyl xylan esterase; | Contains protein domain | UNCLASSIFIED | 1004, 1006, 1007, 1008, |
| | | AxeA [Thermotoga neapolitana] | (PF00300) - Phosphoglycerate | | 1019, 1020, 1021, 1022, |
| | | | mutase family | | 1024, 1026, 1031 |
| 1051 | 47656836 (4965, 4966) | | Contains protein domain | UNCLASSIFIED | 1026 |
| | | | (PF00303) - Thymidylate | | |
| | | | synthase | | |
| 1052 | 86464771 (6233, 6234) | Novel Protein sim. GBank gi\|118709\|sp\|P13454\|DNAA_PSEPU - | Contains protein domain | UNCLASSIFIED | 1026 |
| | | CHROMOSOMAL REPLICATION INITIATOR PROTEIN DNAA | (PF00308) - Bacterial dnaA | | |
| | | | protein | | |
| 1053 | 8760535 (8163, 8164) | Novel Protein sim. GBank gi\|118709\|sp\|P13454\|DNAA_PSEPU - | Contains protein domain | UNCLASSIFIED | 1008 |
| | | CHROMOSOMAL REPLICATION INITIATOR PROTEIN DNAA | (PF00308) - Bacterial dnaA | | |
| | | | protein | | |
| 1054 | 80105238 (3949, 3950) | Novel Protein sim. GBank gi\|3800785 (AF071024) - DNA replication | Contains protein domain | UNCLASSIFIED | 1006, 1011, 1024 |
| | | initiator protein [Streptomyces chrysomallus] | (PF00308) - Bacterial dnaA | | |
| | | | protein | | |
| 1055 | 80223034 (8949, 8950) | Novel Protein sim. GBank gi\|114954\|sp\|P15703\|BGL2_YEAST - GLUCAN | Contains protein domain | UNCLASSIFIED | 1003, 1008, 1020, 1021, |
| | | 1,3-BETA-GLUCOSIDASE PRECURSOR (EXO-1,3-BETA-GLUCANASE) | (PF00332) - Glycosyl hydrolases | | 1022 |
| | | (GP29) | family 17 | | |
| 1056 | 47656597 (6485, 6486) | Novel Protein sim. GBank gi\|4103623 (AF026470) - gluconate repressor | Contains protein domain | UNCLASSIFIED | 1026 |
| | | [Pseudomonas aeruginosa] | (PF00356) - Bacterial regulatory | | |
| | | | proteins, lacl family | | |
| 1057 | 66727485 (5461, 5462) | Novel Protein sim. GBank gi\|1072995\|pir\|\|C53373 - hypothetical protein 2 | Contains protein domain | UNCLASSIFIED | 1046 |
| | | (rpoN 3′ region) - Pseudomonas aeruginosa | (PF00359) - phosphoenolpyruvate | | |
| | | | dependent sugar | | |
| | | | phosphotransferase system, EIIA 2 | | |
| 1058 | 38891752 (7405, 7406) | Novel Protein sim. GBank gi\|1078080\|pir\|\|S53395 - hypothetical protein | Contains protein domain | UNCLASSIFIED | 1006 |
| | | YLR316c - yeast (Saccharomyces cerevisiae) | (PF00383) - Cytidine and | | |
| | | | deoxycytidylate deaminase zinc- | | |
| | | | binding region | | |
| 1059 | 8762096 (8401, 8402) | Novel Protein sim. GBank gi\|1346565\|sp\|P49309\|MOCR_RHIME - | Contains protein domain | UNCLASSIFIED | 1020 |
| | | PROBABLE RHIZOPINE CATABOLISM REGULATORY PROTEIN MOCR | (PF00392) - Bacterial regulatory | | |
| | | | proteins, gntR family | | |
| 1060 | 79261968 (447, 448) | Novel Protein sim. GBank gi\|1709554\|sp\|P39946\|PAC1_YEAST - PAC1 | Contains protein domain | UNCLASSIFIED | 1006 |
| | | PROTEIN | (PF00400) - WD domain, G-beta | | |
| | | | repeat | | |
| 1061 | 79863295 (3421, 3422) | Novel Protein sim. GBank gi\|3452553\|dbj\|BAA32473\| - (AB001347) brain | Contains protein domain | UNCLASSIFIED | 1004, 1015, 1031, 1036 |
| | | beta 3 spectrin [Rattus norvegicus] | (PF00435) - Spectrin repeat | | |
| 1062 | 47652053 (1741, 1742) | Novel Protein sim. GBank gi\|1781101\|emb\|CAB06235\| - (Z83864) | Contains protein domain | UNCLASSIFIED | 1026 |
| | | hypothetical protein Rv3855 [Mycobacterium tuberculosis] | (PF00440) - Bacterial regulatory | | |
| | | | proteins, tetR family | | |
| 1063 | 78377787 (3107, 3108) | Novel Protein sim. GBank gi\|2808724\|emb\|CAA16248\| - (AL021428) | Contains protein domain | UNCLASSIFIED | 1006 |
| | | hypothetical protein Rv0067c [Mycobacterium tuberculosis] | (PF00440) - Bacterial regulatory | | |
| | | | proteins, tetR family | | |
| 1064 | 17906336 (2373, 2374) | Novel Protein sim. GBank gi\|2815319\|emb\|CAA16443\| - (AL021529) | Contains protein domain | UNCLASSIFIED | 1002 |
| | | putative transcriptional regulator [Streptomyces coelicolor] | (PF00440) - Bacterial regulatory | | |
| | | | proteins, tetR family | | |
| 1065 | 78475830 (651, 652) | Novel Protein sim. GBank gi\|3261533\|emb\|CAA17469\| - (AL021943) | Contains protein domain | UNCLASSIFIED | 1002 |
| | | fadE8 [Mycobacterium tuberculosis] | (PF00441) - Acyl-CoA | | |
| | | | dehydrogenase | | |
| 1066 | 80061653 (3377, 3378) | Novel Protein sim. GBank gi\|1174887\|sp\|P42873\|URE1_STAXY - | Contains protein domain | UNCLASSIFIED | 1022 |
| | | UREASE ALPHA SUBUNIT (UREA AMIDOHYDROLASE) | (PF00449) - Urease | | |
| 1067 | 32435619 (5559, 5560) | Novel Protein sim. GBank gi\|882488 (U28377) - ORF_f118 [Escherichia | Contains protein domain | UNCLASSIFIED | 1026 |
| | | coli] | (PF00460) - Flagella basal body | | |
| | | | rod proteins | | |
| 1068 | 78918582 (8941, 8942) | Novel Protein sim. GBank gi\|1168291\|sp\|P42449\|ACEA_CORGL - | Contains protein domain | UNCLASSIFIED | 1036 |
| | | ISOCITRATE LYASE (ISOCITRASE) (ISOCITRATASE) (ICL) | (PF00463) - Isocitrate lyase | | |
| 1069 | 13022730 (1129, 1130) | Novel Protein sim. GBank gi\|2811131 (AF013216) - isocitrate lyase | Contains protein domain | UNCLASSIFIED | 1022 |
| | | [Myxococcus xanthus] | (PF00463) - Isocitrate lyase | | |
| 1070 | 16705995 (981, 982) | Novel Protein sim. GBank gi\|1172911\|sp\|P45833\|RF1_MYCLE - | Contains protein domain | UNCLASSIFIED | 1006 |
| | | PEPTIDE CHAIN RELEASE FACTOR 1 (RF-1) | (PF00472) - Prokaryotic-type | | |
| | | | class I peptide chain release | | |
| | | | factors | | |
| 1071 | 78463975 (8009, 8010) | Novel Protein sim. GBank gi\|2500143\|sp\|O05782\|RF2_MYCTU - | Contains protein domain | UNCLASSIFIED | 1015 |
| | | PEPTIDE CHAIN RELEASE FACTOR 2 (RF-2) | (PF00472) - Prokaryotic-type | | |
| | | | class I peptide chain release | | |
| | | | factors | | |
| 1072 | 94989520 (863, 864) | Novel Protein sim. GBank gi\|128710\|sp\|P03897\|NU3M_HUMAN - NADH- | Contains protein domain | UNCLASSIFIED | 1031 |
| | | UBIQUINONE OXIDOREDUCTASE CHAIN 3 | (PF00507) - NADH- | | |
| | | | ubiquinone/plastoquinone | | |
| | | | oxidoreductase, chain 3 | | |
| 1073 | 27832079 (2441, 2442) | Novel Protein sim. GBank gi\|584897\|sp\|P38042\|CC27_YEAST - CELL | Contains protein domain | UNCLASSIFIED | 1003, 1008, 1020 |
| | | DIVISION CONTROL PROTEIN 27 | (PF00515) - TPR Domain | | |
| 1074 | 29254635 (7039, 7040) | Novel Protein sim. GBank gi\|3258282\|dbj\|BAA30965.1\| - (AP000007) | Contains protein domain | UNCLASSIFIED | 1006 |
| | | 381 aa long hypothetical protein [Pyrococcus horikoshii] | (PF00534) - Glycosyl transferases | | |
| | | | group 1 | | |
| 1075 | 20297958 (3375, 3376) | Novel Protein sim. GBank gi\|1168375\|sp\|P43467\|AGA1_PEDPE - ALPHA | Contains protein domain | UNCLASSIFIED | 1031 |
| | | GALACTOSIDASE 1 (MELIBIASE) | (PF00547) - Urease, gamma | | |
| | | | subunit | | |
| 1076 | 80248091 (6713, 6714) | Novel Protein sim. GBank gi\|2829506\|sp\|P71559\|SUCC_MYCTU - | Contains protein domain | UNCLASSIFIED | 1001, 1002, 1004, 1010, |
| | | SUCCINYL-COA SYNTHETASE BETA CHAIN (SCS-BETA) | (PF00549) - CoA-ligases | | 1028, 1031 |
| 1077 | 80503640 (5001, 5002) | Novel Protein sim. GBank gi\|1518185\|emb\|CAA65743\| - (X97015) | Contains protein domain | UNCLASSIFIED | 1010 |
| | | transposase [Arthrobacter nicotinovorans] | (PF00552) - Integrase | | |
| 1078 | 80219757 (671, 672) | Novel Protein sim. GBank gi\|2133114\|pir\|\|S69673 - SAC7 protein - yeast | Contains protein domain | UNCLASSIFIED | 1001, 1006, 1015, 1020, |
| | | (Saccharomyces cerevisiae) | (PF00556) - Antenna complex | | 1031, 1036 |
| | | | alpha/beta subunit | | |
| 1079 | 54531468 (3451, 3452) | Novel Protein sim. GBank gi\|2981221 (AF053091) - eyelid [Drosophila | Contains protein domain | UNCLASSIFIED | 1038 |
| | | melanogaster] | (PF00560) - Leucine Rich Repeat | | |
| 1080 | 94666655 (8445, 8446) | Novel Protein sim. GBank gi\|4068\|emb\|CAA44073\| - (X62147) nud1 | Contains protein domain | UNCLASSIFIED | 1004 |
| | | [Saccharomyces cerevisiae] | (PF00580) - Leucine Rich Repeat | | |
| 1081 | 29902323 (4019, 4020) | Novel Protein sim. GBank gi\|313748\|emb\|CAA80797\| - (Z23261) | Contains protein domain | UNCLASSIFIED | 1006 |
| | | YBLO501 [Saccharomyces cerevisiae] | (PF00627) - UBA domain | | |
| 1082 | 37800972 (3033, 3034) | Novel Protein sim. GBank gi\|2654448 (U78300) - elongation factor G | Contains protein domain | UNCLASSIFIED | 1010 |
| | | [Thiobacillus cuprinus] | (PF00679) - Elongation factor G C | | |
| | | | terminus | | |
| 1083 | 8910323 (7533, 7534) | Novel Protein sim. GBank gi\|100189\|dbj\|BAA10700\| - (D64005) cation | Contains protein domain | UNCLASSIFIED | 1036 |
| | | efflux system protein [Synechocystis sp.] | (PF00873) - AcrB/AcrD/AcrF | | |
| | | | family | | |
| 1084 | 79599728 (6241, 6242) | Novel Protein sim. GBank gi\|2506614\|sp\|P38054\|YBDE_ECOLI - | Contains protein domain | UNCLASSIFIED | 1002 |
| | | HYPOTHETICAL 114.7 KD PROTEIN IN NFRB-PHEP INTERGENIC | (PF00873) - AcrB/AcrD/AcrF | | |
| | | REGION | family | | |
| 1085 | 65448422 (6933, 6934) | Novel Protein sim. GBank gi\|3025164\|sp\|P76398\|YEGN_ECOLI - | Contains protein domain | UNCLASSIFIED | 1007 |
| | | HYPOTHETICAL 112.1 KD PROTEIN IN ALKA-BAES INTERGENIC | (PF00873) - AcrB/AcrD/AcrF | | |
| | | REGION | family | | |
| 1086 | 29693301 (8999, 9000) | Novel Protein sim. GBank gi\|2654484 (U89914) - hypothetical 16.1 kDa | Contains protein domain | UNCLASSIFIED | 1022 |
| | | transcriptional regulator [Bacillus firmus] | (PF01047) - MarR family | | |
| 1087 | 27843061 (5971, 5972) | Novel Protein sim. GBank gi\|606223 (U18997) - we have one ORF, | Contains protein domain | UNCLASSIFIED | 1020 |
| | | ECFMT has fmu and fmv [Escherichia coli] | (PF01189) - NOL1/NOP2/sun | | |
| | | | family | | |
| 1088 | 30656288 (7647, 7648) | Novel Protein sim. GBank gi\|1926279\|emb\|CAA71938\| - (Y11043) | Contains protein domain | UNCLASSIFIED | 1041 |
| | | hypothetical barstar-like protein [Bacillus subtills] | (PF01337) - Barstar (bamase | | |
| | | | inhibitor) | | |
| 1089 | 17852010 (1477, 1478) | Novel Protein sim. GBank gi\|3165570 (AF067946) - similar to Drosophila | Contains protein domain | UNCLASSIFIED | 1002, 1031, 1036, 1055 |
| | | ring canal protein (kelch) (SW: Q04852) [Caenorhabditis elegans] | (PF01344) - Kelch motif | | |
| 1090 | 80027802 (4143, 4144) | Novel Protein sim. GBank gi\|2384563 (U70470) - beta-hydroxydecanoyl- | Contains protein domain | UNCLASSIFIED | 1004, 1008, 1022, 1031 |
| | | ACP dehydrase [Pseudomonas aeruginosa] | (PF01377) - Thioester dehydrase | | |
| 1091 | 10237183 (5701, 5702) | | Contains protein domain | UNCLASSIFIED | 1036 |
| | | | (PF01381) - Helix-turn-helix | | |
| 1092 | 77518931 (8643, 8644) | Novel Protein sim. GBank gi\|2119159\|pir\|\|I50694 - alpha-1 collagen type | Contains protein domain | UNCLASSIFIED | 1009, 1027, 1035 |
| | | III - chicken (fragment) | (PF01391) - Collagen triple helix | | |
| | | | repeat (20 copies) | | |
| 1093 | 13526943 (3733, 3734) | Novel Protein sim. GBank gi\|116515\|sp\|P22137\|CLH_YEAST - | Contains protein domain | UNCLASSIFIED | 1022 |
| | | CLATHRIN HEAVY CHAIN | (PF01394) - Clathrin propeller | | |
| | | | repeat | | |
| 1094 | 78736414 (695, 696) | Novel Protein sim. GBank gi\|2137494\|pir\|\|S66498 - M-sema F protein | Contains protein domain | UNCLASSIFIED | 1006 |
| | | precusor - mouse | (PF01403) - Sema domain | | |
| 1095 | 20562364 (4691, 4692) | Novel Protein sim. GBank gi\|123938\|sp\|P24191\|HYPC_ECOLI - | Contains protein domain | UNCLASSIFIED | 1020 |
| | | HYDROGENASE ISOENZYMES FORMATION PROTEIN HYPC | (PF01455) - HupF/HypC family | | |
| 1096 | 56321668 (8963, 8964) | Novel Protein sim. GBank gi\|2131341\|pir\|\|S67663 - hypothetical protein | Contains protein domain | UNCLASSIFIED | 1007, 1020, 1024 |
| | | YDL120w - yeast (Saccharomyces cerevisiae) | (PF01491) - Frataxin-like domain | | |
| 1097 | 17696277 (7913, 7914) | Novel Protein sim. GBank gi\|1750115 (U66480) - YnaD [Bacillus subtilis] | Contains protein domain | UNCLASSIFIED | 1015 |
| | | | (PF01581) - FMRFamide related | | |
| | | | peptide family | | |
| 1098 | 79322438 (6159, 6160) | Novel Protein sim. GBank gi\|2578384\|emb\|CAA15469\| - (AL008609) | Contains protein domain | UNCLASSIFIED | 1008, 1026, 1050 |
| | | glycine cleavage system h protein [Mycobacterium leprae] | (PF01597) - Glycine cleavage H- | | |
| | | | protein | | |
| 1099 | 20467324 (4961, 4962) | | Contains protein domain | UNCLASSIFIED | 1008 |
| | | | (PF01816) - Leucine rich repeat | | |
| | | | variant | | |
| 1100 | 11031760 (2651, 2652) | Novel Protein sim. GBank gi\|40507\|emb\|CAA48850\| - (X69104) ORF2 | Contains protein domain | UNCLASSIFIED | 1051 |
| | | [Corynebacterium glutamicum] | PF01836) - Transposase | | |
| 1101 | 56007904 (8151, 8152) | Novel Protein sim. GBank gi\|3025019\|sp\|O07734\|YC20_MYCTU - | Contains protein domain | UNCLASSIFIED | 1015 |
| | | HYPOTHETICAL 11.0 KD PROTEIN CY180.20C | (PF01910) - Protein of unknown | | |
| | | | function | | |
| 1102 | 28800967 (751, 752) | Novel Protein sim. GBank gi\|2916923\|emb\|CAA17670.1\| - (AL022004) | Contains protein domain | UNCLASSIFIED | 1020 |
| | | moaC2 [Mycobacterium tuberculosis] | (PF01967) - MoaC family | | |
| 1103 | 36996478 (4807, 4808) | Novel Protein sim. GBank gi\|1001461\|dbj\|BAA10087\| - (D63999) | | UNCLASSIFIED | 1001 |
| | | hypothetical protein [Synechocystis sp.] | | | |
| 1104 | 78140654 (6529, 6530) | Novel Protein sim. GBank gi\|100788\|pir\|\|S18733 - glutenin high molecular | | UNCLASSIFIED | 1014, 1019 |
| | | weight chain 1By9 precursor - wheat | | | |
| 1105 | 11417249 (455, 456) | Novel Protein sim. GBank gi\|1044963\|bbs\|169646 - protamine | | UNCLASSIFIED | 1015 |
| | | [Monodonta turbinata, gonads, Peptide, 106 aa] | | | |
| 1106 | 20621948 (8297, 8298) | Novel Protein sim. GBank gi\|1050749\|emb\|CAA61941\| - (X89816) GSTR | | UNCLASSIFIED | 1003 |
| | | protein [Rhizobium leguminosarum] | | | |
| 1107 | 79835962 (8449, 8450) | Novel Protein sim. GBank gi\|1050749\|emb\|CAA61941\| - (X89816) GSTR | | UNCLASSIFIED | 1001, 1006 |
| | | protein [Rhizobium leguminosarum] | | | |
| 1108 | 19636755 (1255, 1256) | Novel Protein sim. GBank gi\|1061334 (U34258) - cappuccino [Drosophila | | UNCLASSIFIED | 1022 |
| | | melanogaster] | | | |
| 1109 | 80245076 (3301, 3302) | Novel Protein sim. GBank gi\|106322\|pir\|\|B34087 - hypothetical protein | | UNCLASSIFIED | 1002, 1003, 1006, 1015, |
| | | (L1H 3′ region) - human | | | 1022 |
| 1110 | 79412708 (9039, 9040) | Novel Protein sim. GBank gi\|106322\|pir\|\|B34087 - hypothetical protein | | UNCLASSIFIED | 1022 |
| | | (L1H 3′ region) - human | | | |
| 1111 | 6770549 (5275, 5276) | Novel Protein sim. GBank gi\|1072944\|pir\|\|A48008 - electron transfer | | UNCLASSIFIED | 1020 |
| | | flavoprotein beta chain - Paracoccus denitrificans | | | |
| 1112 | 37036768 (645, 646) | Novel Protein sim. GBank gi\|1074262\|pir\|\|H64142 - hypothetical protein | | UNCLASSIFIED | 1010 |
| | | HI0107 - Haemophilus lnfluenzae (strain Rd KW20) | | | |
| 1113 | 79867038 (8391, 8392) | Novel Protein sim. GBank gi\|1076211\|pir\|\|S50755 - hypothetical protein | | UNCLASSIFIED | 1021, 1022, 1035, 1041 |
| | | VSP-3 - Chlamydomonas reinhardtii | | | |
| 1114 | 98236309 (6833, 6834) | Novel Protein sim. GBank gi\|1076627\|pir\|\|S54172 - inorganic | | UNCLASSIFIED | 1008, 1014 |
| | | pyrophosphatase (EC 3.6.1.1) - common tobacco | | | |
| 1115 | 78782677 (8245, 8246) | Novel Protein sim. GBank gi\|1077247\|pir\|\|S52507 - probable membrane | | UNCLASSIFIED | 1020 |
| | | protein YDL012c - yeast (Saccharomyces cerevisiae) | | | |
| 1116 | 34885537 (3921, 3922) | Novel Protein sim. GBank gi\|1077261\|pir\|\|S52527 - hypothetical protein | | UNCLASSIFIED | 1000 |
| | | YPL004c - yeast (Saccharomyces cerevisiae) | | | |
| 1117 | 29271303 (987, 988) | Novel Protein sim. GBank gi\|1077262\|pir\|\|S52528 - hypothetical protein | | UNCLASSIFIED | 1002 |
| | | YPL003w - yeast (Saccharomyces cerevisiae) | | | |
| 1118 | 78518134 (2353, 2354) | Novel Protein sim. GBank gi\|1077307\|pir\|\|S51892 - probable membrane | | UNCLASSIFIED | 1007 |
| | | protein YOL105c - yeast (Saccharomyces cerevisiae) | | | |
| 1119 | 80229807 (1721, 1722) | Novel Protein sim. GBank gi\|1077333\|pir\|\|S51473 - probable membrane | | UNCLASSIFIED | 1004, 1006, 1022, 1036 |
| | | protein YLR386w - yeast (Saccharomyces cerevisiae) | | | |
| 1120 | 57535632 (8241, 8242) | Novel Protein sim. GBank gi\|1077394\|pir\|\|S51408 - hypothetical protein | | UNCLASSIFIED | 1055 |
| | | YLR272c - yeast (Saccharomyces cerevisiae) | | | |
| 1121 | 39565537 (4731, 4732) | Novel Protein sim. GBank gi\|1077522\|pir\|\|S51244 - hypothetical protein | | UNCLASSIFIED | 1008 |
| | | YDR095c - yeast (Saccharomyces cerevisiae) | | | |
| 1122 | 11398083 (6161, 6162) | Novel Protein sim. GBank gi\|1077561\|pir\|\|S54050 - hypothetical protein | | UNCLASSIFIED | 1003, 1031 |
| | | YDR066c - yeast (Saccharomyces cerevisiae) | | | |
| 1123 | 10853113 (4429, 4430) | Novel Protein sim. GBank gi\|1078406\|pir\|\|S47536 - SWH1 protein | | UNCLASSIFIED | 1001 |
| | | (version 2) - yeast (Saccharomyces cerevisiae) | | | |
| 1124 | 88094158 (7017, 7018) | Novel Protein sim. GBank gi\|1079170\|pir\|\|S50125 - larval glue protein Lgp | | UNCLASSIFIED | 1003 |
| | | 3 precursor - fruit fly (Drosophila virilis) | | | |
| 1125 | 37814616 (2801, 2802) | Novel Protein sim. GBank gi\|1100076 (L49336) - PTS-dependent enzyme | | UNCLASSIFIED | 1055 |
| | | II [Clostridium longisporum] | | | |
| 1126 | 79614995 (8605, 8606) | Novel Protein sim. GBank gi\|1118097 (U41557) - proline and glycine-rich | | UNCLASSIFIED | 1001, 1002 |
| | | [Caenorhabditis elegans] | | | |
| 1127 | 36824986 (7553, 7554) | Novel Protein sim. GBank gi\|112205\|pir\|\|B39066 - proline-rich protein 15 - | | UNCLASSIFIED | 1051 |
| | | rat | | | |
| 1128 | 37802237 (2591, 2592) | Novel Protein sim. GBank gi\|112261\|pir\|\|S16783 - hypothetical protein 2 - | | UNCLASSIFIED | 1055 |
| | | rat transposon L1 | | | |
| 1129 | 33182574 (3505, 3506) | Novel Protein sim. GBank gi\|112262\|pir\|\|S21976 - hypothetical protein 1 - | | UNCLASSIFIED | 1024 |
| | | rat transposon L1 | | | |
| 1130 | 29915706 (3309, 3310) | Novel Protein sim. GBank gi\|113666\|sp\|P23959\|ALUA_HUMAN - !!!! ALU | | UNCLASSIFIED | 1022 |
| | | CLASS A WARNING ENTRY !!!! | | | |
| 1131 | 65704865 (3625, 3626) | Novel Protein sim. GBank gi\|113666\|sp\|P23959\|ALUA_HUMAN - !!!! ALU | | UNCLASSIFIED | 1002 |
| | | CLASS A WARNING ENTRY !!!! | | | |
| 1132 | 65327228 (4471, 4472) | Novel Protein sim. GBank gi\|113668\|sp\|P23961 \|ALUC_HUMAN - !!!! ALU | | UNCLASSIFIED | 1035 |
| | | CLASS C WARNING ENTRY !!!! | | | |
| 1133 | 11126833 (7295, 7296) | Novel Protein sim. GBank gi\|113668\|sp\|P23961\|ALUC_HUMAN - !!!! ALU | | UNCLASSIFIED | 1020 |
| | | CLASS C WARNING ENTRY !!!! | | | |
| 1134 | 85535625 (8715, 8716) | Novel Protein sim. GBank gi\|113668\|sp\|P23961\|ALUC_HUMAN - !!!! ALU | | UNCLASSIFIED | 1035 |
| | | CLASS C WARNING ENTRY !!!! | | | |
| 1135 | 13088036 (2409, 2410) | Novel Protein sim. GBank gi\|1139566\|dbj\|BAA08630\| - (D49826) | | UNCLASSIFIED | 1028 |
| | | unnamed protein product [Serratia marcescens] | | | |
| 1136 | 57522854 (759, 760) | Novel Protein sim. GBank gi\|1146422 (U20254) - Ssu1p [Saccharomyces | | UNCLASSIFIED | 1003, 1020, 1023, 1031 |
| | | cerevisiae] | | | |
| 1137 | 57447671 (3191, 3192) | Novel Protein sim. GBank gi\|114714\|sp\|P04694\|ATTY_RAT - TYROSINE | | UNCLASSIFIED | 1055 |
| | | AMINOTRANSFERASE (L-TYROSINE: 2-OXOGLUTARATE | | | |
| | | AMINOTRANSFERASE) (TAT) | | | |
| 1138 | 20297108 (3713, 3714) | Novel Protein sim. GBank gi\|114878\|sp\|P11435\|BCPA_STRHY - | | UNCLASSIFIED | 1031 |
| | | CARBOXYVINYL-CARBOXYPHOSPHONATE PHOSPHORYLMUTASE | | | |
| | | (CARBOXYPHOSPHONOENOLPYRUVATE PHOSPHONOMUTASE) | | | |
| | | (CPEP PHOSPHONOMUTASE) | | | |
| 1139 | 79633909 (1707, 1708) | Novel Protein sim. GBank gi\|115405\|sp\|P20630\|CC12_CAEEL - | | UNCLASSIFIED | 1035 |
| | | CUTICLE COLLAGEN 12 PRECURSOR | | | |
| 1140 | 27975264 (3003, 3004) | Novel Protein sim. GBank gi\|115939\|sp\|P06961\|CCA_ECOLI - TRNA | | UNCLASSIFIED | 1004 |
| | | NUCLEOTIDYLTRANSFERASE (TRNA ADENYLYLTRANSFERASE) | | | |
| | | (TRNA CCA-PYROPHOSPHORYLASE) (CCA-ADDING ENZYME) | | | |
| 1141 | 66489053 (1271, 1272) | Novel Protein sim. GBank gi\|1160355 (U33058) - UNC-89 [Caenorhabditis | | UNCLASSIFIED | 1001, 1003, 1022, 1026 |
| | | elegans] | | | |
| 1142 | 37026059 (4289, 4290) | Novel Protein sim. GBank gi\|116371\|sp\|P17552\|CHRB_ALCEU - CHRB | | UNCLASSIFIED | 1035 |
| | | PROTEIN | | | |
| 1143 | 57292564 (1379, 1380) | Novel Protein sim. GBank gi\|1164988\|emb\|CAA64063\| - (X94335) | | UNCLASSIFIED | 1006, 1008, 1020 |
| | | YOR3513c [Saccharomyces cerevisiae] | | | |
| 1144 | 11808714 (955, 956) | Novel Protein sim. GBank gi\|116837\|sp\|P21636\|COBF_PSEDE - COBF | | UNCLASSIFIED | 1020 |
| | | PROTEIN | | | |
| 1145 | 86473327 (3299, 3300) | Novel Protein sim. GBank gi\|1169153\|sp\|P46356\|CYAY_YERPE - CYAY | | UNCLASSIFIED | 1026 |
| | | PROTEIN | | | |
| 1146 | 79607194 (1509, 1510) | Novel Protein sim. GBank gi\|1169255\|sp\|P42503\|DCUP_RHOCA - | | UNCLASSIFIED | 1004, 1036 |
| | | UROPORPHYRINOGEN DECARBOXYLASE (UPD) | | | |
| 1147 | 65682712 (1863, 1864) | Novel Protein sim. GBank gi\|1171060\|sp\|P43505\|MTRC_NEIGO - | | UNCLASSIFIED | 1008, 1021 |
| | | MEMBRANE FUSION PROTEIN MTRC PRECURSOR | | | |
| 1148 | 86475460 (4097, 4098) | Novel Protein sim. GBank gi\|1171071\|sp\|P45066\|MURC_HAEIN - UDP-N- | | UNCLASSIFIED | 1045 |
| | | ACETYLMURAMATE-ALANINE LIGASE (UDP-N-ACETYLMURANOYL-L | | | |
| | | ALANINE SYNTHETASE) | | | |
| 1149 | 20610309 (1999, 2000) | Novel Protein sim. GBank gi\|1172069\|sp\|P45494\|PEPV_LACDL - XAA- | | UNCLASSIFIED | 1004 |
| | | HIS DIPEPTIDASE (X-HIS DIPEPTIDASE) (AMINOACYL-HISTIDINE | | | |
| | | DIPEPTIDASE) (CARNOSINASE) | | | |
| 1150 | 37018030 (3265, 3266) | Novel Protein sim. GBank gi\|1172069\|sp\|P45494\|PEPV_LACDL - XAA- | | UNCLASSIFIED | 1023 |
| | | HIS DIPEPTIDASE (X-HIS DIPEPTIDASE) (AMINOACYL-HISTIDINE | | | |
| | | DIPEPTIDASE) (CARNOSINASE) | | | |
| 1151 | 20608541 (3129, 3130) | Novel Protein sim. GBank gi\|1172509\|sp\|P42257\|PILJ_PSEAE - PILJ | | UNCLASSIFIED | 1003 |
| | | PROTEIN | | | |
| 1152 | 79173584 (3163, 3164) | Novel Protein sim. GBank gi\|1172783\|sp\|P41008\|PYRB_BACCL - | | UNCLASSIFIED | 1028 |
| | | ASPARTATE CARBAMOYLTRANSFERASE (ASPARTATE | | | |
| | | TRANSCARBAMYLASE) (ATCASE) | | | |
| 1153 | 25256802 (8809, 8810) | Novel Protein sim. GBank gi\|1173364\|sp\|P45380\|SAT1_RAT - SULFATE | | UNCLASSIFIED | 1006 |
| | | ANION TRANSPORTER 1 (CANALICULAR SULFATE TRANSPORTER) | | | |
| | | (SULFATE/CARBONATE ANTIPORTER) | | | |
| 1154 | 80411891 (8975, 8976) | Novel Protein sim. GBank gi\|1174661\|sp\|P44594\|TGT_HAEIN - | | UNCLASSIFIED | 1026, 1041 |
| | | QUEUINE TRNA-RIBOSYLTRANSFERASE (TRNA-GUANINE | | | |
| | | TRANSGLYCOSYLASE) (GUANINE INSERTION ENZYME) | | | |
| 1155 | 11102917 (8767, 8768) | Novel Protein sim. GBank gi\|1175364\|sp\|Q09686\|YA14_SCHPO - | | UNCLASSIFIED | 1004, 1022 |
| | | HYPOTHETICAL 28.0 KD PROTEIN C13C5.04 IN CHROMOSOME I | | | |
| 1156 | 11088365 (5787, 5788) | Novel Protein sim. GBank gi\|1175473\|sp\|P44555\|YAAJ_HAEIN - | | UNCLASSIFIED | 1003 |
| | | HYPOTHETICAL PROTEIN HI0183 | | | |
| 1157 | 11122739 (8465, 8466) | Novel Protein sim. GBank gi\|1175939\|sp\|P43567\|YFD0_YEAST - | | UNCLASSIFIED | 1031 |
| | | HYPOTHETICAL 41.9 KD PROTEIN IN HAC1-CAK1 INTERGENIC | | | |
| | | REGION | | | |
| 1158 | 79873114 (7261, 7262) | Novel Protein sim. GBank gi\|1175941\|sp\|P43564\|YFD4_YEAST - | | UNCLASSIFIED | 1004 |
| | | HYPOTHETICAL 119.5 KD PROTEIN IN MOB2-RIM15 INTERGENIC | | | |
| | | REGION | | | |
| 1159 | 11413362 (8687, 8688) | Novel Protein sim. GBank gi\|1176206\|sp\|P46481 \|YHCP_ECOLI - | | UNCLASSIFIED | 1051 |
| | | HYPOTHETICAL 73.6 KD PROTEIN IN ARGR-CAFA INTERGENIC | | | |
| | | REGION (F655) | | | |
| 1160 | 80050336 (8197, 8198) | Novel Protein sim. GBank gi\|1176207\|sp\|P46482\|YHCQ_ECOLI - | | UNCLASSIFIED | 1004 |
| | | HYPOTHETICAL 34.8 KD PROTEIN IN ARGR-CAFA INTERGENIC | | | |
| | | REGION | | | |
| 1161 | 78785842 (4443, 4444) | Novel Protein sim. GBank gi\|1176918\|sp\|P24089\|YSY2_YEAST - | | UNCLASSIFIED | 1007, 1041 |
| | | HYPOTHETICAL 137.7 KD PROTEIN IN SUBTELOMERIC Y' REPEAT | | | |
| | | REGION OF CHR XV (ORF 2) | | | |
| 1162 | 32571568 (2903, 2904) | Novel Protein sim. GBank gi\|1176968\|sp\|P42107\|YXAH_BACSU - | | UNCLASSIFIED | 1031 |
| | | HYPOTHETICAL 46.2 KD PROTEIN IN GNTR-HTPG INTERGENIC | | | |
| | | REGION | | | |
| 1163 | 78435203 (3411, 3412) | Novel Protein sim. GBank gi\|119111\|sp\|P12978\|EBN2_EBV - EBNA-2 | | UNCLASSIFIED | 1020 |
| | | NUCLEAR PROTEIN | | | |
| 1164 | 78996721 (4617, 4618) | Novel Protein sim. GBank gi\|120450\|sp\|P27251\|DEF_ECOLI - | | UNCLASSIFIED | 1007, 1041 |
| | | POLYPEPTIDE DEFORMYLASE (PDF) (FORMYLMETHIONINE | | | |
| | | DEFORMYLASE) | | | |
| 1165 | 10159084 (8761, 8762) | Novel Protein sim. GBank gi\|120475\|sp\|P05523\|FPG_ECOLI - | | UNCLASSIFIED | 1003 |
| | | FORMAMIDOPYRIMIDINE-DNA GLYCOSYLASE (FAPY-DNA | | | |
| | | GLYCOSYLASE) | | | |
| 1166 | 17869389 (2211, 2212) | Novel Protein sim. GBank gi\|120943\|sp\|P13816\|GARP_PLAFF - | | UNCLASSIFIED | 1006, 1022 |
| | | GLUTAMIC ACID-RICH PROTEIN PRECURSOR | | | |
| 1167 | 19877214 (7289, 7290) | Novel Protein sim. GBank gi\|121191\|sp\|P17113\|GIDB_ECOLI - | | UNCLASSIFIED | 1031 |
| | | GLUCOSE INHIBITED DIVISION PROTEIN B | | | |
| 1168 | 21434344 (4413, 4414) | Novel Protein sim. GBank gi\|1213021\|emb\|CAA59198\| - (X84710) | | UNCLASSIFIED | 1031 |
| | | ORF492, surface antigen gene [Methanosarcina mazei] | | | |
| 1169 | 25154002 (4817, 4818) | Novel Protein sim. GBank gi\|121661\|sp\|P06980\|GSH1_ECOLI - | | UNCLASSIFIED | 1002, 1021 |
| | | GLUTAMATE-CYSTEINE LIGASE (GAMMA-GLUTAMYLCYSTEINE | | | |
| | | SYNTHETASE) (GAMMA-ECS) (GCS) | | | |
| 1170 | 66051387 (1571, 1572) | Novel Protein sim. GBank gi\|1228093\|emb\|CAA87011\| - (Z46913) | | UNCLASSIFIED | 1008 |
| | | polyketide synthase [Streptomyces ambofaciens] | | | |
| 1171 | 38895546 (5193, 5194) | Novel Protein sim. GBank gi\|122829\|sp\|P13581\|HEM1_SALTY - | | UNCLASSIFIED | 1006 |
| | | GLUTAMYL-TRNA REDUCTASE (GLUTR) | | | |
| 1172 | 65503633 (1909, 1910) | Novel Protein sim. GBank gi\|123166\|sp\|P28735\|HIS8_MYCSM - | | UNCLASSIFIED | 1046 |
| | | HISTIDINOL-PHOSPHATE AMINOTRANSFERASE (IMIDAZOLE | | | |
| | | ACETOL-PHOSPHATE TRANSAMINASE) | | | |
| 1173 | 78784365 (2173, 2174) | Novel Protein sim. GBank gi\|124890\|sp\|P19158\|IRA2_YEAST - | | UNCLASSIFIED | 1020 |
| | | INHIBITORY REGULATOR PROTEIN IRA2 | | | |
| 1174 | 20385137 (8785, 8786) | Novel Protein sim. GBank gi\|125329\|sp\|P04951\|KDSB_ECOLI - 3- | | UNCLASSIFIED | 1003 |
| | | DEOXY-MANNO-OCTULOSONATE CYTIDYLYLTRANSFERASE (CMP- | | | |
| | | KDO SYNTHETASE) (CMP-2-KETO-3-DEOXYOCTULOSONIC ACID | | | |
| | | SYNTHETASE) (CKS) | | | |
| 1175 | 78901612 (1513, 1514) | Novel Protein sim. GBank gi\|125682\|sp\|P26372\|KRUC_SHEEP - | | UNCLASSIFIED | 1002 |
| | | KERATIN, ULTRA HIGH-SULFUR MATRIX PROTEIN (UHS KERATIN) | | | |
| 1176 | 27829679 (8249, 8250) | Novel Protein sim. GBank gi\|125733\|sp\|P10716\|KUCR_RAT - KUPFFER | | UNCLASSIFIED | 1003, 1031 |
| | | CELL RECEPTOR | | | |
| 1177 | 36514909 (6095, 6096) | Novel Protein sim. GBank gi\|125970\|sp\|P14206\|RSP4_MOUSE - 40S | | UNCLASSIFIED | 1026 |
| | | RIBOSOMAL PROTEIN SA (P40) (34/67 KD LAMININ RECEPTOR) | | | |
| 1178 | 90936861 (8621, 8622) | Novel Protein sim. GBank gi\|126722\|sp\|P27046\|MAN2_MOUSE - ALPHA- | | UNCLASSIFIED | 1018 |
| | | MANNOSIDASE II (MANNOSYL-OLIGOSACCHARIDE 1,3-1,6-ALPHA- | | | |
| | | MANNOSIDASE) (MAN II) (GOLGI ALPHA-MANNOSIDASE II) | | | |
| 1179 | 55284151 (4053, 4054) | Novel Protein sim. GBank gi\|127320\|sp\|P24202\|MRR_ECOLI - MRR | | UNCLASSIFIED | 1050 |
| | | RESTRICTION SYSTEM PROTEIN | | | |
| 1180 | 85526278 (6895, 6896) | Novel Protein sim. GBank gi\|127549\|sp\|P11652\|MUTA_PROFR - | | UNCLASSIFIED | 1004, 1006, 1008, 1010, |
| | | METHYLMALONYL-COA MUTASE BETA-SUBUNIT (MCB-BETA) | | | 1020, 1021, 1026, 1031, |
| | | | | | 1036, 1041, 1046 |
| 1181 | 78524503 (889, 890) | Novel Protein sim. GBank gi\|128405\|sp\|P16313\|NO21_SOYBN - | | UNCLASSIFIED | 1002, 1051 |
| | | NODULIN 21 (N-21) | | | |
| 1182 | 30577018 (6069, 6070) | Novel Protein sim. GBank gi\|130084\|sp\|P06200\|PHLC_PSEAE - | | UNCLASSIFIED | 1007 |
| | | HEMOLYTIC PHOSPHOLIPASE C PRECURSOR (HEAT LABILE- | | | |
| | | HEMOLYSIN) (PHOSPHATIDYLCHOLINE | | | |
| | | CHOLINEPHOSPHOHYDROLASE) | | | |
| 1183 | 20465412 (6557, 6558) | Novel Protein sim. GBank gi\|130367\|sp\|P22253\|PNCB_SALTY - | | UNCLASSIFIED | 1008 |
| | | NICOTINATE PHOSPHORIBOSYLTRANSFERASE (NAPRTASE) | | | |
| 1184 | 27982145 (715, 716) | Novel Protein sim. GBank gi\|1304154\|dbj\|BAA11461\| - (D78644) DNA | | UNCLASSIFIED | 1004 |
| | | polymerase [Mus musculus] | | | |
| 1185 | 10158862 (4243, 4244) | Novel Protein sim. GBank gi\|130998\|sp\|P02812\|PRP2_HUMAN - | | UNCLASSIFIED | 1002, 1055 |
| | | SALIVARY PROLINE-RICH PROTEIN PRECURSOR (CLONE CP7) | | | |
| | | [CONTAINS: BASIC PEPTIDE P-F] | | | |
| 1186 | 23281336 (331, 332) | Novel Protein sim. GBank gi\|131225\|sp\|P23993\|PSAL_HORVU - | | UNCLASSIFIED | 1002 |
| | | PHOTOSYSTEM I REACTION CENTRE SUBUNIT XI PRECURSOR | | | |
| | | (SUBUNIT V) (PSI-L) | | | |
| 1187 | 23292290 (869, 870) | Novel Protein sim. GBank gi\|1313926\|emb\|CAA66267\| - (X97677) non | | UNCLASSIFIED | 1015 |
| | | intermediate filament IFA binding protein [Brassica oleracea] | | | |
| 1188 | 80497275 (5069, 5070) | Novel Protein sim. GBank gi\|1314835 (U56084) - exogenous ferric | | UNCLASSIFIED | 1010 |
| | | siderophore receptor [Bordetella bronchiseptica] | | | |
| 1189 | 9354676 (2687, 2688) | Novel Protein sim. GBank gi\|132360\|sp\|P05684\|REPC_AGRRA - | | UNCLASSIFIED | 1006 |
| | | POSSIBLE REPLICATION PROTEIN C | | | |
| 1190 | 79233832 (775, 776) | Novel Protein sim. GBank gi\|132523\|sp\|P19263\|RGR1_YEAST - | | UNCLASSIFIED | 1001, 1006, 1024, 1041 |
| | | GLUCOSE REPRESSION REGULATORY PROTEIN RGR1 | | | |
| 1191 | 79261586 (1819, 1820) | Novel Protein sim. GBank gi\|134515\|sp\|P17883\|SKI3_YEAST - | | UNCLASSIFIED | 1021, 1046 |
| | | SUPERKILLER 3 PROTEIN | | | |
| 1192 | 82476553 (7859, 7860) | Novel Protein sim. GBank gi\|1346647\|sp\|P49687\|N145_YEAST - | | UNCLASSIFIED | 1001, 1006, 1008, 1010, |
| | | NUCLEOPORIN NUP145 (NUCLEAR PORE PROTEIN NUP145) | | | 1015, 1020, 1022, 1031, |
| | | | | | 1051 |
| 1193 | 95293062 (615, 616) | Novel Protein sim. GBank gi\|1346722\|sp\|P49022\|PIP_LACLA - PHAGE | | UNCLASSIFIED | 1020 |
| | | INFECTION PROTEIN | | | |
| 1194 | 10340949 (1031, 1032) | Novel Protein sim. GBank gi\|1346910\|sp\|P28650\|PUA1_MOUSE - | | UNCLASSIFIED | 1035 |
| | | ADENYLOSUCCINATE SYNTHETASE, MUSCLE ISOZYME (IMP- | | | |
| | | ASPARTATE LIGASE) | | | |
| 1195 | 27981812 (1067, 1068) | Novel Protein sim. GBank gi\|134780\|sp\|P14328\|SP96_DICDI - SPORE | | UNCLASSIFIED | 1004 |
| | | COAT PROTEIN SP96 | | | |
| 1196 | 79854352 (6415, 6416) | Novel Protein sim. GBank gi\|134837\|sp\|P17580\|SPOT_ECOLI - | | UNCLASSIFIED | 1015, 1021, 1036 |
| | | GUANOSINE-3′,5′-BIS(DIPHOSPHATE) 3′- | | | |
| | | PYROPHOSPHOHYDROLASE ((PPGPP)ASE) (PENTA-PHOSPHATE | | | |
| | | GUANOSINE-3′-PYROPHOSPHOHYDROLASE) | | | |
| 1197 | 30422207 (3329, 3330) | Novel Protein sim. GBank gi\|135083\|sp\|P24506\|SY62_DISOM - | | UNCLASSIFIED | 1041 |
| | | SYNAPTOTAGMIN B (SYNAPTIC VESICLE PROTEIN O-P65-B) | | | |
| 1198 | 80083733 (2665, 2666) | Novel Protein sim. GBank gi\|1351184\|sp\|P48527\|SYYM_YEAST - | | UNCLASSIFIED | 1020, 1031 |
| | | TYROSYL-TRNA SYNTHETASE, MITOCHONDRIAL PRECURSOR | | | |
| | | (TYROSINE-TRNA LIGASE) (TYRRS) | | | |
| 1199 | 20736833 (8379, 8380) | Novel Protein sim. GBank gi\|135139\|sp\|P15180\|SYKC_YEAST - LYSYL- | | UNCLASSIFIED | 1020 |
| | | TRNA SYNTHETASE, CYTOPLASMIC (LYSINE - TRNA LIGASE) | | | |
| | | (LYSRS) | | | |
| 1200 | 20628105 (2559, 2560) | Novel Protein sim. GBank gi\|1351821\|sp\|P48236\|YG3L_YEAST - | | UNCLASSIFIED | 1008 |
| | | HYPOTHETICAL 51.6 KD PROTEIN IN RPL30B-RSR1 INTERGENIC | | | |
| | | REGION | | | |
| 1201 | 80219752 (9051, 9052) | Novel Protein sim. GBank gi\|1352873\|sp\|P47101\|YJ00_YEAST - | | UNCLASSIFIED | 1003, 1004, 1022, 1027, |
| | | HYPOTHETICAL 84.3 KD PROTEIN IN BNA1-CPR7 INTERGENIC | | | 1041 |
| | | REGION | | | |
| 1202 | 80245061 (1369, 1370) | Novel Protein sim. GBank gi\|1352874\|sp\|P47102\|YJ01_YEAST - | | UNCLASSIFIED | 1004, 1006, 1008, 1020 |
| | | HYPOTHETICAL 159.4 KD PROTEIN IN MER2-CPR7 INTERGENIC | | | |
| | | REGION | | | |
| 1203 | 24141321 (6563, 6564) | Novel Protein sim. GBank gi\|1352890\|sp\|P47123\|YJ44_YEAST - | | UNCLASSIFIED | 1007 |
| | | HYPOTHETICAL 24.3 KD PROTEIN IN PEM2-HOC1 INTERGENIC | | | |
| | | REGION | | | |
| 1204 | 78790208 (1267, 1268) | Novel Protein sim. GBank gi\|1352977\|sp\|P47050\|YJE7_YEAST - | | UNCLASSIFIED | 1020, 1024 |
| | | HYPOTHETICAL 99.3 KD PROTEIN IN MTR4-GYP6 INTERGENIC | | | |
| | | REGION | | | |
| 1205 | 80217268 (5755, 5756) | Novel Protein sim. GBank gi\|1352984\|sp\|P47044\|YJF5_YEAST - | | UNCLASSIFIED | 1003, 1008, 1020, 1022, |
| | | HYPOTHETICAL 26.9 KD PROTEIN IN BTN1-PEP8 INTERGENIC | | | 1024, 1035 |
| | | REGION | | | |
| 1206 | 78757501 (4597, 4598) | Novel Protein sim. GBank gi\|1352989\|sp\|P47037\|SMC3_YEAST - | | UNCLASSIFIED | 1041 |
| | | CHROMOSOME SEGREGATION PROTEIN SMC3 (DA-BOX PROTEIN | | | |
| | | SMC3) | | | |
| 1207 | 8499085 (8377, 8378) | Novel Protein sim. GBank gi\|1352991\|sp\|P47035\|YJH6_YEAST - | | UNCLASSIFIED | 1020, 1031 |
| | | HYPOTHETICAL 128.5 KD PROTEIN IN SCP160-SMC3 INTERGENIC | | | |
| | | REGION | | | |
| 1208 | 12829405 (2879, 2880) | Novel Protein sim. GBank gi\|1353040\|sp\|P46985\|YJS3_YEAST - | | UNCLASSIFIED | 1028 |
| | | HYPOTHETICAL 47.8 KD PROTEIN IN SWE1-ATP12 INTERGENIC | | | |
| | | REGION | | | |
| 1209 | 79827901 (1813, 1814) | Novel Protein sim. GBank gi\|135514\|sp\|P06333\|TCB1_RABIT - T-CELL | | UNCLASSIFIED | 1002, 1006 |
| | | RECEPTOR BETA CHAIN PRECURSOR (ANA 11) | | | |
| 1210 | 79114433 (3251, 3252) | Novel Protein sim. GBank gi\|135514\|sp\|P06333\|TCB1_RABIT - T-CELL | | UNCLASSIFIED | 1041 |
| | | RECEPTOR BETA CHAIN PRECURSOR (ANA 11) | | | |
| 1211 | 78781913 (3323, 3324) | Novel Protein sim. GBank gi\|135969\|sp\|P21269\|CCA1_YEAST - TRNA | | UNCLASSIFIED | 1007 |
| | | NUCLEOTIDYLTRANSFERASE PRECURSOR (TRNA | | | |
| | | ADENYLYLTRANSFERASE) (TRNA CCA-PYROPHOSPHORYLASE) | | | |
| | | (CCA-ADDING ENZYME) | | | |
| 1212 | 85817924 (8597, 8598) | Novel Protein sim. GBank gi\|1360914\|pir\|\|D56279 - coxL 3′-region | | UNCLASSIFIED | 1017 |
| | | hypothetical protein - Pseudomonas carboxydovorans | | | |
| 1213 | 20292767 (823, 824) | Novel Protein sim. GBank gi\|1361153\|pir\|\|S56602 - hypothetical protein | | UNCLASSIFIED | 1031 |
| | | o211 - Escherichia coli | | | |
| 1214 | 27981679 (2195, 2196) | Novel Protein sim. GBank gi\|1361210\|pir\|\|S56383 - lysyl-tRNA synthetase | | UNCLASSIFIED | 1004 |
| | | homolog protein genX - Escherichia coli | | | |
| 1215 | 79841698 (89, 90) | Novel Protein sim. GBank gi\|1361224\|pir\|\|S56597 - peptide N- | | UNCLASSIFIED | 1041 |
| | | acetyltransferase (EC 2.3.1.—) riml - Escherichia coli | | | |
| 1216 | 27366674 (3367, 3368) | Novel Protein sim. GBank gi\|136242\|sp\|P15565\|TRM1_YEAST - N2, N2- | | UNCLASSIFIED | 1020 |
| | | DIMETHYLGUANOSINE TRNA METHYLTRANSFERASE PRECURSOR | | | |
| 1217 | 47652223 (7991, 7992) | Novel Protein sim. GBank gi\|1364110\|pir\|\|S57490 - molybdopterin | | UNCLASSIFIED | 1026 |
| | | cofactor synthesis protein - Arthrobacter nicotinovorans (fragment) | | | |
| 1218 | 29686789 (2183, 2184) | Novel Protein sim. GBank gi\|137616\|sp\|P03708\|TERL_LAMBD - | | UNCLASSIFIED | 1035 |
| | | TERMINASE LARGE SUBUNIT (DNA PACKAGING PROTEIN A) (GPA) | | | |
| 1219 | 10355461 (1093, 1094) | Novel Protein sim. GBank gi\|139859\|sp\|P07859\|XYLS_PSEPU - | | UNCLASSIFIED | 1036 |
| | | XYLDLEGF OPERON TRANSCRIPTIONAL ACTIVATOR | | | |
| 1220 | 17682824 (7251, 7252) | Novel Protein sim. GBank gi\|140372\|sp\|P25569\|YCD9_YEAST - | | UNCLASSIFIED | 1036 |
| | | HYPOTHETICAL 86.0 KD PROTEIN IN GLK1-SRO9 INTERGENIC | | | |
| | | REGION | | | |
| 1221 | 27961532 (4571, 4572) | Novel Protein sim. GBank gi\|140449\|sp\|P25349\|YCP4_YEAST - | | UNCLASSIFIED | 1004 |
| | | HYPOTHETICAL 26.4 KD PROTEIN IN CDC10-CIT2 INTERGENIC | | | |
| | | REGION | | | |
| 1222 | 78382668 (1551, 1552) | Novel Protein sim. GBank gi\|140499\|sp\|P25627\|YCT7_YEAST - | | UNCLASSIFIED | 1002 |
| | | PUTATIVE 30.7 KD METHYLTRANSFERASE IN TSM1-ARE1 | | | |
| | | INTERGENIC REGION | | | |
| 1223 | 10139501 (7153, 7154) | Novel Protein sim. GBank gi\|141308\|sp\|P24562\|YPT5_PSEAE - | | UNCLASSIFIED | 1015 |
| | | HYPOTHETICAL 24.5 KD PROTEIN IN PILT 5′REGION (ORF5) | | | |
| 1224 | 79832459 (35, 36) | Novel Protein sim. GBank gi\|141515\|sp\|P25639\|YCV1_YEAST - | | UNCLASSIFIED | 1006, 1015, 1021, 1041 |
| | | HYPOTHETICAL 65.0 KD PROTEIN IN PWP2-SUP61 INTERGENIC | | | |
| | | REGION | | | |
| 1225 | 79194684 (5007, 5008) | Novel Protein sim. GBank gi\|142856 (M96343) - MreC protein [Bacillus | | UNCLASSIFIED | 1022 |
| | | subtilis] | | | |
| 1226 | 21392310 (2121, 2122) | Novel Protein sim. GBank gi\|1652190\|dbj\|BAA17114\| - (D90903) Fat | | UNCLASSIFIED | 1020 |
| | | protein [Synechocystis sp.] | | | |
| 1227 | 78971760 (7603, 7604) | Novel Protein sim. GBank gi\|1652359\|dbj\|BAA17282\| - (D90904) | | UNCLASSIFIED | 1006 |
| | | hypothetical protein [Synechocystis sp.] | | | |
| 1228 | 77517367 (3317, 3318) | Novel Protein sim. GBank gi\|1652721\|dbj\|BAA17641\| - (D90907), | | UNCLASSIFIED | 1009 |
| | | hypothetical protein [Synechocystis sp.] | | | |
| 1229 | 37800949 (3341, 3342) | Novel Protein sim. GBank gi\|1653898\|dbj\|BAA18808\| - (D90917) | | UNCLASSIFIED | 1010 |
| | | hypothetical protein [Synechocystis sp.] | | | |
| 1230 | 8058034 (3197, 3198) | Novel Protein sim. GBank gi\|1655648\|emb\|CAB03747\| - (Z81368) | | UNCLASSIFIED | 1008 |
| | | hypothetical protein Rv2411c [Mycobacterium tuberculosis] | | | |
| 1231 | 27977068 (501, 502) | Novel Protein sim. GBank gi\|1655665\|emb\|CAB03731\| - (Z81368) | | UNCLASSIFIED | 1020 |
| | | hypothetical protein Rv2395 [Mycobacterium tuberculosis] | | | |
| 1232 | 78528471 (2835, 2836) | Novel Protein sim. GBank gi\|1655665\|emb\|CAB03731\| - (Z81368) | | UNCLASSIFIED | 1027 |
| | | hypothetical protein Rv2395 [Mycobacterium tuberculosis] | | | |
| 1233 | 17287840 (8459, 8460) | Novel Protein sim. GBank gi\|1655699\|emb\|CAA69032\| - (Y07752) | | UNCLASSIFIED | 1006 |
| | | pherophorin-S [Volvox carteri] | | | |
| 1234 | 20286667 (5773, 5774) | Novel Protein sim. GBank gi\|1655830 (U59446) - myrosinase-binding | | UNCLASSIFIED | 1020 |
| | | protein related protein [Brassica napus] | | | |
| 1235 | 8515876 (3545, 3546) | Novel Protein sim. GBank gi\|1657554\|gb\|AAB18082.1\| - (U73857) | | UNCLASSIFIED | 1050 |
| | | hypothetical protein [Escherichia coli] | | | |
| 1236 | 11398315 (7929, 7930) | Novel Protein sim. GBank gi\|1665720\|dbj\|BAA04134\| - (D17312) diarrheal | | UNCLASSIFIED | 1004 |
| | | toxin [Bacillus cereus] | | | |
| 1237 | 70451388 (1087, 1088) | Novel Protein sim. GBank gi\|1694865\|emb\|CAB05411\| - (Z83018) | | UNCLASSIFIED | 1046 |
| | | hypothetical protein Rv2966c [Mycobacterium tuberculosis] | | | |
| 1238 | 39527331 (2135, 2136) | Novel Protein sim. GBank gi\|1703287\|sp\|Q11010\|AMPN_STRLI - | | UNCLASSIFIED | 1004 |
| | | AMINOPEPTIDASE N (LYSYL AMINOPEPTIDASE) (LYS-AP) (ALANINE | | | |
| | | AMINOPEPTIDASE) | | | |
| 1239 | 57293758 (6717, 6718) | Novel Protein sim. GBank gi\|1705514\|sp\|P53226\|BUD9_YEAST - BUD | | UNCLASSIFIED | 1020, 1024, 1031 |
| | | SITE SELECTION PROTEIN BUD9 | | | |
| 1240 | 35125857 (6169, 6170) | Novel Protein sim. GBank gi\|1706439\|sp\|P53388\|DIP5_YEAST - | | UNCLASSIFIED | 1024 |
| | | DICARBOXYLIC AMINO ACID PERMEASE | | | |
| 1241 | 20284542 (7213, 7214) | Novel Protein sim. GBank gi\|1707878\|sp\|P54260\|GCST_SOLTU - | | UNCLASSIFIED | 1020 |
| | | AMINOMETHYL TRANSFERASE PRECURSOR (GLYCINE CLEAVAGE | | | |
| | | SYSTEM T PROTEIN) | | | |
| 1242 | 65466577 (6647, 6648) | Novel Protein sim. GBank gi\|1708467\|sp\|P54689\|ILVE_HAEIN - | | UNCLASSIFIED | 1008 |
| | | BRANCHED-CHAIN AMINO ACID AMINOTRANSFERASE | | | |
| | | (TRANSAMINASE B) (BCAT) | | | |
| 1243 | 78184318 (53, 54) | Novel Protein sim. GBank gi\|1709220\|sp\|P53792\|SL52_RAT - | | UNCLASSIFIED | 1020, 1024 |
| | | SODIUM/GLUCOSE COTRANSPORTER 2 (NA(+)/GLUCOSE | | | |
| | | COTRANSPORTER 2) (LOW AFFINITY SODIUM-GLUCOSE | | | |
| | | COTRANSPORTER) | | | |
| 1244 | 9875298 (5491, 5492) | Novel Protein sim. GBank gi\|1709675\|sp\|P52832\|PMGI_PSESM - 2,3- | | UNCLASSIFIED | 1041 |
| | | BISPHOSPHOGLYCERATE-INDEPENDENT PHOSPHOGLYCERATE | | | |
| | | MUTASE (PHOSPHOGLYCEROMUTASE) (BPG-INDEPENDENT PGAM) | | | |
| 1245 | 29363896 (1331, 1332) | Novel Protein sim. GBank gi\|1709888\|sp\|P32606\|PT27_YEAST - | | UNCLASSIFIED | 1041 |
| | | PUTATIVE MITOCHONDRIAL TRANSLATION SYSTEM COMPONENT | | | |
| | | PET127 | | | |
| 1246 | 6345797 (5859, 5860) | Novel Protein sim. GBank gi\|1710124 (U62279) - leucine-rich repeat- | | UNCLASSIFIED | 1055 |
| | | containing extracellular glycoprotein; contains six N-glycosylation sites | | | |
| | | [NX(S/T)][Sorghum bicolor] | | | |
| 1247 | 52563343 (4645, 4646) | Novel Protein sim. GBank gi\|1710635\|sp\|P51862\|ROM2_YEAST - RHO1 | | UNCLASSIFIED | 1036, 1041 |
| | | GDP-GTP EXCHANGE PROTEIN 2 | | | |
| 1248 | 80425372 (3687, 3688) | Novel Protein sim. GBank gi\|171407 (M83540) - DNA52 [Saccharomyces | | UNCLASSIFIED | 1002, 1003, 1004, 1008, |
| | | cerevisiae] | | | 1020, 1022, 1023, 1025, |
| | | | | | 1028, 1031, 1041 |
| 1249 | 80500805 (4953, 4954) | Novel Protein sim. GBank gi\|171732 (M14048) - histidine-tRNA | | UNCLASSIFIED | 1003, 1004, 1006, 1008, |
| | | synthetase mitochondrial [Saccharomyces cerevisiae] | | | 1010, 1015, 1020, 1021, |
| | | | | | 1022, 1028, 1031 |
| 1250 | 80233117 (6873, 6874) | Novel Protein sim. GBank gi\|1722927\|sp\|Q10403\|Y00R_MYCTU - | | UNCLASSIFIED | 1050 |
| | | HYPOTHETICAL 31.7 KD PROTEIN CY190.27 | | | |
| 1251 | 20395631 (7625, 7626) | Novel Protein sim. GBank gi\|1723055\|sp\|Q11019\|Y07D_MYCTU - | | UNCLASSIFIED | 1003 |
| | | HYPOTHETICAL ABC TRANSPORTER ATP-BINDING PROTEIN | | | |
| | | CY02B10.13 | | | |
| 1252 | 38406202 (5707, 5708) | Novel Protein sim. GBank gi\|1723184\|sp\|P39732\|YAD1_YEAST - | | UNCLASSIFIED | 1006, 1024 |
| | | HYPOTHETICAL 86.6 KD PROTEIN IN PYK1-SNC1 INTERGENIC | | | |
| | | REGION | | | |
| 1253 | 78716228 (4699, 4700) | Novel Protein sim. GBank gi\|1723646\|sp\|P53208\|YG19_YEAST - | | UNCLASSIFIED | 1015 |
| | | HYPOTHETICAL 37.9 KD PROTEIN IN MSB2-UGA1 INTERGENIC | | | |
| | | REGION | | | |
| 1254 | 57292728 (7061, 7062) | Novel Protein sim. GBank gi\|1723655\|sp\|P53217\|YG1I_YEAST - | | UNCLASSIFIED | 1003, 1004, 1020, 1022, |
| | | HYPOTHETICAL 33.3 KD PROTEIN IN VMA7-RPS31A INTERGENIC | | | 1024, 1031 |
| | | REGION | | | |
| 1255 | 80502396 (3345, 3346) | Novel Protein sim. GBank gi\|1723660\|sp\|P53223\|YG1P_YEAST - | | UNCLASSIFIED | 1002, 1004, 1007, 1010, |
| | | HYPOTHETICAL 27.6 KD PROTEIN IN RPL26B-ACB1 INTERGENIC | | | 1020, 1021, 1024, 1028 |
| | | REGION | | | |
| 1256 | 27929655 (2817, 2818) | Novel Protein sim. GBank gi\|1723691\|sp\|P53259\|YG2Q_YEAST - | | UNCLASSIFIED | 1003, 1004, 1020, 1022, |
| | | HYPOTHETICAL 38.8 KD PROTEIN IN MIC1-SRB5 INTERGENIC | | | 1051 |
| | | REGION | | | |
| 1257 | 10311849 (1137, 1138) | Novel Protein sim. GBank gi\|1723730\|sp\|P53297\|YG42_YEAST - | | UNCLASSIFIED | 1041 |
| | | HYPOTHETICAL 78.8 KD PROTEIN IN ATF2-RNR4 INTERGENIC | | | |
| | | REGION | | | |
| 1258 | 38908728 (1881, 1882) | Novel Protein sim. GBank gi\|1723762\|sp\|P53314\|YG59_YEAST - | | UNCLASSIFIED | 1001, 1002, 1024 |
| | | HYPOTHETICAL 26.7 KD PROTEIN IN TDS4-MGA1 INTERGENIC | | | |
| | | REGION | | | |
| 1259 | 57292866 (5525, 5526) | Novel Protein sim. GBank gi\|1723927\|sp\|P53117\|YGO6_YEAST - | | UNCLASSIFIED | 1004, 1020, 1022 |
| | | HYPOTHETICAL 34.7 KD PROTEIN IN RPL9A-TIP20 INTERGENIC | | | |
| | | REGION | | | |
| 1260 | 29225446 (4855, 4856) | Novel Protein sim. GBank gi\|1723969\|sp\|P53075\|YGX8_YEAST - | | UNCLASSIFIED | 1006 |
| | | HYPOTHETICAL 66.9 KD PROTEIN IN SAP4-OST5 INTERGENIC | | | |
| | | REGION | | | |
| 1261 | 27838107 (6437, 6438) | Novel Protein sim. GBank gi\|1723978\|sp\|P53066\|YGZ2_YEAST - | | UNCLASSIFIED | 1004 |
| | | HYPOTHETICAL 20.1 KD PROTEIN IN RTF1-CSE1 INTERGENIC | | | |
| | | REGION | | | |
| 1280 | 80505214 (8991, 8992) | Novel Protein sim. GBank gi\|1805408\|dbj\|BAA08970\| - (D50453) | | UNCLASSIFIED | 1010 |
| | | homologues to nitrile hydratase region 3′-hypothetical protein P47K of P. | | | |
| | | chlororaphis [Bacillus subtilis] | | | |
| 1281 | 82062248 (2803, 2804) | Novel Protein sim. GBank gi\|1841552 (U89336) - unknown [Homo | | UNCLASSIFIED | 1004, 1008, 1014, 1020, |
| | | sapiens] | | | 1022, 1026, 1031, 1036, |
| | | | | | 1041, 1050 |
| 1282 | 79582448 (7769, 7770) | Novel Protein sim. GBank gi\|1870009\|emb\|CAB06860\| - (Z92539) | | UNCLASSIFIED | 1022 |
| | | hypothetical protein Rv1019 [Mycobacterium tuberculosis] | | | |
| 1283 | 85800377 (7057, 7058) | Novel Protein sim. GBank gi\|1872200 (U22376) - alternatively spliced | | UNCLASSIFIED | 1023 |
| | | product using exon 13A [Homo sapiens] | | | |
| 1284 | 70287165 (8165, 8166) | Novel Protein sim. GBank gi\|1877309\|emb\|CAB07152\| - (Z92774) arsB2 | | UNCLASSIFIED | 1007 |
| | | [Mycobacterium tuberculosis] | | | |
| 1285 | 80503107 (2991, 2992) | Novel Protein sim. GBank gi\|1877310\|emb\|CAB07153\| - (Z92774) | | UNCLASSIFIED | 1004, 1006, 1010, 1031, |
| | | hypothetical protein Rv3579c [Mycobacterium tuberculosis] | | | 1041, 1051 |
| 1286 | 79574310 (5127, 5128) | Novel Protein sim. GBank gi\|1881338\|dbj\|BAA19365\| - (AB001488) | | UNCLASSIFIED | 1028 |
| | | PROBABLE INTEGRAL MEMBRANE PROTEIN, SIMILAR TO | | | |
| | | CHLORAMPHENICOL RESISTANCE PROTEIN OF STREPTOMYCES | | | |
| | | VENEZUELAE. [Bacillus subtilis] | | | |
| 1287 | 10329996 (7763, 7764) | Novel Protein sim. GBank gi\|1881338\|dbj\|BAA19365\| - (AB001488) | | UNCLASSIFIED | 1002 |
| | | PROBABLE INTEGRAL MEMBRANE PROTEIN, SIMILAR TO | | | |
| | | CHLORAMPHENICOL RESISTANCE PROTEIN OF STREPTOMYCES | | | |
| | | VENEZUELAE. [Bacillus subtilis] | | | |
| 1288 | 39384711 (8985, 8986) | Novel Protein sim. GBank gi\|1881738 (U89688) - myosin-I binding protein | | UNCLASSIFIED | 1003, 1010, 1031 |
| | | Acan125 [Acanthamoeba castellanil] | | | |
| 1289 | 95361506 (777, 778) | Novel Protein sim. GBank gi\|188864 (M74027) - mucin [Homo sapiens] | | UNCLASSIFIED | 1004, 1006, 1020, 1022, |
| | | | | | 1025, 1028, 1031, 1036, |
| | | | | | 1046, 1055 |
| 1290 | 79863655 (3087, 3088) | Novel Protein sim. GBank gi\|1890588\|emb\|CAB01936\| - (Z79692) ExpE3 | | UNCLASSIFIED | 1010 |
| | | [Sinorhizobium meliloti] | | | |
| 1291 | 10234146 (8001, 8002) | Novel Protein sim. GBank gi\|1929089\|emb\|CAB07817\| - (Z93777) | | UNCLASSIFIED | 1036 |
| | | hypothetical protein Rv1215c [Mycobacterium tuberculosis] | | | |
| 1292 | 16299709 (8525, 8526) | Novel Protein sim. GBank gi\|1934732 (U96128) - UDP-galactopyranose | | UNCLASSIFIED | 1022 |
| | | mutase [Mycobacterium tuberculosis] | | | |
| 1293 | 32338166 (5339, 5340) | Novel Protein sim. GBank gi\|1934826\|emb\|CAB07947\| - (Z93938) | | UNCLASSIFIED | 1026 |
| | | unknown [Bacillus subtilis] | | | |
| 1294 | 11615487 (6413, 6414) | Novel Protein sim. GBank gi\|2055394 (U87306) - transmembrane | | UNCLASSIFIED | 1022 |
| | | receptor UNC5H2 [Rattus norvegicus] | | | |
| 1295 | 20414023 (6547, 6548) | Novel Protein sim. GBank gi\|2072667\|emb\|CAB08319\| - (Z95120) | | UNCLASSIFIED | 1008 |
| | | hypothetical protein Rv3218 [Mycobacterium tuberculosis] | | | |
| 1296 | 80252586 (2699, 2700) | Novel Protein sim. GBank gi\|2072679\|emb\|CAB08310\| - (Z95120) moeZ | | UNCLASSIFIED | 1022, 1050 |
| | | [Mycobacterium tuberculosis] | | | |
| 1297 | 35009859 (3043, 3044) | Novel Protein sim. GBank gi\|2072958 (U93567) - putative p150 [Homo | | UNCLASSIFIED | 1035 |
| | | sapiens] | | | |
| 1298 | 10330910 (211, 212) | Novel Protein sim. GBank gi\|2072961 (U93568) - putative p150 [Homo | | UNCLASSIFIED | 1035 |
| | | sapiens] | | | |
| 1299 | 65674732 (8893, 8894) | Novel Protein sim. GBank gi\|2072967 (U93570) - putative p150 [Homo | | UNCLASSIFIED | 1014 |
| | | sapiens] | | | |
| 1300 | 29681887 (8987, 8988) | Novel Protein sim. GBank gi\|2072967 (U93570) - putative p150 [Homo | | UNCLASSIFIED | 1007 |
| | | sapiens] | | | |
| 1301 | 80028197 (4431, 4432) | Novel Protein sim. GBank gi\|2078483 (U43200) - antifreeze glycopeptide | | UNCLASSIFIED | 1004, 1007 |
| | | AFGP polyprotein precursor [Boreogadus saida] | | | |
| 1302 | 78462526 (8813, 8814) | Novel Protein sim. GBank gi\|2088669 (AF003130) - F55A12.9 gene | | UNCLASSIFIED | 1006 |
| | | product [Caenorhabditis elegans] | | | |
| 1303 | 13084790 (7357, 7358) | Novel Protein sim. GBank gi\|2094844\|emb\|CAB08571\| - (Z95324) fba | | UNCLASSIFIED | 1025 |
| | | [Mycobacterium tuberculosis] | | | |
| 1304 | 39517709 (787, 788) | Novel Protein sim. GBank gi\|2098748 (U94336) - oxidative stress | | UNCLASSIFIED | 1004 |
| | | transcriptional regulator, OxyR [Xanthomonas campestris] | | | |
| 1305 | 46661837 (3055, 3056) | Novel Protein sim. GBank gi\|2104600\|emb\|CAB08809\| - (Z95398) | | UNCLASSIFIED | 1037 |
| | | unknown [Mycobacterium leprae] | | | |
| 1306 | 14999136 (4983, 4984) | Novel Protein sim. GBank gi\|2105069\|emb\|CAB08823\| - (Z95436) mesJ | | UNCLASSIFIED | 1022 |
| | | [Mycobacterium tuberculosis] | | | |
| 1307 | 78749845 (1875, 1876) | Novel Protein sim. GBank gi\|2105134 (U64984) - unknown | | UNCLASSIFIED | 1024 |
| | | [Bacteriophage Mx8] | | | |
| 1308 | 27227955 (4661, 4662) | Novel Protein sim. GBank gi\|2114014\|emb\|CAB08963\| - (Z95558) | | UNCLASSIFIED | 1020 |
| | | hypothetical protein Rv0552 [Mycobacterium tuberculosis] | | | |
| 1309 | 32728669 (4135, 4136) | Novel Protein sim. GBank gi\|2114425 (U92466) - similar to Synechocystis | | UNCLASSIFIED | 1001 |
| | | sp. hypothetical protein, encoded by GenBank Accession Number | | | |
| | | D64006 [Bacillus subtilis] | | | |
| 1310 | 79457145 (1527, 1528) | Novel Protein sim. GBank gi\|2117195\|emb\|CAB09016\| - (Z95584) | | UNCLASSIFIED | 1028 |
| | | hypothetical protein Rv1157c [Mycobacterium tuberculosis] | | | |
| 1311 | 80428870 (4677, 4678) | Novel Protein sim. GBank gi\|2117275\|emb\|CAB09104\| - (Z95618) | | UNCLASSIFIED | 1008, 1020, 1021, 1024, |
| | | hypothetical protein Rv0807 [Mycobacterium tuberculosis] | | | 1031, 1035 |
| 1312 | 80019922 (4561, 4562) | Novel Protein sim. GBank gi\|2119159\|pir\|\|I50694 - alpha-1 collagen type | | UNCLASSIFIED | 1020 |
| | | III - chicken (fragment) | | | |
| 1313 | 66726833 (8117, 8118) | Novel Protein sim. GBank gi\|2127477\|pir\|\|JC5158 - cell division protein | | UNCLASSIFIED | 1007 |
| | | ftsX - Mycobacterium tuberculosis | | | |
| 1314 | 71773040 (281, 282) | Novel Protein sim. GBank gi\|2129099\|pir\|\|G64413 - magnesium-chelatase | | UNCLASSIFIED | 1024, 1026 |
| | | homolog - Methanococcus jannaschii | | | |
| 1315 | 30808488 (421, 422) | Novel Protein sim. GBank gi\|2129099\|pir\|\|G64413 - magnesium-chelatase | | UNCLASSIFIED | 1024 |
| | | homolog - Methanococcus jannaschii | | | |
| 1316 | 56513041 (4419, 4420) | Novel Protein sim. GBank gi\|2129478\|pir\|\|S51939 - chitinase (EC | | UNCLASSIFIED | 1008 |
| | | 3.2.1.14) precursor - beet | | | |
| 1317 | 16534688 (7675, 7676) | Novel Protein sim. GBank gi\|2129478\|pir\|\|S51939 - chitinase (EC | | UNCLASSIFIED | 1006 |
| | | 3.2.1.14) precursor - beet | | | |
| 1318 | 78735025 (6727, 6728) | Novel Protein sim. GBank gi\|2131321\|pir\|\|S67592 - hypothetical protein | | UNCLASSIFIED | 1015 |
| | | YDL057w - yeast (Saccharomyces cerevisiae) | | | |
| 1319 | 80230507 (7889, 7890) | Novel Protein sim. GBank gi\|2131351\|pir\|\|S61051 - hypothetical protein | | UNCLASSIFIED | 1001, 1003, 1004, 1006, |
| | | YDL162c - yeast (Saccharomyces cerevisiae) | | | 1015 |
| 1320 | 78786516 (3383, 3384) | Novel Protein sim. GBank gi\|2131456\|pir\|\|S61174 - hypothetical protein | | UNCLASSIFIED | 1020 |
| | | YDR379w - yeast (Saccharomyces cerevisiae) | | | |
| 1321 | 38863784 (2647, 2648) | Novel Protein sim. GBank gi\|2131833\|pir\|\|S69863 - hypothetical protein | | UNCLASSIFIED | 1020, 1021 |
| | | YMR031w-a - yeast (Saccharomyces cerevisiae) | | | |
| 1322 | 27963711 (8977, 8978) | Novel Protein sim. GBank gi\|2131997\|pir\|\|S66717 - hypothetical protein | | UNCLASSIFIED | 1008, 1020, 1028, 1031 |
| | | YOL034w - yeast (Saccharomyces cerevisiae) | | | |
| 1323 | 79110964 (7745, 7746) | Novel Protein sim. GBank gi\|2132008\|pir\|\|S66765 - hypothetical protein | | UNCLASSIFIED | 1014, 1041 |
| | | YOL072w - yeast (Saccharomyces cerevisiae) | | | |
| 1324 | 56148277 (3429, 3430) | Novel Protein sim. GBank gi\|2132066\|pir\|\|S60988 - hypothetical protein | | UNCLASSIFIED | 1002, 1004, 1008, 1015, |
| | | YOR134w - yeast (Saccharomyces cerevisiae) | | | 1020, 1031 |
| 1325 | 29347669 (8463, 8464) | Novel Protein sim. GBank gi\|2132143\|pir\|\|S67284 - hypothetical protein | | UNCLASSIFIED | 1020 |
| | | YOR372c - yeast (Saccharomyces cerevisiae) | | | |
| 1326 | 78726739 (8763, 8764) | Novel Protein sim. GBank gi\|2132164\|pir\|\|S62027 - hypothetical protein | | UNCLASSIFIED | 1006, 1020, 1024 |
| | | YPL049c - yeast (Saccharomyces cerevisiae) | | | |
| 1327 | 27354572 (8691, 8692) | Novel Protein sim. GBank gi\|2132245\|pir\|\|S61019 - hypothetical protein | | UNCLASSIFIED | 1007 |
| | | YPL245w - yeast (Saccharomyces cerevisiae) | | | |
| 1328 | 39434995 (7629, 7630) | Novel Protein sim. GBank gi\|2132312\|pir\|\|S59829 - hypothetical protein | | UNCLASSIFIED | 1004, 1008, 1020, 1022, |
| | | YPR171w - yeast (Saccharomyces cerevisiae) | | | 1025, 1035, 1041 |
| 1329 | 24114486 (587, 588) | Novel Protein sim. GBank gi\|2132393\|pir\|\|S64015 - pleiotropic drug | | UNCLASSIFIED | 1024 |
| | | resistance control protein PDR1 - yeast (Saccharomyces cerevisiae) | | | |
| 1330 | 78788035 (3725, 3726) | Novel Protein sim. GBank gi\|2132466\|pir\|\|S67803 - probable membrane | | UNCLASSIFIED | 1020 |
| | | protein YDL239c - yeast (Saccharomyces cerevisiae) | | | |
| 1331 | 39707435 (7093, 7094) | Novel Protein sim. GBank gi\|2132683\|pir\|\|S64851 - probable membrane | | UNCLASSIFIED | 1006 |
| | | protein YLR024c - yeast (Saccharomyces cerevisiae) | | | |
| 1332 | 80218401 (7901, 7902) | Novel Protein sim. GBank gi\|2132663\|pir\|\|S64851 - probable membrane | | UNCLASSIFIED | 1004, 1020, 1022 |
| | | protein YLR024c - yeast (Saccharomyces cerevisiae) | | | |
| 1333 | 71793849 (6481, 6482) | Novel Protein sim. GBank gi\|2132828\|pir\|\|S66714 - probable membrane | | UNCLASSIFIED | 1007 |
| | | protein YOL031c - yeast (Saccharomyces cerevisiae) | | | |
| 1334 | 80250262 (4717, 4718) | Novel Protein sim. GBank gi\|2132934\|pir\|\|S67175 - probable membrane | | UNCLASSIFIED | 1004 |
| | | protein YOR273c - yeast (Saccharomyces cerevisiae) | | | |
| 1335 | 27847010 (6575, 6576) | Novel Protein sim. GBank gi\|2132957\|pir\|\|S67290 - probable membrane | | UNCLASSIFIED | 1003, 1022, 1031 |
| | | protein YOR378w - yeast (Saccharomyces cerevisiae) | | | |
| 1336 | 39568617 (7661, 7662) | Novel Protein sim. GBank gi\|2133032\|pir\|\|S69034 - probable membrane | | UNCLASSIFIED | 1003, 1004 |
| | | protein YPR147c - yeast (Saccharomyces cerevisiae) | | | |
| 1337 | 78728781 (7257, 7258) | Novel Protein sim. GBank gi\|2133036\|pir\|\|S59823 - probable membrane | | UNCLASSIFIED | 1006 |
| | | protein YPR164w - yeast (Saccharomyces cerevisiae) | | | |
| 1338 | 80243781 (4587, 4588) | Novel Protein sim. GBank gi\|2135121\|pir\|\|A49674 - flightless-I homolog - | | UNCLASSIFIED | 1004 |
| | | human (fragment) | | | |
| 1339 | 79572341 (5883, 5884) | Novel Protein sim. GBank gi\|2135847\|pir\|\|I59234 - octamer binding | | UNCLASSIFIED | 1015 |
| | | transcription factor 1 - human | | | |
| 1340 | 79161087 (5527, 5528) | Novel Protein sim. GBank gi\|2137044\|pir\|\|I46884 - unknown protein - | | UNCLASSIFIED | 1003 |
| | | rabbit (fragment) | | | |
| 1341 | 17244419 (275, 276) | Novel Protein sim. GBank gi\|2143868\|pir\|\|I59402 - NAB1 - rat | | UNCLASSIFIED | 1015, 1022 |
| 1342 | 37804391 (723, 724) | Novel Protein sim. GBank gi\|2144012\|pir\|\|S70642 - ubiquitin ligase Nedd4 - | | UNCLASSIFIED | 1055 |
| | | rat (fragment) | | | |
| 1343 | 78381454 (4043, 4044) | Novel Protein sim. GBank gi\|2181972\|emb\|CAB09492\| - (Z96072) | | UNCLASSIFIED | 1024, 1026 |
| | | hypothetical protein Rv2681 [Mycobacterium tuberculosis] | | | |
| 1344 | 78675426 (7225, 7226) | Novel Protein sim. GBank gi\|218496\|dbj\|BAA02301\| - (D12917) a | | UNCLASSIFIED | 1015 |
| | | component of the pheromone signal transduction pathway | | | |
| | | [Saccharomyces cerevisiae] | | | |
| 1345 | 13085101 (4089, 4090) | Novel Protein sim. GBank gi\|2191127 (AF007269) - A_IG002N01.1 gene | | UNCLASSIFIED | 1022 |
| | | product [Arabidopsis thaliana) | | | |
| 1346 | 78490869 (7829, 7830) | Novel Protein sim. GBank gi\|2193870\|dbj\|BAA204191 - (D84391) reverse | | UNCLASSIFIED | 1027 |
| | | transcriptase [Mus musculus] | | | |
| 1347 | 20758023 (6551, 6552) | Novel Protein sim. GBank gi\|2193927\|emb\|CA809594\| - (Z96800) | | UNCLASSIFIED | 1020 |
| | | hypothetical protein Rv0306 [Mycobacterium tuberculosis] | | | |
| 1348 | 70287245 (1277, 1278) | Novel Protein sim. GBank gi\|2213518\|emb\|CAB09748\| - (Z97050) | | UNCLASSIFIED | 1007 |
| | | hypothetical protein Rv0181c [Mycobacterium tuberculosis] | | | |
| 1349 | 20474010 (5945, 5946) | Novel Protein sim. GBank gi\|2222715\|emb\|CAB09911\| - (Z97179) | | UNCLASSIFIED | 1008 |
| | | hypothetical protein MLCL383.37 [Mycobacterium leprae] | | | |
| 1350 | 46860900 (4549, 4550) | Novel Protein sim. GBank gi\|2224699\|dbj\|BAA20833\| - (AB002377) | | UNCLASSIFIED | 1051 |
| | | KIAA0379 [Homo sapiens] | | | |
| 1351 | 39731041 (5035, 5036) | Novel Protein sim. GBank gi\|2224832\|emb\|CAB10018\| - (Z97188) | | UNCLASSIFIED | 1024 |
| | | hypothetical protein Rv3813c [Mycobacterium tuberculosis] | | | |
| 1352 | 79464102 (7891, 7892) | Novel Protein sim. GBank gi\|2225947\|emb\|CAB10053\| - (Z97193) | | UNCLASSIFIED | 1025, 1026, 1041 |
| | | hypothetical protein Rv1913 [Mycobacterium tuberculosis] | | | |
| 1353 | 79427160 (625, 626) | Novel Protein sim. GBank gi\|2232045 (U97516) - rubisco operon | | UNCLASSIFIED | 1015 |
| | | transcriptional regulator [Synechococcus PCC7002] | | | |
| 1354 | 25251803 (5705, 5706) | Novel Protein sim. GBank gi\|2243022\|dbj\|BAA21086\| - (AB004855) | | UNCLASSIFIED | 1006, 1024 |
| | | inhibition of morphological differentiation [Streptomyces cyaneus] | | | |
| 1355 | 9678386 (4003, 4004) | Novel Protein sim. GBank gi\|2244683\|emb\|CAA69113\| - (Y07786) | | UNCLASSIFIED | 1041 |
| | | ORF43x9 [Vibrio cholerae] | | | |
| 1356 | 79844068 (951, 952) | Novel Protein sim. GBank gi\|225047\|prf\|\|1207289A - reverse | | UNCLASSIFIED | 1041 |
| | | transcriptase related protein [Homo sapiens] | | | |
| 1357 | 19755599 (7159, 7160) | Novel Protein sim. GBank gi\|2253054\|emb‥CAB10705\| - (Z97559) | | UNCLASSIFIED | 1001 |
| | | hypothetical protein Rv2114 [Mycobacterium tuberculosis] | | | |
| 1358 | 88094659 (4297, 4298) | Novel Protein sim. GBank gi\|2293165 (AF008220) - asparagine synthase | | UNCLASSIFIED | 1008 |
| | | [Bacillus subtilis] | | | |
| 1359 | 17903910 (3963, 3964) | Novel Protein sim. GBank gi\|2293566 (AF012896) - ADP-ribosylation | | UNCLASSIFIED | 1006, 1051 |
| | | factor 1 [Oryza sativa] | | | |
| 1360 | 13883880 (3325, 3326) | Novel Protein sim. GBank gi\|2314239\|gb\|AAD08134.1\| - (AE000615) H. | | UNCLASSIFIED | 1050 |
| | | pylori predicted coding region HP1083 [Helicobacter pylori 26695] | | | |
| 1361 | 85518681 (6517, 6518) | Novel Protein sim. GBank gi\|2314416\|gb\|AAD08296.1\| - (AE000630) | | UNCLASSIFIED | 1046 |
| | | oligopeptide ABC transporter, periplasmic oligopeptide-binding protein | | | |
| | | (oppA) [Helicobacter pylori 26695] | | | |
| 1362 | 3297187 (8955, 8956) | Novel Protein sim. GBank gi\|2314862\|gb\|AAD08525.1\| - (AE000647) | | UNCLASSIFIED | 1035, 1051 |
| | | conserved hypothetical protein [Helicobacter pylori 26695] | | | |
| 1363 | 81022707 (2111, 2112) | Novel Protein sim. GBank gi\|2314688\|gb\|AAD08549.1\| - (AE000649) | | UNCLASSIFIED | 1051 |
| | | conserved hypothetical ATP-binding protein [Helicobacter pylori 26695] | | | |
| 1364 | 66441044 (1705, 1706) | Novel Protein sim. GBank gi\|2317934 (U97553) - unknown [murine | | UNCLASSIFIED | 1002, 1020 |
| | | herpesvirus 68] | | | |
| 1365 | 29213316 (4671, 4672) | Novel Protein sim. GBank gi\|2318062 (AF012532) - YeeB [Bacillus | | UNCLASSIFIED | 1024 |
| | | subtilis] | | | |
| 1366 | 79612771 (8435, 8436) | Novel Protein sim. GBank gi\|2326752\|emb\|CAB10966\| - (Z98268) | | UNCLASSIFIED | 1002 |
| | | hypothetical protein Rv1709 [Mycobacteilum tuberculosis] | | | |
| 1367 | 80071779 (1045, 1046) | Novel Protein sim. GBank gi\|2326943\|emb\|CAA74576\| - (Y14163) fizzy- | | UNCLASSIFIED | 1020 |
| | | related protein [Xenopus laevis] | | | |
| 1368 | 37003586 (957, 958) | Novel Protein sim. GBank gi\|2337843\|emb\|CAB11337\| - (Z98604) | | UNCLASSIFIED | 1026 |
| | | hypothetical protein MLCB2052.39 [Mycobacterium leprae] | | | |
| 1369 | 79172972 (6663, 6664) | Novel Protein sim. GBank gi\|2342601\|emb\|CAA61605\| - (X89442) peptide | | UNCLASSIFIED | 1028 |
| | | synthetase [Metarhizium anisopliae] | | | |
| 1370 | 80062689 (5537, 5538) | Novel Protein sim. GBank gi\|2342612\|emb\|CAB11383\| - (Z98741) | | UNCLASSIFIED | 1008, 1031 |
| | | hypothetical protein MLCB22.18 [Mycobacterium leprae] | | | |
| 1371 | 17294715 (3659, 3660) | Novel Protein sim. GBank gi\|2351849 (U93357) - 40 kDa heat shock | | UNCLASSIFIED | 1036 |
| | | chaperone protein [Halobacterium cutirubrum] | | | |
| 1372 | 13085422 (5511, 5512) | Novel Protein sim. GBank gi\|238781\|bbs\|65093 - (S65091) cyclic AMp- | | UNCLASSIFIED | 1025 |
| | | regulated phosphoprotein, ARPP-21 [rats, Peptide, 88 aa] [Rattus sp.] | | | |
| 1373 | 78470366 (3669, 3670) | Novel Protein sim. GBank gi\|2435511 (AF024504) - contains similarity to | | UNCLASSIFIED | 1024 |
| | | prolyl 4-hydroxylase alpha subunit [Arabidopsis thaliana] | | | |
| 1374 | 80496730 (1323, 1324) | Novel Protein sim. GBank gi\|244239\|bbs\|78626 - (S78624) YCR592 | | UNCLASSIFIED | 1002, 1010, 1020, 1031, |
| | | [Saccharomyces cerevisiae=yeast, Peptide, 1226 aa] [Saccharomyces | | | 1041 |
| | | cerevisiae] | | | |
| 1375 | 9403089 (1085, 1086) | Novel Protein sim. GBank gi\|2459978 (AF010150) - PcrD [Pseudomonas | | UNCLASSIFIED | 1041 |
| | | aeruginosa] | | | |
| 1376 | 27240528 (6889, 6890) | Novel Protein sim. GBank gi\|2464905\|emb\|CAB16805.1\| - (Z99708) minor | | UNCLASSIFIED | 1041 |
| | | allergen [Arabidopsis thaliana] | | | |
| 1377 | 80483956 (1689, 1690) | Novel Protein sim. GBank gi\|2492588\|sp\|Q50734\|YOA4_MYCTU - | | UNCLASSIFIED | 1010 |
| | | HYPOTHETICAL ABC TRANSPORTER ATP-BINDING PROTEIN | | | |
| | | CY9C4.04C | | | |
| 1378 | 17947584 (2285, 2286) | Novel Protein sim. GBank gi\|2492885\|sp\|P77495\|PRPE_ECOLI - PRPE | | UNCLASSIFIED | 1001 |
| | | PROTEIN | | | |
| 1379 | 47652732 (5123, 5124) | Novel Protein sim. GBank gi\|2492983\|sp\|P94556\|MURI_BACSU - | | UNCLASSIFIED | 1026 |
| | | GLUTAMATE RACEMASE | | | |
| 1380 | 33204977 (7297, 7298) | Novel Protein sim. GBank gi\|2494548\|sp\|Q51463\|FLIF_PSEAE - | | UNCLASSIFIED | 1024 |
| | | FLAGELLAR M-RING PROTEIN | | | |
| 1381 | 20100736 (3053, 3054) | Novel Protein sim. GBank gi\|2495183\|sp\|Q51887\|HEMX_PROMI - | | UNCLASSIFIED | 1008 |
| | | PUTATIVE UROPORPHYRIN-III C-METHYLTRANSFERASE (UROGEN | | | |
| | | III METHYLASE) | | | |
| 1382 | 27804781 (1039, 1040) | Novel Protein sim. GBank gi\|2496226\|sp\|Q60283\|YZ24_METJA - | | UNCLASSIFIED | 1022 |
| | | HYPOTHETICAL PROTEIN MJECL24 | | | |
| 1383 | 11102283 (1157, 1158) | Novel Protein sim. GBank gi\|2496709\|sp\|P55564\|Y4ME_RHISN - | | UNCLASSIFIED | 1004 |
| | | HYPOTHETICAL 45.7 KD PROTEIN Y4ME | | | |
| 1384 | 87112445 (2521, 2522) | Novel Protein sim. GBank gi\|2497117\|sp\|Q03690\|IF31_YEAST - | | UNCLASSIFIED | 1020, 1035 |
| | | EUKARYOTIC TRANSLATION INITIATION FACTOR 3 ALPHA SUBUNIT | | | |
| | | (EIF-3 ALPHA) (EIF3 P135) (TRANSLATION INITIATION FACTOR EIF3, | | | |
| | | P135 SUBUNIT) | | | |
| 1385 | 65686809 (599, 600) | Novel Protein sim. GBank gi\|2497183\|sp\|Q04336\|YM54_YEAST - | | UNCLASSIFIED | 1000, 1008 |
| | | HYPOTHETICAL 126.6 KD PROTEIN IN RPL39-VTI1 INTERGENIC | | | |
| | | REGION | | | |
| 1386 | 27788025 (709, 710) | Novel Protein sim. GBank gi\|2497191\|sp\|Q03660\|YM66_YEAST - | | UNCLASSIFIED | 1022 |
| | | HYPOTHETICAL 128.1 KD PROTEIN IN GUA1-ERG8 INTERGENIC | | | |
| | | REGION | | | |
| 1387 | 80053984 (8333, 8334) | Novel Protein sim. GBank gi\|2497281\|sp\|P72689\|IF2_SYNY3 - | | UNCLASSIFIED | 1008 |
| | | TRANSLATION INITIATION FACTOR IF-2 | | | |
| 1388 | 80233293 (3655, 3656) | Novel Protein sim. GBank gi\|2498298\|sp\|Q12387\|DEC1_YEAST - DEC1 | | UNCLASSIFIED | 1006, 1007, 1008, 1015, |
| | | PROTEIN (MDM20 PROTEIN) | | | 1020, 1023 |
| 1389 | 28375903 (7607, 7608) | Novel Protein sim. GBank gi\|2498506\|sp\|Q12446\|LA17_YEAST - | | UNCLASSIFIED | 1041 |
| | | PROLINE-RICH PROTEIN LAS17 | | | |
| 1390 | 10063089 (3741, 3742) | Novel Protein sim. GBank gi\|2498598\|sp\|Q59650\|MURE_PSEAE - UDP- | | UNCLASSIFIED | 1015 |
| | | N-ACETYLMURAMOYLALANYL-D-GLUTAMATE-2.6- | | | |
| | | DIAMINOPIMELATE LIGASE (UDP-N-ACETYLMURAMYL-TRIPEPTIDE | | | |
| | | SYNTHETASE) | | | |
| 1391 | 66376623 (4325, 4326) | Novel Protein sim. GBank gi\|2500969\|sp\|Q50649\|SYD_MYCTU - | | UNCLASSIFIED | 1007 |
| | | ASPARTYL-TRNA SYNTHETASE (ASPARTATE-TRNA LIGASE) | | | |
| | | (ASPRS) | | | |
| 1392 | 80046707 (8683, 8684) | Novel Protein sim. GBank gi\|2500970\|sp\|Q51422\|SYD_PSEAE - | | UNCLASSIFIED | 1022 |
| | | ASPARTYL-TRNA SYNTHETASE (ASPARTATE-TRNA LIGASE) | | | |
| | | (ASPRS) | | | |
| 1393 | 80062922 (7659, 7660) | Novel Protein sim. GBank gi\|2501040\|sp\|O05814\|SYP_MYCTU - | | UNCLASSIFIED | 1020, 1022 |
| | | PROLYL-TRNA SYNTHETASE (PROLINE-TRNA LIGASE) (PRORS) | | | |
| 1394 | 80583862 (8649, 8650) | Novel Protein sim. GBank gi\|2501190\|sp\|Q41739\|TH42_MAIZE - | | UNCLASSIFIED | 1007, 1020, 1024, 1028, |
| | | THIAMINE BIOSYNTHETIC ENZYME 1-2 PRECURSOR | | | 1047, 1055 |
| 1395 | 79826267 (7283, 7284) | Novel Protein sim. GBank gi\|2501603\|sp\|Q08647\|YO43_YEAST - | | UNCLASSIFIED | 1041 |
| | | HYPOTHETICAL 77.0 KD PROTEIN IN HES1-SEC63 INTERGENIC | | | |
| | | REGION | | | |
| 1396 | 79406465 (8645, 8646) | Novel Protein sim. GBank gi\|2506592\|sp\|P45568\|DXR_ECOLI - 1-DEOXY | | UNCLASSIFIED | 1014, 1028 |
| | | D-XYLULOSE 5-PHOSPHATE REDUCTOISOMERASE (DXP | | | |
| | | REDUCTOISOMERASE) | | | |
| 1397 | 39550271 (2023, 2024) | Novel Protein sim. GBank gi\|2507103\|sp\|P43670\|PQIA_ECOLI | | UNCLASSIFIED | 1036 |
| | | PARAQUAT-INDUCIBLE PROTEIN A | | | |
| 1398 | 78463315 (2237, 2238) | Novel Protein sim. GBank gi\|2507510\|sp\|P39173\|UP08_ECOLI - | | UNCLASSIFIED | 1006 |
| | | UNKNOWN PROTEIN FROM 2D-PAGE (SPOTS T26/PR37) | | | |
| 1399 | 36622848 (1071, 1072) | Novel Protein sim. GBank gi\|2507513\|sp\|P53088\|YGW1_YEAST - | | UNCLASSIFIED | 1031 |
| | | HYPOTHETICAL 35.5 KD PROTEIN IN VAM7-YPT32 INTERGENIC | | | |
| | | REGION | | | |
| 1400 | 71088713 (8831, 8832) | Novel Protein sim. GBank gi\|2578381\|emb\|CAA15466\| - (AL008609) | | UNCLASSIFIED | 1050 |
| | | hypothetical protein MLCB1788.34c [Mycobacterium leprae] | | | |
| 1401 | 77588758 (5547, 5548) | Novel Protein sim. GBank gi\|2582422\|gb\|AAB82564.1\| - (AF026067) | | UNCLASSIFIED | 1046 |
| | | FMNH2-dependent methanesulfonate sulfonatase [Pseudomonas | | | |
| | | aeruginosa] | | | |
| 1402 | 10146972 (8081, 8082) | Novel Protein sim. GBank gi\|2589196 (AF008553) - Glu-tRNAGln | | UNCLASSIFIED | 1051 |
| | | amidotransferase subunit B [Bacillus subtilis] | | | |
| 1403 | 79264251 (4757, 4758) | Novel Protein sim. GBank gi\|2598593\|emb\|CAA75591\| - (Y15369) MtNI2 | | UNCLASSIFIED | 1022 |
| | | [Medicago truncatula] | | | |
| 1404 | 80081087 (1937, 1938) | Novel Protein sim. GBank gi\|2612821\|emb\|CAA04438\| - (AJ000978) | | UNCLASSIFIED | 1031, 1041 |
| | | cis/trans isomerase [Pseudomonas putida] | | | |
| 1405 | 85518697 (2667, 2668) | Novel Protein sim. GBank gi\|2619029 (AF027868) - YoaR [Bacillus | | UNCLASSIFIED | 1046 |
| | | subtilis] | | | |
| 1406 | 20736837 (8453, 8454) | Novel Protein sim. GBank gi\|2623258 (AF030941) - putative secreted | | UNCLASSIFIED | 1020 |
| | | protein [Neisseria meningitidis] | | | |
| 1407 | 11077011 (999, 1000) | Novel Protein sim. GBank gi\|2632098\|emb\|CAA75667\| - (Y15513) Prodos | | UNCLASSIFIED | 1020 |
| | | protein [Drosophila melanogaster] | | | |
| 1408 | 9860215 (6187, 6188) | Novel Protein sim. GBank gi\|2635771\|emb\|CAB15264\| - (Z99120) similar | | UNCLASSIFIED | 1006 |
| | | to ABC transporter (ATP-binding protein) [Bacillus subtilis] | | | |
| 1409 | 9742433 (8019, 8020) | Novel Protein sim. GBank gi\|2645674 (AF031955) - krupple-related zinc | | UNCLASSIFIED | 1036 |
| | | finger protein [Mus musculus] | | | |
| 1410 | 20729461 (2545, 2546) | Novel Protein sim. GBank gi\|2648206 (AE000944) - maoC protein (maoC) | | UNCLASSIFIED | 1004 |
| | | [Archaeoglobus fulgidus] | | | |
| 1411 | 27977651 (7001, 7002) | Novel Protein sim. GBank gi\|2649977 (AE001060) - conserved | | UNCLASSIFIED | 1004 |
| | | hypothetical protein [Archaeoglobus fulgidus] | | | |
| 1412 | 65898533 (3967, 3968) | Novel Protein sim. GBank gi\|2661679\|emb\|CAA15784\| - (AL009199) | | UNCLASSIFIED | 1014 |
| | | probable transmembrane transport protein [Streptomyces coelicolor] | | | |
| 1413 | 79110032 (843, 844) | Novel Protein sim. GBank gi\|2661689\|emb\|CAA15793\| - (AL009204) DNA | | UNCLASSIFIED | 1008, 1041 |
| | | gyrase-like protein [Streptomyces coelicolor] | | | |
| 1414 | 65668313 (6823, 6824) | Novel Protein sim. GBank gi\|2661697\|emb\|CAA15801\| - (AL009204) | | UNCLASSIFIED | 1014 |
| | | hypothetical protein SC9B10.11 [Streptomyces coelicolor] | | | |
| 1415 | 79574554 (8397, 8398) | Novel Protein sim. GBank gi\|2661708\|emb\|CAA15812\| - (AL009204) | | UNCLASSIFIED | 1028 |
| | | hypothetical protein SC9B10.22c [Streptomyces coelicolor] | | | |
| 1416 | 78386939 (3995, 3998) | Novel Protein sim. GBank gi\|2661711\|emb\|CAA15815\| - (AL00920.4) | | UNCLASSIFIED | 1006 |
| | | hypothetical protein SC9B10.25c [Streptomyces coelicolor] | | | |
| 1417 | 27354547 (3889, 3870) | Novel Protein sim. GBank gi\|2673908 (AC002561) - hypothetical protein | | UNCLASSIFIED | 1024 |
| | | [Arabidopsis thaliana] | | | |
| 1418 | 17931585 (217, 218) | Novel Protein sim. GBank gi\|2723362 (AF023459) - lustrin A [Hallotis | | UNCLASSIFIED | 1002 |
| | | rufescens] | | | |
| 1419 | 78763436 (3677, 3678) | Novel Protein sim. GBank gi\|2760121\|dbj\|BAA24179\| - (AB002405) LAK- | | UNCLASSIFIED | 1015, 1020 |
| | | 4p [Homo sapiens] | | | |
| 1420 | 38069985 (5501, 5502) | Novel Protein sim. GBank gi\|2791626\|emb\|CAA16113.1\| - (AL021287) | | UNCLASSIFIED | 1014 |
| | | fixB [Mycobacterium tuberculosis] | | | |
| 1421 | 20753533 (4749, 4750) | Novel Protein sim. GBank gi\|2791647\|emb\|CAA16134.1\| - (AL021287) | | UNCLASSIFIED | 1003 |
| | | hypothetical protein Rv3049c [Mycobacterium tuberculosis] | | | |
| 1422 | 11090532 (6973, 6974) | Novel Protein sim. GBank gi\|2811058\|sp\|O07931\|YRAM_BACSU - | | UNCLASSIFIED | 1004 |
| | | HYPOTHETICAL 39.5 KD PROTEIN IN SIGZ-CSN INTERGENIC | | | |
| | | REGION | | | |
| 1423 | 17299877 (3883, 3884) | Novel Protein sim. GBank gi\|2828673\|gb\|AAC00183.1\| - (AF038816) | | UNCLASSIFIED | 1036 |
| | | WbbK [Serratia marcescens] | | | |
| 1424 | 11615829 (1935, 1936) | Novel Protein sim. GBank gi\|283032\|pir\|\|S22456 - hydroxyproline-rich | | UNCLASSIFIED | 1014 |
| | | glycoprotein - perennial teosinte | | | |
| 1425 | 27368323 (2157, 2158) | Novel Protein sim. GBank gi\|2833204\|sp\|Q06063\|YL05_YEAST - | | UNCLASSIFIED | 1015, 1021 |
| | | HYPOTHETICAL 41.7 KD PROTEIN IN SFP1-CTR3 INTERGENIC | | | |
| | | REGION | | | |
| 1426 | 27981996 (7329, 7330) | Novel Protein sim. GBank gi\|2851439\|sp\|P27851\|UBIE_ECOLI - | | UNCLASSIFIED | 1004 |
| | | UBIQUINONE/MENAQUINONE BIOSYNTHESIS | | | |
| | | METHLYTRANSFERASE UBIE | | | |
| 1427 | 10371060 (7665, 7666) | Novel Protein sim. GBank gi\|2851589\|sp\|P42616\|YQJC_ECOLI - | | UNCLASSIFIED | 1055 |
| | | HYPOTHETICAL 14.5 KD PROTEIN IN EXUR-TDCC INTERGENIC | | | |
| | | REGION PRECURSOR | | | |
| 1428 | 79810756 (5713, 5714) | Novel Protein sim. GBank gi\|2853603 (AF031898) - MotB [Pseudomonas | | UNCLASSIFIED | 1002 |
| | | putida] | | | |
| 1429 | 80085671 (5087, 5088) | Novel Protein sim. GBank gi\|2887423\|dbj\|BAA24854\| - (AB007884) | | UNCLASSIFIED | 1051 |
| | | KIAA0424 [Homo sapiens] | | | |
| 1430 | 35106788 (1635, 1636) | Novel Protein sim. GBank gi\|2894186\|emb\|CAA11792.1\| - (AJ223999) | | UNCLASSIFIED | 1024 |
| | | PCZA363.1 [Amycolatopsis orientalis] | | | |
| 1431 | 80496412 (4949, 4950) | Novel Protein sim. GBank gi\|2894206\|emb\|CAA17072\| - (AL021840) | | UNCLASSIFIED | 1010 |
| | | hypothetical protein Rv3258c [Mycobacterium tuberculosis] | | | |
| 1432 | 17942491 (3519, 3520) | Novel Protein sim. GBank gi\|2895756 (AF045160) - hypoxia-inducible | | UNCLASSIFIED | 1022 |
| | | factor 1 alpha related factor [Mus musculus] | | | |
| 1433 | 80504037 (8703, 8704) | Novel Protein sim. GBank gi\|2896688\|emb\|CAA17167.1\| - (AL021897) | | UNCLASSIFIED | 1010 |
| | | hypothetical protein Rv1051c [Mycobacterium tuberculosis] | | | |
| 1434 | 79574675 (6943, 6944) | Novel Protein sim. GBank gi\|2909479\|emb\|CAA17365\| - (AL021930) | | UNCLASSIFIED | 1028 |
| | | hypothetical protein Rv0290 [Mycobacterium tuberculosis] | | | |
| 1435 | 80200576 (6013, 6014) | Novel Protein sim. GBank gi\|2911274 (U20329) - spidroin 1 [Nephila | | UNCLASSIFIED | 1001, 1031, 1035 |
| | | clavipes] | | | |
| 1436 | 37402674 (141, 142) | Novel Protein sim. GBank gi\|2911858 (AF047659) - No definition line | | UNCLASSIFIED | 1020 |
| | | found [Caenorhabditis elegans] | | | |
| 1437 | 25260874 (1769, 1770) | Novel Protein sim. GBank gi\|2916883\|emb\|CAA17631.1\| - (AL022004) | | UNCLASSIFIED | 1024 |
| | | hypothetical protein Rv0825c [Mycobacterium tuberculosis] | | | |
| 1438 | 9846771 (2205, 2206) | Novel Protein sim. GBank gi\|2921304 (AF033496) - herbicide safener | | UNCLASSIFIED | 1021 |
| | | binding protein [Zea mays] | | | |
| 1439 | 13076513(1409, 1410) | Novel Protein sim. GBank gi\|2960090\|emb\|CAA17988.1\| - (AL022121) | | UNCLASSIFIED | 1022 |
| | | dppA [Mycobacterium tuberculosis] | | | |
| 1440 | 65486872 (4407, 4408) | Novel Protein sim. GBank gi\|2960108\|emb\|CAA18006.1\| - (AL022121) | | UNCLASSIFIED | 1021 |
| | | hypothetical protein Rv3684 [Mycobacterium tuberculosis] | | | |
| 1441 | 10858270 (5325, 5326) | Novel Protein sim. GBank gi\|2960127\|emb\|CAA18025.1\| - (AL022121) | | UNCLASSIFIED | 1028 |
| | | hypothetical protein Rv3703c [Mycobacterium tuberculosis] | | | |
| 1442 | 16495698 (2777, 2778) | Novel Protein sim. GBank gi\|2961293\|emb\|CAA12353\| - (AJ225023) | | UNCLASSIFIED | 1006 |
| | | RagC [Bradyrhizobium japonicum] | | | |
| 1443 | 27848380 (1733, 1734) | Novel Protein sim. GBank gi\|2970646 (AF051945) - Xin [Mus musculus] | | UNCLASSIFIED | 1003 |
| 1444 | 10284821 (4781, 4782) | Novel Protein sim. GBank gi\|2970646 (AF051945) - Xin [Mus musculus] | | UNCLASSIFIED | 1001 |
| 1445 | 86380205 (6115, 6116) | Novel Protein sim. GBank gi\|2978255\|dbj\|BAA25190\| - (AB007407) | | UNCLASSIFIED | 1050 |
| | | myeloid zinc finger protein-2 [Mus musculus] | | | |
| 1446 | 80232365 (4711, 4712) | Novel Protein sim. GBank gi\|2978511 (AF006988) - septin [Homo | | UNCLASSIFIED | 1050 |
| | | sapiens] | | | |
| 1447 | 30783668 (7729, 7730) | Novel Protein sim. GBank gi\|2981043 (AF051690) - iron-uptake factor | | UNCLASSIFIED | 1002 |
| | | [Pseudomonas aeruginosa] | | | |
| 1448 | 30499026 (885, 886) | Novel Protein sim. GBank gi\|2981631\|dbj\|BAA25253.1\| - (AB012223) | | UNCLASSIFIED | 1006 |
| | | ORF2 [Canis familiaris] | | | |
| 1449 | 17957450 (8045, 8046) | Novel Protein sim. GBank gi\|2981631\|dbj\|BAA25253.1\| - (AB012223) | | UNCLASSIFIED | 1002 |
| | | ORF2 [Canis familiaris] | | | |
| 1450 | 20292199 (4327, 4328) | Novel Protein sim. GBank gi\|2982903 (AE000677) - glycerol-3-phosphate | | UNCLASSIFIED | 1031 |
| | | cytidyltransferase [Aquifex aeolicus] | | | |
| 1451 | 79562520 (2689, 2690) | Novel Protein sim. GBank gi\|2982968 (AE000681) - RNA | | UNCLASSIFIED | 1021 |
| | | methyltransferase (TrmA-family) [Aqulfex aeolicus] | | | |
| 1452 | 65472169 (4633, 4634) | Novel Protein sim. GBank gi\|2983901 (AE000744) - putative protein | | UNCLASSIFIED | 1046 |
| | | [Aquifex aeolicus] | | | |
| 1453 | 25263548 (3419, 3420) | Novel Protein sim. GBank gi\|2995352\|emb\|CAA04606.1\| - (AJ001206) | | UNCLASSIFIED | 1024 |
| | | pep1 [Streptomyces coelicolor] | | | |
| 1454 | 94238497 (4119, 4120) | Novel Protein sim. GBank gi\|2995645 (AF051092) - restriction | | UNCLASSIFIED | 1008 |
| | | endonuclease R.Xbal [Xanthomonas campestris] | | | |
| 1455 | 56511449 (5681, 5682) | Novel Protein sim. GBank gi\|3002588 (AF030131) - Plenty of SH3s; | | UNCLASSIFIED | 1046 |
| | | POSH [Mus musculus] | | | |
| 1456 | 19882009 (8979, 8980) | Novel Protein sim. GBank gi\|3024402\|sp\|P77349\|PHOL_ECOLI - PHOH- | | UNCLASSIFIED | 1031 |
| | | LIKE PROTEIN | | | |
| 1457 | 86475949 (6909, 6910) | Novel Protein sim. GBank gi\|3025003\|sp\|P75770\|YBHN_ECOLI - | | UNCLASSIFIED | 1026 |
| | | HYPOTHETICAL 35.9 KD PROTEIN IN MOAE-RHLE INTERGENIC | | | |
| | | REGION | | | |
| 1458 | 20457025 (1665, 1666) | Novel Protein sim. GBank gi\|3025051\|sp\|P75870\|YCCS_ECOLI - | | UNCLASSIFIED | 1008 |
| | | HYPOTHETICAL 82.0 KD PROTEIN IN SULA-HELD INTERGENIC | | | |
| | | REGION | | | |
| 1459 | 20456994 (6747, 6748) | Novel Protein sim. GBank gi\|3025051\|sp\|P75870\|YCCS_ECOLI - | | UNCLASSIFIED | 1008 |
| | | HYPOTHETICAL 82.0 KD PROTEIN IN SULA-HELD INTERGENIC | | | |
| | | REGION | | | |
| 1460 | 11695106 (8933, 8934) | Novel Protein sim. GBank gi\|3025274\|sp\|P77751\|YPHA_ECOLI - | | UNCLASSIFIED | 1004 |
| | | HYPOTHETICAL 17.9 KD PROTEIN IN CSIE-GLYA INTERGENIC | | | |
| | | REGION | | | |
| 1461 | 80232553 (3517, 3518) | Novel Protein sim. GBank gi\|3025276\|sp\|Q02981\|YP09_YEAST - | | UNCLASSIFIED | 1003, 1004, 1008, 1015, |
| | | HYPOTHETICAL 62.8 KD PROTEIN IN SSE1-CAR1 INTERGENIC | | | 1020, 1026, 1031, 1035, |
| | | REGION | | | 1041 |
| 1462 | 5647321 (5109, 5110) | Novel Protein sim. GBank gi\|3043744\|dbj\|BAA25536\| - (AB011182) | | UNCLASSIFIED | 1055 |
| | | KIAA0610 protein [Homo sapiens] | | | |
| 1463 | 24120704 (8349, 8350) | Novel Protein sim. GBank gi\|3063449 (AC003981) - F22O13.11 | | UNCLASSIFIED | 1007 |
| | | [Arabidopsis thaliana] | | | |
| 1464 | 20416329 (6795, 6796) | Novel Protein sim. GBank gi\|3080499\|emb\|CAA18696\| - (AL022602) | | UNCLASSIFIED | 1003 |
| | | putative long chain fatty acid-coA ligase [Mycobacterium leprae] | | | |
| 1465 | 80067054 (4755, 4756) | Novel Protein sim. GBank gi\|311121 (L03536) - PRP18 [Saccharomyces | | UNCLASSIFIED | 1002, 1003, 1006, 1007, |
| | | cerevisiae] | | | 1015, 1020, 1024, 1036, |
| | | | | | 1041 |
| 1466 | 27212702 (5063, 5064) | Novel Protein sim. GBank gi\|3122415\|sp\|Q55469\|MURE_SYNY3 - UDP-N | | UNCLASSIFIED | 1007 |
| | | ACETYLMURAMOYLALANYL-D-GLUTAMATE - | | | |
| | | 2,6-DIAMINOPIMELATE | | | |
| | | LIGASE (UDP-N-ACETYLMURAMYL-TRIPEPTIDE SYNTHETASE) | | | |
| 1467 | 65494202 (3285, 3286) | Novel Protein sim. GBank gi\|3122837\|sp\|O05885\|SEA1_MYCTU - | | UNCLASSIFIED | 1021, 1051 |
| | | PREPROTEIN TRANSLOCASE SECA 1 SUBUNIT | | | |
| 1468 | 20446721 (6271, 6272) | Novel Protein sim. GBank gi\|3122843\|sp\|O32922\|SECA_MYCLE - | | UNCLASSIFIED | 1022 |
| | | PREPROTEIN TRANSLOCASE SECA SUBUNIT | | | |
| 1469 | 82125782 (5445, 5446) | Novel Protein sim. GBank gi\|3122849\|sp\|P95759\|SECA_STRGR - | | UNCLASSIFIED | 1008, 1010, 1014, 1022 |
| | | PREPROTEIN TRANSLOCASE SECA SUBUNIT | | | |
| 1470 | 80439990 (3093, 3094) | Novel Protein sim. GBank gi\|3122893\|sp\|P94985\|SYFB_MYCTU - | | UNCLASSIFIED | 1015, 1035, 1041 |
| | | PHENYLALANYL-TRNA SYNTHETASE | | | |
| | | BETA CHAIN (PHENYLALANINE- | | | |
| | | TRNA LIGASE BETA CHAIN) (PHERS) | | | |
| 1471 | 39587457 (969, 970) | Novel Protein sim. GBank gi\|3122932\|sp\|O32053\|TGT_BACSU - | | UNCLASSIFIED | 1020 |
| | | QUEUINE TRNA-RIBOSYLTRANSFERASE (TRNA-GUANINE | | | |
| | | TRANSGLYCOSYLASE) (GUANINE INSERTION ENZYME) | | | |
| 1472 | 19893858 (6581, 6582) | Novel Protein sim. GBank gi\|3122996\|sp\|O10685\|VGLG_BRSV2 - | | UNCLASSIFIED | 1001 |
| | | MAJOR SURFACE GLYCOPROTEIN G (ATTACHMENT | | | |
| | | GLYCOPROTEIN G) | | | |
| 1473 | 66259118 (4425, 4426) | Novel Protein sim. GBank gi\|3127080 (AF061070) - PtxD [Pseudomonas | | UNCLASSIFIED | 1008 |
| | | stutzeri] | | | |
| 1474 | 20369568 (8317, 8318) | Novel Protein sim. GBank gi\|3128359 (AF010496) - ribose transport ATP- | | UNCLASSIFIED | 1003 |
| | | binding protein [Rhodobacter capsulatus] | | | |
| 1475 | 20711026 (7895, 7896) | Novel Protein sim. GBank gi\|3128364 (AF010496) - potential 30S | | UNCLASSIFIED | 1004, 1006 |
| | | ribosomal protein S6 [Rhodobacter capsulatus] | | | |
| 1476 | 20466820 (503, 504) | Novel Protein sim. GBank gi\|3157463\|dbj\|BAA28360\| - (D85027) integral | | UNCLASSIFIED | 1008 |
| | | membrane protein [Thermus sp. A4] | | | |
| 1477 | 94143338 (1423, 1424) | Novel Protein sim. GBank gi\|3170548\|gb\|AAC34395.1\| - (AF056116) | | UNCLASSIFIED | 1002 |
| | | unknown [Fugu rubripes] | | | |
| 1478 | 30166162 (4803, 4804) | Novel Protein sim. GBank gi\|3170548\|gb\|AAC34395.1\| - (AF056116) | | UNCLASSIFIED | 1047 |
| | | unknown [Fugu rubripes] | | | |
| 1479 | 79105657 (2979, 2980) | Novel Protein sim. GBank gi\|3183274\|sp\|O13725\|YDO5_SCHPO - | | UNCLASSIFIED | 1036 |
| | | HYPOTHETICAL 26.5 KD PROTEIN C15A10.05C IN CHROMOSOME I | | | |
| 1480 | 21637936 (5685, 5686) | Novel Protein sim. GBank gi\|3183977\|emb\|CAA39515\| - (X56044) protein | | UNCLASSIFIED | 1031 |
| | | Htf9C [Mus musculus] | | | |
| 1481 | 13521386 (491, 492) | Novel Protein sim. GBank gi\|3192726 (AF064539) - gp41 [Bacteriophage | | UNCLASSIFIED | 1022 |
| | | N15] | | | |
| 1482 | 37013703 (3735, 3736) | Novel Protein sim. GBank gi\|3212854 (AC004005) - unknown protein | | UNCLASSIFIED | 1026 |
| | | [Arabidopsis thaliana] | | | |
| 1483 | 79824579 (3961, 3962) | Novel Protein sim. GBank gi\|321861\|pir\|\|A45313 - putrescine transport | | UNCLASSIFIED | 1041 |
| | | protein potF - Escherichia coli | | | |
| 1484 | 78375747 (3803, 3804) | Novel Protein sim. GBank gi\|3219913\|sp\|O14346\|YB3G_SCHPO - | | UNCLASSIFIED | 1041 |
| | | HYPOTHETICAL PROTEIN C2F12.16 IN CHROMOSOME II | | | |
| 1485 | 66052048 (5579, 5580) | Novel Protein sim. GBank gi\|3219995\|sp\|P37773\|MPL_ECOLI - UDP-N- | | UNCLASSIFIED | 1031, 1046 |
| | | ACETYLMURAMATE: L-ALANYL-GAMMA-D-GLUTAMYL-MESO- | | | |
| | | DIAMINOPIMELATE LIGASE | | | |
| 1486 | 25251251 (2669, 2670) | Novel Protein sim. GBank gi\|3241940 (AC004625) - unknown protein | | UNCLASSIFIED | 1021 |
| | | [Arabidopsis thaliana] | | | |
| 1487 | 13069230 (4851, 4852) | Novel Protein sim. GBank gi\|3242273\|emb\|CAB07017\| - (Z92669) | | UNCLASSIFIED | 1022 |
| | | hypothetical protein Rv0236c [Mycobacterium tuberculosis] | | | |
| 1488 | 79319174 (1081, 1082) | Novel Protein sim. GBank gi\|3242290\|emb\|CAA17283\| - (AL021922) | | UNCLASSIFIED | 1004, 1022 |
| | | cobN [Mycobacterium tuberculosis] | | | |
| 1489 | 25310369 (279, 280) | Novel Protein sim. GBank gi\|3253199 (AF029714) - PhaC [Pseudomonas | | UNCLASSIFIED | 1007 |
| | | putida] | | | |
| 1490 | 80503659 (7965, 7966) | Novel Protein sim. GBank gi\|3261502\|emb\|CAA16010\| - (AL021184) | | UNCLASSIFIED | 1010 |
| | | hypothetical protein Rv1480 [Mycobacterium tuberculosis] | | | |
| 1491 | 20466305 (8043, 8044) | Novel Protein sim. GBank gi\|3261721\|emb\|CAB07057\| - (Z92770) | | UNCLASSIFIED | 1008 |
| | | hypothetical protein Rv0153c [Mycobacterium tuberculosis] | | | |
| 1492 | 81830943 (4045, 4046) | Novel Protein sim. GBank gi\|3261746\|emb\|CAB08449\| - (Z95207) nusA | | UNCLASSIFIED | 1051 |
| | | [Mycobacterium tuberculosis] | | | |
| 1493 | 8018637 (4631, 4632) | Novel Protein sim. GBank gi\|3261799\|emb\|CAB09571\| - (Z96796) | | UNCLASSIFIED | 1031 |
| | | hypothetical protein Rv0457c [Mycobacterium tuberculosis] | | | |
| 1494 | 86477555 (2207, 2208) | Novel Protein sim. GBank gi\|3293539 (AF072709) - unknown | | UNCLASSIFIED | 1026 |
| | | [Streptomyces lividans] | | | |
| 1495 | 10179672 (6245, 6246) | Novel Protein sim. GBank gi\|3319741\|emb\|CAA19907\| - (AL031035) | | UNCLASSIFIED | 1003, 1014 |
| | | hypothetical protein SC6A9.22c [Streptomyces coelicolor] | | | |
| 1496 | 28828128 (3695, 3696) | Novel Protein sim. GBank gi\|3327262\|dbj\|BAA31695\| - (AB010827) NhaP | | UNCLASSIFIED | 1006 |
| | | [Pseudomonas aeruginosa] | | | |
| 1497 | 87537695 (4107, 4108) | Novel Protein sim. GBank gi\|3328190 (AF074266) - proto-oncogene AF4 | | UNCLASSIFIED | 1002 |
| | | [Mus musculus] | | | |
| 1498 | 78513148 (3401, 3402) | Novel Protein sim. GBank gi\|3328774 (AE001308) - Polypeptide | | UNCLASSIFIED | 1014 |
| | | Deformylase [Chlamydia trachomatis] | | | |
| 1499 | 79619697 (6505, 6506) | Novel Protein sim. GBank gi\|3334801\|emb\|CAA19949\| - (AL031107) | | UNCLASSIFIED | 1003 |
| | | putative glucosidase [Streptomyces coelicolor] | | | |
| 1500 | 80423734 (3315, 3316) | Novel Protein sim. GBank gi\|3341622\|emb\|CAA13155\| - (AJ231113) z54f | | UNCLASSIFIED | 1023 |
| | | [Vibrio cholerae] | | | |
| 1501 | 11083988 (7457, 7458) | Novel Protein sim. GBank gi\|3342713 (U22894) - alpha glucosidase | | UNCLASSIFIED | 1022 |
| | | [Streptomyces lividans] | | | |
| 1502 | 16332226 (155, 156) | Novel Protein sim. GBank gi\|3367754\|emb\|CAA20079\| - (AL031155) | | UNCLASSIFIED | 1001, 1003, 1014 |
| | | hypothetical protein SC3A7.16c [Streptomyces coelicolor] | | | |
| 1503 | 79554871 (7667, 7668) | Novel Protein sim. GBank gi\|3367754\|emb\|CAA20079\| - (AL031155) | | UNCLASSIFIED | 1001 |
| | | hypothetical protein SC3A7.16c [Streptomyces coelicolor] | | | |
| 1504 | 80499745 (8901, 8902) | Novel Protein sim. GBank gi\|3367754\|emb\|CAA20079\| - (AL031155) | | UNCLASSIFIED | 1003, 1004, 1010, 1014, |
| | | hypothetical protein SC3A7.16c [Streptomyces coelicolor] | | | 1035, 1041 |
| 1505 | 13022760 (7205, 7206) | Novel Protein sim. GBank gi\|3378298 (AF079317) - putative plasmid | | UNCLASSIFIED | 1022 |
| | | stabilization protein [Sphingomonas aromaticivorans] | | | |
| 1506 | 66376628 (4491, 4492) | Novel Protein sim. GBank gi\|3378429 (AF079317) - unknown | | UNCLASSIFIED | 1007 |
| | | [Sphingomonas aromaticivorans] | | | |
| 1507 | 20182451 (6715, 6716) | Novel Protein sim. GBank gi\|3413827\|emb\|CAA20295\| - (AL031260) | | UNCLASSIFIED | 1008 |
| | | putative dihydrodipicolinate synthase [Streptomyces coelicolor] | | | |
| 1508 | 10109035 (3729, 3730) | Novel Protein sim. GBank gi\|3414871 (AF071034) - CP4-like integrase | | UNCLASSIFIED | 1015 |
| | | [Escherichia coli] | | | |
| 1509 | 71232053 (7105, 7106) | Novel Protein sim. GBank gi\|3414930 (AF076599) - FutA [Dictyostelium | | UNCLASSIFIED | 1039, 1047, 1051 |
| | | discoideum] | | | |
| 1510 | 11618046 (4361, 4362) | Novel Protein sim. GBank gi\|3450883 (AF083334) - fibroin [Antheraea | | UNCLASSIFIED | 1003 |
| | | pernyi] | | | |
| 1511 | 37021934 (8807, 8808) | Novel Protein sim. GBank gi\|3482914 (AC003970) - Similar to nodulins | | UNCLASSIFIED | 1023 |
| | | and lipase [Arabidopsis thaliana] | | | |
| 1512 | 29267664 (129, 130) | Novel Protein sim. GBank gi\|3493\|emb\|CAA27836\| - (X04288) CDC37 | | UNCLASSIFIED | 1020 |
| | | gene product [Saccharomyces cerevisiae] | | | |
| 1513 | 80059321 (3393, 3394) | Novel Protein sim. GBank gi\|3581849\|emb\|CAA20805\| - (AL031541) | | UNCLASSIFIED | 1020, 1022 |
| | | putative phenylalanyl-tRNA synthetase beta chain [Streptomyces | | | |
| | | coelicolor] | | | |
| 1514 | 29694999 (5161, 5162) | Novel Protein sim. GBank gi\|3582220 (AE001272) - conserved | | UNCLASSIFIED | 1022 |
| | | hypothetical protein [Lactococcus lactis] | | | |
| 1515 | 80250065 (1649, 1650) | Novel Protein sim. GBank gi\|3594\|emb\|CAA40571\| - (X57316) | | UNCLASSIFIED | 1004, 1020, 1021 |
| | | carboxypeptidase s [Saccharomyces cerevisiae] | | | |
| 1516 | 78462176 (5405, 5406) | Novel Protein sim. GBank gi\|3641340\|gb\|AAC36351\| - (AF090329) | | UNCLASSIFIED | 1006 |
| | | cyclohexanone monooxygenase homolog [Pseudomonas fluorescens] | | | |
| 1517 | 79633561 (1357, 1358) | Novel Protein sim. GBank gi\|3650031 (AC005396) - putative proline-rich | | UNCLASSIFIED | 1035 |
| | | cell wall protein [Arabidopsis thaliana] | | | |
| 1518 | 27974622 (6149, 6150) | Novel Protein sim. GBank gi\|3721912\|dbj\|BAA33743.1\| - (AB017156) gob- | | UNCLASSIFIED | 1003 |
| | | 5 [Mus musculus] | | | |
| 1519 | 27974630 (8553, 8554) | Novel Protein sim. GBank gi\|3721912\|dbj\|BAA33743.1\| - (AB017156) gob- | | UNCLASSIFIED | 1003 |
| | | 5 [Mus musculus] | | | |
| 1520 | 79255545 (8065, 8066) | Novel Protein sim. GBank gi\|3811377 (AF100956) - tapasin [Mus | | UNCLASSIFIED | 1002, 1006, 1007, 1015, |
| | | musculus] | | | 1020, 1024, 1026, 1036, |
| | | | | | 1041 |
| 1521 | 20396091 (6029, 6030) | Novel Protein sim. GBank gi\|3820539 (AF080002) - UDP-N- | | UNCLASSIFIED | 1003 |
| | | acetylmuramyl tripeptide synthetase MurC [Heliobacillus mobilis] | | | |
| 1522 | 79853458 (7657, 7658) | Novel Protein sim. GBank gi\|3834293 (U80846) - No definition line found | | UNCLASSIFIED | 1002, 1020, 1022 |
| | | [Caenorhabditis elegans] | | | |
| 1523 | 20608530 (967, 968) | Novel Protein sim. GBank gi\|3873399\|gb\|AAC77475.1\| - (U17129) | | UNCLASSIFIED | 1003 |
| | | unknown [Rhodococcus erythropolis] | | | |
| 1524 | 86380142 (2377, 2378) | Novel Protein sim. GBank gi\|3873920\|emb\|CAA97776\| - (Z73423) cDNA | | UNCLASSIFIED | 1050 |
| | | EST EMBL: Z14908 comes from this gene; cDNA EST EMBL: M89403 | | | |
| | | comes from this gene; cDNA EST EMBL: T00022 comes from this gene | | | |
| | | [Caenorhabditis elegans] | | | |
| 1525 | 17248601 (7361, 7362) | Novel Protein sim. GBank gi\|3875362\|emb\|CAA84696\| - (Z35639) similar | | UNCLASSIFIED | 1036 |
| | | to TNF-alpha induced Protein B12 [Caenorhabditis elegans] | | | |
| 1526 | 97993778 (3753, 3754) | Novel Protein sim. GBank gi\|3877494\|emb\|CAA88472.1\| - (Z48583) ATP | | UNCLASSIFIED | 1001, 1006, 1023, 1037 |
| | | binding protein with similarity to the CDC48/PAS1/SEC18 family; cDNA | | | |
| | | EST EMBL: D65037 comes from this gene; cDNA EST EMBL: D68340 | | | |
| | | comes from this gene; cDNA EST EMBL: D65048 comes from this gene; | | | |
| | | cDNA EST EMBL: D6845 . . . | | | |
| 1527 | 35915568 (3477, 3478) | Novel Protein sim. GBank gi\|3878537\|emb\|CAB05777\| - (Z83236) similar | | UNCLASSIFIED | 1021 |
| | | to Sugar (and other) transporters [Caenorhabditis elegans] | | | |
| 1528 | 56026570 (1303, 1304) | Novel Protein sim. GBank gi\|3879594\|emb\|CAA98283\| - (Z73976) | | UNCLASSIFIED | 1007 |
| | | predicted using Genefinder; similar to reverse transcriptase | | | |
| | | [Caenorhabditis elegans] | | | |
| 1529 | 11816374 (1023, 1024) | Novel Protein sim. GBank gi\|3882285\|dbj\|BAA34502.1\| - (AB018325) | | UNCLASSIFIED | 1022, 1031 |
| | | KIAA0782 protein [Homo sapiens] | | | |
| 1530 | 78984391 (3227, 3228) | Novel Protein sim. GBank gi\|3886057 (AF106580) - contains similarity to | | UNCLASSIFIED | 1014, 1020 |
| | | Drosophila diaphanous (SW: P48608) [Caenorhabditis elegans] | | | |
| 1531 | 78925900 (4925, 4926) | Novel Protein sim. GBank gi\|3913032\|sp\|O30746\|ALR2_KLEAE - | | UNCLASSIFIED | 1036 |
| | | ALANINE RACEMASE, CATABOLIC | | | |
| 1532 | 23290639 (5369, 5370) | Novel Protein sim. GBank gi\|3913652\|sp\|O09046\|FIG1_MOUSE - FIG-1 | | UNCLASSIFIED | 1015, 1031 |
| | | PROTEIN PRECURSOR | | | |
| 1533 | 83022629 (7185, 7186) | Novel Protein sim. GBank gi\|3914095\|sp\|O14732\|MYO2_HUMAN - MYO- | | UNCLASSIFIED | 1050 |
| | | INOSITOL-1(OR 4)-MONOPHOSPHATASE 2 (IMP 2) (INOSITOL | | | |
| | | MONOPHOSPHATASE 2) (MYO-INOSITOL MONOPHOSPHATASE A2) | | | |
| 1534 | 39523838 (3859, 3860) | Novel Protein sim. GBank gi\|3915144\|sp\|O33017\|TRMD_MYCLE - (TRNA | | UNCLASSIFIED | 1003 |
| | | (GUANINE-N1)-METHYLTRANSFERASE (M1G- | | | |
| | | METHYLTRANSFERASE) (TRNA [GM37] METHYLTRANSFERASE) | | | |
| 1535 | 78768459 (7865, 7866) | Novel Protein sim. GBank gi\|3915170\|sp\|O69882\|TRMD_STRCO - TRNA | | UNCLASSIFIED | 1006 |
| | | (GUANINE-N1)-METHYLTRANSFERASE (M1G- | | | |
| | | METHYLTRANSFERASE) (TRNA [GM37]METHYLTRANSFERASE) | | | |
| 1536 | 78460574 (7871, 7872) | Novel Protein sim. GBank gi\|3915557\|sp\|O05252\|YUFN_BACSU - | | UNCLASSIFIED | 1024 |
| | | HYPOTHETICAL LIPOPROTEIN YUFN PRECURSOR | | | |
| 1537 | 30179670 (1885, 1886) | Novel Protein sim. GBank gi\|3915759\|sp\|P36044\|MNN44_YEAST - MNN4 | | UNCLASSIFIED | 1020 |
| | | PROTEIN | | | |
| 1538 | 8370333 (3909, 3910) | Novel Protein sim. GBank gi\|3925211\|emb\|CAA21539.1\| - (AL032626) | | UNCLASSIFIED | 1008 |
| | | cDNA EST EMBL: D70654 comes from this gene; cDNA EST | | | |
| | | EMBL: Z14359 comes from this gene; cDNA EST EMBL: D33409 comes | | | |
| | | from this gene; cDNA EST EMBL: D36239 comes from this gene; cDNA | | | |
| | | EST EMBL: Z14766 comes from this gene; . . . | | | |
| 1539 | 79201261 (877, 878) | Novel Protein sim. GBank gi\|3928723\|emb\|CAA22219\| - (AL034355) | | UNCLASSIFIED | 1025 |
| | | putative ABC transporter [Streptomyces coelicolor] | | | |
| 1540 | 30576892 (5709, 5710) | Novel Protein sim. GBank gi\|3941734 (AF109719) - unknown [Mus | | UNCLASSIFIED | 1007 |
| | | musculus] | | | |
| 1541 | 95008332 (6819, 6820) | Novel-Protein sim. GBank gi\|3947854\|emb\|CAA22272\| - (AL034381) | | UNCLASSIFIED | 1015 |
| | | conserved hypothetical PFAM UPF0031 containing protein | | | |
| | | [Schizosaccharomyces pombe] | | | |
| 1542 | 79168015 (3223, 3224) | Novel Protein sim. GBank gi\|3953459 (AC002328) - F20N2.4 [Arabidopsis | | UNCLASSIFIED | 1028, 1047 |
| | | thaliana] | | | |
| 1543 | 65458783 (2617, 2618) | Novel Protein sim. GBank gi\|3978472 (AF089730) - potassium channel | | UNCLASSIFIED | 1051 |
| | | subunit [Rattus norvegicus] | | | |
| 1544 | 30575467 (5661, 5662) | Novel Protein sim. GBank gi\|400132\|sp\|Q02974\|KHK_RAT - | | UNCLASSIFIED | 1007 |
| | | KETOHEXOKINASE (HEPATIC FRUCTOKINASE) | | | |
| 1545 | 66727201 (1977, 1978) | Novel Protein sim. GBank gi\|400729\|sp\|P31664\|PAND_ECOLI - | | UNCLASSIFIED | 1046 |
| | | ASPARTATE 1-DECARBOXYLASE PRECURSOR (ASPARTATE ALPHA- | | | |
| | | DECARBOXYLASE) | | | |
| 1546 | 95287719 (8551, 8552) | Novel Protein sim. GBank gi\|4007675\|emb\|CAA22361\| - (AL034443) | | UNCLASSIFIED | 1004, 1008, 1010, 1020, |
| | | putative neuramidase [Streptomyces coelicolor] | | | 1022, 1028 |
| 1547 | 23207548 (2235, 2236) | Novel Protein sim. GBank gi\|4007726\|emb\|CAA22410\| - AL034447) | | UNCLASSIFIED | 1006 |
| | | putative methylase [Streptomyces coelicolor] | | | |
| 1548 | 11103108 (5671, 5672) | Novel Protein sim. GBank gi\|4007732\|emb\|CAA22416\| - AL034447) | | UNCLASSIFIED | 1004 |
| | | formamidopyrimidine-DNA glycosylase [Streptomyces coelicolor] | | | |
| 1549 | 78778050 (7197, 7198) | Novel Protein sim. GBank gi\|401087\|sp\|Q02100\|SKO1_YEAST - CRE- | | UNCLASSIFIED | 1006, 1024 |
| | | BINDING BZIP PROTEIN SKO1 | | | |
| 1550 | 66442995 (725, 726) | Novel Protein sim. GBank gi\|401444\|sp\|P30143\|YAAJ_ECOLI - | | UNCLASSIFIED | 1020 |
| | | HYPOTHETICAL 51.7 KD PROTEIN IN THRC-TALB INTERGENIC | | | |
| | | REGION (ORF8) | | | |
| 1551 | 30676397 (8219, 8220) | Novel Protein sim. GBank gi\|4033718 (U49397) - unknown [Streptococcus | | UNCLASSIFIED | 1027 |
| | | pyogenes] | | | |
| 1552 | 20750985 (2927, 2928) | Novel Protein sim. GBank gi\|4090263\|emb\|CAA10518\| - (AJ131848) | | UNCLASSIFIED | 1020 |
| | | collagen alpha 1 type X [Rattus norvegicus] | | | |
| 1553 | 52559933 (1293, 1294) | Novel Protein sim. GBank gi\|4091877 (AF061331) - alpha galactosidase | | UNCLASSIFIED | 1004 |
| | | precursor [Saccharopolyspora erythraea] | | | |
| 1554 | 79179690 (5149, 5150) | Novel Protein sim. GBank gi\|4092666 (AF083132) - putative 13.1 kDa E3 | | UNCLASSIFIED | 1025 |
| | | protein [Porcine adenovirus 3] | | | |
| 1555 | 78483307 (3045, 3046) | Novel Protein sim. GBank gi\|4099092 (U83179) - unknown [Arabidopsis | | UNCLASSIFIED | 1024 |
| | | thaliana] | | | |
| 1556 | 80575827 (5763, 5764) | Novel Protein sim. GBank gi\|4104168 (AF033339) - UNC-45 | | UNCLASSIFIED | 1004, 1020, 1026, 1055 |
| | | [Caenorhabditis briggsae] | | | |
| 1557 | 82125017 (3069, 3070) | Novel Protein sim. GBank gi\|4106620\|emb\|CAA21375\| - (AL031866) | | UNCLASSIFIED | 1014, 1020 |
| | | ORF52, len=440 aa, CAT2, highly similar to 4-hydroxybutyrate CoA | | | |
| | | transferase, eg. CAT2_CLOKL Clostridium kluyveri, (429 aa), 40.0% | | | |
| | | identity in 440 aa overlap, Fasta scores: opt: 954, E(): 0 [Yersinia pestis] | | | |
| 1558 | 57127447 (8261, 8262) | Novel Protein sim. GBank gi\|4154795 (AE001464) - ATP-DEPENDENT | | UNCLASSIFIED | 1031 |
| | | ZINC METALLOPEPTIDASE [Helicobacter pylori J99] | | | |
| 1559 | 13892897 (6805, 6806) | Novel Protein sim. GBank gi\|4155073 (AE001485) - putative [Helicobacter | | UNCLASSIFIED | 1031 |
| | | pylori J99] | | | |
| 1560 | 14401486 (3901, 3902) | Novel Protein sim. GBank gi\|4155568 (AE001527) - putative [Helicobacter | | UNCLASSIFIED | 1031 |
| | | pylori J99] | | | |
| 1561 | 20729681 (8883, 8884) | Novel Protein sim. GBank gi\|4155917 (AE001554) - putative [Helicobacter | | UNCLASSIFIED | 1004 |
| | | pylori J99] | | | |
| 1562 | 86474057 (3431, 3432) | Novel Protein sim. GBank gi\|4160292\|emb\|CAA77084\| - (Y18209) alpha- | | UNCLASSIFIED | 1051 |
| | | N-acetylglucosaminidase [Nicotiana tabacum] | | | |
| 1563 | 10126713 (8533, 8534) | Novel Protein sim. GBank gi\|416162\|dbj\|BAA03953\| - (D16502) ORF2 | | UNCLASSIFIED | 1014 |
| | | [Saccharomyces cerevisiae] | | | |
| 1564 | 66471745 (1391, 1392) | Novel Protein sim. GBank gi\|416592\|sp\|P32323\|AGA1_YEAST-A- | | UNCLASSIFIED | 1007 |
| | | AGGLUTININ ATTACHMENT SUBUNIT PRECURSOR | | | |
| 1565 | 80059698 (3307, 3308) | Novel Protein sim. GBank gi\|416605\|sp\|Q00594\|ALKK_PSEOL - | | UNCLASSIFIED | 1008 |
| | | MEDIUM-CHAIN-FATTY-ACID-COA LIGASE (MEDIUM-CHAIN ACYL- | | | |
| | | COA SYNTHETASE) | | | |
| 1566 | 17710385 (7285, 7286) | Novel Protein sim. GBank gi\|41686\|emb\|CAA35552\| - (X17506) hycG | | UNCLASSIFIED | 1041 |
| | | [Escherichia coli] | | | |
| 1567 | 33205981 (8609, 8610) | Novel Protein sim. GBank gi\|417170\|sp\|Q01264\|HYUC_PSESN - | | UNCLASSIFIED | 1024 |
| | | HYDANTOIN UTILIZATION PROTEIN C (ORF4) | | | |
| 1568 | 29443014 (3083, 3084) | Novel Protein sim. GBank gi\|418427\|sp\|P32634\|YEW2_YEAST - | | UNCLASSIFIED | 1024 |
| | | HYPOTHETICAL 195.4 KD PROTEIN IN RPS26B-GLC7 INTERGENIC | | | |
| | | REGION | | | |
| 1569 | 27261550 (4665, 4666) | Novel Protein sim. GBank gi\|418427\|sp\|P32634\|YEW2_YEAST - | | UNCLASSIFIED | 1024 |
| | | HYPOTHETICAL 195.4 KD PROTEIN IN RPS26B-GLC7 INTERGENIC | | | |
| | | REGION | | | |
| 1570 | 95287711 (8073, 8074) | Novel Protein sim. GBank gi\|418480\|sp\|P32139\|YIHR_ECOLI - | | UNCLASSIFIED | 1002, 1004, 1008, 1010, |
| | | HYPOTHETICAL 34.0 KD PROTEIN IN GLNA-RBN INTERGENIC | | | 1023, 1028, 1036, 1051 |
| | | REGION | | | |
| 1571 | 79444091 (8665, 8666) | Novel Protein sim. GBank gi\|4186110\|emb\|CAA71790\| - (Y10831) | | UNCLASSIFIED | 1022 |
| | | putative integrase [Ralstonia eutropha] | | | |
| 1572 | 79621693 (6319, 6320) | Novel Protein sim. GBank gi\|4186115\|emb\|CAA71794\| - (Y10832) trbl | | UNCLASSIFIED | 1004 |
| | | [Raistonia eutropha] | | | |
| 1573 | 16332215 (3487, 3488) | Novel Protein sim. GBank gi\|4200254\|emb\|CAA22902\| - (AL035300) | | UNCLASSIFIED | 1004 |
| | | possible transmembrane protein MLCB1886.05c [Mycobacterium leprae] | | | |
| 1574 | 11229945 (7095, 7096) | Novel Protein sim. GBank gi\|420071\|pir\|\|A43336 - microtubule-vesicle | | UNCLASSIFIED | 1008 |
| | | linker CLIP-170 - human | | | |
| 1575 | 80026071 (901, 902) | Novel Protein sim. GBank gi\|4204102 (U10879) - UDP-N- | | UNCLASSIFIED | 1003, 1004, 1008, 1021, |
| | | acetylmuramoylalanine-D-glutamate ligase; MurD; cell wall synthesis | | | 1028 |
| | | protein [Streptomyces coelicolor] | | | |
| 1576 | 37036258 (3189, 3190) | Novel Protein sim. GBank gi\|4210471\|dbj\|BAA74535.1\| - (AB019033) | | UNCLASSIFIED | 1010 |
| | | orfSA [Pseudomonas sp.] | | | |
| 1577 | 57300817 (5015, 5016) | Novel Protein sim. GBank gi\|422531\|pir\|\|A46170 - tektin A1 - sea urchin | | UNCLASSIFIED | 1003, 1004, 1008, 1022, |
| | | (Strongylocentrotus purpuratus) | | | 1031 |
| 1578 | 52563264 (8547, 8548) | Novel Protein sim. GBank gi\|42405\|emb\|CAA28642\| - (X04968) put. pifA | | UNCLASSIFIED | 1025 |
| | | gene product (183AA) [Escherichia coli] | | | |
| 1579 | 10100744 (6189, 6190) | Novel Protein sim. GBank gi\|4262236\|gb\|AAD14529\| - (AC006200) | | UNCLASSIFIED | 1023 |
| | | putative ribose 5-phosphate isomerase [Arabidopsis thaliana] | | | |
| 1580 | 87452727 (795, 796) | Novel Protein sim. GBank gi\|4263790\|gb\|AAD15450\| - (AC006068) | | UNCLASSIFIED | 1023 |
| | | putative ch-TOG protein [Arabidopsis thaliana] | | | |
| 1581 | 11357950 (4245, 4246) | Novel Protein sim. GBank gi\|4314381\|gb\|AAD15591\| - (AC006232) | | UNCLASSIFIED | 1055 |
| | | putative proline-rich protein PRP2 precursor [Arabidopsis thaliana] | | | |
| 1582 | 79909793 (6125, 6126) | Novel Protein sim. GBank gi\|4328\|emb\|CAA47121\| - (X66501) RIF1 | | UNCLASSIFIED | 1004, 1010, 1021 |
| | | [Saccharomyces cerevisiae] | | | |
| 1583 | 37003901 (4975, 4976) | Novel Protein sim. GBank gi\|4376841\|gb\|AAD18690\| - (AE001639) | | UNCLASSIFIED | 1026 |
| | | Elongation Factor G [Chlamydia pneumoniae] | | | |
| 1584 | 11813007 (827, 828) | Novel Protein sim. GBank gi\|4377309\|gb\|AAD19119\| - (AE001678) YigN | | UNCLASSIFIED | 1004 |
| | | family hypothetical protein [Chlamydia pneumoniae] | | | |
| 1585 | 6750668 (5261, 5262) | Novel Protein sim. GBank gi\|439877 (L27428) - reverse transcriptase | | UNCLASSIFIED | 1020 |
| | | [Homo sapiens] | | | |
| 1586 | 29145606 (7059, 7060) | Novel Protein sim. GBank gi\|4454480\|gb\|AAD20927\| - (AC006234) | | UNCLASSIFIED | 1015 |
| | | putative (1-4)-beta-mannan endohydrolase [Arabidopsis thaliana] | | | |
| 1587 | 71797646 (2731, 2732) | Novel Protein sim. GBank gi\|4455182\|emb\|CAB36714\| - (AL035521) | | UNCLASSIFIED | 1031 |
| | | putative protein [Arabidopsis thaliana] | | | |
| 1588 | 27831761 (6695, 6696) | Novel Protein sim. GBank gi\|4455367\|emb\|CAB36777.1\| - (AL035524) | | UNCLASSIFIED | 1003, 1055 |
| | | putative protein [Arabidopsis thaliana] | | | |
| 1589 | 20291103 (5615, 5616) | Novel Protein sim. GBank gi\|4467246\|emb\|CAB37571\| - (AL035569) | | UNCLASSIFIED | 1020 |
| | | putative phosphodiesterase [Streptomyces coelicolor] | | | |
| 1590 | 66047851 (7467, 7468) | Novel Protein sim. GBank gi\|4494063\|emb\|CAB39170.1\| - (AJ133501) | | UNCLASSIFIED | 1051 |
| | | putative type II myosin heavy chain [Physarum polycephalum] | | | |
| 1591 | 16839582 (6405, 6406) | Novel Protein sim. GBank gi\|4502419\|ref\|NP_000704.1\|pBLVR - biliverdin | | UNCLASSIFIED | 1041 |
| | | reductase B | | | |
| 1592 | 20297151 (8857, 8858) | Novel Protein sim. GBank gi\|4512103\|gb\|AAD21616.1\| - (AF117897) | | UNCLASSIFIED | 1020 |
| | | rab11 binding protein [Bos taurus] | | | |
| 1593 | 79918511 (8581, 8582) | Novel Protein sim. GBank gi\|451544 (U04267) - proline-rich cell wall | | UNCLASSIFIED | 1001, 1003 |
| | | protein [Gossypium barbadense] | | | |
| 1594 | 35007847 (2703, 2704) | Novel Protein sim. GBank gi\|45365\|emb\|CAA40908\| - (X57736) ORF D | | UNCLASSIFIED | 1000 |
| | | [Pseudomonas aeruginosa] | | | |
| 1595 | 78732473 (5009, 5010) | Novel Protein sim. GBank gi\|4538948\|emb\|CAB39684.1\| - (AL049483) | | UNCLASSIFIED | 1024 |
| | | putative protein [Arabidopsis thaliana] | | | |
| 1596 | 80217239 (7379, 7380) | Novel Protein sim. GBank gi\|4539200\|emb\|CAB39858.1\| - (AL049497) | | UNCLASSIFIED | 1001, 1003, 1008, 1022, |
| | | putative long chain fatty acid coA ligase [Streptomyces coelicolor] | | | 1041 |
| 1597 | 11091330 (525, 526) | Novel Protein sim. GBank gi\|4539558\|emb\|CAB38477.1\| - (AL035636) | | UNCLASSIFIED | 1004 |
| | | putative DNA polymerase [Streptomyces coelicolor] | | | |
| 1598 | 78784477 (4151, 4152) | Novel Protein sim. GBank gi\|4539563\|emb\|CAB38482.1\| - (AL035636) | | UNCLASSIFIED | 1006 |
| | | putative transferase [Streptomyces coelicolor] | | | |
| 1599 | 79254433 (4981, 4982) | Novel Protein sim. GBank gi\|4586401\|dbj\|BAA75199.1\| - (D88208) | | UNCLASSIFIED | 1002, 1006, 1014, 1015, |
| | | hSgt1p [Homo sapiens] | | | 1021, 1035, 1036, 1041, |
| | | | | | 1051 |
| 1600 | 20458788 (3149, 3150) | Novel Protein sim. GBank gi\|4589285\|gb\|AAD26430.1\|AF13515 - | | UNCLASSIFIED | 1008 |
| | | (AF135154) ferric alcaligin siderophore receptor [Bordetella pertussis] | | | |
| 1601 | 57293972 (2527, 2528) | Novel Protein sim. GBank gi\|460044 (L29389) - Fun12p [Saccharomyces | | UNCLASSIFIED | 1002, 1004, 1006, 1020, |
| | | cerevisiae] | | | 1031, 1041 |
| 1602 | 8498693 (3293, 3294) | Novel Protein sim. GBank gi\|462626\|sp\|P33749\|MSN4_YEAST - ZINC | | UNCLASSIFIED | 1031 |
| | | FINGER PROTEIN MSN4 (MULTICOPY SUPPRESSOR OF SNF1 | | | |
| | | PROTEIN 4) | | | |
| 1603 | 52560914 (3839, 3840) | Novel Protein sim. GBank gi\|462730\|sp\|P33209\|NOLT_RHIFR - | | UNCLASSIFIED | 1010 |
| | | NODULATION PROTEIN NOLT PRECURSOR | | | |
| 1604 | 21414142 (5385, 5386) | Novel Protein sim. GBank gi\|462738\|sp\|P34909\|NOT4_YEAST - | | UNCLASSIFIED | 1020 |
| | | GENERAL NEGATIVE REGULATOR OF TRANSCRIPTION SUBUNIT 4 | | | |
| 1605 | 10302287 (8141, 8142) | Novel Protein sim. GBank gi\|465535\|sp\|P35196\|YBL2_YEAST - | | UNCLASSIFIED | 1001 |
| | | HYPOTHETICAL 32.7 KD PROTEIN IN NTH2-COQ1 INTERGENIC | | | |
| | | REGION | | | |
| 1606 | 94684758 (7521, 7522) | Novel Protein sim. GBank gi\|465576\|sp\|P33345\|MOLR_ECOLI - | | UNCLASSIFIED | 1025 |
| | | MOLYBDATE METABOLISM REGULATOR | | | |
| 1607 | 13076366 (933, 934) | Novel Protein sim. GBank gi\|4691395\|emb\|CAB41562.1\| - (AL049727) | | UNCLASSIFIED | 1022 |
| | | putative large secreted protein [Streptomyces coelicolor] | | | |
| 1608 | 86464894 (4203, 4204) | Novel Protein sim. GBank gi\|4753853\|emb\|CAB42016.1\| - (AL049754) | | UNCLASSIFIED | 1001, 1002, 1003, 1004, |
| | | putative adenylosuccinate synthetase [Streptomyces coelicolor] | | | 1008, 1015, 1020, 1023, |
| | | | | | 1025, 1026, 1028, 1031 |
| 1609 | 20403478 (143, 144) | Novel Protein sim. GBank gi\|4753873\|emb\|CAB42036.1\| - (AL049754) | | UNCLASSIFIED | 1003 |
| | | putative fructose 1,6-bisphosphate aldolase [Streptomyces coelicolor] | | | |
| 1610 | 30239854 (1063, 1064) | Novel Protein sim. GBank gi\|4758932\|ref\|NP_004563.1\|pPKP2- | | UNCLASSIFIED | 1024 |
| | | plakophilin 2 | | | |
| 1611 | 30638163 (8747, 8748) | Novel Protein sim. GBank gi\|4761453\|gb\|AAD29365.1\|AF11938 - | | UNCLASSIFIED | 1020 |
| | | (AF119384) putative CAMP protein [Mus musculus] | | | |
| 1612 | 80060863 (4877, 4878) | Novel Protein sim. GBank gi\|4826478\|emb\|CAB42896.1\| - (Z83844) | | UNCLASSIFIED | 1015, 1022, 1031 |
| | | similar to SH3-binding protein [Homo sapiens] | | | |
| 1613 | 28814177 (247, 248) | Novel Protein sim. GBank gi\|4827044\|ref\|NP_005112.1\|pTRAP - thyroid | | UNCLASSIFIED | 1041 |
| | | hormone receptor-associated protein, 240 kDa subunit | | | |
| 1614 | 27839834 (6659, 6660) | Novel Protein sim. GBank gi\|4867999\|gb\|AAD31085.1\|AF07816 - | | UNCLASSIFIED | 1020, 1031 |
| | | (AF078164) Ku70-binding protein [Homo sapiens] | | | |
| 1615 | 27975299 (9061, 9062) | Novel Protein sim. GBank gi\|4884719\|gb\|AAD31784.1\|AF12620 - | | UNCLASSIFIED | 1050 |
| | | (AF126201) putative alpha-ketoglutarate dependent dioxygenase AtsK | | | |
| | | [Pseudomonas putida] | | | |
| 1616 | 5394598 (563, 564) | Novel Protein sim. GBank gi\|4885647\|ref\|NP_005472.1\|pTRAP - thyroid | | UNCLASSIFIED | 1055 |
| | | hormone receptor-associated protein complex component | | | |
| 1617 | 78741493 (3553, 3554) | Novel Protein sim. GBank gi\|4894336\|gb\|AAD32424.1\| - (AF065404) | | UNCLASSIFIED | 1020 |
| | | pXO1-120 [Bacillus anthracis] | | | |
| 1618 | 78404939 (6939, 6940) | Novel Protein sim. GBank gi\|4928615\|gb\|AAD33661.1\| - (AF134706) | | UNCLASSIFIED | 1014, 1022 |
| | | unknown [Sinorhizobium meliloti] | | | |
| 1619 | 13516879 (3051, 3052) | Novel Protein sim. GBank gi\|4959396\|gb\|AAD34331.1\|AF11248 - | | UNCLASSIFIED | 1022 |
| | | (AF112481) RAD54B protein [Homo sapiens] | | | |
| 1620 | 57295193 (1507, 1508) | Novel Protein sim. GBank gi\|496309 (M33957) - vanadate-resistance | | UNCLASSIFIED | 1031 |
| | | (VAN1) [Saccharomyces cerevisiae] | | | |
| 1621 | 11309303 (619, 620) | Novel Protein sim. GBank gi\|4966270\|gb\|AAB52261.2\| - (U97002) similar | | UNCLASSIFIED | 1008 |
| | | to acyl-CoA dehydrogenases and epoxide hydrolases: Pfam domain | | | |
| | | PF00441 (Acyl-CoA_dh), Score = 57.4, E-value = 1.7e−16, N = 2; contains | | | |
| | | similarity to Pfam domain PF00702 (Hydrolase), Score = 57.4, E-value = 1e−13, | | | |
| | | N = 1 \|C . . . | | | |
| 1622 | 80084353 (4815, 4816) | Novel Protein sim. GBank gi\|4980567\|gb\|AAD35173.1\|AE00169 - | | UNCLASSIFIED | 1001 |
| | | (AE001694) iron(lll) ABC transporter, permease protein [Thermotoga | | | |
| | | maritima] | | | |
| 1623 | 79180453 (4237, 4238) | Novel Protein sim. GBank gi\|4980870\|gb\|AAD35454.1\|AE00171 - | | UNCLASSIFIED | 1028 |
| | | (AE001716) conserved hypothetical protein [Thermotoga maritima] | | | |
| 1624 | 16316665 (5265, 5266) | Novel Protein sim. GBank gi\|4981139\|gb\|AAD35703.1\|AE00173 - | | UNCLASSIFIED | 1051 |
| | | (AE001736) conserved hypothetical protein [Thermotoga maritima] | | | |
| 1625 | 10106090 (7237, 7238) | Novel Protein sim. GBank gi\|4981298\|gb\|AAD35852.1\|AE00174 - | | UNCLASSIFIED | 1010 |
| | | (AE001746) conserved hypothetical protein [Thermotoga maritima] | | | |
| 1626 | 80055391 (7377, 7378) | Novel Protein sim. GBank gi\|4981328\|gb\|AAD35881.1\|AE00174 - | | UNCLASSIFIED | 1001, 1003, 1008, 1019, |
| | | (AE001747) bioY protein [Thermotoga maritima] | | | 1020, 1046 |
| 1627 | 10213168 (395, 396) | Novel Protein sim. GBank gi\|4981341\|gb\|AAD35893.1\|AE00174 - | | UNCLASSIFIED | 1022 |
| | | (AE001748) sugar ABC transporter, permease protein [Thermotoga | | | |
| | | maritima] | | | |
| 1628 | 20450967 (6583, 6584) | Novel Protein sim. GBank gi\|4981925\|gb\|AAD36435.1\|AE00179 - | | UNCLASSIFIED | 1022 |
| | | (AE001790) flagellar basal-body rod protein FlgC [Thermotoga maritima] | | | |
| 1629 | 80017463 (8705, 8706) | Novel Protein sim. GBank gi\|4982435\|gb\|AAD36913.1\|AE00182 - | | UNCLASSIFIED | 1003, 1006, 1020, 1022, |
| | | (AE001822) alpha-mannosidase, putative [Thermotoga maritima] | | | 1025, 1028 |
| 1630 | 79842052 (5905, 5906) | Novel Protein sim. GBank gi\|4982454\|gb\|AAD36931.1\|AE00182 - | | UNCLASSIFIED | 1036, 1041 |
| | | (AE001823) ATP-dependent protease LA, putative [Thermotoga maritima] | | | |
| 1631 | 95287827 (5137, 5138) | Novel Protein sim. GBank gi\|4995988\|dbj\|BAA78221.1\| - (AB021506) | | UNCLASSIFIED | 1002, 1008, 1010, 1021, |
| | | 25.6% identical to U1 gene of strain U1102 of HHV-6 [Human herpesvirus | | | 1022, 1026, 1050 |
| | | 6] | | | |
| 1632 | 79574205 (3177, 3178) | Novel Protein sim. GBank gi\|5019347\|emb\|CAB44400.1\| - (AL078610) | | UNCLASSIFIED | 1026, 1028 |
| | | putative oxidoreductase [Streptomyces coelicolor] | | | |
| 1633 | 20707230 (3955, 3956) | Novel Protein sim. GBank gi\|5051864\|emb\|CAB38156.2\| - (AL035591) | | UNCLASSIFIED | 1004 |
| | | ABC excision nuclease subunit B [Streptomyces coelicolor] | | | |
| 1634 | 79835127 (1723, 1724) | Novel Protein sim. GBank gi\|5091486\|gb\|AAD39559.1\| - (AF031417) | | UNCLASSIFIED | 1021 |
| | | PcaB-like protein [Pseudomonas putida] | | | |
| 1635 | 37811466 (5687, 5688) | Novel Protein sim. GBank gi\|5091610\|gb\|AAD39599.1\|AC00785 - | | UNCLASSIFIED | 1055 |
| | | (AC007858) 10A191.15 [Oryza sativa] | | | |
| 1636 | 52559430 (883, 884) | Novel Protein sim. GBank gi\|5103027\|dbj\|BAA78765.1\| - (AB023419) | | UNCLASSIFIED | 1035, 1055 |
| | | mSox7 [Mus musculus] | | | |
| 1637 | 79564322 (5967, 5968) | Novel Protein sim. GBank gi\|5105612\|dbj\|BAA80925.1\| - (AP000062) | | UNCLASSIFIED | 1001 |
| | | 167 aa long hypothetical protein [Aeropyrum pernix] | | | |
| 1638 | 35893460 (1173, 1174) | Novel Protein sim. GBank gi\|5105846\|dbj\|BAA81158.1\| - (AP000063) | | UNCLASSIFIED | 1050 |
| | | 479 aa long hypothetical protein [Aeropyrum pernix] | | | |
| 1639 | 9897023 (1065, 1066) | Novel Protein sim. GBank gi\|5107805\|gb\|AAD25110.2\|AF14055 - | | UNCLASSIFIED | 1036 |
| | | (AF140550) ShdA [Salmonella typhimurium] | | | |
| 1640 | 28841378 (7111, 7112) | Novel Protein sim. GBank gi\|5123651\|emb\|CAB45340.1\| - (AL079345) | | UNCLASSIFIED | 1024 |
| | | putative aminotransferase [Streptomyces coelicolor A3(2)] | | | |
| 1641 | 27981501 (1549, 1550) | Novel Protein sim. GBank gi\|5123878\|emb\|CAB45470.1\| - (AL079348) | | UNCLASSIFIED | 1004 |
| | | putative Na(+)/H(+) antiporter [Streptomyces coelicolor] | | | |
| 1642 | 19726577 (6471, 6472) | Novel Protein sim. GBank gi\|5139534\|emb\|CAB45535.1\| - (AJ243174) | | UNCLASSIFIED | 1023 |
| | | hypothetical protein [Pseudomonas fluorescens] | | | |
| 1643 | 80061959 (1041, 1042) | Novel Protein sim. GBank gi\|5139695\|dbj\|BAA81686.1\| - (AB029147) | | UNCLASSIFIED | 1003, 1004, 1014, 1022, |
| | | expressed in cucumber hypocotyls [Cucumis sativus] | | | 1031, 1035, 1051 |
| 1644 | 17284172 (7559, 7560) | Novel Protein sim. GBank gi\|5225378\|gb\|AAD40879.1\|AF11313 - | | UNCLASSIFIED | 1015 |
| | | (AF113136) IL-1 receptor-associated-kinase-M; IRAK-M [Homo sapiens] | | | |
| 1645 | 57301554 (6257, 6258) | Novel Protein sim. GBank gi\|5262605\|emb\|CAB45743.1\| - (AL080150) | | UNCLASSIFIED | 1003, 1004 |
| | | hypothetical protein [Homo sapiens] | | | |
| 1646 | 11070940 (315, 316) | Novel Protein sim. GBank gi\|5292153\|gb\|AAD41527.1\|L48409_- | | UNCLASSIFIED | 1022 |
| | | (L48409) ProQ [Escherichia coli] | | | |
| 1647 | 27835681 (6793, 6794) | Novel Protein sim. GBank gi\|532526 (U06630) - Rts1p [Saccharomyces | | UNCLASSIFIED | 1004 |
| | | cerevisiae] | | | |
| 1648 | 20293899 (5215, 5216) | Novel Protein sim. GBank gi\|5327257\|emb\|CAA21905.2\| - (AL033388) | | UNCLASSIFIED | 1031 |
| | | putative histidine biosynthesis bifunctional aml dotransferase | | | |
| | | [Schizosaccharomyces pombe] | | | |
| 1649 | 11609242 (3661, 3662) | Novel Protein sim. GBank gi\|5354196\|gb\|AAD42405.1\|AF15749 - | | UNCLASSIFIED | 1003 |
| | | (AF157493) hypothetical protein [Zymomonas mobilis] | | | |
| 1650 | 37800640 (2139, 2140) | Novel Protein sim. GBank gi\|5360761\|dbj\|BAA82150.1\| - (AB026288) | | UNCLASSIFIED | 1010 |
| | | pharbin [Rattus norvegicus] | | | |
| 1651 | 79470632 (5609, 5610) | Novel Protein sim. GBank gi\|5361003\|gb\|AAD42910.1\|U12817_- | | UNCLASSIFIED | 1020 |
| | | (U12817) chemotaxis CheV homolog [Vibrio parahaemolyticus] | | | |
| 1652 | 10841396 (1367, 1368) | Novel Protein sim. GBank gi\|538258 (L01880) - elongation factor 1- | | UNCLASSIFIED | 1006 |
| | | gamma [Saccharomyces cerevisiae] | | | |
| 1653 | 79483387 (5679, 5680) | Novel Protein sim. GBank gi\|539177\|pir\|\|S37899 - hypothetical protein | | UNCLASSIFIED | 1020 |
| | | YKL074c - yeast (Saccharomyces cerevisiae) | | | |
| 1654 | 20627828 (7107, 7108) | Novel Protein sim. GBank gi\|539663\|pir\|\|A42701 - PR264/SC35 protein - | | UNCLASSIFIED | 1008 |
| | | human | | | |
| 1655 | 17294928 (819, 820) | Novel Protein sim. GBank gi\|5410308\|gb\|AAD43025.1\| - (AF100761) | | UNCLASSIFIED | 1036 |
| | | PTD017 [Homo sapiens] | | | |
| 1656 | 10296742 (6289, 6290) | Novel Protein sim. GBank gi\|541121\|pir\|\|S40827 - hypothetical protein | | UNCLASSIFIED | 1002 |
| | | o300 - Escherichia coli | | | |
| 1657 | 80043491 (1595, 1596) | Novel Protein sim. GBank gi\|5420387\|emb\|CAB46679.1\| - (AJ243459) | | UNCLASSIFIED | 1020 |
| | | proteophosphoglycan [Leishmania major] | | | |
| 1658 | 20629628 (4225, 4226) | Novel Protein sim. GBank gi\|5441777\|emb\|CAB46801.1\| - (AL096811) | | UNCLASSIFIED | 1003 |
| | | putative transcriptional regulator [Streptomyces coelicolor A3(2)] | | | |
| 1659 | 78188295 (7953, 7954) | Novel Protein sim. GBank gi\|5454006\|ref\|NP_006471.1\|pRGS1 - regulator | | UNCLASSIFIED | 1026 |
| | | of G-protein signalling 14 | | | |
| 1660 | 80248670 (4389, 4390) | Novel Protein sim. GBank gi\|5459240\|emb\|CAB48913.1\| - (AL096837) | | UNCLASSIFIED | 1003, 1004, 1015, 1022, |
| | | hypothetical protein [Streptomyces coelicolor A3(2)] | | | 1025, 1026, 1031 |
| 1661 | 66376423 (3561, 3562) | Novel Protein sim. GBank gi\|5459388\|emb\|CAB50746.1\| - (AL096839) | | UNCLASSIFIED | 1003, 1007, 1028 |
| | | putative aminotransferase [Streptomyces coelicolor] | | | |
| 1662 | 78745654 (8033, 8034) | Novel Protein sim. GBank gi\|548391\|sp\|Q06795\|NUSG_BACSU - | | UNCLASSIFIED | 1006 |
| | | TRANSCRIPTION ANTITERMINATlON PROTEIN NUSG | | | |
| 1663 | 10355349 (8847, 8848) | Novel Protein sim. GBank gi\|549456\|sp\|Q05335\|XYS3_PSEPU - | | UNCLASSIFIED | 1036 |
| | | XYLDLEGF OPERON TRANSCRIPTIONAL ACTIVATOR 3 | | | |
| 1664 | 77814605 (341, 342) | Novel Protein sim. GBank gi\|549590\|sp\|P36555\|YJDB_SALTY - | | UNCLASSIFIED | 1035 |
| | | HYPOTHETICAL 61.6 KD PROTEIN IN BASS/PMRA-ADIY INTERGENIC | | | |
| | | REGION | | | |
| 1665 | 29432205 (4149, 4150) | Novel Protein sim. GBank gi\|549616\|sp\|P36139\|YK26_YEAST - | | UNCLASSIFIED | 1006 |
| | | HYPOTHETICAL 31.2 KD PROTEIN IN GAP1-NAP1 INTERGENIC | | | |
| | | REGION | | | |
| 1666 | 78374963 (5263, 5264) | Novel Protein sim. GBank gi\|549637\|sp\|P36159\|YK59_YEAST - | | UNCLASSIFIED | 1036 |
| | | HYPOTHETICAL 96.8 KD PROTEIN IN SIS2-MTD1 INTERGENIC | | | |
| | | REGION | | | |
| 1667 | 20604601 (4321, 4322) | Novel Protein sim. GBank gi\|549646\|sp\|P36168\|YK76_YEAST - | | UNCLASSIFIED | 1022 |
| | | HYPOTHETICAL 137.5 KD PROTEIN IN MPL1-PPC1 INTERGENIC | | | |
| | | REGION | | | |
| 1668 | 56133267 (7615, 7616) | Novel Protein sim. GBank gi\|549649\|sp\|P36028\|YK83_YEAST - | | UNCLASSIFIED | 1020 |
| | | PROBABLE ATP-DEPENDENT PERMEASE YKR103W | | | |
| 1669 | 79240699 (4305, 4306) | Novel Protein sim. GBank gi\|549678\|sp\|P35735\|YKF1_YEAST - | | UNCLASSIFIED | 1002, 1015, 1041 |
| | | HYPOTHETICAL 40.5 KD PROTEIN IN NUP120-CSE4 INTERGENIC | | | |
| | | REGION | | | |
| 1670 | 79490688 (2065, 2066) | Novel Protein sim. GBank gi\|549706\|sp\|P34253\|KT12_YEAST - KTI12 | | UNCLASSIFIED | 1020 |
| | | PROTEIN | | | |
| 1671 | 6352896 (4295, 4296) | Novel Protein sim. GBank gi\|549771\|sp\|P36115\|YKZ9_YEAST - | | UNCLASSIFIED | 1055 |
| | | HYPOTHETICAL 68.9 KD PROTEIN IN YPT52-DBP7 INTERGENIC | | | |
| | | REGION | | | |
| 1672 | 66694898 (4887, 4888) | Novel Protein sim. GBank gi\|549771\|sp\|P36115\|YKZ9_YEAST - | | UNCLASSIFIED | 1006, 1008 |
| | | HYPOTHETICAL 68.9 KD PROTEIN IN YPT52-DBP7 INTERGENIC | | | |
| | | REGION | | | |
| 1673 | 87453444 (415, 416) | Novel Protein sim. GBank gi\|551288\|emb\|CAA83914\| - (Z33611) | | UNCLASSIFIED | 1023 |
| | | phosphoglycerate mutase [Zea mays] | | | |
| 1674 | 79856129 (61, 62) | Novel Protein sim. GBank gi\|5531324\|emb\|CAB51045.1\| - (AJ009579) | | UNCLASSIFIED | 1015 |
| | | putative alkane 1-monooxygenase [Pseudomonas fluorescens] | | | |
| 1675 | 86694741 (6989, 6990) | Novel Protein sim. GBank gi\|5578850\|emb\|CAB51252.1\| - (AL096872) | | UNCLASSIFIED | 1016 |
| | | hypothetical protein [Streptomyces coelicolor A3(2)] | | | |
| 1676 | 80062341 (5345, 5346) | Novel Protein sim. GBank gi\|5668604\|gb\|AAD45975.1\|AF11533 - | | UNCLASSIFIED | 1008, 1020 |
| | | (AF115334) CmpX [Pseudomonas fluorescens] | | | |
| 1677 | 20435478 (8607, 8608) | Novel Protein sim. GBank gi\|5678923\|gb\|AAD46809.1\|AF15764 - | | UNCLASSIFIED | 1022 |
| | | (AF157643) RecD [Mycobacterium smegmatis] | | | |
| 1678 | 37812478 (2515, 2516) | Novel Protein sim. GBank gi\|5689421\|dbj\|BAA82994.1\| - (AB028965) | | UNCLASSIFIED | 1055 |
| | | KIAA1042 protein [Homo sapiens] | | | |
| 1679 | 30660264 (8427, 8428) | Novel Protein sim. GBank gi\|5689551\|dbj\|BAA83059.1\| - (AB029030) | | UNCLASSIFIED | 1024 |
| | | KIAA1107 protein [Homo sapiens] | | | |
| 1680 | 37056406 (2095, 2096) | Novel Protein sim. GBank gi\|5689883\|emb\|CAB52046.1\| - (AL109732) | | UNCLASSIFIED | 1047 |
| | | hypothetical protein [Streptomyces coelicolor A3(2)] | | | |
| 1681 | 47656370 (5993, 5994) | Novel Protein sim. GBank gi\|5689917\|emb\|CAB51955.1\| - (AL109661) | | UNCLASSIFIED | 1026 |
| | | putative oxidoreductase [Streptomyces coelicolor A3(2)] | | | |
| 1682 | 78916212 (3339, 3340) | Novel Protein sim. GBank gi\|5689948\|emb\|CAB51985.1\| - (AL109663) | | UNCLASSIFIED | 1036 |
| | | putative isoleucyl-tRNA synthetase [Streptomyces coelicolor A3(2)] | | | |
| 1683 | 27975125 (7145, 7146) | Novel Protein sim. GBank gi\|5689958\|emb\|CAB51995.1\| - (AL109663) | | UNCLASSIFIED | 1004 |
| | | putative UDP-N-acetylmuramoylalanine-D-glutamate ligase [Streptomyces | | | |
| | | coelicolor A3(2)] | | | |
| 1684 | 70336412 (8417, 8418) | Novel Protein sim. GBank gi\|5702013\|emb\|CAB52245.1\| - (AJ007904) | | UNCLASSIFIED | 1007 |
| | | splicing factor pTSR1 [Trypanosoma brucel] | | | |
| 1685 | 21415074 (175, 176) | Novel Protein sim. GBank gi\|585159\|sp\|P37476\|FTSH_BACSU - CELL | | UNCLASSIFIED | 1020 |
| | | DIVISION PROTEIN FTSH HOMOLOG | | | |
| 1686 | 71772271 (749, 750) | Novel Protein sim. GBank gi\|586301\|sp\|P38288\|YB12_YEAST - | | UNCLASSIFIED | 1007 |
| | | HYPOTHETICAL 48.0 KD PROTEIN IN CDC28-ARL1 INTERGENIC | | | |
| | | REGION PRECURSOR | | | |
| 1687 | 9544749 (305, 306) | Novel Protein sim. GBank gi\|586348\|sp\|P38326\|YB81_YEAST - | | UNCLASSIFIED | 1004 |
| | | HYPOTHETICAL 34.3 KD PROTEIN IN PCS60-ABD1 INTERGENIC | | | |
| | | REGION | | | |
| 1688 | 80497095 (5495, 5496) | Novel Protein sim. GBank gi\|586407\|sp\|P38206\|RFT1_YEAST - | | UNCLASSIFIED | 1001, 1002, 1003, 1004, |
| | | NUCLEAR DIVISION RFT1 PROTEIN | | | 1006, 1007, 1008, 1010, |
| | | | | | 1015, 1020, 1022, 1023, |
| | | | | | 1024, 1025, 1028, 1031, |
| | | | | | 1035, 1036, 1041 |
| 1689 | 16464675 (3807, 3808) | Novel Protein sim. GBank gi\|586477\|sp\|P38219\|YBN5_YEAST - | | UNCLASSIFIED | 1041 |
| | | HYPOTHETICAL 44.2 KD GTP-BINDING PROTEIN IN SCO2-MRF1 | | | |
| | | INTERGENIC REGION | | | |
| 1690 | 17941407 (5833, 5834) | Novel Protein sim. GBank gi\|586732\|sp\|P37688\|YIBN_ECOLI - | | UNCLASSIFIED | 1036 |
| | | HYPOTHETICAL 15.6 KD PROTEIN IN SECB-TDH INTERGENIC | | | |
| | | REGION | | | |
| 1691 | 80059688 (1715, 1716) | Novel Protein sim. GBank gi\|586814\|sp\|P37484\|YYBT_BACSU - | | UNCLASSIFIED | 1004, 1022, 1031 |
| | | HYPOTHETICAL 74.3 KD PROTEIN IN RPLI-COTF INTERGENIC | | | |
| | | REGION | | | |
| 1692 | 21657669 (4703, 4704) | Novel Protein sim. GBank gi\|625182 (L39015) - mitochondrial glutamyl- | | UNCLASSIFIED | 1003, 1020 |
| | | tRNA synthetase [Saccharomyces cerevisiae] | | | |
| 1693 | 78801027 (8773, 8774) | Novel Protein sim. GBank gi\|628660\|pir\|\|S37755 - Adenylyl-transferase - | | UNCLASSIFIED | 1015 |
| | | Escherichia coli | | | |
| 1694 | 37036146 (2163, 2164) | Novel Protein sim. GBank gi\|633648\|emb\|CAA58712\| - (X83754) alpha- | | UNCLASSIFIED | 1010 |
| | | COP [Saccharomyces cerevisiae] | | | |
| 1695 | 25148919 (4157, 4158) | Novel Protein sim. GBank gi\|709805\|gb\|AAC95474.1\| - (U21300) | | UNCLASSIFIED | 1024 |
| | | transposase [Corynebacterium striatum] | | | |
| 1696 | 20403499 (4331, 4332) | Novel Protein sim. GBank gi\|709805\|gb\|AAC95474.1\| - (U21300) | | UNCLASSIFIED | 1003 |
| | | transposase [Corynebacterium striatum] | | | |
| 1697 | 10302823 (7989, 7990) | Novel Protein sim. GBank gi\|71562\|pir\|\|LRRTA1 - clathrin light chain A1 - | | UNCLASSIFIED | 1036 |
| | | rat (fragment) | | | |
| 1698 | 70203092 (1767, 1768) | Novel Protein sim. GBank gi\|728831\|sp\|P39188\|ALU1_HUMAN - !!!! ALU | | UNCLASSIFIED | 1021 |
| | | SUBFAMILY J WARNING ENTRY !!!! | | | |
| 1699 | 79561090 (2537, 2538) | Novel Protein sim. GBank gi\|728831\|sp\|P39188\|ALU1_HUMAN - !!!! ALU | | UNCLASSIFIED | 1035 |
| | | SUBFAMILY J WARNING ENTRY !!!! | | | |
| 1700 | 87120473 (2611, 2612) | Novel Protein sim. GBank gi\|728831\|sp\|P39188\|ALU1_HUMAN - !!!! ALU | | UNCLASSIFIED | 1023 |
| | | SUBFAMILY J WARNING ENTRY !!!! | | | |
| 1701 | 86467285 (3137, 3138) | Novel Protein sim. GBank gi\|728831\|sp\|P39188\|ALU1_HUMAN - !!!! ALU | | UNCLASSIFIED | 1026 |
| | | SUBFAMILY J WARNING ENTRY !!!! | | | |
| 1702 | 87120109 (5131, 5132) | Novel Protein sim. GBank gi\|728831\|sp\|P39188\|ALU1_HUMAN - !!!! ALU | | UNCLASSIFIED | 1016 |
| | | SUBFAMILY J WARNING ENTRY !!!! | | | |
| 1703 | 11770037 (5481, 5482) | Novel Protein sim. GBank gi\|728831\|sp\|P39188\|ALU1_HUMAN - !!!! ALU | | UNCLASSIFIED | 1028 |
| | | SUBFAMILY J WARNING ENTRY !!!! | | | |
| 1704 | 77723765 (7443, 7444) | Novel Protein sim. GBank gi\|728831\|sp\|P39188\|ALU1_HUMAN - !!!! ALU | | UNCLASSIFIED | 1035 |
| | | SUBFAMILY J WARNING ENTRY !!!! | | | |
| 1705 | 65497572 (8227, 8228) | Novel Protein sim. GBank gi\|728831\|sp\|P39188\|ALU1_HUMAN - !!!! ALU | | UNCLASSIFIED | 1014 |
| | | SUBFAMILY J WARNING ENTRY !!!! | | | |
| 1706 | 77560017 (2625, 2626) | Novel Protein sim. GBank gi\|728832\|sp\|P39189\|ALU2_HUMAN - !!!! ALU | | UNCLASSIFIED | 1051 |
| | | SUBFAMILY SB WARNING ENTRY !!!! | | | |
| 1707 | 35056752 (5635, 5636) | Novel Protein sim. GBank gi\|728832\|sp\|P39189\|ALU2_HUMAN - !!!! ALU | | UNCLASSIFIED | 1000 |
| | | SUBFAMILY SB WARNING ENTRY !!!! | | | |
| 1708 | 77809799 (309, 310) | Novel Protein sim. GBank gi\|728837\|sp\|P39194\|ALU7_HUMAN - !!!! ALU | | UNCLASSIFIED | 1048 |
| | | SUBFAMILY SQ WARNING ENTRY !!!! | | | |
| 1709 | 78259870 (859, 860) | Novel Protein sim. GBank gi\|728837\|sp\|P39194\|ALU7_HUMAN - !!!! ALU | | UNCLASSIFIED | 1024 |
| | | SUBFAMILY SQ WARNING ENTRY !!!! | | | |
| 1710 | 78483811 (1927, 1928) | Novel Protein sim. GBank gi\|728837\|sp\|P39194\|ALU7_HUMAN - !!!! ALU | | UNCLASSIFIED | 1024 |
| | | SUBFAMILY SQ WARNING ENTRY !!!! | | | |
| 1711 | 86477767 (4707, 4708) | Novel Protein sim. GBank gi\|728850\|sp\|P08640\|AMYH_YEAST - | | UNCLASSIFIED | 1017 |
| | | GLUCOAMYLASE S1/S2 PRECURSOR (GLUCAN 1,4-ALPHA- | | | |
| | | GLUCOSIDASE) (1,4-ALPHA-D-GLUCAN GLUCOHYDROLASE) | | | |
| 1712 | 79184203 (3903, 3904) | Novel Protein sim. GBank gi\|728867\|sp\|P40602\|APG_ARATH - ANTER- | | UNCLASSIFIED | 1025 |
| | | SPECIFIC PROLINE-RICH PROTEIN APG PRECURSOR | | | |
| 1713 | 79841889 (4103, 4104) | Novel Protein sim. GBank gi\|728868\|sp\|P40603\|APG_BRANA - ANTER- | | UNCLASSIFIED | 1001, 1023, 1041 |
| | | SPECIFIC PROLINE-RICH PROTEIN APG (PROTEIN CEX) | | | |
| 1714 | 17903925 (5907, 5908) | Novel Protein sim. GBank gi\|729400\|sp\|P39677\|EFG2_YEAST - | | UNCLASSIFIED | 1006 |
| | | ELONGATION FACTOR G, MITOCHONDRIAL 2 PRECURSOR (MEF-G- | | | |
| | | 2) | | | |
| 1715 | 27829695 (5231, 5232) | Novel Protein sim. GBank gi\|729633\|sp\|Q05562\|GRPE_STRCO - GRPE | | UNCLASSIFIED | 1020 |
| | | PROTEIN | | | |
| 1716 | 11668373 (7949, 7950) | Novel Protein sim. GBank gi\|731172\|sp\|P17437\|XP2_XENLA - SKIN | | UNCLASSIFIED | 1022 |
| | | SECRETORY PROTEIN XP2 PRECURSOR (APEG PROTEIN) | | | |
| 1717 | 16844901 (1383, 1384) | Novel Protein sim. GBank gi\|731409\|sp\|P39992\|YEC3_YEAST - | | UNCLASSIFIED | 1021 |
| | | HYPOTHETICAL 78.3 KD PROTEIN IN RIP1-URA3 INTERGENIC | | | |
| | | REGION | | | |
| 1718 | 71793792 (2339, 2340) | Novel Protein sim. GBank gi\|731433\|sp\|P40007\|YEJ2_YEAST - | | UNCLASSIFIED | 1006, 1007 |
| | | HYPOTHETICAL 26.9 KD PROTEIN IN MNN1-PM140 INTERGENIC | | | |
| | | REGION | | | |
| 1719 | 11695753 (2793, 2794) | Novel Protein sim. GBank gi\|731445\|sp\|P40017\|YEL4_YEAST - | | UNCLASSIFIED | 1031 |
| | | HYPOTHETICAL 103.3 KD PROTEIN IN PRO3-GCD11 INTERGENIC | | | |
| | | REGION | | | |
| 1720 | 8489149 (1727, 1728) | Novel Protein sim. GBank gi\|731483\|sp\|P40053\|YER0_YEAST - | | UNCLASSIFIED | 1022 |
| | | HYPOTHETICAL 72.4 KD PROTEIN IN PTP3-ILV1 INTERGENIC | | | |
| | | REGION | | | |
| 1721 | 20482342 (7967, 7968) | Novel Protein sim. GBank gi\|731485\|sp\|P40055\|YER2_YEAST - | | UNCLASSIFIED | 1008 |
| | | HYPOTHETICAL 62.3 KD PROTEIN IN PTP3-ILV1 INTERGENIC | | | |
| | | REGION | | | |
| 1722 | 25234447 (4059, 4060) | Novel Protein sim. GBank gi\|731504\|sp\|P40071\|YEU3_YEAST - | | UNCLASSIFIED | 1041 |
| | | HYPOTHETICAL 81.5 KD PROTEIN IN USS1-BEB1 INTERGENIC | | | |
| | | REGION | | | |
| 1723 | 27850401 (5077, 5078) | Novel Protein sim. GBank gi\|731505\|sp\|P40072\|YEU6_YEAST - | | UNCLASSIFIED | 1020 |
| | | HYPOTHETICAL 30.8 KD PROTEIN IN SPR6-RPL17B INTERGENIC | | | |
| | | REGION | | | |
| 1724 | 9402873 (581, 582) | Novel Protein sim. GBank gi\|731586\|sp\|Q02998\|YH19_RHOCA - | | UNCLASSIFIED | 1002 |
| | | HYPOTHETICAL 104.1 KD PROTEIN IN HYPE 3′REGION (ORF19) | | | |
| 1725 | 79608399 (3767, 3768) | Novel Protein sim. GBank gi\|731676\|sp\|P38796\|YHN5_YEAST - | | UNCLASSIFIED | 1004 |
| | | HYPOTHETICAL 44.9 KD PROTEIN IN ERG7-NMD2 INTERGENIC | | | |
| | | REGION | | | |
| 1726 | 30649562 (4735, 4736) | Novel Protein sim. GBank gi\|731678\|sp\|P38799\|YHN8_YEAST - | | UNCLASSIFIED | 1020 |
| | | HYPOTHETICAL 63.3 KD PROTEIN IN NMD2-IRE1 INTERGENIC | | | |
| | | REGION | | | |
| 1727 | 80503463 (8265, 8266) | Novel Protein sim. GBank gi\|731707\|sp\|P38827\|SET1_YEAST - SET1 | | UNCLASSIFIED | 1002, 1006, 1010, 1020, |
| | | PROTEIN | | | 1022, 1025, 1031 |
| 1728 | 20698592 (8489, 8490) | Novel Protein sim. GBank gi\|731709\|Sp\|P38829\|YHS2_YEAST - | | UNCLASSIFIED | 1031 |
| | | HYPOTHETICAL 25.7 KD PROTEIN IN MSH1-EPT1 INTERGENIC | | | |
| | | REGION | | | |
| 1729 | 79621559 (5987, 5988) | Novel Protein sim. GBank gi\|731745\|sp\|P38865\|YHX5_YEAST - | | UNCLASSIFIED | 1004 |
| | | HYPOTHETICAL 21.7 KD PROTEIN IN ENO2-STB5 INTERGENIC | | | |
| | | REGION | | | |
| 1730 | 21437268 (8237, 8238) | Novel Protein sim. GBank gi\|731813\|sp\|P40523\|YIF5_YEAST - | | UNCLASSIFIED | 1020, 1031 |
| | | HYPOTHETICAL 70.7 KD PROTEIN IN SNP1-GPP1 INTERGENIC | | | |
| | | REGION | | | |
| 1731 | 80079877 (989, 990) | Novel Protein sim. GBank gi\|731907\|sp\|P40564\|YIS4_YEAST - | | UNCLASSIFIED | 1031 |
| | | HYPOTHETICAL 48.6 KD PROTEIN IN BET1-PAN1 INTERGENIC | | | |
| | | REGION | | | |
| 1732 | 79601791 (1975, 1976) | Novel Protein sim. GBank gi\|731958\|sp\|P39543\|YJT2_YEAST - | | UNCLASSIFIED | 1001, 1007 |
| | | HYPOTHETICAL 26.6 KD PROTEIN IN CDC6-CRY2 INTERGENIC | | | |
| | | REGION PRECURSOR | | | |
| 1733 | 94677403 (6417, 6418) | Novel Protein sim. GBank gi\|731958\|sp\|P39543\|YJT2_YEAST - | | UNCLASSIFIED | 1004 |
| | | HYPOTHETICAL 26.6 KD PROTEIN IN CDC6-CRY2 INTERGENIC | | | |
| | | REGION PRECURSOR | | | |
| 1734 | 79234237 (7923, 7924) | Novel Protein sim. GBank gi\|732010\|sp\|P39288\|YJES_ECOLI - | | UNCLASSIFIED | 1015 |
| | | HYPOTHETICAL 43.1 KD PROTEIN IN PSD-AMIB INTERGENIC | | | |
| | | REGION (F379) | | | |
| 1735 | 8219373 (4189, 4190) | Novel Protein sim. GBank gi\|732085\|sp\|P39377\|IADA_ECOLI - | | UNCLASSIFIED | 1031 |
| | | ISOASPARTYL DIPEPTIDASE | | | |
| 1736 | 80047417 (6961, 6962) | Novel Protein sim. GBank gi\|732099\|sp\|P39391\|YJIT_ECOLI - | | UNCLASSIFIED | 1008, 1015 |
| | | HYPOTHETICAL 58.6 KD PROTEIN IN IADA-MCRD INTERGENIC | | | |
| | | REGION | | | |
| 1737 | 10167845 (6693, 6694) | Novel Protein sim. GBank gi\|732122\|sp\|P39411\|YJJX_ECOLI - | | UNCLASSIFIED | 1002 |
| | | HYPOTHETICAL 18.6 KD PROTEIN IN TRPR-GPMB INTERGENIC | | | |
| | | REGION (F173) | | | |
| 1738 | 80428548 (5929, 5930) | Novel Protein sim. GBank gi\|732198\|sp\|P40168\|YNT5_YEAST - | | UNCLASSIFIED | 1003, 1004, 1006, 1007, |
| | | HYPOTHETICAL 26.5 KD PROTEIN IN WHI3-CHS1 INTERGENIC | | | 1008, 1010, 1015, 1020, |
| | | REGION | | | 1021, 1022, 1023, 1025, |
| | | | | | 1028, 1031, 1036, 1041 |
| 1739 | 95010059 (2715, 2716) | Novel Protein sim. GBank gi\|732362\|sp\|P39616\|DHA2_BACSU - | | UNCLASSIFIED | 1006 |
| | | PROBABLE ALDEHYDE DEHYDROGENASE YWDH | | | |
| 1740 | 56152651 (2215, 2216) | Novel Protein sim. GBank gi\|80728\|pir\|\|S18942 - hypothetical protein | | UNCLASSIFIED | 1024, 1026 |
| | | (whiB 3′ region) - Streptomyces coelicolor | | | |
| 1741 | 27372182 (4367, 4368) | Novel Protein sim. GBank gi\|808852 (J03477) - unknown protein | | UNCLASSIFIED | 1007 |
| | | [Saccharomyces cerevisiae] | | | |
| 1742 | 27981046 (579, 580) | Novel Protein sim. GBank gi\|81286\|pir\|\|S22697 - extensin - Volvox carteri | | UNCLASSIFIED | 1004 |
| | | (fragment) | | | |
| 1743 | 79182256 (2649, 2650) | Novel Protein sim. GBank gi\|81286\|pir\|\|S22697 - extensin - Volvox carteri | | UNCLASSIFIED | 1028, 1036 |
| | | (fragment) | | | |
| 1744 | 17710350 (1997, 1998) | Novel Protein sim. GBank gi\|83589\|pir\|\|B22671 - TyB protein - yeast | | UNCLASSIFIED | 1015 |
| | | (Saccharomyces cerevisiae) transposon Ty912 | | | |
| 1745 | 80255924 (691, 692) | Novel Protein sim. GBank gi\|854065\|emb\|CAA58337\| - (X83413) U88 | | UNCLASSIFIED | 1008, 1022 |
| | | [Human herpesvirus 6] | | | |
| 1746 | 8491831 (837, 838) | Novel Protein sim. GBank gi\|854065\|emb\|CAA58337\| - (X83413) U88 | | UNCLASSIFIED | 1031 |
| | | [Human herpesvirus 6] | | | |
| 1747 | 20589867 (3597, 3598) | Novel Protein sim. GBank gi\|854065\|emb\|CAA58337\| - (X83413) U88 | | UNCLASSIFIED | 1050 |
| | | [Human herpesvirus 6] | | | |
| 1748 | 78471213 (4047, 4048) | Novel Protein sim. GBank gi\|854065\|emb\|CAA58337\| - (X83413) U88 | | UNCLASSIFIED | 1041 |
| | | [Human herpesvirus 6] | | | |
| 1749 | 11614741 (4519, 4520) | Novel Protein sim. GBank gi\|854065\|emb\|CAA58337\| - (X83413) U88 | | UNCLASSIFIED | 1022 |
| | | [Human herpesvirus 6] | | | |
| 1750 | 79581891 (7327, 7328) | Novel Protein sim. GBank gi\|854065\|emb\|CAA58337\| - (X83413) U88 | | UNCLASSIFIED | 1022 |
| | | [Human herpesvirus 6] | | | |
| 1751 | 78677674 (1953, 1954) | Novel Protein sim. GBank gi\|870810 (L43074) - ORF5 [Streptomyces | | UNCLASSIFIED | 1006 |
| | | [glaucescens] | | | |
| 1752 | 11110490 (1075, 1076) | Novel Protein sim. GBank gi\|871531\|emb\|CAA61199\| - (X87947) | | UNCLASSIFIED | 1020 |
| | | glycosyltransferase [Saccharomyces cerevisiae] | | | |
| 1753 | 11686962 (1949, 1950) | Novel Protein sim. GBank gi\|882477 (U28377) - ORF_o211 [Escherichia | | UNCLASSIFIED | 1028 |
| | | coli] | | | |
| 1754 | 78386617 (7421, 7422) | Novel Protein sim. GBank gi\|91205\|pir\|\|E29149 - proline-rich protein - | | UNCLASSIFIED | 1024 |
| | | mouse | | | |
| 1755 | 95412852 (7175, 7176) | Novel Protein sim. GBank gi\|924943 (U29539) - ORFB [Mus musculus] | | UNCLASSIFIED | 1001, 1003, 1008, 1020, |
| | | | | | 1022, 1040, 1041 |
| 1756 | 13504589 (8929, 8930) | Novel Protein sim. GBank gi\|95100\|pir\|\|S21334 - hypothetical protein 4 - | | UNCLASSIFIED | 1001 |
| | | Agrobacterium tumefaciens | | | |
| 1757 | 57129414 (5259, 5260) | Novel Protein sim. GBank gi\|961450\|dbJ\|BAA09929\| - (D63879) KIAA0156 | | UNCLASSIFIED | 1031 |
| | | gene product is related to Xenopus nucleolin. [Homo sapiens] | | | |
| 1758 | 79216186 (5981, 5982) | Novel Protein sim. GBank gi\|96198\|pir\|\|JC1108 - Na+/H+-exchanging | | UNCLASSIFIED | 1022 |
| | | protein nhaB - Escherichia coli | | | |
| 1759 | 3375663 (1511, 1512) | Novel Protein sim. GBank gi\|2094851\|emb\|CAA72162\| - (Y11304) | Contains protein domain | UNCLASSIFIED | 1010 |
| | | ferredoxin [Rhodobacter capsulatus] | (PF00111) - 2Fe-2S iron-sulfur | | |
| | | | cluster binding domains | | |
| 1760 | 39403334 (481, 482) | Novel Protein sim. GBank gi\|730917\|sp\|P39076\|TCPB_YEAST - T- | Contains protein domain | UNCLASSIFIED | 1004, 1020, 1022, 1041 |
| | | COMPLEX PROTEIN 1, BETA SUBUNIT (TCP-1-BETA) (CCT-BETA) | (PF00118) - TCP-1/cpn60 | | |
| | | | chaperonin family | | |
| 1761 | 9940240 (3221, 3222) | Novel Protein sim. GBank gi\|3581868\|emb\|CAA20824\| - (AL031541) | Contains protein domain | UNCLASSIFIED | 1015 |
| | | putative glutamine synthetase [Streptomyces coelicolor] | (PF00120) - Glutamine | | |
| | | | synthetase | | |
| 1762 | 11688146 (3229, 3230) | Novel Protein sim. GBank gi\|2894386\|emb\|CAA74996\| - (Y14683) Bpu101 | Contains protein domain | UNCLASSIFIED | 1004 |
| | | (5m)cytosine-specific DNA modification methyltransferase (C1) [Bacillus | (PF00145) - C-5 cytosine-specific | | |
| | | pumilus] | DNA methylase | | |
| 1763 | 78673297 (6737, 6738) | Novel Protein sim. GBank gi\|731628\|sp\|P38702\|YHG2_YEAST - | Contains protein domain | UNCLASSIFIED | 1024 |
| | | PUTATIVE MITOCHONDRIAL CARRIER YHR002W | (PF00153) - Mitochondrial carrier | | |
| | | | proteins | | |
| 1764 | 79247936 (941, 942) | Novel Protein sim. GBank gi\|2662573 (AF036693) - Similar to UDP- | Contains protein domain | UNCLASSIFIED | 1022 |
| | | glucuronosyltransferase [Caenorhabditis elegans] | (PF00201) - UDP-glucoronosyl | | |
| | | | and UDP-glucosyl transferases | | |
| 1765 | 80022725 (239, 240) | Novel Protein sim. GBank gi\|171523 (J02802) - fumarase | Contains protein domain | UNCLASSIFIED | 1003 |
| | | [Saccharomyces cerevisiae] | (PF00206) - Lyase | | |
| 1766 | 20288092 (1139, 1140) | Novel Protein sim. GBank gi\|416644\|sp\|P11447\|ARLY_ECOLI - | Contains protein domain | UNCLASSIFIED | 1031 |
| | | ARGININOSUCCINATE LYASE (ARGINOSUCCINASE) (ASAL) | (PF00206) - Lyase | | |
| 1767 | 79915187(345, 346) | Novel Protein sim. GBank gi\|4704562\|gb\|AAD28162.1\|AF10227 - | Contains protein domain | UNCLASSIFIED | 1001 |
| | | (AF102270) fumarase C [Pseudomonas putida] | (PF00206) - Lyase | | |
| 1768 | 16754986 (2841, 2842) | Novel Protein sim. GBank gi\|298750\|bbs\|127942 - photosystem\|reaction | Contains protein domain | UNCLASSIFIED | 1041 |
| | | center protein psaA product [Sorghum bicolor, Qiuji No. 5, Peptide | (PF00223) - Photosystem\|psaA | | |
| | | Chloroplast, 750 aa] | and psaB proteins | | |
| 1769 | 42940912 (7619, 7620) | | Conlains protein domain | UNCLASSIFIED | 1034 |
| | | | (PF00238) - Ribosomal protein | | |
| | | | L14 | | |
| 1770 | 79260305 (1443, 1444) | Novel Protein sim. GBank gi\|543793\|sp\|P36953\|AFAM_RAT - AFAMIN | Contains protein domain | UNCLASSIFIED | 1002 |
| | | PRECURSOR (ALPHA-ALBUMIN) (ALPHA-ALB) | (PF00273) - Serum albumin family | | |
| 1771 | 79242014 (551, 552) | Novel Protein sim. GBank gi\|2326743\|emb\|CAB10957\| - (Z98268) | Contains protein domain | UNCLASSIFIED | 1007, 1021 |
| | | hypothetical protein Rv1700 [Mycobacterium tuberculosis] | (PF00293) - Bacterial mutT | | |
| | | | protein | | |
| 1772 | 66143987 (8011, 8012) | Novel Protein sim. GBank gi\|1706734\|sp\|P19911\|F16P_ALCEU - | Contains protein domain | UNCLASSIFIED | 1008 |
| | | FRUCTOSE-1,6-BISPHOSPHATASE, CHROMOSOMAL (D-FRUCTOSE- | (PF00316) - Fructose-1-6- | | |
| | | 1,6-BISPHOSPHATE 1-PHOSPHOHYDROLASE) (FBPASE) | bisphosphatase | | |
| 1773 | 20295089 (5037, 5038) | Novel Protein sim. GBank gi\|2495410\|sp\|P55740\|SLYA_ECOLI - | Contains protein domain | UNCLASSIFIED | 1031 |
| | | TRANSCRIPTIONAL REGULATOR SLYA | (PF00325) - Bacterial regulatory | | |
| | | | proteins, crp family | | |
| 1774 | 11773671 (3785, 3786) | Novel Protein sim. GBank gi\|1017706 (U17901) - PLAP [Rattus | Contains protein domain | UNCLASSIFIED | 1020 |
| | | norvegicus] | (PF00400) - WD domain, G-beta | | |
| | | | repeat | | |
| 1775 | 78979108 (6567, 6568) | | Contains protein domain | UNCLASSIFIED | 1041, 1051 |
| | | | (PF00439) - Bromodomain | | |
| 1776 | 20626695 (4261, 4262) | Novel Protein sim. GBank gi\|3261533\|emb\|CAA17469\| - (AL021943) | Contains protein domain | UNCLASSIFIED | 1003 |
| | | fadE8 [Mycobacterium tuberculosis] | (PF00441) - Acyl-CoA | | |
| | | | dehydrogenase | | |
| 1777 | 20292744 (7133, 7134) | Novel Protein sim. GBank gi\|1174884\|sp\|P44391\|URE1_HAEIN - | Contains protein domain | UNCLASSIFIED | 1031 |
| | | UREASE ALPHA SUBUNIT (UREA AMIDOHYDROLASE) | (PF00449) - Urease | | |
| 1778 | 10195690 (2707, 2708) | Novel Protein sim. GBank gi\|1174887\|sp\|P42873\|URE1_STAXY - | Contains protein domain | UNCLASSIFIED | 1002 |
| | | UREASE ALPHA SUBUNIT (UREA AMIDOHYDROLASE) | (PF00449) - Urease | | |
| 1779 | 10867085 (4883, 4884) | Novel Protein sim. GBank gi\|2708800 (AF035751) - urease alpha subunit | Contains protein domain | UNCLASSIFIED | 1004 |
| | | [Synechococcus PCC7002] | PF00449) - Urease | | |
| 1780 | 79834132 (1019, 1020) | Novel Protein sim. GBank gi\|4204900 (U57100) - unknown [Brucella | Contains protein domain | UNCLASSIFIED | 1006 |
| | | abortus] | (PF00455) - Bacterial regulatory | | |
| | | | proteins, deoR family | | |
| 1781 | 11349599(6173, 6174) | Novel Protein sim. GBank gi\|312667\|emb\|CAA48166\| - (X68025) | Contains protein domain | UNCLASSIFIED | 1031 |
| | | transketolase [Escherichia coli] | (PF00456) - Transketolase | | |
| 1782 | 28002779 (2717, 2718) | Novel Protein sim. GBank gi\|2564237\|emb\|CAA71199.1\| - (Y10112) | Contains protein domain | UNCLASSIFIED | 1002 |
| | | omega-6 desaturase [Gossypium hirsutum] | (PF00487) - Fatty acid desaturase | | |
| 1783 | 11669560(4897, 4898) | | Contains protein domain | UNCLASSIFIED | 1022 |
| | | | (PF00490) - Delta-aminolevulinic | | |
| | | | acid dehydratase | | |
| 1784 | 20261727 (6205, 6206) | Novel Protein sim. GBank gi\|2950464\|emb\|CAA17814\| - (AL022071) | Contains protein domain | UNCLASSIFIED | 1004 |
| | | hypothetical protein [Schizosaccharomyces pombe] | (PF00514) - Armadillo/beta- | | |
| | | | catenin-like repeats | | |
| 1785 | 20293306 (2141, 2142) | Novel Protein sim. GBank gi\|2104303\|emb\|CAB08632\| - (Z95387) | Contains protein domain | UNCLASSIFIED | 1031 |
| | | hypothetical protein Rv2610c [Mycobacterium tuberculosis] | (PF00534) - Glycosyl transferases | | |
| | | | group 1 | | |
| 1786 | 79582340 (7679, 7680) | Novel Protein sim. GBank gi\|2983961 (AE000748) - succinyl-CoA ligase | Contains protein domain | UNCLASSIFIED | 1020 |
| | | beta subunit [Aquifex aeolicus] | (PF00549) - CoA-ligases | | |
| 1787 | 27929188 (7705, 7706) | Novel Protein sim. GBank gi\|3288113\|emb\|CAB09803\| - (Z97067) | Contains protein domain | UNCLASSIFIED | 1002, 1004, 1020, 1022, |
| | | elongation factor 1-beta [Beta vulgaris] | (PF00736) - EF-1 guanine | | 1050 |
| | | | nucleotide exchange domain | | |
| 1788 | 10870719 (1037, 1038) | Novel Protein sim. GBank gi\|2507075\|sp\|P15302\|NAGD_ECOLI - NAGD | Contains protein domain | UNCLASSIFIED | 1004 |
| | | PROTEIN | (PF00807) - Apldaecin | | |
| 1789 | 19871965 (8067, 8068) | | Contains protein domain | UNCLASSIFIED | 1031 |
| | | | (PF00818) - Ice nucleation protein | | |
| | | | repeat | | |
| 1790 | 66442693 (7359, 7360) | Novel Protein sim. GBank gi\|1653153\|dbj\|BAA18069\| - (D90911) acriflavin | Contains protein domain | UNCLASSIFIED | 1020, 1036 |
| | | resistance protein [Synechocystis sp.] | (PF00873) - AcrB/AcrD/AcrF | | |
| | | | family | | |
| 1791 | 79209027 (6515, 6516) | Novel Protein sim. GBank gi\|1653901\|dbj\|BAA18811\| - (D90917) | Contains protein domain | UNCLASSIFIED | 1001, 1008 |
| | | acriflavine resistance protein [Synechocystis sp.] | (PF00873) - AcrB/AcrD/AcrF | | |
| | | | family | | |
| 1792 | 85800164 (1463, 1464) | Novel Protein sim. GBank gi\|2501534\|sp\|P75802\|YLIG_ECOLI - | Contains protein domain | UNCLASSIFIED | 1023 |
| | | HYPOTHETICAL 49.6 KD PROTEIN IN MOEA-DACC INTERGENIC | (PF00919) - Uncharacterized | | |
| | | REGION | protein family UPF0004 | | |
| 1793 | 13519117 (2381, 2382) | Novel Protein sim. GBank gi\|2995295\|emb\|CAA18324\| - (AL022268) | Contains protein domain | UNCLASSIFIED | 1022 |
| | | hypothetical protein SC4H2.08 [Streptomyces coelicolor] | (PF00919) - Uncharacterized | | |
| | | | protein family UPF0004 | | |
| 1794 | 79652522 (3871, 3872) | Novel Protein sim. GBank gi\|3294240\|emb\|CAA19853\| - (AL031031) | Contains protein domain | UNCLASSIFIED | 1008, 1024, 1028 |
| | | hypothetical protein SC7C7.07 [Streptomyces coelicolor] | (PF00919) - Uncharacterized | | |
| | | | protein family UPF0004 | | |
| 1795 | 21421629 (7513, 7514) | Novel Protein sim. GBank gi\|418514\|sp\|P32669\|TALC_ECOLI - | Contains protein domain | UNCLASSIFIED | 1020 |
| | | TRANSALDOLASE-LIKE PROTEIN TALC | (PF00923) - Transaldolase | | |
| 1796 | 80236478 (7609, 7610) | Novel Protein sim. GBank gi\|120626\|sp\|P25337\|G10_YEAST - G10 | Contains protein domain | UNCLASSIFIED | 1003, 1004, 1006, 1015, |
| | | PROTEIN HOMOLOG | (PF01125) - G10 protein | | 1020, 1022, 1031, 1036 |
| 1797 | 80581279 (4827, 4828) | Novel Protein sim. GBank gi\|400619\|sp\|P14306\|DKA1_YEAST - DKA1 | Contains protein domain | UNCLASSIFIED | 1002, 1006, 1008,1015, |
| | | PROTEIN (NSP1 PROTEIN) (TFS1 PROTEIN) | (PF01161) - | | 1020, 1022, 1028, 1051, |
| | | | phosphatldylethanolamine- | | 1055 |
| | | | binding protein | | |
| 1798 | 78522096 (2529, 2530) | Novel Protein sim. GBank gi\|1175964\|sp\|P43544\|YFG0_YEAST - | Contains protein domain | UNCLASSIFIED | 1000, 1006,1007 |
| | | HYPOTHETICAL 25.1 KD PROTEIN IN THI5 5′REGION | (PF01174) - uncharacterized | | |
| | | | protein family UPF0030 | | |
| 1799 | 14998905 (5889, 5890) | Novel Protein sim. GBank gi\|2137494\|pir\|\|S66498 - M-sema F protein | Contains protein domain | UNCLASSIFIED | 1022 |
| | | precusor - mouse | (PF01403) - Sema domain | | |
| 1800 | 79633420 (5751, 5752) | Novel Protein sim. GBank gi\|1351621\|sp\|Q09860\|YAF6_SCHPO - | Contains protein domain | UNCLASSIFIED | 1021, 1036 |
| | | PUTATIVE CYSTEINYL-TRNA SYNTHETASE C29E6.06C (CYSTEINE- | (PF01406) - tRNA synthetases | | |
| | | TRNA LIGASE) (CYSRS) | class I (C) | | |
| 1801 | 20435633 (2577, 2578) | Novel Protein sim. GBank gi\|146345 (K02844) - phenylalanyl-tRNA | Contains protein domain | UNCLASSIFIED | 1022 |
| | | synthetase alpha-subunit [Escherichia coli] | (PF01409) - tRNA synthetases | | |
| | | | class II (F) | | |
| 1802 | 7432090 (5995, 5996) | Novel Protein sim. GBank gi\|1730713\|sp\|P53971\|YNC3_YEAST - | Contains protein domain | UNCLASSIFIED | 1055 |
| | | HYPOTHETICAL 108.5 KD PROTEIN IN UME3-PUB1 INTERGENIC | (PF01422) - Zinc finger | | |
| | | REGION | | | |
| 1803 | 25139015 (6993, 6994) | Novel Protein sim. GBank gi\|4982025\|gb\|AAD36528.1\|AE00179 - | Contains protein domain | UNCLASSIFIED | 1024 |
| | | (AE001797) jag protein, putative [Thermotoga maritima] | (PF01424) - R3H domain | | |
| 1804 | 78786559 (6967, 6968) | Novel Protein sim. GBank gi\|1351433\|sp\|P47737\|X194_ECOLI - X | Contains protein domain | UNCLASSIFIED | 1006 |
| | | POLYPEPTIDE (ORF 19) (P19 PROTEIN) (ORF169) | (PF01464) - Transglycosylase | | |
| | | | SLT domain | | |
| 1805 | 70287383 (1917, 1918) | Novel Protein sim. GBank gi\|136131\|sp\|P06694\|TRA3_ECOLI - | contains protein domain | UNCLASSIFIED | 1007 |
| | | TRANSPOSASE FOR TRANSPOSON TN21 | (PF01526) - Transposase | | |
| 1806 | 80234027 (1735, 1736) | Novel Protein sim. GBank gi\|227157\|prf\|\|1615302A - Zn/Cd resistance | Contains protein domain | UNCLASSIFIED | 1020, 1022 |
| | | gene [Saccharomyces cerevisiae] | (PF01545) - Cation efflux family | | |
| 1807 | 80209420 (233, 234) | Novel Protein sim. GBank gi\|2494141\|sp\|P56064\|PRIM_HELPY - DNA | Contains protein domain | UNCLASSIFIED | 1031 |
| | | PRIMASE | (PF01751) - Toprim domain | | |
| 1808 | 36848042 (4401, 4402) | Novel Protein sim. GBank gi\|435743\|bbs\|139151 - (S66567) alpha-atrial | Contains protein domain | UNCLASSIFIED | 1050 |
| | | natriuretic factor/coat protein, alpha-ANF/coat protein = fusion | (PF01819) - Levivirus coat protein | | |
| | | polypeptide(coat protein, alpha-atrial natriuretic factor, alpha-ANF) | | | |
| | | [human, bacteriophage fr, expression vector pFAN15, Peptide | | | |
| | | PlasmidSynthetic . . . | | | |
| 1809 | 21426822 (5517, 5518) | Novel Protein sim. GBank gi\|95567\|pir\|\|S21562 - hypothetical protein B - | Contains protein domain | UNCLASSIFIED | 1020 |
| | | Erwinia amylovora | (PF01836) - Transposase | | |
| 1810 | 80054040 (4009, 4010) | Novel Protein sim. GBank gi\|1001236\|dbj\|BAA10477\| - (D64003) | | UNCLASSIFIED | 1001, 1003, 1015, 1026, |
| | | hypothetical protein [Synechocystis sp.] | | | 1031, 1050 |
| 1811 | 79163120 (8915, 8916) | Novel Protein sim. GBank gi\|1001304\|dbj\|BAA10791\| - (D64006) | | UNCLASSIFIED | 1028 |
| | | hypothetical protein [Synechocystis sp.] | | | |
| 1812 | 27981021 (4579, 4580) | Novel Protein sim. GBank gi\|101245\|pir\|\|S15038 - cell division control | | UNCLASSIFIED | 1004 |
| | | protein CDC15 - yeast (Saccharomyces cerevisiae) | | | |
| 1813 | 12851296 (7091, 7092) | Novel Protein sim. GBank gi\|1055177 (U40060) - weakly similar to E. | | UNCLASSIFIED | 1028 |
| | | nidulans bimA gene product (SP: P17885) [Caenorhabditis elegans] | | | |
| 1814 | 78785447 (4111, 4112) | Novel Protein sim. GBank gi\|1074957\|pir\|\|164084 - lactoferrin binding | | UNCLASSIFIED | 1006, 1020 |
| | | protein (lbpA) homolog - Haemophilus lnfluenzae (strain Rd KW20) | | | |
| 1815 | 78676883 (2253, 2254) | Novel Protein sim. GBank gi\|1077325\|pir\|\|S50966 - probable membrane | | UNCLASSIFIED | 1007 |
| | | protein YLL054c - yeast (Saccharomyces cerevisiae) | | | |
| 1816 | 30149873 (3987, 3988) | Novel Protein sim. GBank gi\|1077333\|pir\|\|S51473 - probable membrane | | UNCLASSIFIED | 1003, 1015, 1020, 1023, |
| | | protein YLR386w - yeast (Saccharomyces cerevisiae) | | | 1025, 1031, 1036 |
| 1817 | 30455430 (2125, 2126) | Novel Protein sim. GBank gi\|1077367\|pir\|\|S51457 - probable membrane | | UNCLASSIFIED | 1006 |
| | | protein YLR238w - yeast (Saccharomyces cerevisiae) | | | |
| 1818 | 10205983 (895, 896) | Novel Protein sim. GBank gi\|1077411\|pir\|\|S51434 - hypothetical protein | | UNCLASSIFIED | 1004 |
| | | YLR189c - yeast (Saccharomyces cerevisiae) | | | |
| 1819 | 80219715 (2101, 2102) | Novel Protein sim. GBank gi\|1077576\|pir\|\|S52683 - probable membrane | | UNCLASSIFIED | 1003, 1004, 1014, 1020, |
| | | protein YDR118w - yeast (Saccharomyces cerevisiae) | | | 1022, 1031 |
| 1820 | 39547823 (7469, 7470) | Novel Protein sim. GBank gi\|1084649\|pir\|\|S55965 - probable membrane | | UNCLASSIFIED | 1004, 1036 |
| | | protein YLR409c - yeast (Saccharomyces cerevisiae) | | | |
| 1821 | 79251709 (1645, 1646) | Novel Protein sim. GBank gi\|1109849 (U41538) - proline rich | | UNCLASSIFIED | 1022 |
| | | [Caenorhabditis elegans] | | | |
| 1822 | 80440066 (301, 302) | Novel Protein sim. GBank gi\|1110587\|bbs\|170532 - (S79410) nuclear | | UNCLASSIFIED | 1008, 1031, 1035 |
| | | localization signals (NLS)-binding protein = spot-1 [mice, Balb/c, testes, | | | |
| | | Peptide, 140 aa] [Mus sp.] | | | |
| 1823 | 20702777 (7387, 7388) | Novel Protein sim. GBank gi\|111817\|pir\|\|S18426 - hypothetical protein 4 - | | UNCLASSIFIED | 1004 |
| | | rat | | | |
| 1824 | 78159669 (2761, 2762) | Novel Protein sim. GBank gi\|112205\|pir\|\|B39066 - proline-rich protein 15 - | | UNCLASSIFIED | 1050 |
| | | rat | | | |
| 1825 | 10173861 (6687, 6688) | Novel Protein sim. GBank gi\|113618\|sp\|P19537\|ALF_CORGL - | | UNCLASSIFIED | 1003 |
| | | FRUCTOSE-BISPHOSPHATE ALDOLASE | | | |
| 1826 | 78835806 (7143, 7144) | Novel Protein sim. GBank gi\|113618\|sp\|P19537\|ALF_CORGL - | | UNCLASSIFIED | 1006, 1020, 1024 |
| | | FRUCTOSE-BISPHOSPHATE ALDOLASE | | | |
| 1827 | 17927323 (3569, 3570) | Novel Protein sim. GBank gi\|1136426\|dbj\|BAA11500\| - (D80005) | | UNCLASSIFIED | 1035, 1041 |
| | | KIAA0183 [Homo sapiens] | | | |
| 1828 | 30245237 (5493, 5494) | Novel Protein sim. GBank gi\|113671\|sp\|P23964\|ALUF_HUMAN - !!!! ALU | | UNCLASSIFIED | 1041 |
| | | CLASS F WARNING ENTRY !!!! | | | |
| 1829 | 79250012 (6861, 6862) | Novel Protein sim. GBank gi\|114699\|sp\|P18496\|ATPY_YEAST - ATP10 | | UNCLASSIFIED | 1023 |
| | | PROTEIN | | | |
| 1830 | 78786528 (1291, 1292) | Novel Protein sim. GBank gi\|114908\|sp\|P28657\|BE16_MOUSE - BRAIN | | UNCLASSIFIED | 1020 |
| | | PROTEIN E161 | | | |
| 1831 | 8499644 (2497, 2498) | Novel Protein sim. GBank gi\|1167959 (U43409) - cathelin related | | UNCLASSIFIED | 1003, 1022 |
| | | antimicrobial peptide [Mus musculus] | | | |
| 1832 | 78388041 (2571, 2572) | Novel Protein sim. GBank gi\|1169483\|sp\|P43897\|EFTS_HUMAN - | | UNCLASSIFIED | 1007 |
| | | MITOCHONDRIAL ELONGATION FACTOR TS PRECURSOR (EF-TS) | | | |
| | | (EF-TSMT) | | | |
| 1833 | 7509905 (5725, 5726) | Novel Protein sim. GBank gi\|1169782\|sp\|P45432\|FUS6_ARATH - FUSCA | | UNCLASSIFIED | 1055 |
| | | PROTEIN FUS6 | | | |
| 1834 | 80187797 (3427, 3428) | Novel Protein sim. GBank gi\|1170950\|sp\|P43638\|MHP1_YEAST - MAP- | | UNCLASSIFIED | 1055 |
| | | HOMOLOGOUS PROTEIN 1 | | | |
| 1835 | 94140105 (3211, 3212) | Novel Protein sim. GBank gi\|1171085\|sp\|P44958\|MVIN_HAEIN - | | UNCLASSIFIED | 1008 |
| | | VIRULENCE FACTOR MVIN HOMOLOG | | | |
| 1836 | 34408496 (1175, 1176) | Novel Protein sim. GBank gi\|1172508\|sp\|P43502\|PILI_PSEAE - PILI | | UNCLASSIFIED | 1027 |
| | | PROTEIN | | | |
| 1837 | 38602558 (3867, 3868) | Novel Protein sim. GBank gi\|1172573\|sp\|P43923\|PPCK_HAEIN - | | UNCLASSIFIED | 1022 |
| | | PHOSPHOENOLPYRUVATE CARBOXYKINASE (ATP) | | | |
| 1838 | 39507802 (4515, 4516) | Novel Protein sim. GBank gi\|1174426\|sp\|P41833\|SPO8_YEAST - | | UNCLASSIFIED | 1031 |
| | | TRANSCRIPTIONAL REGULATOR SPO8 | | | |
| 1839 | 17962587 (3535, 3536) | Novel Protein sim. GBank gi\|1174508\|sp\|P43820\|SYFB_HAEIN - | | UNCLASSIFIED | 1021 |
| | | PHENYLALANYL-TRNA SYNTHETASE BETA CHAIN | | | |
| | | (PHENYLALANINE-TRNA LIGASE BETA CHAIN) | | | |
| | | (PHERS) | | | |
| 1840 | 9875260 (1611, 1612) | Novel Protein sim. GBank gi\|1174661\|sp\|P44594\|TGT_HAEIN - | | UNCLASSIFIED | 1041 |
| | | QUEUINE TRNA-RIBOSYLTRANSFERASE (TRNA-GUANINE | | | |
| | | TRANSGLYCOSYLASE) (GUANINE INSERTION ENZYME) | | | |
| 1841 | 29224577 (5639, 5640) | Novel Protein sim. GBank gi\|1174933\|sp\|P44907\|VACB_HAEIN - VACB | | UNCLASSIFIED | 1027 |
| | | PROTEIN HOMOLOG | | | |
| 1842 | 11293241 (3207, 3208) | Novel Protein sim. GBank gi\|1175916\|sp\|P43583\|YFA7_YEAST - | | UNCLASSIFIED | 1003 |
| | | HYPOTHETICAL 207.6 KD PROTEIN IN SMC1-SEC4 INTERGENIC | | | |
| | | REGION | | | |
| 1843 | 94123912 (2693, 2694) | Novel Protein sim. GBank gi\|1175935\|sp\|P43570\|YFC7_YEAST - | | UNCLASSIFIED | 1001, 1002, 1003, 1004, |
| | | HYPOTHETICAL 57.6 KD PROTEIN IN CAK1-STE2 INTERGENIC | | | 1006, 1007, 1008, 1010, |
| | | REGION | | | 1014, 1015, 1020, 1021, |
| | | | | | 1022, 1023, 1025, 1026, |
| | | | | | 1028, 1031, 1035, 1036, |
| | | | | | 1041, 1046, 1051 |
| 1844 | 28351735 (8819, 8820) | Novel Protein sim. GBank gi\|1175942\|sp\|P43563\|MOB2_YEAST - MOB2 | | UNCLASSIFIED | 1004, 1006, 1035 |
| | | PROTEIN (MPS1 BINDER 2) | | | |
| 1845 | 78681486 (5407, 5408) | Novel Protein sim. GBank gi\|1176023\|sp\|P43618\|YFL6_YEAST - | | UNCLASSIFIED | 1006 |
| | | HYPOTHETICAL 41.3 KD PROTEIN IN SAP155-YMR31 INTERGENIC | | | |
| | | REGION | | | |
| 1846 | 80497259 (891, 892) | Novel Protein sim. GBank gi\|1176192\|sp\|P45420\|YHCD_ECOLI - | | UNCLASSIFIED | 1010 |
| | | HYPOTHETICAL OUTER MEMBRANE USHER PROTEIN IN GLTF- | | | |
| | | NANT INTERGENIC REGION PRECURSOR | | | |
| 1847 | 79632494 (8133, 8134) | Novel Protein sim. GBank gi\|1176241\|sp\|P45524\|YHET_ECOLI - | | UNCLASSIFIED | 1035 |
| | | HYPOTHETICAL 38.5 KD PROTEIN IN KIFB-PRKB INTERGENIC | | | |
| | | REGION | | | |
| 1848 | 9858912 (6535, 6536) | Novel Protein sim. GBank gi\|1176338\|sp\|P40355\|YJ31_YEAST - | | UNCLASSIFIED | 1021 |
| | | HYPOTHETICAL 108.4 KD PROTEIN IN CBF1-NTA1 INTERGENIC | | | |
| | | REGION | | | |
| 1849 | 78795674 (1969, 1970) | Novel Protein sim. GBank gi\|1176586\|sp\|P42842\|YN53_YEAST - | | UNCLASSIFIED | 1007 |
| | | HYPOTHETICAL 102.3 KD PROTEIN IN DAL82-RFA2 INTERGENIC | | | |
| | | REGION | | | |
| 1850 | 78767526 (7827, 7828) | Novel Protein sim. GBank gi\|1176587\|sp\|P42843\|YN51_YEAST - | | UNCLASSIFIED | 1006 |
| | | HYPOTHETICAL 88.9 KD PROTEIN IN RFA2-STB1 INTERGENIC | | | |
| | | REGION | | | |
| 1851 | 71841899 (8051, 8052) | Novel Protein sim. GBank gi\|1176587\|sp\|P42843\|YN51_YEAST - | | UNCLASSIFIED | 1020, 1041 |
| | | HYPOTHETICAL 88.9 KD PROTEIN IN RFA2-STB1 INTERGENIC | | | |
| | | REGION | | | |
| 1852 | 80218016 (7011, 7012) | Novel Protein sim. GBank gi\|1176588\|sp\|P42844\|YN50_YEAST - | | UNCLASSIFIED | 1003, 1004, 1006, 1010, |
| | | HYPOTHETICAL 23.5 KD PROTEIN IN RFA2-STB1 INTERGENIC | | | 1020, 1021, 1022, 1031, |
| | | REGION | | | 1035, 1036 |
| 1853 | 66770458 (5433, 5434) | Novel Protein sim. GBank gi\|1181176 (L25828) - HrcU [Erwinia | | UNCLASSIFIED | 1046 |
| | | amylovora] | | | |
| 1854 | 79190469 (8031, 8032) | Novel Protein sim. GBank gi\|118376\|sp\|P21169\|DCOR_ECOLI - | | UNCLASSIFIED | 1022 |
| | | ORNITHINE DECARBOXYLASE, CONSTITUTIVE | | | |
| 1855 | 30655196 (1261, 1262) | Novel Protein sim. GBank gi\|1203832 (U46003) - beta-D-glucan | | UNCLASSIFIED | 1020 |
| | | exohydrolase, lsoenzyme Exoll [Hordeum vulgare] | | | |
| 1856 | 13515110 (157, 158) | Novel Protein sim. GBank gi\|1208456\|dbj\|BAA10624\| - (D64004) | | UNCLASSIFIED | 1022 |
| | | hypothetical protein [Synechocystis sp.] | | | |
| 1857 | 33202438 (2705, 2706) | Novel Protein sim. GBank gi\|1213585\|dbj\|BAA07613\| - (D38633) | | UNCLASSIFIED | 1024 |
| | | regulatory protein bphR [Pseudomonas sp.] | | | |
| 1858 | 79815089 (6269, 6270) | Novel Protein sim. GBank gi\|1215732 (U48718) - OphB [Agrobacterium | | UNCLASSIFIED | 1015 |
| | | tumefaciens] | | | |
| 1859 | 87898900 (1201, 1202) | Novel Protein sim. GBank gi\|1230578 (U47057) - orf2 [Vibrio cholerae | | UNCLASSIFIED | 1013 |
| | | O139] | | | |
| 1860 | 25266043 (145, 146) | Novel Protein sim. GBank gi\|123528\|sp\|P14586\|HRP3_PLAFS - | | UNCLASSIFIED | 1051 |
| | | HISTIDINE-RICH PROTEIN | | | |
| 1861 | 11088357 (4101, 4102) | Novel Protein sim. GBank gi\|123530\|sp\|P04929\|HRPX_PLALO - | | UNCLASSIFIED | 1020 |
| | | HISTIDINE-RICH GLYCOPROTEIN PRECURSOR | | | |
| 1862 | 27354200 (4195, 4196) | Novel Protein sim. GBank gi\|123530\|sp\|P04929\|HRPX_PLALO - | | UNCLASSIFIED | 1024 |
| | | HISTIDINE-RICH GLYCOPROTEIN PRECURSOR | | | |
| 1863 | 79453762 (6577, 6578) | Novel Protein sim. GBank gi\|123530\|sp\|P04929\|HRPX_PLALO - | | UNCLASSIFIED | 1014 |
| | | HISTIDINE-RICH GLYCOPROTEIN PRECURSOR | | | |
| 1864 | 11617285 (7797, 7798) | Novel Protein sim. GBank gi\|123530\|sp\|P04929\|HRPX_PLALO - | | UNCLASSIFIED | 1022 |
| | | HISTIDINE-RICH GLYCOPROTEIN PRECURSOR | | | |
| 1865 | 71095614 (5737, 5738) | Novel Protein sim. GBank gi\|1256134\|dbj\|BAA19501\| - (AB002150) YbbE | | UNCLASSIFIED | 1026, 1050 |
| | | [Bacillus subtilis] | | | |
| 1866 | 78674975 (6473, 6474) | Novel Protein sim. GBank gi\|126296\|sp\|P08548\|LIN1_NYCCO - LINE-1 | | UNCLASSIFIED | 1024 |
| | | REVERSE TRANSCRIPTASE HOMOLOG | | | |
| 1867 | 71810492 (6457, 6458) | Novel Protein sim. GBank gi\|126690\|sp\|P22134\|MAG_YEAST - DNA-3- | | UNCLASSIFIED | 1006 |
| | | METHYLADENINE GLYCOSIDASE (3-METHYLADENINE DNA | | | |
| | | GLYCOSYLASE) (3MEA DNA GLYCOSYLASE) | | | |
| 1868 | 95292792 (1365, 1366) | Novel Protein sim. GBank gi\|126822\|sp\|P24279\|MCM3_YEAST - | | UNCLASSIFIED | 1020 |
| | | MINICHROMOSOME MAINTENANCE PROTEIN 3 | | | |
| 1869 | 29247836 (1893, 1894) | Novel Protein sim. GBank gi\|127360\|sp\|P08593\|MS18_YEAST - MSS18 | | UNCLASSIFIED | 1002, 1020 |
| | | PROTEIN | | | |
| 1870 | 80475239 (3185, 3186) | Novel Protein sim. GBank gi\|128399\|sp\|P14743\|NMT_YEAST - | | UNCLASSIFIED | 1003, 1004, 1008, 1010, |
| | | GLYCYLPEPTIDE N-TETRADECANOYLTRANSFERASE (PEPTIDE N- | | | 1015, 1020, 1022, 1023, |
| | | MYRISTOYLTRANSFERASE) (MYRISTOYL-COA: PROTEIN N- | | | 1041 |
| | | MYRISTOYLTRANSFERASE) (NMT) | | | |
| 1871 | 6512354 (1493, 1494) | Novel Protein sim. GBank gi\|130201\|sp\|P15083\|PIGR_RAT - | | UNCLASSIFIED | 1020 |
| | | POLYMERIC-IMMUNOGLOBULIN RECEPTOR PRECURSOR (PLGR) | | | |
| | | [CONTAINS: SECRETORY COMPONENT] | | | |
| 1872 | 17696021 (1253, 1254) | Novel Protein sim. GBank gi\|1314576 (U51197) - unknown | | UNCLASSIFIED | 1041 |
| | | [Sphingomonas S88]. | | | |
| 1873 | 27842091 (6015, 6016) | Novel Protein sim. GBank gi\|1335205\|emb\|CAA36480\| - (X52235) ORFII | | UNCLASSIFIED | 1004 |
| | | [Homo sapiens] | | | |
| 1874 | 20474314 (5691, 5692) | Novel Protein sim. GBank gi\|134253\|sp\|P13458\|SBCC_ECOLI - | | UNCLASSIFIED | 1022 |
| | | EXONUCLEASE SBCC | | | |
| 1875 | 8487312 (1807, 1808) | Novel Protein sim. GBank gi\|1345705\|sp\|P11433\|CC24_YEAST - CELL | | UNCLASSIFIED | 1020 |
| | | DIVISION CONTROL PROTEIN 24 (CALCIUM REGULATORY PROTEIN) | | | |
| 1876 | 86671073 (87, 88) | Novel Protein sim. GBank gi\|134920\|sp\|P21997\|SSGP_VOLCA - | | UNCLASSIFIED | 1002, 1045 |
| | | SULFATED SURFACE GLYCOPROTEIN 185 (SSG 185) | | | |
| 1877 | 79763364 (7595, 7596) | Novel Protein sim. GBank gi\|134920\|sp\|P21997\|SSGP_VOLCA - | | UNCLASSIFIED | 1021 |
| | | SULFATED SURFACE GLYCOPROTEIN 185 (SSG 185) | | | |
| 1878 | 7643007 (7099, 7100) | Novel Protein sim. GBank gi\|1351184\|sp\|P48527\|SYYM_YEAST - | | UNCLASSIFIED | 1031 |
| | | TYROSYL-TRNA SYNTHETASE, MITOCHONDRIAL PRECURSOR | | | |
| | | (TYROSINE-TRNA LIGASE) (TYRRS) | | | |
| 1879 | 79872166 (3571, 3572) | Novel Protein sim. GBank gi\|135135\|sp\|P13030\|SYK1_ECOLI - LYSYL- | | UNCLASSIFIED | 1002 |
| | | TRNA SYNTHETASE (LYSINE-TRNA LIGASE) (LYSRS) | | | |
| 1880 | 11272604 (6829, 6830) | Novel Protein sim. GBank gi\|135160\|sp\|P25345\|SYNM_YEAST - | | UNCLASSIFIED | 1008 |
| | | ASPARAGINYL-TRNA SYNTHETASE, MITOCHONDRIAL PRECURSOR | | | |
| | | (ASPARAGINE-TRNA LIGASE) (ASNRS) | | | |
| 1881 | 23308867 (1233, 1234) | Novel Protein sim. GBank gi\|1351819\|sp\|P48234\|YG3J_YEAST - | | UNCLASSIFIED | 1050 |
| | | HYPOTHETICAL 81.7 KD PROTEIN IN MOL1-NAT2 INTERGENIC | | | |
| | | REGION | | | |
| 1882 | 80434029 (2795, 2796) | Novel Protein sim. GBank gi\|1351822\|sp\|P48237\|YG3M_YEAST - | | UNCLASSIFIED | 1004, 1006, 1010, 1022, |
| | | HYPOTHETICAL 101.4 KD PROTEIN IN RPL30B-RSR1 INTERGENIC | | | 1023, 1028, 1031, 1035 |
| | | REGION | | | |
| 1883 | 17297596 (2595, 2596) | Novel Protein sim. GBank gi\|1351898\|sp\|P48840\|AGAB_VIBS7 - BETA- | | UNCLASSIFIED | 1002 |
| | | AGARASE B | | | |
| 1884 | 88097238 (351, 352) | Novel Protein sim. GBank gi\|1352400\|sp\|P45632\|EXOC_AZOBR - | | UNCLASSIFIED | 1016 |
| | | PHOSPHOMANNOMUTASE (PMM) | | | |
| 1885 | 78898882 (1729, 1730) | Novel Protein sim. GBank gi\|1352614\|sp\|P11466\|OCTC_RAT - | | UNCLASSIFIED | 1015 |
| | | PEROXISOMAL CARNITINE OCTANOYLTRANSFERASE (COT) | | | |
| 1886 | 39415921 (8671, 8672) | Novel Protein sim. GBank gi\|1352891\|sp\|P47124\|HOC1_YEAST - | | UNCLASSIFIED | 1022 |
| | | PUTATIVE GLYCOSYLTRANSFERASE HOC1 PRECURSOR | | | |
| 1887 | 30637606 (5811, 5812) | Novel Protein sim. GBank gi\|1352893\|sp\|P47127\|YJ51_YEAST - | | UNCLASSIFIED | 1024 |
| | | HYPOTHETICAL 44.4 KD PROTEIN IN MIR1-STE18 INTERGENIC | | | |
| | | REGION | | | |
| 1888 | 27977408 (601, 602) | Novel Protein sim. GBank gi\|1352922\|sp\|47158\|YJ92_YEAST - | | UNCLASSIFIED | 1020 |
| | | HYPOTHETICAL 57.1 KD PROTEIN IN ATP2-RPS5 INTERGENIC | | | |
| | | REGION | | | |
| 1889 | 11238455 (5177, 5178) | Novel Protein sim. GBank gi\|1352922\|sp\|P47158\|YJ92_YEAST - | | UNCLASSIFIED | 1031 |
| | | HYPOTHETICAL 57.1 KD PROTEIN IN ATP2-RPS5 INTERGENIC | | | |
| | | REGION | | | |
| 1890 | 11613241 (5307, 5308) | Novel Protein sim. GBank gi\|1352922\|sp\|P47158\|YJ92_YEAST - | | UNCLASSIFIED | 1004 |
| | | HYPOTHETICAL 57.1 KD PROTEIN IN ATP2-RPS5 INTERGENIC | | | |
| | | REGION | | | |
| 1891 | 30789199 (689, 690) | Novel Protein sim. GBank gi\|1353007\|sp\|P47019\|YJM2_YEAST - | | UNCLASSIFIED | 1002, 1020 |
| | | HYPOTHETICAL 19.3 KD PROTEIN IN GCD14-POS18 INTERGENIC | | | |
| | | REGION | | | |
| 1892 | 78911349 (391, 392) | Novel Protein sim. GBank gi\|1353047\|sp\|P47083\|YJX2_YEAST - | | UNCLASSIFIED | 1015 |
| | | HYPOTHETICAL 67.0 KD PROTEIN IN PRE3-SAG1 INTERGENIC | | | |
| | | REGION | | | |
| 1893 | 8500628 (2429, 2430) | Novel Protein sim. GBank gi\|1353101\|sp\|P48558\|YN45_YEAST - | | UNCLASSIFIED | 1031 |
| | | HYPOTHETICAL 33.6 KD PROTEIN IN MCK1-RP55B INTERGENIC | | | |
| | | REGION | | | |
| 1894 | 27829902 (5829, 5830) | Novel Protein sim. GBank gi\|1353105\|sp\|P48563\|YN37_YEAST - | | UNCLASSIFIED | 1003, 1004, 1020, 1022, |
| | | HYPOTHETICAL 186.8 KD PROTEIN IN CLA4-MID1 INTERGENIC | | | 1031 |
| | | REGION | | | |
| 1895 | 10101181 (9017, 9018) | Novel Protein sim. GBank gi\|1360960\|pir\|\|B38965 - hypothetical protein B | | UNCLASSIFIED | 1035 |
| | | (insertion sequence IS1222) - Enterobacter agglomerans | | | |
| 1896 | 25139813 (8835, 8836) | Novel Protein sim. GBank gi\|1361235\|pir\|\|S55904 - phosphotransferase | | UNCLASSIFIED | 1024 |
| | | system enzyme II, galactitol specific, protein B - Escherichia coli (strain | | | |
| | | EC3132) | | | |
| 1897 | 78772612 (1105, 1106) | Novel Protein sim. GBank gi\|1363732\|pir\|\|S59413 - probable membrane | | UNCLASSIFIED | 1006 |
| | | protein YLR454w - yeast (Saccharomyces cerevisiae) | | | |
| 1898 | 78673951 (4589, 4590) | Novel Protein sim. GBank gi\|1363741\|pir\|\|S59392 - probable membrane | | UNCLASSIFIED | 1024 |
| | | protein YLR246w - yeast (Saccharomyces cerevisiae) | | | |
| 1899 | 25323155 (4999, 5000) | Novel Protein sim. GBank gi\|1363750\|pir\|\|S59384 - hypothetical protein | | UNCLASSIFIED | 1015 |
| | | YLR419w - yeast (Saccharomyces cerevisiae) | | | |
| 1900 | 27968519 (7035, 7036) | Novel Protein sim. GBank gi\|1363755\|pir\|\|S59376 - hypothetical protein | | UNCLASSIFIED | 1004 |
| | | YLR410w - yeast (Saccharomyces cerevisiae) | | | |
| 1901 | 80233464 (5759, 5760) | Novel Protein sim. GBank gi\|136482\|sp\|P16649\|TUP1_YEAST - | | UNCLASSIFIED | 1006, 1008, 1015, 1022, |
| | | GLUCOSE REPRESSION REGULATORY PROTEIN TUP1 | | | 1031 |
| | | (FLOCCULATION SUPPRESSOR PROTEIN) (REPRESSOR AER2) | | | |
| 1902 | 13084252 (8457, 8458) | Novel Protein sim. GBank gi\|136586\|sp\|P09095\|TYCA_BACBR - | | UNCLASSIFIED | 1022 |
| | | TYROCIDINE SYNTHETASE I (PHENYLALANINE RACEMASE [ATP- | | | |
| | | HYDROLYZING] | | | |
| 1903 | 20457637 (4377, 4378) | Novel Protein sim. GBank gi\|137026\|sp\|P22494\|UMUC_SALTY - UMUC | | UNCLASSIFIED | 1008 |
| | | PROTEIN | | | |
| 1904 | 78761131 (3899, 3900) | Novel Protein sim. GBank gi\|1375487 (U43076) - cdc37 homolog [Mus | | UNCLASSIFIED | 1015, 1020, 1041 |
| | | musculus] | | | |
| 1905 | 79970020 (4249, 4250) | Novel Protein sim. GBank gi\|138595\|sp\|P02845\|VIT2_CHICK - | | UNCLASSIFIED | 1031 |
| | | VITELLOGENIN II PRECURSOR (MAJOR VITELLOGENIN) [CONTAINS: | | | |
| | | LIPOVITELLIN I (LVI); PHOSVITIN (PV); LIPOVITELLIN II (LVII); YGP40] | | | |
| 1906 | 78679746 (4021, 4022) | Novel Protein sim. GBank gi\|139990\|sp\|P03740\|Y194_LAMBD - | | UNCLASSIFIED | 1006 |
| | | HYPOTHETICAL PROTEIN ORF194 | | | |
| 1907 | 30624144 (2175, 2176) | Novel Protein sim. GBank gi\|140464\|sp\|P25618\|YCQ7_YEAST - | | UNCLASSIFIED | 1007 |
| | | HYPOTHETICAL 107.9 KD PROTEIN IN POL4-SRD1 INTERGENIC | | | |
| | | REGION | | | |
| 1908 | 8372269 (4345, 4346) | Novel Protein sim. GBank gi\|140618\|sp\|P07027\|UVRY_ECOLI - UVRY | | UNCLASSIFIED | 1008 |
| | | PROTEIN | | | |
| 1909 | 86694722 (3143, 3144) | Novel Protein sim. GBank gi\|141347\|sp\|P21320\|YR7F_ECOLI - | | UNCLASSIFIED | 1001, 1002, 1003, 1004, |
| | | HYPOTHETICAL 11.9 KD PROTEIN (ORFF) (RETRON EC67) | | | 1008, 1020, 1021, 1022, |
| | | | | | 1031, 1036, 1041, 1051, |
| | | | | | 1055 |
| 1910 | 78784624 (8961, 8962) | Novel Protein sim. GBank gi\|141470\|sp\|P19658\|EX70_YEAST - 70 KD | | UNCLASSIFIED | 1041 |
| | | EXOCYST COMPLEX PROTEIN | | | |
| 1911 | 27827987 (131, 132) | Novel Protein sim. GBank gi\|1469199\|dbj\|BAA09487\| - (D50928) The | | UNCLASSIFIED | 1004 |
| | | KIAA0138 gene product is novel. [Homo sapiens] | | | |
| 1912 | 86696050 (9057, 9058) | Novel Protein sim. GBank gi\|1480863 (U63332) - super cysteine rich | | UNCLASSIFIED | 1022, 1041 |
| | | protein; SCRP [Homo sapiens] | | | |
| 1913 | 11072211 (2727, 2728) | Novel Protein sim. GBank gi\|152957 (L05004) - 5-enolpyruvylshikimate-3- | | UNCLASSIFIED | 1031 |
| | | phosphate synthase [Staphylococcus aureus] | | | |
| 1914 | 66396403 (1793, 1794) | Novel Protein sim. GBank gi\|1542932\|emb\|CAB02171\| - (Z80108) | | UNCLASSIFIED | 1006 |
| | | hypothetical protein Rv1423 [Mycobacterium tuberculosis] | | | |
| 1915 | 37799096 (6339, 6340) | Novel Protein sim. GBank gi\|1550705\|emb\|CAB02362\| - (Z80225) | | UNCLASSIFIED | 1010 |
| | | hypothetical protein Rv2664 [Mycobacterium tuberculosis] | | | |
| 1916 | 78511548 (5695, 5696) | Novel Protein sim. GBank gi\|1644232\|dbj\|BAA11082\| - (D67066) N- | | UNCLASSIFIED | 1051 |
| | | WASP [Bos taurus] | | | |
| 1917 | 27826557 (2747, 2748) | Novel Protein sim. GBank gi\|1651839\|dbj\|BAA16766\| - (D90900) | | UNCLASSIFIED | 1031 |
| | | hypothetical protein [Synechocystis sp.] | | | |
| 1918 | 79822071 (5027, 5028) | Novel Protein sim. GBank gi\|1651938\|dbj\|BAA16864\| - (D90901) heme | | UNCLASSIFIED | 1031 |
| | | oxygenase [Synechocystis sp.] | | | |
| 1919 | 32444862 (7065, 7066) | Novel Protein sim. GBank gi\|1652989\|dbj\|BAA17906\| - (D90910) | | UNCLASSIFIED | 1026 |
| | | hypothetical protein [Synechocystis sp.] | | | |
| 1920 | 32733909 (6827, 6828) | Novel Protein sim. GBank gi\|1653019\|dbj\|BAA17936\| - (D90910) | | UNCLASSIFIED | 1001 |
| | | cob(I)alamin adenosyltransferase [Synechocystis sp.] | | | |
| 1921 | 11085697 (5813, 5814) | Novel Protein sim. GBank gi\|1653584\|dbj\|BAA18497\| - (D90914) | | UNCLASSIFIED | 1003 |
| | | hypothetical protein [Synechocystis sp.] | | | |
| 1922 | 12986753 (8733, 8734) | Novel Protein sim. GBank gi\|1655665\|emb\|CAB03731\| - (Z81368) | | UNCLASSIFIED | 1028 |
| | | hypothetical protein Rv2395 [Mycobacterium tuberculosis] | | | |
| 1923 | 77530490 (371, 372) | Novel Protein sim. GBank gi\|1655699\|emb\|CAA69032\| - (Y07752) | | UNCLASSIFIED | 1035 |
| | | pherophorin-S [Volvox certeri] | | | |
| 1924 | 11088690 (985, 986) | Novel Protein sim. GBank gi\|1655699\|emb\|CAA69032\| - (Y07752) | | UNCLASSIFIED | 1020 |
| | | pherophorin-S [Volvox carteri] | | | |
| 1925 | 47660230 (5965, 5966) | Novel Protein sim. GBank gi\|1655699\|emb\|CAA69032\| - (Y07752) | | UNCLASSIFIED | 1026 |
| | | pherophorin-S [Volvox carteri] | | | |
| 1926 | 79240598 (8711, 8712) | Novel Protein sim. GBank gi\|1657619 (U72504) - G5p [Arabidopsis | | UNCLASSIFIED | 1021 |
| | | thaliana] | | | |
| 1927 | 65987546 (93, 94) | Novel Protein sim. GBank gi\|168237 (M76546) - hydroxyproline-rich | | UNCLASSIFIED | 1051 |
| | | protein [Hellanthus annuus] | | | |
| 1928 | 65691817 (2331, 2332) | Novel Protein sim. GBank gi\|1703594 (U80439) - coded for by C. elegans | | UNCLASSIFIED | 1007 |
| | | cDNA yk7c8.5; coded for by C. elegans cDNA yk133b3.5; coded for by C. | | | |
| | | elegans cDNA yk65a4.5; coded for by C. elegans cDNA yk7c8.3; coded | | | |
| | | for by C. elegans cDNA CEESQ66F; coded for by C. elegans cDNA | | | |
| | | yk65a4.3; . . . | | | |
| 1929 | 80486551 (5199, 5200) | Novel Protein sim. GBank gi\|1709032\|sp\|P53035\|MIG2_YEAST - | | UNCLASSIFIED | 1002, 1003, 1008, 1010, |
| | | REGULATORY PROTEIN MIG2 | | | 1020, 1021, 1022, 1031 |
| 1930 | 79444559 (685, 686) | Novel Protein sim. GBank gi\|1709346\|sp\|P53617\|NRD1_YEAST - NRD1 | | UNCLASSIFIED | 1020 |
| | | PROTEIN | | | |
| 1931 | 78763956 (7585, 7586) | Novel Protein sim. GBank gi\|1709399\|sp\|P52891\|NU84_YEAST - | | UNCLASSIFIED | 1024, 1041 |
| | | NUCLEOPORIN NUP84 (NUCLEAR PORE PROTEIN NUP84) | | | |
| 1932 | 80017553 (5653, 5654) | Novel Protein sim. GBank gi\|171124 (M20319) - aminotriazole resistance | | UNCLASSIFIED | 1004, 1024, 1035 |
| | | protein [Saccharomyces cerevisiae] | | | |
| 1933 | 30420964 (5957, 5958) | Novel Protein sim. GBank gi\|172012 (M12087) - thr-tRNA-synthetase | | UNCLASSIFIED | 1020 |
| | | [Saccharomyces cerevisiae] | | | |
| 1934 | 30658077 (5791, 5792) | Novel Protein sim. GBank gi\|172076 (M88605) - contains Cys-4 zinc- | | UNCLASSIFIED | 1024 |
| | | finger, resembles erythroid transcription factor GATA-1; ORF | | | |
| | | [Saccharomyces cerevisiae] | | | |
| 1935 | 85801318 (1265, 1266) | Novel Protein sim. GBank gi\|1722914\|sp\|Q10388\|Y007_MYCTU - | | UNCLASSIFIED | 1023 |
| | | HYPOTHETICAL 61.0 KD PROTEIN CY190.07 | | | |
| 1936 | 65690391 (65, 66) | Novel Protein sim. GBank gi\|1722975\|sp\|Q10636\|Y039_MYCTU - | | UNCLASSIFIED | 1024, 1046 |
| | | HYPOTHETICAL 32.2 KD PROTEIN CY130.09 PRECURSOR | | | |
| 1937 | 80497297 (8589, 8590) | Novel Protein sim. GBank gi\|1723025\|sp\|P53525\|Y05L_MYCLE - | | UNCLASSIFIED | 1010 |
| | | HYPOTHETICAL 71.2 KD PROTEIN O659 | | | |
| 1938 | 39563096 (7269, 7270) | Novel Protein sim. GBank gi\|1723077\|sp\|Q11042\|Y084_MYCTU - | | UNCLASSIFIED | 1004 |
| | | HYPOTHETICAL 93.4 KD PROTEIN CY50.04C | | | |
| 1939 | 55631457 (4337, 4338) | Novel Protein sim. GBank gi\|1723116\|sp\|P50876\|Y161_HUMAN - | | UNCLASSIFIED | 1000 |
| | | HYPOTHETICAL PROTEIN KIAA0161 | | | |
| 1940 | 57304297 (3335, 3336) | Novel Protein sim. GBank gi\|1723643\|sp\|P53204\|YG15_YEAST - | | UNCLASSIFIED | 1004, 1020, 1024 |
| | | HYPOTHETICAL 44.9 KD PROTEIN IN SEC9-MSB2 INTERGENIC | | | |
| | | REGION | | | |
| 1941 | 80503293 (3905, 3906) | Novel Protein sim. GBank gi\|1723643\|sp\|P53204\|YG15_YEAST - | | UNCLASSIFIED | 1004, 1010, 1041 |
| | | HYPOTHETICAL 44.9 KD PROTEIN IN SEC9-MSB2 INTERGENIC | | | |
| | | REGION | | | |
| 1942 | 80237581 (8897, 8898) | Novel Protein sim. GBank gi\|1723697\|sp\|P53265\|YG2W_YEAST - | | UNCLASSIFIED | 1003, 1004, 1008, 1020, |
| | | HYPOTHETICAL 46.7 KD PROTEIN IN CLB6-SPT6 INTERGENIC | | | 1022, 1023, 1031 |
| | | REGION | | | |
| 1943 | 94992097 (2883, 2884) | Novel Protein sim. GBank gi\|1723717\|sp\|P53285\|YG3H_YEAST - | | UNCLASSIFIED | 1001, 1006, 1015, 1020, |
| | | HYPOTHETICAL 54.5 KD PROTEIN IN CBF2-SKN1 INTERGENIC | | | 1031 |
| | | REGION | | | |
| 1944 | 80238850 (6945, 6946) | Novel Protein sim. GBank gi\|1723717\|sp\|P53285\|YG3H_YEAST - | | UNCLASSIFIED | 1006, 1008, 1020, 1031, |
| | | HYPOTHETICAL 54.5 KD PROTEIN IN CBF2-SKN1 INTERGENIC | | | 1036 |
| | | REGION | | | |
| 1945 | 29353579 (7435, 7436) | Novel Protein sim. GBank gi\|1723731\|sp\|P53298\|YG43_YEAST - | | UNCLASSIFIED | 1006, 1020 |
| | | HYPOTHETICAL 47.3 KD PROTEIN IN ATF2-RNR4 INTERGENIC | | | |
| | | REGION | | | |
| 1946 | 79556773 (3349, 3350) | Novel Protein sim. GBank gi\|1723765\|sp\|P53317\|YG5C_YEAST - | | UNCLASSIFIED | 1035 |
| | | HYPOTHETICAL 22.3 KD PROTEIN IN MGA1-GCN4 INTERGENIC | | | |
| | | REGION | | | |
| 1947 | 30653753 (5373, 5374) | Novel Protein sim. GBank gi\|1723766\|sp\|P53318\|COQ6_YEAST - | | UNCLASSIFIED | 1020 |
| | | UBIQUINONE BIOSYNTHESIS MONOOXGENASE COQ6 | | | |
| 1948 | 78796556 (4163, 4164) | Novel Protein sim. GBank gi\|1723795\|sp\|P53197\|YGA3_YEAST - | | UNCLASSIFIED | 1020 |
| | | HYPOTHETICAL 62.8 KD TRP-ASP REPEATS CONTAINING PROTEIN | | | |
| | | IN PMC1-TFG2 INTERGENIC REGION | | | |
| 1949 | 80470228 (4329, 4330) | Novel Protein sim. GBank gi\|1723806\|sp\|P53192\|YGC0_YEAST - | | UNCLASSIFIED | 1002, 1004, 1006, 1007, |
| | | HYPOTHETICAL 27.1 KD PROTEIN IN ALK1-CKB1 INTERGENIC | | | 1008, 1010, 1015, 1020, |
| | | REGION | | | 1021, 1022, 1023, 1024, |
| | | | | | 1025, 1028, 1031,1035, |
| | | | | | 1036, 1041 |
| 1950 | 87912640 (575, 576) | Novel Protein sim. GBank gi\|1723879\|sp\|P53153\|YGI5_YEAST - | | UNCLASSIFIED | 1007, 1013, 1024 |
| | | HYPOTHETICAL 32.1 KD PROTEIN IN MAD1-SCY1 INTERGENIC | | | |
| | | REGION | | | |
| 1951 | 80491860 (1119, 1120) | Novel Protein sim. GBank gi\|1723900\|sp\|P53140\|YGK7_YEAST - | | UNCLASSIFIED | 1004, 1006, 1007, 1010, |
| | | HYPOTHETICAL 74.6 KD PROTEIN IN TAF60-G4P1 INTERGENIC | | | 1015, 1020, 1025, 1031, |
| | | REGION | | | 1036, 1041 |
| 1952 | 20726486 (2759, 2760) | Novel Protein sim. GBank gi\|1723907\|sp\|P53133\|YGL7_YEAST - | | UNCLASSIFIED | 1004 |
| | | HYPOTHETICAL 30.8 KD PROTEIN IN ABC1-CDC20 INTERGENIC | | | |
| | | REGION | | | |
| 1953 | 57293171 (865, 866) | Novel Protein sim. GBank gi\|1723950\|sp\|P53094\|MDS3_YEAST - MDS3 | | UNCLASSIFIED | 1008, 1020, 1022, 1024, |
| | | PROTEIN (MCK1 DOSAGE SUPPRESSOR 3) | | | 1031 |
| 1954 | 30385147 (7437, 7438) | Novel Protein sim. GBank gi\|1723969\|sp\|P53075\|YGX8_YEAST - | | UNCLASSIFIED | 1002, 1008,1020, 1022 |
| | | HYPOTHETICAL 66.9 KD PROTEIN IN SAP4-OST5 INTERGENIC | | | |
| | | REGION | | | |
| 1955 | 57294333 (6675, 6676) | Novel Protein sim. GBank gi\|1723978\|sp\|P53066\|YGZ2_YEAST - | | UNCLASSIFIED | 1003, 1004, 1006, 1015, |
| | | HYPOTHETICAL 20.1 KD PROTEIN IN RTF1-CSE1 INTERGENIC | | | 1020, 1022, 1031 |
| | | REGION | | | |
| 1956 | 56151668 (5747, 5748) | Novel Protein sim. GBank gi\|1724028\|sp\|P43976\|YIIM_HAEIN - | | UNCLASSIFIED | 1002 |
| | | HYPOTHETICAL PROTEIN HI0278 | | | |
| 1957 | 27981007 (7395, 7396) | Novel Protein sim. GBank gi\|1730680\|sp\|P53736\|YN8O_YEAST - | | UNCLASSIFIED | 1020 |
| | | HYPOTHETICAL 28.6 KD PROTEIN IN DBP6-COQ2 INTERGENIC | | | |
| | | REGION | | | |
| 1958 | 80478120 (1809, 1810) | Novel Protein sim. GBank gi\|1730708\|sp\|P53977\|YNB7_YEAST - | | UNCLASSIFIED | 1002, 1003, 1004, 1007, |
| | | HYPOTHETICAL 12.5 KD PROTEIN IN HDA1-PUB1 INTERGENIC | | | 1008, 1010, 1015, 1020, |
| | | REGION | | | 1022, 1025, 1028, 1035 |
| 1959 | 16540378 (6765, 6766) | Novel Protein sim. GBank gi\|1730818\|sp\|P54964\|YNT2_YEAST - YNT20 | | UNCLASSIFIED | 1036 |
| | | PROTEIN | | | |
| 1960 | 79444729 (8125, 8126) | Novel Protein sim. GBank gi\|1730834\|sp\|P53857\|YNX4_YEAST - | | UNCLASSIFIED | 1031 |
| | | HYPOTHETICAL 47.8 KD PROTEIN IN SIN4-URE2 INTERGENIC | | | |
| | | REGION | | | |
| 1961 | 79233614 (6111, 6112) | Novel Protein sim. GBank gi\|1749442\|dbj\|BAA13779\| - (D89117) similar | | UNCLASSIFIED | 1001 |
| | | to Saccharomyces cerevisiae P9642.2 gene product, GENBANK | | | |
| | | Accession Number U40828 [Schizosaccharomyces pombe] | | | |
| 1962 | 85800340 (7403, 7404) | Novel Protein sim. GBank gi\|1750282 (U81808) - putative gamma- | | UNCLASSIFIED | 1023 |
| | | glutamylcysteine synthetase [Thiobacillus ferrooxidans] | | | |
| 1963 | 80503461 (5595, 5596) | Novel Protein sim. GBank gi\|1771524\|emb\|CAA67934\| - (X99622) | | UNCLASSIFIED | 1008, 1010, 1023 |
| | | muconate cycloisomerase [Rhodococcus opacus] | | | |
| 1964 | 39540480 (3557, 3558) | Novel Protein sim. GBank gi\|1781037\|emb\|CAA64772\| - (X95518) | | UNCLASSIFIED | 1036, 1055 |
| | | neuronal tyrosine threonine phosphatase 1 [Mus musculus] | | | |
| 1965 | 77687658 (833, 834) | Novel Protein sim. GBank gi\|1781049\|emb\|CAB06185\| - (Z83863) | | UNCLASSIFIED | 1022 |
| | | hypothetical protein Rv2553c [Mycobacterium tuberculosis] | | | |
| 1966 | 85801478 (545, 546) | Novel Protein sim. GBank gi\|1840087 (U83280) - 39 kDa antigen | | UNCLASSIFIED | 1035 |
| | | [Leishmania donovani] | | | |
| 1967 | 28382493 (4403, 4404) | Novel Protein sim. GBank gi\|1864015\|dbj\|BAA13521\| - (D87968) SHPS-1 | | UNCLASSIFIED | 1041 |
| | | [Mus musculus] | | | |
| 1968 | 51728564 (3139, 3140) | Novel Protein sim. GBank gi\|1870011\|emb\|CAB06862\| - (Z92539) prsA | | UNCLASSIFIED | 1037 |
| | | [Mycobacterium tuberculosis] | | | |
| 1969 | 79862366 (4745, 4746) | Novel Protein sim. GBank gi\|1877272\|emb\|CAB07053\| - (Z92770) | | UNCLASSIFIED | 1010 |
| | | hypothetical protein Rv0147 [Mycobacterium tuberculosis] | | | |
| 1970 | 79617104 (4393, 4394) | Novel Protein sim. GBank gi\|1877369\|emb\|CAB07121\| - (Z92772) echA3 | | UNCLASSIFIED | 1031 |
| | | [Mycobacterium tuberculosis] | | | |
| 1971 | 20385917 (4387, 4388) | Novel Protein sim. GBank gi\|1881338\|dbj\|BAA19365\| - (AB001488) | | UNCLASSIFIED | 1003 |
| | | PROBABLE INTEGRAL MEMBRANE PROTEIN, SIMILAR TO | | | |
| | | CHLORAMPHENICOL RESISTANCE PROTEIN OF STREPTOMYCES | | | |
| | | VENEZUELAE. [Bacillus subtilis] | | | |
| 1972 | 65981896 (3219, 3220) | Novel Protein sim. GBank gi\|1883006\|emb\|CAA72271\| - (Y11483) | | UNCLASSIFIED | 1006, 1022, 1041 |
| | | jasmonate inducible protein [Brassica napus] | | | |
| 1973 | 36857907 (3633, 3634) | Novel Protein sim. GBank gi\|1890582\|emb\|CAB01955\| - (Z79692) ORF23 | | UNCLASSIFIED | 1014 |
| | | [Sinorhizobium meliloti] | | | |
| 1974 | 91236500 (7181, 7182) | Novel Protein sim. GBank gi\|1914685\|emb\|CAA72742\| - (Y12014) RAD23 | | UNCLASSIFIED | 1002 |
| | | protein, isoform II [Daucus carota] | | | |
| 1975 | 35356258 (747, 748) | Novel Protein sim. GBank gi\|2065210\|emb\|CAA73251\| - (Y12713) Pro-Pol | | UNCLASSIFIED | 1014 |
| | | dUTPase polyprotein [Mus musculus] | | | |
| 1976 | 87912784 (3575, 3576) | Novel Protein sim. GBank gi\|2065210\|emb\|CAA73251\| - (Y12713) Pro-Pol | | UNCLASSIFIED | 1016 |
| | | dUTPase polyprotein [Mus musculus] | | | |
| 1977 | 34387207 (3617, 3618) | Novel Protein sim. GBank gi\|2065210\|emb\|CAA73251\| - (Y12713) Pro-Pol | | UNCLASSIFIED | 1024 |
| | | dUTPase polyprotein [Mus musculus] | | | |
| 1978 | 28992228 (5395, 5396) | Novel Protein sim. GBank gi\|2072553 (AF001395) - salT gene product | | UNCLASSIFIED | 1015 |
| | | [Oryza sativa] | | | |
| 1979 | 52481605 (6937, 6938) | Novel Protein sim. GBank gi\|2072961 (U93568) - putative p150 [Homo | | UNCLASSIFIED | 1033 |
| | | sapiens] | | | |
| 1980 | 39568585 (2305, 2306) | Novel Protein sim. GBank gi\|2072967 (U93570) - putative p150 [Homo | | UNCLASSIFIED | 1004 |
| | | sapiens] | | | |
| 1981 | 85520677 (1447, 1448) | Novel Protein sim. GBank gi\|2105127 (U64984) - DNA adenine | | UNCLASSIFIED | 1008, 1046 |
| | | methyltransferase [Bacteriophage Mx8] | | | |
| 1982 | 24111655 (1403, 1404) | Novel Protein sim. GBank gi\|21117310\|emb\|CAB09116.1\| - (Z95620) | | UNCLASSIFIED | 1041 |
| | | hypothetical protein [Schizosaccharomyces pombe] | | | |
| 1983 | 11076468 (5173, 5174) | Novel Protein sim. GBank gi\|2119707\|pir\|\|A42817 - proline-rich protein | | UNCLASSIFIED | 1020 |
| | | precursor-rat | | | |
| 1984 | 37799396 (4253, 4254) | Novel Protein sim. GBank gi\|2120083\|pir\|\|I38588 - transposon LRE2 | | UNCLASSIFIED | 1010 |
| | | reverse transcriptase homolog - human | | | |
| 1985 | 94631768 (8757, 8758) | Novel Protein sim. GBank gi\|2121115\|pir\|\|I41292 - EcoE type I restriction- | | UNCLASSIFIED | 1022, 1025, 1028 |
| | | modification enzyme R subunit - Escherichia coil | | | |
| 1986 | 20288144 (9055, 9056) | Novel Protein sim. GBank gi\|2126000\|pir\|\|I76771 - phosphomannomutase | | UNCLASSIFIED | 1031 |
| | | (EC 5.4.2.8) - Eacherichia coli | | | |
| 1987 | 27970336 (8291, 8292) | Novel Protein sim. GBank gi\|2126373\|pir\|\|I40646 - sensor-like protein - | | UNCLASSIFIED | 1050 |
| | | Coxiella bumetil | | | |
| 1988 | 29448135 (343, 344) | Novel Protein sim. GBank gi\|2129717\|pir\|\|S71185 - ribonucleoprotein - | | UNCLASSIFIED | 1024 |
| | | Arabidopsis thaliana | | | |
| 1989 | 80236325 (3171, 3172) | Novel Protein sim. GBank gi\|2131374\|pir\|\|S567806 - hypothetical protein | | UNCLASSIFIED | 1004, 1008, 1020, 1041 |
| | | YDL242w - yeast (Saccharomyces cerevisiae) | | | |
| 1990 | 38925223 (5743, 5744) | Novel Protein sim. GBank gi\|2131397\|pir\|\|S61589 - hypothetical protein | | UNCLASSIFIED | 1006 |
| | | YDR206w - yeaet (Saccharomyces cerevisiae) | | | |
| 1991 | 80077468 (4867, 4868) | Novel Protein sim. GBank gi\|21314101pir\|\|S70223 - hypothetical protein | | UNCLASSIFIED | 1020 |
| | | YDR274c - yeast (Saccharomyces cerevisiae) | | | |
| 1992 | 80306740 (2589, 2590) | Novel Protein sim. GBank gi\|2131497\|pir\|\|S69724 - hypothetical protein | | UNCLASSIFIED | 1020 |
| | | YDR445c - yeast (Saccharomyces cerevisiae) | | | |
| 1993 | 78936150 (7101, 7102) | Novel Protein sim. GBank gi\|2131507\|pir\|\|S69627 - hypothetical protein | | UNCLASSIFIED | 1041 |
| | | YDR459c - yeast (Saccharomyces cerevisiae) | | | |
| 1994 | 78784628 (225, 226) | Novel Protein sim. GBank gi\|2131736\|pir\|\|S64794 - hypothetical protein | | UNCLASSIFIED | 1007, 1020 |
| | | YLL042c - yeast (Saccharomyces cerevisiae) | | | |
| 1995 | 78997841 (5761, 5762) | Novel Protein sim. GBank gi\|2131741\|pir\|\|S64829 - hypothetical protein | | UNCLASSIFIED | 1021 |
| | | YLR007w - yeast (Saccharomyces cerevisiae) | | | |
| 1996 | 25326496 (3897, 3898) | Novel Protein sim. GBank gi\|2131751\|pir\|\|S64841 - hypothetical protein | | UNCLASSIFIED | 1024 |
| | | YLR019w - yeast (Saccharomyces cerevisiae) | | | |
| 1997 | 82064955 (485, 486) | Novel Protein sim. GBank gi\|2131784\|pir\|\|S64954 - hypothetical protein | | UNCLASSIFIED | 1001, 1002, 1003, 1004, |
| | | YLR117c - yeast (Saccharomyces cerevisiae) | | | 1006, 1007, 1008, 1010, |
| | | | | | 1014, 1015, 1020, 1021, |
| | | | | | 1022, 1024, 1025, 1026, |
| | | | | | 1028, 1031, 1035, 1036, |
| | | | | | 1041,1051 |
| 1998 | 79398243 (5053, 5054) | Novel Protein sim. GBank gi\|2131821\|pir\|\|S69852 - hypothetical protein | | UNCLASSIFIED | 1004, 1015 |
| | | YML031c-a - yeast (Saccharomyces cerevisiae) | | | |
| 1999 | 78967763 (2783, 2784) | Novel Protein sim. GBank gi\|2131998\|pir\|\|S66719 - hypothetical protein | | UNCLASSIFIED | 1006, 1007, 1015, 1020, |
| | | YOL036w - yeast (Saccharomyces cerevisiae) | | | 1021, 1041 |
| 2000 | 78382826 (2367, 2368) | Novel Protein sim. GBank gi\|2132006\|pir\|\|S66763 - hypothetical protein | | UNCLASSIFIED | 1015 |
| | | YOL070c - yeast (Saccharomyces cerevisiae) | | | |
| 2001 | 20297705 (3969, 3970) | Novel Protein sim. GBank gi\|2132015\|pir\|\|S63445 - hypothetical protein | | UNCLASSIFIED | 1031 |
| | | YOL125w - yeast (Saccharomyces cerevisiae) | | | |
| 2002 | 29689007 (4523, 4524) | Novel Protein sim. GBank gi\|2132060\|pir\|\|S60992 - hypothetical protein | | UNCLASSIFIED | 1007, 1051 |
| | | YOR112w - yeast (Saccharomyces cerevisiae) | | | |
| 2003 | 56484781 (8513, 8514) | Novel Protein sim. GBank gi\|2132082\|pir\|\|S67087 - hypothetical protein | | UNCLASSIFIED | 1002 |
| | | YOR195w - yeast (Saccharomyces cerevisiae) | | | |
| 2004 | 20760680 (4027, 4028) | Novel Protein sim. GBank gi\|2132103\|pir\|\|S67155 - hypothetical protein | | UNCLASSIFIED | 1055 |
| | | YOR258w - yeast (Saccharomyces cerevisiae) | | | |
| 2005 | 94646976 (5423, 5424) | Novel Protein sim. GBank gi\|2132149\|pir\|\|S63463 - hypothetical protein | | UNCLASSIFIED | 1022, 1035 |
| | | YPL019c - yeast (Saccharomyces cerevisiae) | | | |
| 2006 | 79835331 (6441, 6442) | Novel Protein sim. GBank gi\|2132170\|pir\|\|S60928 - hypothetical protein | | UNCLASSIFIED | 1002, 1021, 1035 |
| | | YPL062w - yeast (Saccharomyces cerevisiae) | | | |
| 2007 | 65462081 (8293, 8294) | Novel Protein sim. GBank gi\|2132177\|pir\|\|S61115 - hypothetical protein | | UNCLASSIFIED | 1046 |
| | | YPL071c - yeast (Saccharomyces cerevisiae) | | | |
| 2008 | 80473352 (1985, 1986) | Novel Protein sim. GBank gi\|2132192\|pir\|\|S69458 - hypothetical protein | | UNCLASSIFIED | 1001, 1002, 1003, 1004, |
| | | YPL114w - yeast (Saccharomyces cerevisiae) | | | 1006, 1007, 1008, 1010, |
| | | | | | 1015, 1020, 1022, 1024, |
| | | | | | 1025, 1031, 1041 |
| 2009 | 20416576 (465, 466) | Novel Protein sim. GBank gi\|2132244\|pir\|\|S61023 - hypothetical protein | | UNCLASSIFIED | 1022 |
| | | YPL242c - yeast (Saccharomyces cerevisiae) | | | |
| 2010 | 21149717 (3521, 3522) | Novel Protein sim. GBank gi\|2132443\|pir\|\|S67691 - probable membrane | | UNCLASSIFIED | 1031 |
| | | protein YDL144c - yeast (Saccharomyces cerevisiae) | | | |
| 2011 | 20545269 (8779, 8780) | Novel Protein sim. GBank gi\|2132455\|pir\|\|S67742 - probable membrane | | UNCLASSIFIED | 1020 |
| | | protein YDL187c - yeast (Saccharomyces cerevisiae) | | | |
| 2012 | 79618317 (517, 518) | Novel Protein sim. GBank gi\|2132963\|pir\|\|S67301 - probable membrane | | UNCLASSIFIED | 1003 |
| | | protein YOR389w - yeast (Saccharomyces cerevisiae) | | | |
| 2013 | 29360306 (4567, 4568) | Novel Protein sim. GBank gi\|2132975\|pir\|\|S61116 - probable membrane | | UNCLASSIFIED | 1020 |
| | | protein YPL070w - yeast (Saccharomyces cerevisiae) | | | |
| 2014 | 28486368 (2051, 2052) | Novel Protein sim. GBank gi\|2133005\|pir\|\|S65243 - probable membrane | | UNCLASSIFIED | 1020 |
| | | protein YPL224c - yeast (Saccharomyces cerevisiae) | | | |
| 2015 | 80216525 (1487, 1488) | Novel Protein sim. GBank gi\|2133018\|pir\|\|S65313 - probable membrane | | UNCLASSIFIED | 1003, 1006, 1007, 1008, |
| | | protein YPL280w - yeast (Saccharomyces cerevisiae) | | | 1015, 1020, 1022, 1023, |
| | | | | | 1024, 1028, 1036, 1041, |
| 2016 | 25150624 (3619, 3620) | Novel Protein sim. GBank gi\|2133036\|pir\|\|S59823 - probable membrane | | UNCLASSIFIED | 1041 |
| | | protein YPR164w - yeast (Saccharomyces cerevisiae) | | | |
| 2017 | 80502266 (5117, 5118) | Novel Protein sim. GBank gi\|2133036\|pir\|\|S59823 - probable membrane | | UNCLASSIFIED | 1002, 1004, 1010, 1015, |
| | | protein YPR164w - yeast (Saccharomyces cerevisiae) | | | 1020, 1021, 1022, 1031 |
| 2018 | 78732260 (3497, 3498) | Novel Protein sim. GBank gi\|2133039\|pir\|\|S59841 - probable membrane | | UNCLASSIFIED | 1006 |
| | | protein YPR184w - yeast Saccharomyces cerevisiae) | | | |
| 2019 | 87465190 (8829, 8830) | Novel Protein sim. GBank gi\|2134431\|pir\|\|I50209 - unknown protein - | | UNCLASSIFIED | 1023 |
| | | chicken (fragment) | | | |
| 2020 | 20621913 (1315, 1316) | Novel Protein sim. GBank gi\|2134962\|pir\|\|S64705 - cyclophilin-like protein | | UNCLASSIFIED | 1003 |
| | | CyP-60 - human | | | |
| 2021 | 19895040 (1439, 1440) | Novel Protein sim. GBank gi\|2137043\|pir\|\|I46880 - unknown protein - | | UNCLASSIFIED | 1051 |
| | | rabbit (fragment) | | | |
| 2022 | 27974865 (3805, 3806) | Novel Protein sim. GBank gi\|2143815\|pir\|\|S59131 - Kan-1 protein - rat | | UNCLASSIFIED | 1003 |
| 2023 | 86475747 (2751, 2752) | Novel Protein sim. GBank gi\|2145909\|pir\|\|S72946 - lexA protein - | | UNCLASSIFIED | 1045 |
| | | Mycobacterium leprae | | | |
| 2024 | 95010828 (8577, 6578) | Novel Protein sim. GBank gi\|2182087\|emb\|CAA73844\| - (Y13432) | | UNCLASSIFIED | 1015 |
| | | hypothetical protein [Sinorhizobium meliloti] | | | |
| 2025 | 17903058 (5359, 5360) | Novel Protein sim. GBank gi\|218496\|dbj\|BAA02301\| - (D12917) a | | UNCLASSIFIED | 1002 |
| | | component of the pheromone signal transduction pathway | | | |
| | | [Saccharomyces cerevisiae] | | | |
| 2026 | 65459142 (8357, 8358) | Novel Protein sim. GBank gi\|2222753\|emb\|CAB09977\| - (Z97182) | | UNCLASSIFIED | 1051 |
| | | hypothetical protein Rv0605 [Mycobacterium tuberculosis] | | | |
| 2027 | 65687631 (3193, 3194) | Novel Protein sim. GBank gi\|2226005 (U49973) - ORF2: function | | UNCLASSIFIED | 1043, 1046 |
| | | unknown [Homo sapiens] | | | |
| 2028 | 33187585 (6267, 6268) | Novel Protein sim. GBank gi\|2226005 (U49973) - ORF2: function | | UNCLASSIFIED | 1024 |
| | | unknown [Homo sapiens] | | | |
| 2029 | 78749690 (6677, 6678) | Novel Protein sim. GBank gi\|2226256\|emb\|CAA74543.1\| - (Y14084) | | UNCLASSIFIED | 1007 |
| | | hypothetical protein [Bacillus subtilis] | | | |
| 2030 | 36826780 (383, 384) | Novel Protein sim. GBank gi\|2244792\|emb\|CAB10215.1\| - (Z97336) | | UNCLASSIFIED | 1051 |
| | | ankyrin like protein [Arabidopsis thaliana] | | | |
| 2031 | 17885054 (91, 92) | Novel Protein sim. GBank gi\|226591\|prf\|\|1603238B - ATP synthase 18 kD- | | UNCLASSIFIED | 1022 |
| | | like protein 4 [Saccharomycetales] | | | |
| 2032 | 27964418 (2593, 2594) | Novel Protein sim. GBank gi\|226591\|prf\|\|1603238B - ATP synthase 18 kD- | | UNCLASSIFIED | 1021, 1031 |
| | | like protein 4 [Saccharomycetales] | | | |
| 2033 | 21414260 (7701, 7702) | Novel Protein sim. GBank gi\|2274845\|dbj\|BAA21534\| - (D88461) N- | | UNCLASSIFIED | 1022 |
| | | WASP [Rattus rattus] | | | |
| 2034 | 78674870 (2951, 2952) | Novel Protein sim. GBank gi\|2276394 (U16156) - bifunctional aldolase- | | UNCLASSIFIED | 1015 |
| | | pyrophosphokinase [Streptococcus pneumoniae] | | | |
| 2035 | 80060440 (5437, 5438) | Novel Protein sim. GBank gi\|2293294 (AF008220) - YtjA [Bacillus subtilis] | | UNCLASSIFIED | 1022 |
| 2036 | 37806838 (1517, 1518) | Novel Protein sim. GBank gi\|2293302 (AF008220) - YtqA [Bacillus | | UNCLASSIFIED | 1055 |
| | | subtilis] | | | |
| 2037 | 57288317 (6035, 6036) | Novel Protein sim. GBank gi\|2313504\|gb\|AAD07468.1\| - (AE000555) H. | | UNCLASSIFIED | 1031, 1050 |
| | | pylori predicted coding region HP0386 [Helicobacter pylori 26695] | | | |
| 2038 | 80209588 (6881, 6882) | Novel Protein sim. GBank gi\|2314493\|gb\|AAD08369.1\| - (AE000634) | | UNCLASSIFIED | 1031 |
| | | cation efflux system protein (czcA) [Helicobacter pylori 26695] | | | |
| 2039 | 15006975 (4621, 4622) | Novel Protein sim. GBank gi\|232127\|sp\|P30191\|GAA6_RAT - GAMMA- | | UNCLASSIFIED | 1025 |
| | | AMINOBUTYRIC-ACID RECEPTOR ALPHA-6 SUBUNIT PRECURSOR | | | |
| | | (GABA(A) RECEPTOR) | | | |
| 2040 | 85549721 (5849, 5850) | Novel Protein sim. GBank gi\|2326720\|emb\|CAA64757\| - (X95503) zinc | | UNCLASSIFIED | 1014, 1022, 1050 |
| | | finger protein [Mus musculus] | | | |
| 2041 | 34408950 (8853, 8854) | Novel Protein sim. GBank gi\|2326756\|emb\|CAB10970\| - (Z98268) | | UNCLASSIFIED | 1024 |
| | | hypothetical protein Rv1713 [Mycobacterium tuberculosis] | | | |
| 2042 | 79876968 (4933, 4934) | Novel Protein sim. GBank gi\|2330863\|emb\|CAB11100\| - (Z98533) mma 3′- | | UNCLASSIFIED | 1015 |
| | | end processing protein ma14. [Schizosaccharomyces pombe] | | | |
| 2043 | 79853004 (2295, 2296) | Novel Protein sim. GBank gi\|2340079\|gb\|AAB67303.1\| - (U59485) AttH | | UNCLASSIFIED | 1036, 1041 |
| | | [Agrobacterium tumefaciens] | | | |
| 2044 | 78392934 (171, 172) | Novel Protein sim. GBank gi\|2384732 (AF015911) - NAC-1 protein [Rattus | | UNCLASSIFIED | 1006 |
| | | norvegicus] | | | |
| 2045 | 8358495 (6685, 6686) | Novel Protein sim. GBank gi\|2388584 (AC000098) - EST gb\|ATTS1136 | | UNCLASSIFIED | 1003 |
| | | comes from this gene. [Arabidopsis thaliana] | | | |
| 2046 | 66002976 (1011, 1012) | Novel Protein sim. GBank gi\|2388966\|emb\|CAB11699\| - (Z98979) | | UNCLASSIFIED | 1008 |
| | | putative phosphatidylserine decarboxylase proenzyme | | | |
| | | [Schizosaccharomyces pombe] | | | |
| 2047 | 78723438 (8475, 8476) | Novel Protein sim. GBank gi\|2494842\|sp\|Q12001\|ALG6_YEAST - | | UNCLASSIFIED | 1002, 1006, 1015, 1020, |
| | | GLUCOSYLTRANSFERASE ALG6 | | | 1024, 1036 |
| 2048 | 66376633 (6009, 6010) | Novel Protein sim. GBank gi\|2495497\|sp\|P77489\|YAGR_ECOLI - | | UNCLASSIFIED | 1007 |
| | | HYPOTHETICAL 78.1 KD PROTEIN IN INTF-EAEH INTERGENIC | | | |
| | | REGION | | | |
| 2049 | 10193191 (4363, 4364) | Novel Protein sim. GBank gi\|2495538\|sp\|P77717\|YBAY_ECOLI - | | UNCLASSIFIED | 1001 |
| | | HYPOTHETICAL 19.4 KD LIPOPROTEIN IN TESB-HHA INTERGENIC | | | |
| | | REGION PRECURSOR | | | |
| 2050 | 78958713 (8037, 8038) | Novel Protein sim. GBank gi\|2496666\|sp\|P55508\|Y4JH_RHISN - | | UNCLASSIFIED | 1006 |
| | | HYPOTHETICAL 23.0 KD PROTEIN Y4JH | | | |
| 2051 | 29355668 (4893, 4894) | Novel Protein sim. GBank gi\|2497080\|sp\|Q03640\|YMH2_YEAST - | | UNCLASSIFIED | 1007 |
| | | HYPOTHETICAL 171.1 KD PROTEIN IN YL16A-DAK1 INTERGENIC | | | |
| | | REGION | | | |
| 2052 | 80218984 (1981, 1982) | Novel Protein sim. GBank gi\|2497127\|sp\|Q05131\|YMS4_YEAST - | | UNCLASSIFIED | 1003, 1004, 1010, 1020, |
| | | HYPOTHETICAL 48.4 KD PROTEIN IN ARP9-IMP2 INTERGENIC | | | 1021, 1022, 1027, 1031, |
| | | REGION | | | 1035 |
| 2053 | 57292207 (4687, 4688) | Novel Protein sim. GBank gi\|2497127\|sp\|Q05131\|YMS4_YEAST - | | UNCLASSIFIED | 1004, 1020 |
| | | HYPOTHETICAL 48.4 KD PROTEIN IN ARP9-IMP2 INTERGENIC | | | |
| | | REGION | | | |
| 2054 | 27837596 (6573, 6574) | Novel Protein sim. GBank gi\|2497145\|sp\|Q04304\|YMY0_YEAST - | | UNCLASSIFIED | 1008, 1020, 1022, 1041 |
| | | HYPOTHETICAL 24.9 KD PROTEIN IN RCA1-NPL6 INTERGENIC | | | |
| | | REGION | | | |
| 2055 | 20441416 (9067, 9068) | Novel Protein sim. GBank gi\|2497150\|sp\|Q04436\|YMZ3_YEAST - | | UNCLASSIFIED | 1022 |
| | | HYPOTHETICAL 13.3 KD PROTEIN IN SNZ1-YPK2 INTERGENIC | | | |
| | | REGION | | | |
| 2056 | 78751846 (7047, 7048) | Novel Protein sim. GBank gi\|2497168\|sp\|Q03823\|YM35_YEAST - | | UNCLASSIFIED | 1024 |
| | | HYPOTHETICAL 95.1 KD PROTEIN IN IMP1-HLJ1 INTERGENIC | | | |
| | | REGION | | | |
| 2057 | 80467122 (731, 732) | Novel Protein sim. GBank gi\|2497174\|sp\|Q03218\|YM43_YEAST - | | UNCLASSIFIED | 1001, 1002, 1004, 1006, |
| | | HYPOTHETICAL 58.2 KD PROTEIN IN SIP18-SPT21 INTERGENIC | | | 1007, 1008, 1010, 1015, |
| | | REGION | | | 1020, 1021, 1024, 1031, |
| | | | | | 1038, 1041 |
| 2058 | 80218524 (6461, 6462) | Novel Protein sim. GBank gi\|2497179\|sp\|Q12751\|YM48_YEAST - | | UNCLASSIFIED | 1004, 1014, 1015, 1020 |
| | | HYPOTHETICAL 113.2 KD PROTEIN IN SSO2-HSC82 INTERGENIC | | | |
| | | REGION | | | |
| 2059 | 80223378 (4317, 4318) | Novel Protein sim. GBank gi\|2497182\|sp\|Q04329\|YM53_YEAST - | | UNCLASSIFIED | 1020, 1022, 1036 |
| | | HYPOTHETICAL 14.3 KD PROTEIN IN RPL39-VTI1 INTERGENIC | | | |
| | | REGION | | | |
| 2060 | 95317140 (8593, 8594) | Novel Protein sim. GBank gi\|2497197\|sp\|Q05027\|YM75_YEAST - | | UNCLASSIFIED | 1001, 1002, 1003, 1004, |
| | | HYPOTHETICAL 17.3 KD PROTEIN IN RNA1-RNT1 INTERGENIC | | | 1006, 1008, 1010, 1014, |
| | | REGION | | | 1015, 1020, 1022, 1024, |
| | | | | | 1026, 1028, 1031, 1035, |
| | | | | | 1042 |
| 2061 | 10328702 (1709, 1710) | Novel Protein sim. GBank gi\|2497226\|sp\|Q04869\|YM94_YEAST - | | UNCLASSIFIED | 1023 |
| | | HYPOTHETICAL 38.2 KD PROTEIN IN PRE5-FET4 INTERGENIC | | | |
| | | REGION | | | |
| 2062 | 80258357 (3463, 3464) | Novel Protein sim. GBank gi\|2497948\|sp\|Q12428\|YP02_YEAST - | | UNCLASSIFIED | 1007, 1020 |
| | | HYPOTHETICAL 57.7 KD PROTEIN IN CIT3-HAL1 INTERGENIC | | | |
| | | REGION | | | |
| 2063 | 79816346 (5651, 5652) | Novel Protein sim. GBank gi\|2498298\|sp\|Q12387\|DEC1_YEAST - DEC1 | | UNCLASSIFIED | 1001, 1004, 1020, 1022, |
| | | PROTEIN (MDM20 PROTEIN) | | | 1024 |
| 2064 | 36849914 (719, 720) | Novel Protein sim. GBank gi\|2498325\|sp\|Q62894\|ECM1_RAT - | | UNCLASSIFIED | 1050 |
| | | EXTRACELLULAR MATRIX PROTEIN 1 (SECRETORY COMPONENT | | | |
| | | P85) | | | |
| 2065 | 80217443 (401, 402) | Novel Protein sim. GBank gi\|2498859\|sp\|Q02805\|ROD1_YEAST - ROD1 | | UNCLASSIFIED | 1002, 1003, 1004, 1008, |
| | | PROTEIN | | | 1015, 1022, 1055 |
| 2066 | 47656827 (2009, 2010) | Novel Protein sim. GBank gi\|2500719\|sp\|Q50612\|SEA2_MYCTU - | | UNCLASSIFIED | 1026 |
| | | PREPROTEIN TRANSLOCASE SECA 2 SUBUNIT | | | |
| 2067 | 80503916 (1555, 1556) | Novel Protein sim. GBank gi\|2500728\|sp\|Q59912\|SECY_STRGB - | | UNCLASSIFIED | 1010, 1021, 1022 |
| | | PREPROTEIN TRANSLOCASE SECY SUBUNIT | | | |
| 2068 | 79603634 (5809, 5810) | Novel Protein sim. GBank gi\|2506924\|sp\|P49754\|VP41_HUMAN - | | UNCLASSIFIED | 1031 |
| | | VACUOLAR ASSEMBLY PROTEIN VPS41 HOMOLOG (S53) | | | |
| 2069 | 36831196 (3665, 3666) | Novel Protein sim. GBank gi\|2507089\|sp\|P31554\|OSTA_ECOLI - | | UNCLASSIFIED | 1051 |
| | | ORGANIC SOLVENT TOLERANCE PROTEIN PRECURSOR | | | |
| 2070 | 12904352 (3385, 3386) | Novel Protein sim. GBank gi\|2507430\|sp\|P07395\|SYFB_ECOLI - | | UNCLASSIFIED | 1003 |
| | | PHENYLALANYL-TRNA SYNTHETASE BETA CHAIN | | | |
| | | (PHENYLALANINE- | | | |
| | | TRNA LIGASE BETA CHAIN) (PHERS) | | | |
| 2071 | 8490739 (3091, 3092) | Novel Protein sim. GBank gi\|254450\|bbs\|112161 - (S44213) | | UNCLASSIFIED | 1022 |
| | | YKL525 = TUP1 homolog [Saccharomyces cerevisiae, Peptide, 849 aa] | | | |
| | | (Saccharomyces cerevisiae] | | | |
| 2072 | 87453418 (5941, 5942) | Novel Protein sim. GBank gi\|2618699 (AC002510) - unknown protein | | UNCLASSIFIED | 1023 |
| | | [Arabidopsis thaliana] | | | |
| 2073 | 33205947 (1311, 1312) | Novel Protein sim. GBank gi\|2624970 (AF020312) - proline-rich protein 9-1 | | UNCLASSIFIED | 1024 |
| | | [Mus musculus] | | | |
| 2074 | 79571610 (333, 334) | Novel Protein sim. GBank gi\|2626836\|dbj\|BAA23413\| - (D86947) | | UNCLASSIFIED | 1015 |
| | | chemotactic transducer [Pseudomonas aeruginosa] | | | |
| 2075 | 20292038 (4973, 4974) | Novel Protein sim. GBank gi\|2634032\|emb\|CAB13533\| - (Z99112) nusA | | UNCLASSIFIED | 1031 |
| | | [Bacillus subtilis] | | | |
| 2076 | 39460161 (2425, 2426) | Novel Protein sim. GBank gi\|2635815\|emb\|CAB15308\| - (Z99120) similar | | UNCLASSIFIED | 1003 |
| | | to iron-binding protein [Bacillus subtilis] | | | |
| 2077 | 57292229 (4333, 4334) | Novel Protein sim. GBank gi\|2644\|emb\|CAA41257\| - (X58363) Pet127 | | UNCLASSIFIED | 1002, 1020, 1036 |
| | | [Saccharomyces cerevisiae] | | | |
| 2078 | 71753462 (4017, 4018) | Novel Protein sim. GBank gi\|2660676 (AC002342) - Dreg-2 like protein | | UNCLASSIFIED | 1021 |
| | | [Arabidopsis thaliana] | | | |
| 2079 | 28976545 (6885, 6886) | Novel Protein sim. GBank gi\|2662054\|dbj\|BAA23678\| - (AB004651) | | UNCLASSIFIED | 1024 |
| | | isocitrate lyase [Hyphomicroblum methylovorum] | | | |
| 2080 | 79574400 (3877, 3878) | Novel Protein sim. GBank gi\|2688682 (AE001174) - conserved | | UNCLASSIFIED | 1028 |
| | | hypothetical protein [Borrelia burgdorferi] | | | |
| 2081 | 71744800 (3203, 3204) | Novel Protein sim. GBank gi\|2707972 (U76754) - unknown [Mus | | UNCLASSIFIED | 1002, 1036 |
| | | musculus] | | | |
| 2082 | 78926051 (3705, 3706) | Novel Protein sim. GBank gi\|2791412\|emb\|CAA16006\| - (AL021184) | | UNCLASSIFIED | 1006 |
| | | hypothetical protein Rv1478 [Mycobacterium tuberculosis] | | | |
| 2083 | 38340009 (5697, 5698) | Novel Protein sim. GBank gi\|2791586\|emb\|CAA16074.1\| - (AL021287) | | UNCLASSIFIED | 1006, 1010 |
| | | hypothetical protein Rv2989 [Mycobacterium tuberculosis] | | | |
| 2084 | 80079283 (4507, 4508) | Novel Protein sim, GBank gi\|2791610\|emb\|CAA16098.1\| - (AL021287) | | UNCLASSIFIED | 1024, 1031 |
| | | hypothetical protein Rv3013 [Mycobacterium tuberculosis] | | | |
| 2085 | 78769005 (7241, 7242) | Novel Protein sim. GBank gi\|2815315\|emb\|CAA16438\| - (AL021529) | | UNCLASSIFIED | 1015 |
| | | hypothetical protein SC10A5.06 [Streptomyces coelicolor] | | | |
| 2086 | 86672815 (5391, 5392) | Novel Protein sim. GBank gi\|2827605\|emb\|CAA16660\| - (AL021646) | | UNCLASSIFIED | 1017 |
| | | hypothetical protein Rv3195 [Mycobacterium tuberculosis] | | | |
| 2087 | 87464388 (8079, 8080) | Novel Protein sim. GBank gi\|282994\|pir\|\|S27762 - Sip1 protein - barley | | UNCLASSIFIED | 1023 |
| 2088 | 66314545 (6995, 6996) | Novel Protein sim. GBank gi\|2832228 (AF012126) - zinc finger protein | | UNCLASSIFIED | 1014, 1033 |
| | | [Homo sapiens] | | | |
| 2089 | 28465093 (117, 118) | Novel Protein sim. GBank gi\|2833481\|sp\|Q57122\|Y322_HAEIN - | | UNCLASSIFIED | 1014 |
| | | HYPOTHETICAL PROTEIN HI0322 | | | |
| 2090 | 66770629 (4873, 4874) | Novel Protein sim. GBank gi\|2853221 (U72953) - merozoite surface | | UNCLASSIFIED | 1046 |
| | | porotein 2 [Plasmodium falciparum] | | | |
| 2091 | 77706782 (6089, 6090) | Novel Protein sim. GBank gi\|2853301 (AF007194) - mucin [Homo | | UNCLASSIFIED | 1041 |
| | | sapiens] | | | |
| 2092 | 86473162 (6591, 6592) | Novel Protein sim. GBank gi\|2894254\|emb\|CAA17116.1\| - (AL021841) | | UNCLASSIFIED | 1026 |
| | | PE_PGRS [Mycobacterium tuberculosis] | | | |
| 2093 | 34082841 (6763, 6764) | Novel Protein sim. GBank gi\|2895563 (AF041083) - RoBo-1 [Rattus | | UNCLASSIFIED | 1000 |
| | | norvegicus] | | | |
| 2094 | 19848631 (4499, 4500) | Novel Protein sim. GBank gi\|2896702\|emb\|CAA17181.1\| - (AL021897) | | UNCLASSIFIED | 1031 |
| | | hypothetical protein Rv1065 [Mycobacterium tuberculosis] | | | |
| 2095 | 78387912 (2437, 2438) | Novel Protein sim. GBank gi\|2911858 (AF047659) - No definition line | | UNCLASSIFIED | 1024, 1043 |
| | | found [Caenorhabditis elegans] | | | |
| 2096 | 20562660 (4177, 4178) | Novel Protein sim. GBank gi\|2960089\|emb\|CAA17987.1\| - (AL022121) | | UNCLASSIFIED | 1055 |
| | | dppB [Mycobacterium tuberculosis] | | | |
| 2097 | 8516281 (1801, 1802) | Novel Protein sim. GBank gi\|2981631\|dbj\|BAA25253.1\| - (AB012223) | | UNCLASSIFIED | 1050 |
| | | ORF2 [Canis familiaris] | | | |
| 2098 | 10249120 (4117, 4118) | Novel Protein sim. GBank gi\|2981631\|dbj\|BAA25253.1\| - (AB012223) | | UNCLASSIFIED | 1001 |
| | | ORF2 [Canis familiaris] | | | |
| 2099 | 65652525 (4655, 4656) | Novel Protein sim. GBank gi\|2981631\|dbj\|BAA25253.1\| - (AB012223) | | UNCLASSIFIED | 1051 |
| | | ORF2 [Canis familiaris] | | | |
| 2100 | 78094837 (6731, 6732) | Novel Protein sim. GBank gi\|2981631\|dbj\|BAA25253.1\| - (AB012223) | | UNCLASSIFIED | 1039 |
| | | ORF2 [Canis familiaris] | | | |
| 2101 | 12904356 (3471, 3472) | Novel Protein sim. GBank gi\|2982245 (AF051205) - hypothetical protein | | UNCLASSIFIED | 1028, 1047 |
| | | [Picea mariana] | | | |
| 2102 | 10198085 (6605, 6606) | Novel Protein sim. GBank gi\|2982986 (AE000682) - putative protein | | UNCLASSIFIED | 1001 |
| | | [Aquifex aeolicus] | | | |
| 2103 | 39575224 (5485, 5486) | Novel Protein sim. GBank gi\|2995313\|emb\|CAA18341\| - (AL022268) | | UNCLASSIFIED | 1028 |
| | | ribonucleotide reductase [Streptomyces coelicolor] | | | |
| 2104 | 70637364 (657, 658) | Novel Protein sim. GBank gi\|3006156\|emb\|CAA18397\| - (AL022299) | | UNCLASSIFIED | 1046 |
| | | putative serine palmitoyltransferase [Schizosaccharomyces pombe] | | | |
| 2105 | 25239501 (2863, 2864) | Novel Protein sim. GBank gi\|3024056\|sp\|Q63416\|ITH3_RAT - INTER- | | UNCLASSIFIED | 1007 |
| | | ALPHA-TRYPSIN INHIBITOR HEAVY CHAIN H3 PRECURSOR (ITI | | | |
| | | HEAVY CHAIN H3) | | | |
| 2106 | 80090827 (6553, 6554) | Novel Protein sim. GBank gi\|3025235\|sp\|P75978\|YMFN_ECOLI - | | UNCLASSIFIED | 1002, 1004, 1015 |
| | | HYPOTHETICAL 50.9 KD PROTEIN IN INTE-PIN INTERGENIC REGION | | | |
| 2107 | 66727476 (3173, 3174) | Novel Protein sim. GBank gi\|3025268\|sp\|P76585\|YPHG_ECOLI - | | UNCLASSIFIED | 1046 |
| | | HYPOTHETICAL 127.3 KD PROTEIN IN CSIE-GLYA INTERGENIC | | | |
| | | REGION | | | |
| 2108 | 86689445 (8563, 8564) | Novel Protein sim. GBank gi\|3043598\|dbj\|BAA25463\| - (AB011109) | | UNCLASSIFIED | 1023 |
| | | KIAA0537 protein [Homo sapiens] | | | |
| 2109 | 78898885 (2055, 2056) | Novel Protein sim. GBank gi\|3043634\|dbj\|BAA25481\| - (AB011127) | | UNCLASSIFIED | 1015 |
| | | KIAA0555 protein [Homo sapiens] | | | |
| 2110 | 11356683 (1397, 1398) | Novel Protein sim. GBank gi\|3080425\|emb\|CAA18744.1\| - (AL022604) | | UNCLASSIFIED | 1055 |
| | | putative protein [Arabidopsis thaliana] | | | |
| 2111 | 86623883 (1203, 1204) | Novel Protein sim. GBank gi\|30851\|emb\|CAA44287\| - (X62421) | | UNCLASSIFIED | 1044 |
| | | homologue to E. coli DnaJ protein [Homo sapiens] | | | |
| 2112 | 29143504 (8655, 8656) | Novel Protein sim. GBank gi\|3114594 (AF041377) - cell death activator | | UNCLASSIFIED | 1002, 1014 |
| | | CIDE-B [Mus musculus] | | | |
| 2113 | 29346021 (57, 58) | Novel Protein sim. GBank gi\|3122400\|sp\|O35682\|MUG_MOUSE - | | UNCLASSIFIED | 1020 |
| | | MYELOID UPREGULATED PROTEIN | | | |
| 2114 | 11086263 (1867, 1868) | Novel Protein sim. GBank gi\|3122897\|sp\|O06284\|SYK_MYCTU - LYSYL- | | UNCLASSIFIED | 1003 |
| | | TRNA SYNTHETASE (LYSINE-TRNA LIGASE) (LYSRS) | | | |
| 2115 | 17891620 (1069, 1070) | Novel Protein sim. GBank gi\|3122933\|sp\|Q23623\|TGT_CAEEL - | | UNCLASSIFIED | 1015 |
| | | PUTATIVE QUEUINE TRNA-RIBOSYLTRANSFERASE (TRNA-GUANINE | | | |
| | | TRANSGLYCOSYLASE) (GUANINE INSERTION ENZYME) | | | |
| 2116 | 95105734 (3179, 3180) | Novel Protein sim. GBank gi\|3128315 (AF010496) - potential secretion | | UNCLASSIFIED | 1008 |
| | | ATP-binding protein [Rhodobacter capsulatus] | | | |
| 2117 | 20623991 (1411, 1412) | Novel Protein sim. GBank gi\|3130050\|emb\|CAA18995\| - (AL023518) | | UNCLASSIFIED | 1003 |
| | | hypothetical protein [Schizosaccharomyces pombe] | | | |
| 2118 | 82460088 (8443, 8444) | Novel Protein sim. GBank gi\|3183443\|sp\|Q46861\|YGIQ_ECOLI - | | UNCLASSIFIED | 1001, 1031 |
| | | HYPOTHETICAL 46.9 KD PROTEIN IN METC-SUFI INTERGENIC | | | |
| | | REGION | | | |
| 2119 | 78796862 (4093, 4094) | Navel Protein sim. GBank gi\|3192897 (AF066071) - SP85; PsB | | UNCLASSIFIED | 1024 |
| | | [Dictyostelium discoldeum] | | | |
| 2120 | 28491134 (4287, 4288) | Novel Protein sim. GBank gi\|3192897 (AF066071) - SP85; PsB | | UNCLASSIFIED | 1006 |
| | | [Dictyostelium discoldeum] | | | |
| 2121 | 28384987 (4767, 4768) | Novel Protein sim. GBank gi\|320866\|pir\|\|S31262 - TYB4 protein - yeast | | UNCLASSIFIED | 1015 |
| | | (Saccharomyces cerevisiae) transposon Ty4 | | | |
| 2122 | 80055560 (3731, 3732) | Novel Protein sim. GBank gi\|3256517\|dbj\|BAA29200.1\| - (AP000001) | | UNCLASSIFIED | 1003 |
| | | 249aa long hypothetical protein [Pyrococcus horikoshil] | | | |
| 2123 | 20438347 (3831, 3832) | Novel Protein sim. GBank gi\|3257180\|dbj\|BAA29863\| - (AP000003) 391aa | | UNCLASSIFIED | 1022 |
| | | long hypothetical aspartate aminotransferase [Pyrococcus horikoshil] | | | |
| 2124 | 95103910 (4049, 4050) | Novel Protein sim. GBank gi\|3269293\|emb\|CAA19726\| - (AL030978) | | UNCLASSIFIED | 1002 |
| | | putative protein [Arabidopsis thaliana] | | | |
| 2125 | 20465424 (8395, 8396) | Novel Protein sim. GBank gi\|3287868\|sp\|P87058\|LAH1_SCHPO - LA | | UNCLASSIFIED | 1008 |
| | | PROTEIN HOMOLOG (LA RIBONUCLEOPROTEIN) (LA AUTOANTIGEN | | | |
| | | HOMOLOG) | | | |
| 2126 | 11360195 (8501, 8502) | Novel Protein sim. GBank gi\|3294241\|emb\|CAA19854\| - (AL031031) | | UNCLASSIFIED | 1004 |
| | | phosphatidylglycerophosphate synthase [Streptomyces coelicolor] | | | |
| 2127 | 71805911 (3683, 3684) | Novel Protein sim. GBank gi\|3328385 (AF076956) - prenylated SNARE | | UNCLASSIFIED | 1024 |
| | | protein Ykt6 [Mus musculus] | | | |
| 2128 | 79635381 (5843, 5844) | Novel Protein sim. GBank gi\|3341658\|emb\|CAA13172\| - (AJ231130) z70r | | UNCLASSIFIED | 1001 |
| | | [Vibrio cholerae] | | | |
| 2129 | 37802734 (4537, 4538) | Novel Protein sim. GBank gi\|3342823 (AF076955) - eukaryotic translation | | UNCLASSIFIED | 1055 |
| | | initiation factor p28 subunit [Zea mays] | | | |
| 2130 | 86685844 (5553, 5554) | Novel Protein sim. GBank gi\|3378420 (AF079317) - unknown | | UNCLASSIFIED | 1026 |
| | | [Sphingomonas aromaticivorans] | | | |
| 2131 | 11295400 (3297, 3298) | Novel Protein sim. GBank gi\|3413320\|emb\|CAA06915\| - (AJ006215) CMP | | UNCLASSIFIED | 1003 |
| | | N-acetylneuraminic acid synthetase [Mus musculus] | | | |
| 2132 | 78460013 (6171, 6172) | Novel Protein sim. GBank gi\|3413408\|emb\|CAA20269\| - (AL031231) | | UNCLASSIFIED | 1024 |
| | | ATP/GTP binding protein [Streptomyces coelicolor] | | | |
| 2133 | 25250036 (4055, 4056) | Novel Protein sim. GBank gi\|3426039 (AC005168) - unknown protein | | UNCLASSIFIED | 1041 |
| | | [Arabidopsis thaliana] | | | |
| 2134 | 37061554 (8677, 8678) | Novel Protein sim. GBank gi\|3435201 (AF072467) - unknown [Homo | | UNCLASSIFIED | 1047 |
| | | sapiens] | | | |
| 2135 | 79173375 (1243, 1244) | Novel Protein sim. GBank gi\|3449254\|emb\|CAA20398\| - (AL031317) | | UNCLASSIFIED | 1003 |
| | | hypothetical protein SC6G4.20c [Streptomyces coelicolor] | | | |
| 2136 | 13518323 (6869, 6870) | Novel Protein sim. GBank gi\|3449269\|emb\|CAA20413\| - (AL031317) | | UNCLASSIFIED | 1022 |
| | | hypothetical protein SC6G4.35 [Streptomyces coelicolor] | | | |
| 2137 | 30576868 (4611, 4612) | Novel Protein sim. GBank gi\|3495\|emb\|CAA27837\| - (X04289) CDC39 | | UNCLASSIFIED | 1007 |
| | | gene product (aa 1-834) [Saccharomyces cerevisiae] | | | |
| 2138 | 10317780 (3011, 3012) | Novel Protein sim. GBank gi\|3510629 (AF047828) - syringomycin | | UNCLASSIFIED | 1021 |
| | | synthetase [Pseudomonas syringae pv. syringae] | | | |
| 2139 | 87462072 (3347, 3348) | Novel Protein sim. GBank gi\|3582335 (AC005496) - unknown protein | | UNCLASSIFIED | 1023 |
| | | [Arabidopsis thaliana] | | | |
| 2140 | 86677733 (3957, 3958) | Novel Protein sim. GBank gi\|3639077 (AF090113) - AMPA receptor | | UNCLASSIFIED | 1045 |
| | | binding protein [Rattus norvegicus] | | | |
| 2141 | 27261992 (4743, 4744) | Novel Protein sim. GBank gi\|3688173\|emb\|CAA21201\| - (AL031804) | | UNCLASSIFIED | 1020 |
| | | putative protein [Arabidopsis thaliana] | | | |
| 2142 | 20292030 (4839, 4840) | Novel Protein sim. GBank gi\|3722226 (AF058711) - essential Gc protein | | UNCLASSIFIED | 1031 |
| | | [Neisseria gonorrhoeae] | | | |
| 2143 | 5827990 (1833, 1834) | Novel Protein sim. GBank gi\|3738310 (AC005309) - putative nuclear | | UNCLASSIFIED | 1055 |
| | | protein [Arabidopsis thaliana] | | | |
| 2144 | 79614206 (7739, 7740) | Novel Protein sim. GBank gi\|3786009 (AC005499) - unknown protein | | UNCLASSIFIED | 1002 |
| | | [Arabidopsis thaliana] | | | |
| 2145 | 20466623 (4871, 4872) | Novel Protein sim. GBank gi\|3790677 (AF099002) - similar to human 5′- | | UNCLASSIFIED | 1008 |
| | | nucleotidase (SW: P49902) [Caenorhabditis elegans] | | | |
| 2146 | 78674885 (5371, 5372) | Novel Protein sim. GBank gi\|3818539 (AF071506) - TIMELESS protein | | UNCLASSIFIED | 1015 |
| | | [Mus musculus] | | | |
| 2147 | 11690248 (2181, 2182) | Novel Protein sim. GBank gi\|382209\|prf\|\|1819268A - tRNA guanine | | UNCLASSIFIED | 1028 |
| | | transglycosylase [Zymomonas mobills] | | | |
| 2148 | 17282819 (2423, 2424) | Novel Protein sim. GBank gi\|3860634\|emb\|CAA14535\| - (AJ235270) | | UNCLASSIFIED | 1036 |
| | | DEOXYGUANOSINETRIPHOSPHATE TRIPHOSPHOHYDROLASE | | | |
| | | (dgtP) [Rickettsia prowazekll] | | | |
| 2149 | 21424850 (2033, 2034) | Novel Protein sim. GBank gi\|3873550\|emb\|CAA22127\| - (AL033534) | | UNCLASSIFIED | 1020, 1022, 1031 |
| | | serine-rich protein [Schizosaccharomyces pombe] | | | |
| 2150 | 79259168 (1755, 1756) | Novel Protein sim. GBank gi\|3875273\|emb\|CAB02862\| - (Z81051) | | UNCLASSIFIED | 1022, 1027, 1038 |
| | | predicted using Genefinder; Similarity in 3′ end to Human KIAA0173 | | | |
| | | protein (TR: Q14679); cDNA EST-EMBL: D33319 comes from this gene; | | | |
| | | cDNA EST EMBL: D34000 comes from this gene; cDNA EST | | | |
| | | EMBL: D36110 comes from this gene; c . . . | | | |
| 2151 | 16708710 (4739, 4740) | Novel Protein sim. GBank gi\|3875796\|emb\|CAA97788\| - (Z73425) | | UNCLASSIFIED | 1021 |
| | | Similarity to Yeast hypothetical YIK9 protein (SW: YIK9_YEAST); cDNA | | | |
| | | EST EMBL: T01252 comes from this gene; cDNA EST EMBL: D33205 | | | |
| | | comes from this gene; cDNA EST EMBL: D33955 comes from this gene; | | | |
| | | cDNA EST EMBL: D35484 comes . . . | | | |
| 2152 | 13509387 (2847, 2848) | Novel Protein sim. GBank gi\|3879239\|emb\|CAA92009\| - (Z68010) | | UNCLASSIFIED | 1001 |
| | | T01C1.3 [Caenorhabditis elegans] | | | |
| 2153 | 9398461 (7129, 7130) | Novel Protein sim. GBank gi\|3915465\|sp\|P77254\|YFGK_ECOLI - | | UNCLASSIFIED | 1015, 1026 |
| | | HYPOTHETICAL GTP-BINDING PROTEIN IN XSEA-HISS INTERGENIC | | | |
| | | REGION | | | |
| 2154 | 87451985 (4765, 4766) | Novel Protein sim. GBank gi\|3928084 (AC005770) - retrotransposon-like | | UNCLASSIFIED | 1023 |
| | | protein [Arabidopsis thaliana] | | | |
| 2155 | 78376913 (4005, 4006) | Novel Protein sim. GBank gi\|3928726\|emb\|CAA22222\| - (AL034355) | | UNCLASSIFIED | 1006, 1024 |
| | | hypothetical protein SCD78.17c [Streptomyces coelicolor] | | | |
| 2156 | 20636325 (683, 684) | Novel Protein sim. GBank gi\|3929022 (AF057696) - LspB [Haemophilus | | UNCLASSIFIED | 1022 |
| | | ducreyl] | | | |
| 2157 | 79573718 (7583, 7584) | Novel Protein sim. GBank gi\|3986409 (AF033350) - CDCREL-1 homolog | | UNCLASSIFIED | 1014, 1015 |
| | | [Mus musculus] | | | |
| 2158 | 78674796 (8627, 8628) | Novel Protein sim. GBank gi\|399339\|sp\|P30144\|DAGA_ALTHA - NA(+)- | | UNCLASSIFIED | 1015 |
| | | LINKED D-ALANINE GLYCINE PERMEASE | | | |
| 2159 | 80217591 (4405, 4406) | Novel Protein sim. GBank gi\|4000\|emb\|CAA38222\| - (X54324) 43 kD | | UNCLASSIFIED | 1002, 1003, 1004, 1006, |
| | | protein [Saccharomyces cerevisiae] | | | 1008, 1020, 1022, 1023, |
| | | | | | 1024, 1031, 1035, 1036 |
| 2160 | 78206888 (277, 278) | Novel Protein sim. GBank gi\|400533\|sp\|Q02373\|NIDM_BOVIN - NADH- | | UNCLASSIFIED | 1020 |
| | | UBIQUINONE OXIDOREDUCTASE PDSW SUBUNIT (COMPLEX I- | | | |
| | | PDSW) (CI-PDSW) | | | |
| 2161 | 20458975 (7509, 7510) | Novel Protein sim. GBank gi\|401542\|sp\|P31064\|YEDE_ECOLI - | | UNCLASSIFIED | 1008 |
| | | HYPOTHETICAL 44.4 KD PROTEIN IN AMYA-FLIE INTERGENIC | | | |
| | | REGION (ORF 48) | | | |
| 2162 | 30251079 (2965, 2966) | Novel Protein sim. GBank gi\|401561\|sp\|P31120\|MRSA_ECOLI - MRSA | | UNCLASSIFIED | 1041 |
| | | PROTEIN | | | |
| 2163 | 20443675 (6371, 6372) | Novel Protein sim. GBank gi\|4050087 (AF109907) - S164 [Homo sapiens] | | UNCLASSIFIED | 1022 |
| 2164 | 56653786 (1765, 1766) | Novel Protein sim. GBank gi\|406767\|emb\|CAA52645\| - (X74551) MAC1 | | UNCLASSIFIED | 1002, 1006, 1020, 1021 |
| | | protein [Saccharomyces cerevisiae] | | | |
| 2165 | 29238378 (469, 470) | Novel Protein sim. GBank gi\|4129\|emb\|CAA30440\| - (X07558) URF | | UNCLASSIFIED | 1001, 1003, 1020, 1031, |
| | | [Saccharomyces cerevisiae] | | | 1041 |
| 2166 | 20466807 (6363, 6364) | Novel Protein sim. GBank gi\|4139232\|gb\|AAD05169.1\| - (AF110185) | | UNCLASSIFIED | 1008 |
| | | unknown [Burkholderia pseudomallel] | | | |
| 2167 | 78977368 (8939, 8940) | Novel Protein sim. GBank gi\|414081\|emb\|CAA53202\| - (X75449) RAS | | UNCLASSIFIED | 1002 |
| | | GTPase-activating protein [Saccharomyces cerevisiae] | | | |
| 2168 | 80209391 (2027, 2028) | Novel Protein sim. GBank gi\|4155476 (AE001519) - putative [Helicobacter | | UNCLASSIFIED | 1031 |
| | | pylori J99] | | | |
| 2169 | 82108484 (2613, 2614) | Novel Protein sim. GBank gi\|416658\|sp\|P32448\|ASF2_YEAST - ANTI- | | UNCLASSIFIED | 1001, 1002, 1003, 1004, |
| | | SILENCING PROTEIN 2 | | | 1006, 1007, 1008, 1010, |
| | | | | | 1014, 1015, 1020, 1021, |
| | | | | | 1022, 1024, 1025, 1026, |
| | | | | | 1028, 1031, 1035, 1036, |
| | | | | | 1041 |
| 2170 | 80219578 (4091, 4092) | Novel Protein sim. GBank gi\|416762\|sp\|P32797\|CC13_YEAST - CELL | | UNCLASSIFIED | 1002, 1003, 1004, 1008, |
| | | DIVISION CONTROL PROTEIN 13 | | | 1015, 1020, 1022, 1031 |
| 2171 | 11798406 (931, 932) | Novel Protein sim. GBank gi\|416769\|sp\|P32558\|CC68_YEAST - CELL | | UNCLASSIFIED | 1023 |
| | | DIVISION CONTROL PROTEIN 68 | | | |
| 2172 | 27366317 (2519, 2520) | Novel Protein sim. GBank gi\|416911\|sp\|P32461\|DPH2_YEAST - | | UNCLASSIFIED | 1020 |
| | | DIPHTERIA TOXIN RESISTANCE PROTEIN 2 | | | |
| 2173 | 20711747 (4629, 4630) | Novel Protein sim. GBank gi\|416911\|sp\|P32461\|DPH2_YEAST - | | UNCLASSIFIED | 1020 |
| | | DIPHTERIA TOXIN RESISTANCE PROTEIN 2 | | | |
| 2174 | 11818906 (2093, 2094) | Novel Protein sim. GBank gi\|417116\|sp\|P32396\|HEMZ_BACSU - | | UNCLASSIFIED | 1003 |
| | | FERROCHELATASE (PROTOHEME FERRO-LYASE) (HEME | | | |
| | | SYNTHETASE) | | | |
| 2175 | 14996440 (6761, 6762) | Novel Protein sim. GBank gi\|417457\|sp\|P32767\|PDR6_YEAST - | | UNCLASSIFIED | 1022 |
| | | PLEIOTROPIC DRUG RESISTANCE REGULATORY PROTEIN 6 | | | |
| 2176 | 20483947 (6801, 6802) | Novel Protein sim. GBank gi\|417478\|sp\|P32522\|PT09_YEAST - PET309 | | UNCLASSIFIED | 1008 |
| | | PROTEIN PRECURSOR | | | |
| 2177 | 8234455 (3893, 3894) | Novel Protein sim. GBank gi\|418501\|sp\|P32159\|YIIP_ECOLI - | | UNCLASSIFIED | 1020 |
| | | HYPOTHETICAL 32.9 KD PROTEIN IN CPXA-PFKA INTERGENIC | | | |
| | | REGION | | | |
| 2178 | 57294505 (6107, 6108) | Novel Protein sim. GBank gi\|418609\|sp\|P32464\|YKS9_YEAST - | | UNCLASSIFIED | 1003, 1008, 1015, 1022, |
| | | HYPOTHETICAL 45.9 KD PROTEIN IN CNB1-PXA2 INTERGENIC | | | 1023 |
| | | REGION | | | |
| 2179 | 21635624 (4843, 4844) | Novel Protein sim. GBank gi\|4200042\|dbj\|BAA74460\| - (AB022715) | | UNCLASSIFIED | 1015, 1036 |
| | | exopolyphosphatase [Pseudomonas aeruginosa] | | | |
| 2180 | 91215888 (1449, 1450) | Novel Protein sim. GBank gi\|423830\|pir\|\|A45690 - transactivator EBNA-2 - | | UNCLASSIFIED | 1003, 1014, 1051 |
| | | Herpesvirus papio HVP | | | |
| 2181 | 20123764 (875, 876) | Novel Protein sim. GBank gi\|4322004\|gb\|AAD15907\| - (AF069392) polar | | UNCLASSIFIED | 1031 |
| | | flagellar switch protein [Vibrio parahaemolyticus] | | | |
| 2182 | 88094506 (4131, 4132) | Novel Protein sim. GBank gi\|433645\|emb\|CAA53420\| - (X75781) D513 | | UNCLASSIFIED | 1003, 1004, 1010, 1020, |
| | | [Saccharomyces cerevisiae] | | | 1022, 1041, 1051 |
| 2183 | 6753363 (2721, 2722) | Novel Protein sim. GBank gi\|437726 (L23753) - MNN1 [Saccharomyces | | UNCLASSIFIED | 1020 |
| | | cerevisiae] | | | |
| 2184 | 10331456 (7645, 7646) | Novel Protein sim. GBank gi\|4406780\|gb\|AAD20090\| - (AC006532) | | UNCLASSIFIED | 1002 |
| | | putative multispanning membrane protein [Arabidopsis thaliana] | | | |
| 2185 | 78970614 (3111, 3112) | Novel Protein sim. GBank gi\|441155 (L22219) - ransmission-blocking | | UNCLASSIFIED | 1014, 1024 |
| | | target antigen [Plasmodium falciparum] | | | |
| 2186 | 39709654 (5379, 5380) | Novel Protein sim. GBank gi\|4415936\|gb\|AAD20166\| - (AC006418) | | UNCLASSIFIED | 1002, 1041 |
| | | unknown protein [Arabidopsis thaliana] | | | |
| 2187 | 78751849 (7125, 7126) | Novel Protein sim. GBank gi\|4416305\|gb\|AAD20310\| - (AF105716) | | UNCLASSIFIED | 1002, 1015, 1020, 1024 |
| | | hypothetical protein [Zea mays] | | | |
| 2188 | 78361431 (6365, 6366) | Novel Protein sim. GBank gi\|4455171\|emb\|CAB36703\| - (AL035521) | | UNCLASSIFIED | 1006, 1024, 1043 |
| | | hypothetical protein [Arabidopsis thaliana] | | | |
| 2189 | 80236049 (8061, 8062) | Novel Protein sim. GBank gi\|4468310\|emb\|CAB37991\| - (AL031432) | | UNCLASSIFIED | 1004 |
| | | dJ465N24.1 (PUTATIVE novel protein similar to predicted yeast and worm | | | |
| | | proteins) [Homo sapiens] | | | |
| 2190 | 79831273 (5507, 5508) | Novel Protein sim. GBank gi\|4468699\|emb\|CAB38153.1\| - (AL035591) | | UNCLASSIFIED | 1021 |
| | | putative integral membrane export protein [Streptomyces coelicolor] | | | |
| 2191 | 71088503 (6521, 6522) | Novel Protein sim. GBank gi\|4468699\|emb\|CAB38153.1\| - (AL035591) | | UNCLASSIFIED | 1050 |
| | | putative integral membrane export protein [Streptomyces coelicolor] | | | |
| 2192 | 27972146 (7167, 7168) | Novel Protein sim. GBank gi\|4493746\|emb\|CAB39088.1\| - (AL034358) | | UNCLASSIFIED | 1020 |
| | | predicted using hexExon; L4830.10, Hypothetical protein, len: 816 aa | | | |
| | | [Leishmania major] | | | |
| 2193 | 54696540 (8211, 8212) | Novel Protein sim. GBank gi\|4502037\|ref\|NP_003739.1\|pALDH - | | UNCLASSIFIED | 1038 |
| | | UNKNOWN | | | |
| 2194 | 27847651 (1287, 1288) | Novel Protein sim. GBank gi\|4502351\|ref\|NP_001692.1\|pBAAT - bile acid | | UNCLASSIFIED | 1020, 1031 |
| | | Coenzyme A: amino acid N-acyltransferase; glycine N-choloyltransferase | | | |
| 2195 | 56657161 (7565, 7566) | Novel Protein sim. GBank gi\|4504161\|ref\|NP_002083.1\|pGRSF - G-rich | | UNCLASSIFIED | 1006 |
| | | RNA sequence binding factor 1 | | | |
| 2196 | 71490095 (8531, 8532) | Novel Protein sim. GBank gi\|4504601\|ref\|NP_000865.1\|pIFNA - interferon | | UNCLASSIFIED | 1010, 1039 |
| | | (alpha, beta and omega) receptor 2 | | | |
| 2197 | 78400768 (7077, 7078) | Novel Protein sim. GBank gi\|4505201\|ref\|NP_002411.1\|pMLSN - | | UNCLASSIFIED | 1035 |
| | | melastatin 1 | | | |
| 2198 | 79843360 (8365, 8366) | Novel Protein sim. GBank gi\|4505323\|ref\|NP_003932.1\|pN-WA - | | UNCLASSIFIED | 1006 |
| | | UNKNOWN | | | |
| 2199 | 30510015 (6447, 6448) | Novel Protein sim. GBank gi\|4505891\|ref\|NP_001075.1\|pPLOD - | | UNCLASSIFIED | 1014 |
| | | UNKNOWN | | | |
| 2200 | 80219711 (1795, 1796) | Novel Protein sim. GBank gi\|4507367\|ref\|NP_003182.1\|pTARS - threonyl- | | UNCLASSIFIED | 1002, 1004, 1020 |
| | | tRNA synthetase | | | |
| 2201 | 28480351 (5845, 5846) | Novel Protein sim. GBank gi\|4507909\|ref\|NP_000368.1\|pWAS\| - Wiskott- | | UNCLASSIFIED | 1020 |
| | | Aldrich syndrome (ecezema-thrombocytopenla) | | | |
| 2202 | 78720067 (7947, 7948) | Novel Protein sim. GBank gi\|451544 (U04267) - proline-rich cell wall | | UNCLASSIFIED | 1027 |
| | | protein [Gossypium barbadense] | | | |
| 2203 | 80029393 (2885, 2886) | Novel Protein sim. GBank gi\|4539171\|emb\|CAB39700.1\| - (AL049485) | | UNCLASSIFIED | 1003, 1004, 1006, 1031 |
| | | conserved hypothetical protein [Streptomyces coelicolor] | | | |
| 2204 | 20372397 (5837, 5838) | Novel Protein sim. GBank gi\|4539386\|emb\|CAB37452.1\| - (AL035526) | | UNCLASSIFIED | 1020 |
| | | extensin-like protein [Arabidopsis thaliana] | | | |
| 2205 | 65851027 (6291, 6292) | Novel Protein sim. GBank gi\|4539386\|emb\|CAB37452.1\| - (AL035526) | | UNCLASSIFIED | 1035 |
| | | extensin-like protein [Arabidopsis thaliana] | | | |
| 2206 | 79457146 (1849, 1850) | Novel Protein sim. GBank gi\|4539582\|emb\|CAB38501.1\| - (AL035636) | | UNCLASSIFIED | 1024, 1028 |
| | | putative sodium/proton antiporter [Streptomyces coelicolor] | | | |
| 2207 | 11076626 (6669, 6670) | Novel Protein sim. GBank gi\|4579748\|dbj\|BAA75214.1\| - (AB017484) | | UNCLASSIFIED | 1008 |
| | | tachylectin-3 [Tachypleus tridentatus] | | | |
| 2208 | 79821967 (6821, 6822) | Novel Protein sim. GBank gi\|4580331\|emb\|CAB40107.1\| - (AJ001206) | | UNCLASSIFIED | 1031 |
| | | putative glycogen debranching enzyme [Streptomyces coelicolor] | | | |
| 2209 | 28483211 (9027, 9028) | Novel Protein sim. GBank gi\|4586056\|gb\|AAD25674.1\|AC00702 - | | UNCLASSIFIED | 1002 |
| | | (AC007020) unknown protein [Arabidopsis thaliana] | | | |
| 2210 | 79825487 (3997, 3998) | Novel Protein sim. GBank gi\|4586058\|gb\|AAD25676.1\|AC00702 - | | UNCLASSIFIED | 1041 |
| | | (AC007020) unknown protein [Arabidopsis thaliana] | | | |
| 2211 | 79167936 (1587, 1588) | Novel Protein sim. GBank gi\|4587990\|gb\|AAD25931.1\|AF08527 - | | UNCLASSIFIED | 1028, 1047 |
| | | (AF085279) hypothetical protein [Arabidopsis thaliana] | | | |
| 2212 | 27306125 (5175, 5176) | Novel Protein sim. GBank gi\|4604\|emb\|CAA49191\| - (X69394) TBF1 | | UNCLASSIFIED | 1002, 1021 |
| | | protein [Saccharomyces cerevisiae] | | | |
| 2213 | 80218399 (8923, 8924) | Novel Protein sim. GBank gi\|461915\|sp\|P33894\|DAP1_YEAST - | | UNCLASSIFIED | 1003, 1004, 1006, 1020, |
| | | DIPEPTIDYL AMINOPEPTIDASE A (DPAP A) (YSCIV) | | | 1023, 1031, 1041 |
| 2214 | 71764092 (323, 324) | Novel Protein sim. GBank gi\|462024\|sp\|P25087\|ERG6_YEAST - | | UNCLASSIFIED | 1002 |
| | | DELTA(24)-STEROL C-METHYLTRANSFERASE | | | |
| 2215 | 28781806 (767, 768) | Novel Protein sim. GBank gi\|462168\|sp\|P33892\|GCN1_YEAST - | | UNCLASSIFIED | 1024 |
| | | TRANSLATIONAL ACTIVATOR GCN1 | | | |
| 2216 | 79854885 (7311, 7312) | Novel Protein sim. GBank gi\|462264\|sp\|P25519\|HFLX_ECOLI - GTP- | | UNCLASSIFIED | 1021 |
| | | BINDING PROTEIN HFLX | | | |
| 2217 | 78438796 (3395, 3396) | Novel Protein sim. GBank gi\|462489\|sp\|P33231\|LLDP_ECOLI - L- | | UNCLASSIFIED | 1051 |
| | | LACTATE PERMEASE | | | |
| 2218 | 9939622 (9041, 9042) | Novel Protein sim. GBank gi\|462663\|sp\|Q05869\|MUTY_SALTY - A/G- | | UNCLASSIFIED | 1015 |
| | | SPECIFIC ADENINE GLYCOSYLASE | | | |
| 2219 | 29259652 (3793, 3794) | Novel Protein sim. GBank gi\|464255\|sp\|P34943\|NUEM_BOVIN - NADH- | | UNCLASSIFIED | 1024 |
| | | UBIQUINONE OXIDOREDUCTASE 39 KD SUBUNIT PRECURSOR | | | |
| | | (COMPLEX I-39 KD) (CI-39 KD) | | | |
| 2220 | 46726384 (7597, 7598) | Novel Protein sim. GBank gi\|464376\|sp\|Q05017\|PHLX_RABIT - | | UNCLASSIFIED | 1051 |
| | | PHOSPHOLIPASE ADRAB-B PRECURSOR | | | |
| 2221 | 80042752 (1147, 1148) | Novel Protein sim. GBank gi\|465721\|sp\|P34252\|YKK8_YEAST - | | UNCLASSIFIED | 1002, 1031 |
| | | HYPOTHETICAL 52.3 KD PROTEIN IN HAP4-AAT1 INTERGENIC | | | |
| | | REGION | | | |
| 2222 | 27837569 (1027, 1028) | Novel Protein sim. GBank gi\|466116\|sp\|P35193\|YOI2_YEAST - | | UNCLASSIFIED | 1008, 1020, 1036 |
| | | HYPOTHETICAL 47.6 KD PROTEIN IN ADH1-IRA2 INTERGENIC | | | |
| | | REGION | | | |
| 2223 | 91228712 (2711, 2712) | Novel Protein sim. GBank gi\|466152\|sp\|P34653\|YOT7_CAEEL - | | UNCLASSIFIED | 1004, 1008 |
| | | HYPOTHETICAL 76.2 KD PROTEIN ZK632.7 IN CHROMOSOME III | | | |
| 2224 | 16327135 (8717, 8718) | Novel Protein sim. GBank gi\|4680180\|gb\|AAD27548.1\|AF11170 - | | UNCLASSIFIED | 1008 |
| | | (AF111709) polyprotein [Oryza sativa subsp. indica] | | | |
| 2225 | 23308893 (6287, 6288) | Novel Protein sim. GBank gi\|4680661\|gb\|AAD27720.1\|AF13294 - | | UNCLASSIFIED | 1050 |
| | | (AF132945) CGI-11 protein [Homo sapiens] | | | |
| 2226 | 28985623 (4533, 4534) | Novel Protein sim. GBank gi\|472525 (L31766) - synthetic lethal 39 | | UNCLASSIFIED | 1024 |
| | | [Saccharomyces cerevisiae] | | | |
| 2227 | 19532750 (6607, 6608) | Navel Protein sim. GBank gi\|4760782\|dbj\|BAA77399.1\| - (A8025413) Ten- | | UNCLASSIFIED | 1035 |
| | | m4 [Mus musculus] | | | |
| 2228 | 54539122 (8817, 8818) | Novel Protein sim. GBank gi\|476794\|pir\|\|A40678 - T-cell adhesion | | UNCLASSIFIED | 1037 |
| | | receptor CD2 homolog - African swine fever virus | | | |
| 2229 | 78392965 (5091, 5092) | Novel Protein sim. GBank gi\|480450\|pir\|\|S36884 - ketol-acid | | UNCLASSIFIED | 1006 |
| | | reductolsomerase (EC 1.1.1.86) - Arabidopsis thaliana | | | |
| 2230 | 80245872 (6351, 6352) | Novel Protein sim. GBank gi\|4808394\|emb\|CAB42726.1\| - (AL049826) | | UNCLASSIFIED | 1004, 1007, 1022 |
| | | putative membrane protein [Streptomyces coelicolor] | | | |
| 2231 | 25322209 (4127, 4128) | Novel Protein sim. GBank gi\|4827069\|ref\|NP_005086.1\|pZNF2 - Zinc | | UNCLASSIFIED | 1007 |
| | | finger protein 262 | | | |
| 2232 | 86472489 (5287, 5288) | Novel Protein sim. GBank gi\|482818 (U08864) - unknown [Paracoccus | | UNCLASSIFIED | 1017 |
| | | denitrificans] | | | |
| 2233 | 11175105 (8541, 8542) | Novel Protein sim. GBank gi\|4868437\|gb\|AAD31316.1\|AF14405 - | | UNCLASSIFIED | 1020 |
| | | (AF144054) apoptosis related protein APR-4 [Homo sapiens] | | | |
| 2234 | 79633410 (2889, 2890) | Novel Protein sim. GBank gi\|4887120\|gb\|AAD32200.1\| - (AF134855) | | UNCLASSIFIED | 1036 |
| | | transcriptional regulator [Salmonella typhimurium] | | | |
| 2235 | 32174564 (4581, 4582) | Novel Protein sim. GBank gi\|4887211\|gb\|AAD32237.1\|AF14744 - | | UNCLASSIFIED | 1003, 1036 |
| | | (AF147449) penicillin-binding protein 1B [Pseudomonas aeruginosa] | | | |
| 2236 | 78791211 (4269, 4270) | Novel Protein sim. GBank gi\|4902474\|emb\|CAB43554.1\| - (AJ131243) 5′- | | UNCLASSIFIED | 1007 |
| | | nucleotidase [Columba livia] | | | |
| 2237 | 85808202 (6767, 6768) | Novel Protein sim. GBank gi\|4902699\|emb\|CAB42442.1\| - (AL049784) | | UNCLASSIFIED | 1014, 1020, 1035 |
| | | hypothetical protein [Homo sapiens] | | | |
| 2238 | 83001442 (1359, 1360) | Novel Protein sim. GBank gi\|4902730\|emb\|CAB43533.1\| - (AJ238889) | | UNCLASSIFIED | 1050 |
| | | multidrug resistance-associated protein 7 [Homo sapiens] | | | |
| 2239 | 8519496 (6729, 6730) | Novel Protein sim. GBank gi\|4929538\|gb\|AAD34029.1\|AF15136 - | | UNCLASSIFIED | 1003 |
| | | (AF151367) Olg-1 bHLH protein [Rattus norvegicus] | | | |
| 2240 | 30381809 (2303, 2304) | Novel Protein sim. GBank gi\|4929759\|gb\|AAD34140.1\|AF15190 - | | UNCLASSIFIED | 1020 |
| | | AF151903) CGI-145 protein [Homo sapiens] | | | |
| 2241 | 78523463 (6759, 6760) | Novel Protein sim. GBank gi\|4981756\|gb\|AAD36279.1\|AE00177 - | | UNCLASSIFIED | 1006 |
| | | (AE001777) maltose ABC transporter, periplasmic maltose-binding protein | | | |
| | | [Thermotoga maritima] | | | |
| 2242 | 13519504 (4619, 4620) | Novel Protein sim. GBank gi\|5002553\|gb\|AAD37457.1\| - (AF074603) | | UNCLASSIFIED | 1022 |
| | | NonF [Streptomyces griseus subsp. griseus] | | | |
| 2243 | 87115363 (5095, 5096) | Novel Protein sim. GBank gi\|5006424\|gb\|AAD37493.1\|AF10916 - | | UNCLASSIFIED | 1016 |
| | | (AF109162) HmuT precursor [Corynebacterium diphtheriae] | | | |
| 2244 | 20612645 (475, 476) | Novel Protein sim. GBank gi\|5019354\|emb\|CAB44407.1\| - (AL078610) | | UNCLASSIFIED | 1020 |
| | | putative substrate-binding periplasmic transport protein [Streptomyces | | | |
| | | coelicolor] | | | |
| 2245 | 17900660 (3663, 3664) | Novel Protein sim. GBank gi\|5031665\|ref\|NP_005500.1\|pDMXL - Dmx-like 1 | | UNCLASSIFIED | 1036 |
| 2246 | 20467921 (473, 474) | Novel Protein sim. GBank gi\|5042280\|emb\|CAB44534.1\| - (AL078618) | | UNCLASSIFIED | 1008 |
| | | putative electron transfer oxidoreductase [Streptomyces coelicolor] | | | |
| 2247 | 32152796 (1437, 1438) | Novel Protein sim. GBank gi\|5107182\|gb\|AAD40003.1\|AF15009 - | | UNCLASSIFIED | 1036 |
| | | (AF150097) small zinc finger-like protein [Emericella nidulans] | | | |
| 2248 | 29272255 (5925, 5926) | Novel Protein sim. GBank gi\|515507 (U12027) - Sok1p [Saccharomyces | | UNCLASSIFIED | 1003, 1004, 1008, 1022, |
| | | cerevisiae] | | | 1041 |
| 2249 | 81215365 (1861, 1862) | Novel Protein sim. GBank gi\|520476 (U09129) - Mkt1p [Saccharomyces | | UNCLASSIFIED | 1002, 1003, 1004, 1006, |
| | | cerevisiae] | | | 1007, 1008, 1010, 1014, |
| | | | | | 1015, 1020, 1021, 1022, |
| | | | | | 1023, 1024, 1028, 1031, |
| | | | | | 1036, 1041, 1046, 1051 |
| 2250 | 80250296 (521, 522) | Novel Protein sim. GBank gi\|5257279\|dbj\|BAA81778.1\| - (AP000364) | | UNCLASSIFIED | 1004 |
| | | Similar to Transposon MAGGY gag and pol gene homologues. (L35053) | | | |
| | | [Oryza sativa] | | | |
| 2251 | 11582392 (6651, 6652) | Novel Protein sim. GBank gi\|5262203\|emb\|CAB45800.1\| - (AL080252) | | UNCLASSIFIED | 1003 |
| | | nodulin-like protein [Arabidopsis thaliana] | | | |
| 2252 | 37815191 (4347, 4348) | Novel Protein sim. GBank gi\|5420387\|emb\|CAB46679.1\| - (AJ243459) | | UNCLASSIFIED | 1055 |
| | | proteophosphoglycan [Leishmanla major] | | | |
| 2253 | 80486175 (6683, 6684) | Novel Protein sim. GBank gi\|5420389\|emb\|CAB46680.1\| - (AJ243460) | | UNCLASSIFIED | 1010 |
| | | proteophosphoglycan [Leishmanla major] | | | |
| 2254 | 16308001 (5335, 5336) | Novel Protein sim. GBank gi\|548652\|sp\|Q02722\|Q300_MOUSE - | | UNCLASSIFIED | 1051 |
| | | PROTEIN Q300 | | | |
| 2255 | 11129191 (5611, 5612) | Novel Protein sim. GBank gi\|548652\|sp\|Q02722\|Q300_MOUSE - | | UNCLASSIFIED | 1020 |
| | | PROTEIN Q300 | | | |
| 2256 | 78790951 (739, 740) | Novel Protein sim. GBank gi\|549009\|sp\|P36150\|SUMT_YEAST - | | UNCLASSIFIED | 1007 |
| | | PROBABLE UROPORPHYRIN-III C-METHYLTRANSFERASE (UROGEN | | | |
| | | III METHYLASE) (SUMT) (UROPORPHYRINOGEN III METHYLASE) | | | |
| | | (UROM) | | | |
| 2257 | 80216185 (437, 438) | Novel Protein sim. GBank gi\|549614\|sp\|P36137\|YK24_YEAST - | | UNCLASSIFIED | 1004, 1006, 1008, 1020, |
| | | HYPOTHETICAL 51.0 KD PROTEIN IN GAP1-NAP1 INTERGENIC | | | 1022, 1031, 1035 |
| | | REGION | | | |
| 2258 | 29361783 (5205, 5206) | Novel Protein sim. GBank gi\|549636\|sp\|P36158\|YK58_YEAST - | | UNCLASSIFIED | 1007, 1024, 1031 |
| | | HYPOTHETICAL 68.3 KD PROTEIN IN SIS2-MTD1 INTERGENIC | | | |
| | | REGION | | | |
| 2259 | 80071630 (7307, 7308) | Novel Protein sim. GBank gi\|549648\|sp\|P36170\|YK82_YEAST - | | UNCLASSIFIED | 1004, 1015, 1020 |
| | | HYPOTHETICAL 122.2 KD PROTEIN IN SIR1 3′REGION PRECURSOR | | | |
| 2260 | 80245834 (85, 86) | Novel Protein sim. GBank gi\|549679\|sp\|P35734\|YKF2_YEAST - | | UNCLASSIFIED | 1031 |
| | | HYPOTHETICAL 32.1 KD PROTEIN IN NUP120-CSE4 INTERGENIC | | | |
| | | REGION | | | |
| 2261 | 27845802 (6077, 6078) | Novel Protein sim. GBank gi\|549689\|sp\|P36088\|YKG9_YEAST - | | UNCLASSIFIED | 1020, 1031 |
| | | HYPOTHETICAL 19.7 KD PROTEIN IN LHS1-NUP100 INTERGENIC | | | |
| | | REGION | | | |
| 2262 | 8498866 (3829, 3830) | Novel Protein sim. GBank gi\|549754\|sp\|P28273\|YKV5_YEAST - | | UNCLASSIFIED | 1022 |
| | | HYPOTHETICAL 140.4 KD PROTEIN IN URA1-DOA1 INTERGENIC | | | |
| | | REGION | | | |
| 2263 | 27210480 (385, 386) | Novel Protein sim. GBank gi\|549766\|sp\|P36110\|YKZ3_YEAST - | | UNCLASSIFIED | 1024 |
| | | HYPOTHETICAL 33.8 KD PROTEIN PRECURSOR IN FOX2-YPT52 | | | |
| | | INTERGENIC REGION | | | |
| 2264 | 79810937 (5457, 5458) | Novel Protein sim. GBank gi\|5531272\|emb\|CAB50897.1\| - (AJ243800) | | UNCLASSIFIED | 1022 |
| | | WSC4 homologue [Kluyveromyces lactis] | | | |
| 2265 | 80229396 (6345, 6346) | Novel Protein sim. GBank gi\|5531366\|emb\|CAB50998.1\| - (AL096852) | | UNCLASSIFIED | 1004, 1022 |
| | | hypothetical protein [Streptomyces coelicolor A3(2)] | | | |
| 2266 | 20396935 (9005, 9006) | Novel Protein sim. GBank gi\|5639946\|gb\|AAD45904.1\|AF16132 - | | UNCLASSIFIED | 1008 |
| | | (AF161328) histidine kinase CstS [Corynebacterium diphtheriae] | | | |
| 2267 | 5617688 (4701, 4702) | Novel Protein sim. GBank gi\|5668795\|gb\|AAD46021.1\|AC00751 - | | UNCLASSIFIED | 1055 |
| | | (AC007519) EST gb\|AA605495 comes from this gene. [Arabidopsis | | | |
| | | thaliana] | | | |
| 2268 | 86679196 (4373, 4374) | Novel Protein sim. GBank gi\|5668814\|gb\|AAD46040.1\|AC00751 - | | UNCLASSIFIED | 1005 |
| | | (AC007519) ESTs gb\|H36253 and gb\|AA04251 come from this gene. | | | |
| | | [Arabidopsis thaliana] | | | |
| 2269 | 78903560 (5749, 5750) | Novel Protein sim. GBank gi\|5669820\|gb\|AAD46481.1\|AF12474 - | | UNCLASSIFIED | 1036 |
| | | (AF124741) Toll-like receptor 2 [Mus musculus] | | | |
| 2270 | 11083976 (5043, 5044) | Novel Protein sim. GBank gi\|5689405\|dbj\|BAA82986.1\| - (AB028957) | | UNCLASSIFIED | 1022 |
| | | KIAA1034 protein [Homo sapiens] | | | |
| 2271 | 80088527 (5153, 5154) | Novel Protein sim. GBank gi\|5689948\|emb\|CAB51985.1\| - (AL109663) | | UNCLASSIFIED | 1003 |
| | | putative isoleucyl-tRNA synthetase [Streptomyces coelicolor A3(2)] | | | |
| 2272 | 91232333 (7523, 7524) | Novel Protein sim. GBank gi\|5712756\|gb\|AAD47636.1\|AF16079 - | | UNCLASSIFIED | 1008 |
| | | (AF160798) calcium transporter CaT1 [Rattus norvegicus] | | | |
| 2273 | 52561548 (535, 536) | Novel Protein sim. GBank gi\|585529\|sp\|P38108\|MUCB_PSEAE - SIGMA | | UNCLASSIFIED | 1002 |
| | | FACTOR ALGU REGULATORY PROTEIN MUCB PRECURSOR | | | |
| 2274 | 28782494 (2321, 2322) | Novel Protein sim. GBank gi\|586316\|sp\|P38300\|MBA1_YEAST - MBA1 | | UNCLASSIFIED | 1020 |
| | | PROTEIN PRECURSOR | | | |
| 2275 | 80216566 (8765, 8766) | Novel Protein sim. GBank gi\|586407\|sp\|P38206\|RFT1_YEAST - | | UNCLASSIFIED | 1001, 1002, 1003, 1004, |
| | | NUCLEAR DIVISION RFT1 PROTEIN | | | 1006, 1007, 1010, 1015, |
| | | | | | 1020, 1021, 1022, 1024, |
| | | | | | 1028, 1031, 1041 |
| 2276 | 14995550 (4669, 4670) | Novel Protein sim. GBank gi\|586508\|sp\|P38242\|YBS0_YEAST - | | UNCLASSIFIED | 1022 |
| | | HYPOTHETICAL 27.0 KD PROTEIN IN VAL1-HSP26 INTERGENIC | | | |
| | | REGION | | | |
| 2277 | 80034126 (5179, 5180) | Novel Protein sim. GBank gi\|586525\|sp\|P38258\|YBU9_YEAST - | | UNCLASSIFIED | 1008 |
| | | HYPOTHETICAL 14.8 KD PROTEIN IN VPS15-YMC2 INTERGENIC | | | |
| | | REGION | | | |
| 2278 | 80083735 (2839, 2840) | Novel Protein sim. GBank gi\|586543\|sp\|P38274\|YBY3_YEAST - | | UNCLASSIFIED | 1006, 1020, 1024 |
| | | HYPOTHETICAL 95.2 KD PROTEIN IN AGP2-CKS1 INTERGENIC | | | |
| | | REGION | | | |
| 2279 | 27830651 (7939, 7940) | Novel Protein sim. GBank gi\|586871\|sp\|P37541\|YAAT_BACSU - | | UNCLASSIFIED | 1008 |
| | | HYPOTHETICAL 31.2 KD PROTEIN IN XPAC-ABRB INTERGENIC | | | |
| | | REGION | | | |
| 2280 | 29210919 (3769, 3770) | Novel Protein sim. GBank gi\|595413 (U11236) - beta COP | | UNCLASSIFIED | 1006 |
| | | [Saccharomyces cerevisiae] | | | |
| 2281 | 79912177 (2231, 2232) | Novel Protein sim. Gbank gi\|606216 (U18997) - ORF_f176 [Escherichia | | UNCLASSIFIED | 1002 |
| | | coli] | | | |
| 2282 | 27362875 (7537, 7538) | Novel Protein sim. GBank gi\|630206\|pir\|\|S40970 - hypothetical protein | | UNCLASSIFIED | 1002, 1006, 1015 |
| | | YCR30 - yeast (Saccharomyces cerevisiae) | | | |
| 2283 | 79582169 (4125, 4126) | Novel Protein sim. GBank gi\|66457\|pir\|\|XYPS7A - site-specific DNA- | | UNCLASSIFIED | 1020 |
| | | methyltransferase (adenine-specific) (EC 2.1.1.72) PaeR71 - | | | |
| | | Pseudomonas aeruginosa plasmid pMG7 | | | |
| 2284 | 20724505 (4505, 4506) | Novel Protein sim. GBank gi\|699274 (U15183) - ImbE gene product | | UNCLASSIFIED | 1004 |
| | | [Mycobacterium leprae] | | | |
| 2285 | 38861095 (553, 554) | Novel Protein sim. GBank gi\|728646\|emb\|CAA88514\| - (Z48613) unknown | | UNCLASSIFIED | 1024 |
| | | [Saccharomyces cerevisiae] | | | |
| 2286 | 86690662 (8805, 8806) | Novel Protein sim. GBank gi\|728831\|sp\|P39188\|ALU1_HUMAN - !!!! ALU | | UNCLASSIFIED | 1023 |
| | | SUBFAMILY J WARNING ENTRY !!!! | | | |
| 2287 | 57458406 (5613, 5614) | Novel Protein sim. GBank gi\|728835\|sp\|P39192\|ALU5_HUMAN - !!!! ALU | | UNCLASSIFIED | 1051 |
| | | SUBFAMILY SC WARNING ENTRY !!!! | | | |
| 2288 | 65452389 (2579, 2580) | Novel Protein sim. GBank gi\|728836\|sp\|P39193\|ALU6_HUMAN - !!!! ALU | | UNCLASSIFIED | 1014 |
| | | SUBFAMILY SP WARNING ENTRY !!!! | | | |
| 2289 | 66372202 (5051, 5052) | Novel Protein sim. GBank gi\|728836\|sp\|P39193\|ALU6_HUMAN - !!!! ALU | | UNCLASSIFIED | 1022 |
| | | SUBFAMILY SP WARNING ENTRY !!!! | | | |
| 2290 | 78938732 (2811, 2812) | Novel Protein sim. GBank gi\|728837\|sp\|P39194\|ALU7_HUMAN - !!!! ALU | | UNCLASSIFIED | 1041 |
| | | SUBFAMILY SQ WARNING ENTRY !!!! | | | |
| 2291 | 55176697 (3701, 3702) | Novel Protein sim. GBank gi\|729432\|sp\|P22140\|EPT1_YEAST - | | UNCLASSIFIED | 1006 |
| | | ETHANOLAMINEPHOSPHOTRANSFERASE (ETHPT) | | | |
| 2292 | 28821449 (2599, 2600) | Novel Protein sim. GBank gi\|729999\|sp\|Q01159\|MCE1_YEAST - MRNA | | UNCLASSIFIED | 1006 |
| | | CAPPING ENZYME (MRNA GUANYLYLTRANSFERASE) (GTP-RNA | | | |
| | | GUANYLYLTRANSFERASE) | | | |
| 2293 | 79415423 (6293, 6294) | Novel Protein sim. GBank gi\|730269\|sp\|P32521\|PAN1_YEAST - PAN1 | | UNCLASSIFIED | 1004 |
| | | PROTEIN | | | |
| 2294 | 29688622 (235, 236) | Novel Protein sim. GBank gi\|730428\|sp\|P40607\|PURA_VIBPA - | | UNCLASSIFIED | 1014 |
| | | ADENYLOSUCCINATE SYNTHETASE (IMP-ASPARTATE LIGASE) | | | |
| 2295 | 5961411 (7299, 7300) | Novel Protein sim. GBank gi\|730742\|sp\|P38717\|SIP3_YEAST - SIP3 | | UNCLASSIFIED | 1055 |
| | | PROTEIN | | | |
| 2296 | 9383506 (79, 80) | Novel Protein sim. GBank gi\|731087\|sp\|P20703\|UVSW_BPT4 - UVSW | | UNCLASSIFIED | 1015 |
| | | PROTEIN (DAR PROTEIN) | | | |
| 2297 | 80021661 (1895, 1896) | Novel Protein sim. GBank gi\|731302\|sp\|P27637\|YAI4_YEAST - | | UNCLASSIFIED | 1003 |
| | | HYPOTHETICAL 78.3 KD PROTEIN IN SEN34-ADE1 INTERGENIC | | | |
| | | REGION | | | |
| 2298 | 20637641 (3195, 3196) | Novel Protein sim. GBank gi\|731404\|sp\|P39996\|YEB7_YEAST - | | UNCLASSIFIED | 1022 |
| | | HYPOTHETICAL 38.2 KD PROTEIN IN PMP2-VAC8 INTERGENIC | | | |
| | | REGION | | | |
| 2299 | 79235255 (3927, 3928) | Novel Protein sim. GBank gi\|731408\|sp\|P39993\|YEC2_YEAST - | | UNCLASSIFIED | 1006, 1024 |
| | | HYPOTHETICAL 165.7 KD PROTEIN IN RIP1-URA3 INTERGENIC | | | |
| | | REGION | | | |
| 2300 | 78386371 (7417, 7418) | Novel Protein sim. GBank gi\|731417\|sp\|P39985\|YEG5_YEAST - | | UNCLASSIFIED | 1024 |
| | | HYPOTHETICAL 115.9 KD PROTEIN IN HAT2-RPL15B INTERGENIC | | | |
| | | REGION | | | |
| 2301 | 79619700 (4849, 4850) | Novel Protein sim. GBank gi\|731434\|sp\|P40008\|YEJ4_YEAST - | | UNCLASSIFIED | 1015, 1023, 1024 |
| | | HYPOTHETICAL 25.1 KD PROTEIN IN PMI40-PAC2 INTERGENIC | | | |
| | | REGION | | | |
| 2302 | 80029280 (8015, 8016) | Novel Protein sim. GBank gi\|731441\|sp\|P40013\|BIM1_YEAST - BIM1 | | UNCLASSIFIED | 1015, 1020, 1031, 1041 |
| | | PROTEIN | | | |
| 2303 | 79239198 (3941, 3942) | Novel Protein sim. GBank gi\|731445\|sp\|P40017\|YEL4_YEAST - | | UNCLASSIFIED | 1002, 1015, 1020, 1021 |
| | | HYPOTHETICAL 103.3 KD PROTEIN IN PRO3-GCD11 INTERGENIC | | | |
| | | REGION | | | |
| 2304 | 81712653 (6439, 6440) | Novel Protein sim. GBank gi\|731516\|sp\|P40082\|YEW5_YEAST - | | UNCLASSIFIED | 1002, 1003, 1004, 1006, |
| | | HYPOTHETICAL 15.4 KD PROTEIN IN GLC7-GDI1 INTERGENIC | | | 1007, 1008, 1020, 1022, |
| | | REGION | | | 1024, 1025, 1041, 1051 |
| 2305 | 78901055 (6311, 6312) | Novel Protein sim. GBank gi\|731584\|sp\|P38898\|YH17_YEAST - | | UNCLASSIFIED | 1036 |
| | | HYPOTHETICAL 17.1 KD PROTEIN IN PUR5 3′REGION | | | |
| 2306 | 79439568 (7937, 7938) | Novel Protein sim. GBank gi\|731584\|sp\|P38898\|YH17_YEAST - | | UNCLASSIFIED | 1022 |
| | | HYPOTHETICAL 17.1 KD PROTEIN IN PUR5 3′REGION | | | |
| 2307 | 80215989 (8101, 8102) | Novel Protein sim. GBank gi\|731584\|sp\|P38898\|YH17_YEAST - | | UNCLASSIFIED | 1002, 1003, 1006, 1007, |
| | | HYPOTHETICAL 17.1 KD PROTEIN IN PUR5 3′REGION | | | 1008, 1020, 1022, 1025, |
| | | | | | 1031, 1035, 1036, 1041 |
| 2308 | 94292375 (213, 214) | Novel Protein sim. GBank gi\|731679\|sp\|P38800\|YHO0_YEAST - | | UNCLASSIFIED | 1002 |
| | | HYPOTHETICAL 149.7 KD PROTEIN IN IRE1-KSP1 INTERGENIC | | | |
| | | REGION | | | |
| 2309 | 8504873 (7399, 7400) | Novel Protein sim. GBank gi\|731679\|sp\|P38800\|YHO0_YEAST - | | UNCLASSIFIED | 1022 |
| | | HYPOTHETICAL 149.7 KD PROTEIN IN IRE1-KSP1 INTERGENIC | | | |
| | | REGION | | | |
| 2310 | 78970331 (2015, 2016) | Novel Protein sim. GBank gi\|731701\|sp\|P38821\|YHR3_YEAST - | | UNCLASSIFIED | 1006 |
| | | HYPOTHETICAL 54.2 KD PROTEIN IN ERP5-ORC6 INTERGENIC | | | |
| | | REGION | | | |
| 2311 | 82074896 (1059, 1060) | Novel Protein sim. GBank gi\|731758\|sp\|P38875\|YHY8_YEAST - | | UNCLASSIFIED | 1002, 1004, 1006, 1007, |
| | | HYPOTHETICAL 67.8 KD PROTEIN IN IKI1-ERG9 INTERGENIC | | | 1008, 1014, 1015, 1020, |
| | | REGION | | | 1021, 1022, 1023, 1025, |
| | | | | | 1031, 1041 |
| 2312 | 78713647 (8707, 8708) | Novel Protein sim. GBank gi\|731784\|sp\|P40547\|YIB7_YEAST - | | UNCLASSIFIED | 1002 |
| | | HYPOTHETICAL 105.5 KD PROTEIN IN RPL5A-BAR1 INTERGENIC | | | |
| | | REGION | | | |
| 2313 | 81339427 (7543, 7544) | Novel Protein sim. GBank gi\|731790\|sp\|P40542\|YIC5_YEAST - | | UNCLASSIFIED | 1004, 1007, 1010, 1015, |
| | | HYPOTHETICAL 14.1 KD PROTEIN IN IRR1-TIM44 INTERGENIC | | | 1020, 1021, 1022, 1031, |
| | | REGION | | | 1035, 1051 |
| 2314 | 79619706 (5249, 5250) | Novel Protein sim. GBank gi\|731879\|sp\|P40461\|YIO1_YEAST - | | UNCLASSIFIED | 1023 |
| | | HYPOTHETICAL 14.4 KD PROTEIN IN CCT2-AXL2 INTERGENIC | | | |
| | | REGION | | | |
| 2315 | 57298970 (5963, 5964) | Novel Protein sim. GBank gi\|731888\|sp\|P40450\|YIP9_YEAST - | | UNCLASSIFIED | 1020, 1022 |
| | | HYPOTHETICAL 156.9 KD PROTEIN IN FOX3-UBP7 INTERGENIC | | | |
| | | REGION | | | |
| 2316 | 80075552 (1375, 1376) | Novel Protein sim. GBank gi\|731920\|sp\|P40577\|YIU5_YEAST - | | UNCLASSIFIED | 1002, 1004, 1006, 1015, |
| | | HYPOTHETICAL 42.8 KD PROTEIN IN DAL81-YVH1 INTERGENIC | | | 1020, 1036, 1041 |
| | | REGION | | | |
| 2317 | 80502238 (1579, 1580) | Novel Protein sim. GBank gi\|732198\|sp\|P40168\|YNT5_YEAST - | | UNCLASSIFIED | 1001, 1002, 1008, 1010, |
| | | HYPOTHETICAL 26.5 KD PROTEIN IN WHI3-CHS1 INTERGENIC | | | 1020, 1021, 1025 |
| | | REGION | | | |
| 2318 | 79858444 (3581, 3582) | Novel Protein sim. GBank gi\|732331\|sp\|P39584\|YWBA_BACSU - | | UNCLASSIFIED | 1036 |
| | | HYPOTHETICAL 47.6 KD PROTEIN IN EPR-GALK INTERGENIC | | | |
| | | REGION | | | |
| 2319 | 80059821 (7407, 7408) | Novel Protein sim. GBank gi\|80631\|pir\|\|JS0053 - hypothetical 13.7 K | | UNCLASSIFIED | 1006, 1022, 1024 |
| | | protein - Mycobacterium fortuitum plasmid pAL5000 | | | |
| 2320 | 78388279 (1889, 1890) | Novel Protein sim. GBank gi\|81286\|pir\|\|S22697 - extensin - Volvox carteri | | UNCLASSIFIED | 1024 |
| | | (fragment) | | | |
| 2321 | 79442416 (2463, 2464) | Novel Protein sim. GBank gi\|854065\|emb\|CAA58337\| - (X83413) U88 | | UNCLASSIFIED | 1020 |
| | | [Human herpesvirus 6] | | | |
| 2322 | 21145976 (2919, 2920) | Novel Protein sim. GBank gi\|854065\|emb\|CAA58337\| - (X83413) U88 | | UNCLASSIFIED | 1031 |
| | | [Human herpesvirus 6] | | | |
| 2323 | 57281574 (3253, 3254) | Novel Protein sim. GBank gi\|854065\|emb\|CAA58337\| - (X83413) U88 | | UNCLASSIFIED | 1031 |
| | | [Human herpesvirus 6] | | | |
| 2324 | 11614956 (3609, 3610) | Novel Protein sim. GBank gi\|854065\|emb\|CAA58337\| - (X83413) U88 | | UNCLASSIFIED | 1020 |
| | | [Human herpesvirus 6] | | | |
| 2325 | 80085347 (6203, 6204) | Novel Protein sim. GBank gi\|854065\|emb\|CAA58337\| - (X83413) U88 | | UNCLASSIFIED | 1051 |
| | | [Human herpesvirus 6] | | | |
| 2326 | 78679959 (6219, 6220) | Novel Protein sim. GBank gi\|854065\|emb\|CAA58337\| - (X83413) U88 | | UNCLASSIFIED | 1015 |
| | | [Human herpesvirus 6] | | | |
| 2327 | 11695659 (6857, 6858) | Novel Protein sim. GBank gi\|854065\|emb\|CAA58337\| - (X83413) U88 | | UNCLASSIFIED | 1031 |
| | | [Human herpesvirus 6] | | | |
| 2328 | 66053496 (7265, 7266) | Novel Protein sim. GBank gi\|854065\|emb\|CAA58337\| - (X83413) U88 | | UNCLASSIFIED | 1008 |
| | | [Human herpesvirus 6] | | | |
| 2329 | 19904337 (7541, 7542) | Novel Protein sim. GBank gi\|854065\|emb\|CAA58337\| - (X83413) U88 | | UNCLASSIFIED | 1022 |
| | | [Human herpesvirus 6] | | | |
| 2330 | 20449755 (7849, 7850) | Novel Protein sim. GBank gi\|854065\|emb\|CAA58337\| - (X83413) U88 | | UNCLASSIFIED | 1008 |
| | | [Human herpesvirus 6] | | | |
| 2331 | 19899239 (8111, 8112) | Novel Protein sim. GBank gi\|854065\|emb\|CAA58337\| - (X83413) U88 | | UNCLASSIFIED | 1022 |
| | | [Human herpesvirus 6] | | | |
| 2332 | 86459081 (4421, 4422) | Novel Protein sim. GBank gi\|894178 (U18919) - unknown [Homo sapiens] | | UNCLASSIFIED | 1008, 1031 |
| 2333 | 70445515(4725, 4726) | Novel Protein sim. GBank gi\|924282 (U12767) - mitogen induced nuclear | | UNCLASSIFIED | 1017, 1038 |
| | | orphan receptor [Homo sapiens] | | | |
| 2334 | 14997852 (2277, 2278) | Novel Protein sim. GBank gi\|93504\|pir\|\|D34768 - ORF4 protein - Orf virus | | UNCLASSIFIED | 1001, 1002 |
| | | (strain NZ2) | | | |
| 2335 | 78939072 (5, 6) | | | UNCLASSIFIED | 1021 |
| 2336 | 94146943 (9, 10) | | | UNCLASSIFIED | 1002 |
| 2337 | 10867509 (21, 22) | | | UNCLASSIFIED | 1031 |
| 2338 | 29442779 (63, 64) | | | UNCLASSIFIED | 1020 |
| 2339 | 52384145 (69, 70) | | | UNCLASSIFIED | 1033 |
| 2340 | 80235743 (75, 76) | | | UNCLASSIFIED | 1000, 1020, 1026 |
| 2341 | 79954971 (81, 82) | | | UNCLASSIFIED | 1001 |
| 2342 | 78378519 (97, 98) | | | UNCLASSIFIED | 1024, 1051 |
| 2343 | 79560276 (103, 104) | | | UNCLASSIFIED | 1035 |
| 2344 | 21435078 (121, 122) | | | UNCLASSIFIED | 1031 |
| 2345 | 32086152 (147, 148) | | | UNCLASSIFIED | 1041 |
| 2346 | 80310105 (161, 162) | | | UNCLASSIFIED | 1004, 1008, 1020, 1021, |
| | | | | | 1026, 1031 |
| 2347 | 10368084 (167, 168) | | | UNCLASSIFIED | 1006 |
| 2348 | 46806994 (181, 182) | | | UNCLASSIFIED | 1038 |
| 2349 | 29695963 (187, 188) | | | UNCLASSIFIED | 1022 |
| 2350 | 78283646 (191, 192) | | | UNCLASSIFIED | 1026 |
| 2351 | 52561322 (195, 196) | | | UNCLASSIFIED | 1002 |
| 2352 | 80023954 (203, 204) | | | UNCLASSIFIED | 1050 |
| 2353 | 21437085 (205, 206) | | | UNCLASSIFIED | 1020, 1055 |
| 2354 | 79621320 (207, 208) | | | UNCLASSIFIED | 1003 |
| 2355 | 86687539 (209, 210) | | | UNCLASSIFIED | 1005 |
| 2356 | 78735185 (223, 224) | | | UNCLASSIFIED | 1015, 1020 |
| 2357 | 66407901 (237, 238) | | | UNCLASSIFIED | 1022 |
| 2358 | 35049780 (245, 246) | | | UNCLASSIFIED | 1027 |
| 2359 | 66138496 (261, 262) | | | UNCLASSIFIED | 1003 |
| 2360 | 78734108 (263, 264) | | | UNCLASSIFIED | 1027 |
| 2361 | 91230317 (269, 270) | | | UNCLASSIFIED | 1018, 1035 |
| 2362 | 13025189 (283, 284) | | | UNCLASSIFIED | 1028 |
| 2363 | 12745521 (291, 292) | | | UNCLASSIFIED | 1028 |
| 2364 | 20438376 (327, 328) | | | UNCLASSIFIED | 1008 |
| 2365 | 10075364 (353, 354) | | | UNCLASSIFIED | 1015 |
| 2366 | 56172002 (365, 366) | | | UNCLASSIFIED | 1043 |
| 2367 | 80502101 (369, 370) | | | UNCLASSIFIED | 1010 |
| 2368 | 27847542 (393, 394) | | | UNCLASSIFIED | 1020 |
| 2369 | 78747281 (409, 410) | | | UNCLASSIFIED | 1020 |
| 2370 | 32311509 (417, 418) | | | UNCLASSIFIED | 1026 |
| 2371 | 38906497 (419, 420) | | | UNCLASSIFIED | 1024 |
| 2372 | 91237422 (423, 424) | | | UNCLASSIFIED | 1006, 1008, 1022, 1023, |
| | | | | | 1031, 1041 |
| 2373 | 79163357 (439, 440) | | | UNCLASSIFIED | 1028 |
| 2374 | 20731608 (461, 462) | | | UNCLASSIFIED | 1031 |
| 2375 | 94843553 (467, 468) | | | UNCLASSIFIED | 1041 |
| 2376 | 30536390 (477, 478) | | | UNCLASSIFIED | 1024 |
| 2377 | 57051524 (479, 480) | | | UNCLASSIFIED | 1046 |
| 2378 | 43336130 (487, 488) | | | UNCLASSIFIED | 1000 |
| 2379 | 79612139 (489, 490) | | | UNCLASSIFIED | 1004 |
| 2380 | 11813963 (499, 500) | | | UNCLASSIFIED | 1003 |
| 2381 | 65686807 (507, 508) | | | UNCLASSIFIED | 1008, 1021 |
| 2382 | 80054347 (511, 512) | | | UNCLASSIFIED | 1008 |
| 2383 | 99412314 (523, 524) | | | UNCLASSIFIED | 1020, 1034 |
| 2384 | 77600695 (527, 528) | | | UNCLASSIFIED | 1046 |
| 2385 | 65487838 (529, 530) | | | UNCLASSIFIED | 1021 |
| 2386 | 29021183 (531, 532) | | | UNCLASSIFIED | 1002 |
| 2387 | 95103944 (533, 534) | | | UNCLASSIFIED | 1002, 1033, 1038 |
| 2388 | 33763765 (539, 540) | | | UNCLASSIFIED | 1024 |
| 2389 | 6831423 (543, 544) | | | UNCLASSIFIED | 1020 |
| 2390 | 38399460 (547, 548) | | | UNCLASSIFIED | 1024 |
| 2391 | 29442480 (569, 570) | | | UNCLASSIFIED | 1051 |
| 2392 | 16342187 (593, 594) | | | UNCLASSIFIED | 1020 |
| 2393 | 54540457 (605, 606) | | | UNCLASSIFIED | 1038 |
| 2394 | 36623048 (633, 634) | | | UNCLASSIFIED | 1031 |
| 2395 | 91236768 (637, 638) | | | UNCLASSIFIED | 1014, 1042 |
| 2396 | 9893819 (673, 674) | | | UNCLASSIFIED | 1036 |
| 2397 | 11091334 (701, 702) | | | UNCLASSIFIED | 1020, 1050 |
| 2398 | 79863683 (705, 706) | | | UNCLASSIFIED | 1010 |
| 2399 | 52432672 (735, 736) | | | UNCLASSIFIED | 1026 |
| 2400 | 20608055 (753, 754) | | | UNCLASSIFIED | 1020 |
| 2401 | 46729292 (757, 758) | | | UNCLASSIFIED | 1017 |
| 2402 | 78835499 (763, 764) | | | UNCLASSIFIED | 1007 |
| 2403 | 78968380 (771, 772) | | | UNCLASSIFIED | 1014, 1051 |
| 2404 | 19436353 (773, 774) | | | UNCLASSIFIED | 1041 |
| 2405 | 28979370 (797, 798) | | | UNCLASSIFIED | 1007 |
| 2406 | 81883785 (801, 802) | | | UNCLASSIFIED | 1020, 1050, 1051 |
| 2407 | 19887611 (815, 816) | | | UNCLASSIFIED | 1031 |
| 2408 | 50672706 (817, 818) | | | UNCLASSIFIED | 1033 |
| 2409 | 11692942 (831, 832) | | | UNCLASSIFIED | 1004 |
| 2410 | 86477740 (847, 848) | | | UNCLASSIFIED | 1017 |
| 2411 | 47660207 (857, 858) | | | UNCLASSIFIED | 1026 |
| 2412 | 71808275 (871, 872) | | | UNCLASSIFIED | 1019, 1035, 1041 |
| 2413 | 65881024 (873, 874) | | | UNCLASSIFIED | 1051 |
| 2414 | 79631806 (881, 882) | | | UNCLASSIFIED | 1036 |
| 2415 | 95413187 (897, 898) | | | UNCLASSIFIED | 1020, 1040 |
| 2416 | 39724529 (907, 908) | | | UNCLASSIFIED | 1024 |
| 2417 | 23308591 (909, 910) | | | UNCLASSIFIED | 1050 |
| 2418 | 23308860 (917, 918) | | | UNCLASSIFIED | 1050 |
| 2419 | 78963308 (923, 924) | | | UNCLASSIFIED | 1051 |
| 2420 | 90991725 (927, 928) | | | UNCLASSIFIED | 1018 |
| 2421 | 80187255 (929, 930) | | | UNCLASSIFIED | 1020, 1055 |
| 2422 | 9667021 (937, 938) | | | UNCLASSIFIED | 1036 |
| 2423 | 78380341 (963, 964) | | | UNCLASSIFIED | 1006 |
| 2424 | 81941215 (983, 984) | | | UNCLASSIFIED | 1004, 1010, 1014, 1015 |
| 2425 | 20721514 (1003, 1004) | | | UNCLASSIFIED | 1004 |
| 2426 | 94143077 (1007, 1008) | | | UNCLASSIFIED | 1041 |
| 2427 | 91228835 (1021, 1022) | | | UNCLASSIFIED | 1002 |
| 2428 | 51237185 (1033, 1034) | | | UNCLASSIFIED | 1033 |
| 2429 | 80178026 (1035, 1036) | | | UNCLASSIFIED | 1017, 1020, 1022, 1024, |
| | | | | | 1034 |
| 2430 | 55775842 (1047, 1048) | | | UNCLASSIFIED | 1039 |
| 2431 | 25143318 (1055, 1056) | | | UNCLASSIFIED | 1002, 1015 |
| 2432 | 78982582 (1057, 1058) | | | UNCLASSIFIED | 1014 |
| 2433 | 46849648 (1079, 1080) | | | UNCLASSIFIED | 1026 |
| 2434 | 30393478 (1089, 1090) | | | UNCLASSIFIED | 1027 |
| 2435 | 55925156 (1109, 1110) | | | UNCLASSIFIED | 1019 |
| 2436 | 78899041 (1115, 1116) | | | UNCLASSIFIED | 1021, 1036 |
| 2437 | 10846436 (1121, 1122) | | | UNCLASSIFIED | 1015 |
| 2438 | 29019179 (1123, 1124) | | | UNCLASSIFIED | 1006 |
| 2439 | 78186436 (1133, 1134) | | | UNCLASSIFIED | 1020, 1053 |
| 2440 | 20294837 (1141, 1142) | | | UNCLASSIFIED | 1031 |
| 2441 | 12926066 (1143, 1144) | | | UNCLASSIFIED | 1022 |
| 2442 | 80503910 (1145, 1146) | | | UNCLASSIFIED | 1010 |
| 2443 | 23297653 (1167, 1168) | | | UNCLASSIFIED | 1021 |
| 2444 | 80090387 (1177, 1178) | | | UNCLASSIFIED | 1031 |
| 2445 | 71095137 (1183, 1184) | | | UNCLASSIFIED | 1026, 1050 |
| 2446 | 55278308 (1187, 1188) | | | UNCLASSIFIED | 1051 |
| 2447 | 77673620 (1191, 1192) | | | UNCLASSIFIED | 1002 |
| 2448 | 79201268 (1193, 1194) | | | UNCLASSIFIED | 1002, 1041, 1051 |
| 2449 | 54531954 (1197, 1198) | | | UNCLASSIFIED | 1038 |
| 2450 | 55310202 (1199, 1200) | | | UNCLASSIFIED | 1039 |
| 2451 | 55930627 (1211, 1212) | | | UNCLASSIFIED | 1038, 1039 |
| 2452 | 79843141 (1225, 1226) | | | UNCLASSIFIED | 1041 |
| 2453 | 54858768 (1231, 1232) | | | UNCLASSIFIED | 1017 |
| 2454 | 29001471 (1239, 1240) | | | UNCLASSIFIED | 1041 |
| 2455 | 78277043 (1249, 1250) | | | UNCLASSIFIED | 1026 |
| 2456 | 16835059 (1251, 1252) | | | UNCLASSIFIED | 1021 |
| 2457 | 65327575 (1275, 1276) | | | UNCLASSIFIED | 1020 |
| 2458 | 87114368 (1279, 1280) | | | UNCLASSIFIED | 1023 |
| 2459 | 29017861 (1283, 1284) | | | UNCLASSIFIED | 1041 |
| 2460 | 10360425 (1289, 1290) | | | UNCLASSIFIED | 1015 |
| 2461 | 17937488 (1299, 1300) | | | UNCLASSIFIED | 1006 |
| 2462 | 13033655 (1325, 1326) | | | UNCLASSIFIED | 1028 |
| 2463 | 39723162 (1327, 1328) | | | UNCLASSIFIED | 1034 |
| 2464 | 78527689 (1333, 1334) | | | UNCLASSIFIED | 1002 |
| 2465 | 86476709 (1341, 1342) | | | UNCLASSIFIED | 1026 |
| 2466 | 91238781 (1347, 1348) | | | UNCLASSIFIED | 1002 |
| 2467 | 32568841 (1351, 1352) | | | UNCLASSIFIED | 1031 |
| 2468 | 46886543 (1377, 1378) | | | UNCLASSIFIED | 1034 |
| 2469 | 65694982 (1387, 1388) | | | UNCLASSIFIED | 1035 |
| 2470 | 65892801 (1405, 1406) | | | UNCLASSIFIED | 1051 |
| 2471 | 47660384 (1407, 1408) | | | UNCLASSIFIED | 1026 |
| 2472 | 79816169 (1415, 1416) | | | UNCLASSIFIED | 1003, 1004 |
| 2473 | 80414675 (1425, 1426) | | | UNCLASSIFIED | 1004, 1023, 1051 |
| 2474 | 79834138 (1431, 1432) | | | UNCLASSIFIED | 1006 |
| 2475 | 87914057 (1451, 1452) | | | UNCLASSIFIED | 1013 |
| 2476 | 11383791 (1455, 1456) | | | UNCLASSIFIED | 1014 |
| 2477 | 80501670 (1459, 1460) | | | UNCLASSIFIED | 1010 |
| 2478 | 57057036 (1465, 1466) | | | UNCLASSIFIED | 1051 |
| 2479 | 78464930 (1473, 1474) | | | UNCLASSIFIED | 1006, 1015 |
| 2480 | 78994822 (1475, 1476) | | | UNCLASSIFIED | 1002 |
| 2481 | 77797639 (1481, 1482) | | | UNCLASSIFIED | 1048 |
| 2482 | 34269843 (1483, 1484) | | | UNCLASSIFIED | 1024 |
| 2483 | 5729122 (1491, 1492) | | | UNCLASSIFIED | 1055 |
| 2484 | 78916225 (1497, 1498) | | | UNCLASSIFIED | 1007, 1024, 1036 |
| 2485 | 33763311 (1499, 1500) | | | UNCLASSIFIED | 1024 |
| 2486 | 11801030 (1521, 1522) | | | UNCLASSIFIED | 1028 |
| 2487 | 78913158 (1523, 1524) | | | UNCLASSIFIED | 1041 |
| 2488 | 46671302 (1533, 1534) | | | UNCLASSIFIED | 1020, 1024 |
| 2489 | 30670018 (1545, 1546) | | | UNCLASSIFIED | 1024 |
| 2490 | 46763776 (1553, 1554) | | | UNCLASSIFIED | 1038 |
| 2491 | 48029783 (1569, 1570) | | | UNCLASSIFIED | 1037 |
| 2492 | 8018632 (1577, 1578) | | | UNCLASSIFIED | 1020 |
| 2493 | 30661464 (1583, 1584) | | | UNCLASSIFIED | 1020 |
| 2494 | 11394815 (1593, 1594) | | | UNCLASSIFIED | 1020 |
| 2495 | 27974956 (1599, 1600) | | | UNCLASSIFIED | 1020 |
| 2496 | 79250367 (1601, 1602) | | | UNCLASSIFIED | 1006, 1014, 1021, 1035, |
| | | | | | 1041 |
| 2497 | 27261690 (1607, 1608) | | | UNCLASSIFIED | 1041 |
| 2498 | 80479789 (1619, 1620) | | | UNCLASSIFIED | 1010 |
| 2499 | 32444163 (1627, 1628) | | | UNCLASSIFIED | 1026 |
| 2500 | 80202957 (1629, 1630) | | | UNCLASSIFIED | 1014 |
| 2501 | 33182220 (1637, 1638) | | | UNCLASSIFIED | 1024 |
| 2502 | 5625873 (1641, 1642) | | | UNCLASSIFIED | 1055 |
| 2503 | 94852905 (1647, 1648) | | | UNCLASSIFIED | 1041 |
| 2504 | 65671892 (1651, 1652) | | | UNCLASSIFIED | 1014 |
| 2505 | 20703567 (1653, 1654) | | | UNCLASSIFIED | 1008, 1022 |
| 2506 | 20615832 (1659, 1660) | | | UNCLASSIFIED | 1004 |
| 2507 | 16835986 (1675, 1676) | | | UNCLASSIFIED | 1036 |
| 2508 | 65672070 (1695, 1696) | | | UNCLASSIFIED | 1014 |
| 2509 | 65884029 (1731, 1732) | | | UNCLASSIFIED | 1035 |
| 2510 | 78471966 (1759, 1760) | | | UNCLASSIFIED | 1024 |
| 2511 | 78676775 (1763, 1764) | | | UNCLASSIFIED | 1006 |
| 2512 | 78029354 (1773, 1774) | | | UNCLASSIFIED | 1024 |
| 2513 | 25256400 (1779, 1780) | | | UNCLASSIFIED | 1006 |
| 2514 | 91012600 (1781, 1782) | | | UNCLASSIFIED | 1002 |
| 2515 | 49300541 (1783, 1784) | | | UNCLASSIFIED | 1033 |
| 2516 | 13085578 (1797, 1798) | | | UNCLASSIFIED | 1025 |
| 2517 | 79401347 (1799, 1800) | | | UNCLASSIFIED | 1004 |
| 2518 | 14996212 (1811, 1812) | | | UNCLASSIFIED | 1022 |
| 2519 | 78914607 (1823, 1824) | | | UNCLASSIFIED | 1036 |
| 2520 | 79551154 (1839, 1840) | | | UNCLASSIFIED | 1001 |
| 2521 | 16839667 (1843, 1844) | | | UNCLASSIFIED | 1021 |
| 2522 | 78395601 (1847, 1848) | | | UNCLASSIFIED | 1027 |
| 2523 | 90935673 (1857, 1858) | | | UNCLASSIFIED | 1023 |
| 2524 | 57045809 (1859, 1860) | | | UNCLASSIFIED | 1039 |
| 2525 | 80067536 (1865, 1866) | | | UNCLASSIFIED | 1020, 1021, 1051, 1055 |
| 2526 | 79462581 (1883, 1884) | | | UNCLASSIFIED | 1031 |
| 2527 | 80082630 (1901, 1902) | | | UNCLASSIFIED | 1020, 1031 |
| 2528 | 77894253 (1921, 1922) | | | UNCLASSIFIED | 1033 |
| 2529 | 11795564 (1925, 1926) | | | UNCLASSIFIED | 1035 |
| 2530 | 80173534 (1945, 1946) | | | UNCLASSIFIED | 1020, 1038 |
| 2531 | 48030251 (1971, 1972) | | | UNCLASSIFIED | 1037 |
| 2532 | 98182977 (1973, 1974) | | | UNCLASSIFIED | 1019, 1035, 1055 |
| 2533 | 80502690 (1983, 1984) | | | UNCLASSIFIED | 1010 |
| 2534 | 6352882 (1989, 1990) | | | UNCLASSIFIED | 1055 |
| 2535 | 87454586 (1991, 1992) | | | UNCLASSIFIED | 1023 |
| 2536 | 23292502 (1993, 1994) | | | UNCLASSIFIED | 1036 |
| 2537 | 86679840 (2001, 2002) | | | UNCLASSIFIED | 1001, 1005 |
| 2538 | 94630813 (2003, 2004) | | | UNCLASSIFIED | 1036 |
| 2539 | 10051016 (2013, 2014) | | | UNCLASSIFIED | 1041 |
| 2540 | 33267917 (2037, 2038) | | | UNCLASSIFIED | 1001, 1047 |
| 2541 | 80081934 (2039, 2040) | | | UNCLASSIFIED | 1020, 1041 |
| 2542 | 65691929 (2073, 2074) | | | UNCLASSIFIED | 1007 |
| 2543 | 20709450 (2081, 2082) | | | UNCLASSIFIED | 1003, 1004 |
| 2544 | 39735124 (2083, 2084) | | | UNCLASSIFIED | 1038 |
| 2545 | 79918033 (2087, 2088) | | | UNCLASSIFIED | 1015 |
| 2546 | 29213655 (2091, 2092) | | | UNCLASSIFIED | 1041 |
| 2547 | 55505821 (2097, 2098) | | | UNCLASSIFIED | 1019 |
| 2548 | 85817553 (2103, 2104) | | | UNCLASSIFIED | 1004, 1017, 1028, 1031, |
| | | | | | 1041 |
| 2549 | 13517048 (2109, 2110) | | | UNCLASSIFIED | 1022 |
| 2550 | 78734081 (2113, 2114) | | | UNCLASSIFIED | 1024, 1051 |
| 2551 | 30486972 (2117, 2118) | | | UNCLASSIFIED | 1035 |
| 2552 | 46850156 (2137, 2138) | | | UNCLASSIFIED | 1026 |
| 2553 | 20295911 (2161, 2162) | | | UNCLASSIFIED | 1020 |
| 2554 | 15021067 (2165, 2166) | | | UNCLASSIFIED | 1001 |
| 2555 | 78676881 (2167, 2168) | | | UNCLASSIFIED | 1015 |
| 2556 | 65484134 (2169, 2170) | | | UNCLASSIFIED | 1022, 1051 |
| 2557 | 46571876 (2177, 2178) | | | UNCLASSIFIED | 1026 |
| 2558 | 94253210 (2179, 2180) | | | UNCLASSIFIED | 1036 |
| 2559 | 79416080 (2189, 2190) | | | UNCLASSIFIED | 1020, 1022 |
| 2560 | 30660716 (2191, 2192) | | | UNCLASSIFIED | 1006 |
| 2561 | 29268810 (2199, 2200) | | | UNCLASSIFIED | 1020 |
| 2562 | 10302433 (2221, 2222) | | | UNCLASSIFIED | 1035 |
| 2563 | 12970626 (2225, 2226) | | | UNCLASSIFIED | 1022 |
| 2564 | 81646720 (2239, 2240) | | | UNCLASSIFIED | 1022, 1023, 1026, 1051 |
| 2565 | 17135118 (2247, 2248) | | | UNCLASSIFIED | 1021 |
| 2566 | 94233323 (2249, 2250) | | | UNCLASSIFIED | 1002 |
| 2567 | 55403753 (2251, 2252) | | | UNCLASSIFIED | 1017 |
| 2568 | 78043426 (2259, 2260) | | | UNCLASSIFIED | 1022 |
| 2569 | 16494096 (2269, 2270) | | | UNCLASSIFIED | 1006 |
| 2570 | 15022168 (2293, 2294) | | | UNCLASSIFIED | 1051 |
| 2571 | 16792287 (2297, 2298) | | | UNCLASSIFIED | 1036 |
| 2572 | 10261836 (2301, 2302) | | | UNCLASSIFIED | 1021 |
| 2573 | 78461311 (2311, 2312) | | | UNCLASSIFIED | 1024 |
| 2574 | 29352425 (2347, 2348) | | | UNCLASSIFIED | 1007 |
| 2575 | 79970354 (2357, 2358) | | | UNCLASSIFIED | 1002 |
| 2576 | 11813647 (2365, 2366) | | | UNCLASSIFIED | 1003 |
| 2577 | 20752448 (2387, 2388) | | | UNCLASSIFIED | 1020 |
| 2578 | 77530463 (2399, 2400) | | | UNCLASSIFIED | 1035 |
| 2579 | 52256467 (2419, 2420) | | | UNCLASSIFIED | 1033 |
| 2580 | 78729050 (2439, 2440) | | | UNCLASSIFIED | 1006 |
| 2581 | 71092329 (2451, 2452) | | | UNCLASSIFIED | 1026, 1050 |
| 2582 | 20294841 (2467, 2468) | | | UNCLASSIFIED | 1031 |
| 2583 | 66314057 (2469, 2470) | | | UNCLASSIFIED | 1051 |
| 2584 | 83074239 (2481, 2482) | | | UNCLASSIFIED | 1050 |
| 2585 | 13519288 (2489, 2490) | | | UNCLASSIFIED | 1022 |
| 2586 | 10132589 (2491, 2492) | | | UNCLASSIFIED | 1023 |
| 2587 | 79468481 (2503, 2504) | | | UNCLASSIFIED | 1014 |
| 2588 | 80404939 (2505, 2506) | | | UNCLASSIFIED | 1015, 1023, 1026 |
| 2589 | 65480474 (2507, 2508) | | | UNCLASSIFIED | 1035, 1051 |
| 2590 | 78285849 (2513, 2514) | | | UNCLASSIFIED | 1000 |
| 2591 | 78799479 (2517, 2518) | | | UNCLASSIFIED | 1024 |
| 2592 | 79160595 (2525, 2526) | | | UNCLASSIFIED | 1003 |
| 2593 | 35010285 (2531, 2532) | | | UNCLASSIFIED | 1031 |
| 2594 | 11689777 (2535, 2536) | | | UNCLASSIFIED | 1031 |
| 2595 | 78506537 (2539, 2540) | | | UNCLASSIFIED | 1027, 1051 |
| 2596 | 46571860 (2541, 2542) | | | UNCLASSIFIED | 1026 |
| 2597 | 36512560 (2547, 2548) | | | UNCLASSIFIED | 1024 |
| 2598 | 78796333 (2549, 2550) | | | UNCLASSIFIED | 1024 |
| 2599 | 6783257 (2551, 2552) | | | UNCLASSIFIED | 1020 |
| 2600 | 70972815 (2557, 2558) | | | UNCLASSIFIED | 1033, 1034, 1037, 1038, |
| | | | | | 1039 |
| 2601 | 78165237 (2561, 2562) | | | UNCLASSIFIED | 1027 |
| 2602 | 78945363 (2569, 2570) | | | UNCLASSIFIED | 1027 |
| 2603 | 28991341 (2581, 2582) | | | UNCLASSIFIED | 1021 |
| 2604 | 78259411 (2587, 2588) | | | UNCLASSIFIED | 1024 |
| 2605 | 29916216 (2601, 2602) | | | UNCLASSIFIED | 1027 |
| 2606 | 80051011 (2605, 2606) | | | UNCLASSIFIED | 1003 |
| 2607 | 13051740 (2607, 2608) | | | UNCLASSIFIED | 1025 |
| 2608 | 94315437 (2619, 2620) | | | UNCLASSIFIED | 1002 |
| 2609 | 10025445 (2621, 2622) | | | UNCLASSIFIED | 1038 |
| 2610 | 80231386 (2627, 2628) | | | UNCLASSIFIED | 1020 |
| 2611 | 78956209 (2639, 2640) | | | UNCLASSIFIED | 1006 |
| 2612 | 25334976 (2641, 2642) | | | UNCLASSIFIED | 1036 |
| 2613 | 95294554 (2659, 2660) | | | UNCLASSIFIED | 1004, 1008 |
| 2614 | 32297941 (2661, 2662) | | | UNCLASSIFIED | 1000 |
| 2615 | 79628613 (2695, 2696) | | | UNCLASSIFIED | 1001, 1020, 1024, 1051 |
| 2616 | 80084693 (2709, 2710) | | | UNCLASSIFIED | 1051 |
| 2617 | 17296168 (2733, 2734) | | | UNCLASSIFIED | 1006 |
| 2618 | 57037459 (2737, 2738) | | | UNCLASSIFIED | 1010, 1026, 1028, 1050 |
| 2619 | 79475353 (2741, 2742) | | | UNCLASSIFIED | 1020 |
| 2620 | 91237580 (2753, 2754) | | | UNCLASSIFIED | 1008 |
| 2621 | 13519703 (2763, 2764) | | | UNCLASSIFIED | 1022 |
| 2622 | 5843274 (2779, 2780) | | | UNCLASSIFIED | 1055 |
| 2623 | 79611573 (2781, 2782) | | | UNCLASSIFIED | 1004 |
| 2624 | 11777012 (2785, 2786) | | | UNCLASSIFIED | 1004 |
| 2625 | 20295915 (2791, 2792) | | | UNCLASSIFIED | 1020 |
| 2626 | 78393562 (2799, 2800) | | | UNCLASSIFIED | 1027, 1041 |
| 2627 | 20296449 (2843, 2844) | | | UNCLASSIFIED | 1031 |
| 2628 | 80249573 (2853, 2854) | | | UNCLASSIFIED | 1003, 1004, 1028, 1041 |
| 2629 | 79585883 (2855, 2856) | | | UNCLASSIFIED | 1051 |
| 2630 | 79200992 (2857, 2858) | | | UNCLASSIFIED | 1022 |
| 2631 | 16540873 (2867, 2868) | | | UNCLASSIFIED | 1036 |
| 2632 | 79193127 (2871, 2872) | | | UNCLASSIFIED | 1022 |
| 2633 | 11808824 (2887, 2888) | | | UNCLASSIFIED | 1020 |
| 2634 | 79764857 (2891, 2892) | | | UNCLASSIFIED | 1006 |
| 2635 | 27367480 (2915, 2916) | | | UNCLASSIFIED | 1020 |
| 2636 | 87459608 (2931, 2932) | | | UNCLASSIFIED | 1013 |
| 2637 | 79871671 (2937, 2938) | | | UNCLASSIFIED | 1027, 1037, 1041, 1051 |
| 2638 | 79599325 (2941, 2942) | | | UNCLASSIFIED | 1002, 1006 |
| 2639 | 10314889 (2957, 2958) | | | UNCLASSIFIED | 1035 |
| 2640 | 79826242 (2959, 2960) | | | UNCLASSIFIED | 1041 |
| 2641 | 46899813 (2977, 2978) | | | UNCLASSIFIED | 1037 |
| 2642 | 94132451 (2987, 2988) | | | UNCLASSIFIED | 1002 |
| 2643 | 47651933 (2993, 2994) | | | UNCLASSIFIED | 1026 |
| 2644 | 85516772 (2995, 2996) | | | UNCLASSIFIED | 1050 |
| 2645 | 30230323 (2997, 2998) | | | UNCLASSIFIED | 1024 |
| 2646 | 30793733 (3005, 3006) | | | UNCLASSIFIED | 1024 |
| 2647 | 80056153 (3019, 3020) | | | UNCLASSIFIED | 1002, 1020 |
| 2648 | 78787501 (3027, 3028) | | | UNCLASSIFIED | 1006, 1007, 1020 |
| 2649 | 79181749 (3029, 3030) | | | UNCLASSIFIED | 1015, 1025 |
| 2650 | 65886563 (3035, 3036) | | | UNCLASSIFIED | 1014 |
| 2651 | 50677267 (3039, 3040) | | | UNCLASSIFIED | 1033 |
| 2652 | 78898639 (3073, 3074) | | | UNCLASSIFIED | 1002, 1015 |
| 2653 | 16838936 (3075, 3076) | | | UNCLASSIFIED | 1036 |
| 2654 | 16549137 (3079, 3080) | | | UNCLASSIFIED | 1035 |
| 2655 | 16709708 (3081, 3082) | | | UNCLASSIFIED | 1036 |
| 2656 | 27823588 (3085, 3086) | | | UNCLASSIFIED | 1008 |
| 2657 | 13506489 (3095, 3096) | | | UNCLASSIFIED | 1031 |
| 2658 | 46852790 (3097, 3098) | | | UNCLASSIFIED | 1051 |
| 2659 | 86466913 (3099, 3100) | | | UNCLASSIFIED | 1026 |
| 2660 | 30253082 (3113, 3114) | | | UNCLASSIFIED | 1027 |
| 2661 | 77685125 (3117, 3118) | | | UNCLASSIFIED | 1005 |
| 2662 | 10127591 (3131, 3132) | | | UNCLASSIFIED | 1001 |
| 2663 | 51975910 (3153, 3154) | | | UNCLASSIFIED | 1017 |
| 2664 | 56065523 (3209, 3210) | | | UNCLASSIFIED | 1019 |
| 2665 | 35006356 (3213, 3214) | | | UNCLASSIFIED | 1047 |
| 2666 | 80503920 (3235, 3236) | | | UNCLASSIFIED | 1010 |
| 2667 | 46853933 (3237, 3238) | | | UNCLASSIFIED | 1026 |
| 2668 | 17121495 (3249, 3250) | | | UNCLASSIFIED | 1027 |
| 2669 | 19726688 (3267, 3268) | | | UNCLASSIFIED | 1035 |
| 2670 | 65687035 (3273, 3274) | | | UNCLASSIFIED | 1038 |
| 2671 | 80475471 (3277, 3278) | | | UNCLASSIFIED | 1006, 1007, 1008, 1010, |
| | | | | | 1015, 1020, 1022, 1023, |
| | | | | | 1041 |
| 2672 | 70952517 (3287, 3288) | | | UNCLASSIFIED | 1034 |
| 2673 | 30783130 (3295, 3296) | | | UNCLASSIFIED | 1007 |
| 2674 | 99407738 (3313, 3314) | | | UNCLASSIFIED | 1021, 1031, 1034, 1048 |
| 2675 | 20431922 (3321, 3322) | | | UNCLASSIFIED | 1008 |
| 2676 | 10173821 (3327, 3328) | | | UNCLASSIFIED | 1003 |
| 2677 | 78180052 (3351, 3352) | | | UNCLASSIFIED | 1022 |
| 2678 | 23290719 (3355, 3356) | | | UNCLASSIFIED | 1015 |
| 2679 | 79574506 (3359, 3360) | | | UNCLASSIFIED | 1028 |
| 2680 | 47656347 (3365, 3366) | | | UNCLASSIFIED | 1026 |
| 2681 | 68137709 (3373, 3374) | | | UNCLASSIFIED | 1002 |
| 2682 | 39559794 (3381, 3382) | | | UNCLASSIFIED | 1001 |
| 2683 | 10344736 (3389, 3390) | | | UNCLASSIFIED | 1035 |
| 2684 | 78968773 (3399, 3400) | | | UNCLASSIFIED | 1035, 1051 |
| 2685 | 94238051 (3413, 3414) | | | UNCLASSIFIED | 1051 |
| 2686 | 79458087 (3417, 3418) | | | UNCLASSIFIED | 1014, 1028 |
| 2687 | 38211918 (3425, 3426) | | | UNCLASSIFIED | 1031 |
| 2688 | 33763565 (3433, 3434) | | | UNCLASSIFIED | 1024 |
| 2689 | 33188865 (3435, 3436) | | | UNCLASSIFIED | 1024 |
| 2690 | 20287670 (3439, 3440) | | | UNCLASSIFIED | 1031 |
| 2691 | 80457783 (3441, 3442) | | | UNCLASSIFIED | 1035 |
| 2692 | 78733339 (3453, 3454) | | | UNCLASSIFIED | 1027 |
| 2693 | 13083260 (3473, 3474) | | | UNCLASSIFIED | 1028 |
| 2694 | 86465105 (3479, 3480) | | | UNCLASSIFIED | 1026 |
| 2695 | 38910894 (3481, 3482) | | | UNCLASSIFIED | 1022 |
| 2696 | 27842729 (3491, 3492) | | | UNCLASSIFIED | 1020, 1031 |
| 2697 | 79161229 (3501, 3502) | | | UNCLASSIFIED | 1001, 1003, 1022 |
| 2698 | 78046030 (3513, 3514) | | | UNCLASSIFIED | 1022 |
| 2699 | 65470706 (3527, 3528) | | | UNCLASSIFIED | 1046 |
| 2700 | 41086447 (3537, 3538) | | | UNCLASSIFIED | 1034 |
| 2701 | 20473522 (3539, 3540) | | | UNCLASSIFIED | 1020 |
| 2702 | 27990991 (3549, 3550) | | | UNCLASSIFIED | 1014 |
| 2703 | 79551903 (3563, 3564) | | | UNCLASSIFIED | 1035 |
| 2704 | 24129331 (3565, 3566) | | | UNCLASSIFIED | 1002 |
| 2705 | 56073877 (3573, 3574) | | | UNCLASSIFIED | 1019 |
| 2706 | 10841539 (3579, 3580) | | | UNCLASSIFIED | 1021 |
| 2707 | 94662837 (3587, 3588) | | | UNCLASSIFIED | 1022 |
| 2708 | 80050593 (3591, 3592) | | | UNCLASSIFIED | 1031 |
| 2709 | 16467038 (3599, 3600) | | | UNCLASSIFIED | 1002 |
| 2710 | 79456231 (3605, 3606) | | | UNCLASSIFIED | 1004 |
| 2711 | 25263385 (3607, 3608) | | | UNCLASSIFIED | 1006 |
| 2712 | 80429688 (3613, 3614) | | | UNCLASSIFIED | 1004, 1007, 1008, 1020, |
| | | | | | 1022, 1031, 1035, 1041 |
| 2713 | 79167751 (3631, 3632) | | | UNCLASSIFIED | 1004 |
| 2714 | 20385910 (3643, 3644) | | | UNCLASSIFIED | 1003 |
| 2715 | 48031296 (3673, 3674) | | | UNCLASSIFIED | 1037 |
| 2716 | 43338371 (3685, 3686) | | | UNCLASSIFIED | 1034 |
| 2717 | 94234975 (3693, 3694) | | | UNCLASSIFIED | 1051 |
| 2718 | 79912451 (3707, 3708) | | | UNCLASSIFIED | 1021, 1022 |
| 2719 | 19883421 (3717, 3718) | | | UNCLASSIFIED | 1001 |
| 2720 | 29692576 (3719, 3720) | | | UNCLASSIFIED | 1022 |
| 2721 | 79234687 (3723, 3724) | | | UNCLASSIFIED | 1001 |
| 2722 | 78524159 (3727, 3728) | | | UNCLASSIFIED | 1006 |
| 2723 | 78896169 (3751, 3752) | | | UNCLASSIFIED | 1021, 1024, 1036 |
| 2724 | 78910498 (3761, 3762) | | | UNCLASSIFIED | 1002 |
| 2725 | 57528838 (3763, 3764) | | | UNCLASSIFIED | 1010 |
| 2726 | 46742605 (3777, 3778) | | | UNCLASSIFIED | 1030 |
| 2727 | 79255205 (3781, 3782) | | | UNCLASSIFIED | 1021 |
| 2728 | 51620802 (3797, 3798) | | | UNCLASSIFIED | 1017 |
| 2729 | 10195575 (3799, 3800) | | | UNCLASSIFIED | 1031 |
| 2730 | 79584454 (3809, 3810) | | | UNCLASSIFIED | 1022 |
| 2731 | 65443082 (3815, 3816) | | | UNCLASSIFIED | 1046 |
| 2732 | 79826942 (3819, 3820) | | | UNCLASSIFIED | 1002, 1006, 1015, 1021, |
| | | | | | 1036, 1041 |
| 2733 | 52559445 (3821, 3822) | | | UNCLASSIFIED | 1055 |
| 2734 | 78299534 (3823, 3824) | | | UNCLASSIFIED | 1024 |
| 2735 | 32164393 (3825, 3826) | | | UNCLASSIFIED | 1021 |
| 2736 | 33099526 (3835, 3836) | | | UNCLASSIFIED | 1024 |
| 2737 | 78374957 (3843, 3844) | | | UNCLASSIFIED | 1024 |
| 2738 | 8907028 (3847, 3848) | | | UNCLASSIFIED | 1021 |
| 2739 | 19753682 (3851, 3852) | | | UNCLASSIFIED | 1035 |
| 2740 | 8487952 (3857, 3858) | | | UNCLASSIFIED | 1020 |
| 2741 | 20283499 (3863, 3864) | | | UNCLASSIFIED | 1031 |
| 2742 | 37798059 (3865, 3866) | | | UNCLASSIFIED | 1010 |
| 2743 | 11302523 (3879, 3880) | | | UNCLASSIFIED | 1022 |
| 2744 | 66309134 (3891, 3892) | | | UNCLASSIFIED | 1050 |
| 2745 | 78528776 (3915, 3916) | | | UNCLASSIFIED | 1024, 1041 |
| 2746 | 66031247 (3917, 3918) | | | UNCLASSIFIED | 1050 |
| 2747 | 91253974 (3923, 3924) | | | UNCLASSIFIED | 1008 |
| 2748 | 20267041 (3931, 3932) | | | UNCLASSIFIED | 1031 |
| 2749 | 86665516 (3937, 3938) | | | UNCLASSIFIED | 1017 |
| 2750 | 20195985 (3947, 3948) | | | UNCLASSIFIED | 1008 |
| 2751 | 66258522 (3959, 3960) | | | UNCLASSIFIED | 1006, 1008, 1022, 1035, |
| | | | | | 1051 |
| 2752 | 80029779 (3975, 3976) | | | UNCLASSIFIED | 1003, 1022, 1036 |
| 2753 | 79619003 (3979, 3980) | | | UNCLASSIFIED | 1004, 1015 |
| 2754 | 11103584 (3981, 3982) | | | UNCLASSIFIED | 1050 |
| 2755 | 11764404 (3983, 3984) | | | UNCLASSIFIED | 1020 |
| 2756 | 33189196 (3985, 3986) | | | UNCLASSIFIED | 1024 |
| 2757 | 34623151 (3999, 4000) | | | UNCLASSIFIED | 1026 |
| 2758 | 8489122 (4011, 4012) | | | UNCLASSIFIED | 1031 |
| 2759 | 78396490 (4023, 4024) | | | UNCLASSIFIED | 1027 |
| 2760 | 29345892 (4037, 4038) | | | UNCLASSIFIED | 1020 |
| 2761 | 29347340 (4039, 4040) | | | UNCLASSIFIED | 1006 |
| 2762 | 55663357 (4041, 4042) | | | UNCLASSIFIED | 1019 |
| 2763 | 11701316 (4065, 4066) | | | UNCLASSIFIED | 1025 |
| 2764 | 20192246 (4069, 4070) | | | UNCLASSIFIED | 1008 |
| 2765 | 27286869 (4071, 4072) | | | UNCLASSIFIED | 1006 |
| 2766 | 25264269 (4077, 4078) | | | UNCLASSIFIED | 1006, 1015 |
| 2767 | 11090696 (4083, 4084) | | | UNCLASSIFIED | 1004 |
| 2768 | 79612603 (4099, 4100) | | | UNCLASSIFIED | 1022 |
| 2769 | 79763149 (4105, 4106) | | | UNCLASSIFIED | 1015 |
| 2770 | 78906237 (4115, 4116) | | | UNCLASSIFIED | 1002, 1036 |
| 2771 | 95009140 (4123, 4124) | | | UNCLASSIFIED | 1015 |
| 2772 | 20297255 (4133, 4134) | | | UNCLASSIFIED | 1031 |
| 2773 | 34878135 (4141, 4142) | | | UNCLASSIFIED | 1050 |
| 2774 | 20469119 (4145, 4146) | | | UNCLASSIFIED | 1022 |
| 2775 | 91010108 (4147, 4148) | | | UNCLASSIFIED | 1014, 1018 |
| 2776 | 78941152 (4169, 4170) | | | UNCLASSIFIED | 1036 |
| 2777 | 65506240 (4181, 4182) | | | UNCLASSIFIED | 1014 |
| 2778 | 79909566 (4191, 4192) | | | UNCLASSIFIED | 1010, 1025, 1028 |
| 2779 | 25152088 (4201, 4202) | | | UNCLASSIFIED | 1007 |
| 2780 | 30813844 (4205, 4206) | | | UNCLASSIFIED | 1004 |
| 2781 | 29906897 (4209, 4210) | | | UNCLASSIFIED | 1004 |
| 2782 | 78799491 (4217, 4218) | | | UNCLASSIFIED | 1024 |
| 2783 | 29688099 (4233, 4234) | | | UNCLASSIFIED | 1035 |
| 2784 | 77528564 (4235, 4236) | | | UNCLASSIFIED | 1021 |
| 2785 | 20129211 (4241, 4242) | | | UNCLASSIFIED | 1020 |
| 2786 | 56069291 (4255, 4256) | | | UNCLASSIFIED | 1019 |
| 2787 | 32303790 (4263, 4264) | | | UNCLASSIFIED | 1001 |
| 2788 | 29237787 (4277, 4278) | | | UNCLASSIFIED | 1015 |
| 2789 | 80249583 (4279, 4280) | | | UNCLASSIFIED | 1004 |
| 2790 | 78793467 (4281, 4282) | | | UNCLASSIFIED | 1024 |
| 2791 | 79589721 (4283, 4284) | | | UNCLASSIFIED | 1022 |
| 2792 | 80017549 (4293, 4294) | | | UNCLASSIFIED | 1020, 1031 |
| 2793 | 78254116 (4301, 4302) | | | UNCLASSIFIED | 1024 |
| 2794 | 30673102 (4307, 4308) | | | UNCLASSIFIED | 1006 |
| 2795 | 20634834 (4339, 4340) | | | UNCLASSIFIED | 1022 |
| 2796 | 40385109 (4351, 4352) | | | UNCLASSIFIED | 1034 |
| 2797 | 79188918 (4357, 4358) | | | UNCLASSIFIED | 1003, 1004, 1041, 1050 |
| 2798 | 78772029 (4369, 4370) | | | UNCLASSIFIED | 1006 |
| 2799 | 80068312 (4375, 4376) | | | UNCLASSIFIED | 1002, 1006, 1021, 1022, |
| | | | | | 1023 |
| 2800 | 80254641 (4379, 4380) | | | UNCLASSIFIED | 1008, 1031 |
| 2801 | 25250808 (4383, 4384) | | | UNCLASSIFIED | 1036 |
| 2802 | 79445987 (4395, 4396) | | | UNCLASSIFIED | 1022, 1055 |
| 2803 | 79831265 (4417, 4418) | | | UNCLASSIFIED | 1021 |
| 2804 | 37811456 (4423, 4424) | | | UNCLASSIFIED | 1055 |
| 2805 | 78941659 (4427, 4428) | | | UNCLASSIFIED | 1014, 1021, 1035, 1036 |
| 2806 | 66373462 (4433, 4434) | | | UNCLASSIFIED | 1051 |
| 2807 | 35106993 (4435, 4436) | | | UNCLASSIFIED | 1024 |
| 2808 | 33205300 (4437, 4438) | | | UNCLASSIFIED | 1024 |
| 2809 | 65894279 (4451, 4452) | | | UNCLASSIFIED | 1015, 1035 |
| 2810 | 77686705 (4461, 4462) | | | UNCLASSIFIED | 1022 |
| 2811 | 65667510 (4463, 4464) | | | UNCLASSIFIED | 1020, 1050, 1051 |
| 2812 | 65650760 (4473, 4474) | | | UNCLASSIFIED | 1051 |
| 2813 | 27933422 (4475, 4476) | | | UNCLASSIFIED | 1004 |
| 2814 | 32584668 (4481, 4482) | | | UNCLASSIFIED | 1026 |
| 2815 | 80417530 (4509, 4510) | | | UNCLASSIFIED | 1004, 1006, 1010, 1022, |
| | | | | | 1023, 1024, 1025, 1028, |
| | | | | | 1031 |
| 2816 | 29353908 (4529, 4530) | | | UNCLASSIFIED | 1020 |
| 2817 | 8697154 (4539, 4540) | | | UNCLASSIFIED | 1020 |
| 2818 | 65986177 (4545, 4546) | | | UNCLASSIFIED | 1051 |
| 2819 | 94630957 (4559, 4560) | | | UNCLASSIFIED | 1015 |
| 2820 | 20469357 (4563, 4564) | | | UNCLASSIFIED | 1022 |
| 2821 | 79588615 (4573, 4574) | | | UNCLASSIFIED | 1031 |
| 2822 | 86668222 (4577, 4578) | | | UNCLASSIFIED | 1026 |
| 2823 | 78915658 (4583, 4584) | | | UNCLASSIFIED | 1006 |
| 2824 | 77474737 (4585, 4586) | | | UNCLASSIFIED | 1021 |
| 2825 | 94234185 (4599, 4600) | | | UNCLASSIFIED | 1051 |
| 2826 | 16295755 (4601, 4602) | | | UNCLASSIFIED | 1051 |
| 2827 | 10368280 (4603, 4604) | | | UNCLASSIFIED | 1015 |
| 2828 | 33205305 (4605, 4606) | | | UNCLASSIFIED | 1024 |
| 2829 | 79552441 (4613, 4614) | | | UNCLASSIFIED | 1001, 1020 |
| 2830 | 17940638 (4615, 4616) | | | UNCLASSIFIED | 1036 |
| 2831 | 47652044 (4627, 4628) | | | UNCLASSIFIED | 1026 |
| 2832 | 77882123 (4635, 4636) | | | UNCLASSIFIED | 1039 |
| 2833 | 19505870 (4637, 4638) | | | UNCLASSIFIED | 1006 |
| 2834 | 15028506 (4641, 4642) | | | UNCLASSIFIED | 1051 |
| 2835 | 21631008 (4643, 4644) | | | UNCLASSIFIED | 1036 |
| 2836 | 23286066 (4651, 4652) | | | UNCLASSIFIED | 1036 |
| 2837 | 78944373 (4653, 4654) | | | UNCLASSIFIED | 1002, 1014 |
| 2838 | 66372906 (4657, 4658) | | | UNCLASSIFIED | 1035 |
| 2839 | 30673352 (4659, 4660) | | | UNCLASSIFIED | 1027 |
| 2840 | 20700438 (4663, 4664) | | | UNCLASSIFIED | 1031 |
| 2841 | 8373956 (4673, 4674) | | | UNCLASSIFIED | 1008 |
| 2842 | 79619690 (4681, 4682) | | | UNCLASSIFIED | 1003 |
| 2843 | 32420685 (4741, 4742) | | | UNCLASSIFIED | 1010 |
| 2844 | 66317870 (4747, 4748) | | | UNCLASSIFIED | 1007 |
| 2845 | 11285785 (4751, 4752) | | | UNCLASSIFIED | 1004 |
| 2846 | 78923678 (4759, 4760) | | | UNCLASSIFIED | 1035 |
| 2847 | 78049812 (4769, 4770) | | | UNCLASSIFIED | 1024 |
| 2848 | 36524697 (4773, 4774) | | | UNCLASSIFIED | 1026 |
| 2849 | 78050567 (4785, 4786) | | | UNCLASSIFIED | 1006 |
| 2850 | 10122104 (4787, 4788) | | | UNCLASSIFIED | 1041 |
| 2851 | 25149457 (4795, 4796) | | | UNCLASSIFIED | 1024 |
| 2852 | 37800062 (4799, 4800) | | | UNCLASSIFIED | 1010 |
| 2853 | 86669166 (4805, 4806) | | | UNCLASSIFIED | 1035 |
| 2854 | 99115101 (4811, 4812) | | | UNCLASSIFIED | 1008, 1018, 1024, 1031 |
| 2855 | 79441720 (4813, 4814) | | | UNCLASSIFIED | 1022 |
| 2856 | 29690681 (4821, 4822) | | | UNCLASSIFIED | 1022 |
| 2857 | 32306836 (4831, 4832) | | | UNCLASSIFIED | 1022 |
| 2858 | 19641785 (4841, 4842) | | | UNCLASSIFIED | 1031 |
| 2859 | 86465496 (4853, 4854) | | | UNCLASSIFIED | 1017 |
| 2860 | 71457943 (4859, 4860) | | | UNCLASSIFIED | 1006 |
| 2861 | 10108751 (4879, 4880) | | | UNCLASSIFIED | 1010 |
| 2862 | 36511909 (4881, 4882) | | | UNCLASSIFIED | 1024 |
| 2863 | 51627930 (4885, 4886) | | | UNCLASSIFIED | 1039 |
| 2864 | 10355325 (4889, 4890) | | | UNCLASSIFIED | 1036 |
| 2865 | 32443654 (4905, 4906) | | | UNCLASSIFIED | 1001 |
| 2866 | 78100313 (4911, 4912) | | | UNCLASSIFIED | 1020 |
| 2867 | 79473904 (4917, 4918) | | | UNCLASSIFIED | 1035 |
| 2868 | 79389282 (4923, 4924) | | | UNCLASSIFIED | 1055 |
| 2869 | 9848658 (4935, 4936) | | | UNCLASSIFIED | 1021 |
| 2870 | 80445326 (4945, 4946) | | | UNCLASSIFIED | 1035 |
| 2871 | 13076219 (4951, 4952) | | | UNCLASSIFIED | 1022 |
| 2872 | 87458171 (4963, 4964) | | | UNCLASSIFIED | 1016 |
| 2873 | 19908441 (4967, 4968) | | | UNCLASSIFIED | 1031 |
| 2874 | 79565987 (5003, 5004) | | | UNCLASSIFIED | 1015 |
| 2875 | 52208871 (5021, 5022) | | | UNCLASSIFIED | 1033 |
| 2876 | 79247367 (5031, 5032) | | | UNCLASSIFIED | 1036 |
| 2877 | 12605067 (5065, 5066) | | | UNCLASSIFIED | 1028 |
| 2878 | 78462358 (5071, 5072) | | | UNCLASSIFIED | 1024 |
| 2879 | 37809431 (5103, 5104) | | | UNCLASSIFIED | 1055 |
| 2880 | 11757198 (5111, 5112) | | | UNCLASSIFIED | 1022 |
| 2881 | 17117396 (5125, 5126) | | | UNCLASSIFIED | 1006 |
| 2882 | 80019328 (5139, 5140) | | | UNCLASSIFIED | 1014, 1020 |
| 2883 | 52563817 (5145, 5146) | | | UNCLASSIFIED | 1002 |
| 2884 | 80053961 (5157, 5158) | | | UNCLASSIFIED | 1008 |
| 2885 | 78745454 (5165, 5166) | | | UNCLASSIFIED | 1036 |
| 2886 | 78747092 (5167, 5168) | | | UNCLASSIFIED | 1020 |
| 2887 | 78470377 (5171, 5172) | | | UNCLASSIFIED | 1024 |
| 2888 | 78374663 (5181, 5182) | | | UNCLASSIFIED | 1006 |
| 2889 | 55504394 (5195, 5196) | | | UNCLASSIFIED | 1019 |
| 2890 | 38633736 (5197, 5198) | | | UNCLASSIFIED | 1024 |
| 2891 | 80189412 (5209, 5210) | | | UNCLASSIFIED | 1055 |
| 2892 | 57005676 (5217, 5218) | | | UNCLASSIFIED | 1006 |
| 2893 | 29674648 (5221, 5222) | | | UNCLASSIFIED | 1027 |
| 2894 | 20379495 (5229, 5230) | | | UNCLASSIFIED | 1020 |
| 2895 | 35139265 (5253, 5254) | | | UNCLASSIFIED | 1047 |
| 2896 | 23297485 (5281, 5282) | | | UNCLASSIFIED | 1002 |
| 2897 | 23303003 (5283, 5284) | | | UNCLASSIFIED | 1021 |
| 2898 | 66051735 (5289, 5290) | | | UNCLASSIFIED | 1008 |
| 2899 | 78780652 (5299, 5300) | | | UNCLASSIFIED | 1007, 1022 |
| 2900 | 10885600 (5301, 5302) | | | UNCLASSIFIED | 1025 |
| 2901 | 29350240 (5305, 5306) | | | UNCLASSIFIED | 1041 |
| 2902 | 11013209 (5311, 5312) | | | UNCLASSIFIED | 1004 |
| 2903 | 85537649 (5315, 5316) | | | UNCLASSIFIED | 1035 |
| 2904 | 65471614 (5337, 5338) | | | UNCLASSIFIED | 1046 |
| 2905 | 78261683 (5341, 5342) | | | UNCLASSIFIED | 1020, 1024 |
| 2906 | 65653823 (5347, 5348) | | | UNCLASSIFIED | 1014, 1020, 1051 |
| 2907 | 80250916 (5361, 5362) | | | UNCLASSIFIED | 1001, 1020 |
| 2908 | 80308639 (5363, 5364) | | | UNCLASSIFIED | 1015, 1020, 1023, 1026, |
| | | | | | 1035 |
| 2909 | 65984526 (5367, 5368) | | | UNCLASSIFIED | 1003 |
| 2910 | 95313695 (5397, 5398) | | | UNCLASSIFIED | 1051 |
| 2911 | 35112059 (5403, 5404) | | | UNCLASSIFIED | 1000 |
| 2912 | 66409534 (5409, 5410) | | | UNCLASSIFIED | 1054 |
| 2913 | 80501511 (5411, 5412) | | | UNCLASSIFIED | 1010 |
| 2914 | 79450450 (5415, 5416) | | | UNCLASSIFIED | 1022 |
| 2915 | 17134146 (5417, 5418) | | | UNCLASSIFIED | 1051 |
| 2916 | 30654359 (5419, 5420) | | | UNCLASSIFIED | 1020 |
| 2917 | 85800817 (5429, 5430) | | | UNCLASSIFIED | 1023 |
| 2918 | 10083535 (5441, 5442) | | | UNCLASSIFIED | 1036 |
| 2919 | 66463935 (5449, 5450) | | | UNCLASSIFIED | 1020, 1024 |
| 2920 | 79232559 (5467, 5468) | | | UNCLASSIFIED | 1001, 1008 |
| 2921 | 80491888 (5479, 5480) | | | UNCLASSIFIED | 1003, 1004, 1008, 1010, |
| | | | | | 1020, 1024 |
| 2922 | 46848609 (5487, 5488) | | | UNCLASSIFIED | 1051 |
| 2923 | 55003239 (5499, 5500) | | | UNCLASSIFIED | 1017 |
| 2924 | 85526422 (5519, 5520) | | | UNCLASSIFIED | 1035 |
| 2925 | 20384672 (5523, 5524) | | | UNCLASSIFIED | 1003 |
| 2926 | 20290105 (5565, 5566) | | | UNCLASSIFIED | 1020 |
| 2927 | 66376605 (5575, 5576) | | | UNCLASSIFIED | 1007, 1008 |
| 2928 | 55996771 (5583, 5584) | | | UNCLASSIFIED | 1036 |
| 2929 | 20292707 (5585, 5586) | | | UNCLASSIFIED | 1031 |
| 2930 | 37799216 (5589, 5590) | | | UNCLASSIFIED | 1010 |
| 2931 | 77666770 (5617, 5618) | | | UNCLASSIFIED | 1002 |
| 2932 | 56517982 (5621, 5622) | | | UNCLASSIFIED | 1017 |
| 2933 | 20754310 (5627, 5628) | | | UNCLASSIFIED | 1050 |
| 2934 | 79319395 (5629, 5630) | | | UNCLASSIFIED | 1031 |
| 2935 | 47652512 (5641, 5642) | | | UNCLASSIFIED | 1026 |
| 2936 | 36857764 (5645, 5646) | | | UNCLASSIFIED | 1014 |
| 2937 | 10330364 (5649, 5650) | | | UNCLASSIFIED | 1023 |
| 2938 | 79582558 (5655, 5656) | | | UNCLASSIFIED | 1020 |
| 2939 | 20288445 (5689, 5690) | | | UNCLASSIFIED | 1031 |
| 2940 | 65681567 (5717, 5718) | | | UNCLASSIFIED | 1022 |
| 2941 | 11077196 (5721, 5722) | | | UNCLASSIFIED | 1031 |
| 2942 | 82474748 (5733, 5734) | | | UNCLASSIFIED | 1001 |
| 2943 | 78753658 (5767, 5768) | | | UNCLASSIFIED | 1006, 1015 |
| 2944 | 20296465 (5781, 5782) | | | UNCLASSIFIED | 1031 |
| 2945 | 11815252 (5783, 5784) | | | UNCLASSIFIED | 1022 |
| 2946 | 54532005 (5789, 5790) | | | UNCLASSIFIED | 1038 |
| 2947 | 11204751 (5815, 5816) | | | UNCLASSIFIED | 1020 |
| 2948 | 28450339 (5819, 5820) | | | UNCLASSIFIED | 1036 |
| 2949 | 94720119 (5821, 5822) | | | UNCLASSIFIED | 1002 |
| 2950 | 66390621 (5827, 5828) | | | UNCLASSIFIED | 1035, 1051, 1055 |
| 2951 | 21391992 (5835, 5836) | | | UNCLASSIFIED | 1004 |
| 2952 | 16541051 (5841, 5842) | | | UNCLASSIFIED | 1006 |
| 2953 | 35112748 (5851, 5852) | | | UNCLASSIFIED | 1027 |
| 2954 | 78528487 (5853, 5854) | | | UNCLASSIFIED | 1027 |
| 2955 | 79876219 (5857, 5858) | | | UNCLASSIFIED | 1015 |
| 2956 | 23289053 (5869, 5870) | | | UNCLASSIFIED | 1015 |
| 2957 | 78494382 (5873, 5874) | | | UNCLASSIFIED | 1024 |
| 2958 | 46664258 (5875, 5876) | | | UNCLASSIFIED | 1051 |
| 2959 | 78736790 (5877, 5878) | | | UNCLASSIFIED | 1015 |
| 2960 | 52561007 (5879, 5880) | | | UNCLASSIFIED | 1010 |
| 2961 | 33763197 (5881, 5882) | | | UNCLASSIFIED | 1024 |
| 2962 | 80236339 (5887, 5888) | | | UNCLASSIFIED | 1020 |
| 2963 | 9681893 (5891, 5892) | | | UNCLASSIFIED | 1041 |
| 2964 | 9843987 (5901, 5902) | | | UNCLASSIFIED | 1021 |
| 2965 | 27966722 (5909, 5910) | | | UNCLASSIFIED | 1020 |
| 2966 | 13506838 (5911, 5912) | | | UNCLASSIFIED | 1022 |
| 2967 | 20442033 (5913, 5914) | | | UNCLASSIFIED | 1020 |
| 2968 | 34405095 (5917, 5918) | | | UNCLASSIFIED | 1035 |
| 2969 | 82337919 (5921, 5922) | | | UNCLASSIFIED | 1001 |
| 2970 | 79617558 (5927, 5928) | | | UNCLASSIFIED | 1001, 1027, 1041, 1051 |
| 2971 | 17943756 (5937, 5938) | | | UNCLASSIFIED | 1022 |
| 2972 | 17302549 (5943, 5944) | | | UNCLASSIFIED | 1041 |
| 2973 | 91253982 (5951, 5952) | | | UNCLASSIFIED | 1008 |
| 2974 | 79552301 (5953, 5954) | | | UNCLASSIFIED | 1015, 1035 |
| 2975 | 80419830 (5955, 5956) | | | UNCLASSIFIED | 1023, 1031 |
| 2976 | 65655877 (5959, 5960) | | | UNCLASSIFIED | 1051 |
| 2977 | 95293040 (5961, 5962) | | | UNCLASSIFIED | 1002, 1004, 1021, 1022, |
| | | | | | 1031, 1041 |
| 2978 | 69237168 (5969, 5970) | | | UNCLASSIFIED | 1019, 1043 |
| 2979 | 78473178 (5983, 5984) | | | UNCLASSIFIED | 1024 |
| 2980 | 94233942 (6005, 6006) | | | UNCLASSIFIED | 1002 |
| 2981 | 78755288 (6017, 6018) | | | UNCLASSIFIED | 1020 |
| 2982 | 78781759 (6025, 6026) | | | UNCLASSIFIED | 1006, 1051 |
| 2983 | 80249147 (6031, 6032) | | | UNCLASSIFIED | 1050 |
| 2984 | 10093452 (6041, 6042) | | | UNCLASSIFIED | 1035 |
| 2985 | 87897855 (6043, 6044) | | | UNCLASSIFIED | 1013, 1019, 1020, 1021, |
| | | | | | 1024 |
| 2986 | 46738367 (6051, 6052) | | | UNCLASSIFIED | 1030 |
| 2987 | 79860910 (6085, 6086) | | | UNCLASSIFIED | 1015, 1036 |
| 2988 | 39730975 (6097, 6098) | | | UNCLASSIFIED | 1024 |
| 2989 | 29438548 (6099, 6100) | | | UNCLASSIFIED | 1027 |
| 2990 | 20435652 (6123, 6124) | | | UNCLASSIFIED | 1020 |
| 2991 | 78375120 (6135, 6136) | | | UNCLASSIFIED | 1002 |
| 2992 | 20721829 (6139, 6140) | | | UNCLASSIFIED | 1004 |
| 2993 | 27980881 (6141, 6142) | | | UNCLASSIFIED | 1004 |
| 2994 | 79955526 (6147, 6148) | | | UNCLASSIFIED | 1035 |
| 2995 | 80422939 (6151, 6152) | | | UNCLASSIFIED | 1023 |
| 2996 | 39549162 (6157, 6158) | | | UNCLASSIFIED | 1035 |
| 2997 | 36828436 (6165, 6166) | | | UNCLASSIFIED | 1051 |
| 2998 | 78081039 (6183, 6184) | | | UNCLASSIFIED | 1034 |
| 2999 | 78798321 (6191, 6192) | | | UNCLASSIFIED | 1021 |
| 3000 | 79450459 (6193, 6194) | | | UNCLASSIFIED | 1014, 1027 |
| 3001 | 80026748 (6209, 6210) | | | UNCLASSIFIED | 1003 |
| 3002 | 46849679 (6221, 6222) | | | UNCLASSIFIED | 1026 |
| 3003 | 80048336 (6223, 6224) | | | UNCLASSIFIED | 1022, 1035 |
| 3004 | 17960896 (6237, 6238) | | | UNCLASSIFIED | 1002 |
| 3005 | 17299889 (6249, 6250) | | | UNCLASSIFIED | 1036 |
| 3006 | 79631360 (6253, 6254) | | | UNCLASSIFIED | 1002, 1006, 1031, 1041, |
| | | | | | 1051 |
| 3007 | 30675647 (6261, 6262) | | | UNCLASSIFIED | 1035 |
| 3008 | 13518952 (6263, 6264) | | | UNCLASSIFIED | 1022 |
| 3009 | 66259287 (6281, 6282) | | | UNCLASSIFIED | 1008 |
| 3010 | 19647813 (6285, 6286) | | | UNCLASSIFIED | 1021 |
| 3011 | 20453705 (6301, 6302) | | | UNCLASSIFIED | 1022 |
| 3012 | 79902410 (6303, 6304) | | | UNCLASSIFIED | 1015 |
| 3013 | 27931275 (6305, 6306) | | | UNCLASSIFIED | 1020 |
| 3014 | 54693932 (6315, 6316) | | | UNCLASSIFIED | 1038 |
| 3015 | 90999120 (6317, 6318) | | | UNCLASSIFIED | 1018 |
| 3016 | 65484158 (6325, 6326) | | | UNCLASSIFIED | 1051 |
| 3017 | 20477502 (6331, 6332) | | | UNCLASSIFIED | 1020 |
| 3018 | 79559129 (6347, 6348) | | | UNCLASSIFIED | 1035 |
| 3019 | 55926174 (6359, 6360) | | | UNCLASSIFIED | 1019 |
| 3020 | 13517862 (6369, 6370) | | | UNCLASSIFIED | 1022 |
| 3021 | 20224774 (6379, 6380) | | | UNCLASSIFIED | 1008 |
| 3022 | 35103193 (6381, 6382) | | | UNCLASSIFIED | 1022 |
| 3023 | 11685173 (6389, 6390) | | | UNCLASSIFIED | 1014 |
| 3024 | 86685348 (6393, 6394) | | | UNCLASSIFIED | 1026 |
| 3025 | 88094407 (6395, 6396) | | | UNCLASSIFIED | 1004 |
| 3026 | 80086844 (6407, 6408) | | | UNCLASSIFIED | 1031 |
| 3027 | 17251202 (6411, 6412) | | | UNCLASSIFIED | 1041 |
| 3028 | 78176813 (6419, 6420) | | | UNCLASSIFIED | 1051 |
| 3029 | 55772356 (6435, 6436) | | | UNCLASSIFIED | 1019 |
| 3030 | 21145996 (6443, 6444) | | | UNCLASSIFIED | 1031 |
| 3031 | 94316383 (6445, 6446) | | | UNCLASSIFIED | 1041 |
| 3032 | 21392707 (6451, 6452) | | | UNCLASSIFIED | 1020 |
| 3033 | 77575168 (6475, 6476) | | | UNCLASSIFIED | 1008 |
| 3034 | 46872028 (8483, 6484) | | | UNCLASSIFIED | 1034 |
| 3035 | 78792118 (6487, 6488) | | | UNCLASSIFIED | 1015, 1038, 1041 |
| 3036 | 13503334 (6503, 6504) | | | UNCLASSIFIED | 1003 |
| 3037 | 79557475 (6509, 6510) | | | UNCLASSIFIED | 1001, 1015 |
| 3038 | 85808026 (6533, 6534) | | | UNCLASSIFIED | 1035, 1051 |
| 3039 | 10869938 (6565, 6566) | | | UNCLASSIFIED | 1028 |
| 3040 | 47656841 (6579, 6580) | | | UNCLASSIFIED | 1026, 1050 |
| 3041 | 78186634 (6589, 6590) | | | UNCLASSIFIED | 1020 |
| 3042 | 27965668 (6599, 6600) | | | UNCLASSIFIED | 1050 |
| 3043 | 20296469 (6601, 6602) | | | UNCLASSIFIED | 1031 |
| 3044 | 29470716 (6603, 6604) | | | UNCLASSIFIED | 1020 |
| 3045 | 27848604 (6623, 6624) | | | UNCLASSIFIED | 1008 |
| 3046 | 11618229 (6625, 6626) | | | UNCLASSIFIED | 1022 |
| 3047 | 20705372 (6629, 6630) | | | UNCLASSIFIED | 1020 |
| 3048 | 17678569 (6631, 6632) | | | UNCLASSIFIED | 1006 |
| 3049 | 36996838 (6639, 6640) | | | UNCLASSIFIED | 1001 |
| 3050 | 80231041 (6653, 6654) | | | UNCLASSIFIED | 1003, 1004, 1008, 1015, |
| | | | | | 1026 |
| 3051 | 11101673 (6657, 6658) | | | UNCLASSIFIED | 1004 |
| 3052 | 78956581 (6661, 6662) | | | UNCLASSIFIED | 1027 |
| 3053 | 13513193 (6665, 6666 | | | UNCLASSIFIED | 1022 |
| 3054 | 16554697 (6723, 6724) | | | UNCLASSIFIED | 1021 |
| 3055 | 65695673 (6725, 6726) | | | UNCLASSIFIED | 1035 |
| 3056 | 79856323 (6739, 6740) | | | UNCLASSIFIED | 1015 |
| 3057 | 55658308 (6745, 6746) | | | UNCLASSIFIED | 1019 |
| 3058 | 17930585 (6749, 6750) | | | UNCLASSIFIED | 1021 |
| 3059 | 78093908 (6755, 6756) | | | UNCLASSIFIED | 1030 |
| 3060 | 80500815 (6775, 6776) | | | UNCLASSIFIED | 1010, 1050, 1055 |
| 3061 | 27966001 (6779, 6780) | | | UNCLASSIFIED | 1031 |
| 3062 | 65878974 (6785, 6786) | | | UNCLASSIFIED | 1014 |
| 3063 | 21429156 (6787, 6788) | | | UNCLASSIFIED | 1020 |
| 3064 | 47654581 (6791, 6792) | | | UNCLASSIFIED | 1026 |
| 3065 | 17876791 (6799, 6800) | | | UNCLASSIFIED | 1022 |
| 3066 | 55996267 (6809, 6810) | | | UNCLASSIFIED | 1024 |
| 3067 | 46778724 (6811, 6812) | | | UNCLASSIFIED | 1019 |
| 3068 | 65447753 (6825, 6826) | | | UNCLASSIFIED | 1046 |
| 3069 | 80500325 (6839, 6840) | | | UNCLASSIFIED | 1010 |
| 3070 | 30264538 (6849, 6850) | | | UNCLASSIFIED | 1024 |
| 3071 | 51994325 (6875, 6876) | | | UNCLASSIFIED | 1033 |
| 3072 | 11799469 (6887, 6888) | | | UNCLASSIFIED | 1023 |
| 3073 | 52204302 (6899, 6900) | | | UNCLASSIFIED | 1037 |
| 3074 | 46849293 (6915, 6916) | | | UNCLASSIFIED | 1026 |
| 3075 | 20620141 (6949, 6950) | | | UNCLASSIFIED | 1020 |
| 3076 | 65656389 (6963, 6964) | | | UNCLASSIFIED | 1051 |
| 3077 | 19897778 (6977, 6978) | | | UNCLASSIFIED | 1004 |
| 3078 | 17898426 (6981, 6982) | | | UNCLASSIFIED | 1041 |
| 3079 | 16410802 (6983, 6984) | | | UNCLASSIFIED | 1027 |
| 3080 | 78941320 (6985, 6986) | | | UNCLASSIFIED | 1020, 1036 |
| 3081 | 20286852 (6987, 6988) | | | UNCLASSIFIED | 1031 |
| 3082 | 55770575 (6991, 6992) | | | UNCLASSIFIED | 1021 |
| 3083 | 78945845 (7007, 7008) | | | UNCLASSIFIED | 1006 |
| 3084 | 12921525 (7015, 7016) | | | UNCLASSIFIED | 1003 |
| 3085 | 65496189 (7045, 7046) | | | UNCLASSIFIED | 1021 |
| 3086 | 79632486 (7069, 7070) | | | UNCLASSIFIED | 1002, 1023 |
| 3087 | 17960030 (7081, 7082) | | | UNCLASSIFIED | 1021 |
| 3088 | 78971362 (7165, 7166) | | | UNCLASSIFIED | 1006 |
| 3089 | 11384396 (7169, 7170) | | | UNCLASSIFIED | 1014 |
| 3090 | 33103430 (7219, 7220) | | | UNCLASSIFIED | 1024 |
| 3091 | 20438888 (7223, 7224) | | | UNCLASSIFIED | 1022 |
| 3092 | 79436062 (7227, 7228) | | | UNCLASSIFIED | 1008 |
| 3093 | 52417339 (7235, 7236) | | | UNCLASSIFIED | 1033 |
| 3094 | 77600143 (7253, 7254) | | | UNCLASSIFIED | 1008 |
| 3095 | 8239643 (7267, 7268) | | | UNCLASSIFIED | 1020 |
| 3096 | 20467332 (7287, 7288) | | | UNCLASSIFIED | 1008 |
| 3097 | 25256962 (7313, 7314) | | | UNCLASSIFIED | 1006 |
| 3098 | 79440837 (7317, 7318) | | | UNCLASSIFIED | 1020 |
| 3099 | 10049030 (7319, 7320) | | | UNCLASSIFIED | 1021 |
| 3100 | 55406866 (7341, 7342) | | | UNCLASSIFIED | 1019 |
| 3101 | 11765194 (7343, 7344) | | | UNCLASSIFIED | 1020 |
| 3102 | 36521536 (7345, 7346) | | | UNCLASSIFIED | 1026 |
| 3103 | 55778544 (7353, 7354) | | | UNCLASSIFIED | 1039 |
| 3104 | 80218979 (7355, 7356) | | | UNCLASSIFIED | 1003, 1020 |
| 3105 | 80231372 (7373, 7374) | | | UNCLASSIFIED | 1020 |
| 3106 | 16494088 (7381, 7382) | | | UNCLASSIFIED | 1006 |
| 3107 | 35049221 (7389, 7390) | | | UNCLASSIFIED | 1027 |
| 3108 | 28130270 (7391, 7392) | | | UNCLASSIFIED | 1023 |
| 3109 | 27850077 (7397, 7398) | | | UNCLASSIFIED | 1008 |
| 3110 | 27981953 (7409, 7410) | | | UNCLASSIFIED | 1020 |
| 3111 | 88097857 (7425, 7426) | | | UNCLASSIFIED | 1016 |
| 3112 | 29466792 (7429, 7430) | | | UNCLASSIFIED | 1020 |
| 3113 | 87467657 (7433, 7434) | | | UNCLASSIFIED | 1001, 1004, 1010, 1014, |
| | | | | | 1015, 1016, 1027, 1031 |
| 3114 | 47652650 (7455, 7456) | | | UNCLASSIFIED | 1026 |
| 3115 | 79260338 (7481, 7482) | | | UNCLASSIFIED | 1002, 1020, 1021, 1024 |
| 3116 | 79846868 (7491, 7492) | | | UNCLASSIFIED | 1004, 1022 |
| 3117 | 95006559 (7493, 7494) | | | UNCLASSIFIED | 1001, 1022, 1041, 1051 |
| 3118 | 65690426 (7495, 7496) | | | UNCLASSIFIED | 1041, 1046, 1051 |
| 3119 | 65852425 (7497, 7498) | | | UNCLASSIFIED | 1035 |
| 3120 | 13085439 (7499, 7500) | | | UNCLASSIFIED | 1025 |
| 3121 | 15004014 (7505, 7506) | | | UNCLASSIFIED | 1022 |
| 3122 | 11102062 (7511, 7512) | | | UNCLASSIFIED | 1050 |
| 3123 | 39402420 (7519, 7520) | | | UNCLASSIFIED | 1022 |
| 3124 | 39707534 (7545, 7546) | | | UNCLASSIFIED | 1036 |
| 3125 | 19752152 (7547, 7548) | | | UNCLASSIFIED | 1014 |
| 3126 | 9358875 (7551, 7552) | | | UNCLASSIFIED | 1015 |
| 3127 | 25236002 (7555, 7556) | | | UNCLASSIFIED | 1002 |
| 3128 | 9857259 (7563, 7564) | | | UNCLASSIFIED | 1006 |
| 3129 | 15023397 (7567, 7568) | | | UNCLASSIFIED | 1022 |
| 3130 | 79581081 (7579, 7580) | | | UNCLASSIFIED | 1003 |
| 3131 | 21135804 (7587, 7588) | | | UNCLASSIFIED | 1020 |
| 3132 | 80249151 (7593, 7594) | | | UNCLASSIFIED | 1004, 1014, 1015, 1020, |
| | | | | | 1021, 1031 |
| 3133 | 66471968 (7601, 7602) | | | UNCLASSIFIED | 1026 |
| 3134 | 47656721 (7623, 7624) | | | UNCLASSIFIED | 1026 |
| 3135 | 95010698 (7627, 7628) | | | UNCLASSIFIED | 1015, 1021, 1022 |
| 3136 | 79581738 (7643, 7644) | | | UNCLASSIFIED | 1020 |
| 3137 | 55393466 (7655, 7656) | | | UNCLASSIFIED | 1000 |
| 3138 | 6344770 (7683, 7684) | | | UNCLASSIFIED | 1055 |
| 3139 | 77911852 (7685, 7686) | | | UNCLASSIFIED | 1033 |
| 3140 | 10170528 (7689, 7690) | | | UNCLASSIFIED | 1031 |
| 3141 | 11337885 (7695, 7696) | | | UNCLASSIFIED | 1031 |
| 3142 | 24143784 (7709, 7710) | | | UNCLASSIFIED | 1002 |
| 3143 | 27971022 (7713, 7714) | | | UNCLASSIFIED | 1020 |
| 3144 | 11412586 (7715, 7716) | | | UNCLASSIFIED | 1015 |
| 3145 | 56161955 (7717, 7718) | | | UNCLASSIFIED | 1015 |
| 3146 | 78071766 (7723, 7724) | | | UNCLASSIFIED | 1022 |
| 3147 | 11397949 (7747, 7748) | | | UNCLASSIFIED | 1020 |
| 3148 | 70144465 (7765, 7766) | | | UNCLASSIFIED | 1035, 1046 |
| 3149 | 25136585 (7767, 7768) | | | UNCLASSIFIED | 1024 |
| 3150 | 78985230 (7771, 7772) | | | UNCLASSIFIED | 1014 |
| 3151 | 17886105 (7785, 7786) | | | UNCLASSIFIED | 1022 |
| 3152 | 71332385 (7795, 7796) | | | UNCLASSIFIED | 1000 |
| 3153 | 79483561 (7807, 7808) | | | UNCLASSIFIED | 1004 |
| 3154 | 79964152 (7817, 7818) | | | UNCLASSIFIED | 1004, 1031 |
| 3155 | 24115868 (7851, 7852) | | | UNCLASSIFIED | 1036, 1041 |
| 3156 | 34761535 (7853, 7854) | | | UNCLASSIFIED | 1027 |
| 3157 | 90980639 (7857, 7858) | | | UNCLASSIFIED | 1018, 1035 |
| 3158 | 78460910 (7875, 7876) | | | UNCLASSIFIED | 1006 |
| 3159 | 71449936 (7879, 7880) | | | UNCLASSIFIED | 1010, 1021, 1051 |
| 3160 | 34080055 (7883, 7884) | | | UNCLASSIFIED | 1000 |
| 3161 | 27803085 (7887, 7888) | | | UNCLASSIFIED | 1031 |
| 3162 | 65876043 (7893, 7894) | | | UNCLASSIFIED | 1014, 1041 |
| 3163 | 20465672 (7915, 7916) | | | UNCLASSIFIED | 1008 |
| 3164 | 20629178 (7919, 7920) | | | UNCLASSIFIED | 1031 |
| 3165 | 42723578 (7927, 7928) | | | UNCLASSIFIED | 1000 |
| 3166 | 91231745 (7941, 7942) | | | UNCLASSIFIED | 1008, 1042 |
| 3167 | 79848821 (7957, 7958) | | | UNCLASSIFIED | 1051 |
| 3168 | 23291753 (7969, 7970) | | | UNCLASSIFIED | 1002 |
| 3169 | 28468723 (7973, 7974) | | | UNCLASSIFIED | 1027 |
| 3170 | 20435014 (7977, 7978) | | | UNCLASSIFIED | 1020, 1022 |
| 3171 | 20371520 (7983, 7984) | | | UNCLASSIFIED | 1003 |
| 3172 | 11753273 (8049, 8050) | | | UNCLASSIFIED | 1035 |
| 3173 | 79255059 (8055, 8056) | | | UNCLASSIFIED | 1035 |
| 3174 | 13076231 (8059, 8060) | | | UNCLASSIFIED | 1020, 1025 |
| 3175 | 29445415 (8069, 8070) | | | UNCLASSIFIED | 1020 |
| 3176 | 21412950 (8089, 8090) | | | UNCLASSIFIED | 1020 |
| 3177 | 20557853 (8093, 8094) | | | UNCLASSIFIED | 1055 |
| 3178 | 10297654 (8099, 8100) | | | UNCLASSIFIED | 1023 |
| 3179 | 79921444 (8119, 8120) | | | UNCLASSIFIED | 1006, 1035 |
| 3180 | 13046619 (8129, 8130) | | | UNCLASSIFIED | 1022 |
| 3181 | 80052603 (8131, 8132) | | | UNCLASSIFIED | 1008 |
| 3182 | 88094415 (8157, 8158) | | | UNCLASSIFIED | 1004 |
| 3183 | 94317560 (8175, 8176) | | | UNCLASSIFIED | 1014, 1041 |
| 3184 | 30536559 (8177, 8178) | | | UNCLASSIFIED | 1024 |
| 3185 | 79553582 (8179, 8180) | | | UNCLASSIFIED | 1036 |
| 3186 | 87566014 (8181, 8182) | | | UNCLASSIFIED | 1020, 1031 |
| 3187 | 87451679 (8189, 8190) | | | UNCLASSIFIED | 1016 |
| 3188 | 33189201 (8193, 8194) | | | UNCLASSIFIED | 1024 |
| 3189 | 21639748 (8199, 8200) | | | UNCLASSIFIED | 1021 |
| 3190 | 20732391 (8201, 8202) | | | UNCLASSIFIED | 1020 |
| 3191 | 66429440 (8203, 8204) | | | UNCLASSIFIED | 1022 |
| 3192 | 88097049 (8205, 8206) | | | UNCLASSIFIED | 1023 |
| 3193 | 78961840 (8215, 8216) | | | UNCLASSIFIED | 1015, 1036 |
| 3194 | 13527718 (8221, 8222) | | | UNCLASSIFIED | 1001 |
| 3195 | 86466492 (8231, 8232) | | | UNCLASSIFIED | 1026 |
| 3196 | 9896187 (8233, 8234) | | | UNCLASSIFIED | 1036 |
| 3197 | 20442005 (8243, 8244) | | | UNCLASSIFIED | 1022 |
| 3198 | 65885116 (8257, 8258) | | | UNCLASSIFIED | 1051 |
| 3199 | 9383513 (8269, 8270) | | | UNCLASSIFIED | 1015 |
| 3200 | 65686238 (8273, 8274) | | | UNCLASSIFIED | 1043 |
| 3201 | 11693032 (8301, 8302) | | | UNCLASSIFIED | 1004 |
| 3202 | 65976617 (8309, 8310) | | | UNCLASSIFIED | 1050 |
| 3203 | 30395700 (8311, 8312) | | | UNCLASSIFIED | 1024 |
| 3204 | 78977482 (8315, 8316) | | | UNCLASSIFIED | 1002 |
| 3205 | 11816872 (8325, 8326) | | | UNCLASSIFIED | 1003 |
| 3206 | 78299281 (8327, 8328) | | | UNCLASSIFIED | 1035 |
| 3207 | 71762302 (8329, 8330) | | | UNCLASSIFIED | 1021, 1033 |
| 3208 | 17659316 (8331, 8332) | | | UNCLASSIFIED | 1002 |
| 3209 | 36989187 (8347, 8348) | | | UNCLASSIFIED | 1014 |
| 3210 | 79475887 (8351, 8352) | | | UNCLASSIFIED | 1035 |
| 3211 | 52560939 (8353, 8354) | | | UNCLASSIFIED | 1010 |
| 3212 | 80212643 (8361, 8362) | | | UNCLASSIFIED | 1000, 1022, 1047 |
| 3213 | 30638999 (8363, 8364) | | | UNCLASSIFIED | 1006 |
| 3214 | 20293333 (8381, 8382) | | | UNCLASSIFIED | 1020 |
| 3215 | 97992805 (8393, 8394) | | | UNCLASSIFIED | 1002, 1031, 1041, 1051 |
| 3216 | 78678461 (8405, 8406) | | | UNCLASSIFIED | 1006 |
| 3217 | 79754436 (8407, 8408) | | | UNCLASSIFIED | 1008 |
| 3218 | 79852731 (8415, 8416) | | | UNCLASSIFIED | 1015 |
| 3219 | 20161651 (8425, 8426) | | | UNCLASSIFIED | 1008 |
| 3220 | 78157112 (8433, 8434) | | | UNCLASSIFIED | 1000, 1024 |
| 3221 | 43155046 (8451, 8452) | | | UNCLASSIFIED | 1034 |
| 3222 | 33202172 (8467, 8468) | | | UNCLASSIFIED | 1024 |
| 3223 | 18561492 (8471, 8472) | | | UNCLASSIFIED | 1001 |
| 3224 | 9384481 (8473, 8474) | | | UNCLASSIFIED | 1015 |
| 3225 | 47666079 (8479, 8480) | | | UNCLASSIFIED | 1051 |
| 3226 | 25154862 (8481, 8482) | | | UNCLASSIFIED | 1002 |
| 3227 | 56426884 (8483, 8484) | | | UNCLASSIFIED | 1002, 1035 |
| 3228 | 78781584 (8509, 8510) | | | UNCLASSIFIED | 1024 |
| 3229 | 80572331 (8511, 8512) | | | UNCLASSIFIED | 1002, 1006, 1015, 1020, |
| | | | | | 1021, 1036, 1055 |
| 3230 | 71093450 (8537, 8538) | | | UNCLASSIFIED | 1050 |
| 3231 | 57056549 (8545, 8546) | | | UNCLASSIFIED | 1051 |
| 3232 | 80246765 (8559, 8560) | | | UNCLASSIFIED | 1020 |
| 3233 | 71754055 (8567, 8568) | | | UNCLASSIFIED | 1006 |
| 3234 | 29262665 (8575, 8576) | | | UNCLASSIFIED | 1007 |
| 3235 | 56069130 (8595, 9596) | | | UNCLASSIFIED | 1019 |
| 3236 | 80084472 (8629, 8630) | | | UNCLASSIFIED | 1031 |
| 3237 | 10127784 (8661, 8662) | | | UNCLASSIFIED | 1015 |
| 3238 | 30664656 (8673, 8674) | | | UNCLASSIFIED | 1020 |
| 3239 | 55778583 (8697, 8698) | | | UNCLASSIFIED | 1039 |
| 3240 | 57304771 (8699, 8700) | | | UNCLASSIFIED | 1002, 1004, 1031 |
| 3241 | 30540756 (8719, 8720) | | | UNCLASSIFIED | 1024 |
| 3242 | 20710306 (8735, 8736) | | | UNCLASSIFIED | 1020 |
| 3243 | 78788014 (8739, 8740) | | | UNCLASSIFIED | 1007 |
| 3244 | 79831111 (8741, 8742) | | | UNCLASSIFIED | 1021 |
| 3245 | 80083760 (8751, 8752) | | | UNCLASSIFIED | 1001, 1015 |
| 3246 | 78261877 (8755, 8756) | | | UNCLASSIFIED | 1004 |
| 3247 | 36857037 (8769, 8770) | | | UNCLASSIFIED | 1014 |
| 3248 | 88068123 (8771, 8772) | | | UNCLASSIFIED | 1015, 1031 |
| 3249 | 80068172 (8783, 8784) | | | UNCLASSIFIED | 1020 |
| 3250 | 19879414 (8797, 8798) | | | UNCLASSIFIED | 1031 |
| 3251 | 78903885 (8801, 8802) | | | UNCLASSIFIED | 1041 |
| 3252 | 28775733 (8823, 8824) | | | UNCLASSIFIED | 1041 |
| 3253 | 91228881 (8859, 8860) | | | UNCLASSIFIED | 1008 |
| 3254 | 33204368 (8863, 8864) | | | UNCLASSIFIED | 1024 |
| 3255 | 23294321 (8869, 8870) | | | UNCLASSIFIED | 1021 |
| 3256 | 79854040 (8875, 8876) | | | UNCLASSIFIED | 1041 |
| 3257 | 28384303 (8887, 8888) | | | UNCLASSIFIED | 1041 |
| 3258 | 33097932 (8889, 8890) | | | UNCLASSIFIED | 1010 |
| 3259 | 80307643 (8891, 8892) | | | UNCLASSIFIED | 1002, 1003, 1004, 1006, |
| | | | | | 1015, 1021, 1025, 1026, |
| | | | | | 1031 |
| 3260 | 86475489 (8899, 8900) | | | UNCLASSIFIED | 1045 |
| 3261 | 33207420 (8919, 8920) | | | UNCLASSIFIED | 1024 |
| 3262 | 65878422 (8927, 8928) | | | UNCLASSIFIED | 1041 |
| 3263 | 10101835 (8935, 8936) | | | UNCLASSIFIED | 1014 |
| 3264 | 78784267 (8953, 8954) | | | UNCLASSIFIED | 1002, 1020 |
| 3265 | 51579562 (8959, 8960) | | | UNCLASSIFIED | 1033 |
| 3266 | 20372405 (8969, 8970) | | | UNCLASSIFIED | 1008 |
| 3267 | 79491061 (8973, 8974) | | | UNCLASSIFIED | 1003, 1004, 1021 |
| 3268 | 78438658 (8983, 8984) | | | UNCLASSIFIED | 1051 |
| 3269 | 20288783 (8995, 8996) | | | UNCLASSIFIED | 1020 |
| 3270 | 94324476 (9001, 9002) | | | UNCLASSIFIED | 1001, 1002, 1020 |
| 3271 | 79628162 (9011, 9012) | | | UNCLASSIFIED | 1036 |
| 3272 | 36830398 (9013, 9014) | | | UNCLASSIFIED | 1051 |
| 3273 | 19847912 (9023, 9024) | | | UNCLASSIFIED | 1031 |
| 3274 | 21414034 (9035, 9036) | | | UNCLASSIFIED | 1020 |
| 3275 | 10088537 (9047, 9048) | | | UNCLASSIFIED | 1015 |
| 3276 | 58092544 (9049, 9050) | | | UNCLASSIFIED | 1035 |
| 3277 | 46894759 (9059, 9060) | | | UNCLASSIFIED | 1017 |
| 3278 | 78501937 (9063, 9064) | | | UNCLASSIFIED | 1024 |
| 3279 | 42724351 (3, 4) | | | UNCLASSIFIED | 1034 |
| 3280 | 9671467 (11, 12) | | | UNCLASSIFIED | 1021 |
| 3281 | 10873421 (13, 14) | | | UNCLASSIFIED | 1003 |
| 3282 | 18558895 (19, 20) | | | UNCLASSIFIED | 1055 |
| 3283 | 16843354 (23, 24) | | | UNCLASSIFIED | 1004, 1010, 1022, 1028, |
| | | | | | 1036 |
| 3284 | 47652713 (27, 28) | | | UNCLASSIFIED | 1026 |
| 3285 | 21429024 (31, 32) | | | UNCLASSIFIED | 1050 |
| 3286 | 23209460 (37, 38) | | | UNCLASSIFIED | 1002 |
| 3287 | 65499601 (39, 40) | | | UNCLASSIFIED | 1035 |
| 3288 | 98186999 (43, 44) | | | UNCLASSIFIED | 1031 |
| 3289 | 85543986 (45, 46) | | | UNCLASSIFIED | 1002, 1003, 1004, 1006, |
| | | | | | 1014, 1020, 1022, 1024, |
| | | | | | 1025, 1031, 1035, 1036, |
| | | | | | 1041 |
| 3290 | 27976881 (49, 50) | | | UNCLASSIFIED | 1020 |
| 3291 | 20614060 (55, 56) | | | UNCLASSIFIED | 1008 |
| 3292 | 95012728 (59, 60) | | | UNCLASSIFIED | 1002, 1008 |
| 3293 | 65641290 (71, 72) | | | UNCLASSIFIED | 1038 |
| 3294 | 94662319 (73, 74) | | | UNCLASSIFIED | 1004, 1022, 1025, 1028, |
| | | | | | 1036, 1041 |
| 3295 | 29464115 (83, 84) | | | UNCLASSIFIED | 1035 |
| 3296 | 79753822 (95, 96) | | | UNCLASSIFIED | 1008 |
| 3297 | 79251277 (99, 100) | | | UNCLASSIFIED | 1022 |
| 3298 | 86665092 (101, 102) | | | UNCLASSIFIED | 1017 |
| 3299 | 95087962 (109, 110) | | | UNCLASSIFIED | 1041 |
| 3300 | 54526644 (113, 114) | | | UNCLASSIFIED | 1038 |
| 3301 | 79636146 (115, 116) | | | UNCLASSIFIED | 1020, 1021 |
| 3302 | 11294555 (119, 120) | | | UNCLASSIFIED | 1008 |
| 3303 | 46869437 (125, 126) | | | UNCLASSIFIED | 1034 |
| 3304 | 79844198 (133, 134) | | | UNCLASSIFIED | 1006 |
| 3305 | 54533896 (139, 140) | | | UNCLASSIFIED | 1038 |
| 3306 | 79813912 (151, 152) | | | UNCLASSIFIED | 1015, 1041 |
| 3307 | 86467083 (153, 154) | | | UNCLASSIFIED | 1026 |
| 3308 | 33197987 (159, 160) | | | UNCLASSIFIED | 1047 |
| 3309 | 35345394 (173, 174) | | | UNCLASSIFIED | 1024 |
| 3310 | 78736010 (179, 180) | | | UNCLASSIFIED | 1002 |
| 3311 | 27831430 (185, 186) | | | UNCLASSIFIED | 1008, 1022 |
| 3312 | 78160561 (189, 190) | | | UNCLASSIFIED | 1026 |
| 3313 | 66256488 (193, 194) | | | UNCLASSIFIED | 1014, 1024, 1033 |
| 3314 | 33181887 (215, 216) | | | UNCLASSIFIED | 1024 |
| 3315 | 55929027 (227, 228) | | | UNCLASSIFIED | 1019 |
| 3316 | 87116679 (231, 232) | | | UNCLASSIFIED | 1023 |
| 3317 | 78470548 (243, 244) | | | UNCLASSIFIED | 1041 |
| 3318 | 91235523 (249, 250) | | | UNCLASSIFIED | 1008 |
| 3319 | 29495855 (251, 252) | | | UNCLASSIFIED | 1035 |
| 3320 | 8010672 (253, 254) | | | UNCLASSIFIED | 1020 |
| 3321 | 20636023 (255, 256) | | | UNCLASSIFIED | 1003 |
| 3322 | 30494282 (259, 260) | | | UNCLASSIFIED | 1007 |
| 3323 | 80230515 (265, 266) | | | UNCLASSIFIED | 1007, 1020 |
| 3324 | 78060488 (267, 268) | | | UNCLASSIFIED | 1022 |
| 3325 | 79251749 (273, 274) | | | UNCLASSIFIED | 1002, 1015, 1026 |
| 3326 | 27356164 (289, 290) | | | UNCLASSIFIED | 1024 |
| 3327 | 98102065 (295, 296) | | | UNCLASSIFIED | 1035, 1041 |
| 3328 | 33454848 (297, 298) | | | UNCLASSIFIED | 1026 |
| 3329 | 19883215 (303, 304) | | | UNCLASSIFIED | 1001 |
| 3330 | 56151434 (311, 312) | | | UNCLASSIFIED | 1021 |
| 3331 | 55659811 (313, 314) | | | UNCLASSIFIED | 1039 |
| 3332 | 10344257 (319, 320) | | | UNCLASSIFIED | 1021 |
| 3333 | 80194905 (325, 326) | | | UNCLASSIFIED | 1020, 1031, 1035 |
| 3334 | 29508428 (329, 330) | | | UNCLASSIFIED | 1035 |
| 3335 | 497496 (337, 338) | | | UNCLASSIFIED | 1051 |
| 3336 | 65467524 (355, 356) | | | UNCLASSIFIED | 1051 |
| 3337 | 80079474 (357, 358) | | | UNCLASSIFIED | 1031 |
| 3338 | 94252313 (359, 360) | | | UNCLASSIFIED | 1036 |
| 3339 | 16549173 (361, 362) | | | UNCLASSIFIED | 1035 |
| 3340 | 30788088 (379, 380) | | | UNCLASSIFIED | 1006, 1015, 1020, 1024, |
| | | | | | 1036 |
| 3341 | 95010088 (381, 382) | | | UNCLASSIFIED | 1041 |
| 3342 | 46571395 (387, 388) | | | UNCLASSIFIED | 1026 |
| 3343 | 35344642 (389, 390) | | | UNCLASSIFIED | 1024 |
| 3344 | 66255543 (405, 406) | | | UNCLASSIFIED | 1014 |
| 3345 | 78276305 (407, 408) | | | UNCLASSIFIED | 1026 |
| 3346 | 10323955 (427, 428) | | | UNCLASSIFIED | 1023 |
| 3347 | 66429806 (429, 430) | | | UNCLASSIFIED | 1022 |
| 3348 | 6312912 (431, 432) | | | UNCLASSIFIED | 1055 |
| 3349 | 79200408 (433, 434) | | | UNCLASSIFIED | 1025 |
| 3350 | 71456050 (443, 444) | | | UNCLASSIFIED | 1024, 1041 |
| 3351 | 71059716 (449, 450) | | | UNCLASSIFIED | 1033 |
| 3352 | 25265924 (451, 452) | | | UNCLASSIFIED | 1036 |
| 3353 | 17086703 (453, 454) | | | UNCLASSIFIED | 1021 |
| 3354 | 49506863 (457, 458) | | | UNCLASSIFIED | 1033 |
| 3355 | 17299518 (459, 460) | | | UNCLASSIFIED | 1041 |
| 3356 | 65447083 (483, 484) | | | UNCLASSIFIED | 1014 |
| 3357 | 55007000 (497, 498) | | | UNCLASSIFIED | 1017 |
| 3358 | 55870673 (513, 514) | | | UNCLASSIFIED | 1022 |
| 3359 | 39527184 (519, 520) | | | UNCLASSIFIED | 1004 |
| 3360 | 79257303 (537, 538) | | | UNCLASSIFIED | 1041 |
| 3361 | 16511341 (549, 550) | | | UNCLASSIFIED | 1051 |
| 3362 | 66405131 (555, 556) | | | UNCLASSIFIED | 1022, 1051 |
| 3363 | 17894241 (561, 562) | | | UNCLASSIFIED | 1006 |
| 3364 | 78305241 (567, 568) | | | UNCLASSIFIED | 1017, 1047 |
| 3365 | 77556055 (577, 578) | | | UNCLASSIFIED | 1051 |
| 3366 | 78798198 (583, 584) | | | UNCLASSIFIED | 1024 |
| 3367 | 6433872 (591, 592) | | | UNCLASSIFIED | 1055 |
| 3368 | 19528852 (613, 614) | | | UNCLASSIFIED | 1031 |
| 3369 | 27972001 (617, 618) | | | UNCLASSIFIED | 1004 |
| 3370 | 94256159 (621, 622) | | | UNCLASSIFIED | 1006 |
| 3371 | 56068101 (623, 624) | | | UNCLASSIFIED | 1019 |
| 3372 | 80385281 (629, 630) | | | UNCLASSIFIED | 1002, 1026, 1041 |
| 3373 | 78465177 (631, 632) | | | UNCLASSIFIED | 1036 |
| 3374 | 25322681 (635, 636) | | | UNCLASSIFIED | 1002 |
| 3375 | 95002687 (647, 648) | | | UNCLASSIFIED | 1004 |
| 3376 | 33185125 (649, 650) | | | UNCLASSIFIED | 1024 |
| 3377 | 57301576 (655, 656) | | | UNCLASSIFIED | 1003, 1022, 1031 |
| 3378 | 25238790 (659, 660) | | | UNCLASSIFIED | 1015 |
| 3379 | 71803174 (663, 664) | | | UNCLASSIFIED | 1007 |
| 3380 | 29207301 (665, 666) | | | UNCLASSIFIED | 1006 |
| 3381 | 65682422 (667, 668) | | | UNCLASSIFIED | 1043, 1051 |
| 3382 | 79549187 (669, 670) | | | UNCLASSIFIED | 1035 |
| 3383 | 79843373 (687, 688) | | | UNCLASSIFIED | 1004, 1041 |
| 3384 | 95293067 (697, 698) | | | UNCLASSIFIED | 1020 |
| 3385 | 86693074 (703, 704) | | | UNCLASSIFIED | 1023 |
| 3386 | 55004490 (711, 712) | | | UNCLASSIFIED | 1017 |
| 3387 | 78705380 (713, 714) | | | UNCLASSIFIED | 1002 |
| 3388 | 33763694 (717, 718) | | | UNCLASSIFIED | 1024 |
| 3389 | 46682611 (721, 722) | | | UNCLASSIFIED | 1026 |
| 3390 | 85541861 (727, 728) | | | UNCLASSIFIED | 1051 |
| 3391 | 65466222 (729, 730) | | | UNCLASSIFIED | 1051 |
| 3392 | 42563061 (737, 738) | | | UNCLASSIFIED | 1000 |
| 3393 | 79862067 (743, 744) | | | UNCLASSIFIED | 1001, 1004, 1020, 1023, |
| | | | | | 1024, 1035 |
| 3394 | 10299479 (755, 756) | | | UNCLASSIFIED | 1035 |
| 3395 | 32714312 (783, 784) | | | UNCLASSIFIED | 1026 |
| 3396 | 17860909 (789, 790) | | | UNCLASSIFIED | 1023 |
| 3397 | 77936327 (791, 792) | | | UNCLASSIFIED | 1038 |
| 3398 | 79558046 (793, 794) | | | UNCLASSIFIED | 1023 |
| 3399 | 20289261 (805, 806) | | | UNCLASSIFIED | 1008 |
| 3400 | 46880097 (807, 808) | | | UNCLASSIFIED | 1038 |
| 3401 | 94675674 (811, 812 | | | UNCLASSIFIED | 1020 |
| 3402 | 80258532 (813, 814) | | | UNCLASSIFIED | 1004, 1036 |
| 3403 | 28390881 (821, 822) | | | UNCLASSIFIED | 1041 |
| 3404 | 65703884 (825, 826) | | | UNCLASSIFIED | 1035 |
| 3405 | 17679461 (829, 830) | | | UNCLASSIFIED | 1015 |
| 3406 | 65455792 (835, 836) | | | UNCLASSIFIED | 1014 |
| 3407 | 11686712 (839, 840) | | | UNCLASSIFIED | 1028 |
| 3408 | 20288463 (841, 842) | | | UNCLASSIFIED | 1031 |
| 3409 | 38066871 (849, 850) | | | UNCLASSIFIED | 1020 |
| 3410 | 86667171 (853, 854) | | | UNCLASSIFIED | 1026 |
| 3411 | 350711826 (893, 894) | | | UNCLASSIFIED | 1022 |
| 3412 | 77801266 (911, 912) | | | UNCLASSIFIED | 1051 |
| 3413 | 79209954 (915, 916) | | | UNCLASSIFIED | 1033, 1051 |
| 3414 | 77529068 (921, 922) | | | UNCLASSIFIED | 1035 |
| 3415 | 27360362 (925, 926) | | | UNCLASSIFIED | 1024 |
| 3416 | 86474069 (935, 936) | | | UNCLASSIFIED | 1051 |
| 3417 | 36621578 (945, 946) | | | UNCLASSIFIED | 1031 |
| 3418 | 20297495 (949, 950) | | | UNCLASSIFIED | 1020 |
| 3419 | 51626084 (953, 954) | | | UNCLASSIFIED | 1037 |
| 3420 | 56073185 (959, 960) | | | UNCLASSIFIED | 1019 |
| 3421 | 46866733 (961, 962) | | | UNCLASSIFIED | 1034 |
| 3422 | 65445597 (965, 966) | | | UNCLASSIFIED | 1035 |
| 3423 | 80083883 (975, 976) | | | UNCLASSIFIED | 1001 |
| 3424 | 66437277 (977, 978) | | | UNCLASSIFIED | 1022 |
| 3425 | 78392589 (979, 980) | | | UNCLASSIFIED | 1027 |
| 3426 | 78378977 (991, 992) | | | UNCLASSIFIED | 1006 |
| 3427 | 38215166 (997, 998) | | | UNCLASSIFIED | 1051 |
| 3428 | 77890053 (1005, 1006) | | | UNCLASSIFIED | 1033 |
| 3429 | 28987357 (1009, 1010) | | | UNCLASSIFIED | 1020 |
| 3430 | 79222721 (1013, 1014) | | | UNCLASSIFIED | 1022 |
| 3431 | 80369313 (1015, 1016) | | | UNCLASSIFIED | 1026 |
| 3432 | 55286477 (1025, 1026) | | | UNCLASSIFIED | 1026, 1050 |
| 3433 | 66153753 (1029, 1030) | | | UNCLASSIFIED | 1002 |
| 3434 | 79635191 (1043, 1044) | | | UNCLASSIFIED | 1021 |
| 3435 | 79563375 (1049, 1050) | | | UNCLASSIFIED | 1006, 1051 |
| 3436 | 55183771 (1051, 1052) | | | UNCLASSIFIED | 1017, 1031 |
| 3437 | 16738258 (1053, 1054) | | | UNCLASSIFIED | 1015 |
| 3438 | 33764350 (1061, 1062) | | | UNCLASSIFIED | 1024 |
| 3439 | 86469728 (1073, 1074) | | | UNCLASSIFIED | 1026 |
| 3440 | 71241798 (1077, 1078) | | | UNCLASSIFIED | 1000, 1051 |
| 3441 | 20291697 (1083, 1084) | | | UNCLASSIFIED | 1031 |
| 3442 | 80502240 (1091, 1092) | | | UNCLASSIFIED | 1004, 1010 |
| 3443 | 79574044 (1097, 1098) | | | UNCLASSIFIED | 1004, 1006, 1028, 1046 |
| 3444 | 35066728 (1101, 1102) | | | UNCLASSIFIED | 1051 |
| 3445 | 10347926 (1103, 1104) | | | UNCLASSIFIED | 1023 |
| 3446 | 65978393 (1107, 1108) | | | UNCLASSIFIED | 1051 |
| 3447 | 34751949 (1111, 1112) | | | UNCLASSIFIED | 1027 |
| 3448 | 78794381 (1127, 1128) | | | UNCLASSIFIED | 1024 |
| 3449 | 33099346 (1135, 1136) | | | UNCLASSIFIED | 1024 |
| 3450 | 11100234 (1149, 1150) | | | UNCLASSIFIED | 1020 |
| 3451 | 78945010 (1151, 1152) | | | UNCLASSIFIED | 1027 |
| 3452 | 47657283 (1153, 1154) | | | UNCLASSIFIED | 1026 |
| 3453 | 71219199 (1161, 1162) | | | UNCLASSIFIED | 1026, 1038 |
| 3454 | 78275056 (1163, 1164) | | | UNCLASSIFIED | 1035 |
| 3455 | 79392487 (1165, 1166) | | | UNCLASSIFIED | 1041, 1055 |
| 3456 | 85822780 (1171, 1172) | | | UNCLASSIFIED | 1045 |
| 3457 | 77876079 (1185, 1186) | | | UNCLASSIFIED | 1017 |
| 3458 | 3513946 (1215, 1216) | | | UNCLASSIFIED | 1047 |
| 3459 | 80028175 (1221, 1222) | | | UNCLASSIFIED | 1020, 1031 |
| 3460 | 77883606 (1223, 1224) | | | UNCLASSIFIED | 1019 |
| 3461 | 20466792 (1227, 1228) | | | UNCLASSIFIED | 1008 |
| 3462 | 94316162 (1229, 1230) | | | UNCLASSIFIED | 1002 |
| 3463 | 35011451 (1235, 1236) | | | UNCLASSIFIED | 1051 |
| 3464 | 27848590 (1241, 1242) | | | UNCLASSIFIED | 1008 |
| 3465 | 79245745 (1245, 1246) | | | UNCLASSIFIED | 1006, 1022 |
| 3466 | 86685014 (1247, 1248) | | | UNCLASSIFIED | 1011 |
| 3467 | 29272926 (1295, 1296) | | | UNCLASSIFIED | 1020 |
| 3468 | 7648895 (1329, 1330) | | | UNCLASSIFIED | 1031 |
| 3469 | 29455226 (1337, 1338) | | | UNCLASSIFIED | 1051 |
| 3470 | 65896870 (1339, 1340) | | | UNCLASSIFIED | 1051 |
| 3471 | 80491729 (1345, 1346) | | | UNCLASSIFIED | 1002, 1004, 1010, 1020, |
| | | | | | 1022, 1036, 1041 |
| 3472 | 65451093 (1349, 1350) | | | UNCLASSIFIED | 1014 |
| 3473 | 79316465 (1353, 1354) | | | UNCLASSIFIED | 1003 |
| 3474 | 80104668 (1371, 1372) | | | UNCLASSIFIED | 1004, 1021 |
| 3475 | 82401333 (1389, 1390) | | | UNCLASSIFIED | 1001, 1007 |
| 3476 | 46855997 (1393, 1394) | | | UNCLASSIFIED | 1034 |
| 3477 | 11614944 (1399, 1400) | | | UNCLASSIFIED | 1014 |
| 3478 | 37026044 (1417, 1418) | | | UNCLASSIFIED | 1035 |
| 3479 | 66395996 (1419, 1420) | | | UNCLASSIFIED | 1006 |
| 3480 | 65706567 (1421, 1422) | | | UNCLASSIFIED | 1035 |
| 3481 | 11759684 (1427, 1428) | | | UNCLASSIFIED | 1014 |
| 3482 | 78196286 (1453, 1454) | | | UNCLASSIFIED | 1020 |
| 3483 | 80032497 (1461, 1462) | | | UNCLASSIFIED | 1020 |
| 3484 | 71450178 (1467, 1468) | | | UNCLASSIFIED | 1024, 1026 |
| 3485 | 34089531 (1469, 1470) | | | UNCLASSIFIED | 1000 |
| 3486 | 25147774 (1479, 1480) | | | UNCLASSIFIED | 1003, 1024, 1031 |
| 3487 | 47660070 (1489, 1490) | | | UNCLASSIFIED | 1026 |
| 3488 | 78959481 (1501, 1502) | | | UNCLASSIFIED | 1002 |
| 3489 | 6604102 (1503, 1504) | | | UNCLASSIFIED | 1020 |
| 3490 | 30796416 (1515, 1516) | | | UNCLASSIFIED | 1026 |
| 3491 | 28489177 (1525, 1526) | | | UNCLASSIFIED | 1020 |
| 3492 | 79870716 (1539, 1540) | | | UNCLASSIFIED | 1010 |
| 3493 | 78268255 (1541, 1542) | | | UNCLASSIFIED | 1024 |
| 3494 | 65502187 (1543, 1544) | | | UNCLASSIFIED | 1014 |
| 3495 | 87111835 (1557, 1558) | | | UNCLASSIFIED | 1005 |
| 3496 | 94324185 (1561, 1562) | | | UNCLASSIFIED | 1008, 1026 |
| 3497 | 11102031 (1563, 1564) | | | UNCLASSIFIED | 1004 |
| 3498 | 86472892 (1581, 1582) | | | UNCLASSIFIED | 1026 |
| 3499 | 80221327 (1597, 1598) | | | UNCLASSIFIED | 1000, 1008, 1021, 1027, |
| | | | | | 1051 |
| 3500 | 46676949 (1603, 1604) | | | UNCLASSIFIED | 1031 |
| 3501 | 77810466 (1609, 1610) | | | UNCLASSIFIED | 1048 |
| 3502 | 70053099 (1613, 1614) | | | UNCLASSIFIED | 1006 |
| 3503 | 25245470 (1643, 1644) | | | UNCLASSIFIED | 1002 |
| 3504 | 86472610 (1657, 1658) | | | UNCLASSIFIED | 1026 |
| 3505 | 57533365 (1661, 1662) | | | UNCLASSIFIED | 1020, 1022 |
| 3506 | 21425891 (1663, 1664) | | | UNCLASSIFIED | 1020 |
| 3507 | 37032526 (1667, 1668) | | | UNCLASSIFIED | 1035 |
| 3508 | 80211645 (1677, 1678) | | | UNCLASSIFIED | 1002, 1003, 1041 |
| 3509 | 79965421 (1679, 1680) | | | UNCLASSIFIED | 1023 |
| 3510 | 85803482 (1685, 1686) | | | UNCLASSIFIED | 1035 |
| 3511 | 78890140 (1691, 1692) | | | UNCLASSIFIED | 1002 |
| 3512 | 46856760 (1697, 1698) | | | UNCLASSIFIED | 1026 |
| 3513 | 17896078 (1699, 1700) | | | UNCLASSIFIED | 1022 |
| 3514 | 71113036 (1703, 1704) | | | UNCLASSIFIED | 1022 |
| 3515 | 25313328 (1711, 1712) | | | UNCLASSIFIED | 1002 |
| 3516 | 79647472 (1719, 1720) | | | UNCLASSIFIED | 1035, 1051 |
| 3517 | 79233766 (1725, 1726) | | | UNCLASSIFIED | 1001, 1027 |
| 3518 | 65894261 (1743, 1744) | | | UNCLASSIFIED | 1035 |
| 3519 | 78517619 (1745, 1746) | | | UNCLASSIFIED | 1002 |
| 3520 | 35103654 (1747, 1748) | | | UNCLASSIFIED | 1031 |
| 3521 | 15034723 (1749, 1750) | | | UNCLASSIFIED | 1001 |
| 3522 | 91234953 (1753, 1754) | | | UNCLASSIFIED | 1008 |
| 3523 | 78780894 (1761, 1762) | | | UNCLASSIFIED | 1024 |
| 3524 | 54527322 (1777, 1778) | | | UNCLASSIFIED | 1038 |
| 3525 | 86471698 (1785, 1786) | | | UNCLASSIFIED | 1026 |
| 3526 | 86471898 (1787, 1788) | | | UNCLASSIFIED | 1026 |
| 3527 | 16339805 (1789, 1790) | | | UNCLASSIFIED | 1004 |
| 3528 | 20288566 (1803, 1804) | | | UNCLASSIFIED | 1031 |
| 3529 | 19528620 (1817, 1818) | | | UNCLASSIFIED | 1031 |
| 3530 | 21417734 (1827, 1828) | | | UNCLASSIFIED | 1008 |
| 3531 | 20707160 (1829, 1830) | | | UNCLASSIFIED | 1031 |
| 3532 | 78969555 (1835, 1836) | | | UNCLASSIFIED | 1006, 1027 |
| 3533 | 33204480 (1837, 1838) | | | UNCLASSIFIED | 1024 |
| 3534 | 32594339 (1845, 1846) | | | UNCLASSIFIED | 1031 |
| 3535 | 79000057 (1851, 1852) | | | UNCLASSIFIED | 1006, 1036, 1041 |
| 3536 | 80245704 (1873, 1874) | | | UNCLASSIFIED | 1003, 1004, 1008, 1020, |
| | | | | | 1022, 1026, 1031, 1037, |
| | | | | | 1050 |
| 3537 | 80021840 (1897, 1898) | | | UNCLASSIFIED | 1022 |
| 3538 | 6344649 (1905, 1906) | | | UNCLASSIFIED | 1055 |
| 3539 | 10365642 (1911, 1912) | | | UNCLASSIFIED | 1021 |
| 3540 | 79576319 (1913, 1914) | | | UNCLASSIFIED | 1022 |
| 3541 | 78901994 (1923, 1924) | | | UNCLASSIFIED | 1002 |
| 3542 | 34124779 (1941, 1942) | | | UNCLASSIFIED | 1024 |
| 3543 | 39515024 (1951, 1952) | | | UNCLASSIFIED | 1003 |
| 3544 | 36753955 (1955, 1956) | | | UNCLASSIFIED | 1031 |
| 3545 | 78400559 (1961, 1962) | | | UNCLASSIFIED | 1014, 1035 |
| 3546 | 65999502 (1965, 1966) | | | UNCLASSIFIED | 1035 |
| 3547 | 70435185 (1967, 1968) | | | UNCLASSIFIED | 1034 |
| 3548 | 16495691 (1979, 1980) | | | UNCLASSIFIED | 1006 |
| 3549 | 78424546 (2005, 2006) | | | UNCLASSIFIED | 1027 |
| 3550 | 13088889 (2007, 2008) | | | UNCLASSIFIED | 1022 |
| 3551 | 20745150 (2019, 2020) | | | UNCLASSIFIED | 1020 |
| 3552 | 78700930 (2029, 2030) | | | UNCLASSIFIED | 1015 |
| 3553 | 50101893 (2031, 2032) | | | UNCLASSIFIED | 1033 |
| 3554 | 79637678 (2043, 2044) | | | UNCLASSIFIED | 1035 |
| 3555 | 78835952 (2045, 2046) | | | UNCLASSIFIED | 1002 |
| 3556 | 25268638 (2049, 2050) | | | UNCLASSIFIED | 1002 |
| 3557 | 78965178 (2059, 2060) | | | UNCLASSIFIED | 1035 |
| 3558 | 47660075 (2061, 2062) | | | UNCLASSIFIED | 1026 |
| 3559 | 77588768 (2063, 2064) | | | UNCLASSIFIED | 1046 |
| 3560 | 27348381 (2069, 2070) | | | UNCLASSIFIED | 1020 |
| 3561 | 71820957 (2071, 2072) | | | UNCLASSIFIED | 1006 |
| 3562 | 94321408 (2075, 2076) | | | UNCLASSIFIED | 1002 |
| 3563 | 40388961 (2099, 2100) | | | UNCLASSIFIED | 1034 |
| 3564 | 80077640 (2107, 2108) | | | UNCLASSIFIED | 1021, 1031 |
| 3565 | 19497683 (2123, 2124) | | | UNCLASSIFIED | 1041 |
| 3566 | 65698339 (2127, 2128) | | | UNCLASSIFIED | 1035 |
| 3567 | 80023430 (2143, 2144) | | | UNCLASSIFIED | 1031 |
| 3568 | 66725795 (2145, 2146) | | | UNCLASSIFIED | 1022 |
| 3569 | 20471498 (2147, 2148) | | | UNCLASSIFIED | 1020 |
| 3570 | 23331040 (2155, 2156) | | | UNCLASSIFIED | 1004 |
| 3571 | 16552632 (2159, 2160) | | | UNCLASSIFIED | 1027 |
| 3572 | 46853123 (2193, 2194) | | | UNCLASSIFIED | 1034 |
| 3573 | 54539457 (2197, 2198) | | | UNCLASSIFIED | 1038 |
| 3574 | 55306950 (2203, 2204) | | | UNCLASSIFIED | 1017 |
| 3575 | 77674116 (2209, 2210) | | | UNCLASSIFIED | 1051 |
| 3576 | 54540370 (2213, 2214) | | | UNCLASSIFIED | 1038 |
| 3577 | 25140270 (2217, 2218) | | | UNCLASSIFIED | 1002 |
| 3578 | 79183020 (2227, 2228) | | | UNCLASSIFIED | 1022 |
| 3579 | 80226712 (2229, 2230) | | | UNCLASSIFIED | 1002, 1003 |
| 3580 | 80578671 (2233, 2234) | | | UNCLASSIFIED | 1000, 1003, 1020, 1031, |
| | | | | | 1005 |
| 3581 | 79427132 (2241, 2242) | | | UNCLASSIFIED | 1015 |
| 3582 | 32124925 (2243, 2244) | | | UNCLASSIFIED | 1004 |
| 3583 | 57922978 (2245, 2246) | | | UNCLASSIFIED | 1032 |
| 3584 | 65468355 (2261, 2262) | | | UNCLASSIFIED | 1051 |
| 3585 | 94675635 (2263, 2264) | | | UNCLASSIFIED | 1028 |
| 3586 | 66255338 (2273, 2274) | | | UNCLASSIFIED | 1035 |
| 3587 | 79246404 (2275, 2276) | | | UNCLASSIFIED | 1036 |
| 3588 | 65465523 (2281, 2282) | | | UNCLASSIFIED | 1035 |
| 3589 | 29497553 (2283, 2284) | | | UNCLASSIFIED | 1007 |
| 3590 | 65506232 (2289, 2290) | | | UNCLASSIFIED | 1014 |
| 3591 | 78157770 (2291, 2292) | | | UNCLASSIFIED | 1026 |
| 3592 | 79618063 (2299, 2300) | | | UNCLASSIFIED | 1002, 1015, 1020, 1022, |
| | | | | | 1041 |
| 3593 | 17578951 (2307, 2308) | | | UNCLASSIFIED | 1002 |
| 3594 | 10873638 (2309, 22310) | | | UNCLASSIFIED | 1035 |
| 3595 | 8237944 (2315, 2316) | | | UNCLASSIFIED | 1020 |
| 3596 | 46877462 (2319, 2320) | | | UNCLASSIFIED | 1033 |
| 3597 | 30192098 (2323, 2324) | | | UNCLASSIFIED | 1007 |
| 3598 | 46731026 (2333, 2334) | | | UNCLASSIFIED | 1034 |
| 3599 | 57764132 (2335, 2336) | | | UNCLASSIFIED | 1024, 1048 |
| 3600 | 35096121 (2343, 2344) | | | UNCLASSIFIED | 1047 |
| 3601 | 86666401 (2351, 2352) | | | UNCLASSIFIED | 1026 |
| 3602 | 1499122 (2355, 2356) | | | UNCLASSIFIED | 1022 |
| 3603 | 94140988 (2361, 2362) | | | UNCLASSIFIED | 1041 |
| 3604 | 78235983 (2369, 2370) | | | UNCLASSIFIED | 1047 |
| 3605 | 99415891 (2371, 2372) | | | UNCLASSIFIED | 1004, 1018 |
| 3606 | 78902302 (2375, 2376) | | | UNCLASSIFIED | 1041 |
| 3607 | 86681344 (2383, 2384) | | | UNCLASSIFIED | 1017 |
| 3608 | 79202243 (2385, 2386) | | | UNCLASSIFIED | 1003 |
| 3609 | 46806955 (2389, 2390) | | | UNCLASSIFIED | 1038 |
| 3610 | 32740192 (2393, 2394) | | | UNCLASSIFIED | 1047 |
| 3611 | 16372470 (2395, 2396) | | | UNCLASSIFIED | 1051 |
| 3612 | 91228291 (2405, 2406) | | | UNCLASSIFIED | 1008 |
| 3613 | 91228399 (2407, 2408) | | | UNCLASSIFIED | 1008 |
| 3614 | 52563483 (2413, 2414) | | | UNCLASSIFIED | 1002 |
| 3615 | 52485072 (2417, 2418) | | | UNCLASSIFIED | 1033 |
| 3616 | 65697481 (2431, 2432) | | | UNCLASSIFIED | 1019, 1035 |
| 3617 | 78192673 (2435, 2436) | | | UNCLASSIFIED | 1026 |
| 3618 | 39587464 (2457, 2458) | | | UNCLASSIFIED | 1020 |
| 3619 | 65658841 (2461, 2462) | | | UNCLASSIFIED | 1014, 1022, 1026, 1051 |
| 3620 | 11019628 (2471, 2472) | | | UNCLASSIFIED | 1001 |
| 3621 | 46886993 (2477, 2478) | | | UNCLASSIFIED | 1038 |
| 3622 | 71045449 (2479, 2480) | | | UNCLASSIFIED | 1001, 1026, 1031 |
| 3623 | 86380160 (2483, 2484) | | | UNCLASSIFIED | 1050 |
| 3624 | 79421125 (2485, 2486) | | | UNCLASSIFIED | 1004 |
| 3625 | 28381776 (2493, 2494) | | | UNCLASSIFIED | 1002, 1006 |
| 3626 | 78746032 (2495, 2496) | | | UNCLASSIFIED | 1041 |
| 3627 | 78068597 (2523, 2524) | | | UNCLASSIFIED | 1001 |
| 3628 | 79607546 (2533, 2534) | | | UNCLASSIFIED | 1002, 1031, 1038, 1051 |
| 3629 | 30394319 (2553, 2554) | | | UNCLASSIFIED | 1047 |
| 3630 | 47651920 (2555, 2556) | | | UNCLASSIFIED | 1026 |
| 3631 | 20476250 (2565, 2566) | | | UNCLASSIFIED | 1020 |
| 3632 | 34754593 (2567, 2568) | | | UNCLASSIFIED | 1022 |
| 3633 | 78193010 (2573, 2574) | | | UNCLASSIFIED | 1031 |
| 3634 | 39736987 (2583, 2584) | | | UNCLASSIFIED | 1034 |
| 3635 | 30455830 (2585, 2586) | | | UNCLASSIFIED | 1027 |
| 3636 | 81216486 (2603, 2604) | | | UNCLASSIFIED | 1001, 1002, 1003, 1004 |
| | | | | | 1006, 1007, 1408, 1010 |
| | | | | | 1014, 1015, 1020, 1021 |
| | | | | | 1022, 1023, 1024, 1025 |
| | | | | | 1028, 1031, 1035, 1036 |
| | | | | | 1041, 1046, 1051 |
| 3637 | 77702253 (2609, 2610) | | | UNCLASSIFIED | 1035 |
| 3638 | 49127631 (2615, 2616) | | | UNCLASSIFIED | 1037 |
| 3639 | 9873274 (2623, 2624) | | | UNCLASSIFIED | 1041 |
| 3640 | 78379444 (2629, 2630) | | | UNCLASSIFIED | 1024 |
| 3641 | 80063267 (2633, 2634) | | | UNCLASSIFIED | 1006, 1015, 1021, 1031 |
| 3642 | 80428354 (2635, 2636) | | | UNCLASSIFIED | 1022, 1023, 1041 |
| 3643 | 35604627 (2637, 2638) | | | UNCLASSIFIED | 1026 |
| 3644 | 86668031 (2645, 2646) | | | UNCLASSIFIED | 1026 |
| 3645 | 65447043 (2653, 2654) | | | UNCLASSIFIED | 1035 |
| 3646 | 55779287 (2655, 2656) | | | UNCLASSIFIED | 1019 |
| 3647 | 30808157 (2663, 2664) | | | UNCLASSIFIED | 1047 |
| 3648 | 80193155 (2675, 2676) | | | UNCLASSIFIED | 1035, 1055 |
| 3649 | 79843527 (2677, 2678) | | | UNCLASSIFIED | 1006 |
| 3650 | 46849653 (2683, 2684) | | | UNCLASSIFIED | 1026 |
| 3651 | 29351909 (2685, 2686) | | | UNCLASSIFIED | 1041 |
| 3652 | 87913234 (2691, 2692) | | | UNCLASSIFIED | 1016, 1020 |
| 3653 | 27974005 (2697, 2698) | | | UNCLASSIFIED | 1020 |
| 3654 | 78715780 (2719, 2720) | | | UNCLASSIFIED | 1006, 1007, 1015, 1024 |
| 3655 | 78786371 (2729, 2730) | | | UNCLASSIFIED | 1020 |
| 3656 | 66255506 (2739, 2740) | | | UNCLASSIFIED | 1014 |
| 3657 | 57567671 (2745, 2746) | | | UNCLASSIFIED | 1021 |
| 3658 | 16836431 (2749, 2750) | | | UNCLASSIFIED | 1021 |
| 3659 | 80218369 (2765, 2766) | | | UNCLASSIFIED | 1001, 1020, 1022 |
| 3660 | 37055937 (2767, 2768) | | | UNCLASSIFIED | 1027 |
| 3661 | 19644342 (2769, 2770) | | | UNCLASSIFIED | 1031 |
| 3662 | 25339900 (2787, 2788) | | | UNCLASSIFIED | 1002 |
| 3663 | 78236643 (2789, 2790) | | | UNCLASSIFIED | 1024 |
| 3664 | 34761626 (2797, 2798) | | | UNCLASSIFIED | 1027 |
| 3665 | 78678904 (2807, 2808) | | | UNCLASSIFIED | 1007 |
| 3666 | 20557833 (2809, 2810) | | | UNCLASSIFIED | 1055 |
| 3667 | 94139859 (2813, 2814) | | | UNCLASSIFIED | 1041 |
| 3668 | 65486699 (2815, 2816) | | | UNCLASSIFIED | 1051 |
| 3669 | 80071788 (2819, 2820) | | | UNCLASSIFIED | 1020 |
| 3670 | 77724257 (2823, 2824) | | | UNCLASSIFIED | 1051 |
| 3671 | 79635735 (2825, 2826) | | | UNCLASSIFIED | 1035 |
| 3672 | 55003597 (2827, 2828) | | | UNCLASSIFIED | 1017 |
| 3673 | 51621004 (2829, 2830) | | | UNCLASSIFIED | 1033 |
| 3674 | 71033720 (2831, 2832) | | | UNCLASSIFIED | 1034, 1038 |
| 3675 | 34386965 (2833, 2834) | | | UNCLASSIFIED | 1024 |
| 3676 | 80032829 (2837, 2838) | | | UNCLASSIFIED | 1050 |
| 3677 | 79462591 (2851, 2852) | | | UNCLASSIFIED | 1014, 1031 |
| 3678 | 78185398 (2859, 2860) | | | UNCLASSIFIED | 1022, 1050 |
| 3679 | 80193829 (2861, 2862) | | | UNCLASSIFIED | 1031, 1050, 1055 |
| 3680 | 80502697 (2873, 2874) | | | UNCLASSIFIED | 1003, 1004, 1008, 1010 |
| | | | | | 1024, 1055 |
| 3681 | 28465931 (2875, 2876) | | | UNCLASSIFIED | 1002 |
| 3682 | 29965879 (2877, 2878) | | | UNCLASSIFIED | 1022 |
| 3683 | 27366914 (2881, 2882) | | | UNCLASSIFIED | 1020 |
| 3684 | 50869757 (2901, 2902) | | | UNCLASSIFIED | 1033 |
| 3685 | 79555889 (2907, 2908) | | | UNCLASSIFIED | 1021 |
| 3686 | 79248537 (2909, 2910) | | | UNCLASSIFIED | 1022 |
| 3687 | 66398017 (2911, 2912) | | | UNCLASSIFIED | 1007 |
| 3688 | 79640057 (2917, 2918) | | | UNCLASSIFIED | 1035 |
| 3689 | 54534082 (2923, 2924) | | | UNCLASSIFIED | 1022, 1038 |
| 3690 | 54526857 (2935, 2936) | | | UNCLASSIFIED | 1033 |
| 3691 | 21660945 (2939, 2940) | | | UNCLASSIFIED | 1022 |
| 3692 | 36857751 (2945, 2946) | | | UNCLASSIFIED | 1014 |
| 3693 | 55389743 (2949, 2950) | | | UNCLASSIFIED | 1027 |
| 3694 | 46668352 (2953, 2954) | | | UNCLASSIFIED | 1020 |
| 3695 | 34251001 (2961, 2962) | | | UNCLASSIFIED | 1024 |
| 3696 | 11703373 (2967, 2968) | | | UNCLASSIFIED | 1028 |
| 3697 | 46874237 (2973, 2974) | | | UNCLASSIFIED | 1034 |
| 3698 | 37816708 (2975, 2976) | | | UNCLASSIFIED | 1055 |
| 3699 | 35907210 (2981, 2982) | | | UNCLASSIFIED | 1037 |
| 3700 | 78745265 (2983, 2984) | | | UNCLASSIFIED | 1002, 1033 |
| 3701 | 79858904 (3007, 3008) | | | UNCLASSIFIED | 1038 |
| 3702 | 78085425 (3009, 3010) | | | UNCLASSIFIED | 1047 |
| 3703 | 78206639 (3017, 3018) | | | UNCLASSIFIED | 1014 |
| 3704 | 65874974 (3021, 3022) | | | UNCLASSIFIED | 1051 |
| 3705 | 28471465 (3023, 3024) | | | UNCLASSIFIED | 1006 |
| 3706 | 78746666 (3037, 3038) | | | UNCLASSIFIED | 1006 |
| 3707 | 46889682 (3047, 3048) | | | UNCLASSIFIED | 1034 |
| 3708 | 78948378 (3057, 3058) | | | UNCLASSIFIED | 1036 |
| 3709 | 66396594 (3065, 3066) | | | UNCLASSIFIED | 1006, 1031 |
| 3710 | 78196786 (3067, 3068) | | | UNCLASSIFIED | 1031 |
| 3711 | 16383784 (3071, 3072) | | | UNCLASSIFIED | 1002 |
| 3712 | 47657734 (3077, 3078) | | | UNCLASSIFIED | 1026 |
| 3713 | 79447045 (3105, 3106) | | | UNCLASSIFIED | 1020 |
| 3714 | 33183407 (3109, 3110) | | | UNCLASSIFIED | 1024 |
| 3715 | 86664985 (3115, 3116) | | | UNCLASSIFIED | 1017, 1034 |
| 3716 | 10301850 (3119, 3120) | | | UNCLASSIFIED | 1023 |
| 3717 | 79248020 (3125, 3126) | | | UNCLASSIFIED | 1022 |
| 3718 | 35933247 (3127, 3128) | | | UNCLASSIFIED | 1050 |
| 3719 | 99140168 (3141, 3142) | | | UNCLASSIFIED | 1007, 1014, 1017, 1022, |
| | | | | | 1051 |
| 3720 | 11694990 (3145, 3146) | | | UNCLASSIFIED | 1035 |
| 3721 | 33694297 (3147, 3148) | | | UNCLASSIFIED | 1024 |
| 3722 | 78953221 (3151, 3152) | | | UNCLASSIFIED | 1014, 1027 |
| 3723 | 94326081 (3155, 3156) | | | UNCLASSIFIED | 1041 |
| 3724 | 46742595 (3157, 3158) | | | UNCLASSIFIED | 1030 |
| 3725 | 16426623 (3159, 3160) | | | UNCLASSIFIED | 1051 |
| 3726 | 90993570 (3161, 3162) | | | UNCLASSIFIED | 1018 |
| 3727 | 30661131 (3169, 3170) | | | UNCLASSIFIED | 1020 |
| 3728 | 11175015 (3175, 3176) | | | UNCLASSIFIED | 1003 |
| 3729 | 19885104 (3187, 3188) | | | UNCLASSIFIED | 1001 |
| 3730 | 29694374 (3199, 3200) | | | UNCLASSIFIED | 1024 |
| 3731 | 24143481 (3201, 3202) | | | UNCLASSIFIED | 1002 |
| 3732 | 71101817 (3205, 3206) | | | UNCLASSIFIED | 1022 |
| 3733 | 65656895 (3215, 3216) | | | UNCLASSIFIED | 1035 |
| 3734 | 18436662 (3217, 3218) | | | UNCLASSIFIED | 1031 |
| 3735 | 41672398 (3239, 3240) | | | UNCLASSIFIED | 1034 |
| 3736 | 78052422 (3241, 3242) | | | UNCLASSIFIED | 1034 |
| 3737 | 80183969 (3243, 3244) | | | UNCLASSIFIED | 1019, 1020 |
| 3738 | 20476882 (3245, 3246) | | | UNCLASSIFIED | 1020 |
| 3739 | 17895353 (3247, 3248) | | | UNCLASSIFIED | 1002 |
| 3740 | 38905365 (3261, 3262) | | | UNCLASSIFIED | 1014 |
| 3741 | 86685857 (3269, 3270) | | | UNCLASSIFIED | 1026 |
| 3742 | 65468591 (3283, 3284) | | | UNCLASSIFIED | 1051 |
| 3743 | 25131527 (3289, 3290) | | | UNCLASSIFIED | 1002 |
| 3744 | 10094373 (3291, 3292) | | | UNCLASSIFIED | 1015 |
| 3745 | 30505782 (3305, 3306) | | | UNCLASSIFIED | 1006 |
| 3746 | 27836190 (3311, 3312) | | | UNCLASSIFIED | 1004 |
| 3747 | 80423912 (3319, 3320) | | | UNCLASSIFIED | 1001, 1002, 1003, 1004, |
| | | | | | 1020, 1021, 1023, 1031, |
| | | | | | 1036, 1041 |
| 3748 | 10249295 (3333, 3334) | | | UNCLASSIFIED | 1035 |
| 3749 | 78680744 (3337, 3338) | | | UNCLASSIFIED | 1002 |
| 3750 | 35103649 (3343, 3344) | | | UNCLASSIFIED | 1031 |
| 3751 | 34899964 (3353, 3354) | | | UNCLASSIFIED | 1051 |
| 3752 | 78360120 (3371, 3372) | | | UNCLASSIFIED | 1006, 1024 |
| 3753 | 30632411 (3379, 3380) | | | UNCLASSIFIED | 1006 |
| 3754 | 35024176 (3391, 3392) | | | UNCLASSIFIED | 1051 |
| 3755 | 16457561 (3405, 3406) | | | UNCLASSIFIED | 1035 |
| 3756 | 65645505 (3407, 3408) | | | UNCLASSIFIED | 1038 |
| 3757 | 79798841 (3415, 3416) | | | UNCLASSIFIED | 1002, 1006, 1021, 1036 |
| 3758 | 80203744 (3443, 3444) | | | UNCLASSIFIED | 1014 |
| 3759 | 71750789 (3447, 3448) | | | UNCLASSIFIED | 1002 |
| 3760 | 77802440 (3467, 3468) | | | UNCLASSIFIED | 1022 |
| 3761 | 8359544 (3469, 3470) | | | UNCLASSIFIED | 1003 |
| 3762 | 10225872 (3493, 3494) | | | UNCLASSIFIED | 1036 |
| 3763 | 46894999 (3495, 3496) | | | UNCLASSIFIED | 1039 |
| 3764 | 11389279 (3503, 3504) | | | UNCLASSIFIED | 1022 |
| 3765 | 71045975 (3507, 3508) | | | UNCLASSIFIED | 1034 |
| 3766 | 80087698 (3509, 3510) | | | UNCLASSIFIED | 1008, 1051 |
| 3767 | 79579134 (3511, 3512) | | | UNCLASSIFIED | 1004 |
| 3768 | 79919013 (3515, 3516) | | | UNCLASSIFIED | 1021, 1050 |
| 3769 | 80066001 (3523, 3524) | | | UNCLASSIFIED | 1004, 1008 |
| 3770 | 29646977 (3525, 3526) | | | UNCLASSIFIED | 1022 |
| 3771 | 33188974 (3533, 3534) | | | UNCLASSIFIED | 1024 |
| 3772 | 35009714 (3543, 3544) | | | UNCLASSIFIED | 1031 |
| 3773 | 20467302 (3547, 3548) | | | UNCLASSIFIED | 1008 |
| 3774 | 17931649 (3555, 3556) | | | UNCLASSIFIED | 1002 |
| 3775 | 27361421 (3567, 3568) | | | UNCLASSIFIED | 1021 |
| 3776 | 10299797 (3577, 3578) | | | UNCLASSIFIED | 1035 |
| 3777 | 79557652 (3583, 3584) | | | UNCLASSIFIED | 1035 |
| 3778 | 30169120 (3585, 3586) | | | UNCLASSIFIED | 1035 |
| 3779 | 78374939 (3589, 3590) | | | UNCLASSIFIED | 1002, 1015, 1021 |
| 3780 | 30787151 (3593, 3594) | | | UNCLASSIFIED | 1024 |
| 3781 | 78804617 (3595, 3596) | | | UNCLASSIFIED | 1027 |
| 3782 | 66367508 (3603, 3604) | | | UNCLASSIFIED | 1050 |
| 3783 | 78373112 (3615, 3616) | | | UNCLASSIFIED | 1015, 1022 |
| 3784 | 11413985 (3621, 3622) | | | UNCLASSIFIED | 1015 |
| 3785 | 95009017 (3623, 3624) | | | UNCLASSIFIED | 1002 |
| 3786 | 20723468 (3635, 3636) | | | UNCLASSIFIED | 1022 |
| 3787 | 79816682 (3637, 3638) | | | UNCLASSIFIED | 1015, 1035 |
| 3788 | 51577874 (3645, 3646) | | | UNCLASSIFIED | 1033 |
| 3789 | 10846444 (3647, 3648) | | | UNCLASSIFIED | 1001 |
| 3790 | 25260882 (3649, 3650) | | | UNCLASSIFIED | 1002 |
| 3791 | 28389918 (3651, 3652) | | | UNCLASSIFIED | 1051 |
| 3792 | 79318955 (3667, 3668) | | | UNCLASSIFIED | 1031 |
| 3793 | 16283681 (3671, 3672) | | | UNCLASSIFIED | 1022 |
| 3794 | 94138495 (3689, 3690) | | | UNCLASSIFIED | 1002 |
| 3795 | 41672409 (3691, 3692) | | | UNCLASSIFIED | 1034 |
| 3796 | 78836180 (3703, 3704) | | | UNCLASSIFIED | 1006 |
| 3797 | 65659899 (3711, 3712) | | | UNCLASSIFIED | 1051 |
| 3798 | 34112159 (3721, 3722) | | | UNCLASSIFIED | 1026 |
| 3799 | 78956714 (3739, 3740) | | | UNCLASSIFIED | 1036 |
| 3800 | 27842055 (3743, 3744) | | | UNCLASSIFIED | 1020 |
| 3801 | 33187894 (3745, 3746) | | | UNCLASSIFIED | 1024 |
| 3802 | 28001618 (3755, 3756) | | | UNCLASSIFIED | 1051 |
| 3803 | 27967726 (3759, 3760) | | | UNCLASSIFIED | 1050 |
| 3804 | 85546206 (3765, 3766) | | | UNCLASSIFIED | 1014, 1017, 1051 |
| 3805 | 65475958 (3771, 3772) | | | UNCLASSIFIED | 1035 |
| 3806 | 57118245 (3779, 3780) | | | UNCLASSIFIED | 1051 |
| 3807 | 86474081 (3783, 3784) | | | UNCLASSIFIED | 1051 |
| 3808 | 11618663 (3787, 3788) | | | UNCLASSIFIED | 1022 |
| 3809 | 70118997 (3789, 3790) | | | UNCLASSIFIED | 1007, 1014, 1041, 1051 |
| 3810 | 27980874 (3795, 3796) | | | UNCLASSIFIED | 1004 |
| 3811 | 79242234 (3811, 3812) | | | UNCLASSIFIED | 1021 |
| 3812 | 79959340 (3817, 3818) | | | UNCLASSIFIED | 1015 |
| 3813 | 27824068 (3827, 3828) | | | UNCLASSIFIED | 1022 |
| 3814 | 28822150 (3837, 3838) | | | UNCLASSIFIED | 1015, 1031 |
| 3815 | 56660811 (3845, 3846) | | | UNCLASSIFIED | 1039 |
| 3816 | 65661203 (3849, 3850) | | | UNCLASSIFIED | 1038 |
| 3817 | 78490606 (3853, 3854) | | | UNCLASSIFIED | 1027 |
| 3818 | 46849024 (3855, 3856) | | | UNCLASSIFIED | 1034 |
| 3819 | 33202221 (3875, 3876) | | | UNCLASSIFIED | 1024 |
| 3820 | 78678308 (3887, 3888) | | | UNCLASSIFIED | 1020 |
| 3821 | 78725201 (3889, 3890) | | | UNCLASSIFIED | 1006 |
| 3822 | 70624070 (3907, 3908) | | | UNCLASSIFIED | 1033 |
| 3823 | 65643267 (3911, 3912) | | | UNCLASSIFIED | 1014 |
| 3824 | 65469565 (3933, 3934) | | | UNCLASSIFIED | 1035 |
| 3825 | 65655468 (3935, 3936) | | | UNCLASSIFIED | 1022 |
| 3826 | 78914614 (3943, 3944) | | | UNCLASSIFIED | 1051 |
| 3827 | 65896155 (3951, 3952) | | | UNCLASSIFIED | 1006, 1051 |
| 3828 | 46772096 (3953, 3954) | | | UNCLASSIFIED | 1031, 1034 |
| 3829 | 18596560 (3965, 3966) | | | UNCLASSIFIED | 1035 |
| 3830 | 99389270 (3971, 3972) | | | UNCLASSIFIED | 1008 |
| 3831 | 28348241 (3973, 3974) | | | UNCLASSIFIED | 1022 |
| 3832 | 65891364 (3977, 3978) | | | UNCLASSIFIED | 1051 |
| 3833 | 30152221 (4001, 4002) | | | UNCLASSIFIED | 1035 |
| 3834 | 78492065 (4007, 4008) | | | UNCLASSIFIED | 1027 |
| 3835 | 79642523 (4029, 4030) | | | UNCLASSIFIED | 1035 |
| 3836 | 79861856 (4031, 4032) | | | UNCLASSIFIED | 1035 |
| 3837 | 79871329 (4033, 4034) | | | UNCLASSIFIED | 1036, 1041 |
| 3838 | 87890504 (4035, 4036) | | | UNCLASSIFIED | 1013 |
| 3839 | 25242118 (4057, 4058) | | | UNCLASSIFIED | 1041 |
| 3840 | 27968176 (4061, 4062) | | | UNCLASSIFIED | 1004 |
| 3841 | 78784754 (4075, 4076) | | | UNCLASSIFIED | 1007 |
| 3842 | 79408074 (4079, 4080) | | | UNCLASSIFIED | 1014 |
| 3843 | 56333036 (4081, 4082) | | | UNCLASSIFIED | 1043 |
| 3844 | 94239501 (4087, 4088) | | | UNCLASSIFIED | 1008, 1022 |
| 3845 | 80026097 (4095, 4096) | | | UNCLASSIFIED | 1022 |
| 3846 | 87456342 (4137, 4138) | | | UNCLASSIFIED | 1023 |
| 3847 | 30198108 (4155, 4156) | | | UNCLASSIFIED | 1024 |
| 3848 | 20710997 (4159, 4160) | | | UNCLASSIFIED | 1004 |
| 3849 | 55402030 (4165, 4166) | | | UNCLASSIFIED | 1017 |
| 3850 | 65465045 (4171, 4172) | | | UNCLASSIFIED | 1035 |
| 3851 | 57458168 (4185, 4186) | | | UNCLASSIFIED | 1051 |
| 3852 | 78728168 (4193, 4194) | | | UNCLASSIFIED | 1015, 1017, 1019, 1022, |
| | | | | | 1031, 1041, 1051 |
| 3853 | 13000688 (4207, 4208) | | | UNCLASSIFIED | 1028 |
| 3854 | 80236710 (4211, 4212) | | | UNCLASSIFIED | 1004, 1006 |
| 3855 | 17710366 (4221, 4222) | | | UNCLASSIFIED | 1041 |
| 3856 | 20700094 (4223, 4224) | | | UNCLASSIFIED | 1031 |
| 3857 | 80434504 (4227, 4228) | | | UNCLASSIFIED | 1001, 1002, 1015, 1020, |
| | | | | | 1035 |
| 3858 | 32711850 (4229, 4230) | | | UNCLASSIFIED | 1026 |
| 3859 | 86672681 (4231, 4232) | | | UNCLASSIFIED | 1045 |
| 3860 | 16842159 (4247, 4248) | | | UNCLASSIFIED | 1002 |
| 3861 | 82391545 (4251, 4252) | | | UNCLASSIFIED | 1001, 1015, 1036 |
| 3862 | 46907814 (4257, 4258) | | | UNCLASSIFIED | 1051 |
| 3863 | 16543537 (4259, 4260) | | | UNCLASSIFIED | 1041 |
| 3864 | 33694101 (4265, 4266) | | | UNCLASSIFIED | 1024 |
| 3865 | 65668963 (4267, 4268) | | | UNCLASSIFIED | 1014 |
| 3866 | 35018781 (4271, 4272) | | | UNCLASSIFIED | 1031 |
| 3867 | 51234646 (4273, 4274) | | | UNCLASSIFIED | 1033 |
| 3868 | 78732638 (4275, 4276) | | | UNCLASSIFIED | 1024 |
| 3869 | 20449012 (4285, 4286) | | | UNCLASSIFIED | 1020 |
| 3870 | 52563141 (4291, 4292) | | | UNCLASSIFIED | 1020 |
| 3871 | 57764140 (4299, 4300) | | | UNCLASSIFIED | 1048 |
| 3872 | 30817381 (4303, 4304) | | | UNCLASSIFIED | 1041 |
| 3873 | 87114380 (4311, 4312) | | | UNCLASSIFIED | 1023 |
| 3874 | 29686126 (4313, 4314) | | | UNCLASSIFIED | 1035 |
| 3875 | 34098920 (4315, 4316) | | | UNCLASSIFIED | 1022 |
| 3876 | 43152714 (4319, 4320) | | | UNCLASSIFIED | 1001 |
| 3877 | 65883519 (4323, 4324) | | | UNCLASSIFIED | 1051 |
| 3878 | 16836263 (4335, 4336) | | | UNCLASSIFIED | 1021 |
| 3879 | 86475758 (4341, 4342) | | | UNCLASSIFIED | 1045 |
| 3880 | 42943293 (4349, 4350) | | | UNCLASSIFIED | 1001 |
| 3881 | 65882415 (4353, 4354) | | | UNCLASSIFIED | 1051 |
| 3882 | 30420553 (4355, 4356) | | | UNCLASSIFIED | 1022, 1051 |
| 3883 | 29347345 (4365, 4366) | | | UNCLASSIFIED | 1006 |
| 3884 | 86679852 (4381, 4382) | | | UNCLASSIFIED | 1005 |
| 3885 | 17110686 (4391, 4392) | | | UNCLASSIFIED | 1027 |
| 3886 | 11103257 (4397, 4398) | | | UNCLASSIFIED | 1020 |
| 3887 | 77544403 (4399, 4400) | | | UNCLASSIFIED | 1014 |
| 3888 | 10173631 (4439, 4440) | | | UNCLASSIFIED | 1021 |
| 3889 | 79847279 (4445, 4446) | | | UNCLASSIFIED | 1036 |
| 3890 | 20621925 (4447, 4448) | | | UNCLASSIFIED | 1003 |
| 3891 | 66442017 (4449, 4450) | | | UNCLASSIFIED | 1004, 1010, 1020, 1021, |
| | | | | | 1025, 1028, 1031 |
| 3892 | 25312469 (4459, 4460) | | | UNCLASSIFIED | 1020 |
| 3893 | 79599936 (4469, 4470) | | | UNCLASSIFIED | 1002 |
| 3894 | 65695299 (4477, 4478) | | | UNCLASSIFIED | 1035 |
| 3895 | 78741111 (4479, 4480) | | | UNCLASSIFIED | 1015 |
| 3896 | 91231091 (4483, 4484) | | | UNCLASSIFIED | 1008 |
| 3897 | 65701383 (4485, 4486) | | | UNCLASSIFIED | 1008 |
| 3898 | 11690101 (4487, 4488) | | | UNCLASSIFIED | 1028 |
| 3899 | 28800584 (4489, 4490) | | | UNCLASSIFIED | 1015 |
| 3900 | 11686830 (4503, 4504) | | | UNCLASSIFIED | 1028 |
| 3901 | 54858787 (4513, 4514) | | | UNCLASSIFIED | 1017 |
| 3902 | 78257578 (4521, 4522) | | | UNCLASSIFIED | 1024 |
| 3903 | 77897196 (4525, 4526) | | | UNCLASSIFIED | 1033 |
| 3904 | 13031713 (4527, 4528) | | | UNCLASSIFIED | 1003 |
| 3905 | 87890824 (4531, 4532) | | | UNCLASSIFIED | 1013 |
| 3906 | 79636785 (4535, 4536) | | | UNCLASSIFIED | 1021 |
| 3907 | 15028427 (4541, 4542) | | | UNCLASSIFIED | 1051 |
| 3908 | 65466325 (4547, 4548) | | | UNCLASSIFIED | 1051 |
| 3909 | 42723088 (4551, 4552) | | | UNCLASSIFIED | 1000 |
| 3910 | 10017074 (4555, 4556) | | | UNCLASSIFIED | 1021 |
| 3911 | 71808623 (4557, 4558) | | | UNCLASSIFIED | 1007, 1020 |
| 3912 | 66464838 (4569, 4570) | | | UNCLASSIFIED | 1054 |
| 3913 | 19741094 (4575, 4576) | | | UNCLASSIFIED | 1023 |
| 3914 | 3323644 (4593, 4594) | | | UNCLASSIFIED | 1035 |
| 3915 | 79876205 (4595, 4596) | | | UNCLASSIFIED | 1015 |
| 3916 | 65700316 (4609, 4610) | | | UNCLASSIFIED | 1035 |
| 3917 | 29469285 (4675, 4676) | | | UNCLASSIFIED | 1035 |
| 3918 | 28955148 (4697, 4698) | | | UNCLASSIFIED | 1024 |
| 3919 | 79966209 (4705, 4706) | | | UNCLASSIFIED | 1002, 1023 |
| 3920 | 79462800 (4709, 4710) | | | UNCLASSIFIED | 1031 |
| 3921 | 10873043 (4713, 4714) | | | UNCLASSIFIED | 1020 |
| 3922 | 9858716 (4715, 4716) | | | UNCLASSIFIED | 1036 |
| 3923 | 85816681 (4721, 4722) | | | UNCLASSIFIED | 1017 |
| 3924 | 80066607 (4723, 4724) | | | UNCLASSIFIED | 1020 |
| 3925 | 86476727 (4729, 4730) | | | UNCLASSIFIED | 1026 |
| 3926 | 90990455 (4733, 4734) | | | UNCLASSIFIED | 1006, 1018, 1019, 1051, |
| | | | | | 1055 |
| 3927 | 98421661 (4737, 4738) | | | UNCLASSIFIED | 1000, 1002, 1006, 1008, |
| | | | | | 1015, 1019, 1031, 1038 |
| 3928 | 28781284 (4753, 4754) | | | UNCLASSIFIED | 1024 |
| 3929 | 38883229 (4763, 4764) | | | UNCLASSIFIED | 1047, 1051 |
| 3930 | 78511398 (4775, 4776) | | | UNCLASSIFIED | 1038, 1051 |
| 3931 | 79604903 (4783, 4784) | | | UNCLASSIFIED | 1003 |
| 3932 | 35816017 (4791, 4792) | | | UNCLASSIFIED | 1024 |
| 3933 | 51617480 (4793, 4794) | | | UNCLASSIFIED | 1033 |
| 3934 | 77717021 (4801, 4802) | | | UNCLASSIFIED | 1014 |
| 3935 | 40382597 (4823, 4824) | | | UNCLASSIFIED | 1034 |
| 3936 | 78377539 (4825, 4826) | | | UNCLASSIFIED | 1041 |
| 3937 | 46774743 (4829, 4830) | | | UNCLASSIFIED | 1039 |
| 3938 | 65701385 (4833, 4834) | | | UNCLASSIFIED | 1035 |
| 3939 | 11795701 (4835, 4836) | | | UNCLASSIFIED | 1035 |
| 3940 | 16312090 (4837, 4838) | | | UNCLASSIFIED | 1051 |
| 3941 | 9939777 (4845, 4846) | | | UNCLASSIFIED | 1041 |
| 3942 | 79823597 (4857, 4858) | | | UNCLASSIFIED | 1017, 1021, 1041, 1051 |
| 3943 | 78049817 (4861, 4862) | | | UNCLASSIFIED | 1024 |
| 3944 | 33201780 (4863, 4864) | | | UNCLASSIFIED | 1024 |
| 3945 | 10840687 (4891, 4892) | | | UNCLASSIFIED | 1015 |
| 3946 | 27931141 (4895, 4896) | | | UNCLASSIFIED | 1020 |
| 3947 | 78527897 (4903, 4904) | | | UNCLASSIFIED | 1027 |
| 3948 | 78268274 (4915, 4916) | | | UNCLASSIFIED | 1024 |
| 3949 | 46894060 (4919, 4920) | | | UNCLASSIFIED | 1031 |
| 3950 | 79954324 (4921, 4922) | | | UNCLASSIFIED | 1023 |
| 3951 | 65979550 (4927, 4928) | | | UNCLASSIFIED | 1051 |
| 3952 | 80079455 (4931, 4932) | | | UNCLASSIFIED | 1031 |
| 3953 | 54534093 (4937, 4938) | | | UNCLASSIFIED | 1038 |
| 3954 | 20728393 (4939, 4940) | | | UNCLASSIFIED | 1004 |
| 3955 | 55506019 (4941, 4942) | | | UNCLASSIFIED | 1019 |
| 3956 | 78523668 (4943, 4944) | | | UNCLASSIFIED | 1006, 1026 |
| 3957 | 71104557 (4947, 4948) | | | UNCLASSIFIED | 1021 |
| 3958 | 20197541 (4955, 4956) | | | UNCLASSIFIED | 1022 |
| 3959 | 56334712 (4959, 4960) | | | UNCLASSIFIED | 1046 |
| 3960 | 55183444 (4977, 4978) | | | UNCLASSIFIED | 1017 |
| 3961 | 70450451 (4979, 4980) | | | UNCLASSIFIED | 1017 |
| 3962 | 66769028 (4985, 4986) | | | UNCLASSIFIED | 1046 |
| 3963 | 78235359 (4993, 4994) | | | UNCLASSIFIED | 1024 |
| 3964 | 16412431 (4995, 4996) | | | UNCLASSIFIED | 1002 |
| 3965 | 28394457 (4997, 4998) | | | UNCLASSIFIED | 1021 |
| 3966 | 30383089 (5013, 5014) | | | UNCLASSIFIED | 1014 |
| 3967 | 66393613 (5025, 5026) | | | UNCLASSIFIED | 1035 |
| 3968 | 34387080 (5029, 5030) | | | UNCLASSIFIED | 1024 |
| 3969 | 24121590 (5039, 5040) | | | UNCLASSIFIED | 1026 |
| 3970 | 32433483 (5041, 5042) | | | UNCLASSIFIED | 1010 |
| 3971 | 94141717 (5045, 5046) | | | UNCLASSIFIED | 1041 |
| 3972 | 25306744 (5055, 5056) | | | UNCLASSIFIED | 1020 |
| 3973 | 88476858 (5057, 5058) | | | UNCLASSIFIED | 1026 |
| 3974 | 78944624 (5059, 5060) | | | UNCLASSIFIED | 1014 |
| 3975 | 65670632 (5061, 5062) | | | UNCLASSIFIED | 1026 |
| 3976 | 13050562 (5073, 5074) | | | UNCLASSIFIED | 1022 |
| 3977 | 27844300 (5085, 5086) | | | UNCLASSIFIED | 1020 |
| 3978 | 39601978 (5089, 5090) | | | UNCLASSIFIED | 1021 |
| 3979 | 65653559 (5093, 5094) | | | UNCLASSIFIED | 1035 |
| 3980 | 80089370 (5099, 5100) | | | UNCLASSIFIED | 1003, 1022, 1024 |
| 3981 | 54534284 (5101, 5102) | | | UNCLASSIFIED | 1038 |
| 3982 | 33184707 (5105, 5106) | | | UNCLASSIFIED | 1024 |
| 3983 | 79634511 (5107, 5108) | | | UNCLASSIFIED | 1035 |
| 3984 | 86472313 (5113, 5114) | | | UNCLASSIFIED | 1017 |
| 3985 | 20439571 (5121, 5122) | | | UNCLASSIFIED | 1020 |
| 3986 | 33202592 (5133, 5134) | | | UNCLASSIFIED | 1024 |
| 3987 | 79478434 (5135, 5136) | | | UNCLASSIFIED | 1023 |
| 3988 | 79576204 (5141, 5142) | | | UNCLASSIFIED | 1001, 1014, 1031, 1047, |
| | | | | | 1050 |
| 3989 | 13522872 (5143, 5144) | | | UNCLASSIFIED | 1001 |
| 3990 | 66049527 (5147, 5148) | | | UNCLASSIFIED | 1005 |
| 3991 | 46848378 (5151, 5152) | | | UNCLASSIFIED | 1026 |
| 3992 | 78956043 (5155, 5156) | | | UNCLASSIFIED | 1006 |
| 3993 | 78305060 (5159, 5160) | | | UNCLASSIFIED | 1024 |
| 3994 | 78380191 (5163, 5164) | | | UNCLASSIFIED | 1024, 1050 |
| 3995 | 33189038 (5169, 5170) | | | UNCLASSIFIED | 1024 |
| 3996 | 79573868 (5185, 5186) | | | UNCLASSIFIED | 1001 |
| 3997 | 78317811 (5187, 5188) | | | UNCLASSIFIED | 1011 |
| 3998 | 78505531 (5191, 5192) | | | UNCLASSIFIED | 1020 |
| 3999 | 11798237 (5201, 5202) | | | UNCLASSIFIED | 1031 |
| 4000 | 35128761 (5207, 5208) | | | UNCLASSIFIED | 1010 |
| 4001 | 21433789 (5211, 5212) | | | UNCLASSIFIED | 1020 |
| 4002 | 25177609 (5213, 5214) | | | UNCLASSIFIED | 1003, 1004, 1021, 1031 |
| 4003 | 52563366 (5219, 5220) | | | UNCLASSIFIED | 1002 |
| 4004 | 30620920 (5227, 5228) | | | UNCLASSIFIED | 1020 |
| 4005 | 78825645 (5245, 5246) | | | UNCLASSIFIED | 1027 |
| 4006 | 80421656 (5255, 5256) | | | UNCLASSIFIED | 1001, 1003, 1006, 1020, |
| | | | | | 1023, 1041 |
| 4007 | 55187397 (5257, 5258) | | | UNCLASSIFIED | 1017 |
| 4008 | 77656677 (5271, 5272) | | | UNCLASSIFIED | 1014, 1022 |
| 4009 | 65691308 (5291, 5292) | | | UNCLASSIFIED | 1046 |
| 4010 | 27982125 (5293, 5294) | | | UNCLASSIFIED | 1050 |
| 4011 | 54695036 (5295, 5296) | | | UNCLASSIFIED | 1038 |
| 4012 | 79461884 (5313, 5314) | | | UNCLASSIFIED | 1031 |
| 4013 | 80389472 (5317, 5318) | | | UNCLASSIFIED | 1020, 1024, 1026 |
| 4014 | 30251469 (5319, 5320) | | | UNCLASSIFIED | 1041 |
| 4015 | 13513007 (5329, 5330) | | | UNCLASSIFIED | 1021, 1022 |
| 4016 | 56149302 (5333, 5334) | | | UNCLASSIFIED | 1006 |
| 4017 | 78095920 (5355, 5356) | | | UNCLASSIFIED | 1019 |
| 4018 | 46682434 (5365, 5366) | | | UNCLASSIFIED | 1026 |
| 4019 | 46690837 (5375, 5376) | | | UNCLASSIFIED | 1030 |
| 4020 | 12992450 (5377, 5378) | | | UNCLASSIFIED | 1022 |
| 4021 | 87466194 (5383, 5384) | | | UNCLASSIFIED | 1016 |
| 4022 | 39719598 (5387, 5388) | | | UNCLASSIFIED | 1031 |
| 4023 | 55310055 (5389, 5390) | | | UNCLASSIFIED | 1039 |
| 4024 | 33265615 (5393, 5394) | | | UNCLASSIFIED | 1000 |
| 4025 | 65885491 (5401, 5402) | | | UNCLASSIFIED | 1028 |
| 4026 | 32125784 (5421, 5422) | | | UNCLASSIFIED | 1004 |
| 4027 | 52376941 (5425, 5426) | | | UNCLASSIFIED | 1033 |
| 4028 | 33203507 (5431, 5432) | | | UNCLASSIFIED | 1024 |
| 4029 | 78978467 (5435, 5436) | | | UNCLASSIFIED | 1020, 1027, 1051 |
| 4030 | 11071319 (5443, 5444) | | | UNCLASSIFIED | 1004 |
| 4031 | 65890822 (5451, 5452) | | | UNCLASSIFIED | 1035 |
| 4032 | 29228414 (5469, 5470) | | | UNCLASSIFIED | 1027 |
| 4033 | 79584929 (5483, 5484) | | | UNCLASSIFIED | 1051 |
| 4034 | 66173703 (5497, 5498) | | | UNCLASSIFIED | 1014 |
| 4035 | 65674710 (5509, 5510) | | | UNCLASSIFIED | 1014 |
| 4036 | 85800185 (5513, 5514) | | | UNCLASSIFIED | 1023 |
| 4037 | 78670351 (5535, 5536) | | | UNCLASSIFIED | 1024 |
| 4038 | 10847716 (5539, 5540) | | | UNCLASSIFIED | 1001 |
| 4039 | 35144239 (5541, 5542) | | | UNCLASSIFIED | 1047 |
| 4040 | 6331065 (5581, 5562) | | | UNCLASSIFIED | 1055 |
| 4041 | 30235029 (5563, 5564) | | | UNCLASSIFIED | 1026 |
| 4042 | 94147686 (5569, 5570) | | | UNCLASSIFIED | 1041 |
| 4043 | 80225256 (5573, 5574) | | | UNCLASSIFIED | 1020 |
| 4044 | 94239307 (5581, 5582) | | | UNCLASSIFIED | 1023 |
| 4045 | 58213698 (5599, 5600) | | | UNCLASSIFIED | 1020 |
| 4046 | 65987181 (5601, 5602) | | | UNCLASSIFIED | 1051 |
| 4047 | 20554815 (5603, 5604) | | | UNCLASSIFIED | 1050 |
| 4048 | 80080228 (5619, 5620) | | | UNCLASSIFIED | 1020 |
| 4049 | 65655872 (5625, 5626) | | | UNCLASSIFIED | 1051 |
| 4050 | 78046862 (5631, 5632) | | | UNCLASSIFIED | 1024 |
| 4051 | 19740737 (5637, 5638) | | | UNCLASSIFIED | 1002 |
| 4052 | 79265109 (5643, 5644) | | | UNCLASSIFIED | 1005 |
| 4053 | 25136397 (5647, 5648) | | | UNCLASSIFIED | 1002 |
| 4054 | 65458428 (5657, 5658) | | | UNCLASSIFIED | 1051 |
| 4055 | 78303052 (5665, 5666) | | | UNCLASSIFIED | 1024 |
| 4056 | 66139535 (5669, 5670) | | | UNCLASSIFIED | 1003 |
| 4057 | 11615647 (5673, 5674) | | | UNCLASSIFIED | 1004 |
| 4058 | 78487206 (5675, 5676) | | | UNCLASSIFIED | 1024 |
| 4059 | 13032587 (5677, 5678) | | | UNCLASSIFIED | 1022 |
| 4060 | 78390333 (5683, 5684) | | | UNCLASSIFIED | 1020 |
| 4061 | 54540020 (5699, 5700) | | | UNCLASSIFIED | 1038 |
| 4062 | 94234536 (5703, 5704) | | | UNCLASSIFIED | 1002 |
| 4063 | 14996436 (5711, 5712) | | | UNCLASSIFIED | 1022 |
| 4064 | 95420776 (5723, 5724) | | | UNCLASSIFIED | 1051 |
| 4065 | 57056645 (5727, 5728) | | | UNCLASSIFIED | 1051 |
| 4066 | 30817392 (5735, 5736) | | | UNCLASSIFIED | 1041 |
| 4067 | 94747080 (5739, 5740) | | | UNCLASSIFIED | 1002, 1007, 1020, 1031, |
| | | | | | 1034, 1035, 1041 |
| 4068 | 78254479 (5741, 5742) | | | UNCLASSIFIED | 1024 |
| 4069 | 12806365 (5753, 5754) | | | UNCLASSIFIED | 1003 |
| 4070 | 28307526 (5757, 5758) | | | UNCLASSIFIED | 1051 |
| 4071 | 66556800 (5771, 5772) | | | UNCLASSIFIED | 1007 |
| 4072 | 20288127 (5775, 5776) | | | UNCLASSIFIED | 1031 |
| 4073 | 78470896 (5777, 5778) | | | UNCLASSIFIED | 1050 |
| 4074 | 91220019 (5785, 5786) | | | UNCLASSIFIED | 1041 |
| 4075 | 80062075 (5793, 5794) | | | UNCLASSIFIED | 1020, 1035 |
| 4076 | 66256460 (5797, 5798) | | | UNCLASSIFIED | 1014 |
| 4077 | 33200626 (5801, 5802) | | | UNCLASSIFIED | 1024 |
| 4078 | 25250044 (5807, 5808) | | | UNCLASSIFIED | 1041 |
| 4079 | 10887065 (5817, 5818) | | | UNCLASSIFIED | 1025 |
| 4080 | 85803373 (5825, 5826) | | | UNCLASSIFIED | 1051 |
| 4081 | 65697321 (5831, 5832) | | | UNCLASSIFIED | 1035 |
| 4082 | 80047922 (5847, 5848) | | | UNCLASSIFIED | 1020, 1023, 1051 |
| 4083 | 65651292 (5855, 5856) | | | UNCLASSIFIED | 1051 |
| 4084 | 80034763 (5861, 5862) | | | UNCLASSIFIED | 1050 |
| 4085 | 13070491 (5863, 5864) | | | UNCLASSIFIED | 1022 |
| 4086 | 46906764 (5885, 5886) | | | UNCLASSIFIED | 1037 |
| 4087 | 79814725 (5893, 5894) | | | UNCLASSIFIED | 1015, 1023, 1035 |
| 4088 | 36840458 (5895, 5896) | | | UNCLASSIFIED | 1051 |
| 4089 | 20633617 (5897, 5898) | | | UNCLASSIFIED | 1031 |
| 4090 | 78519782 (5899, 5900) | | | UNCLASSIFIED | 1041 |
| 4091 | 17565583 (5903, 5904) | | | UNCLASSIFIED | 1002 |
| 4092 | 78901767 (5915, 5916) | | | UNCLASSIFIED | 1022, 1036 |
| 4093 | 11699215 (5919, 5920) | | | UNCLASSIFIED | 1028 |
| 4094 | 66171743 (5923, 5924) | | | UNCLASSIFIED | 1029, 1035 |
| 4095 | 66582653 (5947, 5948) | | | UNCLASSIFIED | 1007 |
| 4096 | 79910954 (5973, 5974) | | | UNCLASSIFIED | 1041 |
| 4097 | 80076243 (5975, 5976) | | | UNCLASSIFIED | 1020 |
| 4098 | 78985005 (5977, 5978) | | | UNCLASSIFIED | 1027 |
| 4099 | 91009475 (5985, 5986) | | | UNCLASSIFIED | 1018 |
| 4100 | 78901768 (6001, 6002) | | | UNCLASSIFIED | 1036 |
| 4101 | 11087950 (6003, 6004) | | | UNCLASSIFIED | 1020 |
| 4102 | 77681934 (6007,6008) | | | UNCLASSIFIED | 1014 |
| 4103 | 95292964 (6019, 6020) | | | UNCLASSIFIED | 1008 |
| 4104 | 80073933 (6021, 6022) | | | UNCLASSIFIED | 1022 |
| 4105 | 80431947 (6027, 6028) | | | UNCLASSIFIED | 1002, 1007, 1035, 1041 |
| 4106 | 79624651 (6039, 6040) | | | UNCLASSIFIED | 1021 |
| 4107 | 80234432 (6047, 6048) | | | UNCLASSIFIED | 1001, 1004, 1010, 1020, |
| | | | | | 1022, 1024, 1028, 1031 |
| 4108 | 79206096 (6049, 6050) | | | UNCLASSIFIED | 1031 |
| 4109 | 30817005 (6059, 6060) | | | UNCLASSIFIED | 1041 |
| 4110 | 29242793 (6061, 6062) | | | UNCLASSIFIED | 1006 |
| 4111 | 35009979 (6065, 6066) | | | UNCLASSIFIED | 1035 |
| 4112 | 87122142 (6067, 6068) | | | UNCLASSIFIED | 1023 |
| 4113 | 91009929 (6071, 6072) | | | UNCLASSIFIED | 1018 |
| 4114 | 79623479 (6073, 6074) | | | UNCLASSIFIED | 1001 |
| 4115 | 11398414 (6079, 6080) | | | UNCLASSIFIED | 1004 |
| 4116 | 65703325 (6087, 6088) | | | UNCLASSIFIED | 1035 |
| 4117 | 65684346 (6093, 6094) | | | UNCLASSIFIED | 1046, 1055 |
| 4118 | 10868901 (6103, 6104) | | | UNCLASSIFIED | 1004 |
| 4119 | 11311378 (6105, 6106) | | | UNCLASSIFIED | 1020 |
| 4120 | 79235267 (6113, 6114) | | | UNCLASSIFIED | 1006 |
| 4121 | 30152838 (6117, 6118) | | | UNCLASSIFIED | 1035 |
| 4122 | 20711416 (6129, 6130) | | | UNCLASSIFIED | 1004 |
| 4123 | 17678565 (6131, 6132) | | | UNCLASSIFIED | 1006 |
| 4124 | 36988726 (6133, 6134) | | | UNCLASSIFIED | 1014 |
| 4125 | 78918057 (6137, 6138) | | | UNCLASSIFIED | 1036 |
| 4126 | 77817414 (6155, 6156) | | | UNCLASSIFIED | 1020 |
| 4127 | 65697328 (6167, 6168) | | | UNCLASSIFIED | 1035 |
| 4128 | 78053726 (6175, 6176) | | | UNCLASSIFIED | 1024 |
| 4129 | 46671323 (6177, 6178) | | | UNCLASSIFIED | 1020 |
| 4130 | 65883859 (6179, 6180) | | | UNCLASSIFIED | 1035 |
| 4131 | 87118463 (6181, 6182) | | | UNCLASSIFIED | 1022, 1023 |
| 4132 | 18470878 (6195, 6196) | | | UNCLASSIFIED | 1031 |
| 4133 | 65969432 (6197, 6198) | | | UNCLASSIFIED | 1050 |
| 4134 | 87453791 (6199, 6200) | | | UNCLASSIFIED | 1023 |
| 4135 | 56513556 (6201, 6202) | | | UNCLASSIFIED | 1017 |
| 4136 | 16326912 (6213, 6214) | | | UNCLASSIFIED | 1031 |
| 4137 | 16550020 (6229, 6230) | | | UNCLASSIFIED | 1027 |
| 4138 | 79611588 (6239, 6240) | | | UNCLASSIFIED | 1036 |
| 4139 | 78066806 (6247, 6248) | | | UNCLASSIFIED | 1031, 1047 |
| 4140 | 34081193 (6251, 6252) | | | UNCLASSIFIED | 1000 |
| 4141 | 46899384 (6255, 6256) | | | UNCLASSIFIED | 1038 |
| 4142 | 79758123 (6259, 6260) | | | UNCLASSIFIED | 1006, 1015 |
| 4143 | 11357965 (6265, 6266) | | | UNCLASSIFIED | 1055 |
| 4144 | 9285363 (6273, 6274) | | | UNCLASSIFIED | 1006, 1008 |
| 4145 | 46665971 (6279, 6280) | | | UNCLASSIFIED | 1020 |
| 4146 | 78407155 (6283, 6284) | | | UNCLASSIFIED | 1022, 1033, 1038 |
| 4147 | 20621931 (6295, 6296) | | | UNCLASSIFIED | 1003 |
| 4148 | 10169149 (6297, 6298) | | | UNCLASSIFIED | 1023 |
| 4149 | 11693024 (6299, 6300) | | | UNCLASSIFIED | 1031 |
| 4150 | 27972796 (6309, 6310) | | | UNCLASSIFIED | 1004 |
| 4151 | 16456669 (6321, 6322) | | | UNCLASSIFIED | 1006 |
| 4152 | 94740044 (6333, 6334) | | | UNCLASSIFIED | 1041 |
| 4153 | 65656730 (6337, 6338) | | | UNCLASSIFIED | 1035 |
| 4154 | 27842096 (6341, 6342) | | | UNCLASSIFIED | 1020 |
| 4155 | 80034769 (6355, 6356) | | | UNCLASSIFIED | 1050 |
| 4156 | 78708420 (6361, 6362) | | | UNCLASSIFIED | 1007, 1015, 1019, 1033, |
| | | | | | 1051 |
| 4157 | 78742567 (6367, 6368) | | | UNCLASSIFIED | 1051 |
| 4158 | 66041756 (6375, 6376) | | | UNCLASSIFIED | 1014, 1027, 1051 |
| 4159 | 95314292 (6377, 6378) | | | UNCLASSIFIED | 1008 |
| 4160 | 27980005 (6383, 6384) | | | UNCLASSIFIED | 1020 |
| 4161 | 95007160 (6385, 6386) | | | UNCLASSIFIED | 1022, 1031, 1051 |
| 4162 | 46869941 (6397, 6398) | | | UNCLASSIFIED | 1034 |
| 4163 | 34102245 (6399, 6400) | | | UNCLASSIFIED | 1022 |
| 4164 | 79445277 (6401, 6402) | | | UNCLASSIFIED | 1022 |
| 4165 | 33183198 (6403, 6404) | | | UNCLASSIFIED | 1024 |
| 4166 | 18536627 (6429, 6430) | | | UNCLASSIFIED | 1015 |
| 4167 | 94701911 (6431, 6432) | | | UNCLASSIFIED | 1008 |
| 4168 | 70101159 (6463, 6464) | | | UNCLASSIFIED | 1017 |
| 4169 | 66037530 (6469, 6470) | | | UNCLASSIFIED | 1029 |
| 4170 | 42723069 (6477, 6478) | | | UNCLASSIFIED | 1000 |
| 4171 | 79607920 (6489, 6490) | | | UNCLASSIFIED | 1001 |
| 4172 | 86664798 (6493, 6494) | | | UNCLASSIFIED | 1017 |
| 4173 | 65445071 (6495, 6496) | | | UNCLASSIFIED | 1035 |
| 4174 | 12904360 (6497, 6498) | | | UNCLASSIFIED | 1028, 1047 |
| 4175 | 27983938 (6523, 6524) | | | UNCLASSIFIED | 1014 |
| 4176 | 33043643 (6525, 6526) | | | UNCLASSIFIED | 1000 |
| 4177 | 9671885 (6539, 6540) | | | UNCLASSIFIED | 1021 |
| 4178 | 100090708 (6549, 6550) | | | UNCLASSIFIED | 1002, 1004, 1010, 1043 |
| 4179 | 30256515 (6555, 6556) | | | UNCLASSIFIED | 1041 |
| 4180 | 1782112 (6559, 6560) | | | UNCLASSIFIED | 1036 |
| 4181 | 27968065 (6561, 6562) | | | UNCLASSIFIED | 1004 |
| 4182 | 27847852 (6587, 6588) | | | UNCLASSIFIED | 1004 |
| 4183 | 78673470 (6593, 6594) | | | UNCLASSIFIED | 1024 |
| 4184 | 57057071 (6597, 6598) | | | UNCLASSIFIED | 1051 |
| 4185 | 28832464 (6611, 6612) | | | UNCLASSIFIED | 1015 |
| 4186 | 11305369 (6617, 6618) | | | UNCLASSIFIED | 1020 |
| 4187 | 17942349 (6621, 6622) | | | UNCLASSIFIED | 1036 |
| 4188 | 80197597 (6633, 6634) | | | UNCLASSIFIED | 1003, 1004, 1031 |
| 4189 | 16796894 (6641, 6642) | | | UNCLASSIFIED | 1041 |
| 4190 | 43337302 (6643, 6644) | | | UNCLASSIFIED | 1034 |
| 4191 | 27974626 (6645, 6646) | | | UNCLASSIFIED | 1003 |
| 4192 | 33204353 (6649, 6650) | | | UNCLASSIFIED | 1024 |
| 4193 | 23294699 (6655, 6656) | | | UNCLASSIFIED | 1021 |
| 4194 | 71033741 (6667, 6668) | | | UNCLASSIFIED | 1033, 1038 |
| 4195 | 33189538 (6671, 6672) | | | UNCLASSIFIED | 1024 |
| 4196 | 77654576 (6673, 6674) | | | UNCLASSIFIED | 1003 |
| 4197 | 19518170 (6679, 6680) | | | UNCLASSIFIED | 1002, 1021 |
| 4198 | 80085851 (6681, 6682) | | | UNCLASSIFIED | 1051 |
| 4199 | 91232516 (6691, 6692) | | | UNCLASSIFIED | 1008 |
| 4200 | 20414027 (6699, 6700) | | | UNCLASSIFIED | 1008 |
| 4201 | 10314264 (6703, 6704) | | | UNCLASSIFIED | 1023 |
| 4202 | 33202236 (6705, 6706) | | | UNCLASSIFIED | 1024 |
| 4203 | 80076441 (6707, 6708) | | | UNCLASSIFIED | 1014 |
| 4204 | 78279405 (6709, 6710) | | | UNCLASSIFIED | 1010, 1041 |
| 4205 | 78061916 (6735, 6736) | | | UNCLASSIFIED | 1001 |
| 4206 | 79776991 (6743, 6744) | | | UNCLASSIFIED | 1006 |
| 4207 | 79567978 (6751, 6752) | | | UNCLASSIFIED | 1015 |
| 4208 | 27846532 (6753, 6754) | | | UNCLASSIFIED | 1003, 1004 |
| 4209 | 10871598 (6757, 6758) | | | UNCLASSIFIED | 1004 |
| 4210 | 66141239 (6769, 6770) | | | UNCLASSIFIED | 1022 |
| 4211 | 16313560 (6771, 6772) | | | UNCLASSIFIED | 1051 |
| 4212 | 27372041 (6773, 6774) | | | UNCLASSIFIED | 1024 |
| 4213 | 16315152 (6777, 6778) | | | UNCLASSIFIED | 1051 |
| 4214 | 79427073 (6781, 6782) | | | UNCLASSIFIED | 1015 |
| 4215 | 25254641 (6807, 6808) | | | UNCLASSIFIED | 1006 |
| 4216 | 79110357 (6831, 6832) | | | UNCLASSIFIED | 1006, 1014, 1041 |
| 4217 | 49514230 (6843, 6844) | | | UNCLASSIFIED | 1033 |
| 4218 | 30256268 (6845, 6846) | | | UNCLASSIFIED | 1022 |
| 4219 | 80504315 (6851, 6852) | | | UNCLASSIFIED | 1002, 1010, 1021 |
| 4220 | 85527269 (6853, 6854) | | | UNCLASSIFIED | 1035 |
| 4221 | 86476282 (6855, 6856) | | | UNCLASSIFIED | 1026 |
| 4222 | 87114392 (6863, 6864) | | | UNCLASSIFIED | 1023 |
| 4223 | 79578263 (6865, 6866) | | | UNCLASSIFIED | 1002, 1004, 1006, 1007, |
| | | | | | 1015, 1036 |
| 4224 | 80248910 (6871, 6872) | | | UNCLASSIFIED | 1002, 1003, 1004, 1007, |
| | | | | | 1020, 1041 |
| 4225 | 28999996 (6877, 6878) | | | UNCLASSIFIED | 1041 |
| 4226 | 21436936 (6907, 6908) | | | UNCLASSIFIED | 1003 |
| 4227 | 80079467 (6913, 6914) | | | UNCLASSIFIED | 1031 |
| 4228 | 20615850 (6923, 6924) | | | UNCLASSIFIED | 1022 |
| 4229 | 18519374 (6925, 6926) | | | UNCLASSIFIED | 1001 |
| 4230 | 78250641 (6927, 6928) | | | UNCLASSIFIED | 1026 |
| 4231 | 37026242 (6935, 6936) | | | UNCLASSIFIED | 1035 |
| 4232 | 94323474 (6947, 6948) | | | UNCLASSIFIED | 1051 |
| 4233 | 39710205 (6953, 6954) | | | UNCLASSIFIED | 1006 |
| 4234 | 32357717 (6955, 6956) | | | UNCLASSIFIED | 1051 |
| 4235 | 57107512 (6957, 6958) | | | UNCLASSIFIED | 1004, 1015, 1020, 1022 |
| 4236 | 78956408 (6969, 6970) | | | UNCLASSIFIED | 1027 |
| 4237 | 52470405 (6971, 6972) | | | UNCLASSIFIED | 1033 |
| 4238 | 66599197 (6975, 6976) | | | UNCLASSIFIED | 1051 |
| 4239 | 78161421 (6979, 6980) | | | UNCLASSIFIED | 1022 |
| 4240 | 78780340 (7023, 7024) | | | UNCLASSIFIED | 1020, 1024 |
| 4241 | 55501079 (7029, 7030) | | | UNCLASSIFIED | 1019 |
| 4242 | 78713891 (7031, 7032) | | | UNCLASSIFIED | 1027 |
| 4243 | 20286180 (7051, 7052) | | | UNCLASSIFIED | 1020 |
| 4244 | 36524048 (7053, 7054) | | | UNCLASSIFIED | 1017 |
| 4245 | 79610849 (7055, 7056) | | | UNCLASSIFIED | 1022 |
| 4246 | 78759335 (7063, 7064) | | | UNCLASSIFIED | 1036 |
| 4247 | 78298406 (7067, 7068) | | | UNCLASSIFIED | 1024 |
| 4248 | 10159288 (7073, 7074) | | | UNCLASSIFIED | 1002 |
| 4249 | 50876921 (7083, 7084) | | | UNCLASSIFIED | 1033 |
| 4250 | 20293635 (7087, 7088) | | | UNCLASSIFIED | 1004 |
| 4251 | 66248710 (7089, 7090) | | | UNCLASSIFIED | 1050 |
| 4252 | 78107270 (7103, 7104) | | | UNCLASSIFIED | 1033 |
| 4253 | 30540740 (7109, 7110) | | | UNCLASSIFIED | 1024 |
| 4254 | 78248505 (7113, 7114) | | | UNCLASSIFIED | 1027 |
| 4255 | 78735474 (7117, 7118) | | | UNCLASSIFIED | 1041 |
| 4256 | 71113067 (7123, 7124) | | | UNCLASSIFIED | 1022 |
| 4257 | 30804412 (7131, 7132) | | | UNCLASSIFIED | 1026 |
| 4258 | 94670373 (7137, 7138) | | | UNCLASSIFIED | 1004 |
| 4259 | 77783861 (7141, 7142) | | | UNCLASSIFIED | 1017 |
| 4260 | 71047276 (7155, 7156) | | | UNCLASSIFIED | 1022, 1024, 1036 |
| 4261 | 80255888 (7157, 7158) | | | UNCLASSIFIED | 1008 |
| 4262 | 34882072 (7171, 7172) | | | UNCLASSIFIED | 1026 |
| 4263 | 66727380 (7173, 7174) | | | UNCLASSIFIED | 1046 |
| 4264 | 17960962 (7177, 7178) | | | UNCLASSIFIED | 1036 |
| 4265 | 27923405 (7179, 7180) | | | UNCLASSIFIED | 1004 |
| 4266 | 79834165 (7183, 7184) | | | UNCLASSIFIED | 1006 |
| 4267 | 38454471 (7187, 7188) | | | UNCLASSIFIED | 1051 |
| 4268 | 30401770 (7191, 7192) | | | UNCLASSIFIED | 1024 |
| 4269 | 34892989 (7193, 7194) | | | UNCLASSIFIED | 1047 |
| 4270 | 80258520 (7201, 7202) | | | UNCLASSIFIED | 1008, 1051 |
| 4271 | 85539894 (7207, 7208) | | | UNCLASSIFIED | 1035 |
| 4272 | 20608203 (7215, 7216) | | | UNCLASSIFIED | 1003 |
| 4273 | 65473568 (7231, 7232) | | | UNCLASSIFIED | 1051 |
| 4274 | 66363828 (7233, 7234) | | | UNCLASSIFIED | 1003 |
| 4275 | 77666363 (7243, 7244) | | | UNCLASSIFIED | 1050 |
| 4276 | 87457794 (7245, 7246) | | | UNCLASSIFIED | 1016 |
| 4277 | 65479067 (7249, 7250) | | | UNCLASSIFIED | 1035 |
| 4278 | 85822954 (7259, 7260) | | | UNCLASSIFIED | 1045 |
| 4279 | 77530644 (7271, 7272) | | | UNCLASSIFIED | 1035 |
| 4280 | 35131206 (7277, 7278) | | | UNCLASSIFIED | 1000 |
| 4281 | 65896777 (7279, 7280) | | | UNCLASSIFIED | 1051 |
| 4282 | 78960096 (7281, 7282) | | | UNCLASSIFIED | 1006, 1027 |
| 4283 | 55405441 (7291, 7292) | | | UNCLASSIFIED | 1039 |
| 4284 | 78741397 (7293, 7294) | | | UNCLASSIFIED | 1041 |
| 4285 | 80098140 (7301, 7302) | | | UNCLASSIFIED | 1003, 1022, 1023 |
| 4286 | 91231570 (7305, 7306) | | | UNCLASSIFIED | 1002 |
| 4287 | 78477787 (7309, 7310) | | | UNCLASSIFIED | 1006 |
| 4288 | 78317357 (7323, 7324) | | | UNCLASSIFIED | 1024 |
| 4289 | 78781762 (7331, 7332) | | | UNCLASSIFIED | 1020 |
| 4290 | 54698166 (7335, 7336) | | | UNCLASSIFIED | 1038 |
| 4291 | 52571364 (7363, 7364) | | | UNCLASSIFIED | 1033 |
| 4292 | 66143816 (7365, 7366) | | | UNCLASSIFIED | 1008, 1039 |
| 4293 | 94321654 (7367, 7368) | | | UNCLASSIFIED | 1001, 1002, 1010, 1031, |
| | | | | | 1051 |
| 4294 | 78792119 (7369, 7370) | | | UNCLASSIFIED | 1014, 1015, 1036 |
| 4295 | 94323443 (7371, 7372) | | | UNCLASSIFIED | 1051 |
| 4296 | 78297939 (7375, 7376) | | | UNCLASSIFIED | 1027 |
| 4297 | 79974047 (7413, 7414) | | | UNCLASSIFIED | 1021 |
| 4298 | 8910196 (7439, 7440) | | | UNCLASSIFIED | 1021 |
| 4299 | 79572191 (7441, 7442) | | | UNCLASSIFIED | 1001 |
| 4300 | 80048876 (7445, 7446) | | | UNCLASSIFIED | 1003, 1051 |
| 4301 | 25146376 (7461, 7462) | | | UNCLASSIFIED | 1036 |
| 4302 | 11793419 (7465, 7466) | | | UNCLASSIFIED | 1023 |
| 4303 | 71208240 (7471, 7472) | | | UNCLASSIFIED | 1017, 1047 |
| 4304 | 54695984 (7475, 7476) | | | UNCLASSIFIED | 1037 |
| 4305 | 33183803 (7483, 7484) | | | UNCLASSIFIED | 1024 |
| 4306 | 91012461 (7485, 7486) | | | UNCLASSIFIED | 1008 |
| 4307 | 78049832 (7503, 7504) | | | UNCLASSIFIED | 1024 |
| 4308 | 78394868 (7515, 7516) | | | UNCLASSIFIED | 1035 |
| 4309 | 78388490 (7517, 7518) | | | UNCLASSIFIED | 1024 |
| 4310 | 11798792 (7531, 7532) | | | UNCLASSIFIED | 1014 |
| 4311 | 33188480 (7535, 7536) | | | UNCLASSIFIED | 1024 |
| 4312 | 14154923 (7557, 7558) | | | UNCLASSIFIED | 1014 |
| 4313 | 34667105 (7561, 7562) | | | UNCLASSIFIED | 1026 |
| 4314 | 19641442 (7569, 7570) | | | UNCLASSIFIED | 1022 |
| 4315 | 30392015 (7571, 7572) | | | UNCLASSIFIED | 1027 |
| 4316 | 54696369 (7589, 7590) | | | UNCLASSIFIED | 1038 |
| 4317 | 80412988 (7613, 7614) | | | UNCLASSIFIED | 1026 |
| 4318 | 29342366 (7621, 7622) | | | UNCLASSIFIED | 1007 |
| 4319 | 81821520 (7631, 7632) | | | UNCLASSIFIED | 1051 |
| 4320 | 11811365 (7633, 7634) | | | UNCLASSIFIED | 1035 |
| 4321 | 8522062 (7635, 7636) | | | UNCLASSIFIED | 1031 |
| 4322 | 79246951 (7639, 7640) | | | UNCLASSIFIED | 1002 |
| 4323 | 11395060 (7641, 7642) | | | UNCLASSIFIED | 1031 |
| 4324 | 79569085 (7649, 7650) | | | UNCLASSIFIED | 1015 |
| 4325 | 30519422 (7653, 7654) | | | UNCLASSIFIED | 1022 |
| 4326 | 29687932 (7663, 7664) | | | UNCLASSIFIED | 1014 |
| 4327 | 30158321 (7669, 7670) | | | UNCLASSIFIED | 1026 |
| 4328 | 81742754 (7671, 7672) | | | UNCLASSIFIED | 1051 |
| 4329 | 91226597 (7673, 7674) | | | UNCLASSIFIED | 1003, 1008 |
| 4330 | 32425855 (7681, 7682) | | | UNCLASSIFIED | 1026 |
| 4331 | 13086608 (7687, 7688) | | | UNCLASSIFIED | 1022 |
| 4332 | 28794345 (7693, 7694) | | | UNCLASSIFIED | 1041 |
| 4333 | 71795370 (7697, 7698) | | | UNCLASSIFIED | 1006, 1007 |
| 4334 | 78794094 (7703, 7704) | | | UNCLASSIFIED | 1007 |
| 4335 | 66155711 (7707, 7708) | | | UNCLASSIFIED | 1002, 1003 |
| 4336 | 11617467 (7719, 7720) | | | UNCLASSIFIED | 1003 |
| 4337 | 51728410 (7733, 7734) | | | UNCLASSIFIED | 1037 |
| 4338 | 78757399 (7735, 7736) | | | UNCLASSIFIED | 1041 |
| 4339 | 65504987 (7741, 7742) | | | UNCLASSIFIED | 1035 |
| 4340 | 27262716 (7749, 7750) | | | UNCLASSIFIED | 1015 |
| 4341 | 77731440 (7753, 7754) | | | UNCLASSIFIED | 1043 |
| 4342 | 78101975 (7761, 7762) | | | UNCLASSIFIED | 1052 |
| 4343 | 38194650 (7773, 7774) | | | UNCLASSIFIED | 1027 |
| 4344 | 87454805 (7777, 7778) | | | UNCLASSIFIED | 1023 |
| 4345 | 80581048 (7779, 7780) | | | UNCLASSIFIED | 1002, 1003, 1004, 1006, |
| | | | | | 1007, 1008, 1015, 1020, |
| | | | | | 1022, 1028, 1031, 1055 |
| 4346 | 35092915 (7781, 7782) | | | UNCLASSIFIED | 1047 |
| 4347 | 54701303 (7783, 7784) | | | UNCLASSIFIED | 1017 |
| 4348 | 80221827 (7787, 7788) | | | UNCLASSIFIED | 1014 |
| 4349 | 10131687 (7793, 7794) | | | UNCLASSIFIED | 1041 |
| 4350 | 16525372 (7801, 7802) | | | UNCLASSIFIED | 1027 |
| 4351 | 78188445 (7809, 7810) | | | UNCLASSIFIED | 1026 |
| 4352 | 56067857 (7811, 7812) | | | UNCLASSIFIED | 1019 |
| 4353 | 34126419 (7813, 7814) | | | UNCLASSIFIED | 1024 |
| 4354 | 70567845 (7815, 7816) | | | UNCLASSIFIED | 1002, 1003, 1033, 1041 |
| 4355 | 55764343 (7823, 7824) | | | UNCLASSIFIED | 1021, 1033 |
| 4356 | 65702063 (7831, 7832) | | | UNCLASSIFIED | 1035 |
| 4357 | 80046692 (7833, 7834) | | | UNCLASSIFIED | 1022, 1038 |
| 4358 | 65878255 (7837, 7838) | | | UNCLASSIFIED | 1041 |
| 4359 | 94135090 (7841, 7842) | | | UNCLASSIFIED | 1008 |
| 4360 | 71466509 (7843, 7844) | | | UNCLASSIFIED | 1017, 1024 |
| 4361 | 20434291 (7861, 7862) | | | UNCLASSIFIED | 1003 |
| 4362 | 17710858 (7863, 7864) | | | UNCLASSIFIED | 1015 |
| 4363 | 55183282 (7869, 7870) | | | UNCLASSIFIED | 1039 |
| 4364 | 17139933 (7873, 7874) | | | UNCLASSIFIED | 1036 |
| 4365 | 65879441 (7877, 7878) | | | UNCLASSIFIED | 1014 |
| 4366 | 80149654 (7885, 7886) | | | UNCLASSIFIED | 1008, 1055 |
| 4367 | 37055375 (7897, 7898) | | | UNCLASSIFIED | 1027 |
| 4368 | 27356015 (7907, 7908) | | | UNCLASSIFIED | 1024 |
| 4369 | 79310489 (7909, 7910) | | | UNCLASSIFIED | 1022 |
| 4370 | 95287836 (7917, 7918) | | | UNCLASSIFIED | 1006, 1010, 1015, 1051 |
| 4371 | 78254487 (7921, 7922) | | | UNCLASSIFIED | 1024 |
| 4372 | 30817986 (7931, 7932) | | | UNCLASSIFIED | 1024 |
| 4373 | 78297979 (7935, 7936) | | | UNCLASSIFIED | 1027 |
| 4374 | 66368983 (7943, 7944) | | | UNCLASSIFIED | 1051 |
| 4375 | 90937494 (7955, 7956) | | | UNCLASSIFIED | 1018 |
| 4376 | 78161920 (7959, 7960) | | | UNCLASSIFIED | 1000 |
| 4377 | 71297578 (7961, 7962) | | | UNCLASSIFIED | 1000, 1001, 1022 |
| 4378 | 78490285 (7971, 7972) | | | UNCLASSIFIED | 1027 |
| 4379 | 13089767 (7979, 7980) | | | UNCLASSIFIED | 1025 |
| 4380 | 5637866 (7987, 7988) | | | UNCLASSIFIED | 1055 |
| 4381 | 32122983 (7995, 7996) | | | UNCLASSIFIED | 1022 |
| 4382 | 78928374 (8013, 8014) | | | UNCLASSIFIED | 1015 |
| 4383 | 77712820 (8021, 8022) | | | UNCLASSIFIED | 1051 |
| 4384 | 95102078 (8023, 8024) | | | UNCLASSIFIED | 1041 |
| 4385 | 66312467 (8041, 8042) | | | UNCLASSIFIED | 1051 |
| 4386 | 80060621 (8047, 8048) | | | UNCLASSIFIED | 1022, 1036 |
| 4387 | 71091125 (8053, 8054) | | | UNCLASSIFIED | 1005, 1031, 1046 |
| 4388 | 79419209 (8071, 8072) | | | UNCLASSIFIED | 1008 |
| 4389 | 32283895 (8083, 8084) | | | UNCLASSIFIED | 1047 |
| 4390 | 54533422 (8091, 8092) | | | UNCLASSIFIED | 1038 |
| 4391 | 77544426 (8095, 8096) | | | UNCLASSIFIED | 1014 |
| 4392 | 78980649 (8105, 8106) | | | UNCLASSIFIED | 1022 |
| 4393 | 38069803 (8107, 8108) | | | UNCLASSIFIED | 1033 |
| 4394 | 9844352 (8115, 8116) | | | UNCLASSIFIED | 1021 |
| 4395 | 78490286 (8121, 8122) | | | UNCLASSIFIED | 1027 |
| 4396 | 34867899 (8123, 8124) | | | UNCLASSIFIED | 1047 |
| 4397 | 79200648 (8135, 8136) | | | UNCLASSIFIED | 1003, 1022, 1025, 1031 |
| 4398 | 35070432 (8139, 8140) | | | UNCLASSIFIED | 1027 |
| 4399 | 66465809 (8143, 8144) | | | UNCLASSIFIED | 1022 |
| 4400 | 27962501 (8145, 8146) | | | UNCLASSIFIED | 1020 |
| 4401 | 10302827 (8147, 8148) | | | UNCLASSIFIED | 1036 |
| 4402 | 55004194 (8149, 8150) | | | UNCLASSIFIED | 1017 |
| 4403 | 80254666 (8161, 8162) | | | UNCLASSIFIED | 1003 |
| 4404 | 78952408 (8167, 8168) | | | UNCLASSIFIED | 1002 |
| 4405 | 19510208 (8169, 8170) | | | UNCLASSIFIED | 1031 |
| 4406 | 78462199 (8185, 8186) | | | UNCLASSIFIED | 1002, 1051 |
| 4407 | 78188298 (8187, 8188) | | | UNCLASSIFIED | 1026 |
| 4408 | 80104525 (8191, 8192) | | | UNCLASSIFIED | 1002, 1004, 1022, 1051 |
| 4409 | 79835167 (8209, 8210) | | | UNCLASSIFIED | 1006 |
| 4410 | 94326068 (8213, 8214) | | | UNCLASSIFIED | 1041 |
| 4411 | 25140679 (8223, 8224) | | | UNCLASSIFIED | 1002 |
| 4412 | 78924391 (8225, 8226) | | | UNCLASSIFIED | 1000, 1024, 1026, 1051 |
| 4413 | 78674480 (8229, 8230) | | | UNCLASSIFIED | 1007, 1051 |
| 4414 | 18520847 (8251, 8252) | | | UNCLASSIFIED | 1015 |
| 4415 | 79641282 (8253, 8254) | | | UNCLASSIFIED | 1035 |
| 4416 | 10872492 (8255, 8256) | | | UNCLASSIFIED | 1020 |
| 4417 | 46788868 (8263, 8264) | | | UNCLASSIFIED | 1037 |
| 4418 | 20456670 (8267, 8268) | | | UNCLASSIFIED | 1008 |
| 4419 | 66437272 (8271, 8272) | | | UNCLASSIFIED | 1022 |
| 4420 | 46683894 (8275, 8276) | | | UNCLASSIFIED | 1020 |
| 4421 | 82125380 (8279, 8280) | | | UNCLASSIFIED | 1014 |
| 4422 | 80054024 (8283, 8284) | | | UNCLASSIFIED | 1003 |
| 4423 | 91255717 (8285, 8286) | | | UNCLASSIFIED | 1002 |
| 4424 | 79448440 (8289, 8290) | | | UNCLASSIFIED | 1003 |
| 4425 | 99517906 (8295, 8296) | | | UNCLASSIFIED | 1001, 1008, 1020, 1022, |
| | | | | | 1036, 1041, 1055 |
| 4426 | 80082084 (8299, 8300) | | | UNCLASSIFIED | 1020,1022, 1026, 1028, |
| | | | | | 1031, 1035 |
| 4427 | 54528786 (8305, 8306) | | | UNCLASSIFIED | 1038 |
| 4428 | 16333379 (8313, 8314) | | | UNCLASSIFIED | 1004 |
| 4429 | 77894027 (8319, 8320) | | | UNCLASSIFIED | 1019, 1033 |
| 4430 | 94233812(8321, 8322) | | | UNCLASSIFIED | 1002, 1015, 1023, 1035, |
| | | | | | 1050, 1051 |
| 4431 | 55183467 (8337, 8338) | | | UNCLASSIFIED | 1017 |
| 4432 | 85540000 (8341, 8342) | | | UNCLASSIFIED | 1035 |
| 4433 | 87455204 (8355, 8356) | | | UNCLASSIFIED | 1023 |
| 4434 | 10853661 (8369, 8370) | | | UNCLASSIFIED | 1015 |
| 4435 | 78378831 (8373, 8374) | | | UNCLASSIFIED | 1041 |
| 4436 | 79763791 (8375, 8376) | | | UNCLASSIFIED | 1020 |
| 4437 | 78914945 (8389, 8390) | | | UNCLASSIFIED | 1036 |
| 4438 | 29897195 (8403, 8404) | | | UNCLASSIFIED | 1022 |
| 4439 | 27839395 (8411, 8412) | | | UNCLASSIFIED | 1020 |
| 4440 | 55929020 (8413, 8414) | | | UNCLASSIFIED | 1019 |
| 4441 | 19887773 (8419, 8420) | | | UNCLASSIFIED | 1031 |
| 4442 | 80399986 (8429, 8430) | | | UNCLASSIFIED | 1006, 1023, 1026 |
| 4443 | 78374679 (8431, 8432) | | | UNCLASSIFIED | 1006, 1024 |
| 4444 | 10104463 (8437, 8438) | | | UNCLASSIFIED | 1035 |
| 4445 | 27977235 (8439, 8440) | | | UNCLASSIFIED | 1004 |
| 4446 | 79763608 (8447, 8448) | | | UNCLASSIFIED | 1021 |
| 4447 | 71059237 (8455, 8456) | | | UNCLASSIFIED | 1022 |
| 4448 | 71845869 (8461, 8462) | | | UNCLASSIFIED | 1027, 1033 |
| 4449 | 34761080 (8469, 8470) | | | UNCLASSIFIED | 1027 |
| 4450 | 78946789 (8487, 8488) | | | UNCLASSIFIED | 1019, 1033, 1038, 1051 |
| 4451 | 33101646 (8491, 8492) | | | UNCLASSIFIED | 1024 |
| 4452 | 30394512 (8495, 8496) | | | UNCLASSIFIED | 1035 |
| 4453 | 80200907 (8497, 8498) | | | UNCLASSIFIED | 1020, 1022 |
| 4454 | 77515115 (8499, 8500) | | | UNCLASSIFIED | 1002 |
| 4455 | 77881555 (8503, 8504) | | | UNCLASSIFIED | 1019 |
| 4456 | 79778294 (8505, 8506) | | | UNCLASSIFIED | 1015 |
| 4457 | 39734743 (8515, 8516) | | | UNCLASSIFIED | 1024 |
| 4458 | 20281464 (8517, 8518) | | | UNCLASSIFIED | 1031 |
| 4459 | 80021097 (8521, 8522) | | | UNCLASSIFIED | 1004 |
| 4460 | 50401417 (8523, 8524) | | | UNCLASSIFIED | 1033 |
| 4461 | 55506630 (8527, 8528) | | | UNCLASSIFIED | 1019, 1024 |
| 4462 | 6598409 (8535, 8536) | | | UNCLASSIFIED | 1020 |
| 4463 | 10080426 (8543, 8544) | | | UNCLASSIFIED | 1015 |
| 4464 | 80424139 (8549, 8550) | | | UNCLASSIFIED | 1003, 1008, 1023 |
| 4465 | 78058919 (8555, 8556) | | | UNCLASSIFIED | 1022 |
| 4466 | 37026708 (8557, 8558) | | | UNCLASSIFIED | 1035, 1041 |
| 4467 | 66049540 (8565, 8566) | | | UNCLASSIFIED | 1005 |
| 4468 | 66139409 (8571, 8572) | | | UNCLASSIFIED | 1003, 1010, 1020 |
| 4469 | 65891380 (8579, 8580) | | | UNCLASSIFIED | 1051 |
| 4470 | 65981380 (8583, 8584) | | | UNCLASSIFIED | 1051 |
| 4471 | 78948740 (8591, 8592) | | | UNCLASSIFIED | 1001, 1015, 1031 |
| 4472 | 19905899 (8599, 8600) | | | UNCLASSIFIED | 1008 |
| 4473 | 87115127 (8603, 8604) | | | UNCLASSIFIED | 1023 |
| 4474 | 32296073 (8611, 8612) | | | UNCLASSIFIED | 1000 |
| 4475 | 25183594 (8613, 8614) | | | UNCLASSIFIED | 1002 |
| 4476 | 17903334 (8619, 8620) | | | UNCLASSIFIED | 1021 |
| 4477 | 28459834 (8631, 8632) | | | UNCLASSIFIED | 1002 |
| 4478 | 42942377 (8633, 8634) | | | UNCLASSIFIED | 1000 |
| 4479 | 24133419 (8635, 8636) | | | UNCLASSIFIED | 1002 |
| 4480 | 78788013 (8647, 8648) | | | UNCLASSIFIED | 1002, 1006 |
| 4481 | 35073151 (8651, 8652) | | | UNCLASSIFIED | 1047 |
| 4482 | 34697225 (8659, 8660) | | | UNCLASSIFIED | 1022 |
| 4483 | 11076810 (8663, 8664) | | | UNCLASSIFIED | 1008 |
| 4484 | 27842778 (8667, 8668) | | | UNCLASSIFIED | 1003, 1008 |
| 4485 | 66437464 (8669, 8670) | | | UNCLASSIFIED | 1022 |
| 4486 | 80206883 (8681, 8682) | | | UNCLASSIFIED | 1031 |
| 4487 | 79114654 (8689, 8690) | | | UNCLASSIFIED | 1002, 1006, 1007, 1014, |
| | | | | | 1015, 1020, 1021, 1024, |
| | | | | | 1034, 1036, 1041 |
| 4488 | 30256277 (8701, 8702) | | | UNCLASSIFIED | 1041 |
| 4489 | 78377302 (8713, 8714) | | | UNCLASSIFIED | 1024 |
| 4490 | 86476874 (8723, 8724) | | | UNCLASSIFIED | 1026 |
| 4491 | 78387102 (8725, 8726) | | | UNCLASSIFIED | 1024 |
| 4492 | 87456737 (8727, 8728) | | | UNCLASSIFIED | 1023 |
| 4493 | 78913039 (8731, 8732) | | | UNCLASSIFIED | 1027, 1041 |
| 4494 | 21430756 (8737, 8738) | | | UNCLASSIFIED | 1003 |
| 4495 | 87453107 (8743, 8744) | | | UNCLASSIFIED | 1023 |
| 4496 | 29006178 (8745, 8746) | | | UNCLASSIFIED | 1041 |
| 4497 | 57057267 (8749, 8750) | | | UNCLASSIFIED | 1051 |
| 4498 | 20754821 (8777, 8778) | | | UNCLASSIFIED | 1050 |
| 4499 | 34411796 (8795, 8796) | | | UNCLASSIFIED | 1022 |
| 4500 | 79190982 (8815, 8816) | | | UNCLASSIFIED | 1022, 1035 |
| 4501 | 80026765 (8825, 8826) | | | UNCLASSIFIED | 1003 |
| 4502 | 34885768 (8833, 8834) | | | UNCLASSIFIED | 1014 |
| 4503 | 88097866 (8837, 8838) | | | UNCLASSIFIED | 1016 |
| 4504 | 32712852 (8839, 8840) | | | UNCLASSIFIED | 1026 |
| 4505 | 80412124 (8843, 8844) | | | UNCLASSIFIED | 1026 |
| 4506 | 6512390 (8845, 8846) | | | UNCLASSIFIED | 1020 |
| 4507 | 88464789 (8849, 8850) | | | UNCLASSIFIED | 1026, 1031 |
| 4508 | 65881056 (8861, 8862) | | | UNCLASSIFIED | 1051 |
| 4509 | 79111174 (8865, 8866) | | | UNCLASSIFIED | 1024, 1041 |
| 4510 | 78432343 (8867, 8868) | | | UNCLASSIFIED | 1031, 1051 |
| 4511 | 65468389 (8871, 8872) | | | UNCLASSIFIED | 1051 |
| 4512 | 65648374 (8879, 8880) | | | UNCLASSIFIED | 1051 |
| 4513 | 79862565 (8881, 8882) | | | UNCLASSIFIED | 1041 |
| 4514 | 77883302 (8903, 8904) | | | UNCLASSIFIED | 1019 |
| 4515 | 11088007 (8905, 8906) | | | UNCLASSIFIED | 1020 |
| 4516 | 80077674 (8907, 8908) | | | UNCLASSIFIED | 1004, 1031 |
| 4517 | 30797043 (8911, 8912) | | | UNCLASSIFIED | 1014 |
| 4518 | 10845648 (8913, 8914) | | | UNCLASSIFIED | 1001 |
| 4519 | 35101562 (8921, 8922) | | | UNCLASSIFIED | 1022 |
| 4520 | 33200646 (8931, 8932) | | | UNCLASSIFIED | 1024 |
| 4521 | 78473190 (8937, 8938) | | | UNCLASSIFIED | 1024 |
| 4522 | 77915440 (8951, 8952) | | | UNCLASSIFIED | 1033 |
| 4523 | 71760619 (8957, 8958) | | | UNCLASSIFIED | 1002 |
| 4524 | 33764227 (8981, 8982) | | | UNCLASSIFIED | 1024 |
| 4525 | 71768824 (8997, 8998) | | | UNCLASSIFIED | 1002, 1051 |
| 4526 | 20396723 (9003, 9004) | | | UNCLASSIFIED | 1008 |
| 4527 | 20728632 (9007, 9008) | | | UNCLASSIFIED | 1022 |
| 4528 | 27980170 (9015, 9016) | | | UNCLASSIFIED | 1004 |
| 4529 | 11706751 (9019, 9020) | | | UNCLASSIFIED | 1035 |
| 4530 | 91236129 (9025, 9026) | | | UNCLASSIFIED | 1042 |
| 4531 | 11773980 (9029, 9030) | | | UNCLASSIFIED | 1023 |
| 4532 | 78238336 (9031, 9032) | | | UNCLASSIFIED | 1024 |
| 4533 | 25242940 (9033, 9034) | | | UNCLASSIFIED | 1041 |
| 4534 | 79619732 (9045, 9046) | | | UNCLASSIFIED | 1023 |

[0340] TABLE 2

| tissue | | | |
|---|---|---|---|
| id | tissue heirarchy | Common conditions/diseases | Other diseases |
| 1000 | Cardiovascular System/Artery/Coronary Artery | | |
| 1001 | Cardiovascular System/Heart | cancer, trauma, regeneration (in vitro and in | Cardiomyopathy, |
| | | vivo), viral/bacterial/parasitic infections | Atherosclerosis, Hypertension, |
| | | | Congenital heart defects, Aortic stenosis, |
| | | | Atrial septal defect |
| | | | (ASD), Atrioventricular (A-V) canal defect, |
| | | | Ductus arteriosus, Pulmonary stenosis, |
| | | | Subaortic stenosis, Ventricular septal |
| | | | defect (VSD), valve diseases, Tuberous |
| | | | sclerosis, Scleroderma, |
| | | | Obesity, Transplantation |
| 1002 | Endocrine System/Adrenal | cancer, trauma, regeneration (in vitro and in | Adrenoleukodystrophy, Congenital |
| | Gland/Suprarenal gland | vivo), viral/bacterial/parasitic infections | Adrenal Hyperplasia, |
| 1003 | Endocrine System/Pancreas | cancer, trauma, regeneration (in vitro and in | Diabetes, Von Hippel-Lindau (VHL) |
| | | vivo), viral/bacterial/parasitic infections | syndrome, Pancreatitis, Obesity |
| 1004 | Endocrine System/Thyroid | cancer, trauma, regeneration (in vitro and in | Hyperthyroidism and Hypothyroidism |
| | | vivo), viral/bacterial/parasitic infections | |
| 1005 | Female Reproductive System/Cervix | cancer, trauma, regeneration (in vitro and in | Fertility |
| | | vivo), viral/bacterial/parasitic infections | |
| 1006 | Female Reproductive System/Mammary | cancer, trauma, regeneration (in vitro and in | Fertility |
| | gland/Breast | vivo), viral/bacterial/parasitic infections | |
| 1007 | Female Reproductive System/Ovary | cancer, trauma, regeneration (in vitro and in | Endometriosis, Fertility |
| | | vivo), viral/bacterial/parasitic infections | |
| 1008 | Female Reproductive System/Placenta | cancer, trauma, regeneration (in vitro and in | Fertility |
| | | vivo), viral/bacterial/parasitic infections | |
| 1009 | Female Reproductive | | |
| | System/Placenta/Chorionic Villus | | |
| 1010 | Female Reproductive System/Uterus | cancer, trauma, regeneration (in vitro and in | Endometriosis, Fertility |
| | | vivo), viral/bacterial/parasitic infections | |
| 1011 | Female Reproductive | cancer, trauma, regeneration (in vitro and in | Endometriosis Fertility |
| | System/Uterus/Myometrium | vivo), viral/bacterial/parasitic infections | |
| 1012 | Gastro-intestinal/Digestive System/Large | cancer, trauma, regeneration (in vitro and in | Hirschsprung's disease, Crohn's |
| | Intestine/Colon | vivo), viral/bacterial/parasitic infections | Disease, Appendicitis |
| 1013 | Gastro-intestinal/Digestive System/Large | | |
| | Intestine/Colon/Ascending Colon | | |
| 1014 | Gastro-intestinal/Digestive System/Liver | cancer, trauma, regeneration (in vitro and in | Von Hippel-Lindau (VHL) syndrome, |
| | | vivo), viral/bacterial/parasitic infections | Cirrhosis, Transplantation |
| 1015 | Gastro-intestinal/Digestive System/Salivary | | |
| | Glands | | |
| 1016 | Gastro-intestinal/Digestive System/Salivary | | |
| | Glands/Parotid Salivary glands | | |
| 1017 | Gastro-intestinal/Digestive System/Small | | |
| | Intestine | | |
| 1018 | Gastro-intestinal/Digestive System/Small | | |
| | Intestine/Duodenum | | |
| 1019 | Gastro-intestinal/Digestive System/Stomach | cancer, trauma, regeneration (in vitro and in | Hypercalceimia, Ulcers |
| | | vivo), viral/bacterial/parasitic infections | |
| 1020 | Hematopoietic and Lymphatic | cancer, trauma, regeneration (in vitro and in | Hemophilia, hypercoagulation, Idiopathic |
| | System/Hematopoietic Tissues/Bone | vivo), viral/bacterial/parasitic infections | thrombocytopenic purpura, autoimmume |
| | Marrow | | disease, allergies, |
| | | | immunodeficiencies, transplantation, |
| | | | Graft vesus host, |
| 1021 | Hematopoietic and Lymphatic | cancer, trauma, regeneration (in vitro and in | Hemophilia, hypercoagulation, idiopathic |
| | System/Hematopoietic Tissues/Lymphoid | vivo), viral/bacterial/parasitic infections | thrombocytopenic purpura, autoimmume |
| | tissue | | disease, allergies, immunodeficiencies, |
| | | | transplantation, Graft versus host |
| | | | disease (GVHD), Lymphaedema |
| 1022 | Hematopoietic and Lymphatic | | |
| | System/Hematopoietic Tissues/Lymphoid | | |
| | tissue/Lymph node | | |
| 1023 | Hematopoietic and Lymphatic | cancer, trauma, regeneration (in vitro and in | Hemophilia, Hypercoagulation, Idiopathic |
| | System/Hematopoietic Tissues/Lymphoid | vivo), viral/bacterial/parasitic infections | thrombocytopenic purpura, |
| | tissue/Spleen | | Immunodeficiencies, Graft vesus host |
| 1024 | Hematopoietic and Lymphatic | cancer, trauma, regeneration (in vitro and in | Anemia, Ataxia- |
| | System/Hematopoietic Tissues/Peripheral | vivo), viral/bacterial/parasitic infections | telangiectasia, Autoimmume |
| | Blood | | disease, Immunodeficiencies |
| 1025 | Hematopoietic and Lymphatic | cancer, trauma, regeneration (in vitro and in | Hemophilia, hypercoagulation, Idiopathic |
| | System/Hematopoietic Tissues/Thymus | vivo), viral/bacterial/parasitic infections | thrombocytopenic purpura, |
| | | | immunodeficiencies |
| 1026 | Male Reproductive System/Prostate | cancer, trauma, regeneration (in vitro and in | Fertility |
| | | vivo), viral/bacterial/parasitic infections | |
| 1027 | Male Reproductive System/Testis | cancer, trauma, regeneration (in vitro and in | Fertility |
| | | vivo), viral/bacterial/parasitic infections | |
| 1028 | Musculoskeletal System/Bone | cancer, trauma, regeneration (in vitro and in | Osteoporosis, Hypercalceimia, Arthritis, |
| | | vivo), viral/bacterial/parasitic infections | Ankylosing spondylitis, Scoliosis |
| 1029 | Musculoskeletal System/Muscle | cancer, trauma, regeneration (in vitro and in | Muscular dystrophy, Lesch-Nyhan |
| | | vivo), viral/bacterial/parasitic infections | syndrome, Myasthenia gravis |
| 1030 | Musculoskeletal System/Muscle/Skeletal | cancer, trauma, regeneration (in vitro and in | Muscular dystrophy, Lesch-Nyhan |
| | Muscle | vivo), viral/bacterial/parasitic infections | syndrome, Myasthenia gravis |
| 1031 | Nervous System/Brain | cancer, trauma, regeneration (in vitro and in | Von Hippel-Lindau (VHL) syndrome, |
| | | vivo), viral/bacterial/parasitic infections | Alzheimer's disease, Stroke, Tuberous |
| | | | sclerosis, hypercalceimia, Parkinson's |
| | | | disease, Huntington's disease, Cerebral |
| | | | palsy, Epilepsy, Lesch-Nyhan syndrome, |
| | | | Multiple sclerosis, Ataxia- |
| | | | telangiectasia, Leukodystrophies, Behavioral |
| | | | disorders, Addiction, Anxiety, Pain, |
| | | | Neuroprotection |
| 1032 | Nervous System/Brain/Brain | | |
| | Stem/Hindbrain/Cerebellum | | |
| 1033 | Nervous System/Brain/Hippocampus | | |
| 1034 | Nervous | | |
| | System/Brain/Prosencephalon/Forebrain/ | | |
| | Dienecephalon/Hypothalamus | | |
| 1035 | Nervous | cancer, trauma, regeneration (in vitro and in | Endocrine dysfunctions, Diabetes, |
| | SystemlBrain/Prosencephalon/Forebrain/ | vivo), viral/bactenal/parasitic infections | obesity, Growth and reproductive |
| | Dienecephalon/Pituitary Gland | | disorders |
| 1036 | Nervous | | |
| | System/Brain/Prosencephalon/Forebrain/ | | |
| | Dienecephalon/Thalamus | | |
| 1037 | Nervous | | |
| | System/Brain/Prosencephalon/Forebrain/ | | |
| | Telencephalon/Cerebrum/Cerebral | | |
| | Cortex/Cerebral Gray Matter/Cerebral | | |
| | gyri/Temporal Lobe/Amygdala | | |
| 1038 | Nervous System/Brain/Substantia Nigra | cancer, trauma, regeneration (in vitro and in | Von Hippel-Lindau (VHL) syndrome, |
| | | vivo), viral/bacterial/parasitic infections | Alzheimer's disease, Stroke, Tuberous |
| | | | sclerosis, hypercalceimia, Parkinson's |
| | | | disease, Huntington's disease, Cerebral |
| | | | palsy, Epilepsy, Lesch-Nyhan syndrome, |
| | | | Multiple sclerosis, Ataxia- |
| | | | teiangiectasia, Leukodystrophies, Behavioral |
| | | | disorders, Addiction, Anxiety, Pain, |
| | | | Neuroprotection |
| 1039 | Nervous System/Spinal Chord | | |
| 1040 | Respiratory System/Larynx | | |
| 1041 | Respiratory System/Lung | cancer, trauma, regeneration (in vitro and in | Systemic lupus erythematosus, |
| | | vivo), viral/bacterial/parasitic infections | Autoimmune disease, Asthma, |
| | | | Emphysema, Scleroderma |
| 1042 | Respiratory System/Lung/Lung Pleura | | |
| 1043 | Respiratory System/Trachea | | |
| 1044 | Sensory System/Eye/Retina | cancer, trauma, regeneration (in vitro and in | Von Hippel-Lindau (VHL) syndrome, |
| | | vivo), viral/bacterial/parasitic infections | Diabetes, Tuberous sclerosis |
| 1045 | Sensory System/Skin | cancer, trauma, regeneration (in vitro and in | Psoriasis, Actinic keratosis, Tuberous |
| | | vivo), viral/bacterial/parasitic infections | sclerosis |
| 1046 | Sensory System/Skin/Dermis | | |
| 1047 | Sensory System/Skin/Epidermis | | |
| 1048 | Sensory System/Skin/Epidermis/Hair | | |
| | Follicles | | |
| 1049 | Sensory System/Skin/Foreskin | cancer, trauma, regeneration (in vitro and in | Psoriasis, Actinic keratosis, Tuberous |
| | | vivo), viral/bacterial/parasitic infections | sclerosis |
| 1050 | Tissue Not Assigned | | |
| 1051 | Urinary System/Kidney | cancer, trauma, regeneration (in vitro and in | Diabetes, Autoimmune disease, Renal |
| | | vivo), viral/bacterial/parasitic infections | artery stenosis, Interstitial nephritis, |
| | | | Glomerulonephritis, Polycystic kidney |
| | | | disease, Systemic lupus erythematosus, |
| | | | Renal tubular acidosis, IgA nephropathy, |
| | | | Hypercalceimia, Lesch-Nyhan syndrome |
| 1052 | Urinary System/Kidney/Kidney Cortex | | |
| 1053 | Urinary System/Kidney/Kidney | | |
| | Cortex/Nephrons/Proximal Convoluted | | |
| | Tubule | | |
| 1054 | Urinary System/Urinary Bladder | | |
| 1055 | Whole Organism | cancer, trauma, tissue regeneration (in vitro | |
| | | and in vivo), viral/bacterial/parasitic infections, | |
| | | immunological disease, respiratory disease, | |
| | | gastro-intestinal diseases, | |
| | | reproductive health, neurological and | |
| | | neurodegenerative diseases, bone marrow | |
| | | transplantation, metabolic and endocrine | |
| | | diseases, allergy and inflammation, | |
| | | nephrological disorders, cardiovascular | |
| | | diseases, muscle, bone, joint and skeletal | |
| | | disorders, hematopoietic disorders, urinary | |
| | | system disorders | |

What is claimed is:

1. An isolated nucleic acid molecule encoding a polypeptide comprising an amino acid sequence that is at least 85% identical to a polypeptide including an amino acid sequence selected from the group consisting of SEQ ID NO:2n, wherein n is any integer 1-4534, or the complement thereof.

2. The isolated nucleic acid molecule of claim 1, said molecule hybridizing under stringent conditions to a nucleic acid sequence complementary to a nucleic acid molecule comprising the sequence of nucleotides selected from the group consisting of SEQ ID NO:2n−1, wherein n is any integer 1-4534, or the complement thereof.

3. The isolated nucleic acid molecule of claim 1, said molecule encoding a polypeptide comprising the amino acid sequence selected from the group consisting of SEQ ID NO: 2n, wherein n is any integer 1-4534, or an amino acid sequence comprising one or more conservative substitutions in the amino acid sequence selected from the group consisting of SEQ ID NO: 2n.

4. The isolated nucleic acid molecule of claim 1, wherein said molecule encodes a polypeptide comprising the amino acid sequence selected from the group consisting of SEQ ID NO: 2n, wherein n is any integer 1-4534.

5. The isolated nucleic acid molecule of claim 1, wherein said molecule comprises the sequence of nucleotides selected from the group consisting of SEQ ID NO:2n−1, wherein n is any integer 1-4534, or the complement thereof.

6. An oligonucleotide less than 100 nucleotides in length and comprising at least 6 contiguous nucleotides selected from the group consisting of SEQ ID NO:2n−1, wherein n is any integer 1-4534, or the complement thereof.

7. A vector comprising the nucleic acid molecule of claim 1.

8. The vector of claim 7, wherein said vector is an expression vector.

9. A host cell comprising the isolated nucleic acid molecule of claim 1.

10. A substantially purified polypeptide comprising an amino acid sequence at least 80% identical to a polypeptide comprising the amino acid sequence selected from the group consisting of SEQ ID NO: 2n, wherein n is any integer 1-4534.

11. The polypeptide of claim 10, wherein said polypeptide comprises the amino acid sequence selected from the group consisting of SEQ ID NO: 2n, wherein n is any integer 1-4534.

12. An antibody that selectively binds to the polypeptide of claim 10.

13. A pharmaceutical composition comprising a therapeutically or prophylactically effective amount of a therapeutic selected from the group consisting of:
a) the nucleic acid of claim 1;
b) the polypeptide of claim 10; and
c) the antibody of claim 12;
and a pharmaceutically acceptable carrier.

14. A kit comprising in one or more containers, a therapeutically or prophylactically effective amount of the pharmaceutical composition of claim 13.

15. A method of producing the polypeptide of claim 10, said method comprising culturing the host cell of claim 9 under conditions in which the nucleic acid molecule is expressed.

16. A method of detecting the presence of the polypeptide of claim 10 in a sample, comprising contacting the sample with a compound that selectively binds to said polypeptide under conditions allowing the formation of a complex between said polypeptide and said compound, and detecting said complex, if present, thereby identifying said polypeptide in said sample.

17. A method of detecting the presence of a nucleic acid molecule of claim 1 in a sample, the method comprising contacting the sample with a nucleic acid probe or primer that selectively binds to the nucleic acid molecule and determining whether the nucleic acid probe or primer bound to the nucleic acid molecule of claim 1 is present in the sample.

18. A method for modulating the activity of the polypeptide of claim 10, the method comprising contacting a cell sample comprising the polypeptide of claim 10 with a compound that binds to said polypeptide in an amount sufficient to modulate the activity of the polypeptide.

19. The use of a therapeutic in the manufacture of a medicament for treating a syndrome associated with a ORFX-associated disorder, wherein said therapeutic is selected from the group consisting of:
a) the nucleic acid of claim 1;
b) the polypeptide of claim 10; and
c) the antibody of claim 12.

20. A method for screening for a modulator of activity or of latency or predisposition to an ORFX-associated disorder, said method comprising:
a) contacting a test compound with the polypeptide of claim 10; and
b) determining if said test compound binds to said polypeptide,
wherein binding of said test compound to said polypeptide indicates the test compound is a modulator of activity or of latency or predisposition to an ORFX-associated disorder.

21. A method for screening for a modulator of activity or of latency or predisposition to an ORFX-associated disorder, said method comprising:
a) administering a test compound to a test subject at an increased risk ORFX-associated disorder, wherein said test subject recombinantly expresses a polypeptide encoded by the nucleotide of claim 1;
b) measuring expression the activity of said protein in said test subject;
c) measuring the activity of said protein in a control subject that recombinantly expresses said protein and is not at increased risk for an ORFX-associated disorder; and
d) comparing expression of said protein in said test subject and said control subject, wherein a change in the activity of said protein in said test subject relative to said control subject indicates the test compound is a modulator or of latency of predispostition to an ORFX-associated disorder.

22. The method of claim 20, wherein said test animal is a recombinant test animal that expresses a test protein transgene or expresses said transgene under the control of a promoter at an increased level relative to a wild-type test animal, and wherein said promoter is not the native gene promoter of said transgene.

23. A method for determining the presence of or predisposition to a disease associated with altered levels of a polypeptide of claim 11 in a subject, the method comprising:
a) measuring the amount of the polypeptide in a sample from said subject; and
b) comparing the amount of said polypeptide in step (a) to the amount of the polypeptide present in a control sample,
wherein an alteration in the level of the polypeptide in step (a) as compared to the control sample indicates the presence of or predisposition to a disease in said subject.

24. The method of claim 23, wherein said subject is a human.

25. A method for determining the presence of or predisposition to a disease associated with altered levels the nucleic acid molecule of claim 1 in a subject, the method comprising:
a) measuring the amount of the nucleic acid in a sample from the mammalian subject; and
b) comparing the amount of said nucleic acid in step (a) to the amount of the nucleic acid present in a control sample,
wherein an alteration in the level of the nucleic acid in step (a) as compared to the control sample indicates the presence of or predisposition to said disease in said subject.

26. The method of claim 25, wherein said subject is a human.

27. A method of treating or preventing a pathological condition associated with an ORFX-associated disorder in a subject, the method comprising administering to said subject the polypeptide of claim 10 in an amount sufficient to alleviate or prevent said pathological condition.

28. The method of claim 27, wherein said subject is a human.

29. A method of treating or preventing a pathological condition associated with an ORFX-associated disorder in a subject, the method comprising administering to said subject the nucleic acid molecule of claim 1 in an amount sufficient to alleviate or prevent said pathological condition.

30. The method of claim 29, wherein said subject is a human.

31. A method of treating or preventing a pathological condition associated with an ORFX-associated disorder in a subject, the method comprising administering to said subject the antibody of claim 12 in an amount sufficient to alleviate or prevent said pathological condition.

32. The method of claim 31, wherein said subject is a human.

The application's sequence listing, which the Patent Office published only in electronic form, follows.

SEQUENCE LISTING (9068 sequences)

SEQ ID NO: 1 - DNA, 212 bp, Homo sapiens
cggactgcggcatcgcgtgccgcggtagccggattcgacgctgtcgagattcatagcgcccacggctacttgctacatcagttttattcgccgctgtccaacacccgcactgacggttggggaagcgattatgacggacgagtccgtctgccgctggcggtcgctgacgcgatgcgtggggctattcccgacgacatgcctctgctggcccg

SEQ ID NO: 2 - protein, 70 aa, Homo sapiens
RTAASRAAVAGFDAVEIHSAHGYLLHQFYSPLSNTRTDGWGSDYDGRVRLPLAVADAMRGAIPDDMPLLA

SEQ ID NO: 3 - DNA, 388 bp, Homo sapiens
actagtgacgggacaagagatcagcccaagacatccaagcactgggctggtaggcagctgaccgtgcagctcagtgccacagttcaagctggggccgctggactggcaaggccttcacaggaagggaaaacggactggccagcaggcaccacgaacacatttcatgtgggccctcttcccaactttgcttggtgtgattatgatacagttatatataagccctaaattaaaggactctgtgttccttgcaaatggaaagaatgctttcatctaagtgttttaaatctgattcctgcctggggagtcgagcagtagcccaccaggaggaactggagtttggtgagaatcacagagctgggagatgccagagctccacaaaaggaaattt

SEQ ID NO: 4 - protein, 51 aa, Homo sapiens
MKAFFPFARNTESFNLGLIYNCIIITPSKVGKRAHMKCVRGACWPVRFPFL

SEQ ID NO: 5 - DNA, 352 bp, Homo sapiens
cggccgcagtcagccctgcggggcctgcaccggccaccaccacgtcatagacgaagtccggatcgatggtttcggtaatccccagttcgtcagcaagctccgacgtggtcgggttttgcaagaagcagcgttcccggccaaatcaccaccggaggctgctcgtgggccaactggaaacactcgatgaaaccgtcggcctcaggttcggtctccgtatcgatcaagcgatgcggataaccgttgcgcactaggaagcgctccagccgcaaggtatcggcggctgtgtcccggcccaaccagcaccacgccaccgaagccggcgcgggatcaacccacgcgcggcagatgaagg

SEQ ID NO: 6 - protein, 61 aa, Homo sapiens
MVSVIPSSSASSDVVGFCKKQRSRPNHHRRLLVGQLETLDETVGLRFGLRIDQAMRITVAH

SEQ ID NO: 7 - DNA, 281 bp, Homo sapiens
  misc_feature (208)..(208): Wherein n may be a, c, g or t
  misc_feature (209)..(209): Wherein n may be a, c, g or t
  misc_feature (272)..(272): Wherein n may be a, c, g or t
  misc_feature (273)..(273): Wherein n may be a, c, g or t
  misc_feature (274)..(274): Wherein n may be a, c, g or t
  misc_feature (275)..(275): Wherein n may be a, c, g or t
  misc_feature (277)..(277): Wherein n may be a, c, g or t
  misc_feature (278)..(278): Wherein n may be a, c, g or t
  misc_feature (280)..(280): Wherein n may be a, c, g or t
  misc_feature (281)..(281): Wherein n may be a, c, g or t
tcgacgtctggccctgtattggaacgtgctggggacttggcagccatgctggccaaccttgaagaaggtgatgtgctgttcatcgacgaaattcaccgtctttcccccgtgattgaagaaattctttaccctgccatggaagattaccaactcgacattatgattggtgaaggtcctgcggcgcgttcaattaagctcgacttacccnnttttactttaattgccgcaaccacacgtgctggactcctcacctctcctttacgtgaccgggnnnncnncnn

SEQ ID NO: 8 - protein, 93 aa, Homo sapiens
  misc_feature (70)..(70): Wherein Xaa may be any naturally occuring amino acid
  misc_feature (91)..(91): Wherein Xaa may be any naturally occuring amino acid
  misc_feature (92)..(92): Wherein Xaa may be any naturally occuring amino acid
  misc_feature (93)..(93): Wherein Xaa may be any naturally occuring amino acid
STSGPVLERAGDLAAMLANLEEGDVLFIDEIHRLSPVIEEILYPAMEDYQLDIMIGEGPAARSIKLDLPXFTLIAATTRAGLLTSPLRDRXXX

SEQ ID NO: 9 - DNA, 292 bp, Homo sapiens
  misc_feature (1)..(1): Wherein n may be a, c, g or t
ncgcccacacgaagatgcttaacaaaacgaggggtgtcgtcgccaggctcggcacacaacggcacctcgaccggatcgtcgacgttggccaggaaccgcgccacgtgcctgcgattcattgtcggcaatgtgaggacagactccccggtgagcatcgaggcaagacccgcatgggaatagatgtcgactaacgccaccgctgggctgaatcgcacgagatccgccggatgcgtcgtcggggcgacaagggaggccatcgtctccatctcgtcgtgacccttttgcttcatga

SEQ ID NO: 10 - protein, 96 aa, Homo sapiens
MKQKGHDEMETMASLVAPTTHPADLVRFSPAVALVDIYSHAGLASMLTGESVLTLPTMNRRHVARFLANVDDPVEVPLCAEPGDDTPRFVKHLRVG

SEQ ID NO: 11 - DNA, 278 bp, Homo sapiens
acgcgttgtcttctctccgtggtcctatctagttcttacccaggtgagtctaggatttatgctctggaagccagaagtcataataatgaacattcatatgatcccttacagaatgcaaaaggccaatctggcttccagtgtctccaggtaggtattgctcaccctctttcctgagataagggaacagaggctcaaagtggagagagagaacttgatacaatgctgaccccatcttaaggtggatgacaggagcatggacacccagctgagtacaggct

SEQ ID NO: 12 - protein, 60 aa, Homo sapiens [sequence omitted]

SEQ ID NO: 13 - DNA, 313 bp, Homo sapiens
  misc_feature (1)..(1): Wherein n may be a, c, g or t
nttgagagagaggcccatgtagcatttttccgaggtgtattgggaaggacaggtgaggccagcatggatgaaaactcccatataactttcaaaggcttcctgtatgtcatgtcccctcctagactcacccaagctacagccttctctccccagcctctcacagacaaaccccaacagagaacggggtttctttgtcagttcacctcctgactcaaatcttcatctgcaatctgatgtctgcctccaccaatggattgaaatcactccagaaaaagttgccaggaactttttaattgctacaatcaatatgtgg

SEQ ID NO: 14 - protein, 70 aa, Homo sapiens [sequence omitted]

SEQ ID NO: 15 - DNA, 258 bp, Homo sapiens
ggcctgcacttttatactggacagctgttcaacattcctgccattacacaagccggacatgcaaagggctgttttgttggctttgacctagcgcatgcggttggaaatgttgaactccacttacatgactgggatgttgactttgcctgctggtgctcctacaagtatttaaattcaggagctggaggtctggctggtgccttcatccatgagaaacacgctcacacgatcaagccagcgttagtgggatggttcggc

SEQ ID NO: 16 - protein, 86 aa, Homo sapiens
GLHFYTGQLFNIPAITQAGHAKGCFVGFDLAHAVGNVELHLHDWDVDFACWCSYKYLNSGAGGLAGAFIHEKHAHTIKPALVGWFG

SEQ ID NO: 17 - DNA, 660 bp, Homo sapiens
  misc_feature (1)..(1): Wherein n may be a, c, g or t
ntcatgatcaaattctttctgttgctgttagccccatcagatttcctggtgttataaacttgataaacgccaccggtgggattatcgtacctttgcttattggtgaagatgctatgaaaatcgcccctcgaaagttgaacactgctcatctcttgtaagtataatctggtcttcttgctggtttcgcctttaccgtaataagaagagtgaatagtttttgttttacgtgtagaacttaaagtgataacatttgttcaagtaaacctttatgttagttcacgcgtcttttgtcgcctcgtctaatttttacgcgtgacatttttccaagcagagatattttattgagcagcgaagaagagttagagaataagaaagtgatgcgataaaaaatccacccaattagcatagatcctttcgtatatggctgaagaaggtggtacgcgcatagctattaacatatatgcaaaaagaacggcaaaaggcgaggaggtttttatgccaccgctagtatttgacatagatcacatcaaacttctaaggaaatggggtatttgtggtgtgttatctggaactttgcctactgcagcacagcaaaatgtatttttgtcggtacctttgaggcttatgttagaagatgtgctgtggctgcatttgaacaat

SEQ ID NO: 18 - protein, 55 aa, Homo sapiens
MPPLVFDIDHIKLLRKWGICGVLSGTLPTAAQQNVFLSVPLRLMLEDVLWLHLNN

SEQ ID NO: 19 - DNA, 247 bp, Homo sapiens
acgcgttgtcgtctctccgctgttccacacctggaggtggaggatggaagataaggaaagattagacagagtcccatggccatgaggaacaaaatgtcaaccagtggaaacagagaaattaacaggcacagagactgcagagtccagggagcccagaagaaggcacattacattacacagcccagcagagtccacaggagtggtctgtggaaagggggaatgcttttactggggctggactgatgaa

SEQ ID NO: 20 - protein, 55 aa, Homo sapiens [sequence omitted]

SEQ ID NO: 21 - DNA, 262 bp, Homo sapiens
acgcgtgaagggatggtggggccagggaggaccttcattccaggctggggcttttgtgggctgtttctggagagagtgagcttcccacaggaagcacatttagtggaggaacttcttgttggggctgttggagtggagactgaagtcatcccaggcctccatgccctgtgaatttgtcatctgctggacgttggtggcctcccaagcttccatgctgatcgcgtgggggctgttcactggtgccggctgatgcagtgcttac

SEQ ID NO: 22 - protein, 52 aa, Homo sapiens [sequence omitted]

SEQ ID NO: 23 - DNA, 325 bp, Homo sapiens
ccgtctccccaggatggcgaatcagtgaggtgcaggacgctaaagccaaggccaacgcagagactagtaacggcgaagccgacgagacggttatctgccacgttgctgctgacggattcgaggagaggatggtgccgttcccagttccgtcaggttcttatcgcgatctggcagtcgtcaaggatggtgtggtgtggatcgaggtggctgatcgcggcggcgagctgggcgctacccgtgccggtgttaccggcgaagcacccagtgacgtcttgtggcactacaacctgtccgcccgtcacctcgataagctgtgtgaacgcgt

SEQ ID NO: 24 - protein, 65 aa, Homo sapiens
MVPFPVPSGSYRDLAVVKDGVVWIEVADRGGELGATRAGVTGEAPSDVLWHYNLSARHLDKLCER

SEQ ID NO: 25 - DNA, 378 bp, Homo sapiens
  misc_feature (1)..(1): Wherein n may be a, c, g or t
ncggagacgtgtgtccgctcaatccaggcctctgtgaagcatccctacgaagtaggcatcaaggaagaggaaaagctgtttatgtacctccgggcatccgggcaggctaaagccctacagtatgccttctttgctgaaaagtctgcaaataagtggtcaactccctcaggagcgtcttggaaaacagcctctgctcaacccgtctcctcagttggcgttcttggcttgggaacgatgggccgaggcatcgccatttcttttgcgagagtggggatctctgtggttgctgtggagtcaggcccaaagcagctagatgctgcaaagaagataatcactttcaccttggagaaggaagcatccagagcgcatcagaacggc

SEQ ID NO: 26 - protein, 126 aa, Homo sapiens
  misc_feature (1)..(1): Wherein Xaa may be any naturally occuring amino acid
XETCVRSIQASVKHPYEVGIKEEEKLFMYLRASGQAKALQYAFFAEKSANKWSTPSGASWKTASAQPVSSVGVLGLGTMGRGIAISFARVGISVVAVESGPKQLDAAKKIITFTLEKEASRAHQNG

SEQ ID NO: 27 - DNA, 300 bp, Homo sapiens
cctagggcaaggacctcaccccatattttcctacctgaggagtcagggcacagggtaggggacaaagaacactgaccaactcctgcttctcccccaaatctctccagcccccattcaaaggaccctccattttctgctatgaaatctgtttatttgcagttgaactctcctggtggccagccctggtgtctgaagtttagaatgtggtgccatgctcttgcatgttgtgcttaaaaggcttttgttggaaaagcttgtgtaagccactggcacctgtacgttaaccatttactctcgcta

SEQ ID NO: 28 - protein, 57 aa, Homo sapiens [sequence omitted]

SEQ ID NO: 29 - DNA, 194 bp, Homo sapiens
  misc_feature (1)..(1): Wherein n may be a, c, g or t
  misc_feature (2)..(2): Wherein n may be a, c, g or t
nnacccgtgcggtcctacaaggccgtctacgtctatgaggtgccggtccgcctctggcactggatcaacgccttgtccatcaccgtgctggccggcaccggctacttcatcggcagcccgctgccgacccagccgggggaagccagcgccaacttcctgaggggctacatccgcttcttccacttcgcgggggc

SEQ ID NO: 30 - protein, 64 aa, Homo sapiens
  misc_feature (1)..(1): Wherein Xaa may be any naturally occuring amino acid
XPVRSYKAVYVYEVPVRLWHWINALSITVLAGTGYFIGSPLPTQPGEASANFLRGYIRFFHFAG

SEQ ID NO: 31 - DNA, 366 bp, Homo sapiens
  misc_feature (1)..(1): Wherein n may be a, c, g or t
ngcaagtcgtggccgaaactgcctgccggccggtgactgtgagtctcaaatcggccagtgggcaggcggagcagcagcaaaacaccttctgcaaacaggccaacggtacctgggaactgatctgaggatgaccatgaagaagcgcgcgctcgcgctggcagtggttggggcttgcggcctactgccgcaagcattcgctcacgagctggccgtctcgaaaaaagatcacatcaaggtagatgtcccaggcgaagcctcaaactggtgcaaacccgaaattgagctgaccattcgacggccaggtcgggacaaccaagcgctcctgactggcctggtcggcaaactaccaactgtactcgccaatga

SEQ ID NO: 32 - protein, 79 aa, Homo sapiens
MTMKKRALALAVVGACGLLPQAFAHELAVSKKDHIKVDVPGEASNWCKPEIELTIRRPGRDNQALLTGLVGKLPTVLAN

SEQ ID NO: 33 - DNA, 257 bp, Homo sapiens
  misc_feature (257)..(257): Wherein n may be a, c, g or t
acgcgtgctcccgtcaccattctcatctcgatcgacggctttcgccccgattaccgcacgcgcggggtgacgcccaatctcgatgcgctggccgccagtggcatcagcgcggcgatgcggccgtccttcccgtccaagacatttccccatcactggacgctcgtcaccggcctgcgccccgatcgcaacggcatcgtttccaattcgatggaggatgccgcgcggcccggcgtgaccttcacgatggaaaattgtcn

SEQ ID NO: 34 - protein, 85 aa, Homo sapiens
TRAPVTILISIDGFRPDYRTRGVTPNLDALAASGISAAMRPSFPSKTFPHHWTLVTGLRPDRNGIVSNSMEDAARPGVTFTMENC

SEQ ID NO: 35 - DNA, 534 bp, Homo sapiens
tctccaagtccttcttccaacagagacacgttgttctcgctctcttcagacaccacgaccgccacggccaccaataataataaacggagacgcgctgaaggcgaagacgagggtgataacacctccaaccacgacactttgcgcgacgaagactacgataatgatgacgacgaaattgcttccattgaagcgccacctctgcttcctcaagacatacccgttttccgaatcttgtttaccaacacgaagtaccagatgcttgccgcgcacctctcgtgcgtcgccaacgtggtctttcacatgcttacctacccgctattcatgtacatctttgtagacctaatcatcggcttcgctgtaggtaacttgctcggcaagggcatccgcatctttaatctcttggcccactggattaagggcggcgtattttttactctgggcgttgtctctttagcaagatactgcggtttcgcagctaagtacggctgggcatggaacaacatcagcttcacctctcaactcacacaaacgcgt

SEQ ID NO: 36 - protein, 178 aa, Homo sapiens
SPSPSSNRDTLFSLSSDTTTATATNNNKRRRAEGEDEGDNTSNHDTLRDEDYDNDDDEIASIEAPPLLPQDIPVFRILFTNTKYQMLAAHLSCVANVVFHMLTYPLFMYIFVDLIIGFAVGNLLGKGIRIFNLLAHWIKGGVFFTLGVVSLARYCGFAAKYGWAWNNISFTSQLTQTR

SEQ ID NO: 37 - DNA, 346 bp, Homo sapiens
accggtttgtctgatggcaaagcaactgggaaaggtcttcagagaggctcctgaaggctcaaacaacctcctgagaacagcaatgattaagttatgttctcagcctacagcagttcaatcaaggaaacaggagcctgcttcgtgcactactacagtcatacaggaataggtcatgttacttgactatggaactcttaggagatgagctttactatgaagtcacaccactgtagcaaagttataatgaagccctttagaattgcttcccacctaggaatagctctgaaggtcctgattctgaatgtgcagacctattaactacaaggtcatggcctttgactgtaca

SEQ ID NO: 38 - protein, 51 aa, Homo sapiens
MAKQLGKVFREAPEGSNNLLRTAMIKLCSQPTAVQSRKQEPASCTTTVIQE

SEQ ID NO: 39 - DNA, 295 bp, Homo sapiens
tctagagcatcgtgaggacaagaagggtctcatgttcacagttgtattccgtgactagtacaggactcgacacagttggcttttcataaatgcttgttgcagaatttacgaataaacaaatgaagaaacaaacgaacgaatcaaaggtgggggagggtgtgaaggtggagctgaactacaggggcaatgccaggagcagggatgtgagggtcagatggagatggggaccagaaggaggggaaatgaatttggagcagggcccagctgggaggctgtgcaagtacatccagggccc

SEQ ID NO: 40 - protein, 68 aa, Homo sapiens [sequence omitted]

SEQ ID NO: 41 - DNA, 226 bp, Homo sapiens
  misc_feature (1)..(1): Wherein n may be a, c, g or t
nacgcgtcggcgctcggcgtcagctccttcatctggcaggacctgttgggcagggacctgcactgggcagccccgtcgatcgccttgatcgccttggtggccgtcggcgcggactacaacctgctgctgaccatgcggctgcgcgaggaggtgacgcggccggatgcgggtttgaagaccggcatgatccggacgttcggcggcacccgcggggggggtgaccacc

SEQ ID NO: 42 - protein, 75 aa, Homo sapiens
  misc_feature (1)..(1): Wherein Xaa may be any naturally occuring amino acid
XASALGVSSFIWQDLLGRDLHWAAPSIALIALVAVGADYNLLLTMRLREEVTRPDAGLKTGMIRTFGGTRGGGDH

SEQ ID NO: 43 - DNA, 343 bp, Homo sapiens
aagacattagagatcggattgaaagaaccagtgagatttgggataaatagtacttgttttgttaaataaaatgtgtctaagggggaaaagccgatgtggtcttccccctttggttgttaggtgaggcctgtttgaagcctgggagggcagggtctgtagaacttccttcatctgctccacacctgtactgtaaacagtggagctatgagtaatgggatgacaagctgtgccttctaaatcccaagagattctgctgaagagctgtgtcttaaagccctgggtcaacacaggagtatcgttatggacacctgtgcatgcttccctcccagcgtcccccacgcgt

SEQ ID NO: 44 - protein, 54 aa, Homo sapiens [sequence omitted]

SEQ ID NO: 45 - DNA, 724 bp, Homo sapiens
acgcgttgagtagtaatgcaagaacgcaacaatttcacgctttctacttaagaggacagatcttcgagcagaatatttttctcctagcgcggctttcagaatcttcttaccatctgcaggacatcacatgcaagcacatgaagctggaaccacgcaccattaaatgtaaacctacagacatagctagcacagaaatgctactttggaaacctcggttgcatcggctgacctcggctgttcagcaacgtgagctggttgttgttattgttcatagaatcctgtattttaccagtgtagctttgtccgcccaccccacgcttttggccactagtatgtacgtatatgcgtgggctctatatcattgaaaacgaattttccacgcaaaacccacttcacaccataaaggccttatgacgatgtacattcttcccctcccccctcctcccgaaggaacccttatagtgatcctaatacggtataacgtaaaccggagttgtcagcagagagaagcgaataatatgttttgcgtggggttcccacgagcggcaggaaccgtagcgcattgaaaaatgaatcatcgatcatctttgggtttcaagggttcggacttcgccaaaggtccgaatacttccaccagtatttctctttttccctttccagtctcgttcttcgccgaatccccgccttcccatcatgatcgtttctctgtttctctctttccgga

SEQ ID NO: 46 - protein, 75 aa, Homo sapiens
MKLEPRTIKCKPTDIASTEMLLWKPRLHRLTSAVQQRELVVVIVHRILYFTSVALSAHPTLLATSMYVYAWALYH

SEQ ID NO: 47 - DNA, 360 bp, Homo sapiens
ctagtactttatgctgatggtgaacgtcgttacatccttgcccctaaaggcatggttgctggtgatgtgatccaatctggtgaagatgcatcaattaaagtaggtaactgcttaccgatgcgtaatattccagttggtacaacagtacacgctgtagaaatgaaacctgctaaaggtgcacaaattgcacgttctgctggttcttacagccaaattatagctcgtgatggtgcttacgttactctacgtttacgtagtggtgaaatgcgtaaaatccctgctgagtgtcgtgcaacaatcggtgaagttggtaatgcagaacatatgctacgtcaactaggtaaagctggtgctacgcgt

SEQ ID NO: 48 - protein, 120 aa, Homo sapiens
LVLYADGERRYILAPKGMVAGDVIQSGEDASIKVGNCLPMRNIPVGTTVHAVEMKPAKGAQIARSAGSYSQIIARDGAYVTLRLRSGEMRKIPAECRATIGEVGNAEHMLRQLGKAGATR

SEQ ID NO: 49 - DNA, 433 bp, Homo sapiens
  misc_feature (1)..(1): Wherein n may be a, c, g or t
nctctttcacccaccacaccattacttacaatttttcttaccataaaacgtgggtacgacgaggagatggggggtcgttaaatattgtcagtatatactcggagattaaatttcgaactttagccaatcgaggtccttgagttcttgtccgcttggatcattagggtggccattgttaacccgaaggccgctggtcaatgtagactttgtagtgggtaaattcacctcgtacttgttccccatactgaccatgctggtatccaaatccaatagttcatcatcatgcagttgtaacagcgtaaaattcttaaagtaatcttcggtctggtcgtctggatcctccattggtatgcttcggagagcatccatctcggcgtttccgatattgtccatatctgagggaacaatgaaagattgacggtgcagattgggt

SEQ ID NO: 50 - protein, 95 aa, Homo sapiens
MDNIGNAEMDALRSIPMEDPDDQTEDYFKNFTLLQLHDDELLDLDTSMVSMGNKYEVNLPTTKSTLTSGLRVNNGHPNDPSGQELKDLDWLKFEI

SEQ ID NO: 51 - DNA, 367 bp, Homo sapiens
  misc_feature (1)..(1): Wherein n may be a, c, g or t
  misc_feature (2)..(2): Wherein n may be a, c, g or t
nncgaaggcctgacgagttgttgccaacagggctattccctgcggttggtcaacagccgggacgagctgccgcaagccatcgaccatgacgtggcggtggtgatgcttacccacgtcaattacaagaccggctacatgtacgacatgcaggcgctcaccgccttgagccacgaatgtggcgcgctgagcatctgggacctggcgcattcggcgggcgcggtgcccatcgacctgaacaaggccggtgccgattatgcgattggctgcacctacaaatacctgaatggcgggccgggctcgcaggcgtttgtgtgggtcaacccggccttggtggatgtggtgcgccagccgctatcgggttggtttg

SEQ ID NO: 52 - protein, 122 aa, Homo sapiens
  misc_feature (1)..(1): Wherein Xaa may be any naturally occuring amino acid
XEGLTSCCQQGYSLRLVNSRDELPQAIDHDVAVVMLTHVNYKTGYMYDMQALTALSHECGALSIWDLAHSAGAVPIDLNKAGADYAIGCTYKYLNGGPGSQAFVWVNPALVDVVRQPLSGWF

SEQ ID NO: 53 - DNA, 402 bp, Homo sapiens
aggcctcgggcgggtgatagggagctgctgctggttggaaggctttgggtggtgttcattgtggcagtgtccgtggcttggctgccagtggtgcaggcagcacagggcggccagctcttcgattacattcagtctgtctccagctacctggcgcctccagtgtccgctgtctttgtgctggcactctttgtgccccgtgttaatgagaagggtgctttctggggactcattgggggcctgctgatgggcctagctcgtctcatacccgagttcttctttggcacgggcagctgtgtgcgaccctctgcatgcccagccatcttctgccgggtacactacctctacttcgccatcattctcttcttctgctccggcttcctcacactcgcaatctccctgtgc

SEQ ID NO: 54 - protein, 134 aa, Homo sapiens
RPRAGDRELLLVGRLWVVFIVAVSVAWLPVVQAAQGGQLFDYIQSVSSYLAPPVSAVFVLALFVPRVNEKGAFWGLIGGLLMGLARLIPEFFFGTGSCVRPSACPAIFCRVHYLYFAIILFFCSGFLTLAISLC

SEQ ID NO: 55 - DNA, 309 bp, Homo sapiens
  misc_feature (1)..(1): Wherein n may be a, c, g or t
nctgaccacatctcccatgaagttgctcttatcaaggtcaacagtgacttccatgttactaaatccaatggatattttccagtctccaacctttgacaccattgaccactctcttctcaaaatcctttccatgatttctgtgttacaacattctcgttttcttctaccctatctgatcttccatgctctcttttatcagcttgtcttttttttacccaaccattaaatagtgaaaattctcagggaccagtcctaaacccttttctcactctaatttttttcctcaggtgatgacgactactcccatgg

SEQ ID NO: 56 - protein, 69 aa, Homo sapiens
MKLLLSRSTVTSMLLNPMDIFQSPTFDTIDHSLLKILSMISVLQHSRFLLPYLIFHALFYQLVFFLPNH

SEQ ID NO: 57 - DNA, 266 bp, Homo sapiens
atcagagatatcagggccaaccccgccgttcaatggatccaagctgcactcgtagtattagttatatacaacccaacacggtgtgtttctgggaccgacgactggcggtgtccatcttaccaggtatcaacctgctggcatatgtgtctgatctggtgtactccactcgtctggtattcgtcaaggtctgagattgacaaggggctcccttccccatctctccttgcagcctcttcaaccagttgattacccaggtgattggtacc

SEQ ID NO: 58 - protein, 81 aa, Homo sapiens
IRDIRANPAVQWIQAALVVLVIYNPTRCVSGTDDWRCPSYQVSTCWHMCLIWCTPLVWYSSRSEIDKGLPSPSLLAASSTS

SEQ ID NO: 59 - DNA, 285 bp, Homo sapiens
tctagagctttcaagttccttcacaatcaaaatttatttcccaataacctctaagtatgttttactctttcatgcccatgacacaatctagcaccacaattttgtggcttttgttcctaacagaacacgctctccattctctgcccatccaagtgccatgcacccatccgccaacacggaaaaatccgcttgctgccctcatctgctcaaaaacactcaaacctatagaaattcatcttttttttttttttggacccaaaaaaatggggcctaaaaggacacacc

SEQ ID NO: 60 - protein, 76 aa, Homo sapiens [sequence omitted]

SEQ ID NO: 61 - DNA, 429 bp, Homo sapiens
cgcgttgccacaccggaagacccggccagctcacgcctgggtgaaagtttctgggcgttcctgccgcgttcggtgtggttcagcgccgtgtcggcgtggaacctggagcgcgagcgcctgcgcaaactcggcctgccggcctggcactggaagaacgccgtgctcagtgcctggatgtacagcgtggtgttgtggggggtgatgattgtctggttgggcgcggcggtgattccgttcctgatcattcagggtgtctacgggttctcgttgctggaagtggtcaactacgtcgagcactacgggcttaaacgccagaagttgcccaacggtcgttatgaacggtgttcgcctcggcactcgtggaacagcaaccggattgtcaccaatatctttctgttccaacttcagcggcattccgaccaccatgcc

SEQ ID NO: 62 - protein, 143 aa, Homo sapiens
RVATPEDPASSRLGESFWAFLPRSVWFSAVSAWNLERERLRKLGLPAWHWKNAVLSAWMYSVVLWGVMIVWLGAAVIPFLIIQGVYGFSLLEVVNYVEHYGLKRQKLPNGRYERCSPRHSWNSNRIVTNIFLFQLQRHSDHHA

SEQ ID NO: 63 - DNA, 343 bp, Homo sapiens
  misc_feature (343)..(343): Wherein n may be a, c, g or t
taattacttagcatgctatttaacattttctaaaaattatgacatttgggtatatttttgtcaataaagacattgatggtagtgtttgtatttgcttataattgagattttacaagttcccttttcatggaactgactgtaaaacgtcaacttcaataaatttatgtttccaatataattgctcataaatttgtaagtaatgtagcataaataagaatatatggatagtttcttttttcttaattaaacaagcaaattttctgatttttctagttttaagtagaattttgaatgtttgatacatgtttatacaaaactagtgtaaagttctatatcatctaan

SEQ ID NO: 64 - protein, 59 aa, Homo sapiens
MYQTFKILLKTRKIRKFACLIKKKETIHIFLFMLHYLQIYEQLYWKHKFIEVDVLQSVP

SEQ ID NO: 65 - DNA, 329 bp, Homo sapiens
  misc_feature (100)..(100): Wherein n may be a, c, g or t
  misc_feature (192)..(192): Wherein n may be a, c, g or t
gaattcaccacgcctcaggcccacggcgccaaagagatggagtcgctcctgcgccgggttaccgataaggccgcgggtaagtggttgttggtccgcgtcnatatcgacgcccagccccgactggctcaaagtctgggggttaaagccgttcccattctcgttgccgtcattattggtcaactcgccccgctngctcagggcaccatcgacgagcagcagttccgtcagctcactgagcaggtcatccaggcagcgacgtcagcgggcatggtggggcgcgcggaaccggtgatggtcgaggtgagcagtgaggaaccggtcggtccgga

SEQ ID NO: 66 - protein, 109 aa, Homo sapiens
  misc_feature (34)..(34): Wherein Xaa may be any naturally occuring amino acid
EFTTPQAHGAKEMESLLRRVTDKAAGKWLLVRVXIDAQPRLAQSLGVKAVPILVAVIIGQLAPLAQGTIDEQQFRQLTEQVIQAATSAGMVGRAEPVMVEVSSEEPVGP

SEQ ID NO: 67 - DNA, 258 bp, Homo sapiens
  misc_feature (226)..(226): Wherein n may be a, c, g or t
gtgcactgtagcggcacaaacccgcgccaaccactgagctgcgggtttgttgcgggagtcgtgtgcgacagtggtgcgcatcctcagggtcagttgcgggccctcctgcgacgttatgtccgtccctaccgcagtctggtcgcggtggtcgtcatgctgcagatcatcagcaccctggccgcgctctatctgccgacagtcaacgccgcgatcatcgacgacggantgccgcagggtgatacgcacacgatcacgcgt

SEQ ID NO: 68 - protein, 86 aa, Homo sapiens
  misc_feature (76)..(76): Wherein Xaa may be any naturally occuring amino acid
VHCSGTNPRQPLSCGFVAGVVCDSGAHPQGQLRALLRRYVRPYRSLVAVVVMLQIISTLAALYLPTVNAAIIDDGXPQGDTHTITR

SEQ ID NO: 69 - DNA, 276 bp, Homo sapiens
gggcccgcggtgagccacgatcatgccactgtactgcagcctgagtgacagagcgggaccctatctcaaaaaaataagagatatcacttaccaactttgcctgacctaaaagaagtattggataggtgataaaatctttaggatgacttaagaaaactacgcttagaaaaggccaggaacaaaaggatgctggccacacagccaaagagcatatcacagaatccatctagcagggacatagtttgcatggcttgccatgctgtccccgggaacttg

SEQ ID NO: 70 - protein, 75 aa, Homo sapiens [sequence omitted]

SEQ ID NO: 71 - DNA, 351 bp, Homo sapiens
  misc_feature (314)..(314): Wherein n may be a, c, g or t
  misc_feature (345)..(345): Wherein n may be a, c, g or t
  misc_feature (351)..(351): Wherein n may be a, c, g or t
gaattccaacaagatagattatctgggaaaatatttctgaccgaaacacctgactgaaacacctgaacagaagaaagtatgatgaaagtatgatgattctgaaacgatgattttcagaaacgacacagatgaaagaattagtagacaataccattaaaactgttaaatatgttcaagaggtttgagagattgaggcatggaagacgtaaaaagattaaatcaaacttccagagatgaaaacagcaatgtgtaaaaggaaaaatatattggatgagattaatggcacgtaacactgcaaaataaaagattagtanatgagaatacataacaatagaaatgatccanaatttn

SEQ ID NO: 72 - protein, 62 aa, Homo sapiens
  misc_feature (5)..(5): Wherein Xaa may be any naturally occuring amino acid
MYSHXLIFYFAVLRAINLIQYIFPFTHCCFHLWKFDLIFLRLPCLNLSNLLNIFNSFNGIVY

SEQ ID NO: 73 - DNA, 242 bp, Homo sapiens
acgcgtcctcagcagacaccatcggactgttcttcggcgaggatgtgttcattgccatcgggtcgatcctgctcatcactggattcgttgacgccacctacaacctcaaactcgaggctctccaaatcgccttgtgggccattccgacggccatttgtgccttcctcatccatgcacctcgactgtggttgctggatcgcaaactcgccaagatggctgccgagggaggcgacgacgtcgac

SEQ ID NO: 74 - protein, 66 aa, Homo sapiens
MCSLPSGRSCSSLDSLTPPTTSNSRLSKSPCGPFRRPFVPSSSMHLDCGCWIANSPRWLPREATTS

SEQ ID NO: 75 - DNA, 591 bp, Homo sapiens
gctagcgcctggtcgatgctcaaagagacattcgtttcaccggatcgaccataggaaacccgtagcaagtggagaccttcgggacatgattctctcaagctgggccacttcgccgacatgtgggtaagtgccttggcagtaacggtggtcgttccgggcgccaccagcatgccgtttccgcgtgggctggagtctagctcgggtgcctgcaaggcgagattgacgtggccgatcggcgcgcctggcgccatctcgggcccaacggtctcgatgacattgctgagcagttttgtggcaggtccagccgaacaggctacgacgacccgaggggtcaggaagaaacgactctcgccgttggtgacggggggcaaagatggatccggattgcgagaggttccagcggtctccacgagccactgatcttcgtggcgggttagtccgcgagctcctactcgggtcatggtcgtcgcgccggcctgttctgcctgacgacgcagctcggccggcatgatgaacatgccaccggctaccgacgcgactgcgggccccgctggcatccgtgagcggcacagggcaactcccgcggctagc

SEQ ID NO: 76 - protein, 185 aa, Homo sapiens
MPAGPAVASVAGGMFIMPAELRRQAEQAGATTMTRVGARGLTRHEDQWLVETAGTSRNPDPSLPPVTNGESRFFLTPRVVVACSAGPATKLLSNVIETVGPEMAPGAPIGHVNLALQAPELDSSPRGNGMLVAPGTTTVTAKALTHMSAKWPSLRESCPEGLHLLRVSYGRSGETNVSLSIDQAL

SEQ ID NO: 77 - DNA, 162 bp, Homo sapiens
  misc_feature (1)..(1): Wherein n may be a, c, g or t
nggatccagcccaagatcgtccactgctggaggcccatgcggcgtaccttcaagacctatgatgagaatggaacggggctcctgagtgtggctgacttcaggaaggtgctgcggcagttcagcatcaacctgtcggaggaggagttcttccacgtgctcgag

SEQ ID NO: 78 - protein, 54 aa, Homo sapiens
  misc_feature (1)..(1): Wherein Xaa may be any naturally occuring amino acid
XIQPKIVHCWRPMRRTFKTYDENGTGLLSVADFRKVLRQFSINLSEEEFFHVLE

SEQ ID NO: 79 - DNA, 151 bp, Homo sapiens
acgcgtcgtttgatggatgatggacaagtcaccaacctgagaatcaatactatcttccttcgatacaaagaagaagagatcaagaaattgaaaggtgctgattatcagactgaaatcaagtacgttaccagccataagaagcgtaatgcgt

SEQ ID NO: 80 - protein, 50 aa, Homo sapiens
TRRLMDDGQVTNLRINTIFLRYKEEEIKKLKGADYQTEIKYVTSHKKRNA

SEQ ID NO: 81 - DNA, 160 bp, Homo sapiens
accggttgcatgagtgggaccgtgctggagcgaggctgcttctacagcgaaggcgatcgcgccgcagtcaccgttatcgactcattgccacccgaagcattggcaggccttgaagaagcggtggccgatggcaacctcacccgagagcaactggacgaat

SEQ ID NO: 82 - protein, 50 aa, Homo sapiens
MSGTVLERGCFYSEGDRAAVTVIDSLPPEALAGLEEAVADGNLTREQLDE

SEQ ID NO: 83 - DNA, 161 bp, Homo sapiens
ggatcccactccggaataagattgggccatcggtcggaactcgtgaaaccataccattgtgaggatgtcagcgctggtgaccccgtgatcgaggaaatggcgcactgtccccgagcagattcgcctggtcaatcccggcgataggggcgaaaccttcatga

SEQ ID NO: 84 - protein, 53 aa, Homo sapiens
MKVSPLSPGLTRRICSGTVRHFLDHGVTSADILTMVWFHEFRPMAQSYSGVGS

SEQ ID NO: 85 - DNA, 186 bp, Homo sapiens
  misc_feature (40)..(40): Wherein n may be a, c, g or t
cgggactctagcgacgaagatactggttcagaggcggtgncttcaagggagcaaacagaccttacaggcgagggtcatggtggagctgatgatgagcaagatgaaagtacaatacagagacaaagccgcaaaagaaagatttcgctacttttgcagcagcagtacgggtctagttccagcatggta

SEQ ID NO: 86 - protein, 62 aa, Homo sapiens
  misc_feature (14)..(14): Wherein Xaa may be any naturally occuring amino acid
RDSSDEDTGSEAVXSREQTDLTGEGHGGADDEQDESTIQRQSRKRKISLLLQQQYGSSSSMV

SEQ ID NO: 87 - DNA, 291 bp, Homo sapiens
  misc_feature (1)..(1): Wherein n may be a, c, g or t
  misc_feature (2)..(2): Wherein n may be a, c, g or t
  misc_feature (289)..(289): Wherein n may be a, c, g or t
nnggatccggattatggggctattgctaacaggtcaacggccatcaaggtgctcgttgccgtggcaccgccagccccggagcctactcgcgagccaccgacgaactccgctccttccgaggaaccgtcctcgtcgtcaatcgcaccggtcccgccggccccgacgactgcagtacccacgactagttcgtcgtcgggccgctgaccgatgcgcccatcggcgggctcatctggctggcgctagcgggggcttcgatgtccccataccacagcgtccgctaaattgcccncc

SEQ ID NO: 88 - protein, 67 aa, Homo sapiens
  misc_feature (1)..(1): Wherein Xaa may be any naturally occuring amino acid
XDPDYGAIANRSTAIKVLVAVAPPAPEPTREPPTNSAPSEEPSSSSIAPVPPAPTTAVPTTSSSSGR

SEQ ID NO: 89 - DNA, 352 bp, Homo sapiens
tgaggcctacggcgcctatccccaagcgtttccctccagcgtcgccgagcgcgcgcggatgccaatgagttggtgggaaaagcgcctggacaatccgttggaccgggtactcggcgcgttcgcggctgacaccttggccgggattgtcggcctggcctttgaacccggggaaaggcccggcacaaagtcacgctgttcggcatgttcgtgaccgaggcttatcagcgcaagggcctgggccgtgagttgctggagcggctcgatgccgcgcgacgccggcccggcgtcaaactgatccaactgaccgtcaccgccggcaacgacgcagccttcgcgctgtaccagcgctgcg

SEQ ID NO: 90 - protein, 63 aa, Homo sapiens
TRGKARHKVTLFGMFVTEAYQRKGLGRELLERLDAARRRPGVKLIQLTVTAGNDAAFALYQRC

SEQ ID NO: 91 - DNA, 177 bp, Homo sapiens
gtacaagatactttacaaaatatacaactaagcgacaatggtgaagataatgatgggaatagcaatgaaaataacgatattgaggatagtggggaggataaagaatcacaatcatatgaaaataaggagaacaacactatcaacttgaacagggggctgtcaaggcatggaaacgcg

SEQ ID NO: 92 - protein, 59 aa, Homo sapiens
VQDTLQNIQLSDNGEDNDGNSNENNDIEDSGEDKESQSYENKENNTINLNRGLSRHGNA

SEQ ID NO: 93 - DNA, 282 bp, Homo sapiens
  misc_feature (147)..(147): Wherein n may be a, c, g or t
  misc_feature (157)..(157): Wherein n may be a, c, g or t
  misc_feature (282)..(282): Wherein n may be a, c, g or t
agatctcctcttttaagtctgaggaaagggagcgactgaggattttctggccctccccagaagacgacgaggaggaaaagccccgaaacccctcactacgaggtgcccgcctacgggaaagaaacccgatcccaccatcggagcctnccaccccccngaagacgaactccagtgattcccactcacccctctccccccaccatcatccacgactctcccccacctcagccctgaggaagcccatccctctcaaaggttctcctttgtgagactccaccgccn

SEQ ID NO: 94 - protein, 64 aa, Homo sapiens
  misc_feature (40)..(40): Wherein Xaa may be any naturally occuring amino acid
GFSGPPQKTTRRKSPETPHYEVPAYGKETRSHHRSLPPPXRRTPVIPTHPSPPTIIHDSPPPQP

SEQ ID NO: 95 - DNA, 282 bp, Homo sapiens
  misc_feature (1)..(1): Wherein n may be a, c, g or t
ntatggaggtccacggggcattggcgcagttggtagcgcggctgctttgcaagcagtaggtcaggggttcgagtcccctatgctccaccccacgcacaagactcgaacccttggtttcgattcgggccttgttgctgtcttgggcccacgcgagggcgtcggcgttgatctgagggtcggggtgcatctctacgctctgtcgttctcgacgcggagttggtcgtcttcgtcgatgtgatcttggggaagaaggcttggttgcaaaggcgtgcgttgacgttt

SEQ ID NO: 96 - protein, 62 aa, Homo sapiens
MHPDPQINADALAWAQDSNKARIETKGSSLVRGVEHRGLEPLTYCLQSSRATNCANAPWTSI

SEQ ID NO: 97 - DNA, 752 bp, Homo sapiens
gaattctacgggattctggtagtcgccgaaaacactgaaatcgaccactgaatgctcccttgctctttgggcaaagtgcagcctgatgctccactgcctggcctgccggcatgtcctgagcgcagtcggcaggcgctagacttttggaggctgctatacgtcctgtgtcacttcttggcgattcccagtgctttggtggctgactgcagcgtggacttgactattccggcgtctcgtccgaagatgcggatcgcttgatcattgttgagccagatgtatgcctgatagcccgtgatcagaggttccggtactccttttgatggagacatcgaaaagagcggcttgcttggagatattttcgtaacccttgatgggtgacgccttgatgtttatttccaggccgtgattgacaccttgcgtggccaacgtggtatgaccacacctggaagtttgttcttcttgtgatttgtatgccttcttctgtcggtcggacatggtcgtggtgacgatgattcgtgtggatggtttgtcactgacggccacgagagtgtcgctgatctcgtgtgaagtgaggccgagggaggactgcctgagagccgcatcgcatccagctggggagatcttcgcttggctgagcgtcttgtcgagattgtccacaacgggcctgagctgagagtcgtcctggatgacaaacatgtggccatcgatcttcttgtgggagaacgccttggtgaagtcgtccttgctaatta

SEQ ID NO: 98 - protein, 145 aa, Homo sapiens
MFVIQDDSQLRPVVDNLDKTLSQAKISPAGCDAALRQSSLGLTSHEISDTLVAVSDKPSTRIIVTTTMSDRQKKAYKSQEEQTSRCGHTTLATQGVNHGLEINIKASPIKGYENISKQAALFDVSIKRSTGTSDHGLSGIHLAQQ

SEQ ID NO: 99 - DNA, 319 bp, Homo sapiens
agatctgaattgcattctgaaacaaaggtgtatgctccatcactccctgtaatcttggtgagggcagggacatgttgcttttgtttcatgctctattgtctgtgtgcccaacacatagtggacttcacttcagaaagtgcacattcaggatctgataaagaggattctggagtcttcattttgtccctcctcatcactgtgcgtgtaggacatataatgtgtgtgtaggacatacacagtcctataatcctgtcaatagcatacccagtatctggacaagagtacttctctggaagatgacctgggtaaaacttcatga

SEQ ID NO: 100 - protein, 74 aa, Homo sapiens
MKFYPGHLPEKYSCPDTGYAIDRIIGLCMSYTHIICPTRTVMRRDKMKTPESSLSDPECALSEVKSTMCWAHRQ

SEQ ID NO: 101 - DNA, 340 bp, Homo sapiens
acgcgttcagatctttaaaacgaaagtgatcataaacgaagaagagatgtatgatggcgtaccatgcgctgcatcctcaaccgataactcaagacgcttcacaggcttcagctctttcaccttttttttttgcaccaacttatgttctcagcacttagtagtatcacacaccaaacccagacgggacgcggcacaaaaaggcagaaaaggagtctgcaccaataccgctgcaggcctggggggtaggtgtcggctgtttctaatcgcgatcatatacttctaaaagcaaaaaagctattgcaggggaattttcggtgagaggctggacaaaaataagggc

SEQ ID NO: 102 - protein, 78 aa, Homo sapiens
MYDGVPCAASSTDNSRRFTGFSSFTFFFCTNLCSQHLVVSHTKPRRDAAQKGRKGVCTNTAAGLGGRCRLFLIAIIYF

SEQ ID NO: 103 - DNA, 311 bp, Homo sapiens
ggcgcccctcccaacggccactttaacacccagcaacttgttttcattttgtactaaaactgcactctgggcttgcgggtcagccccgggagacgccactgctcccttttccttggtgatgaattccccacctttggggaggggaggggtgggaatgaatggggagagggaggcgaagatggaggcttggcccaccctccatggggcagaaatggcacttggaagcaaaagaccttcctgctggtggctggggcctttttcagccgcatcagagccagatgtcctagcatggatgggttggtgagattagg

SEQ ID NO: 104 - protein, 78 aa, Homo sapiens
MLGHLALMRLKKAPATSRKVFCFQVPFLPHGGWAKPPSSPPSPHSFPPLPSPKVGNSSPRKREQWRLPGLTRKPRVQF

SEQ ID NO: 105 - DNA, 269 bp, Homo sapiens
  misc_feature (43)..(43): Wherein n may be a, c, g or t
aaatttcttgaaacaaatgaaaatgggaacacagcataccaanacctatggcctacagcaaaagcagttctgagagggaagtttataacaacaaatacctacatcaaaaaagaagacagacttcaaataaacaaactaattatgaaccttagaagagcaagaacaaaccaaacccgaaggagcagaaagaaagaataattgtagcagaaataaatgaaattgagacgaaaatacaaaagagtaagaaaacagaaagttggttttgtaaa

SEQ ID NO: 106 - protein, 65 aa, Homo sapiens
  misc_feature (15)..(15): Wherein Xaa may be any naturally occuring amino acid
KFLETNENGNTAYQXLWPTAKAVLRGKFITTNTYIKKEDRLQINKLIMNLRRARTNQTRRSRKKE

SEQ ID NO: 107 - DNA, 282 bp, Homo sapiens
  misc_feature (1)..(1): Wherein n may be a, c, g or t
nacgcgttcgaccgcgccacgcgcgggcacgttatcgactacatcgactttcacctgcacggctggcactggcccgccttcaacatcgctgacatggccatcgtgggcggggcgatcgcgctggtggcccagtcgttcatgagcgtggagaacccggccgccacaaaggagtcccagtgacattgggacgatccggaaattcgcaatgcacacggtgcaggacaccaatctgaagagaacggcccccagcatgagcggccgcggcttggccctcatgctagc

SEQ ID NO: 108 - protein, 59 aa, Homo sapiens
  misc_feature (1)..(1): Wherein Xaa may be any naturally occuring amino acid
XAFDRATRGHVIDYIDFHLHGWHWPAFNIADMAIVGGAIALVAQSFMSVENPAATKESQ

SEQ ID NO: 109 - DNA, 271 bp, Homo sapiens
actagtggcttccctttaatggggactgggcagggagctacctgctacaaccagacacccaaatgccaggacaaactggtcttttatttggggcacttgaattcctttaatgaaggatcttttgatcatttgcttgggagataggcccctgagtgctggatattctgcatgtggggaggcaggcagaaggcagcaggtatggattgctctttctaatgactctattcctcatctcacttctgccatgtgtggctctgggatctctggatcc

SEQ ID NO: 110 - protein, 54 aa, Homo sapiens [sequence omitted]

SEQ ID NO: 111 - DNA, 344 bp, Homo sapiens
gatctcgaaactgtcaagcagcagattgaagagctaaagcaatttaagtctgaggcctatcaacagcagatagaaatggaaagactgaatcatcaagcagagcttttgctaaagaaagtaacagaagagagtgacaaacacactgttcaagacccattaatggaactgaaattgatatgggatagcctggaggagagaatcatcaacagacagcataaactggagggtgctctattagccttgggtcagttccaacatgccctggatgagctcctggcatggctgacacacaccgagggcttgctaagtgagcagaaacctgttggaggagaccctaaagccat

SEQ ID NO: 112 - protein, 114 aa, Homo sapiens
DLETVKQQIEELKQFKSEAYQQQIEMERLNHQAELLLKKVTEESDKHTVQDPLMELKLIWDSLEERIINRQHKLEGALLALGQFQHALDELLAWLTHTEGLLSEQKPVGGDPKA

SEQ ID NO: 113 - DNA, 468 bp, Homo sapiens
gctagccagctatatagttacaggaaaggctggggtgtctgctacccacgctttttaaaatgattccccaacaccaaattagccaactgcgcttaagtgatttctatttgactaattgcctttaaggagtctgttaaaacccctcacttactccagcccacactccgtcagatattgcaaaacagcactatggttggggcagtggctgggaagcagctatggttgctaggatggagacagcctggtgtgatggcttgggtgggcccatgttgtttttattattattattttgcaattatgtgagaggagcattatctcatatactttttaaaaaagaatccccctgtcttctccccttgggtctttcctgttgcatcactccggcaaaactgtgtactctttatttagtttcaaactcttgtctccccctctcctgccatacacacaaacacacaagtgtgtgtgcac

SEQ ID NO: 114 - protein, 83 aa, Homo sapiens [sequence omitted]

SEQ ID NO: 115 - DNA, 291 bp, Homo sapiens
cctaggtttttggcatcagcaacctggcagatgctggtatcttcaatggacacggggaagatgggcagtagattgtgggcgcagagagttctgtgcaggcatgttaaattgcagatgcccattaatggccacaggagatgccaactaggtacttggcaaagtgagtctgggaattgagaccatcatggtaggagatagcatttggaagattttggcagaggtgggatccaaatccatgggagtggaatatagatagaaaagtggacatgggactagacatggccactaacg

SEQ ID NO: 116 - protein, 52 aa, Homo sapiens [sequence omitted]

SEQ ID NO: 117 - DNA, 314 bp, Homo sapiens
  misc_feature (1)..(1): Wherein n may be a, c, g or t
  misc_feature (2)..(2): Wherein n may be a, c, g or t
nngggggggggggaagtgaatgtactatatcccaatgaacaaatctgtttacattatggcaaatgggcaaatacactcaaaaaacaagggcgacctatcggaaataatgatttatggatcgcttgtcacgcattgaggtttaaaagcgttctaattacccataatgtaaaagaatttcagcgaattacagatcttcagtggcaagattggacaaaatagataattctgattttttattttacttatgacataatctgtttaactcaactaaaaaaggacaaaccaatgcaaattttacacactatgttacgcgt

SEQ ID NO: 118 - protein, 72 aa, Homo sapiens
  misc_feature (1)..(1): Wherein Xaa may be any naturally occuring amino acid
XGGGEVNVLYPNEQICLHYGKWANTLKKQGRPIGNNDLWIACHALRFKSVLITHNVKEFQRITDLQWQDWTK

SEQ ID NO: 119 - DNA, 392 bp, Homo sapiens
acgcgtaccctccagcacatccgccggcgactccccaaaccgctcccgagcttcacgcgccgcgacattgttggcggcgaaatcctcacgggtcacccctgaaaacttgaactgctgggccaagccaaacaggctgcgcaacacatgcccgcccgcattgatccagcgctccatatctcgacgccccatcaaagccgtgtgattagccaacagcaactggcgggcgatgttgtcgtagtcaatcagcaggtagacggccaaaaagcccaacggagtgttgatatagagcggcaccgtgaccgggtgaacattgaaggtttcacccacctgcactgcaaagggcagacatctcatcaactcgtccagtcgcccccgaatcagcgtcaacgcgt

SEQ ID NO: 120 - protein, 118 aa, Homo sapiens
MRCLPFAVQVGETFNVHPVTVPLYINTPLGFLAVYLLIDYDNIARQLLLANHTALMGRRDMERWINAGGHVLRSLFGLAQQFKFSGVTREDFAANNVAAREARERFGESPADVLEGTR

SEQ ID NO: 121 - DNA, 305 bp, Homo sapiens
agatctgtgcagagaaataatcatcccagaaagccgagcggataattcagaacgaaaacctgcaatctatggagaaccgaaccgagaccagcgaagaaccaaccagcacaggtgggcgggtgagacacaggctgcgagacgcgagaacaactggcctgcccgcagatcaaacggcgcctcgaagagcttgcgaagagaacagcagagaagggccgcgaacacggcacgaaagggagaaacttgttcgaatcagccccgcaggagccggcaacaaccactgactgcggaaacgagagcgcaaattt

SEQ ID NO: 122 - protein, 70 aa, Homo sapiens
MENRTETSEEPTSTGGRVRHRLRDARTTGLPADQTAPRRACEENSREGPRTRHEREKLVRISPAGAGNNH

SEQ ID NO: 123 - DNA, 429 bp, Homo sapiens
  misc_feature (1)..(1): Wherein n may be a, c, g or t
  misc_feature (2)..(2): Wherein n may be a, c, g or t
nnagatctgtgaaggatgaggatggctgagcttgttttccacaccggtccgatggactctggcaagtccaccctcgcactgcagatggaccatgcgcagtccgctcacgaccgccaaggggtgcgatacgcgatgcacgaccgctctggtggagctcggatcacctcgcggattggtttgagtgtcgaagctgtcgaggtcactgactccctggacctctaccaggacatcgtctcgcggctgagtcgcggaggacgaattgattacctcatttgcgacgaggcccagttctaccgaactaagcagatcgaccagctggctcgagtcgtcgatgacctcgacatcgacgtctactgcttcggaatcctggccgattttcggacagagctatttcccggatcaaaacgtctcgttgagttggccgaccgc

SEQ ID NO: 124 - protein, 136 aa, Homo sapiens
MAELVFHTGPMDSGKSTLALQMDHAQSAHDRQGVRYAMHDRSGGARITSRIGLSVEAVEVTDSLDLYQDIVSRLSRGGRIDYLICDEAQFYRTKQIDQLARVVDDLDIDVYCFGILADFRTELFPGSKRLVELADR

SEQ ID NO: 125 - DNA, 343 bp, Homo sapiens
aagctttatagtacctaagaagagaagggagcacaaagagtctagttctgccgtcctactccctacagtggggctagtgtggataattctttattggaagtagatgaccctctcttttcaaatggcagcacctctgtattatgagaataccaggctcttatgcaggtgtccaatcactttgtccacaggcaaaaatgatattttccctttctaacagcttctcagggagctctgcacttaaagtgatttgcatttcattgctaaagggaaaatgtgtagcctttatgtcagcatttcctctctcctttttagggcagcagctggatgaattcctacagctagc

SEQ ID NO: 126 - protein, 67 aa, Homo sapiens [sequence omitted]

SEQ ID NO: 127 - DNA, 300 bp, Homo sapiens
atctttgacagccgcggcaaccctacagtcgaggtcgacgtgttttgctcagatggaacctttgcaagggcagctgttcccagtggagcatcaactggtgtatatgaagctctggagttgagggatggtggctctgactatttggggaagggtgtctccaaggctgtgaacaatgtgaattctgttattggacctgctctgattggcaaggaccctacagcacagactgagattgataacttcatggttcaacaacttgatgggaccaaaaatgagtggggatggtgcaagcaaaagctt

SEQ ID NO: 128 - protein, 100 aa, Homo sapiens
IFDSRGNPTVEVDVFCSDGTFARAAVPSGASTGVYEALELRDGGSDYLGKGVSKAVNNVNSVIGPALIGKDPTAQTEIDNFMVQQLDGTKNEWGWCKQKL

SEQ ID NO: 129 - DNA, 312 bp, Homo sapiens
gagtatcagttacatggtgacgataagatgacttggcaagtcattcatcaatccgaattgagggctaccattaaggaaatttacgacatgaagaaaattccatatttaaatccaatggaactatcaaatgtcattaatatgtttttcgagaaggttatcttcaacaaggacaagccaatgggtaaagagtcttttttgagatcagttcaagaaaaatttttgcacattcaaaaacgttccaaaattttacgacaagaggaaatggatgaatcgaatgctgaaggagtagagacgattcaattgaaatctcta

SEQ ID NO: 130 - protein, 104 aa, Homo sapiens
EYQLHGDDKMTWQVIHQSELRATIKEIYDMKKIPYLNPMELSNVINMFFEKVIFNKDKPMGKESFLRSVQEKFLHIQKRSKILRQEEMDESNAEGVETIQLKSL

SEQ ID NO: 131 - DNA, 225 bp, Homo sapiens
ctagaaagggagcggctgaagagggagagactggagagggagcgcatgagcgtggagcgtgaaaggcgcaaggaacagcagcgcattatgcgtgagcgtgaggagctgcgacggcagcaagagcagctgcgggctgagcaggaacggcgagcattgcgcagagcctacaacctggatgctaggagagatgatggctactggccagaagggaagcgtgcagccatg

SEQ ID NO: 132 - protein, 75 aa, Homo sapiens
LERERLKRERLERERMSVERERRKEQQRIMREREELRRQQEQLRAEQERRALRRAYNLDARRDDGYWPEGKRAAM

SEQ ID NO: 133 - DNA, 247 bp, Homo sapiens
ggcgccaaccaccatctgcgccagtcgctggtgtttcttgatgtgccgtgcatgcagcagccggaagcctacttggggggcgcgggcagcgcgttcgatgaggcgggcaatgtgtcggaaaagaccaagccattccttcaggcgtttatcaatgcctatggcacctgggtcgagaaacaacacggctgaatacgcaacacccggccgccagcgccgggtgttttgtttttgcgggcagggccagcga

SEQ ID NO: 134 - protein, 69 aa, Homo sapiens
MCRACSSRKPTWGARAARSMRRAMCRKRPSHSFRRLSMPMAPGSRNNTAEYATPGRQRRVFCFCGQGQR

SEQ ID NO: 135 - DNA, 219 bp, Homo sapiens
ccggattcaacgtacacttatggttggaaaagggcggagattttgggtgctctgattaacgccgtctttttgattgccttatgtgtctcaattttgatagaagcgctacaaagaattattgctccccccgtgattgaaaatcctaagtttgtgttgtatgtgggtgtcgcagggttgatatcgaacaccgttggacttttcttatttcacgacaatgat

SEQ ID NO: 136 - protein, 73 aa, Homo sapiens
PDSTYTYGWKRAEILGALINAVFLIALCVSILIEALQRIIAPPVIENPKFVLYVGVAGLISNTVGLFLFHDND

SEQ ID NO: 137 - DNA, 404 bp, Homo sapiens
  misc_feature (331)..(331): Wherein n may be a, c, g or t
  misc_feature (397)..(397): Wherein n may be a, c, g or t
  misc_feature (398)..(398): Wherein n may be a, c, g or t
  misc_feature (402)..(402): Wherein n may be a, c, g or t
  misc_feature (404)..(404): Wherein n may be a, c, g or t
gccggcgacaccggctacatcgggcgccacggcgggctgatgctcctggtctcgctggtccagatcatctgctcgatcgccgcggtgtggttctccgcgcgcaacgcgatgggcttcggccgggacctccgggcggcgatcttccaccgggtcgggtccttctcggcccgcgaggtgcagcacttcggcgccccctcgctcatcacccgcgagaccaacgacgtccagcaggtgcagatgctggtgctgatgggcggcacgctgatggtgtcggccccgatcatgatggtcggcggcatcatcatggccgcgcgcgcagacgtccggctgncgtggctggtcctgtcggtggtcccggtcctcggcgtctcgatcgggctgctcgtgcgccagatgnncccncn

SEQ ID NO: 138 - protein, 134 aa, Homo sapiens
  misc_feature (111)..(111): Wherein Xaa may be any naturally occuring amino acid
  misc_feature (133)..(133): Wherein Xaa may be any naturally occuring amino acid
AGDTGYIGRHGGLMLLVSLVQIICSIAAVWFSARNAMGFGRDLRAAIFHRVGSFSAREVQHFGAPSLITRETNDVQQVQMLVLMGGTLMVSAPIMMVGGIIMAARADVRLXWLVLSVVPVLGVSIGLLVRQMXP

SEQ ID NO: 139 - DNA, 262 bp, Homo sapiens
gaattctagattcaacagtagcattttttgttattgttgttttgtgctatcaaacagtgtagcaaagggtctttgcaactgtgcatatctcaacatatttctactaatttctcttaaccctttgtagggccccaaaccattccacttttctttccaaagagtctttggatacagggtagctaagactttagtaggctctcttggactgcctctacttataaaaaacatttgctcctgggcacaggggctcacgcctgttatt

SEQ ID NO: 140 - protein, 65 aa, Homo sapiens [sequence omitted]

SEQ ID NO: 141 - DNA, 373 bp, Homo sapiens
  misc_feature (1)..(1): Wherein n may be a, c, g or t
  misc_feature (2)..(2): Wherein n may be a, c, g or t
nntggccagcaagcctctctggcaggctggaagagggaggtcccggcagatccacagctgcactctgaggagaacctgaccagtggaatggacagaggacaccggcagcctcctgaatgaggctctgagcagcactggccagtgttcagagatgttaaagacctgctgacgttggtgccgccccttgttggtctgaagggaaacctggaaatgacgctggcatcccgactctctacgtctgccaacactgggcaaatcgatgaccgccaggagaggtacagaatcatcagcagcaacctcgctgtggttcaggtgcaagccactgttgtggggctcctggctgcagtggcctcactgatgctgggcacagggt

SEQ ID NO: 142 - protein, 84 aa, Homo sapiens
GSEQHWPVFRDVKDLLTLVPPLVGLKGNLEMTLASRLSTSANTGQIDDRQERYRIISSNLAVVQVQATVVGLLAAVASLMLGTG

SEQ ID NO: 143 - DNA, 384 bp, Homo sapiens
gttgagcacatgttcaagaactacgacggcatgctcaagattgacggtgaggtcggcaacaagaagatgtacgacccgcgttcgtggggcaagaaggctgaggctggtatggccgctcggattgttgaggcttgtgagcagctgggttcgaagggtacttcggtcagcgcctgagttgttttgtgaagaatcctagccagttctgttgtgaggattggctgggatttttcacgtcatcggtgtgatggtaatattgtgccgccaattccggcagcagcggatagtatgacgcatacggcatagtttatagttgtttttgttctcattactattccttggtggtaatcgatttcatgtcaagtgaagtgtccatatggttcgcga

SEQ ID NO: 144 - protein, 57 aa, Homo sapiens
VEHMFKNYDGMLKIDGEVGNKKMYDPRSWGKKAEAGMAARIVEACEQLGSKGTSVSA

SEQ ID NO: 145 - DNA, 314 bp, Homo sapiens
  misc_feature (1)..(1): Wherein n may be a, c, g or t
  misc_feature (2)..(2): Wherein n may be a, c, g or t
  misc_feature (3)..(3): Wherein n may be a, c, g or t
  misc_feature (102)..(102): Wherein n may be a, c, g or t
  misc_feature (314)..(314): Wherein n may be a, c, g or t
nnngcgtgagcacctgctctcatctcaggctgaatgttaagaaattggttctctctttgctcatctcctcagtccctgtatgttttgtctttacatctttantactggtaagcattcagatagcaccaagtaggtgggcattgggcaaatcttcgaatctatcataaaaaatttaatccccattcttgtcatcatcaccatcatcatcgtcatcatcatcatcttattcataaccacaacatatgttctagaagtcctaggcaccaggccctgggctgcatccattattttgaatcattcaaccatctgtaaan

SEQ ID NO: 146 - protein, 62 aa, Homo sapiens
HQVGGHWANLRIYHKKFNPHSCHHHHHHRHHHHLIHNHNICSRSPRHQALGCIHYFESFNHL

SEQ ID NO: 147 - DNA, 337 bp, Homo sapiens
  misc_feature (1)..(1): Wherein n may be a, c, g or t
naggataactgaacctccctctacgggtggttaggattaagtaaatgtggaacatttactattataaaagctcagggaatgtaaatttcccctctgcccctagcccccattctggctgcctctgtgccatcttctgttctgtgggagtcctctcttccatctgccactcgcaaccaccttcgtgcttcttgagctcatctctggcagccagtgacccctgctcccctctggtccgcccttcaggccaccttggggtcaggattgcacctccgctttccacctgctctcaaaatagtgctgcccgcctcccctgttcccctggcaacaagcttccgga

SEQ ID NO: 148 - protein, 97 aa, Homo sapiens
MWNIYYYKSSGNVNFPSAPSPHSGCLCAIFCSVGVLSSICHSQPPSCFLSSSLAASDPCSPLVRPSGHLGVRIAPPLSTCSQNSAARLPCSPGNKLP

SEQ ID NO: 149 - DNA, 475 bp, Homo sapiens
  misc_feature (1)..(1): Wherein n may be a, c, g or t
  misc_feature (2)..(2): Wherein n may be a, c, g or t
nntctagacgtgattcgtgatcgtcttattgctggacaattatttgactaccttcgttatacagaagcgttgcccgccacaaaagaacaattaatcgctgttcatgacgaagactatgtgaattccattttttctaagacgccaaaggaaggtcatattgaaatagaaccagaaaccttgttaatgccccatacgatcgacgcggctattcatgcggctggtgctgtggttcatggcgtggacttggtcatggggaatacaatagataatgcattttgtgcggtaaggccaccaggtcatcatgcagaaatagaccgttcaatgggcttttgcttttttaataatgttgctgtaggtgctcagtatgcactacagaagtatgggttaaagcgagttgctatcgtcgattttgatgtgcaccacggtaatggcacagaagccatttttcaaaactcttcaaaggtgctttacgcgt

SEQ ID NO: 150 - protein, 158 aa, Homo sapiens
  misc_feature (1)..(1): Wherein Xaa may be any naturally occuring amino acid
XLDVIRDRLIAGQLFDYLRYTEALPATKEQLIAVHDEDYVNSIFSKTPKEGHIEIEPETLLMPHTIDAAIHAAGAVVHGVDLVMGNTIDNAFCAVRPPGHHAEIDRSMGFCFFNNVAVGAQYALQKYGLKRVAIVDFDVHHGNGTEAIFQNSSKVLYA

SEQ ID NO: 151 - DNA, 254 bp, Homo sapiens
ccatggggcagacaatacagaagatgagctaagaacatcctgttgtaccagaagctctccaaagttttggggttatgttaaaaaaaaaatacaagagacaacttgaatgaactcctattggccaaaggggagatactctgaacatccaaacagtaattactctaaaatattcaaacatatcacatatgttaaaatcactgataatgacactactgggcatcttacaaaatcctaaggcaccaactcattctgaa

SEQ ID NO: 152 - protein, 63 aa, Homo sapiens [sequence omitted]

SEQ ID NO: 153 - DNA, 354 bp, Homo sapiens
  misc_feature (283)..(283): Wherein n may be a, c, g or t
ggtacctaaaatagaaataactgggaaactctaggatgttctgcttttcttaatgccaacacttaacctttgttgatgtaatgttttctctgcaaatagtgcaaattggaaatttccctaggatcacaatccagccttccccagagccaaattcagtctcaaagttgctgttctcaagtatggtgatatttattcagtctcagctcatttcctacatttttttgttgaaacactcttcctacagcactatttaacaattgagccatttggaaaattagctgtntgtttctaaaatttggatttctaaaggaagcctaaatatttgcccatggttggtattttgggccttgatca

SEQ ID NO: 154 - protein, 57 aa, Homo sapiens
MFSLQIVQIGNFPRITIQPSPEPNSVSKLLFSSMVIFIQSQLISYIFLLKHSSYSTI

SEQ ID NO: 155 - DNA, 348 bp, Homo sapiens
  misc_feature (1)..(1): Wherein n may be a, c, g or t
ngtcgactcaaccagctgaggaaggagttgggagccaagtccaacctcgactggttgtacttcgacaccaactaccctgctggttggcagaacgaccggatcgccaacgctctaaacgccgaaggctggaggatcggttccgaatggtcgtcaacctatccgcgctataaccagtggtcgcactgggccaatgacgagaactacggaaccggcaacaagggatacagttcccggatcattcggttcatcgacaattcccgccgcgacacgtggaatcctgatccgatcctcggcaactccaatgtcgtcgagtatgagggttggacgagccacaacgactacaacgcg

SEQ ID NO: 156 - protein, 116 aa, Homo sapiens
  misc_feature (1)..(1): Wherein Xaa may be any naturally occuring amino acid
XRLNQLRKELGAKSNLDWLYFDTNYPAGWQNDRIANALNAEGWRIGSEWSSTYPRYNQWSHWANDENYGTGNKGYSSRIIRFIDNSRRDTWNPDPILGNSNVVEYEGWTSHNDYNA

SEQ ID NO: 157 - DNA, 393 bp, Homo sapiens
  misc_feature (1)..(1): Wherein n may be a, c, g or t
nccagcctctctccgcccaatcaagctttaggctttgcaaagttttcaaatcctgaagcgctaacttctagtcgtcagcttgcctgtaaaaccttatacgatgcggtggtaaaacacccttttatggtggcaggaacagaacgttactgcactaatatgatgacgattctgcagcagcgtgtttttcttaaagttggggctgaaggggtttatatcgccgctattccagaactaaaactgagcattgctttaaagtgtgaagacggtgctgtacgggccgcagaagcggtgatgaccgcgttattggatcatgtaggtattacctcttttgttgctgatgaagcaatgcaagcctatcgaaccgttacgctgcaaaactgggaaaagcgtacg

SEQ ID NO: 158 - protein, 131 aa, Homo sapiens
  misc_feature (1)..(1): Wherein Xaa may be any naturally occuring amino acid
XSLSPPNQALGFAKFSNPEALTSSRQLACKTLYDAVVKHPFMVAGTERYCTNMMTILQQRVFLKVGAEGVYIAAIPELKLSIALKCEDGAVRAAEAVMTALLDHVGITSFVADEAMQAYRTVTLQNWEKRT

SEQ ID NO: 159 - DNA, 233 bp, Homo sapiens
agatcttgagggcctacctagtttggggattctttcctctaaaggtttgtatttgtttgcttggaaacaagttactaccaaatggagaccctttgagtagattttgaagacaccgccttactacatgaatctcaagataagctctctcacttggcggaagtaaggagaagtggtcagtcctcagccagctgagagcatacatgtcctctgttcctgtatcttacagcccatgg

SEQ ID NO: 160 - protein, 62 aa, Homo sapiens
MYALSWLRTDHFSLLPPSERAYLEIHVVRRCLQNLLKGSPFGSNLFPSKQIQTFRGKNPQTR

SEQ ID NO: 161 - DNA, 434 bp, Homo sapiens
gtgcaccctggccatatggacgccagcgacgtcggcgtcttgcgtgacgtggaaccgatcggcccaagtagagagatggattttgaatggtgacgatgtacccgccgcagcaagtggatgccgtcctctttgacatggacggaaccctgctcaacaccctgccggcctggtgcgtggcatctgagcatctgtggggcacttctctggctgacgctgacagcgccaaggttgacgggggcaccgtcgacgacgtcgttgagctgtatctgcgagaccaccctcaggcagatccccaggccaccatcgagcgtttcatggacatccttgacgccaacctggctggccacaccgagccgatgcccggagctgaccgcctcgtgaagaggctgtcaggtcatgtacccatcgctgtggtgtcgaattccccgacgcgt

SEQ ID NO: 162 - protein, 116 aa, Homo sapiens
MVTMYPPQQVDAVLFDMDGTLLNTLPAWCVASEHLWGTSLADADSAKVDGGTVDDVVELYLRDHPQADPQATIERFMDILDANLAGHTEPMPGADRLVKRLSGHVPIAVVSNSPTR

SEQ ID NO: 163 - DNA, 929 bp, Homo sapiens
atcacatcggtcgctgaaccccgacgagcctcaccttgtcgaaatattcatccttgagatcagcccacgtgccgtcgacctctacctcggtgagggtcgcgggcgggtaccaacagccgacctcgtcctcggctccactcatggcggcaagttccgctgccagtccggggatcgtcggggcatgggcgatgatgagcaggttatccacatcgtcgtcgatttctccgatgcgccgacgcacggtatcagtgccgcagtaatagagggctcgcatgaattcgaccggacaatccagttggaggcagtcccaggtctggcgggtgcgtagggcatcggagaccagagcatgtccaacattgcgcagtcctaaacgcgtgccgacctcacgggcctgacggcgccccacgtcggtgagcggacgctcccgatccccgcccggagcatgggatgcgggctgtgcatgtctcatgaggaacagagtgtgcatggatccatcgttgcacttcgcggtcgccgcggttctacgatgttggcatgccgttgacggatttgggcattgatgaggcgcgtacctaccgcccgaacgtccctgaacccgatggtttcgactctttttgggccgagaccctcgatgagtattccggcgttccccaagatctgacggcggtgcctttcgataaccgtcaggctctgatagatacctgggatttgtcgtgggtggggtatcacaactctcgggtgagcgggtgattacatgccccagccgctgtgaacggcccattcccccttgtcatcgagtacctcgggtactcgagttcgcgtggtgtgccgattggatcagtcttcgctgctgctggctatgcacatatcgtcgtcgatccacgtggtcaggggtggggccacccaaccttgacggaaaactgtccgga

SEQ ID NO: 164 - protein, 71 aa, Homo sapiens
MPLTDLGIDEARTYRPNVPEPDGFDSFWAETLDEYSGVPQDLTAVPFDNRQALIDTWDLSWVGYHNSRVSG

SEQ ID NO: 165 - DNA, 372 bp, Homo sapiens
  misc_feature (1)..(1): Wherein n may be a, c, g or t
  misc_feature (2)..(2): Wherein n may be a, c, g or t
nncggcgagatcaaccggaaagccgcagctacaagacaagggagtgccccgatgaaagcgcttgtatacgacgggcctcgagaggtccacgtcaaggacgtgcccgatgcgcggatcgagaatccgacagatgtgctggggaagatcacgagcaccaacatctgcgggtcggatctacacatgtacgaaggccgcaccgatctggagcccggaatggtcctcggtcacgaaaacttgggcatcgtcgccgaagtcggcaatgcagtggtcaaagtatcgccaggggatcgagtgtgcttgccgttcaacatcggctgcggcttctgccgaaactgcgaggaagggttgactgcattctgcctgacggtgcac

SEQ ID NO: 166 - protein, 107 aa, Homo sapiens
MKALVYDGPREVHVKDVPDARIENPTDVLGKITSTNICGSDLHMYEGRTDLEPGMVLGHENLGIVAEVGNAVVKVSPGDRVCLPFNIGCGFCRNCEEGLTAFCLTVH

SEQ ID NO: 167 - DNA, 362 bp, Homo sapiens
acgcgtactgcgttcgccgcgccagcagaagctggtgaaccgtaccttcgccagcctgttcgtcggcgccgcggggctgctggcgacggtacgccgagcgccgctctgagccgcccgacacgccgacggggcgtgattggtacagaatatttcttggctggggcggaagggcgaagggacaatttaatctcttccattctcacttcgtcttcgccatgcaccctccgaaaatcctgctgtggctgctgccgctggtctgcgcgttcagccttggagctattgccgacacggccgtcgacccctcccaagccttgcatctgttgagttacctggcggccgactattcgccgaccgtggctgac

SEQ ID NO: 168 - protein, 105 aa, Homo sapiens
MQGLGGVDGRVGNSSKAERADQRQQPQQDFRRVHGEDEVRMEEIKLSLRPSAPAKKYSVPITPRRRVGRLRAALGVPSPAAPRRRRTGWRRYGSPASAGAANAVR

SEQ ID NO: 169 - DNA, 334 bp, Homo sapiens
gtgcactcctcgacgatgtggatcgtgctccttggagttttcatctttgtccagcagatgttcggacagggtatttctggtctgctaccaaagttcatttcgaactactttccggtcgagaagcgcgctgctggcttgggcttctcatataacgtcggagctcttggaggggctatcgccccggtcctcggcattgccctggcaggtgacccagctaccggtgtcggcggtgtgctgccctccagctggggcctcggatggaccctgttcatcttgtccttcgcattcaccgcggtgatcatcattctcatcgccatcaatttcccgctccgga

SEQ ID NO: 170 - protein, 111 aa, Homo sapiens
VHSSTMWIVLLGVFIFVQQMFGQGISGLLPKFISNYFPVEKRAAGLGFSYNVGALGGAIAPVLGIALAGDPATGVGGVLPSSWGLGWTLFILSFAFTAVIIILIAINFPLR

SEQ ID NO: 171 - DNA, 333 bp, Homo sapiens
tgcaccaatgcccgccgagtggtacgtaaaagctggctgcccaagactaagccgctgcacctggtggagggtgataactacagcagcttcatcagcgacacttgcaagatagaaccggacatgatgagcatggaacacagcttcgagacagccagccacgatggcgaggctggcccttcagctgaggttctccagtaacatacatgtgacacccccttactggatgtcacactcccctcctatcacaccctcacctatcacctacctggtcacgatctactgtctgtccctccccaggacctgtgaggggctgctccatgccctctatccgga

SEQ ID NO: 172 - protein, 65 aa, Homo sapiens
CTNARRVVRKSWLPKTKPLHLVEGDNYSSFISDTCKIEPDMMSMEHSFETASHDGEAGPSAEVLQ

SEQ ID NO: 173 - DNA, 365 bp, Homo sapiens
gtgcacatatgaaggacttactatttaccagataccacataggtaacagggctataataaggcccttgaggatctcatcgtctagtttttcaaagcatttgttataatttgcaaagagaaaacttgcataaggcttacaaagtaagggcaaaacctgattcccaaaagaagtattacagaatgatacataatgcagaattagacaaagttccattctgggagctattttttgcctatatttccctttgggggtaaccttttggaaaagggaaaaaagccgggttttgaagctcacaagggcatctgcaggccactgttcatcaatgtccttagcttccacatgactaccaaaaggcaactgatca

SEQ ID NO: 174 - protein, 71 aa, Homo sapiens
MELCLILHYVSFCNTSFGNQVLPLLCKPYASFLFANYNKCFEKLDDEILKGLIIALLPMWYLVNSKSFICA

SEQ ID NO: 175 - DNA, 225 bp, Homo sapiens
agctttttaccgttccttattttattaatcccgtcattctttttaatttatacaatgacccaacaagccggaggcggcggtaaaggggttatgaactttggcaagtcaaaatccaaagatgtctcaaaacaaaaagttaaagtacgttttgaagacgtagcaggtgcagaagaagaaaaacacgaacttgttgaaattgttgagtttctaaaagacccaacgcgt

SEQ ID NO: 176 - protein, 75 aa, Homo sapiens
SFLPFLILLIPSFFLIYTMTQQAGGGGKGVMNFGKSKSKDVSKQKVKVRFEDVAGAEEEKHELVEIVEFLKDPTR

SEQ ID NO: 177 - DNA, 287 bp, Homo sapiens
accggtctgcaagaccgtgtggcgcaacgcagccaggagctggacgccgccagcctcgccctgaacaaaaacgaagcgcgcctggccatggccctgcaagccagcgaactgggcttgtgggactggaacctgcaaaccgatgaagtgcaccacacccaactcagggagctggtcggcctggaccctgagtacgttacggcgatgctcagccatctcaagccacgcctgcaccccgacgacctgccgctgctcaagcgcgccctggtggaacacctcaagggccgcaa

SEQ ID NO: 178 - protein, 95 aa, Homo sapiens
TGLQDRVAQRSQELDAASLALNKNEARLAMALQASELGLWDWNLQTDEVHHTQLRELVGLDPEYVTAMLSHLKPRLHPDDLPLLKRALVEHLKGR

SEQ ID NO: 179 - DNA, 318 bp, Homo sapiens
ttgcaattagatgattccaacattctaccactgaaataaataaaacagatagcttcctcaaagatagaaaccagtatatttctgtgatcctctgaagatctcactacaaattcaaagtggctgcttacacaagtcaaaaacaaaatattaatcttatataccataatagcaaatactgagagttttctaagtgccagagactatgtgccttagcacacatacatgcattatttcatttaatcctctccacaatctgatggaagtataattatcatttccattttacagtgaataatgtgtgttaggatgaaagcttct

SEQ ID NO: 180 - protein, 54 aa, Homo sapiens
MVYKINILFLTCVSSHFEFVVRSSEDHRNILVSIFEEAICFIYFSGRMLESSNC

SEQ ID NO: 181 - DNA, 392 bp, Homo sapiens
agatcttcgaagtgctccaagaaacaaatgactaccagctcgactattattcaagaataaggattaaattgaaatacaggaaaacagcatttgccacttatagcactttaataaatgcatttctgaaggatgtatttttgagtaaaatttaaagaaagtattccgaacgaatatttccagaaaaagagatgagatgcaagtaggcatggtgagcaaaaagaaggtagataaaaaattagttagttgaaatgaatgtgcaaaataatattttattgggtacttaaaagttataatcaccatataggaaatcaagaatgggtaaaataataggtagtaataattaaagtcttataacatctttcaatttttccaaatttccaaggagaaaaatc

SEQ ID NO: 182 - protein, 78 aa, Homo sapiens [sequence omitted]

SEQ ID NO: 183 - DNA, 739 bp, Homo sapiens
caattggttttgttcttggaaactttgacacaaaatggccattccaacaaggaaccaaaagattttgactgggccaagtttcccgtggcatctagggcactgctagatatctatcaagataacattgttaaatcacaaaacgcggaagttgttttcaagatgttcaaatttcagatctttgccaagctgcaagaagaatataagcatttggccgattggttgggaactgtaggtagaatgaagtttgtccgtcccggttacagactattaaactctgtagaccgtcgattggcacttgcaactttcgacaaattcaaggacacgtatcatccaatctgtaaagctcttgtgaaacaagatttaggtctttgaaaagggacgtgtcgtaacacgaatacgtaaacaattaaatataacctactaatgagccttcattgctacttctctggttctaattagtggcggagttctgtgtcgtgcgatacgaattttgcacttttgtcacatgcaatcgaggcaaaaagaaaaaataaataataacaacgaatataaatacaaatcgaaagaattcagattggattcaatattgcagggctttgaacactgagtttggaactatcagccgtcaaatacgcataaaataacatcaaatactccaataatgaaccagttaggagctttagccgtaagttctaaattgtaaacacatttgcatcattgaaaaactatactaacgcgt

SEQ ID NO: 184 - protein, 123 aa, Homo sapiens
QLVLFLETLTQNGHSNKEPKDFDWAKFPVASRALLDIYQDNIVKSQNAEVVFKMFKFQIFAKLQEEYKHLADWLGTVGRMKFVRPGYRLLNSVDRRLALATFDKFKDTYHPICKALVKQDLGL

SEQ ID NO: 185 - DNA, 326 bp, Homo sapiens
gggcccgggctgctgtggtcgtaggattgcggtaatttagtggctcgccctcgtttgtcgtgctttttccgagttccgaaactctttcccgagctgttaatgtgctaaaagtggtaaatcgtatatgatgatatacgtatatgatgataatttcctgcgcgctacttgcgtgcattcgtcactcataacaaaaagaactacacaatacgtaaacaacgtgcgaaaatatctatatacaaggggagaaaacaaaagtgaaagtgcattacagcccatcacagatcattataatacaatatgccgaccaagtcaacttttagtcgcga

SEQ ID NO: 186 - protein, 67 aa, Homo sapiens
MMIYVYDDNFLRATCVHSSLITKRTTQYVNNVRKYLYTRGENKSESALQPITDHYNTICRPSQLLVA

SEQ ID NO: 187 - DNA, 324 bp, Homo sapiens
  misc_feature (324)..(324): Wherein n may be a, c, g or t
tcatgagctctagtgggtactgtgatcacctcctgtctgtgactgctttccccaaacacgtggaatatgttccttggaagtgtactcatgtaaaattcacatcttttaggcactgctgcttccctgtggagtgtgatatactacagtgtgaaaacacgtgccacttattctttatagctctcaaacttgctggaattttggctccagtggcagctcttaagatgtgcattgtctgtgatgtatgatcgtagtgccatttttgttgctttggagtcagggaggttttttgtttgtttgtttgtttgttttttaattccgaggatn

SEQ ID NO: 188 - protein, 80 aa, Homo sapiens
MSSSGYCDHLLSVTAFPKHVEYVPWKCTHVKFTSFRHCCFPVECDILQCENTCHLFFIALKLAGILAPVAALKMCIVCDV

SEQ ID NO: 189 - DNA, 388 bp, Homo sapiens
gctagcaaaatgaacatattaaaggacccacatatagattgaccctcaggatctgggtaagataggggaaggggatgggagatctctttttttttccctaggccagttgcggagacagctgttgttgacagccctggagtgtcccaaatgcagagcagtctcaaaagtttctggagctttacctggctgagaccagtgcagacacagctgtttctggcggccctggaagttagcatctcaaccatgatttgtacttcagctccacccttagcttagcatttgctgcttgcttctttttattaatggtttctcagcctggctgtgtctaagctaggaggctcctgaaagaagccagttgatttgacaacataaaatacatgctcttaat

SEQ ID NO: 190 - protein, 81 aa, Homo sapiens [sequence omitted]

SEQ ID NO: 191 - DNA, 338 bp, Homo sapiens
cgatcgatcactcactcaaactggagtgggaaatagatgggcaagaaggagaaagaggaaaatgaaattgaagatggacatttgtcttgggaaaaagaaagaactttggaggaaaaccagtgtgctcacttactccagcagggacaggaaagacatcgtgttgctgtggaacccagaagtagcaggctgcctaggtaaggcttgattctaatatgtgttgatgatgggatagggctctcagcagcctggccgacattactgtaacttttgggtttcccgtgatctggcaaatgcaagtaactgtactaattccacctccaagttagaataataccttt

SEQ ID NO: 192 - protein, 53 aa, Homo sapiens [sequence omitted]

SEQ ID NO: 193 - DNA, 350 bp, Homo sapiens
tccggagcactaaggacacctccctggagactgggggatctgggtaccagggtttctgctgttgcctagagctggggaccagatcctcagacacgacttcctcaacaaaggcggtatgatctacgtgcagaggaggcagtggccacagtgcacaggcctgaggcctgggtgacctcacccagccacagcccaagctggcatggtcatccagcagtatggccaccatgcacaaagtgcccccaggctctggttctcactggcatgctgactgtttcctcaccaggcacctctgctgtacattatggtctttcctaatatgtgatagcaagattacacttgtccagagatct

SEQ ID NO: 194 - protein, 75 aa, Homo sapiens
MVAILLDDHASLGCGWVRSPRPQACALWPLPPLHVDHTAFVEEVVSEDLVPSSRQQQKPWYPDPPVSREVSLVLR

SEQ ID NO: 195 - DNA, 237 bp, Homo sapiens
gggccctcgactcggtcacgccgaattcgggggccacgttggctgcgtggatgcccaggcgcgggtgccattgcagagcggcatccgacaggtagtcgggggtgggctctttcaataaaaatgccgtagcggttgcagatctcgatcatcttgggcagctggatctcggccggcagctcgtctgccacccggaccggcgcgtcgaaggagcccacgttgcgggtctccatgacgcgt

SEQ ID NO: 196 - protein, 76 aa, Homo sapiens
METRNVGSFDAPVRVADELPAEIQLPKMIEICNRYGIFIERAHPRLPVGCRSAMAPAPGHPRSQRGPRIRRDRVEG

SEQ ID NO: 197 - DNA, 333 bp, Homo sapiens
gccgtgattggagcgggagtcatcggactgtctacagccctctgcattcatgaacgttaccacccagcccaacctctgcacatgaagatctatgcggatcgcttcacgccgttcactaccagcgatgtggctgcggggctctggcagccttatctctctgaccccagcaacccgcaggaggcggagtggaaccagcaaactttcgatcaccttcagagctgcctccattctccaaacgctgagaaaatgggcttggccctaatctcaggctacaacctcttccgagacgaagtcccggaccctttctggaaaagcacagttctgggattccgg

SEQ ID NO: 198 - protein, 111 aa, Homo sapiens
AVIGAGVIGLSTALCIHERYHPAQPLHMKIYADRFTPFTTSDVAAGLWQPYLSDPSNPQEAEWNQQTFDHLQSCLHSPNAEKMGLALISGYNLFRDEVPDPFWKSTVLGFR

SEQ ID NO: 199 - DNA, 372 bp, Homo sapiens
  misc_feature (1)..(1): Wherein n may be a, c, g or t
  misc_feature (2)..(2): Wherein n may be a, c, g or t
nntatccatgcagacatgggaccagggtctctgagggcaggaagcaaagtgggtgagggggatgggacaagatgccctggtgctaaggcctctggagctggagctggttatagggatgataccaggcaccctgagtcactcgcacctcacaatggggccgcttctgggagccagtgggcttatggggctggcaatgtgctgggttatgaggatggatcagaacttccagggcctcagggaactggggtcagaacagcctatggagaaaggtcaaggggccttgggcctaggagtacagggccagggggtgaggcaggctttagagatggttcaggaggcctccaaggaatgggatcagcagatgggcccggt

SEQ ID NO: 200 - protein, 124 aa, Homo sapiens
  misc_feature (1)..(1): Wherein Xaa may be any naturally occuring amino acid
XIHADMGPGSLRAGSKVGEGDGTRCPGAKASGAGAGYRDDTRHPESLAPHNGAASGSQWAYGAGNVLGYEDGSELPGPQGTGVRTAYGERSRGLGPRSTGPGGEAGFRDGSGGLQGMGSADGPG

SEQ ID NO: 201 - DNA, 150 bp, Homo sapiens
  misc_feature (18)..(18): Wherein n may be a, c, g or t
  misc_feature (26)..(26): Wherein n may be a, c, g or t
  misc_feature (33)..(33): Wherein n may be a, c, g or t
  misc_feature (35)..(35): Wherein n may be a, c, g or t
  misc_feature (37)..(37): Wherein n may be a, c, g or t
  misc_feature (38)..(38): Wherein n may be a, c, g or t
  misc_feature (40)..(40): Wherein n may be a, c, g or t
  misc_feature (49)..(49): Wherein n may be a, c, g or t
  misc_feature (52)..(52): Wherein n may be a, c, g or t
  misc_feature (55)..(55): Wherein n may be a, c, g or t
  misc_feature (67)..(67): Wherein n may be a, c, g or t
  misc_feature (70)..(70): Wherein n may be a, c, g or t
  misc_feature (76)..(76): Wherein n may be a, c, g or t
  misc_feature (83)..(83): Wherein n may be a, c, g or t
  misc_feature (89)..(89): Wherein n may be a, c, g or t
  misc_feature (90)..(90): Wherein n may be a, c, g or t
  misc_feature (97)..(97): Wherein n may be a, c, g or t
  misc_feature (102)..(102): Wherein n may be a, c, g or t
  misc_feature (105)..(105): Wherein n may be a, c, g or t
  misc_feature (110)..(110): Wherein n may be a, c, g or t
  misc_feature (112)..(112): Wherein n may be a, c, g or t
  misc_feature (113)..(113): Wherein n may be a, c, g or t
  misc_feature (119)..(119): Wherein n may be a, c, g or t
  misc_feature (134)..(134): Wherein n may be a, c, g or t
  misc_feature (147)..(147): Wherein n may be a, c, g or t
agaacagccacagcagangacaaaanacttcantncnncntaaagaagntanggncaaacaatatcnctngtattnaagaggngaatanntttacanaccanggngcagngnnccactngaacaaccctaaagntcaggcatctctngca

SEQ ID NO: 202 - protein, 50 aa, Homo sapiens
  misc_feature (6)..(6): Wherein Xaa may be any naturally occuring amino acid
  misc_feature (9)..(9): Wherein Xaa may be any naturally occuring amino acid
  misc_feature (11)..(11): Wherein Xaa may be any naturally occuring amino acid
  misc_feature (12)..(12): Wherein Xaa may be any naturally occuring amino acid
  misc_feature (13)..(13): Wherein Xaa may be any naturally occuring amino acid
  misc_feature (14)..(14): Wherein Xaa may be any naturally occuring amino acid
  misc_feature (17)..(17): Wherein Xaa may be any naturally occuring amino acid
  misc_feature (18)..(18): Wherein Xaa may be any naturally occuring amino acid
  misc_feature (19)..(19): Wherein Xaa may be any naturally occuring amino acid
  misc_feature (23)..(23): Wherein Xaa may be any naturally occuring amino acid
  misc_feature (24)..(24): Wherein Xaa may be any naturally occuring amino acid
  misc_feature (26)..(26): Wherein Xaa may be any naturally occuring amino acid
  misc_feature (28)..(28): Wherein Xaa may be any naturally occuring amino acid
  misc_feature (30)..(30): Wherein Xaa may be any naturally occuring amino acid
  misc_feature (33)..(33): Wherein Xaa may be any naturally occuring amino acid
  misc_feature (34)..(34): Wherein Xaa may be any naturally occuring amino acid
  misc_feature (37)..(37): Wherein Xaa may be any naturally occuring amino acid
  misc_feature (38)..(38): Wherein Xaa may be any naturally occuring amino acid
  misc_feature (40)..(40): Wherein Xaa may be any naturally occuring amino acid
  misc_feature (45)..(45): Wherein Xaa may be any naturally occuring amino acid
RTATAXDKXLXXXXKKXXXNNIXXIXEXNXFTXXGAXXHXNNPKXQASLA

SEQ ID NO: 203 - DNA, 227 bp, Homo sapiens
ggatccagcagcgccttggcgccctgattcctgctgtgctcgcaagcatccttgagcaggccaacgagcgcctgcaatgccttgtagtggctctcgccttcatcatcgatgaaacgcgccgagttcagttgacgctgagcctgttgcaaggtgcgaaggctttcatgaatgacctttttcgcgaccaagcgcagatagcgtccgggctgaaagtcgacacgctgcat

SEQ ID NO: 204 - protein, 75 aa, Homo sapiens
MQRVDFQPGRYLRLVAKKVIHESLRTLQQAQRQLNSARFIDDEGESHYKALQALVGLLKDACEHSRNQGAKALLD

SEQ ID NO: 205 - DNA, 210 bp, Homo sapiens
gtgcacttctactcagctcactctgtctctttctcaccgtgggagtagctatgggaaaggtcacacttccttgctttcccctcaaaccaacagggctttcacttctcagtctcccaacgcactgcacactgctcccagcatcccgcacagtctcaccacacacatctctgcacatcaggaagtaatgcacagtaggctccatcgggatcc

SEQ ID NO: 206 - protein, 67 aa, Homo sapiens
MEPTVHYFLMCRDVCGETVRDAGSSVQCVGRLRSESPVGLRGKQGSVTFPIATPTVRKRQSELSRSA

SEQ ID NO: 207 - DNA, 371 bp, Homo sapiens
acgcgtccctcgaccggtcgggcaccgtgcaggtcaaagggacattacgaacccacaccaagcaaccggtttcaggggccctcatcaacctggcagtagatggaaagccccttgccgtcggcgtgacacacgacaacggatcgtggtctggcaccttccggttgcctcccactatgcaagctggcgcccacgagttgtccgccaccttcgacggcaccgaaggggtcggggcagcctcagcaagcggcactttctcaatcgctgcccaacctactgtcctcaccgcagccgtgaaaccgacgatcgccgccccgggagcattactcaatgtcaacgggacagtgatccttcccagtcaccgtcgggtcatc

SEQ ID NO: 208 - protein, 66 aa, Homo sapiens
MQAGAHELSATFDGTEGVGAASASGTFSIAAQPTVLTAAVKPTIAAPGALLNVNGTVILPSHRRVI

SEQ ID NO: 209 - DNA, 485 bp, Homo sapiens
gggcccctgtaggcaactgtgcatgcattcatgctagtggtggtgttatcatgggagcaccggtgggtgctgtgtgtgccctctgtgcatattcatgctggtagtggtggccgcccagtgccaaggccagggcaactattttctgtgcctaattttgcaccagtggcagtgttgctgcacaggtggggcacaggcagggcagggccagtgggctccttgactgccaatgcttcaacaacaatggtggtaccgctgggagaagtgggacaaggtgcactccactggcagtagtgtcatgacagggtgctcatgcatatttacgctggcagggaagggaaggctatgtctacctgcacacacatgtgctggcaaagcaatgtggaggtggctacgggtgagtgcctgtgggcaaagcagcatggaggctgctgttgggggaggactcagtgtggtgcaagcaggggcactctgctggagcactctgc

SEQ ID NO: 210 - protein, 86 aa, Homo sapiens [sequence omitted]

SEQ ID NO: 211 - DNA, 386 bp, Homo sapiens
  misc_feature (1)..(1): Wherein n may be a, c, g or t
  misc_feature (2)..(2): Wherein n may be a, c, g or t
  misc_feature (112)..(112): Wherein n may be a, c, g or t
  misc_feature (113)..(113): Wherein n may be a, c, g or t
  misc_feature (139)..(139): Wherein n may be a, c, g or t
  misc_feature (140)..(140): Wherein n may be a, c, g or t
  misc_feature (160)..(160): Wherein n may be a, c, g or t
  misc_feature (184)..(184): Wherein n may be a, c, g or t
  misc_feature (185)..(185): Wherein n may be a, c, g or t
  misc_feature (301)..(301): Wherein n may be a, c, g or t
nnaacattccccataattcctatcgaaattccagtggcttttttttttttcagaaaacagccaattctaaaatttatatggaaatgcaaaagactcagagtagtcaaaaacnnaattttggaaaagaacaaagaaggcnnttgccttcccagtttcaaanactataaagccattcgggttaagnnggcagtgggggggttggggaataatccaatagtccaatggaacagaactgggagttcagaaactaaccttcacatttatggtcaactgactgtagatggagacaaatccagtgagnggggaagggatagttttttcaacaggtggtgctgggacaacaggatattcatgtgcaaaagaatgatgttggacccttcacgcgt

SEQ ID NO: 212 - protein, 128 aa, Homo sapiens
  misc_feature (1)..(1): Wherein Xaa may be any naturally occuring amino acid
  misc_feature (38)..(38): Wherein Xaa may be any naturally occuring amino acid
  misc_feature (47)..(47): Wherein Xaa may be any naturally occuring amino acid
  misc_feature (54)..(54): Wherein Xaa may be any naturally occuring amino acid
  misc_feature (62)..(62): Wherein Xaa may be any naturally occuring amino acid
  misc_feature (101)..(101): Wherein Xaa may be any naturally occuring amino acid
XTFPIIPIEIPVAFFFFRKQPILKFIWKCKRLRVVKNXILEKNKEGXCLPSFKXYKAIRVKXAVGGLGNNPIVQWNRTGSSETNLHIYGQLTVDGDKSSEXGRDSFFNRWCWDNRIFMCKRMMLDPSR

SEQ ID NO: 213 - DNA, 216 bp, Homo sapiens
gccattttaaaagcgcaaaagaatagtgatatttcgccaatccctgttctcgttgattcacccccggtttctgaaggtaaaaagagagattattcctacgtaaaaacaacaccaggtgccattggacccggtaaaactaaatgcatgataactgaaaccattcaacactttaacttagaggagtatgttcaagtcttgcaaacaacaaaaattccg

SEQ ID NO: 214 - protein, 72 aa, Homo sapiens
AILKAQKNSDISPIPVLVDSPPVSEGKKRDYSYVKTTPGAIGPGKTKCMITETIQHFNLEEYVQVLQTTKIP

SEQ ID NO: 215 - DNA, 305 bp, Homo sapiens
tgatcatttcagttcttaaggcaaaacccatcatcttttctactacattcccaaaggtatttccaagaaaaatttagcaaatatgcaaaattcagctttaggagcaaagtctcactttggatatgcaagaggttgcatatcctttgagctctcaaaataacattacaaacagcccaactgctggtcaatcaactatgaataggttaaccaccttttacattcagttgcaaaggctttgttcccattgccaaaaccttgagcttaaattaaaaagaacttgtgacagggagcaagtagtcactagt

SEQ ID NO: 216 - protein, 61 aa, Homo sapiens [sequence omitted]

SEQ ID NO: 217 - DNA, 225 bp, Homo sapiens
  misc_feature (1)..(1): Wherein n may be a, c, g or t
ncgtacgcctcgggggccccttgtccgtcgtcgtcctggtcagggcccatccgcgccgtgggcctcccgtcctcggacccctcgtcgtcactggcctctcggcgccgcatcgtaggaagcgcctcatcgtcggggtcgctcacgtactcctcatcctccacctcacccgctgccccatccgacaccgcagcggcgtccggctccaacgggagggcgccgccgggc

SEQ ID NO: 218 - protein, 75 aa, Homo sapiens
  misc_feature (1)..(1): Wherein Xaa may be any naturally occuring amino acid
XYASGAPCPSSSWSGPIRAVGLPSSDPSSSLASRRRIVGSASSSGSLTYSSSSTSPAAPSDTAAASGSNGRAPPG

SEQ ID NO: 219 - DNA, 246 bp, Homo sapiens
aagctcatcttgctccgccatggcgagagcgaatggaactccaagaacctcttcaccggctgggtggacgtcgatctcaacgagaagggcgaagcgagggctcgtcacgccgccgacctgctcaagcaggaaaacctcctgcccgatatcgtccacacctcgctgctacgtcgtgctatccataccgcctacctagcccttgacggctgcgaccgccattggatcccggtgcatcgttcctggcgc

SEQ ID NO: 220 - protein, 82 aa, Homo sapiens
KLILLRHGESEWNSKNLFTGWVDVDLNEKGEARARHAADLLKQENLLPDIVHTSLLRRAIHTAYLALDGCDRHWIPVHRSWR

SEQ ID NO: 221 - DNA, 276 bp, Homo sapiens
cgcgactacccattatctttggaagaataccaacgttacggaagacaaatgattgttgaagaaacaggtggtgtagcaggtcaagtcaagttgaaaaatacaaaagttttggtagttggtgctggaggtttgggatgtcccgccttgccctacttagcgggcgctggcgtgggccaaataggcatagtagataacgatgtggtggagacttccaatttgcataggcaggttcttcatgattctagcagagttggaatgttgaaatgtgagtcggcc

SEQ ID NO: 222 - protein, 92 aa, Homo sapiens
RDYPLSLEEYQRYGRQMIVEETGGVAGQVKLKNTKVLVVGAGGLGCPALPYLAGAGVGQIGIVDNDVVETSNLHRQVLHDSSRVGMLKCESA

SEQ ID NO: 223 - DNA, 281 bp, Homo sapiens
caattgataaaacacttatcattcttgctacctcatttcctcaaagtgttaagtcaaccatgattggggaatgagttctatctcctttctgacagcccccttgactctaattatactaaatctgcaaaaagctgaagctatattattccagagaaagtgtgcctcagcttccattgccaaatatccccttcccagaaaatgtacacatttacctttactccaattattaattacataaatgcacactgccggcctggggccggggctcatgcctcttatcc

SEQ ID NO: 224 - protein, 73 aa, Homo sapiens [sequence omitted]

SEQ ID NO: 225 - DNA, 446 bp, Homo sapiens
gccctttgccaagatgtccatttgaatgatgaaaaggatggacttcttttgcgtttaatacctactcgacaactgcagaaaaatactgagcgtatagaaaataaattactaaatcatatagaattatatcttacatattcaaaagtatataacgagcccttactacttttgcgaatatgggaggagaaaagcatagatggtattccaatgaccaaattgatgctcccaactgatatcgaatcgctgcttgatgttcaaggcaaattccaactaggtttggatactatcattaacctggaaggtagcgtttggtattctttccatccatgcgatacatcatgtatagtaggtgaccaggctgagttcatgtcaacttacttaagacgatgggtcagtattttcatatttagttggttaggttatgaagattcatagcttaacctagg

SEQ ID NO: 226 - protein, 144 aa, Homo sapiens
ALCQDVHLNDEKDGLLLRLIPTRQLQKNTERIENKLLNHIELYLTYSKVYNEPLLLLRIWEEKSIDGIPMTKLMLPTDIESLLDVQGKFQLGLDTIINLEGSVWYSFHPCDTSCIVGDQAEFMSTYLRRWVSIFIFSWLGYEDS

SEQ ID NO: 227 - DNA, 374 bp, Homo sapiens
gctagccaacgcttcctcaactaccccataatgtctacagacaagcccagaaggcactggataccttccttaggcagtgtagagaatgaagcagggagccacaagccagggctgcagagagtaatatctgaggagggcaaacattctcaggagtttctgagagtcacatctctgttccccagcaaataatcatcttaataaaaactaacatttactgagcatctatttactatatgccaggcactgttgttctaaatgtcttttacattattaaaaaaatcctcataactaccttatcgggtggacttactgtccccattttacagataacatcattgagacaaagaagtgaagtaatttgtttagcctcacac

SEQ ID NO: 228 - protein, 52 aa, Homo sapiens
MSTDKPRRHWIPSLGSVENEAGSHKPGLQRVISEEGKHSQEFLRVTSLFPSK

SEQ ID NO: 229 - DNA, 292 bp, Homo sapiens
  misc_feature (248)..(248): Wherein n may be a, c, g or t
cgcgttttcgcctacgctgaccagcagcgctaccgcattggcccgaactaccagcagttgccggtcaaccagccacagaatgtggatgaggtcaatacttatcagcacgagggcagcatgcagttccttttcaatgccccggaggatccggtgtactcgccgaaccgctatgaaaagggtactggcgtgcttgacgacgccgctgtgaatgaccgctcccagctcgagaccaccaccgcggcggactnttatatcaatccggagtcctacggcggcgatctggtgcgtgcac

SEQ ID NO: 230 - protein, 97 aa, Homo sapiens
  misc_feature (83)..(83): Wherein Xaa may be any naturally occuring amino acid
RVFAYADQQRYRIGPNYQQLPVNQPQNVDEVNTYQHEGSMQFLFNAPEDPVYSPNRYEKGTGVLDDAAVNDRSQLETTTAADXYINPESYGGDLVRA

SEQ ID NO: 231 - DNA, 358 bp, Homo sapiens
  misc_feature (1)..(1): Wherein n may be a, c, g or t
nggaaggatgccctcttggttatatattcaagctctttggatacagtatctatagttgtttttttttttatttggttattgtgacttctgaaataaggtttcctttgtgtgaaactcagcatgaggccagaatgtgttagtcctgtctgcttgccatgtaacacctggccaacacaacaacccatgattgatgggtgaatgcttgaggcctattagtgctaacgtgaagtactgcctgaaaaaggacagctgtgtcctctctccccttttgttttaggattttcgcaataaggtacatcccccaaatggtttctgctacctttttaaaaatcaaatgtttctacgtgagctgtaatta

SEQ ID NO: 232 - protein, 61 aa, Homo sapiens [sequence omitted]

SEQ ID NO: 233 - DNA, 395 bp, Homo sapiens
caaagtaagctttttgataaatccagtttgctctatggctatcatttggctaaagaacacatctataaacaaaagcaagtcattgtaacagaggggtatttggatgtgattttattgcaccaggcgggttttaaaaacgccatagccacgcttgggacagctttaacgccatcgcatttgcccttgcttaaaaaaggcgatcccgaaattacaaggaaatcaaggtcttgacttatttactttttcaaagtgtgtgcgtacacatatgccactttttaagctatttttaagcaaaaaacacaagtgtgtacgcacacattttttagtctcaaaccatgcaaccccctaaaatgcgtaacttaatctaaaagtaaatgaaaagtaaataaacctaa

SEQ ID NO: 234 - protein, 76 aa, Homo sapiens
QSKLFDKSSLLYGYHLAKEHIYKQKQVIVTEGYLDVILLHQAGFKNAIATLGTALTPSHLPLLKKGDPEITRKSRS

SEQ ID NO: 235 - DNA, 354 bp, Homo sapiens
tgtacagtggggcatgagtttggtgcttctactggacgtcaacgtcgttgtggttggtttgatgccgaaattcttcgccgttctgttgaagtgaactctttatctggtatttgcttaactaagctagatgtacttgatggcttagaagaaattaaaatctgtgtaggctatgaagatgttgattcaggctgtgcaggttcttctgacgcgatttcatttgaaagcttgaagcctatctatgaaactatgccaggttggagcgaatctacagtaggtttaactcaggttgatcaacttcctgcaaacgctttggcatatgtcgaacgccttgagcagttgatcgaatgtccaatt

SEQ ID NO: 236 - protein, 118 aa, Homo sapiens
CTVGHEFGASTGRQRRCGWFDAEILRRSVEVNSLSGICLTKLDVLDGLEEIKICVGYEDVDSGCAGSSDAISFESLKPIYETMPGWSESTVGLTQVDQLPANALAYVERLEQLIECPI

SEQ ID NO: 237 - DNA, 392 bp, Homo sapiens
  misc_feature (10)..(10): Wherein n may be a, c, g or t
  misc_feature (33)..(33): Wherein n may be a, c, g or t
tgatcattanataagttgaatcgtgtacagaanatccacaaagaaaattccaggaccagaagcctttcatatgacttccaccaatcttttaaggaacaaagtattttaatattacataaacacatacaagaaggaacaactctcagactcataagacactaaaattcacgtgaagactatgtcaaaataaaattacaatctaatttgacctatggatgtatgttgaaaaaaatctgaaacaatatattagcaaactgaatccagcaatacagaaagataatatagaaaagcaagtgtatcctaggaactacaaattggtttactatctgacaatgaaacaatgtagtttgtcatgtgtatagaatacaggagagaacccatatgaccccccc

SEQ ID NO: 238 - protein, 50 aa, Homo sapiens
  misc_feature (40)..(40): Wherein Xaa may be any naturally occuring amino acid
  misc_feature (48)..(48): Wherein Xaa may be any naturally occuring amino acid
MSLRVVPSCMCLCNIKILCSLKDWWKSYERLLVLEFSLWXFCTRFNLXND

SEQ ID NO: 239 - DNA, 441 bp, Homo sapiens
  misc_feature (1)..(1): Wherein n may be a, c, g or t
ntcgcgagcacactccagcctctgggatattcatatcgtttctccattacatacagtcatttttttgcatttttaaattcgtgacttttagtactgcagctgttttttttctcacgtcaagaaattccataaagtctaactattaaacggataagagatacaatcatgttgagatttaccaattgtagttgcaagactttcgtaaaatcgtcatataagcttaatataagaagaatgaactcctcgttcagaactgaaaccgatgcatttggtgagatacacgtgcctgctgataagtactggggtgcccaaactcaaagatcctttcaaaacttcaagattggtggcgctcgtgaaagaatgccattgcctttggtgcatgcatttggtgttttgaagaaatctgccgcgattgtgaatgagtgtgtggggggattggat

SEQ ID NO: 240 - protein, 92 aa, Homo sapiens
MLRFTNCSCKTFVKSSYKLNIRRMNSSFRTETDAFGEIHVPADKYWGAQTQRSFQNFKIGGARERMPLPLVHAFGVLKKSAAIVNECVGGLD

SEQ ID NO: 241 - DNA, 246 bp, Homo sapiens
  misc_feature (229)..(229): Wherein n may be a, c, g or t
aggctgaggacctcttgtgagagggccaagagaactctgtcttccactgcccagaccaccattgagattgactcgctgtacgagggcattgacttctactccaccatcacccgtgccaggtttgaggagctcaacatggacctgttcaggaagtgcatggagcctgttgagaagtgcctgagggatgccaagatggacaagagcagcgtccatgatgttgtccttgttngtggctccactaggatc

SEQ ID NO: 242 - protein, 82 aa, Homo sapiens
  misc_feature (77)..(77): Wherein Xaa may be any naturally occuring amino acid
RLRTSCERAKRTLSSTAQTTIEIDSLYEGIDFYSTITRARFEELNMDLFRKCMEPVEKCLRDAKMDKSSVHDVVLVXGSTRI

SEQ ID NO: 243 - DNA, 336 bp, Homo sapiens
ggatcccctgcaaggtgagggcccacaacttctgactcctgctggagtactcttttcttggagcaacaaattacttctactcaggtttctttcctaactgtcatgaaagcatatgccagttcaatattttaaggctgctatgctagaatgcaacacatctctccgtgatcactttaacgtatccaatctattgataaaaccccaattaagtgtctcctgtcaattaattaaagctgaggcaaatgaaatactggtttttatttaaagtttagtaaaaaatggcatgcaattagctggcaacagacgcgatctcagcaggggtttcattacgttatg

SEQ ID NO: 244 - protein, 50 aa, Homo sapiens [sequence omitted]

SEQ ID NO: 245 - DNA, 182 bp, Homo sapiens
  misc_feature (182)..(182): Wherein n may be a, c, g or t
ggatcccctagagtgctgctctactggagaccaacattccatccctcagcaagtttctccttctgcttgggaagaggctgtgttttcttcccgatgaaatggttggctggtgttgaggggctgcaagctgacttgtgagctggttttgtgcatctcctcccaaccctatgttcacagtcatn

SEQ ID NO: 246 - protein, 57 aa, Homo sapiens [sequence omitted]

SEQ ID NO: 247 - DNA, 264 bp, Homo sapiens
aatttgatcaacgaggaacacttacacatggcccaatcttcacctgcaccatttcaagtactggcgagtccttccggcttaaatggcacactaacagggcatgcatacaagatgtctgacccggccgcccgcaagctgattgaggaatggccctgtttctacccgatggtgctgaggaagagggaggagcctcgagaagaggctgagctggggtatgacgacgacttcccggtggcagttgaagtcattgttggtggcgtccgg

SEQ ID NO: 248 - protein, 88 aa, Homo sapiens
NLINEEHLHMAQSSPAPFQVLASPSGLNGTLTGHAYKMSDPAARKLIEEWPCFYPMVLRKREEPREEAELGYDDDFPVAVEVIVGGVR

SEQ ID NO: 249 - DNA, 281 bp, Homo sapiens
  misc_feature (1)..(1): Wherein n may be a, c, g or t
nccatcttcctttattccatagaggtggagtgccttctagtaacaagtgctgtgtgccgtgtatggaagacaccagtaatcacatcatagaccctaatctcaaggaacctgtgttcttgtggggcagtcaaagaaataggcctagtccagggtattaaatgctgtgatggggatactgagagagtatcctgggaatgtttaggagggcaccttattgtcttggtgaggatgacgcagtcacagaagtttcttctaaagagaagacacataggcagagatct

SEQ ID NO: 250 - protein, 85 aa, Homo sapiens
MCLLFRRNFCDCVILTKTIRCPPKHSQDTLSVSPSQHLIPWTRPISLTAPQEHRFLEIRVYDVITGVFHTRHTALVTRRHSTSME

SEQ ID NO: 251 - DNA, 322 bp, Homo sapiens
caattgagtattcttatcagtttttctcatgctagtctcagcactgtgtctaacctttccgctgccttgcttccatgaggcgtttgaggctaataggccaatatataagccagggtcccagcagaaaacagatgtcacactcaaactggaatatattggaggacactttataagtgaggtaaaatgacttgctcaaggtcactaagcaagtgactatttacaatagtgtgggcagagtgtagggaaaccacaaaggataatactagtgattggttctgttacccacttggcctgaagagatgagggaagggtcagtagatct

SEQ ID NO: 252 - protein, 52 aa, Homo sapiens [sequence omitted]

SEQ ID NO: 253 - DNA, 330 bp, Homo sapiens
aaatttggtatatctctcttccctcaggttagttaagctctgacaaaaccccaatatattaggctctgggaacctggttgagctcctgaaagtaaaactcagaaaagcttgggactttgtctccctccactcccaccatgactgggtccccctggactttttaacttcaaacatgtacacacctagcctctagcaatttgtcagttgcagttcaggtatttctgtcctgacgctttctcacagagatttgtgatctggtaactactgtgtttctgcctgtctctaattttggggacagtggtttgtttgccagaggtggagtgtgcttga

SEQ ID NO: 254 - protein, 58 aa, Homo sapiens
MFEVKKSRGTQSWWEWRETKSQAFLSFTFRSSTRFPEPNILGFCQSLTNLREERYTKF

SEQ ID NO: 255 - DNA, 368 bp, Homo sapiens
acgcgtataggaaacagtttggctatccgtttcaacattcacgctgactgactcgtcaaacagttcgccttgaccaggagagtcttcaaaacctttatcaaactgattttgttgagccaaacgccattgttcaagaatgagctgatacttagactcccattcagcgattttagtatctttttctattaatactttttcttactctattaatgtcgactctttttcacccagcagcagtgactgctcaagtaaaagagcctgaagcgattcaacgtcattgggtaagtcatcaataccaggccattgaaaatgacctttttcgagccgcttacaaacagaccattgctctcagtgcattatgcaagctt

SEQ ID NO: 256 - protein, 53 aa, Homo sapiens
MSTLFHPAAVTAQVKEPEAIQRHWVSHQYQAIENDLFRAAYKQTIALSALCKL

SEQ ID NO: 257 - DNA, 429 bp, Homo sapiens
  misc_feature (121)..(121): Wherein n may be a, c, g or t
ttcatagcagccttatttataatagcccaattctggaaagaacctagatgtccttcaacagaagagtggatacagaaaatgtggtaccttaacacactggagtactattcagctattaaanacaatgattccatgaaatttttaggcaaatggatagaagtagaaaatatcctgaatgaggtaacccaatcacagaaaaacacatatggtatgtaatcactgataaatgtttatgaacccaaaagtttggaataaccaagatacaatttacagacctaatgaagaccaagaagaagtaagaccaaagtatggatgcttcagtcctccttagaagagggaacaaaacattcacaggaggaaatatggagacatattttggagcagagacatgaggaaagaccatccagagactgtcccacctggggatcc

SEQ ID NO: 258 - protein, 71 aa, Homo sapiens
  misc_feature (41)..(41): Wherein Xaa may be any naturally occuring amino acid
FIAALFIIAQFWKEPRCPSTEEWIQKMWYLNTLEYYSAIKXNDSMKFLGKWIEVENILNEVTQSQKNTYGM

SEQ ID NO: 259 - DNA, 352 bp, Homo sapiens
gtcgacagacagacctggatgcagggagagaagcaggtgcagggcagggcagggccaaggcaccctgtgagctccagggctgggtctaacctgagaggttggcattgtaggaacaagggaaagctccaggggcagaggctacccccagccagggagagcaagtctcagaactacctgtgttcttatctctgctaggggacaaggtaggagatatggaaatagccttagtacactgctggtcaggagatgggactggatgctgactccaggttcctgaagcacacagagaagtctgtattggagaatctgtccaggtgggttttccagagcaggaggacacctttgggagctc

SEQ ID NO: 260 - protein, 58 aa, Homo sapiens
MQGEKQVQGRAGPRHPVSSRAGSNLRGWHCRNKGKLQGQRLPPARESKSQNYLCSYLC

SEQ ID NO: 261 - DNA, 385 bp, Homo sapiens
tgcagtgacagcagatccatcctcatctgcacatgccagtagcagtggtagtggcagctgtggcaaagagctagcagatgctagggtgtctgcctccccgcaggcattcaccacagtggtggaggcaacacagctggggatgtccagggcgccctctgctggtgactgtgcatgtggttgtgctggagctggtgttggcttgggggcagaatgctggcagatgcagctctgggtaccttctctgtcccccacaaacaggagtggtcacttagggtgaaggaggatctgctcttctctacacagtgttagtgcaagggtggggtgctgacagggcctggcctgccgggctctgtgttcgccaaggctccgattgcaatggtgatca

SEQ ID NO: 262 - protein, 64 aa, Homo sapiens [sequence omitted]

SEQ ID NO: 263 - DNA, 410 bp, Homo sapiens
tcatgaggttgggctcgtcgtggaaaaacttctcctcgaagttgcgggcatgaagattgcggcgagtgtcgaaagtctcgacgtcgccaccgcgtcgcaccgacagcaggtctgacggaacactagacagtccgtcgaatggaactgcccccctcgacagaggccaaccggcggtcttcgccaaccagtcgacgctgatccaataccgcccggacatcactcgcactccttcggacgggaccgggagagcagagcgataggtggcgggatcctcatggtcgccgtcacacatgatccacacctggttagcatcgcctctgactagccaccgccagcgtcctgaatccatgcgcaccgcgaacctgcgtgacgggacattcacgctagcaatccgagacaaggcctccgga

SEQ ID NO: 264 - protein, 116 aa, Homo sapiens
MDSGRWRWLVRGDANQVWIMCDGDHEDPATYRSALPVPSEGVRVMSGRYWISVDWLAKTAGWPLSRGAVPFDGLSSVPSDLLSVRRGGDVETFDTRRNLHARNFEEKFFHDEPNLM

SEQ ID NO: 265 - DNA, 536 bp, Homo sapiens
gcgcgccttcctgctgcccagggcctgcgccaaccgggttaggcgtggagggtgaaggcatctggggcacgcgcttctgggcctgggaatgcgccgccttgggccactgttcctctttccgctaagaaatagccgcttccctctcccgctgcgacccagttgctttgcacttgaatgttaggcgcagcttttgcccttttttcccaaggcttaagctcagatgaagctccaggaggagctcaggactaggactgtacctgataccatgtaaggttcgatgcatatatgttgaatcagagaggcgaggtgacctgttcaaggtcacaactcatgcgagggctgagctggtattcaaacctgaggattcgtggtaaatgaactttattctctaggacggccttatgactagcaggcttttccgagacacccatgtgtaaatcgctacattcatcccgctgtgcacactgatgatttttgtttgtttgtttttgaatagttagccctagatgctccatagtacccttgtcagagagtcc

SEQ ID NO: 266 - protein, 73 aa, Homo sapiens [sequence omitted]

SEQ ID NO: 267 - DNA, 378 bp, Homo sapiens
  misc_feature (271)..(271): Wherein n may be a, c, g or t
cagctttgttcttttgctctttgcaataagaacaaaagtcattataattttaggggaaatagacattcagaaaacctaggttttagtccagttctatctctagtatctatttctaaggctttctttggaaaagaaatattcttttccttgcctatgaagttctttccaaacttacaaggctacgacgtactccttgctaatacgaataaaaacaaaacatttgacaaattaccacaaattaaacacagatcaagtatgtctaatgaaaatntatcatctgaattgagatgtgccagatacgtaaactacacacttgagtttgaagattctgtgcgaaaaacggaaactattgccttagtagtgatttctattgaccac

SEQ ID NO: 268 - protein, 75 aa, Homo sapiens
  misc_feature (40)..(40): Wherein Xaa may be any naturally occuring amino acid
MKFFPNLQGYDVLLANTNKNKTFDKLPQIKHRSSMSNENXSSELRCARYVNYTLEFEDSVRKTETIALVVISIDH

SEQ ID NO: 269 - DNA, 393 bp, Homo sapiens
ggatccctgggaacaggccacttggcagtgggcatggactcagagcaaagcaagatgggtgcctcaagagcttggtcccacccaggcctgagactgcctcccttcctggtgaggatcagagagaggatgtcctgcccgcagtgcgttctgtgctatttccgtgttctgcaccagggacagtgtagcatgaactttgaaggtggaacctggctcactgtgctgtgattggatttggtgtcacagattctcctttgatgtcagaggcctcacctacaagtgggccatcctgggatgggtttacagcacctggaggtgacatcaggtgttcctctccagcagttaatgccaacagcacaaagcatctgtgtgccgaagaacctggcaggtactagt

SEQ ID NO: 270 - protein, 63 aa, Homo sapiens
MDSEQSKMGASRAWSHPGLRLPPFLVRIRERMSCPQCVLCYFRVLHQGQCSMNFEGGTWLTVL

SEQ ID NO: 271 - DNA, 234 bp, Homo sapiens
ccttattctaaccatctaataaaaaattatctcaataatcacactagataccattcttcatcgaattcggagtcaaacatggaaagtcctcgcttgtcatatggtgagtcttccactccgacctctattgaagagttaaacccaacaataaataattcgaggctggtgaagagaaactactcaatatcaattgatcctttgcatgacaacagcaataataatacggatgatgat

SEQ ID NO: 272 - protein, 78 aa, Homo sapiens
PYSNHLIKNYLNNHTRYHSSSNSESNMESPRLSYGESSTPTSIEELNPTINNSRLVKRNYSISIDPLHDNSNNNTDDD

SEQ ID NO: 273 - DNA, 459 bp, Homo sapiens
tgtattttaaaaggatactttcttggtttgttatgagatattctaattaaacagtgatgaattcttactcctggtcagtgtaagtctaaattcaagtttgttgctttgttttacagtttcctttcactcccctcccccatcccctcatgagtcataagcatgcagtgttgggaatagaacttgtcagctgagtggggatgagacagttctctgcccatactatttgtaactgtagtcaatgaggagaggaaaggacgttattaaatgctggagaaacaccttgattgaggcagcttcttctgtggctgtgtggtatggatgcagagttctgtgtgactatacactgatgtattctggctctgaatcacttagggatctcttctgcaccttgtgcattgtaggttttggatgcttatttgtttagggtctaggacctggtgcttagcctctcctggatcc

SEQ ID NO: 274 - protein, 61 aa, Homo sapiens
MRRGKDVIKCWRNTLIEAASSVAVWYGCRVLCDYTLMYSGSESLRDLFCTLCIVGFGCLFV

SEQ ID NO: 275 - DNA, 195 bp, Homo sapiens
gatccacacaaggaggaggagatcagaaagtacagcgccatctatgggcgatttgactccaaaagaaaggatggtaaacacctcacattgcatgagctcacggttaacgaggcagctgctcagctgtgtgtgaaggacaatgccctgctgacgagaagagatgagcttttcgccctggccaggcaggtttctcga

SEQ ID NO: 276 - protein, 65 aa, Homo sapiens
DPHKEEEIRKYSAIYGRFDSKRKDGKHLTLHELTVNEAAAQLCVKDNALLTRRDELFALARQVSR

SEQ ID NO: 277 - DNA, 418 bp, Homo sapiens
  misc_feature (67)..(67): Wherein n may be a, c, g or t
cgagccgacccagacacagaacgagtggaaggtccgcaggggttcgcttaaaccatgccggactctngggacaaggatgtgtacccggagcccccgcgccgcacgcctgctccctcgccgcagacctcgatccctaaccccatcacctacttgacgaaggcctacgacctcgtcgtggactggcccgtgaccctcgtgagagagttcattgaacaacagcacgccaagaaccgaacctactactaccaccgacagtaccgtcgagtgccagacatcacggaatgcaaagagggtgatgtcatctgtatctatgaggctgagatgcagtggagaagggacttcaaagtggaccaagaaatcatcaacatcatccaggagagacttaaggcttgtcagcagagggaaggagagagtgcac

SEQ ID NO: 278 - protein, 121 aa, Homo sapiens
  misc_feature (5)..(5): Wherein Xaa may be any naturally occuring amino acid
MPDSXDKDVYPEPPRRTPAPSPQTSIPNPITYLTKAYDLVVDWPVTLVREFIEQQHAKNRTYYYHRQYRRVPDITECKEGDVICIYEAEMQWRRDFKVDQEIINIIQERLKACQQREGESA

SEQ ID NO: 279 - DNA, 232 bp, Homo sapiens
  misc_feature (1)..(1): Wherein n may be a, c, g or t
  misc_feature (2)..(2): Wherein n may be a, c, g or t
  misc_feature (232)..(232): Wherein n may be a, c, g or t
nntccggacacggtgctgttcgacctggcgctcgattacgccagtgcaaaacgcatcgccgtggcccgtgccgaccagtgcagcgacgacgcctatgcggccgtcgtcggcctgttccaggcggccggtttcatcgtcacgcgcctggacaacatgcctgacctggccgtcatgcgcacaatcaccatgctggccaacaaagcggccaacgccgtcaaccagggcgtatgcn

SEQ ID NO: 280 - protein, 77 aa, Homo sapiens
  misc_feature (1)..(1): Wherein Xaa may be any naturally occuring amino acid
XPDTVLFDLALDYASAKRIAVARADQCSDDAYAAVVGLFQAAGFIVTRLDNMPDLAVMRTITMLANKAANAVNQGVC

SEQ ID NO: 281 - DNA, 421 bp, Homo sapiens
ctagcgtcggcacaccgaggaatactgtacatcgatgaagtcaatcttcttgacgatcacatcgtcgacatcttgctggattctgcagctatgggagtgaataccgttgagcgggaaggcatgagcgtgatccatccatcccgtttcagcttggtaggaacgatgaatcccgaagaaggccagctacgtccacaattgctggatcggttcggactgtgcgttacggtccagggagagaccgatcccgaggtacggatggagatcgtacaacgtcgactatcattcgaagatgatcctgatggatttattacagaatggtcctcgcatagcagacgattagccgaacgcatcgaaaattccatgaccctagtccaatccgtcgagattccaaaagatattctttccacagcggtacagatct

SEQ ID NO: 282 - protein, 140 aa, Homo sapiens
LASAHRGILYIDEVNLLDDHIVDILLDSAAMGVNTVEREGMSVIHPSRFSLVGTMNPEEGQLRPQLLDRFGLCVTVQGETDPEVRMEIVQRRLSFEDDPDGFITEWSSHSRRLAERIENSMTLVQSVEIPKDILSTAVQI

SEQ ID NO: 283 - DNA, 322 bp, Homo sapiens
gaattctgcccaccacaatccctggggtgcctcgtgtgggggtaagggaggggttcccctgtacatggaggtgagggaaggcagggctgtgccttgtgtggggagcatgttcaagtccccatgtcggcctttctcatgcaacctgaattgtgggttgccctggcctctggacccgtgtgtcctggtgcttcttcatgagggatcagcgcacacatctggactctgctatgcgtctgcctcccagtagaggaagtggctggggtttgggtttggactctaagtgggctggaagttactgggggagctcaaaggaggtttcctg

SEQ ID NO: 284 - protein, 60 aa, Homo sapiens
MEVREGRAVPCVGSMFKSPCRPFSCNLNCGLPWPLDPCVLVLLHEGSAHTSGLCYASASQ

SEQ ID NO: 285 - DNA, 207 bp, Homo sapiens
acgcgtgtgctgcggttagagcctagggctaacgactcagcgccgcaatccgtcttggaactagtcgactctcccgtgatgtccgaatcgcatacggtgaacaggggcaatttaaagatgtggctgttagtcaagtcagtcatcaacgatgacgccaaccagctacctcataacccactcacattgcagaatcttcacaaagtggcc

SEQ ID NO: 286 - protein, 69 aa, Homo sapiens
TRVLRLEPRANDSAPQSVLELVDSPVMSESHTVNRGNLKMWLLVKSVINDDANQLPHNPLTLQNLHKVA

SEQ ID NO: 287 - DNA, 265 bp, Homo sapiens
  misc_feature (265)..(265): Wherein n may be a, c, g or t
tgggcccggggcaagccgttggacaccggcagcgtgcgcgcgccgtcgctgaaggtcggcgacaaggtcatctacggccagtacgccggcagctcttacaagagcgaaggcgtcgagtacaaggtcctgcgcgaagacgacgtgctcgccgtcatcggctgagcctcggtgcgacctgtttcaacctgatccccaaatcccagccgccgggcatcgtccggcgctaccaatgaggtaattgcaatggctgccaaggatattcgtn

SEQ ID NO: 288 - protein, 53 aa, Homo sapiens
WARGKPLDTGSVRAPSLKVGDKVIYGQYAGSSYKSEGVEYKVLREDDVLAVIG

SEQ ID NO: 289 - DNA, 354 bp, Homo sapiens
  misc_feature (1)..(1): Wherein n may be a, c, g or t
ntttttttgagacagagttttgctgttgcccagccctccagtaaaactccataaactgaaaactatgacaatagaggtcatgtccattttcgcttatcaatatatctgtagcacctaatctaacacttggcatacagcgggcatacaataaatatttacaagtgaattatcaaatgctatttactctctgcatgagagtaataattatcccagttttctttcctgccttctctctcccttccttctatggctcttcttacgatggaatgctctggtcctctctttgggcaatcccatccattctcacatctaaggggataaatcccaattctctatttttcacctctatatctt

SEQ ID NO: 290 - protein, 60 aa, Homo sapiens [sequence omitted]

SEQ ID NO: 291 - DNA, 393 bp, Homo sapiens
acgcgtctaccgtaggatccatgaccttccgcaagaccgaccaccacaagaacgccattgactacgaggtcgccggactaatgtggctcgctgctgcccggccagatggggccggcatcgtcgaggtgctcgaccacggcaagggatggctcaccgaacccgaattgtccactgggcaccccacccgcgaggcagccgaggactttggccgccgactggctcacacccacgcagccggggcctcacacctgggggctgcacctgacgggtttgttcccgacgatgggtatatcggccgtgctcccctgccactgccgtccgaaccaatctcctcctggggagagttttacgctcagtgccgcatcgaaccatatatggacagtctcgacgctg

SEQ ID NO: 292 - protein, 124 aa, Homo sapiens
MTFRKTDHHKNAIDYEVAGLMWLAAARPDGAGIVEVLDHGKGWLTEPELSTGHPTREAAEDFGRRLAHTHAAGASHLGAAPDGFVPDDGYIGRAPLPLPSEPISSWGEFYAQCRIEPYMDSLDA

SEQ ID NO: 293 - DNA, 174 bp, Homo sapiens
ttcagcgatgccatgtgccaacagtggcgcgacgaaggcttgggcctggacagggttcagcgcttgcccggccgtttgccggggttgtattgcatccagacggacgccaacggcgaacgcaaatttctctactggcgcaatgaagccgccgtgcgtgattgcttcaccacgccg

SEQ ID NO: 294 - protein, 58 aa, Homo sapiens
FSDAMCQQWRDEGLGLDRVQRLPGRLPGLYCIQTDANGERKFLYWRNEAAVRDCFTTP

SEQ ID NO: 295 - DNA, 367 bp, Homo sapiens
tctagaaccttgcattatagtatttttttttcttttccttgcatttctatagttgtgaacaactaggagtgggtttttagcaattaattcagtgagcttgttaattttgaaaaggcttcaactgaggaacactttcttctcatttctttgatgatagcttctctgtttctccttcagaaagtcttgttttttatatgcatatttactttttgggtgcactctccttgttaatgagttatttgcatctgattttgagtttattcagcaaatatttattaatgatttactgtatactctgtgcttggggagttgacctacggaactcaaaggaggctcctttgaagaattgatgcttgagctgagatct

SEQ ID NO: 296 - protein, 51 aa, Homo sapiens [sequence omitted]

SEQ ID NO: 297 - DNA, 414 bp, Homo sapiens
  misc_feature (372)..(372): Wherein n may be a, c, g or t
ccatgggtggccctgctcatattcttcattatagctccaggttgtgaatggctactggcttgaattctatccagggaactattagaaaatgtgtttatattgcttgggaacatcattgctaataagagataccaaggtacacaagggaaatagtagtaaaacaagcagagtagtcacttaaaaatcccttcaacagtcatttgttgagtccctagtattaaggaaacaaagataaaaacatgtaatgtcagtcactgcatatgatggttttgtcaaatattgcaccactgaaaaacacattctcattatcatttcagctgctgatatcagtttccttgatgctcattacccactaagcaaattcatatgttntaggttgattttataccaacacttcacattgaggtactagta

SEQ ID NO: 298 - protein, 55 aa, Homo sapiens
  misc_feature (43)..(43): Wherein Xaa may be any naturally occuring amino acid
MSVTAYDGFVKYCTTEKHILIIISAADISFLDAHYPLSKFICXRLILYQHFTLRY

SEQ ID NO: 299 - DNA, 198 bp, Homo sapiens
aagcttccgttccaaaggcttgtcagggagattgcccaggatttcaagactgatcttcgtttccagagccatgcggtgcttgcgctgcaggaggctgcggaggcgtacctggtgggtctattcgaggacactaatctgtgcgccattcatgccaagcgcgttaccatcatgcccaaggacattcagctggctaggagg

SEQ ID NO: 300 - protein, 66 aa, Homo sapiens
KLPFQRLVREIAQDFKTDLRFQSHAVLALQEAAEAYLVGLFEDTNLCAIHAKRVTIMPKDIQLARR

SEQ ID NO: 301 - DNA, 236 bp, Homo sapiens
  misc_feature (1)..(1): Wherein n may be a, c, g or t
nacgcgtgcgcacgcatgcaacacacatacacacacacactcacacatacgcacacgcactcacacacatatgcacacacgcacacggaggcagaggtacatcttgtactctgccgtgttcacacaggtacacagtgtaccctctccgagcgccagctctcgttctcaacaaaggcgttactgccctctaggggacattttggaaatttgtgtaggagaatttttacatggtcttc

SEQ ID NO: 302 - protein, 78 aa, Homo sapiens
  misc_feature (1)..(1): Wherein Xaa may be any naturally occuring amino acid
XACARMQHTYTHTLTHTHTHSHTYAHTHTEAEVHLVLCRVHTGTQCTLSERQLSFSTKALLPSRGHFGNLCRRIFTWS

SEQ ID NO: 303 - DNA, 351 bp, Homo sapiens
cttaagaactgtacttgacacttgagaaagctgcaccaaaaatgaactactgttactctaacaaaatttaatgtggaatagggaaaataggaccaagcctctgatacccagcaaaagatgtataacactaagaaatactgagcaacaaatgctattaaagaaagacagttataatattaattctcaatttgtgggaaagaaggtgcttctgctgttctttcccacaaattacattaaaatcttttaaatgactgttttcaggtgatatcagcccaaaatgactgcagggagaaatgtctttgaaaaagtacaaaacaagtttagacaggagaaagggagggaaaagatcat

SEQ ID NO: 304 - protein, 58 aa, Homo sapiens
MWNRENRTKPLIPSKRCITLRNTEQQMLLKKDSYNINSQFVGKKVLLLFFPTNYIKIF

SEQ ID NO: 305 - DNA, 204 bp, Homo sapiens
atcaagactagaagagctcggcaagctgaggaagaatatgcgaaaacacataagtatgaatcgttaactgttgaatcgatccctgcaaaagtaaacagcatctgggaggagctacaggaggctagtaagaaccgtcttttgagcagttcagggaaagtcggctttgttctcgacggttccaagcaggctaggtcgacaacggcg

SEQ ID NO: 306 - protein, 68 aa, Homo sapiens
IKTRRARQAEEEYAKTHKYESLTVESIPAKVNSIWEELQEASKNRLLSSSGKVGFVLDGSKQARSTTA

SEQ ID NO: 307 - DNA, 429 bp, Homo sapiens
  misc_feature (1)..(1): Wherein n may be a, c, g or t
  misc_feature (301)..(301): Wherein n may be a, c, g or t
  misc_feature (337)..(337): Wherein n may be a, c, g or t
  misc_feature (338)..(338): Wherein n may be a, c, g or t
naagatggagaacccgtgaccaatgtcaatgatcttttcttcaaatattcaatggaaggagtggccaccatcctttatgagagtcgtttgggctgcctggaaaacagcatcccacagctgactgtggaatacatcgaggccctggaggtcatgtttagcatgttcaagacctccatgtatgcaggcgccatccccagatggcttcgccccttcatcccaaagccctggcgggaattctgcaggtcctgggatggactcttcaaattcagccaaattcatgttgacaacaagttgagggacnatacagtaccaaatggaccgaggccggagggtgagnncgggggacttctcacatacctcttccttagccaggctctgacgctgcaggagatctacgccaacgtgactgagatgctgctggccggcgtc

SEQ ID NO: 308 - protein, 143 aa, Homo sapiens
  misc_feature (1)..(1): Wherein Xaa may be any naturally occuring amino acid
  misc_feature (101)..(101): Wherein Xaa may be any naturally occuring amino acid
  misc_feature (113)..(113): Wherein Xaa may be any naturally occuring amino acid
XDGEPVTNVNDLFFKYSMEGVATILYESRLGCLENSIPQLTVEYIEALEVMFSMFKTSMYAGAIPRWLRPFIPKPWREFCRSWDGLFKFSQIHVDNKLRDXTVPNGPRPEGEXGGLLTYLFLSQALTLQEIYANVTEMLLAGV

SEQ ID NO: 309 - DNA, 440 bp, Homo sapiens
  misc_feature (52)..(52): Wherein n may be a, c, g or t
  misc_feature (362)..(362): Wherein n may be a, c, g or t
  misc_feature (376)..(376): Wherein n may be a, c, g or t
  misc_feature (382)..(382): Wherein n may be a, c, g or t
cctaggctggagcgcagtggcactatcttggctcactgcaacatccgtctcnccggctcaagcagtcctcccacctcagcctcctgggtatctgggattataggcacatactaccgtgcccggctagaggattatagtttaataatggatttatttctaagtgtaaaaccagatgaaaagcaaaggccaaactacctgccatccagttagtttgaaatgatccttcatttatgcaaagagaccgacacagattatccaaaaactattctttttactttggaacgtgaagggcatgatttttttaaataattgtgttgcgttgaacaaacatcaaatgattctgttccctacttcactagatngcagagagactcanagcatntgagatagcagtagccagcctggaaatcaaaaatctgtggctgattcagaagtaaaag

SEQ ID NO: 310 - protein, 69 aa, Homo sapiens
  misc_feature (18)..(18): Wherein Xaa may be any naturally occuring amino acid
PRLERSGTILAHCNIRLXGSSSPPTSASWVSGIIGTYYRARLEDYSLIMDLFLSVKPDEKQRPNYLPSS

SEQ ID NO: 311 - DNA, 476 bp, Homo sapiens
gtgcaccgttctttttcggggcactataaaacgccacacttgttgggtgcctccttcttgcctcctaccatcagcttctcaatctcccttgctaggctcatttcatcttcttgactacatgggaatgccttgactttggcccttggaccccttccctgcctgcactcactccctaggggatctgatctagtatcaatcatgtgggaacaactaccaattatgtctcttgtcccaacctgtgccttgaactcaaatgcatctattccactgctttctctatatctgcacttgggtgtctatccgggcatctcacagccaacagttccaagctcaactctttcttccacttgcttgcctgaatctacgttccccatctctatgagtggtgccatcaaaacctaaagtcatacttgacttcatcagtctctcccaccacactgcccatctgtcatatccagttagtgcatcctgtcagc

SEQ ID NO: 312 - protein, 67 aa, Homo sapiens [sequence omitted]

SEQ ID NO: 313 - DNA, 296 bp, Homo sapiens
gggcccagatgaacaggtaagagacacaagcagctctgggaactgcaaggtgattagaagatgggggcaagactgagcacaaaggcgggagagcacaggatggagcaggttaggaagctggtacaggaatcaggacagcgatgccaaggtaaggaaggcatcgggggtacaggaaaaagcagaactaaattcagcaaaatgctcccagttgaccagatcctatggaaaaaccctcagctgaacgcctggggcacccacttacaaaggcaatcttatcttataaagagagggaattc

SEQ ID NO: 314 - protein, 78 aa, Homo sapiens
MGARLSTKAGEHRMEQVRKLVQESGQRCQGKEGIGGTGKSRTKFSKMLPVDQILWKNPQLNAWGTHLQRQSYLIKRGN

SEQ ID NO: 315 - DNA, 159 bp, Homo sapiens
acagtaaaagcacctcgcgaagaacagcacaccccggtttctgacatttcagctctgactgtcggacaagccctgaaggtgaaagcgggtcaaaacgcgatggatgccaccgtattagaaatcaccaaagacggcgtccgcgtccagctgaattcgggt

SEQ ID NO: 316 - protein, 53 aa, Homo sapiens
TVKAPREEQHTPVSDISALTVGQALKVKAGQNAMDATVLEITKDGVRVQLNSG

SEQ ID NO: 317 - DNA, 382 bp, Homo sapiens
  misc_feature (50)..(50): Wherein n may be a, c, g or t
  misc_feature (382)..(382): Wherein n may be a, c, g or t
gatcccacccaattcaaggaccctgaccatttcaatcccaccaatttctnggatgaccagggcgagttccagaacaacgacgccttcatgccctttgccccaggaaagcggatgtgcctgggtgctggcctagcccgctctgagatcttcctcttcctgacggctatcctgcagaagttctccctgctccctgtgggaagtcctgctgacatcgaccttactccacagtgcactggtctaggcaatgtgcccccagccttccagctccgcttggtggcccgctgaggttgggcttcagtattctgatctcagtggccttgatatcctcactgccctaactgtacgtgtgaatctctttacggagaggaatacaagtgtgtgn

SEQ ID NO: 318 - protein, 94 aa, Homo sapiens
  misc_feature (17)..(17): Wherein Xaa may be any naturally occuring amino acid
DPTQFKDPDHFNPTNFXDDQGEFQNNDAFMPFAPGKRMCLGAGLARSEIFLFLTAILQKFSLLPVGSPADIDLTPQCTGLGNVPPAFQLRLVAR

SEQ ID NO: 319 - DNA, 326 bp, Homo sapiens
acgcgtcgtgcgcgtccatggtgatcttccatgccaggtagagctgattgacgccggtatcgtgaaattcatccggcgtcggcacgtcgatgatcactgtttcggctccgttccgacccataattttgcctgccaccttgctagcaggaatcaggcttatcgctagtaactattgtggctgtcgggatcgatggcggcttgcgtttaccccctcgcctcttcgctatcatgggggcatatataactcctaatgccaccacacgcgggctttgccatatgacgctacaagttaacatcacaccaaatgggcgtatgagcctgccggt

SEQ ID NO: 320 - protein, 53 aa, Homo sapiens
MITVSAPFRPIILPATLLAGIRLIASNYCGCRDRWRLAFTPSPLRYHGGIYNS

SEQ ID NO: 321 - DNA, 261 bp, Homo sapiens
  misc_feature (1)..(1): Wherein n may be a, c, g or t
  misc_feature (2)..(2): Wherein n may be a, c, g or t
nnacgcgtgcccactgacgatgaagaaacgtttggccccgtggctgctatctataagttccactctgaagaacaagtgcttcgtctggcgaacgacgtgcgtgtgggcttggcaggctacttcttcagcgagaacgtgcatcgctgctaccgcgtggctgaagcactgcacgtcggtatggttggtatcaatacgggtatgatttcacctaacactatgccctttggcggggtaagggagagcggctttggccgggaaggg

SEQ ID NO: 322 - protein, 87 aa, Homo sapiens
  misc_feature (1)..(1): Wherein Xaa may be any naturally occuring amino acid
XRVPTDDEETFGPVAAIYKFHSEEQVLRLANDVRVGLAGYFFSENVHRCYRVAEALHVGMVGINTGMISPNTMPFGGVRESGFGREG

SEQ ID NO: 323 - DNA, 333 bp, Homo sapiens
attgaggccacatgtcacgctccaaaattagaaggtgtatacagcgaaatctacaaggttttgaaaccgggtggtacctttgctgtttacgaatgggtaatgactgataaatatgacgaaaacaatcctgaacatagaaagatcgcttatgaaattgaactaggtgatggtatcccaaagatgttccatgtcgacgtggctaggaaagcattgaagaactgtggtttcgaagtcctcgttagcgaagacctggcggacaatgatgatgaaatcccttggtattacccattaactggtgagtggaagtacgttcaaaacttagctaatttggcc

SEQ ID NO: 324 - protein, 111 aa, Homo sapiens
IEATCHAPKLEGVYSEIYKVLKPGGTFAVYEWVMTDKYDENNPEHRKIAYEIELGDGIPKMFHVDVARKALKNCGFEVLVSEDLADNDDEIPWYYPLTGEWKYVQNLANLA

SEQ ID NO: 325 - DNA, 610 bp, Homo sapiens
acgcgtgaaggggcaatgctcttgtgttgtccctctgtctggacgcgcctggccactccgaaggcttttcaccccattatggccaaatagtatagggccactggggagggggaagggaatcattttgtgttcatttttgttttctgtttcacctaaaccagcataggattgataggggagacggttggcgggcatttccgtttctatgtgactatgtgaccaaggcagcaggggcttttacctgctaggcggcaatcctttggccctgagaatttgggagagaacagtgcatcaggccaggctcagcaatatgtttgctcacattctttcagccttctgtcacccccctcaacaccaaactttcttccttgtgagcagaaggttggctgctgttagcaggatcccacagtgataaccaggcccttcccttcctaagccaaaacccattgtgactgcctgtctctcctgtctctgacttctcaggcagcctcttgagtgcactgagttgtatccgagagggtgggaacagcagcatcccctaattgcagtacacggttccttttccgcccgccaccctgcctttccttgggggcagctgtctctctgtaca

SEQ ID NO: 326 - protein, 68 aa, Homo sapiens [sequence omitted]

SEQ ID NO: 327 - DNA, 294 bp, Homo sapiens
  misc_feature (1)..(1): Wherein n may be a, c, g or t
nccgcgttcatctgttgccacagccagttcatcgcgggcgggtgccaatcgtcatagtggccgctaagcgcctgaccatattggcgaatggcgtcccaggtgaggattccgggccaaaagagcgcgccatgcaccacaaggacgagcaggagcgctacaccatgccgatcgacggtccgttaccggtgcgccattttgaggaaaggctgctcacccggaaccgctatcatgtcggcaaatatatttcatcccgcgtcaatccgtaatatttgacctgacgcaccataaaaattt

SEQ ID NO: 328 - protein, 61 aa, Homo sapiens
MASQVRIPGQKSAPCTTRTSRSATPCRSTVRYRCAILRKGCSPGTAIMSANIFHPASIRNI

SEQ ID NO: 329 - DNA, 483 bp, Homo sapiens
ggatccaaccccacatttcccctcagcactcccctagtagagtctctctgcaggggctccatctctgctgcaggcttctgcctgggcacctgggctttctgatacatcctgtgacatctaggtggaagctgttaagcctccttcactcttgcattgtgtgcacctgcaggtttaacaccacgtggaagctgccaagtcttacagattgtgcctttaggaatagcagttcagttagatctgggacctttggcctgcggctggagctggagagccaaaatataggaagcaatgtcctgaggctgcccaggacaggggaaccctggccctggccctggcccctgaagccatgctttcctcctaagcctctgggcctgtgatggggagggctgtcctgaagacttccaaaatggcttccaggcctgttttccatctcttgactcttagcacttggctcccttttagttatgtaaatctctctaccaa

SEQ ID NO: 330 - protein, 95 aa, Homo sapiens [sequence omitted]

SEQ ID NO: 331 - DNA, 279 bp, Homo sapiens
  misc_feature (1)..(1): Wherein n may be a, c, g or t
natccgatccgtgcgcgtgctgctgtgtgtgtgtcggtggagatggccacagcttacgctcccatggcgagccaggtgatgaagagcagcctcgtcgtgcactcgaggccgaggggcctgtcaggcgctgctgcgctcacgaggcggcccggccggtccaccgtcaaggccatccagcccgagaaggcaacgtaccaggtggtgcagcccatcaacggcgacccgttcatcggcagcctggagacgccggtcacctccagcccgctcgtggcgtggtac

SEQ ID NO: 332 - protein, 79 aa, Homo sapiens
MATAYAPMASQVMKSSLVVHSRPRGLSGAAALTRRPGRSTVKAIQPEKATYQVVQPINGDPFIGSLETPVTSSPLVAWY

SEQ ID NO: 333 - DNA, 231 bp, Homo sapiens
cccgcggactacgacccacgctcacgcggttggtacaaggcggccaccgccgcccaacagaccatcgtcaccgaaccctacgtcgccgcctcctccggcaagctggtgatcaccctggccaccccggtacagcatcagggccaattcatcggcgtggccggcgccgatatagacctgggcagcatcagcgccattatcaactcgttgaacttcggtggtcacgggcacgcg

SEQ ID NO: 334 - protein, 77 aa, Homo sapiens
PADYDPRSRGWYKAATAAQQTIVTEPYVAASSGKLVITLATPVQHQGQFIGVAGADIDLGSISAIINSLNFGGHGHA

SEQ ID NO: 335 - DNA, 327 bp, Homo sapiens
  misc_feature (1)..(1): Wherein n may be a, c, g or t
  misc_feature (2)..(2): Wherein n may be a, c, g or t
nnacgcgtcggcccagccgtggtggagctgttctccagaggcgtcctgctgcccgacatcgggatcagcctgtggcggttggtgatcggcctggcggtggcggtcgtggtcgggattccggcgggcttgttgctcggcctcagcaccgcggccgagggggcgaccgcgcccctcgtgcagttcgtccggatgatctcgccgctgtcctgggcgcccatcgcccgtggcggtattcggcatcggcaaccagccgtgattttcttgatcgcggtggcggcggtgtggccggtgctgatcaaccccgcggccggcgtacgcgccgtcgac

SEQ ID NO: 336 - protein, 109 aa, Homo sapiens
  misc_feature (1)..(1): Wherein Xaa may be any naturally occuring amino acid
XRVGPAVVELFSRGVLLPDIGISLWRLVIGLAVAVVVGIPAGLLLGLSTAAEGATAPLVQFVRMISPLSWAPIARGGIRHRQPAVIFLIAVAAVWPVLINPAAGVRAVD

SEQ ID NO: 337 - DNA, 243 bp, Homo sapiens
atttgggcttctattatctagaaattcaataagagtttgttgtgctggtctgacaaatatcatctgtatatgtggatgaatagttttctctcattagcttcatctctttatttttatgtggggatggaaatatctactttttccagggggaaggaggtcagtgggagggtgtggagggaattggtttctgtgtcatgtgcagtcatgtgctgcttaacaatgggaatatattctgagagacgc

SEQ ID NO: 338 - protein, 58 aa, Homo sapiens
MWMNSFLSLASSLYFYVGMEISTFSRGKEVSGRVWRELVSVSCAVMCCLTMGIYSERR

SEQ ID NO: 339 - DNA, 398 bp, Homo sapiens
cgagccttcatcttcatcgacgaatcacacatcaccgacgccttcacctggctctccaagcagcagaaggacagtggctgcttcaggagctccggatcactgttcaacaatgccatgaaggggggagtcgatgatgaaatcaccctctctgcctatataaccatggcccttctggaaagttcactcccagacacagtaggtgccacattgctttccagcattcaaactggtgtaaagtctatggctttctatcctttctgaagccaagaggaagcttttatttttattattgtttacaatgctttgcacttgtcagatttcatcaataagcatccacttgctcaacaaaatcctggatatgttacaaaaatcaacctgaaatcacagcctctggatcc

SEQ ID NO: 340 - protein, 86 aa, Homo sapiens
RAFIFIDESHITDAFTWLSKQQKDSGCFRSSGSLFNNAMKGGVDDEITLSAYITMALLESSLPDTVGATLLSSIQTGVKSMAFYPF

SEQ ID NO: 341 - DNA, 417 bp, Homo sapiens
  misc_feature (300)..(300): Wherein n may be a, c, g or t
gtaccatgcatgttctcaggtatgccacgtaaagaatatgatgaacgacttgcaagccatcgtgaaggtctactggatattgcaaaacgtgcaggttatcaagtgacatggattgataataattctggttgtaagggaacttgtgatcgagttgaacaatttaagattccagagccaattcaaaagaaatggtgtaaagatgaagagtgttttgatgatattttaattgatagcctgaaagcttatcttgcaacaattcctaaagatgatacgcgtccacgcttagtggtactacatcanatgggtagtcatggtcccagcctattacaacgtattccagcagaaattaaagtttttaaaccaacctgtgataccaatgcgattcaaggttgttcgcgtgattcacttgtgaatagt

SEQ ID NO: 342 - protein, 139 aa, Homo sapiens
  misc_feature (100)..(100): Wherein Xaa may be any naturally occuring amino acid
VPCMFSGMPRKEYDERLASHREGLLDIAKRAGYQVTWIDNNSGCKGTCDRVEQFKIPEPIQKKWCKDEECFDDILIDSLKAYLATIPKDDTRPRLVVLHXMGSHGPSLLQRIPAEIKVFKPTCDTNAIQGCSRDSLVNS

SEQ ID NO: 343 - DNA, 282 bp, Homo sapiens
  misc_feature (1)..(1): Wherein n may be a, c, g or t
ngtgatgtgtgtttctctgaagtgtatcgcgaaggcggtggcaccgtaggaattgtggactacacaaattatgatgatatgaaatatgctataaagaagctggatgatactgaattcaggaacgcctttgggcgagcctatataagggtgaaggaatataacggcaaacgtggtcgctcctactcacgtagccgaagcccaagtcgtagttacagcaaaagcaggagtccgagtaaatcacccaggactcgccgttcatcatctagatcccggtcaagatct

SEQ ID NO: 344 - protein, 94 aa, Homo sapiens
  misc_feature (1)..(1): Wherein Xaa may be any naturally occuring amino acid
XDVCFSEVYREGGGTVGIVDYTNYDDMKYAIKKLDDTEFRNAFGRAYIRVKEYNGKRGRSYSRSRSPSRSYSKSRSPSKSPRTRRSSSRSRSRS

SEQ ID NO: 345 - DNA, 234 bp, Homo sapiens
  misc_feature (13)..(13): Wherein n may be a, c, g or t
tcctttcccccancgaagtagtgcggagttgatgcaatgagcaaagctgcaagcaagagcgcccccaagggtttccggatcgagcatgacagcatgggcgaactgcaggtgcctgccgacgccctgtggggcgcgcagacccagcgcgctgtacagaatttcccggtgtcgggccagcgcatgccgcgcggcttcatccgcgcactgggcctggtcaagggagccgccgccggc

SEQ ID NO: 346 - protein, 66 aa, Homo sapiens
MSKAASKSAPKGFRIEHDSMGELQVPADALWGAQTQRAVQNFPVSGQRMPRGFIRALGLVKGAAAG

SEQ ID NO: 347 - DNA, 380 bp, Homo sapiens
  misc_feature (1)..(1): Wherein n may be a, c, g or t
ncggccgcgggagaagctccaaaattcgcgggtactctcaaccgattcaagacaccctccggtggcatccttatgaccgccagcgttttcctactgggggtgggactcgagtacgtcgttcccgagcgtgccttcgagatatccattaacacggctgcggtcggtgtcatctggacgtgggcgacgatcttctggtgccagttggtgttgcgccgacaagtgaatgagggtcggatcacagattcgggtttccatatgccgggttacccaattacgggtatcttcggaatcgtcagcttggccggggtgacggccctcatggtgctcgatccccagaaccgaattgtactggctgcatccctggtgtacatcgccgttat

SEQ ID NO: 348 - protein, 126 aa, Homo sapiens
  misc_feature (1)..(1): Wherein Xaa may be any naturally occuring amino acid
XAAGEAPKFAGTLNRFKTPSGGILMTASVFLLGVGLEYVVPERAFEISINTAAVGVIWTWATIFWCQLVLRRQVNEGRITDSGFHMPGYPITGIFGIVSLAGVTALMVLDPQNRIVLAASLVYIAV

SEQ ID NO: 349 - DNA, 375 bp, Homo sapiens
  misc_feature (28)..(28): Wherein n may be a, c, g or t
gagctgctggaaaacaactctcaagagnacgaatatttttgtgacattttttccactgaattaaaattagatgaaacttctaacaagtcaaccgattattccagttcaaatcaccagtatcctgaacaactggagttgcacaattataaactgctcaataaaattggtgaaggggcattttccagagtatttaaagcagtaggcatcaacacggatgaccaagctcctgttgccatcaaagcaatcataaagaaaggcatttcgagcgatgccatcttaaaagggaatgatagaatccaaggttccagcagaaagaaagtcttaaacgaagttgccatccacaaactggtttcgaaaaataatccgcattgtaca

SEQ ID NO: 350 - protein, 125 aa, Homo sapiens
  misc_feature (10)..(10): Wherein Xaa may be any naturally occuring amino acid
ELLENNSQEXEYFCDIFSTELKLDETSNKSTDYSSSNHQYPEQLELHNYKLLNKIGEGAFSRVFKAVGINTDDQAPVAIKAIIKKGISSDAILKGNDRIQGSSRKKVLNEVAIHKLVSKNNPHCT

SEQ ID NO: 351 - DNA, 183 bp, Homo sapiens
gtcgacgacaaggggcagatcttctggggcgaccagctgctggtggtgctggcccgcgacgtgctgaagagccaccccggcggcaccatcatcgccgacgtcaaggcgtcccaggtgttgttcgatgaggtcgagcgtgccggcggcacgccgctgatgtggcgcacagggcattcgctgatc

SEQ ID NO: 352 - protein, 61 aa, Homo sapiens
VDDKGQIFWGDQLLVVLARDVLKSHPGGTIIADVKASQVLFDEVERAGGTPLMWRTGHSLI

SEQ ID NO: 353 - DNA, 342 bp, Homo sapiens
ggcgccatggtcatcagcatcatgtgttcggcgcccgctgcacgaatgttcgtgcgatcaagcgcgccttttagttcgacgcacggtaaagcccgtgcgcatcgatgtaggccaggaccgcgtcaggcaccaggaaacgtaccgacttcccgctggccggcagttgacggatctgggtggcggacaccgcaagcggggtctgccagacgaatgcaatattcccgttcggcccggtcagggccaaggggtcacttaccgaccgcgcggccagcaggttgcgcaaggcatccggcggttcgctggcggcatccgggcgttgcaaaaccaggatgtggcaatgct

SEQ ID NO: 354 - protein, 112 aa, Homo sapiens
MVISIMCSAPAARMFVRSSAPFSSTHGKARAHRCRPGPRQAPGNVPTSRWPAVDGSGWRTPQAGSARRMQYSRSARSGPRGHLPTARPAGCARHPAVRWRHPGVAKPGCGNA

SEQ ID NO: 355 - DNA, 366 bp, Homo sapiens
agatcttgcctgcagtaattattactgcagtgttctaatggtgattttctgtttctctcatgccttctgcatttaaccagaattcagcagtatggatgatttgtcccgcctcctccatatatttattaattcaaacatttatttttactcctctgctccttaaaatcttttgatgagtgtcctttgggatgaagtccaaatcccttcatatgacaattacaagactgtttgcaatacgttctcttcctgcccttccagcctcctcctcctgtcttgtgttcacacacacttcattctccagccatcttaagccacaagaaattatctcaaataccatgtgtccttgtgctccataccttctttcct

SEQ ID NO: 356 - protein, 59 aa, Homo sapiens
MKSKSLHMTITRLFAIRSLPALPASSSCLVFTHTSFSSHLKPQEIISNTMCPCAPYLLS

SEQ ID NO: 357 - DNA, 357 bp, Homo sapiens
ggattggcaattaatgccagcgctttgcaagcactccgttctgaagctcaaaattttgcagtactgctttggtgttcaccacaacgctaaagcgtggtcacttgcccattgccgcaaaggtctgcaccaactgcagcagcggtgcctgcgcattgatctcctgcaattccacctgcagccggttgacgccgggcaacgcggcgtcgccgttcaacgcttgctgcaataacgcaggcaaaccgcccagatcgcgcaaccaccacgcggcaccagctgcctgcagccgtgccgcgtggtcgaactggtcgtagtccagcgggtagacgatcgatggcagccccgccgccaggcacgcgt

SEQ ID NO: 358 - protein, 71 aa, Homo sapiens
MPALCKHSVLKLKILQYCFGVHHNAKAWSLAHCRKGLHQLQQRCLRIDLLQFHLQPVDAGQRGVAVQRLLQ

SEQ ID NO: 359 - DNA, 402 bp, Homo sapiens
tgtacatatatggtccagattcacccttacttagaaatccccgagctggcagggcgaggctgggaattgagagtgagcaaaaagggagtctgcctctttcccccagggtgtgctatcaactccattaccatttccaaacagctgggtgtgagtctaactaaggtttccttcagtcagacatttgccaggagccggagcccctgacaggacagcgagagcgatgatcagacatcatttcacagtgaaatcatcactcgctgatttcaggcagaaaactttagaaaactctaaactctaaagaggcactgaagcgtgctagggcagcagcagtacttccccgactgaccttcaggaacctgcatattctccagccccgccccaccccaccccctctcagctagc

SEQ ID NO: 360 - protein, 64 aa, Homo sapiens
MVQIHPYLEIPELAGRGWELRVSKKGVCLFPPGCAINSITISKQLGVSLTKVSFSQTFARSRSP

SEQ ID NO: 361 - DNA, 303 bp, Homo sapiens
  misc_feature (294)..(294): Wherein n may be a, c, g or t
  misc_feature (295)..(295): Wherein n may be a, c, g or t
  misc_feature (298)..(298): Wherein n may be a, c, g or t
  misc_feature (299)..(299): Wherein n may be a, c, g or t
  misc_feature (300)..(300): Wherein n may be a, c, g or t
  misc_feature (301)..(301): Wherein n may be a, c, g or t
  misc_feature (302)..(302): Wherein n may be a, c, g or t
  misc_feature (303)..(303): Wherein n may be a, c, g or t
cctagggctgctgtaacaaatcaccacaaattgggtggcccaaaacatatgtgttccctcacagttctggagtctggaagtctgaactcaaggacctggcaggccagtgctccctctgaaggctttaggggagaatttttccttgcctcttcctagcctctggtggctgcttggcaacccttggtgttccttatcttgtagctgcaacacttcagtttctgcctctataatgattgctatggtttggaatgtttgggtcccctcaaaattcatacattgaaacctaatcccccnnccnnnnnn

SEQ ID NO: 362 - protein, 61 aa, Homo sapiens [sequence omitted]

SEQ ID NO: 363 - DNA, 167 bp, Homo sapiens
  misc_feature (1)..(1): Wherein n may be a, c, g or t
  misc_feature (2)..(2): Wherein n may be a, c, g or t
nngcgtggcgccgatgcgatgagcgcgcgcgaggcgctggagattgccacgctgggcggcgcccgcgtgctgggccgcgccgattgcggcagcctggaacccggcaagcgcgccgacatcgccatctgggacatgcgcgggatcgaggcggcgggcgcctgggatcc

SEQ ID NO: 364 - protein, 55 aa, Homo sapiens
  misc_feature (1)..(1): Wherein Xaa may be any naturally occuring amino acid
XRGADAMSAREALEIATLGGARVLGRADCGSLEPGKRADIAIWDMRGIEAAGAWD

SEQ ID NO: 365 - DNA, 375 bp, Homo sapiens
  misc_feature (366)..(366): Wherein n may be a, c, g or t
gtcgacagagcgcttacagcttccaaggcatggaggcaccacactaccaggcttgccaggacaccccagaggggcacagacttcgggctctgtcacatggctgtgtagcatgttggagagacacagagaccacaggcgcccgggggctaatctgtgtcctcctcagaccggtggctgaagagcagatgaccagagtggacccctgccggctgcctgaggcagttgcttccagaagtgggcgagttccgggaaagcttcaggtggtgggtgccctgctggaccccctctggtgcctgctaagagggcacccttgcatgctggaagtttccaccggaccctgaagcccccaggatgctccgagctgcngttcccctg

SEQ ID NO: 366 - protein, 103 aa, Homo sapiens
MEAPHYQACQDTPEGHRLRALSHGCVACWRDTETTGARGLICVLLRPVAEEQMTRVDPCRLPEAVASRSGRVPGKLQVVGALLDPLWCLLRGHPCMLEVSTGP

SEQ ID NO: 367 - DNA, 317 bp, Homo sapiens
cttgtgcagaatgcaaggccgccactgcctgcttcatgccctgtggcaataagccacctgatcatgcagtgctgggcgaccaaccctgacaaaagacctcagtttgatgacatcgtggcgatcctcgagagctacaaggaagccctcgatgaggacccgtcgttcttcttatcgtatataccgcctccaccggaccacggccaccaccaccatcatcagagccttctccggtgcttccctcgctccatgcgaaggtctgcatctctgaaagtatgatcaggccgggatgttgcctctgctcatcgatgccgtgtaca

SEQ ID NO: 368 - protein, 91 aa, Homo sapiens
LVQNARPPLPASCPVAISHLIMQCWATNPDKRPQFDDIVAILESYKEALDEDPSFFLSYIPPPPDHGHHHHHQSLLRCFPRSMRRSASLKV

SEQ ID NO: 369 - DNA, 353 bp, Homo sapiens
gtcgaccccttcgattgtggcgaactccatggctgctgcgggcctgcgtaggctctcgagtagctcgacgtcgggttcgcgagggctcgcagcgtggccatgctgcttcttggatggttcgggcaactcctcgggggattcgagcagttcttggcgcacctgctctggcgtcatcccggaggccaggccgacaagtgctgcctcctgccacccgctgagcgacgctgccatgttgagtacggcgtcttcactggtcagggcgagcgcggtatcgaccaggttggcgtccaggccgagagacagcatgtctgctcagtcgcggtgatgactggagtggcggtctcctgcacggg

SEQ ID NO: 370 - protein, 102 aa, Homo sapiens
MLSLGLDANLVDTALALTSEDAVLNMAASLSGWQEAALVGLASGMTPEQVRQELLESPEELPEPSKKQHGHAASPREPDVELLESLRRPAAAMEFATIEGVD

SEQ ID NO: 371 - DNA, 451 bp, Homo sapiens
  misc_feature (1)..(1): Wherein n may be a, c, g or t
  misc_feature (2)..(2): Wherein n may be a, c, g or t
  misc_feature (190)..(190): Wherein n may be a, c, g or t
  misc_feature (438)..(438): Wherein n may be a, c, g or t
  misc_feature (446)..(446): Wherein n may be a, c, g or t
nntctagacaagacacaacaaaatcaccacaacctccccttaaaaggtcatatatcaggaagggcaaagtaagatgggaccttcctaccacaacccaccacaccccctcccccccccccccctcccggcgcccccccccctcccctcccccccccaccccactactcaccacccccccactccccccccncccgccctccccccccgctccgggcgccgctcccccccacccccccttcgtgacgctcacatcaggaatcattagcaaacctgtcgtaatgccagataaccaatgcctggctggcacaccaataactgagtcatattatatgcttcatccttttgacaggagcgtacaaaaccatctattgtgcactgtcattttcactgaaaacataataactgggtttagtagtctttacaaatcaaagttatgcnctttcacngaatg

SEQ ID NO: 372 - protein, 56 aa, Homo sapiens
  misc_feature (40)..(40): Wherein Xaa may be any naturally occuring amino acid
DGTFLPQPTTPPPPPPPPGAPPPPLPPPPHYSPPPHSPPXRPPPPLRAPLPPTPPS

SEQ ID NO: 373 - DNA, 246 bp, Homo sapiens
  misc_feature (166)..(166): Wherein n may be a, c, g or t
  misc_feature (178)..(178): Wherein n may be a, c, g or t
  misc_feature (179)..(179): Wherein n may be a, c, g or t
ggatccctgaaatctgttgccatcgccccggctgaagttgagggagctttcgttgaaggcgtgggcttcgacggctcagctatcgaggggtatgcccgcgtctacgaggcagatatggtggcccaccccgatccggccaccttccaagttctgccatggcgttctnggcaccagcacnnggccaggatgttctgcgatatcaccaatcctgacggaacctcctctgcagctgatcctcgtcacgtc

SEQ ID NO: 374 - protein, 82 aa, Homo sapiens
  misc_feature (56)..(56): Wherein Xaa may be any naturally occuring amino acid
  misc_feature (60)..(60): Wherein Xaa may be any naturally occuring amino acid
GSLKSVAIAPAEVEGAFVEGVGFDGSAIEGYARVYEADMVAHPDPATFQVLPWRSXHQHXARMFCDITNPDGTSSAADPRHV

SEQ ID NO: 375 - DNA, 408 bp, Homo sapiens
  misc_feature (1)..(1): Wherein n may be a, c, g or t
ngcatcacacagtcaagcaacgagagacgcgacaactcaggttcccctcatgggttgctccttggcaagaacatattggtggttgatgacaacaaggtaaatcttagagtggctgctggcacattaaagaaattcggagcgaaggtggagtgcgtggagagtgggaaagatgctctcgccagcctacaagttccacataagttccatctttgtctcatggacattcagatgcccgaaatggatgggttcgaggccaccaagcaaataagggcaatggaggcgaaggcaaatgagcaggcagtcgcctgtgatgattcagaaacggatggcgcgacaagggcggcgagatggcacctgcctgtccttgcaatgaccgccgatgtcatccaggccacccatgaggagtgc

SEQ ID NO: 376 - protein, 136 aa, Homo sapiens
  misc_feature (1)..(1): Wherein Xaa may be any naturally occuring amino acid
XITQSSNERRDNSGSPHGLLLGKNILVVDDNKVNLRVAAGTLKKFGAKVECVESGKDALASLQVPHKFHLCLMDIQMPEMDGFEATKQIRAMEAKANEQAVACDDSETDGATRAARWHLPVLAMTADVIQATHEEC

SEQ ID NO: 377 - DNA, 238 bp, Homo sapiens
gtgcacgaactggggccgaagatcgaacatcacccgcgctttccggcacgggctaatgtgggctttttgcaggtgatcgaccgtaaccgtgcgcaattgcgcgtatgggaacgcggcgtcggcgaaacccaggcttgcggcaccggcgcctgcgccgctgccgtggccgcgatcagccaggggtggatggattcgccgctgttgatcgacctgcccggggggaccctttattcccatt

SEQ ID NO: 378 - protein, 79 aa, Homo sapiens
VHELGPKIEHHPRFPARANVGFLQVIDRNRAQLRVWERGVGETQACGTGACAAAVAAISQGWMDSPLLIDLPGGTLYSH

SEQ ID NO: 379 - DNA, 247 bp, Homo sapiens
tccggatcgttaccttactcccaagcaataaacgtgaaatctgttttgtatatatatttgcagctttttttcttttgttctttttctttttttggagatgcgtcttaaaaagcgccacagtttcaagggtccggcggataatttgagcaatgatagtatgaaatgccagattactgtgtattaaataatacttcatgaatttgcgaatgaaccacttttttgaaagtttatggatatagatgtgcac

SEQ ID NO: 380 - protein, 65 aa, Homo sapiens
MKYYLIHSNLAFHTIIAQIIRRTLETVALFKTHLQKKKKNKRKKAANIYTKQISRLLLGSKVTIR

SEQ ID NO: 381 - DNA, 482 bp, Homo sapiens
cggccgccgcggtagtgagccctgcgtcggtggcgtaatggaaaatgctgcgctggttggacaggcgcgagacattgttgtggacgatgccgctgtcgatcggtggcacgccggtgaagatgcatttatccaacggccgggacagggccggcagttcacagtccagtttgtaaagcgctgcgcgtcctgcgctgatataggcctggagatgccccatggcgtgtcgggcaacctcgtagttcaggccgtcgagcaccacaaggatgacgttgtgcttcataaggggagacgctccgcaacgataggcttgactcatttcacttgaggaacggggtcaaaactgtgggcgcgggcaagcccgctcccacacaagcccgtgcccacattggatctccaatgtgggctacagccttactgcatattgatgatgacttcttcctgccacttctgcggcagtgccttggaggtcttttcccacgcgt

SEQ ID NO: 382 - protein, 105 aa, Homo sapiens
MSQAYRCGASPLMKHNVILVVLDGLNYEVARHAMGHLQAYISAGRAALYKLDCELPALSRPLDKCIFTGVPPIDSGIVHNNVSRLSNQRSIFHYATDAGLTTAAA

SEQ ID NO: 383 - DNA, 291 bp, Homo sapiens
gatgggattcttctgcttgaactagatagattgctcaggcctggaggttattttgcttactcctctcctgaagcatatgcacaggatgaggaggatctccgaatctggaaagaaatgagtgcccttgtagaaaggatgtgttggaaaatcgcagagaaaagaaaccaaactgttatttgggtgaaacctctggacaatgattgttacaagaggcgagcacatggtacaaagccacctctatgcaaaagtggcaatgatccagattcagtatggggagttccaatggaagct

SEQ ID NO: 384 - protein, 97 aa, Homo sapiens
DGILLLELDRLLRPGGYFAYSSPEAYAQDEEDLRIWKEMSALVERMCWKIAEKRNQTVIWVKPLDNDCYKRRAHGTKPPLCKSGNDPDSVWGVPMEA

SEQ ID NO: 385 - DNA, 360 bp, Homo sapiens
ttcattaccaagggcactcaaacggcttctgctagtcccgttgccacaacatcagctcctattgtggttgctaatgctcaagtggacagcatagctacttccgttatccaagaaagcgctgtcgtggctgaatctgcaacatttgaagaatcctctacagaaacatctgaagcattttctacagcaactgcaaccatacaagcggtgcaaacctccgcaagtgccacacaggatgatgtaaccacaactttaacatcttcaacacaacctaccagcacaactactccaacaaccactaccactagcccaaccactaccactagcccaactactaccgctagtccaactactactgctagc

SEQ ID NO: 386 - protein, 120 aa, Homo sapiens
FITKGTQTASASPVATTSAPIVVANAQVDSIATSVIQESAVVAESATFEESSTETSEAFSTATATIQAVQTSASATQDDVTTTLTSSTQPTSTTTPTTTTTSPTTTTSPTTTASPTTTAS

SEQ ID NO: 387 - DNA, 190 bp, Homo sapiens
gctagcaaaatgggccgaagagttaaaaaaacagagagcagcagaaatatcaggccgctgaaaactgcaaaggagattaacgctatgaagcgggccctccagtttgggaccgggacagttactggacaaaacaggaatggtctgcggaatgctatgatttttgtctttggaatcaatacgggtctccgga

SEQ ID NO: 388 - protein, 60 aa, Homo sapiens
MGRRVKKTESSRNIRPLKTAKEINAMKRALQFGTGTVTGQNRNGLRNAMIFVFGINTGLR

SEQ ID NO: 389 - DNA, 288 bp, Homo sapiens
gaattcatggattattcatgtgtaattacaaatagctattgtgctcctttaaatcatccctatggcccattatggctcataacaactgaaatagcaattgtcatagtaaggtttgggctctgtcatagagtgtggactctaatcaataatgatgaatggtaaaattttacatcaagcagtccaaagtctggttggccctctccataaatctgtacaaacaccaaacagagcagctgcagagttccaaaaatttaaaagccaacactttgccttaccccctaaaagctt

SEQ ID NO: 390 - protein, 51 aa, Homo sapiens [sequence omitted]

SEQ ID NO: 391 - DNA, 357 bp, Homo sapiens
  misc_feature (1)..(1): Wherein n may be a, c, g or t
ngccggcatgcaagggaagcagaaaattttcaattttgcgatgagctcttgaagaaacagtgttttgttatgaataaatgatgtgtgcacgaaagacccaaggaaagtcgtataatgtcggaactctttggagtattgaaatctaatgctggcagaattattttgaaggacccctccgccacttctaaagatgttaaagcatatatagattcagttatcaatacctgtaagaatgggagtattacaaagaaagcagaactggacgaaatcactgttgatggtttagacgccaatcaagtttggtggcaggtcaaactagttcttgatagtattgatggtgatctaattcaaggaatt

SEQ ID NO: 392 - protein, 81 aa, Homo sapiens
MSELFGVLKSNAGRIILKDPSATSKDVKAYIDSVINTCKNGSITKKAELDEITVDGLDANQVWWQVKLVLDSIDGDLIQGI

SEQ ID NO: 393 - DNA, 262 bp, Homo sapiens
aaattttgatcaccttagcatctgagtgaggaggtaatgtgtgtgttgacatttcctgaactacctcaggtctcctctaaccactgggtgtcttgttcctgctgaattgtactgtgcagtagactccactgtattagtggatgcatcagtctgtggtaggatttcttgaccttagctctgctgacagttggggttggataattctttgttgtggggaactgttctgtgcattgtaggatgttcagtagcatccctggcgcgc

SEQ ID NO: 394 - protein, 61 aa, Homo sapiens [sequence omitted]

SEQ ID NO: 395 - DNA, 352 bp, Homo sapiens
  misc_feature (1)..(1): Wherein n may be a, c, g or t
ngtcgacatgttcgcgagccactgcaccggccgtgaggacgtgaagggcgcgatcaagaacgccgaacgcgcagcgacccgcatcttccggaacacctgagcgcggctgccggaggcgagaccatggcgcattccgcactgacagagccggcgccagtcgctgtcccgatccgctcgggttggcagcgcctgcgcgcgagccgcggctgggcgggcttctggttcatgctgccgacggcgctgatcctcggcctgttcctggcctatccgctgttgaagggcatctggctgtccttcaccaacgcgcggatcggccgcgaaggcgtgttcatcggcctggagaactacgcgt

SEQ ID NO: 396 - protein, 76 aa, Homo sapiens
MAHSALTEPAPVAVPIRSGWQRLRASRGWAGFWFMLPTALILGLFLAYPLLKGIWLSFTNARIGREGVFIGLENYA

SEQ ID NO: 397 - DNA, 379 bp, Homo sapiens
cgcgtcctgatccttgaggagcacgcctttcagcgcgccgtcgtcgtgagccagttcaaacggttggggcatgcggtgatcgaggcgacgcatgccactgaagccttggccctcctggaaagcgttcacggggtggatgtcgtactgtgcgacttgtccatgtccggcatggatgggctggagtttttgcaacatgccgcgcaacaagggtggctgcatggcgtgattgtcagcggccatcagccgaccgggatcagccaagccctgcaacagttcaccagcctgctcggcgtgtgtttgcttggccatgtcgaaaagctggcgaccctcaatcagctcgaagaggtattgcatcgtcatcagcctgttggggggatcc

SEQ ID NO: 398 - protein, 126 aa, Homo sapiens
RVLILEEHAFQRAVVVSQFKRLGHAVIEATHATEALALLESVHGVDVVLCDLSMSGMDGLEFLQHAAQQGWLHGVIVSGHQPTGISQALQQFTSLLGVCLLGHVEKLATLNQLEEVLHRHQPVGGI

SEQ ID NO: 399 - DNA, 375 bp, Homo sapiens
gtaagaacgataccagttcagactattcagtttaaaaaaatttgcagccatatcaaccccatgtatagtgattcaatgcagcaagattgtcaagaattttgtcaatttttgcttgatggcttgcacgaggatttgaaccaaaacggcagcaaaaagcatcttaaacagttatcagatgaggaagaacgaatgagagaaaaaatgtccatacgcaaagctagtgctctcgagtgggaaagatttttgcttaccgacttcagtgcgataattgaccttttccaaggacagtacgcatctaggctacaatgtcaagtttgtgaacatacctccacaacttaccaaacattctctgttctttctgttcctgtcccacgc

SEQ ID NO: 400 - protein, 125 aa, Homo sapiens
VRTIPVQTIQFKKICSHINPMYSDSMQQDCQEFCQFLLDGLHEDLNQNGSKKHLKQLSDEEERMREKMSIRKASALEWERFLLTDFSAIIDLFQGQYASRLQCQVCEHTSTTYQTFSVLSVPVPR

SEQ ID NO: 401 - DNA, 353 bp, Homo sapiens
ccggacggtcatatttcagaattgcgtgcggcactgcctgtccaattattcatttcaccgtttgttccagtcaatgtaaagacctccgatgttattgaaagaacgctcaaaacgtttggaccctcatatcaagtaacaagtcagcacgataattcattcagcagcaaaaactttgtagacgatagtgaagaagatgtgatttttcaaagatctgcttctgcgttacaattgtcttcaatgccaaccatagtatctggctctactttaaatatcaatagtactgatgcagaggctaccgcagtcgctgacacaactatggtaactagtttgatggtacttcggagagaggctgg

SEQ ID NO: 402 - protein, 117 aa, Homo sapiens
PDGHISELRAALPVQLFISPFVPVNVKTSDVIERTLKTFGPSYQVTSQHDNSFSSKNFVDDSEEDVIFQRSASALQLSSMPTIVSGSTLNINSTDAEATAVADTTMVTSLMVLRREA

SEQ ID NO: 403 - DNA, 156 bp, Homo sapiens
ggatccttatactcattacagtcaatttcaaaacgttccttgaacctgaatgatttattagtctttgacgatcctctccctagtaagaaaccagcatccgaaaatgtgaataaatcagaaccccattcgttggaatcagactctgattttgagatc

SEQ ID NO: 404 - protein, 52 aa, Homo sapiens
GSLYSLQSISKRSLNLNDLLVFDDPLPSKKPASENVNKSEPHSLESDSDFEI

SEQ ID NO: 405 - DNA, 368 bp, Homo sapiens
  misc_feature (152)..(152): Wherein n may be a, c, g or t
  misc_feature (256)..(256): Wherein n may be a, c, g or t
  misc_feature (285)..(285): Wherein n may be a, c, g or t
  misc_feature (362)..(362): Wherein n may be a, c, g or t
ggtacccactaagaaaatacattataaatatacagtgaaagaaagggaaatcacaatgatacactacaaaaaagttcaatttttaaaaagacaataataaaagaataaaagaaaaaacacatacagaagacaaatacatcaatgacagaatntacaccatctttatgctgggtgcggtggctcatgcctgtcattccagcacttcatttaaagtgattaataatacacctaaagcaaaccccccaattcttccatntttccacatcagcaatcctcactgtcttntcttcttcttcttcttctttttgtgctttttgagaacaggtctggctctctattgctcaggcaggagttcagtggcnagatct

SEQ ID NO: 406 - protein, 68 aa, Homo sapiens
  misc_feature (31)..(31): Wherein Xaa may be any naturally occuring amino acid
  misc_feature (41)..(41): Wherein Xaa may be any naturally occuring amino acid
MLGAVAHACHSSTSFKVINNTPKANPPILPXFHISNPHCLXFFFFFFLCFLRTGLALYCSGRSSVARS

SEQ ID NO: 407 - DNA, 397 bp, Homo sapiens
  misc_feature (246)..(246): Wherein n may be a, c, g or t
  misc_feature (391)..(391): Wherein n may be a, c, g or t
tcatgaccaaaatattgagaaacactggtccatactactcatgtgcatgaaaagcccatctggtaggcacctcccagctatgccttcatttctccaaagaataaccagaggttcagggaggtcatatgactcaccccaggccacagtggtggcactgaaataggactcaaacctggtgctagaggttctaccaaaagacaccttccatgtgtgggaatgagatgtttgtcttgaggcactcacgtntgttgttgttggttttatttggatgtttgtaaacaaaaaataattgtccctttctaaaaatgaaatgaagggctataaatatgcattggtaagacgggatacctctaaacaccatctctcaaaatcccaaactggacttcctctntgggaa

SEQ ID NO: 408 - protein, 57 aa, Homo sapiens
  misc_feature (39)..(39): Wherein Xaa may be any naturally occuring amino acid
MVFRGIPSYQCIFIALHFIFRKGQLFFVYKHPNKTNNNXRECLKTNISFPHMEGVFW

SEQ ID NO: 409 - DNA, 447 bp, Homo sapiens
gaattctcttttagcaaacagctgaagggtaaggctactttcaagtgggcacaggaaggccctaaagcctctctctattcaactagcccaggaagactgtcccctcgaagcacagcacctggtatgctgtacagccgacgcggccaggcttctgcactgctgcacgagagcctttctgtgaaattcatggcatctcagctctcctaccctacccaaagctttcaaacagaggcacttaagaacacaacctcgagtgctgtgcttcccacttaaccacagcatcacccaggagggctgattagcccgcgaagctttgccgaagctttgccaagtgccgggagcacggtgcatgctctgtccgccctgactcgccggcatgtgtgccaccaaaccatttgttttggaatgactgacaaagagtctctctgagccagggatgtttctaga

SEQ ID NO: 410 - protein, 99 aa, Homo sapiens
MPASQGGQSMHRAPGTWQSFGKASRANQPSWVMLWLSGKHSTRGCVLKCLCLKALGRVGELRCHEFHRKALVQQCRSLAASAVQHTRCCASRGQSSWAS

SEQ ID NO: 411 - DNA, 150 bp, Homo sapiens
acgcgtgaagcgatcgagctgaccaagaacgccaagaaagccggcgccgatgcttgcctgctggtgaccccgtactacaacaagccgacccaggaaggcctgtaccagcactttcgcgccattgccgaagccgttgatatcccgcagatc

SEQ ID NO: 412 - protein, 50 aa, Homo sapiens
TREAIELTKNAKKAGADACLLVTPYYNKPTQEGLYQHFRAIAEAVDIPQI

SEQ ID NO: 413 - DNA, 330 bp, Homo sapiens
aagcttctcgacggtgctgctgacggtcacgttagctacgagcaggcggcggccctcctcggctacaccccagaggctctcctggacgagatcgtcgacgccttcgccgccggggacgcccaccaggtttttgccacgatcgacaaggtcatcgaggtaggtcaggaccctcgccgtttcgctgaggacctgctgcgtcgcatgcgcgacctcgtcatcgtctcggcggtccctgacgcctgccggagcggactcatcgatgtctcaccggagcaggccacccggcttactcatcaggtcgccggtttcggcgcaggcgagctcacgcgt

SEQ ID NO: 414 - protein, 110 aa, Homo sapiens
KLLDGAADGHVSYEQAAALLGYTPEALLDEIVDAFAAGDAHQVFATIDKVIEVGQDPRRFAEDLLRRMRDLVIVSAVPDACRSGLIDVSPEQATRLTHQVAGFGAGELTR

SEQ ID NO: 415 - DNA, 189 bp, Homo sapiens
gatcaagctcttgcctcaggaaagatttatgatggagatgggttcaactacatcaaagaatcttttgaaaatggtactcttcaccttattgggttgttgagtgatggtggtgtccactcccgccttgaccaactgcagttacttctgaaaggtgtcagtgagagaggagcaaaaaaaattcgtgtgcac

SEQ ID NO: 416 - protein, 63 aa, Homo sapiens
DQALASGKIYDGDGFNYIKESFENGTLHLIGLLSDGGVHSRLDQLQLLLKGVSERGAKKIRVH

SEQ ID NO: 417 - DNA, 344 bp, Homo sapiens
tccggagtagctgggactacaggtgcatggcaccatggaaccacaggacagccagaggcagagggggttccccaagtgcccatggggcacaggctgccagttcagtttgtcagccatagctcgctgtctgagcaaagcatcactcagtcaccatgtggggggcagcagggcactgggcagtgtggagtgtccgccctgcaaggccctgtgcccggaggactggcagcacccttcaagaggggaccagacagcccagctggccaaggcctcatgtctacttgctgtctgtgcagtcagtggaagagccctgctcttctttctctcacaagcaccctgctggatcc

SEQ ID NO: 418 - protein, 103 aa, Homo sapiens [sequence omitted]

SEQ ID NO: 419 - DNA, 381 bp, Homo sapiens
  misc_feature (204)..(204): Wherein n may be a, c, g or t
  misc_feature (252)..(252): Wherein n may be a, c, g or t
  misc_feature (310)..(310): Wherein n may be a, c, g or t
gtgcacacagaaggcttctaatagcacagcatggggccaaaacagagatatctgggtgatcagagaaagcagccttgctctgaacatctctgtgaccccctgcagcaccaagaagcaggaaggtctggcttaaagcagagacaccccttcagctctgaatataacatgtcacttagttcagagaagacaagaggcagactaganaagctaagccttgggtccttaagtcaaatcagccaactctgcctgagnctgagaaattagcatttcctgggcaggcagatgtagaagatttgaggttgactcaagnccaggttatgtgcttctctctctagttcaatgtcatccacccagtggcccaggccacagtcaacttgcgga

SEQ ID NO: 420 - protein, 77 aa, Homo sapiens
  misc_feature (58)..(58): Wherein Xaa may be any naturally occuring amino acid
  misc_feature (74)..(74): Wherein Xaa may be any naturally occuring amino acid
MGPKQRYLGDQRKQPCSEHLCDPLQHQEAGRSGLKQRHPFSSEYNMSLSSEKTRGRLXKLSLGSLSQISQLCLXLRN

SEQ ID NO: 421 - DNA, 295 bp, Homo sapiens
ccggaggagggcgaactgcgcccccagttgctcgaccgcttcgggctgtgcgtcaccgtcagcggggaggacgacccggacaagcgcaccgaggtaatccggcgccgaatggcttttgaggacgaccctggtggcttctcacgcacatgggaacaggttggccacaagctcagcgaacggatccaacgtgctactgagctcgtcacccaggtagtcatctccgacgaaaccctcacgacggcggctcgtacctgcatcaacgcacacgtcgacggtcaccgcgccgacatcatga

SEQ ID NO: 422 - protein, 98 aa, Homo sapiens
PEEGELRPQLLDRFGLCVTVSGEDDPDKRTEVIRRRMAFEDDPGGFSRTWEQVGHKLSERIQRATELVTQVVISDETLTTAARTCINAHVDGHRADIM

SEQ ID NO: 423 - DNA, 651 bp, Homo sapiens
ggttgacggcagagcattgaggaatgcctacaaagaggggcaaaaagcaaaggccaagctagagaaagagacgagaatccgaggtgtggagcggctgcacctgccctccctccacaacagatcgtcccgtgggaagctgggcacttggccatccaggaacgcttccatgcctccctggcagcaagtgcgactaagccctggcccaaggcctgtgctacctccaggaagtgtccttagagaggggcatgcaccaatctttgctcttcctgctggctggaaagcagatgtgatggctgacacagccggctggagccaggaagtagtagtctccataaggaaggcctggccctcatcactggaagacgacacagaggggtctgagtgctgatgatgggggtgctgccatctcagtgggagctactcacatctgggaaaggcagaaatgcacttctatcctatttcagtcactgcagccatattatttcgagatctctgtcactaagcagcaggatcttatcataactactaaaaaggagcagaaatgagaaattctaggagccagaggaggtaggctggaaactcagagacgcttgcctcagacagggcgaccgggggtcaatgtggaactctgagacagctgtgtgtacgcgt

SEQ ID NO: 424 - protein, 101 aa, Homo sapiens
METTTSWLQPAVSAITSAFQPAGRAKIGACPSLRTLPGGSTGLGPGLSRTCCQGGMEAFLDGQVPSFPRDDLLWREGRCSRSTPRILVSFSSLAFAFCPSL

SEQ ID NO: 425 - DNA, 288 bp, Homo sapiens
aaatttgctgccagggctgctctgtctgctggcaaagttccacctgaaaccatcgatagtgtcatcgtgggcaatgtcatgcagagctcttcagatgcggcatacctggcgaggcatgtggggttggaagggggagtcccaacaaaaactggggcccttaccctcaacaggctctgtggctctggtttccagtccatcgtgagcggatgtcaggaaatctgttctaaagatgctgaggtcgtcttgtgtggaggaacagagagcatgagccagtccccctactgggtc

SEQ ID NO: 426 - protein, 96 aa, Homo sapiens
KFAARAALSAGKVPPETIDSVIVGNVMQSSSDAAYLARHVGLEGGVPTKTGALTLNRLCGSGFQSIVSGCQEICSKDAEVVLCGGTESMSQSPYWV

SEQ ID NO: 427 - DNA, 349 bp, Homo sapiens
agatctttgagaatggaaattgctttttatcactttgtatccttagcccctaacagaatgccatgcacagatgagacattcagtgtgcatttagctacatgttctctctggctctcatctgcccacctccattacatcccacacgctgaaaggcagttatccatactgggcaaagacacctgagttgggagttggatggcttgggtttgaatccctgctctaccacctacttgatatgtgaccttgggccacaggttaatctccttaaatttttcccatttgtaaaatagggatgacagtagacagtagcatctatctcatgcagtacatgtaaattcaactccatgtt

SEQ ID NO: 428 - protein, 56 aa, Homo sapiens [sequence omitted]

SEQ ID NO: 429 - DNA, 430 bp, Homo sapiens
  misc_feature (244)..(244): Wherein n may be a, c, g or t
  misc_feature (271)..(271): Wherein n may be a, c, g or t
  misc_feature (292)..(292): Wherein n may be a, c, g or t
  misc_feature (319)..(319): Wherein n may be a, c, g or t
  misc_feature (362)..(362): Wherein n may be a, c, g or t
  misc_feature (422)..(422): Wherein n may be a, c, g or t
  misc_feature (426)..(426): Wherein n may be a, c, g or t
  misc_feature (430)..(430): Wherein n may be a, c, g or t
agatctgtacatttattctcacacagtgtagataccatgctattaactattatcttatgcctatgcagtcttctgtcttccttcacttcaaaaggtaaaactttgaagtcgaagggtctcatgcttacgttcttatgtttgccacctatttatgaatgcatacacattatacagtgttcgtggtttaattgcaggtggcatcctcattatgtagagctctgcaactttttaataatctcttgtnttttgagaccctttccacattattacnatggaatctattttaagtgcnttttagtagttcctcctatggatacgncttattcataccattaaacccggacgtcagggcgaatatgtgntagagtaccatatgcaatatattacagtcccctttgtcacagaacaacctccctgatgtntcanggan

SEQ ID NO: 430 - protein, 99 aa, Homo sapiens
  misc_feature (70)..(70): Wherein Xaa may be any naturally occuring amino acid
  misc_feature (79)..(79): Wherein Xaa may be any naturally occuring amino acid
  misc_feature (86)..(86): Wherein Xaa may be any naturally occuring amino acid
  misc_feature (95)..(95): Wherein Xaa may be any naturally occuring amino acid
MLLTIILCLCSLLSSFTSKGKTLKSKGLMLTFLCLPPIYECIHIIQCSWFNCRWHPHYVELCNFLIISCXLRPFPHYYXGIYFKCXLVVPPMDTXYSYH

SEQ ID NO: 431 - DNA, 210 bp, Homo sapiens
tgatcaccttcaggagaagagaaataaggaaatattagatcatgacttggaaaatgtatcaggcaggactttgtgcaagccctttggaactcccgctaatctaaatggggaagacaagacactgagaacactaagcagatccatatctcttgaacaatgtgcacggtcgagttggtgagaaaggtaaaacataacaggaaatatggtacc

SEQ ID NO: 432 - protein, 50 aa, Homo sapiens
MFYLSHQLDRAHCSRDMDLLSVLSVLSSPFRLAGVPKGLHKVLPDTFSKS

SEQ ID NO: 433 - DNA, 342 bp, Homo sapiens
tccggaacgttctatgatgtttgaaaagggcatggatctaatctctggtgcagtttatagaaagctggagtgaacagaacagtcagaagacagctataacagtttgggtaagaaggctgtgctgtgggagtacaaagaaatgaatgagtacaagatatgttggaggtaaatctgtacctcataaatagaaacattctttcagttaccaccacagacactagagatgtatatagagtcatagatccagagagcgccaagagagaaaaggaggaggccaaagatagaatttgggggattattatttctgaaggctgtctggaggaaaaacctagagaaggagag

SEQ ID NO: 434 - protein, 75 aa, Homo sapiens
MTLYTSLVSVVVTERMFLFMRYRFTSNISCTHSFLCTPTAQPSYPNCYSCLLTVLFTPAFYKLHQRLDPCPFQTS

SEQ ID NO: 435 - DNA, 303 bp, Homo sapiens
cgcgttaatgatgaaatgaaagttaactgtgcaactttattacaggccgcttacaggggtcattccatccgtgccaatgtgttcagcgtattgagaacaattacaaatttgcaaaagaaaattagaaaggaactaaaacaaagacaactgaaacaagaacatgaatataatgctgcggtaactattcaaagtaaagttaggacctttgagccgagatcgagatttttacgcactaaaaaagacactgttgttgtccaatctttgatcagaagaagagctgctcaaaggaaattgaaacaattg

SEQ ID NO: 436 - protein, 101 aa, Homo sapiens
RVNDEMKVNCATLLQAAYRGHSIRANVFSVLRTITNLQKKIRKELKQRQLKQEHEYNAAVTIQSKVRTFEPRSRFLRTKKDTVVVQSLIRRRAAQRKLKQL

SEQ ID NO: 437 - DNA, 624 bp, Homo sapiens
  misc_feature (430)..(430): Wherein n may be a, c, g or t
acgcgtgtgcccaaccatgatgctagtttatctataccgtttttggacaagatcaaccagttttggcatgtaggcggtgccacgcaaattaggaatattcagtcgatcaaattgactcaggaccgtgatcaagataaacatggattagtattgtccaatggaattggcgacaacaccatcaatgactttgagattgttttcactttcagaatttctcacgaccccactacacaactcactggtgatggaatgtgttttgccattacgcccgaaaatgggtttctcacacagaatttacagtcgtcgtatgcgaaaaagcaatacatgatgaattctcagggcgtcatagccgataatacagatctgatgggcttcccgaaaaatctgcctggcctatttattgtcttggatacgtatcgcaaccaaggcncgcaccataaggaggtaccctttatggaatgttttataaatgtggccccagaaagcgattggtacgatataaatagtgatggtgaactcagtacatcgctgcggcttaattcaagaggccacataaaactcaagaaaaatgccctgtggaatcgagtcacgaaactaagaataatatatttggaaagtataagc

SEQ ID NO: 438 - protein, 208 aa, Homo sapiens
  misc_feature (144)..(144): Wherein Xaa may be any naturally occuring amino acid
TRVPNHDASLSIPFLDKINQFWHVGGATQIRNIQSIKLTQDRDQDKHGLVLSNGIGDNTINDFEIVFTFRISHDPTTQLTGDGMCFAITPENGFLTQNLQSSYAKKQYMMNSQGVIADNTDLMGFPKNLPGLFIVLDTYRNQGXHHKEVPFMECFINVAPESDWYDINSDGELSTSLRLNSRGHIKLKKNALWNRVTKLRIIYLESIS

SEQ ID NO: 439 - DNA, 352 bp, Homo sapiens
  misc_feature (1)..(1): Wherein n may be a, c, g or t
nccccagactactgaattcactaagtctcttggataaatcccatgacctcggcatcctcatcctcaatgcagaagcacagggtggtcggctggaacagtgctcagccactatgcgtcccctccacagagcagcctctccgctgaggcaaatgcccgcagccctcctccttcaggtccacccttttgggttcttctgttgcagggagctgaaggcagttccctagaaaggcagccatagagaagagagggagccatcttgaataaacacgactggtggctcatttacgtactgcagtgcacaaccctgggtctagtttgggtcccaagctagcagtagctctctagtctgcca

SEQ ID NO: 440 - protein, 57 aa, Homo sapiens [sequence omitted]

SEQ ID NO: 441 - DNA, 283 bp, Homo sapiens
  misc_feature (1)..(1): Wherein n may be a, c, g or t
  misc_feature (2)..(2): Wherein n may be a, c, g or t
nngttcaaaattcaaccaacaatctttgggggttaaattttcaattaaccaaaaccattcccatggacttcaccttaggcataaaagtaggcttttttttccaaaaaaaaaaaaaaaaaaagctttggacccaatgtcttcactggtgaattttaccaagctattgaagagaaattgataccaatcctactcacactattctgccaaataaagaatgaaggaatacttccaaaatcatttcacaaagccaatattaccctgacactaaaaccagacaaaattt

SEQ ID NO: 442 - protein, 64 aa, Homo sapiens [sequence omitted]

SEQ ID NO: 443 - DNA, 304 bp, Homo sapiens
gtgcacaactgctattaaatatgacaataacaaaataaggcaatggggcagcttggcactgccagtggacatgatgcagcgtgggtacaggagcccaccctgcaagcagcacgaagccttttgccatcagggttggtgatgtactgctcaccttgacgctgtgtacctgcaggaaatacagcaggccaggccctaccatgccagttccaagtcatggccaccctcttcatgagtcacgaatattccttggtccttattcatcttaacacactcatgagctgtttggaactggaggtagggatcc

SEQ ID NO: 444 - protein, 71 aa, Homo sapiens
MKRVAMTWNWHGRAWPAVFPAGTQRQGEQYITNPDGKRLRAACRVGSCTHAASCPLAVPSCPIALFCYCHI

SEQ ID NO: 445 - DNA, 303 bp, Homo sapiens
gccaaggaaaaggacaggcccgaggacaagatccgcaaggtgatgaaaatcgccaaggaaccgatctcgatggaaaccccgatcggcgacgacgaggattcgcatctgggcgatttcatcgaggacaccaacgtggagtccccgatcgacaacaccaccaacatcaatctctccgagacggtgcgggacgtgttggccggcctgaccccgcgggaagccaaggtgctgcgcatgcgcttcggtatcgacatgaacaccgatcacacgctggaagaggtcggcaagcagttcgatgtcacgcgt

SEQ ID NO: 446 - protein, 101 aa, Homo sapiens
AKEKDRPEDKIRKVMKIAKEPISMETPIGDDEDSHLGDFIEDTNVESPIDNTTNINLSETVRDVLAGLTPREAKVLRMRFGIDMNTDHTLEEVGKQFDVTR

SEQ ID NO: 447 - DNA, 297 bp, Homo sapiens
atggatgttttatttaccaattatacgaactccagcaagaagaactatttggtgatcgttaccgcgtctaaagatttgcagattcatgttttcaagtgggtctccgaggaatgcaagttccaacaaattaggtctttattgggccatgagcatattgtctctgcggtaaaaatctggcagaaaaataatgatgtccatatagcgtcctgttccagagatcaaactgttaaaatttgggacttccacaatggttggtcgttgaaaacatttcagcctcattcccaatgggttcgttcc

SEQ ID NO: 448 - protein, 99 aa, Homo sapiens
MDVLFTNYTNSSKKNYLVIVTASKDLQIHVFKWVSEECKFQQIRSLLGHEHIVSAVKIWQKNNDVHIASCSRDQTVKIWDFHNGWSLKTFQPHSQWVRS

SEQ ID NO: 449 - DNA, 317 bp, Homo sapiens
gtgcactgtcttctcagatgggggccttcagcctgcacttaatgccgctgacgctagttcctggagccgcggctgaggtgaatgagactcaagtggctgcaggccttggttcttggtccaccggtaggcacataccaagtagtggtagttctcatgcgttcattacagataggcaaaaccaccaaccaactcagcttagaaacgtgcttctcagggattcaaggtaagggggtggtagttaagacctggcacattacatggatggggtgaagacagacatctgtagcagtgaacgtggtttttccagtttaaccctg

SEQ ID NO: 450 - protein, 69 aa, Homo sapiens [sequence omitted]

SEQ ID NO: 451 - DNA, 379 bp, Homo sapiens
gaattcccaggccggtggaatgttgtcaaacactttctccacaagcttggtattcttgatacccaaagccgcacacggataacggaaacgatccttgtgacgttctttgtcattctcgtcgaacaaccccatgctgaagaactcggcttccattacctcgttggttgccttgatttcttcgttgatctgataacgctcatacagcgaacgtttatcttcttcgccttcagaccggtcatctttcttacggaacgtgctgccgctggattcatgctgccgtacagcggcgttgatcgcagtagctaggttcttttctttttcggtttcaggaataactgcacagcacagacgactgaacacggtgttgtaaagcacgcgt

SEQ ID NO: 452 - protein, 51 aa, Homo sapiens
MEAEFFSMGLFDENDKERHKDRFRYPCAALGIKNTKLVEKVFDNIPPAWEF

SEQ ID NO: 453 - DNA, 286 bp, Homo sapiens
ggatccacttgatcagaatcttcagggctgtgtccaggcaatctacaatagattcaaatacaagcagtctgacatttaagaaccttgggtgagaactcaataaaagagaaagatttaaatggaagggcaggaattttctgattgggggtaatatattagccccatggacagaaaccatgcctatctgattcatttttgtagttccaacacttagaatagtgcctagctcatagcagacttttcataaatatctattgcatgaatgaatggatggaggaaacatttc

SEQ ID NO: 454 - protein, 64 aa, Homo sapiens [sequence omitted]

SEQ ID NO: 455 - DNA, 277 bp, Homo sapiens
acgcgtgctcggggaggtcggcgccgccgacgcctccggcgagaagctcggagtgcttggcgcggttgcagcaggctcgatccgagaggcgcttgcaggtcccgccgcccacaactatgcgcgcgcgtcgctcgtcccggcggcacgcggcaagatcgtgacgagcacctcgctcgacgccgtccggcagtgcaacgtcgtgctcgccgcgagcaacgcgccgcagccgttgctcgagccgcagcactttggtgacgagccggtcctcgtcgtcgac

SEQ ID NO: 456 - protein, 84 aa, Homo sapiens
TRARGGRRRRRLRREARSAWRGCSRLDPRGACRSRRPQLCARVARPGGTRQDRDEHLARRRPAVQRRARREQRAAAVARAAALW

SEQ ID NO: 457 - DNA, 284 bp, Homo sapiens
  misc_feature (1)..(1): Wherein n may be a, c, g or t
  misc_feature (284)..(284): Wherein n may be a, c, g or t
naatggtctccttgcagaatggaaaagtgtatttgttctaaagttagatgtttttcaacatgcttttggattgttatatacagataaaggaaatgcttcaatttccattttttccattaacatttttagtaaaattgtttaattcttctcattttatgttagcaaccaccaaccatattgacctattttctagaaatgatacaaagtttagctttttgacttcgtcgtatttcatcattgtagtaatataatcccttgtgaagttctgtccttaccccttaccn

SEQ ID NO: 458 - protein, 67 aa, Homo sapiens
MFFNMLLDCYIQIKEMLQFPFFPLTFLVKLFNSSHFMLATTNHIDLFSRNDTKFSFLTSSYFIIVVI

SEQ ID NO: 459 - DNA, 237 bp, Homo sapiens
  misc_feature (237)..(237): Wherein n may be a, c, g or t
gcaggctggggctgagcaggagatgatgaatttcatgtagacaggtgtgagtttgaggcgcctgtgggacattcatgagaggtgtctatgggctccagggctcgggctagagaaacgcatgtgggagacatcttacagctgatgtttgaaggatgggcttgcgtgaggctctctagaaacatgatgaacagcgagaaaggagaaggggtcatggacaccaccctggggtacactgcn

SEQ ID NO: 460 - protein, 59 aa, Homo sapiens
MTPSPFSLFIMFLESLTQAHPSNISCKMSPTCVSLARALEPIDTSHECPTGASNSHLST

SEQ ID NO: 461 - DNA, 205 bp, Homo sapiens
aggtgcagatcaatgcacagtgataaatgtctgtgtgaacactttaaaatcagagtctcagcaccaacagggactttcccaccccaccccccaaagcaagcagaaccagcagaggcgtgtctgctgcaggtgtgcggcacagaggaaagggacaggagcaaggagttgccaggttaacactgtgaaagaaggacagcggactctt

SEQ ID NO: 462 - protein, 54 aa, Homo sapiens
MHSDKCLCEHFKIRVSAPTGTFPPHPPKQAEPAEACLLQVCGTEERDRSKELPG

SEQ ID NO: 463 - DNA, 339 bp, Homo sapiens
acgcgtagccatgtgagttttgatgaaggtaatatcgttattgaaacccagcaagatttaaatcgattacataatgctattgttcataccttgttaatgggagcggatgcaaaaggtattgatttatttgcatctggtgatgtgccgattagctctcgcccattccttttggggcaggttgtagatcatcaagggcaacacattgctaatcaagttatcgcaagtaatttcgccacttatttgattcaaaataaattgcaaacacgtcgattacaaaacgggcataccgtgcaatttgtctctgttcctatgattgcaaaccacgtagaagtgcgtgca

SEQ ID NO: 464 - protein, 113 aa, Homo sapiens
TRSHVSFDEGNIVIETQQDLNRLHNAIVHTLLMGADAKGIDLFASGDVPISSRPFLLGQVVDHQGQHIANQVIASNFATYLIQNKLQTRRLQNGHTVQFVSVPMIANHVEVRA

SEQ ID NO: 465 - DNA, 369 bp, Homo sapiens
attcgatataaatacgataaattgaaatttacactctcaaggttttcgtgtactgtcgaacttttgcaagcatattgtcgttcaaaattgttgaagacaaccgttaacacaaaattaaatgatattgagatatcacattatcctctgacaaaattgcagtcttatatgcgtgcttcttatgtgagaaagaaggtgatgtccctcaatacaaagttgaacgatgagcgagaaagtattatgaagttttcggcaatcatcagaggtaacgttgtgaggtgttcagaggacccgatattaagtgctgtacatgatgtacataaggaaaatatctcaaaattgcaaagcttgattagaggaatatttacgcgt

SEQ ID NO: 466 - protein, 123 aa, Homo sapiens
IRYKYDKLKFTLSRFSCTVELLQAYCRSKLLKTTVNTKLNDIEISHYPLTKLQSYMRASYVRKKVMSLNTKLNDERESIMKFSAIIRGNVVRCSEDPILSAVHDVHKENISKLQSLIRGIFTR

SEQ ID NO: 467 - DNA, 215 bp, Homo sapiens
tgatcaccaagccagccccaagccagaatttatgcaccacctcttaactctagaatcctgtcctgaccccaggatgactgcctcccacactcagcagccaagtggaagctgtggctcactctcctgtgtggtctctggccgcactggtttccccttattgctgctgtgtctgcctctgtttctggctggagttttttccttagtgcatctctaga

SEQ ID NO: 468 - protein, 60 aa, Homo sapiens [sequence omitted]

SEQ ID NO: 469 - DNA, 228 bp, Homo sapiens
  misc_feature (1)..(1): Wherein n may be a, c, g or t
nacgcgtgctagcaagcggtaatgaaatacaaggaaatcaatttcttcaagggccatccgagctcgaggttgctgcctcgagaagcagtaattcaagcgactgcggctatattggggcccgagaccagggagtacgataacgacccctataacaggcatccgctgacgtacggttcggacgaaggtgccctgtgggtgcgagagcagatttgtacgtttctgaatgat

SEQ ID NO: 470 - protein, 69 aa, Homo sapiens
MKYKEINFFKGHPSSRLLPREAVIQATAAILGPETREYDNDPYNRHPLTYGSDEGALWVREQICTFLND

SEQ ID NO: 471 - DNA, 396 bp, Homo sapiens
  misc_feature (313)..(313): Wherein n may be a, c, g or t
gatctgaagggtgataggaaattaacgaacatgtttggtggtgtgctcaaaaaagttaccgaccatgattgcccgcacatttctgagtctgttttcgaaaaatatttgcaggagaaagatattgttcctataggtaccgatgaaaggtccttatggcttgataaaagagacaccaatacggaatctgttaacaacgcgaacatctcctgtgacacttctccactgcaaacaaaaagtggagcttgggaaaccgttcggtatctgtacaataaaaaatctaatgatgtcgttacacgttctgaattgattgtgntatcttcattaggtgataagccgccaaacctgggaggtatttgtaggttatgtgatgttttaggtgtgggactgcttactgta

SEQ ID NO: 472 - protein, 132 aa, Homo sapiens
  misc_feature (105)..(105): Wherein Xaa may be any naturally occuring amino acid
DLKGDRKLTNMFGGVLKKVTDHDCPHISESVFEKYLQEKDIVPIGTDERSLWLDKRDTNTESVNNANISCDTSPLQTKSGAWETVRYLYNKKSNDVVTRSELIVXSSLGDKPPNLGGICRLCDVLGVGLLTV

SEQ ID NO: 473 - DNA, 327 bp, Homo sapiens
  misc_feature (1)..(1): Wherein n may be a, c, g or t
  misc_feature (247)..(247): Wherein n may be a, c, g or t
  misc_feature (327)..(327): Wherein n may be a, c, g or t
nggatccacggtggacgtgtcaccccctttgttcttccttggcccgagctggctgactaccccaatttcggcatggtgtgccgacgcacggttctcgacgagcgtctggcccgtcacgccgagtcgcagggagtcaccctcgttgagaatgctaatgtcattgagccgatcctcaatcctaacggccgtattcgcggcgtccgtacgtccgagggtgccgagtattccgcccccgttatcgtcgcanccgatggcaattcttctcgactcggcttagcgatgggcctgcacaagcgggacgatcgtccgatgggcgtggcggtacgn

SEQ ID NO: 474 - protein, 109 aa, Homo sapiens
  misc_feature (1)..(1): Wherein Xaa may be any naturally occuring amino acid
  misc_feature (83)..(83): Wherein Xaa may be any naturally occuring amino acid
XIHGGRVTPFVLPWPELADYPNFGMVCRRTVLDERLARHAESQGVTLVENANVIEPILNPNGRIRGVRTSEGAEYSAPVIVAXDGNSSRLGLAMGLHKRDDRPMGVAVR

SEQ ID NO: 475 - DNA, 351 bp, Homo sapiens
gtcgaccgcggctgaacgccgtttccctttgggcgttgatctggcacacgcggccgtctgccgcaaattgacgggcgttatatacctatatatatttcgttaccgagattgatcttgtccgaggagagagtcatgttccgcaaacacccgatcctggcggtatcgctggccctggccgccgtctggggccccagcgcccacgccggcgacctggtcgtgtccgccgccgccagcctgaccaacgcgttcaaggacgtggcccaggcatccgagaaggagcatgccggcaccaaggtcatcctgaacttcggcgcctccgacgtgctgctgcagcagatcgtcaagggcgcg

SEQ ID NO: 476 - protein, 73 aa, Homo sapiens
MFRKHPILAVSLALAAVWGPSAHAGDLVVSAAASLTNAFKDVAQASEKEHAGTKVILNFGASDVLLQQIVKGA

SEQ ID NO: 477 - DNA, 194 bp, Homo sapiens
tcatgaaatggtgagaaaaaggagaagtcccaaatggcacatgtggctgatggtggaggtcagggttcaagccacgcaggcatccttcccaggcaggggcctgagcgtccctccccaaggacccaagccctcgagtgccgccctcgggtcagcagcactcagaagacctggcaaccccagccctggaatccgga

SEQ ID NO: 478 - protein, 62 aa, Homo sapiens [sequence omitted]

SEQ ID NO: 479 - DNA, 409 bp, Homo sapiens
  misc_feature (367)..(367): Wherein n may be a, c, g or t
  misc_feature (368)..(368): Wherein n may be a, c, g or t
  misc_feature (376)..(376): Wherein n may be a, c, g or t
aagcttaaacttcaactctccagccacttaactgcagcatgttgacttcaggtctcttgtaagaaagtctaaatgtaggctgttgaataatccctttgagggccctgtaactatttttatgcctggatatgcgtcatcagtgggtattttctctggtgactcgcttccatcaggtctcctaccatacattctatcagtgagtgacttatgattgatgggaaccacggcttgttgtttagctttatctgtgacctcagcgaatggacaacaggaatttccaggctgttaaattccctgaatgcttgaagacaggggctcacggtgttgctcaaggcaggtagcagagtgatattattctccagcgatnnatgggganggacgagagaagaaagggggaggaaaaggaggg

SEQ ID NO: 480 - protein, 53 aa, Homo sapiens [sequence omitted]

SEQ ID NO: 481 - DNA, 289 bp, Homo sapiens
gatctgaacaacggaaccattgccgacatgagacagttaggtatcgtcgagagttacaagctaaaacgagcagtagtcagctctgcatctgaagccgctgaagttctactaagggtggataacatcatccgtgcaagaccaagaaccgccaatagacaacatatgtaacatatttaggatataccccgaaaataataaaccgccacactgtcattattataattagaaacagaacgcaaaaattatccactatataattcaaagacgcgaaaaaaaaagaacaacgcgt

SEQ ID NO: 482 - protein, 55 aa, Homo sapiens
DLNNGTIADMRQLGIVESYKLKRAVVSSASEAAEVLLRVDNIIRARPRTANRQHM

SEQ ID NO: 483 - DNA, 371 bp, Homo sapiens
  misc_feature (307)..(307): Wherein n may be a, c, g or t
tctagattcaccaatgtcatgttgtttattgcaccagtctgaacctgagtccgggaaagctggattctagtccctgctctacaactaattagcttttggcattgggcaaaccatttaaccttgtcgagcctacatatcttcgcctctaaaatggagatgtaatataataattcctgccctaccagcttcataagattaagtatcaagtgagataatacatgtgaatgcgttttggacatttaagctgtgaaaagatcaagatatgaagatttccctttaatattttaaaatttgtgctacgtatatntttgttgttcttattcttgctgctggtaatggtatattaatatgctcagtatcttggtagatct

SEQ ID NO: 484 - protein, 79 aa, Homo sapiens [sequence omitted]

SEQ ID NO: 485 - DNA, 621 bp, Homo sapiens
gggggggggggggggaaatatccatgcagccgcgtcagatctatctttgaaagagcattattagtagatagttcattcatccccctttggatacgatacattgatgctgagctgaaagtcaaatgtattaaccatgctaggaatcttatgaacagagctattagtacgttgcccagagtagacaagttatggtacaagtatctcattgtcgaagagtcgttaaacaacgttgaaattgtacgatcactgtacaccaaatggtgctccttggagccaggggttaatgcatggaattctttcgtggattttgaaataagacagaaaaactggagcggtgtaagagagatttactcaaaatacgtcatggctcacccgcaaatgcagacgtggctaaagtgggtgaggtttgaaaatagacatggtaatactgaatttacgagaagtgtgtattctttagcgatagacacagtagctaacctccaaaatttacagatttggtctgatatggaggttgcaaaattagtaaattcatttgctcattgggaagctgcgcagcaagaatacgaaagatctagtgctctttatcaaattgctatagaaaaatggccctccaatcaattg

SEQ ID NO: 486 - protein, 207 aa, Homo sapiens
GGGGGKYPCSRVRSIFERALLVDSSFIPLWIRYIDAELKVKCINHARNLMNRAISTLPRVDKLWYKYLIVEESLNNVEIVRSLYTKWCSLEPGVNAWNSFVDFEIRQKNWSGVREIYSKYVMAHPQMQTWLKWVRFENRHGNTEFTRSVYSLAIDTVANLQNLQIWSDMEVAKLVNSFAHWEAAQQEYERSSALYQIAIEKWPSNQL

SEQ ID NO: 487 - DNA, 322 bp, Homo sapiens
  misc_feature (1)..(1): Wherein n may be a, c, g or t
  misc_feature (231)..(231): Wherein n may be a, c, g or t
  misc_feature (322)..(322): Wherein n may be a, c, g or t
ncacagctgggaagggttatcagcttttaaggacttgtgtgattagtttgggcccacccagttaatccagtattatctccacatcttaagttccttcaccttaatcacatctgcaaagccctttgcccctgaggtaacacagtccccggttcttgggatgaggaagtggagctcccaggatccacacctgcctccctcggcctcctccctgcctgctggggctgatgtgtntccacccgggcaaccttgggccctgcaaagaaagggagagcagctatttttttttttttttttgaaatggatttccccccttttgcctatn

SEQ ID NO: 488 - protein, 55 aa, Homo sapiens
  misc_feature (25)..(25): Wherein Xaa may be any naturally occuring amino acid
  misc_feature (55)..(55): Wherein Xaa may be any naturally occuring amino acid
MRKWSSQDPHLPPSASSLPAGADVXPPGQPWALQRKGEQLFFFFFLKWISPLLPX

SEQ ID NO: 489 - DNA, 509 bp, Homo sapiens
gaattccatcatctttcagtaccgggccagttcaaggagaccagacatcactaggtgttggcacacctctcttatttggcatgagcccagggtgtcctggtatgagggtactgtgacctctatccattcctttgtcacctggacctcggtgtccactggggactccctggatcggcctctgcttggtgccagagtccttggagatgagtcccccccagactctaccagttccctgtcgttttgtgtcagaaaaaagggggttatgggacctggacactttaccctttgctgagcgaggccaagggcagccagctgagcttccaagaccccatcactctctcctgtccttgtgtgaggagcagtgtccccttgctccagggagagtgacagtggccttaactcctttgaagtgtttttccatctgagcagatgtcatggaccacgagcatgaagaagtcatctctattggatcagaaaataccttagctttgctgagccgtaactgtgcg

SEQ ID NO: 490 - protein, 73 aa, Homo sapiens
MSPPQTLPVPCRFVSEKRGLWDLDTLPFAERGQGQPAELPRPHHSLLSLCEEQCPLAPGRVTVALTPLKCFSI

SEQ ID NO: 491 - DNA, 310 bp, Homo sapiens
  misc_feature (1)..(1): Wherein n may be a, c, g or t
  misc_feature (2)..(2): Wherein n may be a, c, g or t
  misc_feature (3)..(3): Wherein n may be a, c, g or t
nnncaactcctagaacccggagtcggagtcatcctcgacaccgaaaccaccgacctggacgggcgcatcatcgaaatatcgatcattgacgcagccaccgggacggtcctgatggaccaactcatcaacccccaaggagccccgatctgcgccgaggcccgcaccgtccaccacatcagccccgacgatctcgcgacagcccccacgttcacccaggtgcggccccggctggaggatgtggtggccgatcgggtcatcatggcctggaacgcccccttcgaccgggagcgggttgaagcagaatacgcgt

SEQ ID NO: 492 - protein, 103 aa, Homo sapiens
  misc_feature (1)..(1): Wherein Xaa may be any naturally occuring amino acid
XQLLEPGVGVILDTETTDLDGRIIEISIIDAATGTVLMDQLINPQGAPICAEARTVHHISPDDLATAPTFTQVRPRLEDVVADRVIMAWNAPFDRERVEAEYA

SEQ ID NO: 493 - DNA, 322 bp, Homo sapiens
  misc_feature (1)..(1): Wherein n may be a, c, g or t
nacgcgttttatgtcagcgttgaattggaagacggcaagtctatcgccatgctgccccaggcagatggctggtttgaagtggaggtgaagtgcccggcgggcactcactaccgctataacatcgacggcgaaaccgatgtacccgacccggcatccagggcgcaagccaacgatgtgcatgggtggagcgtcgtcgtcgacccgctcgcctatcaatggcgacaccctaactggcaaggccgcccctggcatgaggcggtgatttacgagctgcacgttggcgtactgggcgggtacgccgctgttgaacagcaactgccgc

SEQ ID NO: 494 - protein, 107 aa, Homo sapiens
  misc_feature (1)..(1): Wherein Xaa may be any naturally occuring amino acid
XAFYVSVELEDGKSIAMLPQADGWFEVEVKCPAGTHYRYNIDGETDVPDPASRAQANDVHGWSVVVDPLAYQWRHPNWQGRPWHEAVIYELHVGVLGGYAAVEQQLP

SEQ ID NO: 495 - DNA, 210 bp, Homo sapiens
  misc_feature (1)..(1): Wherein n may be a, c, g or t
nacgcgtgccgctggaaataccaggccacgccggcggtggagaacgccacgggcgatatcgtccagcagtgtgaaccgaccttgggtatcggcgcgccgaccgatcaggtgttcctgctgcaggaagccaaccgcccggatgagcagatgcccgccttcgaggacgaacacggcacctacatcatgaacgccaaggacctgcgcgccggc

SEQ ID NO: 496 - protein, 70 aa, Homo sapiens
  misc_feature (1)..(1): Wherein Xaa may be any naturally occuring amino acid
XACRWKYQATPAVENATGDIVQQCEPTLGIGAPTDQVFLLQEANRPDEQMPAFEDEHGTYIMNAKDLRAG

SEQ ID NO: 497 - DNA, 321 bp, Homo sapiens
agatctcaggagccctgtggagagtcccatatgacaaggaactaatgtttctggccaacagccagcaggaaactgaatcatgaccctgaccatatgaatgagcatggaagtggattctccccaagtctagccttgagatgactgctgccctggctgataccttgattgcagccctgtgagagactctgagcagaggccatcacaaagctattcccagactcctgacccatagaagtcatgagaacataaatgccaaatttgggggtaatttgtaaacagcaatagctaaccagtataaacatccttttagtttaaaaattt

SEQ ID NO: 498 - protein, 74 aa, Homo sapiens [sequence omitted]

SEQ ID NO: 499 - DNA, 297 bp, Homo sapiens
ccatgggccatctgtcttttgggtttctgtcccttcccatctcctgcagcccggtgggctgtccatcctttaggtttccggcccttcattttcctttccgtggtgtgtatcggggctacgaatggtcccagaatgcaaattttcaccttgtataacatcggtatctatgtcccaagatgcataagaaaacatacctgaggggaatttattccagggtgccacatgtttagacaaatggtttgtaatgactaagacttgtctttaaaaatcccatttaattacagcacgacaacgcgt

SEQ ID NO: 500 - protein, 52 aa, Homo sapiens [sequence omitted]

SEQ ID NO: 501 - DNA, 348 bp, Homo sapiens
  misc_feature (1)..(1): Wherein n may be a, c, g or t
  misc_feature (130)..(130): Wherein n may be a, c, g or t
natcttgtgaagtgggcgctgaccaagccttttaagacgggcgacagtagcggctcgatggttggcgtgacatggtcgatggcgctcattggcgtcggtcacttggttggtattgccgtggccgcggcantcctcgtcggtctctttatctcgtacggtgcgatcctgccgtggcgggtatccggcaaggttggtagcgaccttacggtgattcaggacgtcttcactagcgatgtccgcttcgtcggtgctggcaccatcggtgttgcggctatctggactcttgtcaaggtcattggccccatcgtcaagggcatcagcgattccataagttcctccaagacgcgt

SEQ ID NO: 502 - protein, 116 aa, Homo sapiens
  misc_feature (1)..(1): Wherein Xaa may be any naturally occuring amino acid
  misc_feature (44)..(44): Wherein Xaa may be any naturally occuring amino acid
XLVKWALTKPFKTGDSSGSMVGVTWSMALIGVGHLVGIAVAAAXLVGLFISYGAILPWRVSGKVGSDLTVIQDVFTSDVRFVGAGTIGVAAIWTLVKVIGPIVKGISDSISSSKTR

SEQ ID NO: 503 - DNA, 403 bp, Homo sapiens
  misc_feature (1)..(1): Wherein n may be a, c, g or t
ncctctctccgacaattccgctacatcacctggccgtcgatgcagacgctttacatcacctgcacgctgctttcgatgatctggacgctcggcgatttcaacagcgtctatctgctcaccggcgcgggtccgccgacctcacccatgtgctgtcgacgctcgacattcgctatctccggctcgaacagtctcgctggcgatggcatcgatcgtctgtgcgatgccgttcgtcctgccgctcgtgtatttcatgatgaaacggttgtcgcgatgaagcttccctctctccgtgacgtcgcgaccgaagcgcggctcctgctgatcggtatccccgtcttcatctggacgatgatcccgatctatcacatgttcctgttcgcgctctcgccgaaggaggacgcgt

SEQ ID NO: 504 - protein, 134 aa, Homo sapiens
  misc_feature (1)..(1): Wherein Xaa may be any naturally occuring amino acid
XSLRQFRYITWPSMQTLYITCTLLSMIWTLGDFNSVYLLTGAGPPTSPMCCRRSTFAISGSNSLAGDGIDRLCDAVRPAARVFHDETVVAMKLPSLRDVATEARLLLIGIPVFIWTMIPIYHMFLFALSPKEDA

SEQ ID NO: 505 - DNA, 264 bp, Homo sapiens
tctttccatctgggcggcccctttgatgcatgcactccacagagaaataagaataataaagtggcgcctgtactggccttcccagcagatggtccaaataatacagtaggcggccgcacaagtaagaagtctaccttagatgaggtgtttggtagggaaacagtagacgacgattctgagacgttgaaccaactacaagatagagcatatttattcaataaggccaattccagtactacgactttggatgcgattaaaccgaat

SEQ ID NO: 506 - protein, 88 aa, Homo sapiens
SFHLGGPFDACTPQRNKNNKVAPVLAFPADGPNNTVGGRTSKKSTLDEVFGRETVDDDSETLNQLQDRAYLFNKANSSTTTLDAIKPN

SEQ ID NO: 507 - DNA, 392 bp, Homo sapiens
accggtttgaggtacgggaagtaatgttgctgcacccgatcggcccacgctttgagaaaccatgccggtttctggttgccattgcccaggctgccgagtaacaggcggccatcggcatcgcggcgaatgctgctcaggacctggcgcgtgtcccaggagccctggccgccggggaggatctgcttggccgcttcatcggtcagcggcgccgatgccccctggtagtaataaccggggaaaaagttacgccgcagttcggtccattcgccttcggtgtaggcattggaggcgatcaccacctgggcggcctgtaccgcgccctcggcggtctgcaccgaccaataggcaccttggcgctcaagctgggtgaccggcgaatgatcaaacaattg

SEQ ID NO: 508 - protein, 102 aa, Homo sapiens
MPVSGCHCPGCRVTGGHRHRGECCSGPGACPRSPGRRGGSAWPLHRSAAPMPPGSNNRGKSYAAVRSIRLRCRHWRRSPPGRPVPRPRRSAPTNRHLGAQAG

SEQ ID NO: 509 - DNA, 336 bp, Homo sapiens
gatcagagtgaccttcatgttatcatattcgatgaaattgatgccatctgcaagtctagaggatctacccgtgatggtacaggtgtacatgatagcattgtaaaccagctgcttacaaagatagatggtgttgaggcgttgaataatgtattgcttattggaatgacgaatcgtaaagatttgcttgatgaagctttattgagacctggacgattggaagtacacattgagataaacctgccttatgaaaatggtcgtttgcaaatccttcaaattcatacaaataagatgaaggagaattctttcctgtctcccgatattaatcttcaggagcta

SEQ ID NO: 510 - protein, 112 aa, Homo sapiens
DQSDLHVIIFDEIDAICKSRGSTRDGTGVHDSIVNQLLTKIDGVEALNNVLLIGMTNRKDLLDEALLRPGRLEVHIEINLPYENGRLQILQIHTNKMKENSFLSPDINLQEL

SEQ ID NO: 511 - DNA, 345 bp, Homo sapiens
acgcgtccagtatgtccacggaggacatgcttgacctcgactcgaacgtctcctactacgcgaggaactatcaggccgcgcaatcagttgtggcgaaattcgacgcgggcaccattgcccaagccgaagacctgccacctgacgacacccacacgggggcggaactggtaaagagcgtggtcaacagcatcacctgtgtgtcacccctgtacatcgaagatttcaccaccatagagatccaggggctgggactgcactgtgtcaggctctgggcgcctgggctgctcgccctgtcactgcccagcgcacccatgcgggcacacccccgctacgccgcatatggcg

SEQ ID NO: 512 - protein, 111 aa, Homo sapiens
MSTEDMLDLDSNVSYYARNYQAAQSVVAKFDAGTIAQAEDLPPDDTHTGAELVKSVVNSITCVSPLYIEDFTTIEIQGLGLHCVRLWAPGLLALSLPSAPMRAHPRYAAYG

SEQ ID NO: 513 - DNA, 400 bp, Homo sapiens
  misc_feature (400)..(400): Wherein n may be a, c, g or t
tgtacatccagaggattagtgtctggtaggttttgtattataccaagtccctcaaaatggttattgatccctacaaatgcctgcctctcaagtgttattgtttaattaatgttgttggaacttatgctacccagcagcaaacatacagagacctgtgtgttgattttaatcactgccactactgggatactgtaaaaggagaagtcaattatcttaaaaataccttctgctgagtttaacttagggagttctttagaaaagctttcttttacctgtagatttctgaaaagaaaaagaatgtttcaatttttaaaaaaacctggcagaagctcttagtttgtgagttgatgagtggatcctttgggttcaatctttcaaagaaaaccataatcccaatttn

SEQ ID NO: 514 - protein, 58 aa, Homo sapiens [sequence omitted]

SEQ ID NO: 515 - DNA, 221 bp, Homo sapiens
  misc_feature (130)..(130): Wherein n may be a, c, g or t
gccctaaaggctgtgcaatctggattgggtcccgcagctgttatcgtgatggacaaatctacggatgtcgttgacgcgattgctaggctgtcctacttctacaagcatgagagttgtgggcagtgcagcncttgccgagagggcacaccctggctctggatgatcatggagaggctcaaggttggtgacgcgaagctggaggaaattgacatgcttcatga

SEQ ID NO: 516 - protein, 73 aa, Homo sapiens
  misc_feature (44)..(44): Wherein Xaa may be any naturally occuring amino acid
ALKAVQSGLGPAAVIVMDKSTDVVDAIARLSYFYKHESCGQCSXCREGTPWLWMIMERLKVGDAKLEEIDMLH

SEQ ID NO: 517 - DNA, 330 bp, Homo sapiens
gaattcggtagcgggaaagactttgctgtctaccaatatgtgagcccataccaggccttaaaaacggatgcagactttttgatttggtcatctgctgtcagcgtggtcggagaaattgttgatgccatttataaagtgaatgatttattgatacccgaagtctactcttttatgacagataacacaacttccagcgacttaataaagaatgtcgaaacggctcgctccactatcgatggtttaattgaatctctagggtggattgaactaaattaccgttgtgagagacaatgcaattgggatgaagtttgttacactccttcctggggc

SEQ ID NO: 518 - protein, 110 aa, Homo sapiens
EFGSGKDFAVYQYVSPYQALKTDADFLIWSSAVSVVGEIVDAIYKVNDLLIPEVYSFMTDNTTSSDLIKNVETARSTIDGLIESLGWIELNYRCERQCNWDEVCYTPSWG

SEQ ID NO: 519 - DNA, 266 bp, Homo sapiens
  misc_feature (260)..(260): Wherein n may be a, c, g or t
  misc_feature (264)..(264): Wherein n may be a, c, g or t
  misc_feature (266)..(266): Wherein n may be a, c, g or t
cggccgcaaaggctcgcggcacttaatagcgataggtgaaatacagttccaacgcactgaaggtctggtcgtcaccgaatacctgcttggcggcggccagtggtttgacccagttataggacagcgacgtataaaacgacggcgttggggtccagtggaggaatatcacgctctcatcggcaaagcgccgatcactgaccgctgcgcccatgtggtttttacagtgacagagttgacgttcttggaaggattgctacccncccncn

SEQ ID NO: 520 - protein, 62 aa, Homo sapiens
MGAAVSDRRFADESVIFLHWTPTPSFYTSLSYNWVKPLAAAKQVFGDDQTFSALELYFTYRY

SEQ ID NO: 521 - DNA, 279 bp, Homo sapiens
  misc_feature (1)..(1): Wherein n may be a, c, g or t
  misc_feature (202)..(202): Wherein n may be a, c, g or t
ncgcattcatacatatcaagaggatttgtggataagtataaaccgcccaccaaagttcttagaacacctatgttagtaagctcaccaggagcggagtatatggccagtcaaggatgttttcaagtgccattgagtataggtaggcatgttttcccctcggatttaatcattttggaatcacaagatttggatgtaattctgngtatggattggctgtcgatgaatggaggaaacatcgattgcgccggtaagatgattttgcttacaaccccaaaagga

SEQ ID NO: 522 - protein, 93 aa, Homo sapiens
  misc_feature (1)..(1): Wherein Xaa may be any naturally occuring amino acid
  misc_feature (68)..(68): Wherein Xaa may be any naturally occuring amino acid
XHSYISRGFVDKYKPPTKVLRTPMLVSSPGAEYMASQGCFQVPLSIGRHVFPSDLIILESQDLDVILXMDWLSMNGGNIDCAGKMILLTTPKG

SEQ ID NO: 523 - DNA, 406 bp, Homo sapiens
gcgcgccagggatgctgtcaaacatcctacaatgcacaggacagcctcacaacaaagaattatggccctaagtgccaaggttgagaaagtctgccttagacctgtcagggctgcccccagcctggggtctgtttcccccaaaacacgcacatctcagcggacagggccagaatgcactttgggggccagccacagcccctgccagcctcccagttcccccagatcttaccctgggcttcccctgtaagagctttataatgagatttcaattttataaaattataaggggcctcttaggagtttttgcctgacatatctttatgaacctaccctgagtgtttgtccctggagagccaggcccaaggataccaatggctagaaccaacagaaaagcacagctgccggc

SEQ ID NO: 524 - protein, 71 aa, Homo sapiens
MHRTASQQRIMALSAKVEKVCLRPVRAAPSLGSVSPKTRTSQRTGPECTLGASHSPCQPPSSPRSYPGLPL

SEQ ID NO: 525 - DNA, 366 bp, Homo sapiens
  misc_feature (1)..(1): Wherein n may be a, c, g or t
  misc_feature (2)..(2): Wherein n may be a, c, g or t
nntcgaatatccatgcagccgcgcgatgaggctgtggcagatctgctcacccgacgtgacggcattgccccggaggtggctgctgaggctgcccgcgctggccaagggcatatcgggcgggcgcggcgtctggcctgggacgaggaggctggtgggcgacgcacggccattggtgagctcccttacccggttgcggagtttgggggatgtctgcaagcagccgaggacctcgttaatcaggccagcgaggaggccgcagcccgtaccgcagaggttaatgcggccgagcgggccgagctgaataaagccctgggattggcgtcctctggtgctcgaccgcgcaatgctcaagctgctttacgggat

SEQ ID NO: 526 - protein, 122 aa, Homo sapiens
  misc_feature (1)..(1): Wherein Xaa may be any naturally occuring amino acid
XRISMQPRDEAVADLLTRRDGIAPEVAAEAARAGQGHIGRARRLAWDEEAGGRRTAIGELPYPVAEFGGCLQAAEDLVNQASEEAAARTAEVNAAERAELNKALGLASSGARPRNAQAALRD

SEQ ID NO: 527 - DNA, 341 bp, Homo sapiens
accggttcgagatatggacgagcaacagccccttgggctggagcacgcgggcgtaggcgcggaacgcttcgcgcgtcatcaaatgcgcggggatcgcatccgaggagaaagcgtcgagcgcgagcagatcgaggctgtcgggtgcgtcctgctccagactgaggcgcgcgtcgccgatgcgaatcgtggggttgggcaggcagttgcgcaaataggtgaactggccggtgtcgcgcgcgatatgcacgacgacgggatcgatctcatagaagcgccagcgctggccgggctgtgcgtagcaggcgagcgtgcccgtcccgagcccgacgacaccgacgcgt

SEQ ID NO: 528 - protein, 109 aa, Homo sapiens
MDEQQPLGLEHAGVGAERFARHQMRGDRIRGESVEREQIEAVGCVLLQTEARVADANRGVGQAVAQIGELAGVARDMHDDGIDLIEAPALAGLCVAGERARPEPDDTDA

SEQ ID NO: 529 - DNA, 416 bp, Homo sapiens
  misc_feature (412)..(412): Wherein n may be a, c, g or t
  misc_feature (413)..(413): Wherein n may be a, c, g or t
accggttgatatttccaatgaagtggcggatgcaccctatgtgttgccggaattccggtgttgtgcattagtacagtaggtatatacggtggtgtactaagtctgcacggatcaacgccaccgttatccacacaatgaaaacatccattattgctattgccttggctgccactgcacttgcatctgtggacgcattgaagtgcgaaaagtacgcctctggatctttggcgtcttgggaagaagtcaacttggagaatggacatgttcagcattatgcgatgaaggacggaaaactcgcgaagagccagaaaggagaggagtttgacttctacgcatgcgaggcgccagcgaagtttcataagaacctcaaggcgaatcgggagcatggagctgagaaggggggtgtgattanntcg

SEQ ID NO: 530 - protein, 128 aa, Homo sapiens
MLPIRLEVLMKLRWRLACVEVKLLSFLALREFSVLHRIMLNMSILQVDFFPRRQRSRGVLFALQCVHRCKCSGSQGNSNNGCFHCVDNGGVDPCRLSTPPYIPTVLMHNTGIPATHRVHPPLHWKYQP

SEQ ID NO: 531 - DNA, 288 bp, Homo sapiens
tctagaaagcagcttgagcaaggaggtggctggaggggcctgcgggaggaagagcagacaagctctgagctcagggatgctcccagctgtactgaaggtacagccacacccagcccgttgctggccccacccagcatcttcccttgcctaaaatgcccctgtagggcatccccgatctgctccagccccatcctctaacggggagagggccagagctggcctcttttttgaagtctgcggtctggggtggagaaggcagtaacatagctcctatctggcagtgtggtg

SEQ ID NO: 532 - protein, 64 aa, Homo sapiens
MLLPSPPQTADFKKEASSGPLPVRGWGWSRSGMPYRGILGKGRCWVGPATGWVWLYLQYSWEHP

SEQ ID NO: 533 - DNA, 449 bp, Homo sapiens
ccatggggctggcagtgcctgcatgggacaggcacctgccatatgcccaacagataacaggacaactgtttacccatcctaagcccgagtgctgggccctggcccgtccacaaaacccaaggggctggaggtcaggggggtgacatcaggggacacagggcccaggagaaaacgggagatccccgccgcacctgcccccgcccctgcaggcccctacagctctgctccccgggatctacacagaccggcttctggactccaggcagatgaaaccccagccctaacaacaatggttccaccttctcatggaaatcgtgggagagctggggaaaatggtgccctttccttcctggctctgggcactcctggctggggagccacagggtcagcctaatgacagtggaccaaagccgtggtttctgcatcaaagggaacagcccattgtcgac

SEQ ID NO: 534 - protein, 97 aa, Homo sapiens
MQKPRLWSTVIRLTLWLPSQECPEPGRKGHHFPQLSHDFHEKVEPLLLGLGFHLPGVQKPVCVDPGEQSCRGLQGRGQVRRGSPVFSWALCPLMSPP

SEQ ID NO: 535 - DNA, 342 bp, Homo sapiens
gtccgtgagcggctgttgcagctcgacggttctgcccaggaactggtgcgggtaaatggaaaaactcaatgtgtcagtggcacactggtcgccggcctgggcaattcgcctgacgcgccttcgcgcgcactcgacccgctaaaactcactcaattctacgaactggccgtcattggcaaatcccgtgtggctggtcgtaatgcagtgattgtgtcgattactccacgcgatcaataccggtatggcttcgagttgcacctggatcgtgaaaccgcgttgccgctgaaatcgttgttgctcaatgatcaaggccagttgctggagcgctttcagttcacgcgt

SEQ ID NO: 536 - protein, 114 aa, Homo sapiens
VRERLLQLDGSAQELVRVNGKTQCVSGTLVAGLGNSPDAPSRALDPLKLTQFYELAVIGKSRVAGRNAVIVSITPRDQYRYGFELHLDRETALPLKSLLLNDQGQLLERFQFTR

SEQ ID NO: 537 - DNA, 282 bp, Homo sapiens
  misc_feature (1)..(1): Wherein n may be a, c, g or t
nccctggcaaccatcttaccctctgcttctatgaattggactcagatttcacatacaagtgagatgatcgtgcagtatttctctttctgtgtcttgcctattttaattttggctaaccataatgtcctccatgttctgaatggcaggatttcttccttttataaggctgagcagtatgtaattgtaattttataaaccctatctttattcatcaaaggacgttgagtaatgctgcaatgaacataggagtgcagatatctctttgcaaccttgatttcaatt

SEQ ID NO: 538 - protein, 54 aa, Homo sapiens [sequence omitted]

SEQ ID NO: 539 - DNA, 463 bp, Homo sapiens
  misc_feature (415)..(415): Wherein n may be a, c, g or t
tgatcattttcagcaaaacaggctgagcatttatacaaatggaccattcacatgatagcatcagctgacaccagattagacataactccagtattttctcaccttactgtccagtacagagggtatgcactcataatgaaaatcaaatcagccttagcaagtaaatgcaccagacccccgtctggtctgagaagcacgaattaatttgtggtctctgcataccatctcttccagctccccctctgcccactggcttatcaatcaatggaaaaagggaattgggacatccttgcctcttcttctcctttaacccaggacaattttaacctgctatatattgaccctgacaacagagcacagaaagagaagaccagaagagagacacacagagtggagttactgatgagagttattngctgagtgagcagggcctcctcaaggcttgcagctgccctccactagt

SEQ ID NO: 540 - protein, 53 aa, Homo sapiens [sequence omitted]

SEQ ID NO: 541 - DNA, 375 bp, Homo sapiens
agatctaacgggggatggaggtgttcttaagacagtagtgcggaaagcaaaagatgatgctatagcgccatccgagagcctgcccttggttgatgttcattacgaaggtacacttgctgagactggtgaagttttcgataccacccatgaagataactttattttcttcttttgaaaatgggccaagggggctgccattcaaagcattgggatatagccttaagaactatgaaggttggcgaggttgtaaaaattacatgcaaatcagaatatgcatatggagctgcaggctcaccaccagagatacctcctaatgcaacccttatttttgaggtggagctagtagcttgcaggcccgaggaaaggttcaagctt

SEQ ID NO: 542 - protein, 66 aa, Homo sapiens
MGQGGCHSKHWDIALRTMKVGEVVKITCKSEYAYGAAGSPPEIPPNATLIFEVELVACRPEERFKL

SEQ ID NO: 543 - DNA, 217 bp, Homo sapiens
actagtctcctgggcttttccagaagccccatgcttttttatgcctctgccccctttgatgtactgtttcctgtccccgaaacacctgccttcatcatcccgctaggtcttgttcctaccaatctcccattcaaacccctgtttttccacaaaagcccatctcacatattaccacctctgtaaatccttttctaacttattcagggtgaccgaattc

SEQ ID NO: 544 - protein, 50 aa, Homo sapiens [sequence omitted]

SEQ ID NO: 545 - DNA, 397 bp, Homo sapiens
  misc_feature (1)..(1): Wherein n may be a, c, g or t
ntgtacacataaaaatgttaaagatggtaaattttatgttatgtgttttttaccaaaataaaaaagaattcagtaacttaagtcctcaaaatatttatgctgctttgtaataaacttctaaggggttgtgtgtgtatatgtgtatgtgcatgtgcatgtgtgtatgtgtgtcaggttgtaaaatatatgtatagaaggtccctgccttatgagagtttgacctacgatttttcaactttgccattgtgtggaagtgatatgcatccagtagaaactgtacttccagtttccaattttgaactttgatcttttcctgggctagagatatgcagtatgatactctcttgcactgctaggcagcatcagtgagcctcagttcccagtcagccactgatca

SEQ ID NO: 546 - protein, 69 aa, Homo sapiens [sequence omitted]

SEQ ID NO: 547 - DNA, 305 bp, Homo sapiens
gaattccaatttggtagaaaagaaagatgatttgaaaaggagagaatgctggtgagtgggatgtcttctcgatcttaccagaaagtccgaagtacctgctggtatgagcaagttcccagcctatgggcactgccggcctttctcgcatgggtctccctccatcccccagctcccatggctggagccgggacctgccatgtcgagggtctccctgcggctaactccactggccacttctgcatcttcgtctgatttgatccctcagggcactcaacacagaagatcatccctctttctggaagctt

SEQ ID NO: 548 - protein, 70 aa, Homo sapiens
MIFCVECPEGSNQTKMQKWPVELAAGRPSTWQVPAPAMGAGGWRETHARKAGSAHRLGTCSYQQVLRTFW

SEQ ID NO: 549 - DNA, 434 bp, Homo sapiens
ccatggggtaactacaatataactcttggggccatgctttttggtttgctgtggatactacagcctttgtggaaaaggcacaatctgagctggttgttgcaagatggagggaatacagacatagggaaaaacaagccaggccagaaccacacctgaagaaacgcacaaagaaccttttttactaaaattaaaccaggtacatgggctggggtgcctagggaggtgagtccacatgaatggcgggcttgagggcaaatgaatgatgggatagaaatgatttctggtgaagaggcctgtgactggcgtgttagctgaagtgaagcaggaaggtatgaaatggcgagagggtgacactggggcagagatagggagagcctaaatctgaattcagaactgggaatctcaattaccaaattactttgtatcttgcttgg

SEQ ID NO: 550 - protein, 58 aa, Homo sapiens
MWTHLPRHPSPCTWFNFSKKGSLCVSSGVVLAWLVFPYVCIPSILQQPAQIVPFPQRL

SEQ ID NO: 551 - DNA, 360 bp, Homo sapiens
atcaagcagtaccgccacccggtgcgcgtgcgtgactgggagattccggcgggactgctcgacatctcaggcgaaagccccctccacagcgcacaacgagagctggccgaagaagccgacctcgtcgccgcccggtgggacgtgctcgcggagttctacacgactcctggtggcagcgacgaagcgattcgcatctacctggcccgcgatctgtcgccggcgcatgaggtattcgaccgcgagcacgaagaagccgacatcgaggtgcagtggacgccgctcgatgacgtggtcgccgcggtgctcgatcgtcgtgtgcagaacccttcgctcgtcgtcggagtgcttgccgctcacgcg

SEQ ID NO: 552 - protein, 120 aa, Homo sapiens
IKQYRHPVRVRDWEIPAGLLDISGESPLHSAQRELAEEADLVAARWDVLAEFYTTPGGSDEAIRIYLARDLSPAHEVFDREHEEADIEVQWTPLDDVVAAVLDRRVQNPSLVVGVLAAHA

SEQ ID NO: 553 - DNA, 270 bp, Homo sapiens
gatcaaccaaattatgaagaaatggtgaagaccgcatttgatatcgcaaatacttggtatagaaagcacaacagtttgtttgactatctagaccacaccgataataagggcaatagcttgttgcatgttttgaaaacaaacattccaatccttttacaactgactaagctagatattaatgaggaaaattataagggattgacgccattaatggtatatgtgaagtacaaaagactaagtaatattgacgccatcacgaaagaccgtcga

SEQ ID NO: 554 - protein, 90 aa, Homo sapiens
DQPNYEEMVKTAFDIANTWYRKHNSLFDYLDHTDNKGNSLLHVLKTNIPILLQLTKLDINEENYKGLTPLMVYVKYKRLSNIDAITKDRR

SEQ ID NO: 555 - DNA, 333 bp, Homo sapiens
tccggatatttctttttttgtttgattacctttacttctcgccccccttttttccccgattacactggcaaactcttcttgattacagtacttagtccacttacatttaatgtaattattgctatgacttatatctgatgataatttatatgtgcagttttgctctttattgtatatttcatgtcttttttgttacctcttttatgttgccatttttggttttaaatatttttcagtgtacaattttaatttctctaatttttttaaactgttttttgatgtattatcttagatgttgatcctggagattgtaatacacatcctaattgatca

SEQ ID NO: 556 - protein, 53 aa, Homo sapiens
MIIYMCSFALYCIFHVFFVTSFMLPFLVLNIFQCTILISLIFLNCFLMYYLRC

SEQ ID NO: 557 - DNA, 306 bp, Homo sapiens
accggtaccgtgcagaagagtgccggacgcatcgtgatggaaggttccgatatcacgcattcgcagtcgtatgagatcaaccggcgcggcatctcaatcgtgcctgaaggtcgacgtcttttccccaatctgacggtcacggagaacctgcggatcgccgcacgtccggggggagcctcgtacgacgagatctacgaactgttccccaagctccgcctgctcaatcgcgcgctggccgagagcttatcaggcggtgaaaggcagatgctcgcgatcgcgcgggccctgacggtgcccagcaagctt

SEQ ID NO: 558 - protein, 102 aa, Homo sapiens
TGTVQKSAGRIVMEGSDITHSQSYEINRRGISIVPEGRRLFPNLTVTENLRIAARPGGASYDEIYELFPKLRLLNRALAESLSGGERQMLAIARALTVPSKL

SEQ ID NO: 559 - DNA, 255 bp, Homo sapiens
aattcgaaaatattacattatgatgatcgtgtttcagaaaatcaaggtcttgtgcagacatatgatcatcacctaagtagcattctggctctcaagtattttcccgatggttcgaagtttatttcttcttcagaggataagacggtaagaatttgggaaaatcagatcaatgtaccaataaaacaaataagtgacacggctcaacattctatgccatttttaaatgtacatccgtctcagaactatttctgtgcg

SEQ ID NO: 560 - protein, 85 aa, Homo sapiens
NSKILHYDDRVSENQGLVQTYDHHLSSILALKYFPDGSKFISSSEDKTVRIWENQINVPIKQISDTAQHSMPFLNVHPSQNYFCA

SEQ ID NO: 561 - DNA, 276 bp, Homo sapiens
tggccatgatttgggaaatgggagctcatgctgtggtgggagtacgtgtgcattctttttagagagcaactttgtaatctcaaagttgacaatttgcatatccttccattcatcaagtgcagtcccaaagtgatcccaaagtgcttgtgtgtatcccagtgaccaatacttctccaagtatgaacagaggacctgtggggatgcccagaactctttgagcggctcatgatgtcctccgcttttcaatcggacatctgtgggaggctagattgtctt

SEQ ID NO: 562 - protein, 75 aa, Homo sapiens
MSRSKSSGHPHRSSVHTWRSIGHWDTHKHFGITLGLHLMNGRICKLSTLRLQSCSLKRMHTYSHHSMSSHFPNHG

SEQ ID NO: 563 - DNA, 150 bp, Homo sapiens
  misc_feature (106)..(106): Wherein n may be a, c, g or t
cggttccccgccatcacacacctcaagttcctggcgagagacatgtctgagcaggtgctcctgtgtgcatccagccagaccagcagcctagtggagtgctggtccnttcggaaagagggccttcctgtgaacaacatcttccagcagatc

SEQ ID NO: 564 - protein, 50 aa, Homo sapiens
  misc_feature (36)..(36): Wherein Xaa may be any naturally occuring amino acid
RFPAITHLKFLARDMSEQVLLCASSQTSSLVECWSXRKEGLPVNNIFQQI

SEQ ID NO: 565 - DNA, 371 bp, Homo sapiens
  misc_feature (139)..(139): Wherein n may be a, c, g or t
attgagatatctgagagtgcagcagttgggactcgcattcccctggacagtgcatttgatccagatgttggggaaaattccctccacacatactcgctctctgccaatgattttttttttatcatcgaggttccggggnacccaggggcaccctgaaaagggaagccaaggtatgcagaactcatagtggtcagagagttagatcgggagctgaagtcaagctacgagtttcagctcactgcttcagacatgggagtacctcagaggtctggctcatccatactaaaaataagcatttcagactccaatgacaacagccctgcttttgagcagcaatcttatataatacaactcttagaaaactccccggg

SEQ ID NO: 566 - protein, 51 aa, Homo sapiens
  misc_feature (47)..(47): Wherein Xaa may be any naturally occuring amino acid
IEISESAAVGTRIPLDSAFDPDVGENSLHTYSLSANDFFFIIEVPGXPGAP

SEQ ID NO: 567 - DNA, 437 bp, Homo sapiens
tgatcatccaaggaacagttttttgtgcctttgtcacaaaagggagttgtcctgattcattaatgtaattatactaaattttctaaatggtgttattgaatttgtttattctaacataaagttgggactttctctgtttttcatattttgtaaaatatccctctttaatctcttgttttttgaaagcctaaagatgccaggtaacaaatgttgcactctagaaccgtcaccttttttatataactttatagtagtttcttccacatttattatgaccttatgaattagctcagtaacattgctctgacaggtatcactaattaaatattgttcaaaaattctgtgaagcattctgcctcattaatgtagcatcattggtgaggctttataatttttttcatctgtctgcgcagcacttctggttttctaatgctagc

SEQ ID NO: 568 - protein, 81 aa, Homo sapiens
MLHRIFEQYLISDTCQSNVTELIHKVIINVEETTIKLYKKGDGSRVQHLLPGIFRLSKNKRLKRDILQNMKNRESPNFMLE

SEQ ID NO: 569 - DNA, 243 bp, Homo sapiens
tgatcaagatggaaaagaaaagagagaaatgtggttgtaaagtgaagcctatctcaacataatctattggataaattgttctggagcagctcatgcttgtggaaacatttcccttgaatgctgccgaggtcagtttctacaccatctttcacagaagtgtcggggtgaggtgggaagccatctccttttgcactggcttttcaaaacctcactattttgtctcagtgaatcagttcagctctc

SEQ ID NO: 570 - protein, 50 aa, Homo sapiens [sequence omitted]

SEQ ID NO: 571 - DNA, 227 bp, Homo sapiens
  misc_feature (1)..(1): Wherein n may be a, c, g or t
ngaattcatctcatccatgagttagctaaaccctttgaaatcctatttttagatgaaccttcaaatgacctagaccttgagacggttgattggctaaaaagacagatacagaagatgaggcaaaccgttattttcatttcccatgatgaagactttctttctcaaacggcagacactattgttcacttgcgactggtcaagcaccgtaaagaaacggaaacactagt

SEQ ID NO: 572 - protein, 75 aa, Homo sapiens
  misc_feature (1)..(1): Wherein Xaa may be any naturally occuring amino acid
XIHLIHELAKPFEILFLDEPSNDLDLETVDWLKRQIQKMRQTVIFISHDEDFLSQTADTIVHLRLVKHRKETETL

SEQ ID NO: 573 - DNA, 299 bp, Homo sapiens
atcaacaacatcgccaaggcgcatggcggcgtgtcggtgttcgccggcgtcggcgagcgcacccgcgagggcaacgacctctactacgagatgatcgacgcgggcgtcatcaagctcggtgagggcaccaccgagggctccaaggtgggcctggtctacgggcagatgaacgagccgccgggggcccgcgcgcgcgtggcactcaccgggctttcgatcgcggaataattacgcgacgaggaaagacaggacgtgctgttcttcgtcgatgcggtgagaggctggatgcaccccacggc

SEQ ID NO: 574 - protein, 75 aa, Homo sapiens
INNIAKAHGGVSVFAGVGERTREGNDLYYEMIDAGVIKLGEGTTEGSKVGLVYGQMNEPPGARARVALTGLSIAE

SEQ ID NO: 575 - DNA, 174 bp, Homo sapiens
cgagtgtcatactgggactggtttggtgggtggaaagacttaagcttagaaatgctcaaggatggattagcggttgtttatgagggtaaagtaaacacagaatttgatgatagagaagataagtatcgatattatgaatttttggcaagatctagaaaaaagggactgtggatc

SEQ ID NO: 576 - protein, 58 aa, Homo sapiens
RVSYWDWFGGWKDLSLEMLKDGLAVVYEGKVNTEFDDREDKYRYYEFLARSRKKGLWI

SEQ ID NO: 577 - DNA, 314 bp, Homo sapiens
actagtgaagagagaagtttgtcaggagtagtgtcaaaaagcaggttgggtggtttccatcttgtgaagtcattaagcaagatttgaggagtgtggatgatcctatattgcttttttcctgtcattgaaaaagaacgtagtttgccgcccaagcccagctgttttcctgtgtggtgcctgttttactgttactgttgcataacaattctctttgtttgtgtagattcgcaggataagccatactacttctttttttttgtaagagatgggatctgcctggagagcagcctggcataatcatagtgcatttcagg

SEQ ID NO: 578 - protein, 66 aa, Homo sapiens
MILYCFFPVIEKERSLPPKPSCFPVWCLFYCYCCITILFVCVDSQDKPYYFFFFVRDGICLESSLA

SEQ ID NO: 579 - DNA, 387 bp, Homo sapiens
  misc_feature (1)..(1): Wherein n may be a, c, g or t
  misc_feature (2)..(2): Wherein n may be a, c, g or t
nngctcgtgctgatcccctacttcgtacccgccgttccggtggtgtactcggcctccactgacgcccccaggcggggagcgccaacattctcgaggacggggccagggtctccgagaccatcaccctgccgtccaccgtggaggccagttccatcaacatcgctttcctggccgaagaggtgcagtggctggactcctcagtggtcacggtcgaggtcacggacgcctccggtaaccgggtcttcagaaccgaggccccggcgaactccctgcacgacggcctgcacagcttccccgccgacgggctcgtcctgcgcggtggcgtgaagtacaccgtgacgatcaccagcaggatgaccgagggcggatatgcccgcgtcatgatca

SEQ ID NO: 580 - protein, 108 aa, Homo sapiens
  misc_feature (1)..(1): Wherein Xaa may be any naturally occuring amino acid
XLVLIPYFVPAVPVVYSASTDAPRRGAPTFSRTGPGSPRPSPCRPPWRPVPSTSLSWPKRCSGWTPQWSRSRSRTPPVTGSSEPRPRRTPCTTACTASPPTGSSCAVA

SEQ ID NO: 581 - DNA, 192 bp, Homo sapiens
  misc_feature (1)..(1): Wherein n may be a, c, g or t
nggcgtggcttgcaggctattaagcaggcaggaggactgaccctggcccagcatccggacacggccaagttcgacatgatgccgcaaagcgcgatcgccgccgaagtggtggacctggtcgattttcccgacaagatgcccgacaagatcatcacctatctgttccgcagcagttttctcagcttgcccggg

SEQ ID NO: 582 - protein, 64 aa, Homo sapiens
  misc_feature (1)..(1): Wherein Xaa may be any naturally occuring amino acid
XRGLQAIKQAGGLTLAQHPDTAKFDMMPQSAIAAEVVDLVDFPDKMPDKIITYLFRSSFLSLPG

SEQ ID NO: 583 - DNA, 516 bp, Homo sapiens
cataacaaattttcagaagacagggaaggacgctgtagctgcgcatagctgctaatgacttcggcatcacccggagccaagccacgggggacatggtctgactctaattaatttccatgcagcgggtccacagaggtgacctagagagccttttagctctcttggctgcagctaagccttcgtggaacttgctgccagagctggtccagcaaaagcatgtggacgctcctcatattgtgtccagcaatacccagggcacagtgcagcttctcctttgtgtgccgggcacagtgctcaccttcacgtcacgtttgtcagaaagtcaaacagcagtggatatgagattagcgaaatcacacagacctagattaacccaaacctgccttggcttcagcacactgttaggtcatttcaaaaacaaagcttgcttttgttccttagatgcaggccatggatgtcacccccatgctcacccccaaaccctgagacctcactcttccttccagaggtaactgc

SEQ ID NO: 584 - protein, 131 aa, Homo sapiens [sequence omitted]

SEQ ID NO: 585 - DNA, 474 bp, Homo sapiens
accggtacacctacgtcacccgtaaaaaccgacgcaatacccggatcgcctcgtcctcaaaaaattcgatcccgtcgtgcgtcgtcacattgagttcaaggaggcccgctaatggccaaaaagtccaagattgtcgcccagaagaaacgtgagaagctcgtagcccaatacgccgaaaggcgcgccgaactcaaggccatcatgaagtgcccaactgcctcattggacgaacgcatggaggcatcgcgtaagctgtctcgcctgccgcgcgattcatcccccgtgcggttacgtaaccgtgaccaagtcgacgggcgtccccgcggctacgttggcaaggccggtgtgtcccgtatccgtttccgtgagatggcccaccgcggcgaactccccggaatcgcgaagtcaagctggtgaagccatggcagtaccgaagcgaaagaagtcccgttcgaccacgcgtcataggcgggc

SEQ ID NO: 586 - protein, 101 aa, Homo sapiens
MAKKSKIVAQKKREKLVAQYAERRAELKAIMKCPTASLDERMEASRKLSRLPRDSSPVRLRNRDQVDGRPRGYVGKAGVSRIRFREMAHRGELPGIAKSSW

SEQ ID NO: 587 - DNA, 168 bp, Homo sapiens
ccggatctcccaagtcttaagacgggcacttcatgcttactaaatggcattgaatcgcctcaattgccattcaatggtcgctcagcaccttccccagtgagaaacaactcactaccggagtttgcacaattgccttcatttaggtcattatccgtgtctgatatgatc

SEQ ID NO: 588 - protein, 56 aa, Homo sapiens
PDLPSLKTGTSCLLNGIESPQLPFNGRSAPSPVRNNSLPEFAQLPSFRSLSVSDMI

SEQ ID NO: 589 - DNA, 345 bp, Homo sapiens
  misc_feature (103)..(103): Wherein n may be a, c, g or t
  misc_feature (142)..(142): Wherein n may be a, c, g or t
agatctgatctgccaatctgcaccagctctgccctccacaccctcatgtgcttcctcctgagcgtattctccttcctagacatctgcagttcctccatgtgcnaccccaggctgctgatccactttctcaccactaaccatnccatctcctttgcaggtggtgtaatccagatggccctcatgaccttctatggcacaggggaatgtctgctgctggccatcgtagcctatgactgagttgtggccatttgccaccctttcccctagcatatcatcatgtccaagggactgtgtgcccagctggtggtggttacctctgctgtgggggtgctcatttcagctcta

SEQ ID NO: 590 - protein, 78 aa, Homo sapiens
  misc_feature (35)..(35): Wherein Xaa may be any naturally occuring amino acid
  misc_feature (48)..(48): Wherein Xaa may be any naturally occuring amino acid
RSDLPICTSSALHTLMCFLLSVFSFLDICSSSMCXPRLLIHFLTTNHXISFAGGVIQMALMTFYGTGECLLLAIVAYD

SEQ ID NO: 591 - DNA, 341 bp, Homo sapiens
  misc_feature (1)..(1): Wherein n may be a, c, g or t
  misc_feature (341)..(341): Wherein n may be a, c, g or t
ncccaaagtcacactacagaaccagaatctcagccaggttccagaggcctagcttttactgaccactattagatgcctgagtgagcaagaaatgctaaattatcaggcaacctgtaaatattttaagggaccggaacaaatctgtccaaggaaaactgctaaaatgcaaaatttgctcagatgaggaaattcaccaaatcgctgggtagcgtaacgatgaatgctttctctttcctcctgaattttgttttgctgcttcccaagttttccggagctcggagggaacaaggtgcgaaagtgaaccctgacggggagccgccccgccccagagcccaggaccn

SEQ ID NO: 592 - protein, 53 aa, Homo sapiens [sequence omitted]

SEQ ID NO: 593 - DNA, 288 bp, Homo sapiens
gactcggtcaggacggcgacgatgcggtcgcgcacgtcctggacgtcacgggtgcgctcggccatgtagccgcccaaggaactccaccatggaggccagagttcctgcggactcccacacggcgcgctccggaaccaggagcctctcgcgcaccatggcctgcgccgtcgaggtcagggtggggtcagcagccatctgcgcgggggtctcaaggagcgtgcgcgcctcggccttggcctcggctgcggacagctccaggcccttcttaacctgctgggccgccagcgt

SEQ ID NO: 594 - protein, 66 aa, Homo sapiens
MEARVPADSHTARSGTRSLSRTMACAVEVRVGSAAICAGVSRSVRASALASAADSSRPFLTCWAAS

SEQ ID NO: 595 - DNA, 378 bp, Homo sapiens
  misc_feature (190)..(190): Wherein n may be a, c, g or t
cgcgtagacgccgtggcttccatgctctatctggattattcccgcgatgagtggctgcccaaccaatatggcggccgcgagaacctcgaggccgtgcaattcctgcaggaaaccaacgccaccctcaaccgcacgcatccaggcgtactcaccattgccgaggaatccacttcctggccgggcgttaccngccccacctctgataacggcctaggcttttccctgaagtggaatatgggctggatgaatgacaccttggagtacttcaagcacgagcccattcaccgttcctatcaccacggcgagctcaccttctccatggtctatgcctactcggagcgctacgtactgccgtttagccacgacgaggtagtgcac

SEQ ID NO: 596 - protein, 126 aa, Homo sapiens
  misc_feature (64)..(64): Wherein Xaa may be any naturally occuring amino acid
RVDAVASMLYLDYSRDEWLPNQYGGRENLEAVQFLQETNATLNRTHPGVLTIAEESTSWPGVTXPTSDNGLGFSLKWNMGWMNDTLEYFKHEPIHRSYHHGELTFSMVYAYSERYVLPFSHDEVVH

SEQ ID NO: 597 - DNA, 336 bp, Homo sapiens
gtcgacaataagtgtacagtttatgttaaaggtgcatttgaaagaattcttgagtactccacaagttatttgaaatcaaagggtaaaaaaactgaaaagttgactgaagcccaaaaagctccgataaatgagtgcgcaaattctatggcatctgaaggtttgcgtgtctttggatttgctaaactaactttgtctgattcatcaactcctctaaccgaagacctaatcaaagatttaacctttactggtttaatcggtatgaatgacccaccaagaccgaacgttaaatttgccatcgaacaattactacaaggtggtgtccatattattatgatc

SEQ ID NO: 598 - protein, 112 aa, Homo sapiens
VDNKCTVYVKGAFERILEYSTSYLKSKGKKTEKLTEAQKAPINECANSMASEGLRVFGFAKLTLSDSSTPLTEDLIKDLTFTGLIGMNDPPRPNVKFAIEQLLQGGVHIIMI

SEQ ID NO: 599 - DNA, 432 bp, Homo sapiens
  misc_feature (1)..(1): Wherein n may be a, c, g or t
nagcttttctacgacgtgctgcatcgccctgatggccagagcgaaccggtgcgcctgcgctccatcgtcgggttaatgccgctgttcgcggtgctggtgctggaacagcgcgagcatgagggcctggaaggcttgcgcgagcgcctgctgggttttatgcatcatcggccggacctggccaagctggtttcgcgctggaccgagccggggcagggcaaccgcctgttgctggcgctgttgcgcggtgaacgcaccaaggatttgctgcggcgcatattggatgatcaggagttcttgtcggcctttggcgtacgcgccctgtccaaggccttcgctgagcagcccctggcgttgaagatgaatggcgacaccctgtgtgccagttaccaacccggtgaatccgactcacgcttgtacggcggcaactccaat

SEQ ID NO: 600 - protein, 144 aa, Homo sapiens
  misc_feature (1)..(1): Wherein Xaa may be any naturally occuring amino acid
XLFYDVLHRPDGQSEPVRLRSIVGLMPLFAVLVLEQREHEGLEGLRERLLGFMHHRPDLAKLVSRWTEPGQGNRLLLALLRGERTKDLLRRILDDQEFLSAFGVRALSKAFAEQPLALKMNGDTLCASYQPGESDSRLYGGNSN

SEQ ID NO: 601 - DNA, 366 bp, Homo sapiens
gcttccgttcaagttagagaaatcagatttcaaaaaggtcttatagatagcactgaggattacatatctgagactttgctacctttggaactaaactttgatttttttccaaacactataagcacaaacaaaggatgttatgtaggacaagagctgacagccaggacatatgctacaggcattctacggaaacgtttggtcccagttaagctggataattatcaacttttagatacagacccagaaagaaagtacgcagaattccatatcgacaacgttgtagaaaagagccttgcagagaacgagccaaccctcaatccatttaccaataaaccgcccgaacgaaccaagagaaagcaaaggccg

SEQ ID NO: 602 - protein, 122 aa, Homo sapiens
ASVQVREIRFQKGLIDSTEDYISETLLPLELNFDFFPNTISTNKGCYVGQELTARTYATGILRKRLVPVKLDNYQLLDTDPERKYAEFHIDNVVEKSLAENEPTLNPFTNKPPERTKRKQRP

SEQ ID NO: 603 - DNA, 429 bp, Homo sapiens
gcttacgagagactcattcttgatgttctcttgggcgacccgccactgttcccccaacatgaggaggtcgaattggcttggaagatccttgacccggtactggatttctgggccgagtccaacactcccccgtgcgaatatccggccggtagttggggaccgtcggaggctgacgagatgatcgcccgcgacgggttcatctggcgcaggccttgaggaggagacatgatcgtcacgctcaacgacaccaccgcctcgaagattggtggggccatcgtggaggcccgtcgtaccgttggttctggatctgggttggttcacaccctcatttgcatctgtgactcttcccacttcgatgccgccttcgaggcggccagggatgccgcccgtcagcacccgtcacgcctcctcatggtcgtgacgacgcgt

SEQ ID NO: 604 - protein, 71 aa, Homo sapiens
AYERLILDVLLGDPPLFPQHEEVELAWKILDPVLDFWAESNTPPCEYPAGSWGPSEADEMIARDGFIWRRP

SEQ ID NO: 605 - DNA, 332 bp, Homo sapiens
gctagcatgtgattaacaattactgctgtaattcaaagcaactcctatctatctgtgattcatttggaattttgtctttatacaaagaaaataaatacaacattgtggatttggatttttaaaaatccacataattattttatctgagaattatttgaaggtaaataaactataacaatgatgtccactggattctgttctttttatgcacccatttgccttgcactaaatagcaggaggaaacacaaagcatctgactcatttagctggaaacatattgtccacacagcaggatgggaatggtatttactatacacagccggggaagaccc

SEQ ID NO: 606 - protein, 51 aa, Homo sapiens [sequence omitted]

SEQ ID NO: 607 - DNA, 234 bp, Homo sapiens
  misc_feature (1)..(1): Wherein n may be a, c, g or t
  misc_feature (2)..(2): Wherein n may be a, c, g or t
nnggatcctggcaccatgtgttgggtcactggctgggggaacattgccacaaatcaaccgctcccaccacccttcaccctgcaggagttgcaggtgcctcttattgatgccaagacctgcaatacctactaccaggagaactccgttcccagcacggagcaggtcattctcgaagatatgctgtgtgctggtttcgtggaaggcaagaaggatgcttgcaatggtgattccgga

SEQ ID NO: 608 - protein, 78 aa, Homo sapiens
  misc_feature (1)..(1): Wherein Xaa may be any naturally occuring amino acid
XDPGTMCWVTGWGNIATNQPLPPPFTLQELQVPLIDAKTCNTYYQENSVPSTEQVILEDMLCAGFVEGKKDACNGDSG

SEQ ID NO: 609 - DNA, 720 bp, Homo sapiens
  misc_feature (1)..(1): Wherein n may be a, c, g or t
  misc_feature (2)..(2): Wherein n may be a, c, g or t
nnggatcctgaccgcggcatgaggttcaaccctgccaagctattgctcgacccttatgccagggccatcacggcaggagtcgattatcacggcccgattatggaccacacgccggaatccaactacgagcctgacctgaccgacgatgcgacgtcggtcccgctcgccgtcgtcattgacgatcccggcccgcctacgcctattgcgcgccgccacgacatcagcgaatcgggcatctatgagacccatgtcaaagggctaacccgccttcaccccctcgttcctgagcatcttcgcagcacctatgccgggcttgcctatccggctgttatcgaacacctcaagtcaatcggagtaacagccatcgaactactacccgtccagcagttcgtctccgaaccattcatcgttgggcgcggcttatccgattactggggttacaacaccctggggttctttgcgccgcatgctgcctactgctccgtcggctcgatgggaacccaggtgcgcgagttcaaggacatggtgacgtctttccacgaagccggcatcgaggttttcctcgatgtcgtctacaaccacactggtgagggcggccatgaaggaccgactctgtctttccgcggcatcgatcacgagtcttattaccgcctcaccaacgatcaccgcaatgactatgacgtcaccggttgtggcaattctgtcgacacctcccatccg

SEQ ID NO: 610 - protein, 240 aa, Homo sapiens
  misc_feature (1)..(1): Wherein Xaa may be any naturally occuring amino acid
XDPDRGMRFNPAKLLLDPYARAITAGVDYHGPIMDHTPESNYEPDLTDDATSVPLAVVIDDPGPPTPIARRHDISESGIYETHVKGLTRLHPLVPEHLRSTYAGLAYPAVIEHLKSIGVTAIELLPVQQFVSEPFIVGRGLSDYWGYNTLGFFAPHAAYCSVGSMGTQVREFKDMVTSFHEAGIEVFLDVVYNHTGEGGHEGPTLSFRGIDHESYYRLTNDHRNDYDVTGCGNSVDTSHP

SEQ ID NO: 611 - DNA, 268 bp, Homo sapiens
accacgtcgttccgcgacggcctggctttctgcgccatcctgcaccgccaccggcccgacctcataaacttcagtgctctcaagaaggaaaatatttatgaaaacaataaactggtgagtggcccccgccccggcctcacagctggcttagccagcctgctgagccccacccacgtccgagggaccgagggactccccccaggccctgcacctgccttgggagtcctgcctgggaatcgggggctccctgaccagcccggcaacgcgt

SEQ ID NO: 612 - protein, 89 aa, Homo sapiens
TTSFRDGLAFCAILHRHRPDLINFSALKKENIYENNKLVSGPRPGLTAGLASLLSPTHVRGTEGLPPGPAPALGVLPGNRGLPDQPGNA

SEQ ID NO: 613 - DNA, 258 bp, Homo sapiens
agaagccacattttttcctgtgttgtcttcaccctgggtttgaacttctatgatggctgaaatcaaagttttggtcataagaaagaatgactgagatgagtagttggtgtttgagagctggtgctttgcccatgatgggtagaagaaggcttctcttctgctttttccagcgggagagcttcttcaggtccactgttgagcaggtgtcctgctacccgttctgttctgcagggactttggtgttggcccacaccatct

SEQ ID NO: 614 - protein, 57 aa, Homo sapiens [sequence omitted]

SEQ ID NO: 615 - DNA, 264 bp, Homo sapiens
  misc_feature (1)..(1): Wherein n may be a, c, g or t
  misc_feature (2)..(2): Wherein n may be a, c, g or t
nngcgcgccatgactggtagggcgaacagtctgtcgattgccctggttggcttcggtccactagccgtcatcgccttggccggtgcatacatcatggcctttggtgtatggcttatcttgggcttagatcctgttcatccctggtatttcattggatttgtgacattggcatctctgtcgtggatgatgctggcgttctggatgaggcttatctttggatcgccccagacggcaatcttccttatccttctggtgctccaattg

SEQ ID NO: 616 - protein, 88 aa, Homo sapiens
  misc_feature (1)..(1): Wherein Xaa may be any naturally occuring amino acid
XRAMTGRANSLSIALVGFGPLAVIALAGAYIMAFGVWLILGLDPVHPWYFIGFVTLASLSWMMLAFWMRLIFGSPQTAIFLILLVLQL

SEQ ID NO: 617 - DNA, 246 bp, Homo sapiens
  misc_feature (246)..(246): Wherein n may be a, c, g or t
tgatcatggcggctgttcttgctgagtatgttccttataaacacttctaccacgtggtaggtaacgtggttgtgtacgcctgtcttgctgcggcgattgcggtgccgttttttgtacatcactggcgtaagcacgtccgggttcacatcccgctactgattatgtggggcgtagtgtgcgacgtgctgggctactaacgttgattggcacgatgtttatcgggaagctagtttcacccgcaacggn

SEQ ID NO: 618 - protein, 63 aa, Homo sapiens
MAAVLAEYVPYKHFYHVVGNVVVYACLAAAIAVPFFVHHWRKHVRVHIPLLIMWGVVCDVLGY

SEQ ID NO: 619 - DNA, 159 bp, Homo sapiens
  misc_feature (64)..(64): Wherein n may be a, c, g or t
catggtgaagtacagttcaaagatgtgcgtgtgcctaaggagaacatacttctgggccctggcngaggctttgagatcgctcagggcaggctggggcccggtcggattcatcactgcatgaggttgatcgggtattcagagagggccctggaactcatg

SEQ ID NO: 620 - protein, 53 aa, Homo sapiens
  misc_feature (22)..(22): Wherein Xaa may be any naturally occuring amino acid
HGEVQFKDVRVPKENILLGPGXGFEIAQGRLGPGRIHHCMRLIGYSERALELM

SEQ ID NO: 621 - DNA, 386 bp, Homo sapiens
gctagctagccgtgtggaacccttcgggcaggtgggatgggcgaaactttgtgacgcggcccatcggggtttggcacctttaaggtggctgcccgatgtggttacggcataacacgccgctgcagccgaccgcttcgtgcacaagattggtggcattttaggcgattacgcagcgcgcttgcgggcggctaaaaagtacctgtgggggaggacgcgaaactcatggcgacgcagcgctgggacgagacgtggcaccggacttcgtgaatggacatccggacaaggcccgtccgagcgactagccgcgcagatcctaatcgcggaaggctattccgggttggacccgagtcatcccctaggtggaaaggacgggggaagggacgcgt

SEQ ID NO: 622 - protein, 52 aa, Homo sapiens
MPPILCTKRSAAAACYAVTTSGSHLKGAKPRWAASQSFAHPTCPKGSTRLAS

SEQ ID NO: 623 - DNA, 392 bp, Homo sapiens
  misc_feature (392)..(392): Wherein n may be a, c, g or t
agatcttcaaggacttacatttctaaaacttaaagtaaccaattcattcaaaactgctgctacattcctgcaaagccagactaccaaacagacaggagattcaagcatacaagagactggactgaaaagaatcagagaaaaaaaactgataggtgtatgttgtagctgagtgccactactggtaaggcccgggccaaagggagccccataggtcaaatctcccttgcttctggtagggcttggtgacagaagtgaacctccaacccatgacgcctttagctctagcccaggttggaaccagatattgttgttcgttgtctgcattcccactactgccagttacatgtctcaacttaacagtaacacactggacatgcacacattcgatcatn

SEQ ID NO: 624 - protein, 105 aa, Homo sapiens
MQTTNNNIWFQPGLELKASWVGGSLLSPSPTRSKGDLTYGAPFGPGLTSSGTQLQHTPISFFSLILFSPVSCMLESPVCLVVWLCRNVAAVLNELVTLSFRNVSP

SEQ ID NO: 625 - DNA, 674 bp, Homo sapiens
  misc_feature (1)..(1): Wherein n may be a, c, g or t
ntcatgagtgtttataaaatgcgtaagtccttgatgcgtatgacattacgccagctcaaggttttcaatgaggtctgcgatctgcgttcctacagccgcgcagctgatgaaatgtctctcacacaaccggccgtaagcctacaaattcgccagctggaagagctgatcggccagccttttatcgactacctccgcaaaaagctctccagaaccgaggcgggtgaaccgttacggggggccagccgggacatttccgggcgggtggaaaacctcgatttgcacctcttcgacatgcagggctcgctgcaagggcagttgaaactggcggtggaatccaacgccaagtatttcgtcccgcacctgtttgccgcgttcaagcgccagcatcccgaggtcaatctgcacctggcggtggtcaaccgcgcgcaggcgctgcggcgccttcgggacaaccgtgacgatttgttgatcatgtcgatggtgccccaggacatggggcttgaattcctgccgtttctgaacaacccgattgtcgcggtggcccgcccgaatcacccgctgtgccacggcggcccgctgcgcttgcaggacctggagccgtatacgttgttgatccgcgaagcgggatcggggacgcggatcgcctgcgaggagtatttcaaggagaaacgcgt

SEQ ID NO: 626 - protein, 224 aa, Homo sapiens
  misc_feature (1)..(1): Wherein Xaa may be any naturally occuring amino acid
XMSVYKMRKSLMRMTLRQLKVFNEVCDLRSYSRAADEMSLTQPAVSLQIRQLEELIGQPFIDYLRKKLSRTEAGEPLRGASRDISGRVENLDLHLFDMQGSLQGQLKLAVESNAKYFVPHLFAAFKRQHPEVNLHLAVVNRAQALRRLRDNRDDLLIMSMVPQDMGLEFLPFLNNPIVAVARPNHPLCHGGPLRLQDLEPYTLLIREAGSGTRIACEEYFKEKR

SEQ ID NO: 627 - DNA, 530 bp, Homo sapiens
tccggaatgccggatttgtggaccgacaccggcgctgctcagcgagccttagagatcggagccgatgcgctcctcatgggtaagcagggggttgacggcgtctacgacagtgatcccaagacgaacccgaacgcccacaagtttgacgaactgacctacgatgagtttctgtcgcgtgatcttaaggtcgccgacgcaactgccgtcgccatggccagggataatgacctgacgatggtcttcttcaacctcgagatgccaggcaatattggccgcgtcatcaatggtgaggacatcggcaccaccgtccatcgctgaaccatcgagacatacccaaggaaggacaacacagtgagcgacatcattaaggacgccgagaaaaagatggggtcagcggtcgaccatgcccgcgaggagttcgcggctattcgcaccgggcgtgctaaccccgccatgtttaacaaactcatggtcgagtactacggcacccccaccccgctacagcagctcgccagtttccaggttccgga

SEQ ID NO: 628 - protein, 105 aa, Homo sapiens
SGMPDLWTDTGAAQRALEIGADALLMGKQGVDGVYDSDPKTNPNAHKFDELTYDEFLSRDLKVADATAVAMARDNDLTMVFFNLEMPGNIGRVINGEDIGTTVHR

SEQ ID NO: 629 - DNA, 488 bp, Homo sapiens
tctagaactgtaaggaataagtttctgttgtttaaaagctacctagtttaaggtgttttgttataggtgcccagacaggctaggacaaacgccaataagctttcgtttatgtgggttgtatccattgatacttgctgtatgaagaataaaaattaataactttaaaaagatttattgattcagaaacagtaacaaaacttaatatgcgttaacgtacttttatgttggataaaaactatatcccaccccagtatatgaatagagtggcattgttttatgtgtttaatctctgacttaacagaaggcaattggatgatcatacctgcttctatgtttattctgctgccaatatcacacagcttctggaaacttccacggcacacattcatgagacaataagagttaaaaaggtaaacagtgtcttagtagtgtatgaaaatagtttaatctcatagaccccctgaaaaagctgcagaatccttacgcgt

SEQ ID NO: 630 - protein, 69 aa, Homo sapiens [sequence omitted]

SEQ ID NO: 631 - DNA, 187 bp, Homo sapiens
accggtgtgtcggaattagtaagcggacatcccttccgctgggctcgccatcgcagatatatatataagaagatggttttgggcaaatgtttagctgtaactatgttgcggaaaaacaggcaagaaagcaatcgcgcaaacaaataaaacataattaatttataatggttcaagccgtcgcaggtta

SEQ ID NO: 632 - protein, 50 aa, Homo sapiens
MFYLFARLLSCLFFRNIVTAKHLPKTIFLYIYLRWRAQRKGCPLTNSDTP

SEQ ID NO: 633 - DNA, 382 bp, Homo sapiens
gggcccactcagagcgtttgtctgtctgttatacccaaatggtgagccagggaaacccttccaccgctccaggatcacacacttcagttcttcaggctgagctcagcccagcccaggttcacaggctcattcgcatccacagcctgctcaaccacaggcatcggccacagcacaggctctgcttggtagccatgatgattctaaagtgcaggctggaggatccttgcagagcactcccagcagagcgaggtgtagcatggtgtcattcctgttcccagtgggccgagagggaggaagggacatgtggcaaagaaccagaggaaatctgttaccatgacaaccttcgtgcagaacacgagttgagcaggtgtgtcgtgtgcac

SEQ ID NO: 634 - protein, 114 aa, Homo sapiens
MVSQGNPSTAPGSHTSVLQAELSPAQVHRLIRIHSLLNHRHRPQHRLCLVAMMILKCRLEDPCRALPAERGVAWCHSCSQWAEREEGTCGKEPEEICYHDNLRAEHELSRCVVC

SEQ ID NO: 635 - DNA, 268 bp, Homo sapiens
tgatcaacagagcaggccgagctagcttgctaagtgagttcaggagctcatgaatggactgccctgggtgttgcatgaggcttgtggcactacccagaatgcacagctgcatcaggtgagacgaactcagctctaaatgctgggtgctgtgggcttctgcttcccgccccaccttgagaagttctataagaacagataaaaggactggggagaatggaccatactggggctcctgatacattctcattacatctccacttccaaaccg

SEQ ID NO: 636 - protein, 82 aa, Homo sapiens
MRMYQEPQYGPFSPVLLSVLIELLKVGREAEAHSTQHLELSSSHLMQLCILGSATSLMQHPGQSIHELLNSLSKLARPALLI

SEQ ID NO: 637 - DNA, 312 bp, Homo sapiens
tgtacagctatattatatatgactttacaaaaatgagattacttttgtatcagtaggattatttgatttgcaagcaatagaaataaactctggctgacttaaggctgaaaaggaatttattggaaggatatgaggtaggtaaagagctgaagaactgagcgggaaaacatgaagagccacgctggtaaagcaacttccatgacacagagagcaagggctcatgtgcagttctccaggcactgccatttcagtgtacctcctccaaccactttttgtctttgtatcgtttctgttcgagattaaattcctagg

SEQ ID NO: 638 - protein, 73 aa, Homo sapiens [sequence omitted]

SEQ ID NO: 639 - DNA, 433 bp, Homo sapiens
  misc_feature (1)..(1): Wherein n may be a, c, g or t
  misc_feature (2)..(2): Wherein n may be a, c, g or t
  misc_feature (433)..(433): Wherein n may be a, c, g or t
nnaccggtgcgcatcgacgaggaaggccggtactggtctcccggcgtgcgcggtggcatcaaaccgggggatccataccacctcaccgagtacttcggcccggttaccggaattatgtacgctcctgacttagccaccgctatcgagtatcagaacggcaccgctttcggtttgacggccggtctgcactctctggaccccgccgagatcgagttttgggtcgagagagccaatgctggaaacctctacgtcaaccggagcatcacgggagccatcgtcggtcgccaacccttcggtggttggaagcgttcagcggtcggtccaggtgccaaggccggtggctaccactacttacaggtgttggggacttggcgtcgagctgaggcgtcggccccgactccggcaaaccgtccctgtgctctggtcgagcagn

SEQ ID NO: 640 - protein, 144 aa, Homo sapiens
  misc_feature (1)..(1): Wherein Xaa may be any naturally occuring amino acid
XPVRIDEEGRYWSPGVRGGIKPGDPYHLTEYFGPVTGIMYAPDLATAIEYQNGTAFGLTAGLHSLDPAEIEFWVERANAGNLYVNRSITGAIVGRQPFGGWKRSAVGPGAKAGGYHYLQVLGTWRRAEASAPTPANRPCALVEQ

SEQ ID NO: 641 - DNA, 244 bp, Homo sapiens
  misc_feature (244)..(244): Wherein n may be a, c, g or t
acgcgtgaccgtatgattgaaaaggcaagccagcttatcagagagtatggctatcagaatatccccctaaggaaactggcatctctgctgggggttacgactggtgctttctacaaggcttttgagaataaggaggaactttactatcaggtctgtcttttggaaaaccagaagcagcttaagcgtttagaggagcagtatctagatggagtctctgatcctctggattgcatttggcaaatan

SEQ ID NO: 642 - protein, 81 aa, Homo sapiens
TRDRMIEKASQLIREYGYQNIPLRKLASLLGVTTGAFYKAFENKEELYYQVCLLENQKQLKRLEEQYLDGVSDPLDCIWQI

SEQ ID NO: 643 - DNA, 645 bp, Homo sapiens
ccggaaagaattcttgatgcacctggtttccaagacgacttttatttaaacttgttaagttggtccaaaaaaaatgtcttagctatagcactagacactgcattatatctgtggaatgccaccactggggatgtttccctgttaacggatttcgaaaacaccacaatatgcagcgttacgtggtctgatgatgattgtcatatctctatcggtaaagaggatgggaacaccgaaatttgggacgttgagaccatgtcattaattagaactatgagatcaggcttaggtgtccgtatcggttcattgtcttggttagatactttgatagctacaggcagtcgtagtggagaaattcaaatcaatgatgtcaggatcaaacagcatattgtatctacatgggcagagcacacaggcgaagtctgcggtttgagctataaaagtgacggattgcaacttgcatctggtggtaatgataacactgtaatgatttgggataccagaacgtccttgcctcaattttccaagaagacgcatactgctgctgtaaaagcactaagctggtgtccatattcgccaaatattctagcctctggaggcggacaaacagataaacacatccatttttggaacagtatcacaggtgca

SEQ ID NO: 644 - protein, 215 aa, Homo sapiens
PERILDAPGFQDDFYLNLLSWSKKNVLAIALDTALYLWNATTGDVSLLTDFENTTICSVTWSDDDCHISIGKEDGNTEIWDVETMSLIRTMRSGLGVRIGSLSWLDTLIATGSRSGEIQINDVRIKQHIVSTWAEHTGEVCGLSYKSDGLQLASGGNDNTVMIWDTRTSLPQFSKKTHTAAVKALSWCPYSPNILASGGGQTDKHIHFWNSITGA

SEQ ID NO: 645 - DNA, 256 bp, Homo sapiens
  misc_feature (1)..(1): Wherein n may be a, c, g or t
nacgcgtggccgctcacggcgctcttgaaactcaccggcccgatcgtcgatttcgtcaatctcttcgtcaagggggttctgactctattgcgcctcaaccaacggcgggatcaccacacttactcgcccgaagaactccgcgcgctgctcagtcaaacctctgtgtggcgtttccagaaccaccgggaattgctgctcaatctccttgacatcgaacacctcactggtgccgacgggatgaaaccccgacgggtga

SEQ ID NO: 646 - protein, 85 aa, Homo sapiens
  misc_feature (1)..(1): Wherein Xaa may be any naturally occuring amino acid
XAWPLTALLKLTGPIVDFVNLFVKGVLTLLRLNQRRDHHTYSPEELRALLSQTSVWRFQNHRELLLNLLDIEHLTGADGMKPRRV

SEQ ID NO: 647 - DNA, 394 bp, Homo sapiens
aggtttgcgctcaagggctctgattattggctcgcgttggcggatacgtgtttcagcgttagtgccagtcgaaacacacccgtcggttgccgcgatatggatgacttagcagtgaagctctggccttccgacaatctcgcgtccctacccggattttcacgaccttccacgaccagacccccaactgtgatatagtttccatacggcaactatatttgaggggaaactagaatggacctccgaagcatcctgatgcatcttcagtgtgagctggtcgcagagcgttccctagtgaatccgctcgacatttcctggctgcaatacgatgttctcctccagctggacagagaacacgagatgctgccatctgagctcagtctcgtcatggggatcc

SEQ ID NO: 648 - protein, 54 aa, Homo sapiens
MDLRSILMHLQCELVAERSLVNPLDISWLQYDVLLQLDREHEMLPSELSLVMGI

SEQ ID NO: 649 - DNA, 318 bp, Homo sapiens
aagcttctctaatacaagtgttttgtgcgtagagcacatcccagttctgttgtgttaggagcactagacagcacccagcactatgctggagaccgtaagtaaacagtaaaatcaccaagaaaagaagcacaaaaaatgcaaaaaaaaagtggcagtttttgaaatgtaaaaaggatgcgtgtttacagtatgaaagctgaaagaagaagggcgggaccatcaccttgttctgcctaacctgggaatttgcgtgtcaaggtggtcaaactttttttttctccacacatggccatgaatgaccgggaaagccccccaagt

SEQ ID NO: 650 - protein, 73 aa, Homo sapiens [sequence omitted]

SEQ ID NO: 651 - DNA, 303 bp, Homo sapiens
cgagcatggcctgcctcgctgccatgggtccatccgcagtctggcgcgcatgtggcccgcgccgccatgacgtacctgcacagccaggccgaagccggcaccggttgcccgctgaccatgacgttcgcctgcgtcccggcgctgcgcctgcaaccggatctggcgcagacctggctgccgaaaatcctcaacaccgaatacgacccgcgcaacgtcggtatcgcccacaaagccggcgccaccattggcatggccatgcccgagaaacaaggcggcaccgacgtgcgcgccaatcccacgcgt

SEQ ID NO: 652 - protein, 101 aa, Homo sapiens
RAWPASLPWVHPQSGAHVARAAMTYLHSQAEAGTGCPLTMTFACVPALRLQPDLAQTWLPKILNTEYDPRNVGIAHKAGATIGMAMPEKQGGTDVRANPTR

SEQ ID NO: 653 - DNA, 585 bp, Homo sapiens
aaatttaccggcggcaaaacccacgtcaccgactacaccaacgcctcgcgcaccatgctcttcaacatccacacgctggagtgggatgcgaagatgctggagattctcgacgtgccgcgcgagatgctgccggaagttaagtcgtcttcagaaatctacggccgcaccaaaagcggtatcgctatcggcggcatcgcgggcgaccaacaggctgctctgttcggccagatgtgcgtggaagccgggcaggccaagaacacttatggcaccggctgcttcctgctgatgaacaccggcgacaaagccgtcaaatccaaacacggcatgctcaccaccatcgcctgcggtccacgcggcgaagtggcttatgcgctggaaggcgcggtgttcaacggtggttcccccgtgcagtggctgcgtgatgagctgaagatcatcgcggacgccaccgacaccgaatacttcgccggcaaggtcaaggacagcaacggcgtctacctggtgccggcctttaccggcctgggcgctccgtactgggacccgtatgcccgtggcgctttgtttggcctgactcgtggcgtacgc

SEQ ID NO: 654 - protein, 195 aa, Homo sapiens
KFTGGKTHVTDYTNASRTMLFNIHTLEWDAKMLEILDVPREMLPEVKSSSEIYGRTKSGIAIGGIAGDQQAALFGQMCVEAGQAKNTYGTGCFLLMNTGDKAVKSKHGMLTTIACGPRGEVAYALEGAVFNGGSPVQWLRDELKIIADATDTEYFAGKVKDSNGVYLVPAFTGLGAPYWDPYARGALFGLTRGVR

SEQ ID NO: 655 - DNA, 243 bp, Homo sapiens
tgcatgctataaaaggaggctgagcaagtcatggatgggagaaggccaggaagcagcctcctccatgtcctctgcatcagtttctgccccaggtttctgccctgcttggttgagttcctgacttcttttgatgatgtgttgtgatgtggaagagtaattgaaagaaaccctttccttctcccatggtcttatggtcatggtgtcttatctcagcagagaagccctgagtgagagagtgtgcac

SEQ ID NO: 656 - protein, 63 aa, Homo sapiens
MTIRPWEKERVSFNYSSTSQHIIKRSQELNQAGQKPGAETDAEDMEEAASWPSPIHDLLSLLL

SEQ ID NO: 657 - DNA, 330 bp, Homo sapiens
  misc_feature (1)..(1): Wherein n may be a, c, g or t
  misc_feature (2)..(2): Wherein n may be a, c, g or t
nnagatctgtctggacattgtgcttaataagcatgacagggtgaggtcagtaggcaggaaatggcaaatccgtgtcggcgtccgacgaaacaatacgacattcgtcccctgcgtagccggtaaacggggatgacaaaaacagagtctatggaccaggagtcgctccatggattgtttgaatggatcacatgggtgttcaagtctataccagggcgggacataattttgcgctatatcgccagcagctaccaaaatgatccgatccgctcattgctggagctgattctgtttatatttgctgttcgtacgattctgcaaaatcgaacgcgt

SEQ ID NO: 658 - protein, 67 aa, Homo sapiens
MTKTESMDQESLHGLFEWITWVFKSIPGRDIILRYIASSYQNDPIRSLLELILFIFAVRTILQNRTR

SEQ ID NO: 659 - DNA, 406 bp, Homo sapiens
  misc_feature (1)..(1): Wherein n may be a, c, g or t
  misc_feature (406)..(406): Wherein n may be a, c, g or t
naacagtctataagctgatgtcgcagaggttggaaggaagggttaaaggggaatgtcatggttcaggatcacaggcatgggattcaaatcctgattctgtcatttactgacacgtgactcggtcaagggcttcagcatcttggtgcctccgtttcttcatctataaaatggcaaaaacaatagtcctgaatctactttgcaagactcttgtgaagattccatgaagtaacgtcatgtttcccatgctgctcttaccaacatcatatctttgcaccataccctgtgtgctcaccctatggcaattaattttatttaatattttcccttacaatgaactcaccttctatcttagatactatagcctcatcctaaaagctaatatccacgaaatcgtcggataaattgn

SEQ ID NO: 660 - protein, 55 aa, Homo sapiens
MFPMLLLPTSYLCTIPCVLTLWQLILFNIFPYNELTFYLRYYSLILKANIHEIVG

SEQ ID NO: 661 - DNA, 330 bp, Homo sapiens
cggccggagattagccccgccctggatgcggtagtgctgaaggctttggagaagcagccggagaatcgttttgataatgccggcgatttccaggaggctttagaggatattctgggtgagcatgttgcgccccgtgtgcacttgccggattaccaaaaaatgggggcgacgctggcggcggatactaaccccacggagtcttttactgcctctacctccattcttcctatccagccgctaaaaaagcacggcgccgctgatggtgctgacggcactgctggcggtgctgctaatgccgcgggtgctaccggcgcgagcagtgctacgcgt

SEQ ID NO: 662 - protein, 110 aa, Homo sapiens
RPEISPALDAVVLKALEKQPENRFDNAGDFQEALEDILGEHVAPRVHLPDYQKMGATLAADTNPTESFTASTSILPIQPLKKHGAADGADGTAGGAANAAGATGASSATR

SEQ ID NO: 663 - DNA, 317 bp, Homo sapiens
ccatggttactgctgaggagaaaaacagagaatggccatgtgagagcaccctaaggacagagctctgggcagagatgctaccagctggggccaggcaaaggaaaaagtgatggcttccagcaacctctgccttcccagataccaagctttaaacactgaaccttctaagccctattctgccaaagagaccaacactaaacagtctctgttggtttccactctacgttgtgacagccacatacacctgtacactgttgagtcctgagacctttctgactgtgaccttcaagttcccaaacaccactcgacaccctagg

SEQ ID NO: 664 - protein, 51 aa, Homo sapiens
MASSNLCLPRYQALNTEPSKPYSAKETNTKQSLLVSTLRCDSHIHLYTVES

SEQ ID NO: 665 - DNA, 324 bp, Homo sapiens
  misc_feature (324)..(324): Wherein n may be a, c, g or t
caattgcatgggaacagaggtctgtgctccagatatggggatatttaactctcctgggtggtgcgaatgaaactaccaacagcacactctcaatcaggcttcaggaaagaagatgaccagtcccttcttccccagggatgggacagataaaggccgggagcgtccctcatcacccgacttctggacacagcctgcagcatcattcaccacttcacttcaccactatctgcgcgtgccatgtcctggtgtggaaatcttggagaaactcccatgaacaacaatgcgactgtgtgctgccggtcggaaacactcggagctgcagan

SEQ ID NO: 666 - protein, 62 aa, Homo sapiens
MGQIKAGSVPHHPTSGHSLQHHSPLHFTTICACHVLVWKSWRNSHEQQCDCVLPVGNTRSCR

SEQ ID NO: 667 - DNA, 351 bp, Homo sapiens
atcttttttttctgcgttgatgtatttttctccctagatgatgtttgtctttttctttttcttcttcttttttttttgtgacagagcaatactcttgtcttgaagaaaaaaaaaagaaaaatgcacttaaatttcaaatttagttgggaaagaaaaattataattgaatcacctaattcccaggcttgtaaattttgtgtccttcaaagcttgaaagcaaaataaccacataaatatttgggagtggttcatacaagtaaacgtcaaatacttgagacattttggttgcttggaagcaaggtcaaaggaaatggtttgcatatggtttacctagaagcccttatttttggc

SEQ ID NO: 668 - protein, 50 aa, Homo sapiens [sequence omitted]

SEQ ID NO: 669 - DNA, 622 bp, Homo sapiens
acgcgtgaaggggaggtgctggaggaaatgaattctgcagcactaaatagcagcctatcaacctaaaatgaagacaggctttctgcttcccaaatctgcttctggtcccatattaattgatatacatgcagctgcaggtttggtcaaatctgagaaatttccaacagcaatagtgacatttgatttcttcacataacaagatgtgtacagggaggttaaaccaggtttattacatcagtctaacaatgtcctcaaagcctccaacactccactttccattctgccatcttctgcatgatgctcttccttgggcttgttaccacctcatggttgcaaggtgattgccacagcctcaaatatggcatctttataccatcatcccaaataggaagaaagaagaggacaagcaaaaaatatgatttcctcttatcagggaggaagagcttccccagaagtactccagcagaccttctaatatctcactggtcagatctgggtcacatggccatctgcaaaggaggcttagaaagtgtatatcaagaaggagaatgggagagccacgacgggttaaggtctgttatcattcatcccctgggactgaaactactggggttctgctagc

SEQ ID NO: 670 - protein, 108 aa, Homo sapiens
MMLFLGLVTTSWLQGDCHSLKYGIFIPSSQIGRKKRTSKKYDFLLSGRKSFPRSTPADLLISHWSDLGHMAICKGGLESVYQEGEWESHDGLRSVIIHPLGLKLLGFC

SEQ ID NO: 671 - DNA, 336 bp, Homo sapiens
tccggaacatcgcctcacgcagagttcaaaaattacagagatatgtttttatctaatagaaatggtttcacaggtagggttttcggtgttactttagcagaatcgttgagcgtcgccagtgcagaggtcattgttcaaagtgagttggtgagttttggtcggatacccatcgtggtagccaagtgcggcgcatacttaaaagcaaatggattggagacctcgggtatatttcgtatagcgggcaatggtaaaagagtaaaagcccttcaatacatattctcgtcgccacctgattatggtaccaaattcaacgattgggaaacatatacagtgcac

SEQ ID NO: 672 - protein, 112 aa, Homo sapiens
SGTSPHAEFKNYRDMFLSNRNGFTGRVFGVTLAESLSVASAEVIVQSELVSFGRIPIVVAKCGAYLKANGLETSGIFRIAGNGKRVKALQYIFSSPPDYGTKFNDWETYTVH

SEQ ID NO: 673 - DNA, 240 bp, Homo sapiens
acgcgttcgcgcggcgcgtaggcggcacgggcatccgcccgcggcagcagggccacgatcgcacccttgtcgacggccacagcatggtgctcaagcacgacgccatgcggttccaccggcacgacccagcgcgcttcgatcaggaggtcgatggtttgcggggcgttctggctcatctgttggctcactttttgatgttggatacgacatggggcggatcacggttccgggggcgagcaa

SEQ ID NO: 674 - protein, 58 aa, Homo sapiens
MSQNAPQTIDLLIEARWVVPVEPHGVVLEHHAVAVDKGAIVALLPRADARAAYAPRER

SEQ ID NO: 675 - DNA, 247 bp, Homo sapiens
gagacactcaagttacttgagggcttggagatgtacgaagaagactggagtttagtgtcgctgcatgtgggtacgcgctccagagagcagtgtatcacaaagtttatccagttgcctatccaggatccctaccttgatggtgcctcacagaaggatttgggggcgctgcaatatgcgcctcgtgatcccacaagtgggcaagctgttcctctgcttccatttgctcaggctgacaaccctgtcatga

SEQ ID NO: 676 - protein, 82 aa, Homo sapiens
ETLKLLEGLEMYEEDWSLVSLHVGTRSREQCITKFIQLPIQDPYLDGASQKDLGALQYAPRDPTSGQAVPLLPFAQADNPVM

SEQ ID NO: 677 - DNA, 251 bp, Homo sapiens
gcgtgtcgtcagcgtctgcgcccgatcctgatgacgtctctggcatttgtgtttggcgtgctgcctatggcgaccagttctggagcaggttccagcagccagcatgctgtggggacgggggtgatgggcggaatgatttcagccacggttctggctatctatttcgttccgttgttcttcgtgctggtgcgtcgtcgcttcccgcttaaagaacggccagaataaacgtgcattaaaaaaggcggctccaa

SEQ ID NO: 678 - protein, 74 aa, Homo sapiens
ACRQRLRPILMTSLAFVFGVLPMATSSGAGSSSQHAVGTGVMGGMISATVLAIYFVPLFFVLVRRRFPLKERPE

SEQ ID NO: 679 - DNA, 204 bp, Homo sapiens
cggagcgaggggaagcaagatgcgctagaggagttcaaggcctttgtggacctgaccttcccaggcagcatcctagaagatgagcaccaagacatggtccattatcatctgcctggctgtgacctcagctgggccaaggtatttggtatcctggagaaagccaaggagaagtatggagtggatgattactctgtgaaccagatc

SEQ ID NO: 680 - protein, 68 aa, Homo sapiens
RSEGKQDALEEFKAFVDLTFPGSILEDEHQDMVHYHLPGCDLSWAKVFGILEKAKEKYGVDDYSVNQI

SEQ ID NO: 681 - DNA, 297 bp, Homo sapiens
cggtggaataactatctcaaaagatactgtccctttctgaatagccaaaaaaagaataataaaagcgctattaccaacaacgatggcgtatgtactcccaagaccccgatagccaatttttccacttcatcctcttctgttccatcagtctcgcatcaatacgatactgattacaatattaaacatccagatgaaactgttaacaatcatactaaggaatccgtagctatggaaacgcaaaagcacgtcatctcctggaaaaatatcaattataccattggagacaaaaaattgatc

SEQ ID NO: 682 - protein, 99 aa, Homo sapiens
RWNNYLKRYCPFLNSQKKNNKSAITNNDGVCTPKTPIANFSTSSSSVPSVSHQYDTDYNIKHPDETVNNHTKESVAMETQKHVISWKNINYTIGDKKLI

SEQ ID NO: 683 - DNA, 396 bp, Homo sapiens
  misc_feature (1)..(1): Wherein n may be a, c, g or t
ngaattcaaactggtgttcgtatgggccataagcaaggtacatatacgatgcgttttagaagccagttcacagatcaacgtctattcggaaccgatcaatttagtattggtgggcgctattctgtacgaggttttagtggagaagaaaccttaagaggtgactcgggctattatgtacaaaatgaatgggcattaccatttagaaaacaacaaattactccatatgtagggatagatattggacatgtatgggggccatctacagaaactcaattaggtaataccttaattggtggtgtagttggtgtacgtggtatggttggtgacgatgtaaactatgatgtatcactaggaacaccaattaagaaaccagaaggttttgatacagatacgcgt

SEQ ID NO: 684 - protein, 132 aa, Homo sapiens
  misc_feature (1)..(1): Wherein Xaa may be any naturally occuring amino acid
XIQTGVRMGHKQGTYTMRFRSQFTDQRLFGTDQFSIGGRYSVRGFSGEETLRGDSGYYVQNEWALPFRKQQITPYVGIDIGHVWGPSTETQLGNTLIGGVVGVRGMVGDDVNYDVSLGTPIKKPEGFDTDTR

SEQ ID NO: 685 - DNA, 276 bp, Homo sapiens
gatgaaacaagatccaattccaacagcagcagcaacaaacccggtacttgtgcccatgccataaacacgttgggcgaagtaattcaagaactgctatccgatgctattgcaaaaagtaatcaagaccacaaggaaaaaattcgtatgcttttagacatttgggacaggtccggcttgtttcaaaagagttacttgaacgccatcaggtcaaaatgctttgctatggacatatcgaataaccccgcgaaccccgcttcacaacaactatcagtggat

SEQ ID NO: 686 - protein, 92 aa, Homo sapiens
DETRSNSNSSSNKPGTCAHAINTLGEVIQELLSDAIAKSNQDHKEKIRMLLDIWDRSGLFQKSYLNAIRSKCFAMDISNNPANPASQQLSVD

SEQ ID NO: 687 - DNA, 373 bp, Homo sapiens
actagtaaaaattactttttcaagaggctggaatgatataaaagatcacttgaatcactgcatacaccggaatagctacacttaaaaaggctgaccacaccaatgttgggaaatatgtggagtcatcacaagtctcccacactgtgggtggaggtaaaaagagttcaggagaaggcccaggaatgtcttataaaattaagcacacacatgccctataatgcagcaattctacgcctagttaacactaacagaaatgaaaatgcatgtccacaaaaagtatagagtattcctatacaaggaactttattcatagtagtcaagcctggaatctgcttaggtgtccttcaacaggagaatggataaatcaacgcgt

SEQ ID NO: 688 - protein, 59 aa, Homo sapiens [sequence omitted]

SEQ ID NO: 689 - DNA, 354 bp, Homo sapiens
  misc_feature (1)..(1): Wherein n may be a, c, g or t
nacgcgtcaatccgtttggaatgatctcatcgcaaaattttttttcgctaaaattttcatagagagtatcaatattaatatatggttataacttatggcggcattagtcgatgaggtgcttgccgaagagactagcacagccaacccataatgccttctaaaaactccatcaacagacctaagctgacttcaaatttgcaccacaaggtgcactctttaaataagaaaagagctcaaagagaaagagctggtctcttgaagccagctagatccagcgtaaattcgaaatctggggaaataaaatcagtagcgttggacctatacttccaaaacaagaagaacgaaagtcagaat

SEQ ID NO: 690 - protein, 68 aa, Homo sapiens
MPSKNSINRPKLTSNLHHKVHSLNKKRAQRERAGLLKPARSSVNSKSGEIKSVALDLYFQNKKNESQN

SEQ ID NO: 691 - DNA, 591 bp, Homo sapiens
  misc_feature (70)..(70): Wherein n may be a, c, g or t
  misc_feature (71)..(71): Wherein n may be a, c, g or t
  misc_feature (313)..(313): Wherein n may be a, c, g or t
  misc_feature (314)..(314): Wherein n may be a, c, g or t
tgtgcatgtgtgtgtaggagtgtgtgtgcaggggtgtgtatgcaggggtgtgtgcgcgtaaaggtatgtnngtgcgtaggggtgtgtgtgcaggggtgtgtgtgcgtggggctgtgtgtgcaggggtgtgtgtgcatagcggtgtgtgtgcaggggtgtgtacgcgcaggggtgtgtgcgtgtgcacatctgtttatgtttctgtgcacatgcctgcacatctgtgtgtacaggggggtgtacaggtgtgtgtatgtatgcatgtctgtgtgtgcctctgtgtgcatgtcggtgtgtgtatgtgtatgtgtcnncgtgtggggcatgcaggtatgtatgtgtgcatgcaagtctgatacttgaatccagtagaaaccagagaggaggagaagctggtgttagctctctcttcatgactcccagctctttccttttataatgatcagagaaggactcttccaggtctctttggcatcaggaagggacccatgctttggcaggccttcctaggaaaggaggggcatttacaccaaaacagtacgggattgtgtctgttgccacgggtagctgatgccagaaacagccagatct

SEQ ID NO: 692 - protein, 120 aa, Homo sapiens
  misc_feature (24)..(24): Wherein Xaa may be any naturally occuring amino acid
  misc_feature (105)..(105): Wherein Xaa may be any naturally occuring amino acid
CACVCRSVCAGVCMQGCVRVKVCXCVGVCVQGCVCVGLCVQGCVCIAVCVQGCVRAGVCACAHLFMFLCTCLHICVYRGVYRCVYVCMSVCASVCMSVCVCVCVXVWGMQVCMCACKSDT

SEQ ID NO: 693 - DNA, 299 bp, Homo sapiens
gcgcgcctggccgtggagccggatcaattgctgcaaaccctggctgcactgccgggtgaaatcatttttgtcagcaacgagaccggaatgggtgtcgtgccgctgggcgaattgactcgccgctatgtggatgaagccggttggctgcatcaagccttggccgagcggtgtcagcgtgttgttctgacggttgcaggcctgcccctgactttgaaaggtactgcgttatgactgacacctggtggctcaacccttgtaaggctgtcgacgcctcagcgtacgaacaagcgctggccggc

SEQ ID NO: 694 - protein, 76 aa, Homo sapiens
ARLAVEPDQLLQTLAALPGEIIFVSNETGMGVVPLGELTRRYVDEAGWLHQALAERCQRVVLTVAGLPLTLKGTAL

SEQ ID NO: 695 - DNA, 444 bp, Homo sapiens
cattgaccctgagagcaagagccatcagtctgatggcttcctctggccggaagctgtggctgagatatccttccttcctcccagcagcctggatttgcctcctcccaagctgggaaaggctagggatgcccaggtggggctgtcagggccaaaggctgtttcaaaagtgtcctttattgcccaatcagggggtttggctggcatctgcttgtggcatggggtgctggctctcgtggagcaagactgagggctgtcgagccccaggggtcctgcccatcagcagccatgcttacccctgcagagctggccacggtagtacggcggttctcccagaccggcatccaggacttcctgacactgacgctgacggagcccactgggcttctgtacgtgggcgcccgagaggccctgtttgccttcagcatggaggccctggagctgcag

SEQ ID NO: 696 - protein, 53 aa, Homo sapiens
MLTPAELATVVRRFSQTGIQDFLTLTLTEPTGLLYVGAREALFAFSMEALELQ

SEQ ID NO: 697 - DNA, 268 bp, Homo sapiens
gcgcgccttcaatgcgtgcgctagaacccagatgggaagctttttaacgcgcctgtgttgcgcacttatgtccttttaggttgtctcttccctttctagagtgtgggccctgtgcctgtattcttctaagggtgtgtgtgttagccttggaggttggtgctattggcgttagatgggggtggggaatccagttaggtgcgcccacgtgttggagaagcaccggtgtgcacctagatttccttctaggcttttttctcatactcaattg

SEQ ID NO: 698 - protein, 71 aa, Homo sapiens
MRKKPRRKSRCTPVLLQHVGAPNWIPHPHLTPIAPTSKANTHTLRRIQAQGPHSRKGRDNLKGHKCATQAR

SEQ ID NO: 699 - DNA, 186 bp, Homo sapiens
ctcgagctgtctctggaagacctgcagcgcgacctcgatcgccgcaagcccggcaccagccgccacacgacccagcgccaggagcccgacgaagtcgagattctctccggcgtgttcgaaggccgcaccaccggctgcgccattggcttgctgatccgcaataccgaccagaagtccaaggactac

SEQ ID NO: 700 - protein, 62 aa, Homo sapiens
LELSLEDLQRDLDRRKPGTSRHTTQRQEPDEVEILSGVFEGRTTGCAIGLLIRNTDQKSKDY

SEQ ID NO: 701 - DNA, 222 bp, Homo sapiens
  misc_feature (222)..(222): Wherein n may be a, c, g or t
acgcgtcctgcactgcagctgggggatcgtttctaaatccgagcagcacgtcactgctccttccagaatcattcctaccaggccttccatcgtttgatttctgccccctttcttttctaaccttgccccaaaccatgcctctcctcttccttctcatcctttttgctcccatccaccgtctggttctcagtgggggtcgggaaggcttctctccgatctgtn

SEQ ID NO: 702 - protein, 57 aa, Homo sapiens
MGAKRMRRKRRGMVWGKVRKERGQKSNDGRPGRNDSGRSSDVLLGFRNDPPAAVQDA

SEQ ID NO: 703 - DNA, 289 bp, Homo sapiens
gtgcaccatttcaactacgataagcaaggtgcagccatatgagacgaaaaggtgctagcataggcgagcagggcaaggacggatgcgagccggcgccgcgaacctcttggccaggattttgaagcggcgaaagtatctggctgagaatgtaacatacgacgtccataaagattagtgtatcgaaatcagttaacggaaagtatataatatcggagtggcattgataaggtcgtcagataggagcgaaagactaattactcaatgtaatcagaaccacgagggttgatca

SEQ ID NO: 704 - protein, 51 aa, Homo sapiens
MDVVCYILSQILSPLQNPGQEVRGAGSHPSLPCSPMLAPFRLIWLHLAYRS

SEQ ID NO: 705 - DNA, 175 bp, Homo sapiens
gtcgacggtgcagccaaaccggtttcggcggcagaccgacgcgccgacctggtgccgatcatcgccgtgacggtgttccacgccgcggtgggtctgatcttcggcgttactgcggcgaccgtcggaaccatcgtgctatcgctctcctcgaccgcccgcgccatgttcctcccga

SEQ ID NO: 706 - protein, 54 aa, Homo sapiens
MARAVEESDSTMVPTVAAVTPKIRPTAAWNTVTAMIGTRSARRSAAETGLAAPS

SEQ ID NO: 707 - DNA, 306 bp, Homo sapiens
gtcgacgtgactcagtcgagcaacgacttcctgcgtctgaagcaagaactggcaagcggtgcgctgaagcaagagaacggcaaagccaaagtgaaactgctgctggaaaacggcgcgcaatacgctcaggaaggcacgctggaattctctgacgtcaccgttgatgaaaccaccggttccatcaccattcgtgcggtgttccctaaccctaacgatacgctgttgccgggcatgttcgttcgcgcccgtctggacgaaggtgtgcgcagcgacgcattgctggtaccgcagcagggtgtgacgcgt

SEQ ID NO: 708 - protein, 102 aa, Homo sapiens
VDVTQSSNDFLRLKQELASGALKQENGKAKVKLLLENGAQYAQEGTLEFSDVTVDETTGSITIRAVFPNPNDTLLPGMFVRARLDEGVRSDALLVPQQGVTR

SEQ ID NO: 709 - DNA, 204 bp, Homo sapiens
ccggaggatatcagtacaaaaacaatgagattatctttgaaaaatatggggggagacgtgatagtttttggagccagtgattttcttttgaagaaaggtgaaaataaactaatattggagtgtagagatatcatgtacggtgaattttctctgctttgtttcgaaatcattgttgaggggattacttttgtaaaggagtttccg

SEQ ID NO: 710 - protein, 68 aa, Homo sapiens
PEDISTKTMRLSLKNMGGDVIVFGASDFLLKKGENKLILECRDIMYGEFSLLCFEIIVEGITFVKEFP

SEQ ID NO: 711 - DNA, 287 bp, Homo sapiens
gaattctagccagagctctgcctctacacactctttcgtgtggacattgccaagcttctttccccaaaagacagtcatctctttccaactagttgtgtgagtcttagctgggaaagaagagagaaatgtgttggtattatagggactacagttaccttatttcttttaggtacctttggggaggatgggtttatattaagtgtggcatttttaacccatttcttttttttcttttttttttgagatgtagtgtggctctgtcatccaatctggagtgcagtgttgcc

SEQ ID NO: 712 - protein, 54 aa, Homo sapiens [sequence omitted]

SEQ ID NO: 713 - DNA, 234 bp, Homo sapiens
caattggaaagttggagtggggaagaataggtttgtagggaatatcaagagtttcattttggacatatgatatccaagtagaaatatgtagtgaggagttgaatgtattagtctggagattagaagagatatctggactagatatacatatttgggagttattgacatatagatgaaatttaaagccattagattggatgagatgcccaaaggacagaatgtagataggcaccc

SEQ ID NO: 714 - protein, 63 aa, Homo sapiens
MALNFIYMSITPKYVYLVQISLLISRLIHSTPHYIFLLGYHMSKMKLLIFPTNLFFPTPTFQL

SEQ ID NO: 715 - DNA, 330 bp, Homo sapiens
  misc_feature (1)..(1): Wherein n may be a, c, g or t
  misc_feature (2)..(2): Wherein n may be a, c, g or t
  misc_feature (128)..(128): Wherein n may be a, c, g or t
  misc_feature (151)..(151): Wherein n may be a, c, g or t
  misc_feature (160)..(160): Wherein n may be a, c, g or t
nncgatcgtatctcgtcaggtgagacttgtgtatgcatcacaggcatctctgccgccgggtgctgtcgtcgccatgcgacaacatcggctctttggactggcgcctcacgacggtgagcgtgtccccntatctcattgtgcacggtgctcnccgcgtccnaagctgcaagaacttggctattgcccctctcggagctgagcacatactcgctccatatggagtactacgtacagcgtacgattctgccggtactcgatcgcattcttggtcttgttggggtgaatgtatacgcatggcatgatgctatgccacgcacgagcaacacgcgt

SEQ ID NO: 716 - protein, 71 aa, Homo sapiens
  misc_feature (4)..(4): Wherein Xaa may be any naturally occuring amino acid
  misc_feature (12)..(12): Wherein Xaa may be any naturally occuring amino acid
  misc_feature (15)..(15): Wherein Xaa may be any naturally occuring amino acid
ACPXISLCTVLXASXAARTWLLPLSELSTYSLHMEYYVQRTILPVLDRILGLVGVNVYAWHDAMPRTSNTR

SEQ ID NO: 717 - DNA, 444 bp, Homo sapiens
  misc_feature (1)..(1): Wherein n may be a, c, g or t
nctaataagggtagaaaacgcatattcgcgccctccactggatattgttctaatatgtctcccagagggtaaaaaaacataattgcttaaagaagtggaacaatgtatcttccatattcttgttaaataatagcagaccatagaggaggattcttctagataaaaatagactcaagtgttatttcttccaagtttcaagtatcttattcaaaaagttaaatagttccatttttggtttgttttgtctttaatctggaaaaccccatccgatttatggggaacatgcttgtaaatttgtgtgtaaaatgtaatgggtaattaaggataaaagctctaacaaaacaaaatctaaaaaaatagagttgcatagttgcaagacgcagaccaggaaagacctttgggcacaaagtgcaaggctgaagaaactcttcttggatctgatca

SEQ ID NO: 718 - protein, 50 aa, Homo sapiens
MQLYFFRFCFVRAFILNYPLHFTHKFTSMFPINRMGFSRLKTKQTKNGTI

SEQ ID NO: 719 - DNA, 195 bp, Homo sapiens
gacgcaatgacccagttctgtgaggctgaattctctgtcaagacccgaccccacctgtgctgcaaacagcgtggggaggagcgattctcttgcttccagaaggaagctcctcggcccgactacctgctccgaccctgccccatccaccagactggcatttcctcaggaacccaactgcctttccctccggggttg

SEQ ID NO: 720 - protein, 65 aa, Homo sapiens
DAMTQFCEAEFSVKTRPHLCCKQRGEERFSCFQKEAPRPDYLLRPCPIHQTGISSGTQLPFPPGL

SEQ ID NO: 721 - DNA, 269 bp, Homo sapiens
  misc_feature (269)..(269): Wherein n may be a, c, g or t
gaattctgtgttggcaaagaaaccctcaaaattaatgacactgtgctgtgttccctgactatcagcatcctgttctgaaagtcaagaaacttggcagaggaaggaatctgaatcacaactaacagtaatgaggtgtgataacacggccatcgagctctcactctggatttatcgtgggtcaaaccgcaactcccaaaacagctttggacagcaagcgcctccgaagtgtgcatgaccccagtttccacggggagtacgtgtaaaaagcn

SEQ ID NO: 722 - protein, 77 aa, Homo sapiens [sequence omitted]

SEQ ID NO: 723 - DNA, 160 bp, Homo sapiens
agatctcctggagttgaagttacagcttgtgagctgccatgtgggtgcagggaagcaaacccagatcctctgacagaacagcaagtgctcttaacctctgagacatctctgcagcccataaatacaatgtgtcttctaaagcctttccgctctgaccggt

SEQ ID NO: 724 - protein, 53 aa, Homo sapiens
RSPGVEVTACELPCGCREANPDPLTEQQVLLTSETSLQPINTMCLLKPFRSDR

SEQ ID NO: 725 - DNA, 243 bp, Homo sapiens
caattgcgtcactttttccacatgttctcggtgtttaaagacagcctcaagagcagcgccggccaactcagctcgttccaggcgctgatgctcagcctggcgggccgcgtgggggccggtaacatcgccggtgtcggcattgccgtgaccctgggtggcccgggtgccgtgttctggatgtgggtcaccgcactggtgggcatgtcttcgagctttatagaatgctccctcggccagttgtac

SEQ ID NO: 726 - protein, 81 aa, Homo sapiens
QLRHFFHMFSVFKDSLKSSAGQLSSFQALMLSLAGRVGAGNIAGVGIAVTLGGPGAVFWMWVTALVGMSSSFIECSLGQLY

SEQ ID NO: 727 - DNA, 269 bp, Homo sapiens
actagttatgttggtagaacaagatagacaaatgctgctgaaattagcaaatcagtattggaacacagtgatactcatttctcctcactgccctttccaattcattgacagttgccgcaagcagtatgaatgggttttttataggactctctttctctccttacctattccaatttgtattttcactttagttcccttgctctgatgttcaagactttaaaggatttgccactgcccaccacaccatgctttcctattttataggatcc

SEQ ID NO: 728 - protein, 65 aa, Homo sapiens
MLVEQDRQMLLKLANQYWNTVILISPHCPFQFIDSCRKQYEWVFYRTLFLSLPIPICIFTLVPLL

SEQ ID NO: 729 - DNA, 271 bp, Homo sapiens
ggatcccataattctgtatgtgttgctgatcccactacatatttatggaggaaagaagaaatctgaaaaatacaaagcaagacatgtcctcaaattcaaaacacttgactttggaatgttatccctcctatacactcatttcctctgtgctttgctgccaaacatttctcagtgcacggtccacgaatctgactgggtgttgaatgcaaaaagtcccagattcccacagatgactaatttttattaatagttaacaggacttccgactagt

SEQ ID NO: 730 - protein, 52 aa, Homo sapiens [sequence omitted]

SEQ ID NO: 731 - DNA, 654 bp, Homo sapiens
cgcgttgagataaacgagttaaagagacaagctgaaattgaaaaggctgcaataaaggaattggagaaaaatcctcaataccaaaaattagctgaagcattcaacagtcatgatcatgttcatttacgtgaatcagagaccgagcaaaacgacataatttcattgggcacgatacgagactacaaaagcagtaaatgtgagcaagctgataagccttcgtcgttgaatctgcattcgcatacacattctcatggacatacgcattctcatgctgctcacaatccattattagtacttagtactgagcaaattaggaaaaatgcaggcgtaagaatcacatgggtcggcttaggtgtaaacgttggtattgctataggtaaattttttggaggtatcgtatttcattcacaagcgttgtttgcggatgctatccacgcaataagtgacatggtttctgacttgttgactttgctttcggtagggctagcagccaacaagccaaccgctgattatctatatgggtatggcaaaattgaaactgttggttccttggcagtttcaacaatattagccatggctggtatatcaataggttggagttccctttgtgcactcgtagggcctgttatcccacatacaatcattgacaccata

SEQ ID NO: 732 - protein, 218 aa, Homo sapiens
RVEINELKRQAEIEKAAIKELEKNPQYQKLAEAFNSHDHVHLRESETEQNDIISLGTIRDYKSSKCEQADKPSSLNLHSHTHSHGHTHSHAAHNPLLVLSTEQIRKNAGVRITWVGLGVNVGIAIGKFFGGIVFHSQALFADAIHAISDMVSDLLTLLSVGLAANKPTADYLYGYGKIETVGSLAVSTILAMAGISIGWSSLCALVGPVIPHTIIDTI

SEQ ID NO: 733 - DNA, 261 bp, Homo sapiens
  misc_feature (64)..(64): Wherein n may be a, c, g or t
  misc_feature (65)..(65): Wherein n may be a, c, g or t
  misc_feature (106)..(106): Wherein n may be a, c, g or t
cgcgtgctggcggcccgtgctttcgcccacactgctgcctatgacgtcgcggtggccacctggnnttcggcagtcgtgacggggtggccgttgacggcgttcccancctttgtcggtacgaccggggagctgtcctgcccgttgcgctatggcgagaactcccaccaggccgcagccgtttaccgtagctccggcgagcccggcctggccggagcccgccaactccacggcaaggccatgagctacaacaactacgtcgac

SEQ ID NO: 734 - protein, 87 aa, Homo sapiens
  misc_feature (22)..(22): Wherein Xaa may be any naturally occuring amino acid
  misc_feature (36)..(36): Wherein Xaa may be any naturally occuring amino acid
RVLAARAFAHTAAYDVAVATWXSAVVTGWPLTAFPXFVGTTGELSCPLRYGENSHQAAAVYRSSGEPGLAGARQLHGKAMSYNNYVD

SEQ ID NO: 735 - DNA, 361 bp, Homo sapiens
cctaggatcaaaatcttatccagtccatagcctgcaattggctgctatttcctgagtctcttttgatagacaggttttcttgctgattctcttttctttgtatttttgttgttgttgttggagaaaccaggtcatttgtcatgtagagcttcacatgaggtgggttttgtcgattacgcccccttggaggtgtttatcatgtgcctctgtccccggtatttcctataaattgacagttacatctaggtgcctggtcagattctggttcagcttttacttttacttttttggcaagagcagttcaccaagggaggtgctaatgtccaactcgccttctgtgatgccagcagcttcctgatca

SEQ ID NO: 736 - protein, 67 aa, Homo sapiens
MRWVLSITPPWRCLSCASVPGISYKLTVTSRCLVRFWFSFYFYFFGKSSSPREVLMSNSPSVMPAAS

SEQ ID NO: 737 - DNA, 416 bp, Homo sapiens
  misc_feature (416)..(416): Wherein n may be a, c, g or t
gaattcacagtgttactcagagatatagaatcagcagactgatgaatggtctttttttttgtttcccccagggtatttttaaaagccagattattttcaatcctctactgtgggcaaatgggaacttttaccgagacagaaaaaaatagataagctacaagacatggaaggcaagacaaagaatcaaaatggaaacgtgaagttgaaggtgtctgactatgtaggaattgtgagtgaaaataaatttggaaaccaaatgagaggcaaaggatgaaattcagatttgtgaattattaatatatatgcagtaatgaaggtcctgagaacagtgttatttaggaagtgagtaaagtaaagaaagaaggctgctgcgaagaagcccatagagagcccagcatttgatggctccgggttcn

SEQ ID NO: 738 - protein, 55 aa, Homo sapiens
MGFFAAAFFLYFTHFLNNTVLRTFITAYILIIHKSEFHPLPLIWFPNLFSLTIPT

SEQ ID NO: 739 - DNA, 384 bp, Homo sapiens
gatcaggttcatttgcttattggtacagggtccacggactcagtaagcgtttgtaagaatagaatccactccattttgaatgctggtggtaatcccatagtagtgaatccctcgtcaccaagccatactaaacaattacaattggaatttggtaagtttgcaaagttcgaaatagtagaaagggagtttaggttatctgatttaactactttggggagagttctggtatgcaaggtagtggatagagtattcgtagatctacccataacacaaagtcgcctatgcgaggagatcttttggcaatgccaaaaactgagaattcccataaatacattccacaaaccagagttttctaccttcaatatgattcctacgtgggtcgac

SEQ ID NO: 740 - protein, 128 aa, Homo sapiens
DQVHLLIGTGSTDSVSVCKNRIHSILNAGGNPIVVNPSSPSHTKQLQLEFGKFAKFEIVEREFRLSDLTTLGRVLVCKVVDRVFVDLPITQSRLCEEIFWQCQKLRIPINTFHKPEFSTFNMIPTWVD

SEQ ID NO: 741 - DNA, 276 bp, Homo sapiens
acgcgtgcgttggtggttctggtcgcagcgtcgccgtgcgcgctagcaatctccgtgccgctgacggtcgtggccgcgatcggcgcggccagccagtttggcgtggtcatcaagtccggcgcggcgttcgagcggctcggcggcatccgtcacctggcggtggacaagaccggaaccctcactggcaaccagcccgaggttaccggcgtggtcccggcagacggattcgatcgggcgccagtgcttgccttcgcggcagcagttgagcagcagtcg

SEQ ID NO: 742 - protein, 92 aa, Homo sapiens
TRALVVLVAASPCALAISVPLTVVAAIGAASQFGVVIKSGAAFERLGGIRHLAVDKTGTLTGNQPEVTGVVPADGFDRAPVLAFAAAVEQQS

SEQ ID NO: 743 - DNA, 757 bp, Homo sapiens
gtaaacctattatacaacccaaaaaaaaaaaaaaagaaccccccgctcacccaccctgctcccgattataagtggggaaattgaaaggaaaacattttaaaaagaaaccataagccaaataccgccaagctcggtccgagttggatcccataataccgcccccagtgtgctgaaattcggcttagcccattccagcctttttccgcccgcgttgtcaatgacaataccgcaggatgcgaatgtgtgacttcgtaatcatcggtgtgaaaaatcctctaactttaaacaaaggtaacatctaaactgtctggaaatatgcagctattcccatgtatacacactagaaagaacaggtatttcccaggtcccagaagtttgatcactggctttctctgcatatgtagtcctacccgtaatttaccctttgaagagataatctgagcactcagatttcgaccctgatggggtcacttttctgaatcattgctgacattgcttctgaaaagtgttgcctgtgtctttattccacttatgagttggtaagcttcctcacaatttataatgggttccgatagctaaatcacgtttaacgaagatttcgccgcccctctaaatcggtggcaaaaataagaaagtaagtggtaatagtggcggtagagggtttatttggtagtgcagttgtaaagctttcaaacacattcgagcgtcgcatcatcaaattaacaaaagcataactcttcagcaatgacatcaattg

SEQ ID NO: 744 - protein, 54 aa, Homo sapiens
MSLLKSYAFVNLMMRRSNVFESFTTALPNKPSTATITTYFLIFATDLEGRRNLR

SEQ ID NO: 745 - DNA, 182 bp, Homo sapiens
accggtatcacaaaacattcacagaatttgcagggcagagtcgcctttaccagggacacatccgcgactactgcctacatggacgtgagcagactgacatttgaagacacggctgtctatttctgtgcgagagcccagaggccccacgtccctgggcggtcaatacaattatggggaagctt

SEQ ID NO: 746 - protein, 60 aa, Homo sapiens
TGITKHSQNLQGRVAFTRDTSATTAYMDVSRLTFEDTAVYFCARAQRPHVPGRSIQLWGS

SEQ ID NO: 747 - DNA, 265 bp, Homo sapiens
aagcttggaggttgagacctgtcaactctggaccctcatgcaagtgaaggtaaggcaaagaaggagtccactctgatggttggtgtgactaatcctgatatgaagggaaaaattagattgcttctgcacagtgatggtaaagatgagtatgtctggaatgcagggcacccagacatactgggtcacccccttacactccaatgccctataattaaaatcaacaaaaaactataataacccaaatcaggcgggactggtgatgggc

SEQ ID NO: 748 - protein, 72 aa, Homo sapiens
DLSTLDPHASEGKAKKESTLMVGVTNPDMKGKIRLLLHSDGKDEYVWNAGHPDILGHPLTLQCPIIKINKKL

SEQ ID NO: 749 - DNA, 267 bp, Homo sapiens
gtcgacagtaatggtcaaacagtcacagccgattccaccaataccgttgtcggtcctgctgttccttcttcttacactaaagactctactgttttgtccagcagtgctcaagcagttgaaacgagtgaaagccagtcttccatctcttcctctaaaaccacctcttctgctgctgctgcttcatcatcttcgtcatcatcttctaacactaacggtgactggtccagaggttcctactttgtcccaggctctactagcaactgtaca

SEQ ID NO: 750 - protein, 89 aa, Homo sapiens
VDSNGQTVTADSTNTVVGPAVPSSYTKDSTVLSSSAQAVETSESQSSISSSKTTSSAAAASSSSSSSSNTNGDWSRGSYFVPGSTSNCT

SEQ ID NO: 751 - DNA, 249 bp, Homo sapiens
gccaagaaggtccccgagctgcttccactagcgcataccatcggcgtgcacggctgcgctgtggagctcacgcttgacgacgaccacgtattcatctccgccaccgtccgcaccgccgaccgcactggcgtggagatggaagcgcttacggccgtgaatgtttccgcgctcgccatcatcgacatggtcaagggcgtggaccgctccgcctatatccgccgttgcggtatcgtggcgaaatccggcggc

SEQ ID NO: 752 - protein, 83 aa, Homo sapiens
AKKVPELLPLAHTIGVHGCAVELTLDDDHVFISATVRTADRTGVEMEALTAVNVSALAIIDMVKGVDRSAYIRRCGIVAKSGG

SEQ ID NO: 753 - DNA, 368 bp, Homo sapiens
gcgcgccaggggagagagttttcagaggtaaagattgccaagtagtatacacagatagaaatgacccaatcctgggggaggaatgggggtgaaatagacaaggaaattcatgactaactctgctataaaactactgaggttgcaattacacaggtaaatcctccggaagaaagtggaatttttcttgtgataaacatctcactcaaaggccccttgccatgcttaccaaccttgacttactggtaatatgttcctctgagcctaacctgaattttttcattcctcaattcagtttgctcctaattctctccttaggagtgagaacagctgttactctgcactggaaaataagtcccacgtcccttgcc

SEQ ID NO: 754 - protein, 50 aa, Homo sapiens
MLTNLDLLVICSSEPNLNFFIPQFSLLLILSLGVRTAVTLHWKISPTSLA

SEQ ID NO: 755 - DNA, 256 bp, Homo sapiens
acgcgtgaagggtaaaaacctggtctacagcttatcttggctaataagctaaacacaccatgttaatgagagaagctaacattgtcaaatgtcattttgttttgctacttcctgcagaagaatactgtttgtttatcatatgtcaaatagcttaatagagatactaacttacatctttaaaatcccccacaactatcttgtgactagttttattcccttccaccttataaaaccaagcctccatgcaatgaatggg

SEQ ID NO: 756 - protein, 56 aa, Homo sapiens [sequence omitted]

SEQ ID NO: 757 - DNA, 328 bp, Homo sapiens
  misc_feature (1)..(1): Wherein n may be a, c, g or t
  misc_feature (328)..(328): Wherein n may be a, c, g or t
ncgggaaactgaactgcataggtgatgaatatgaatgaccttctcatggggttattggataatgctaatacaatctgacattttgtagttgttgatgggtggtctccattttacccagacggaaaaggctctgctttgcaacctggtgatagacaagagaacagacacctaaacacacagatgaaaataattggagagatgcatcatgaaacatccccatttatatttacaggaagagcttactgtgaaactgtctcaaatggctccagttggaatgtccattttgaggaacaaagagcactctaaattctctttcttgagaaagatn

SEQ ID NO: 758 - protein, 51 aa, Homo sapiens [sequence omitted]

SEQ ID NO: 759 - DNA, 204 bp, Homo sapiens
ctaggaaccatatacggcggtgtttgcgtttgttggtcaattctatgccttttatgcacattgcatgagtattctaaaaagatgctgcatgctgcccgtaaatcttcattattttcagagtcaggtacggaaaagacgacagtttctccgtataacagcattgaaagcgtggaagaatcaaactcggctctagattttacgcgt

SEQ ID NO: 760 - protein, 68 aa, Homo sapiens
LGTIYGGVCVCWSILCLLCTLHEYSKKMLHAARKSSLFSESGTEKTTVSPYNSIESVEESNSALDFTR

SEQ ID NO: 761 - DNA, 361 bp, Homo sapiens
  misc_feature (37)..(37): Wherein n may be a, c, g or t
tgtacattctcctcacatccacatgggacattttcanggatagaccatatgctaagacaaaaatcaagcctcaatagattaacaaagacagagataatacaacctgtcttctccagccacaatggaatgaagttaaaaataaataacaagaagaaactgacattctcaaaaaagttgtaaaaattaaacaacatacttttaaacaaccaatggataaaataagcaaacacaatggaaatttaaaaatacttagatatgaataaaaacgaaatcgcacatcaaaatttggggaacacagtgagtatagtgttaaagagtaaatacatactttcaaatgcttatattagaagtaagtagatct

SEQ ID NO: 762 - protein, 59 aa, Homo sapiens
  misc_feature (13)..(13): Wherein Xaa may be any naturally occuring amino acid
CTFSSHPHGTFSXIDHMLRQKSSLNRLTKTEIIQPVFSSHNGMKLKINNKKKLTFSKKL

SEQ ID NO: 763 - DNA, 425 bp, Homo sapiens
aagcttagggctgggggagtactgggaagtgcccaaggacataaggtgaatcattaaaccgcaagatatcctccttaggcaatgaggcaacagtcttccggggacatgttctttctttgaaaaggtcaggaatctgctcagggcagggctctagctttgcccagtctgacagtccgatcccggtccccaatagtcttagattaatgggttgttctgaaggtggagcactcaagggtatagggattcctgtccccaggagaagtagaaaggtggataagtttcgcttcaagaaagtgagtcctgagctaagatggaaggccaggtaggacatgatgggaaggagcagagaagaaagttttctgaaatgtactctctcagtcattaagtatggaagataacgttgcttgcaatgtaaaacttctaga

SEQ ID NO: 764 - protein, 125 aa, Homo sapiens
MTERVHFRKLSSLLLPIMSYLAFHLSSGLTFLKRNLSTFLLLLGTGIPIPLSAPPSEQPINLRLLGTGIGLSDWAKLEPCPEQIPDLFKERTCPRKTVASLPKEDILRFNDSPYVLGHFPVLPQP

SEQ ID NO: 765 - DNA, 495 bp, Homo sapiens
  misc_feature (1)..(1): Wherein n may be a, c, g or t
  misc_feature (2)..(2): Wherein n may be a, c, g or t
nncaattgggacggcatgacgccaatcgaagagaccctggaagccctgcgcctgttggtgggttcgggcaagatccgctacttcggcaccagcaatttcaccgcctggcagatgatgaaaaccctgggcaaggccgaactgcacgggatgctcaagccgattacccaacagatgtactacaccccggaatcccgcgaggccgagtacgagttgctgccccggccaatgggttcaccaaatggcacgctggtatgggggccgatgggcgaaggcctgctgaccggcaccacccgacgcgggcacaagccgccggccaatacccgccagggcagcggctggccggaaccctatgtccacgaccaggaacgtgcgctggacattatcgaaaccctcgccgccgtcggcgatgaacacagcgtctcggtcgcccgcacctgcctggcctggctcaaggatcgcccggggatcacctcgctgattgtcggcgcccgtacg

SEQ ID NO: 766 - protein, 165 aa, Homo sapiens
  misc_feature (1)..(1): Wherein Xaa may be any naturally occuring amino acid
XNWDGMTPIEETLEALRLLVGSGKIRYFGTSNFTAWQMMKTLGKAELHGMLKPITQQMYYTPESREAEYELLPRPMGSPNGTLVWGPMGEGLLTGTTRRGHKPPANTRQGSGWPEPYVHDQERALDIIETLAAVGDEHSVSVARTCLAWLKDRPGITSLIVGART

SEQ ID NO: 767 - DNA, 306 bp, Homo sapiens
  misc_feature (1)..(1): Wherein n may be a, c, g or t
ncagctgcttatgcagcatttattcagcctaatgagttcacaccgatcctttgtaagactatcgaagcagatttaaccgcggatgatttctcacgtttatctgaagaggacttcgaaatttttgcaggagaggaaggtgttctggtggttgacgtcctggaagaaagcatgaataagaaactttccaataaaaattctaaagagtacgaaactctaatgtgggaacaaaaaataaggaaggagcaagccaaaaagaatgtgaaaaaactttcaaaagaggaacaagagctcgttaatgaacagtta

SEQ ID NO: 768 - protein, 102 aa, Homo sapiens
  misc_feature (1)..(1): Wherein Xaa may be any naturally occuring amino acid
XAAYAAFIQPNEFTPILCKTIEADLTADDFSRLSEEDFEIFAGEEGVLVVDVLEESMNKKLSNKNSKEYETLMWEQKIRKEQAKKNVKKLSKEEQELVNEQL

SEQ ID NO: 769 - DNA, 195 bp, Homo sapiens
agatctcgggcacgccgcatgaaagaagccaaaaggaaaggccgtcattcaggatatggtaagcgtaagggtacccgggaggcaaggctgccaactaagattctatggatgagaaggatgagggtgttgaggcgtttgcttcgcaagtaccgtgaagccaagaagattgacaaacatatgtaccatgatatgtac

SEQ ID NO: 770 - protein, 65 aa, Homo sapiens
RSRARRMKEAKRKGRHSGYGKRKGTREARLPTKILWMRRMRVLRRLLRKYREAKKIDKHMYHDMY

SEQ ID NO: 771 - DNA, 422 bp, Homo sapiens
gctagcagcgcaggataccgtgcctgaaaatgggctggagaacaagagaagtgtgtcctgccacctttcccggggccacaccctcaaaccagccaccctactccagtggcacttctgctcccaataagagttgggagctaagtgatgaatcccccagaacctcaatgtcctcagtgtcggaaacacaaaagcacgtctacctccttctgtctccaaaagggatcacaaccctgaccaagcatgaaagggggctctgaaacattccaggccaaacaacatttaggtaaataagtcctgagcaagggcaaaccattcctacggccacgtagtaagagtcagcctgtctctgttggggcaggtacacaagcccttggtcttgtagcctttgcaaagcgaggtcgtgagatctggactctgtgcac

SEQ ID NO: 772 - protein, 75 aa, Homo sapiens [sequence omitted]

SEQ ID NO: 773 - DNA, 260 bp, Homo sapiens
acgcgtgaagggtagaggtctgtctggtcattcactgctgtctgccctcagtgcctggctacatgcctcacaaatacttgctgaacgaagagactccagccccatcccatgtctgagatggctgaggcatggtggcgctcgagatgggcagtggacaggatgattctgcaggtcccctcgcaatgtagattccaccattcaacccctgggcccaattctgggcaggcactttctcaggctcgaggcctgaagctgtcgga

SEQ ID NO: 774 - protein, 56 aa, Homo sapiens
MVESTLRGDLQNHPVHCPSRAPPCLSHLRHGMGLESLRSASICEACSQALRADSSE

SEQ ID NO: 775 - DNA, 561 bp, Homo sapiens
gcgtcaaagataaatagagctgaaggtccagaggaattggcaagaatactacagcagctgaaactggacaagattattcatgttttaaccaccatgtttgaaaacacgggatggtcatgcagcaggattattaagattgataaaccaatcaggactcaagtgaatactggcggcgaaagcgttgttaaaaaagaagataataaatatgctattgctggtaacagcactactaatagtgatgtttccttgttattacaaagggacctatttatcagactaccacattggccgctcaactggtatttgattttatcgataatatcctctaaaacatcatgtgtggtggaaaaaagaatcggtaaaattgtctctcaacgtgggaaatggaatctcaaatatttagacaattccaacgtgatgactgtcaaattggagtcaataacatatcaaaaaattatgatattgcaaagaactattttaaacagaattataaaccatatgttgatcgattctttgaaccaactagaaattcgcaataagatttgttcttctgaaatgatc

SEQ ID NO: 776 - protein, 187 aa, Homo sapiens
ASKINRAEGPEELARILQQLKLDKIIHVLTTMFENTGWSCSRIIKIDKPIRTQVNTGGESVVKKEDNKYAIAGNSTTNSDVSLLLQRDLFIRLPHWPLNWYLILSIISSKTSCVVEKRIGKIVSQRGKWNLKYLDNSNVMTVKLESITYQKIMILQRTILNRIINHMLIDSLNQLEIRNKICSSEMI

SEQ ID NO: 777 - DNA, 1141 bp, Homo sapiens
  misc_feature (1)..(1): Wherein n may be a, c, g or t
  misc_feature (2)..(2): Wherein n may be a, c, g or t
nntcatgatggcggcctggtgtgtgggtatgtccacgatgggcgcgtcacgcgtgtcgcccgtgatgctcaggggcgggttaccgggatagaggggccatcagggcgttggagttacggctacaacgaggctgggtcactcatcagcgcgacggggccccgcacacaacataactggactcacgacgcctatggccggctcaccagccacgccacatccggaaccgacaccaccttcgcctgggaccaggaaggccacctggcgcagacgtgtacgcgtgcacacgggcatgccactgccacccagtatcgctatgacgcagcgggacggcgcgtcagtgcgaccagctcagacggccaggaggagcgttactcctgggatggacggggttggctgtctgacatcaccaccgacgccacgaccgtatcgactcacgtcgatgcattggggcgcgccagtcgtatcaccactaagggccagcaggtacgagtggactgggacctcgtgaccggagcccccacctcgattgatggtcgtcctgtgcttcccctgcccggaggacgcatcctcggcgccacacccatcggcgataccaacctatggcgtgaggtcatgcccaccgaccctgacaacccttaccagcccgccacggccactattgagggtgtccccgagacgatcaggatggccgggaacacgctagtggttgatggtcacccttggtgggggcgcgcctctacgacccaactaccaccaccttcttgtctcctgacccgttaaccccgcccgccggcgcgctatgggccaacaacccctacgactacgccaacaacaaccccctcaccctcaccgatcctctcgggacccaccccgtcaccgacgaccaactggcactcctcacccaccccatcggcacactcgcacactacgtcgccaactccgtcagcacactcgtgcatcacatcaccgatccgatcagccactggtgggccacccacaaagaccggatcctctcccgggacttcctgatcggtgccggcctcgtcatcggcggtatcgcgtagcggccacgggcgtaggaggacccctcctagccgcggccatttccgggggactcatctcaggcggcttttccgctagc

SEQ ID NO: 778 - protein, 259 aa, Homo sapiens
  misc_feature (1)..(1): Wherein Xaa may be any naturally occuring amino acid
XHDGGLVCGYVHDGRVTRVARDAQGRVTGIEGPSGRWSYGYNEAGSLISATGPRTQHNWTHDAYGRLTSHATSGTDTTFAWDQEGHLAQTCTRAHGHATATQYRYDAAGRRVSATSSDGQEERYSWDGRGWLSDITTDATTVSTHVDALGRASRITTKGQQVRVDWDLVTGAPTSIDGRPVLPLPGGRILGATPIGDTNLWREVMPTDPDNPYQPATATIEGVPETIRMAGNTLVVDGHPWWGRASTTQLPPPSCLLTR

SEQ ID NO: 779 - DNA, 357 bp, Homo sapiens
  misc_feature (1)..(1): Wherein n may be a, c, g or t
  misc_feature (2)..(2): Wherein n may be a, c, g or t
  misc_feature (266)..(266): Wherein n may be a, c, g or t
nngctagcacatgagaagtgtgaagtttatactttgcttgggcgatcacgccgttttccaaatatggctcatgcaacttctggccaaaggggtcacattgagcgtgctgctatcaatgctcctgtacagggcagtgcagctgatgttgctatgtgtgcaatgcttgagatagacaggaatactcgtcttaaggagcttggttggacgctactcttgcaggtgcatgatgaagtgatactggaagggccttcagagtctgcggagtnggccaagtccatagttgttgagtgcatgtctaagcccttctatggcaccaatatcctgagggtcgaccttgctgttgatgccaagtgtgca

SEQ ID NO: 780 - protein, 119 aa, Homo sapiens
  misc_feature (1)..(1): Wherein Xaa may be any naturally occuring amino acid
  misc_feature (89)..(89): Wherein Xaa may be any naturally occuring amino acid
XLAHEKCEVYTLLGRSRRFPNMAHATSGQRGHIERAAINAPVQGSAADVAMCAMLEIDRNTRLKELGWTLLLQVHDEVILEGPSESAEXAKSIVVECMSKPFYGTNILRVDLAVDAKCA

SEQ ID NO: 781 - DNA, 288 bp, Homo sapiens
catgagttggagctgtacggacattacaaggccaaaatttctcctaaagtcatcgaaaggctgcagacgcgccaaaatggtaagtacatcttggtgtctggtatcacaccaacaccactgggagagggtaaatccactacaacaatgggtcttgtccaggcactaacggctcacttgggcaagccagccattgcgaacgtcagacaaccctccctaggacccactttaggtgtcaaaggtggtgctgcgggtggtggttattcccaagtcatcccaatggacgaattc

SEQ ID NO: 782 - protein, 96 aa, Homo sapiens
HELELYGHYKAKISPKVIERLQTRQNGKYILVSGITPTPLGEGKSTTTMGLVQALTAHLGKPAIANVRQPSLGPTLGVKGGAAGGGYSQVIPMDEF

SEQ ID NO: 783 - DNA, 405 bp, Homo sapiens
  misc_feature (405)..(405): Wherein n may be a, c, g or t
tccggagttctaccaaatccagtgttctccttctgctacatgctcccgggatatataaattcattctcacggtttcaactaccacctgtgagctggcgactcacagtcctaatatctcaggcttatatcctttctacaagcatcagagttctatctctcagactgtcagacatttacacatggagatgtcaccaggacctcaactcgacctcttccatacctcatttatcaccttccagctactcagcccttcaggaaggacctctaataaacactgctgcattaaaggatggacctgctgcaactcctcctgaattatcagtcccagctgcaaataactactatcatcttgttttgtagttaccagccctgggaatcattccttcataccctagtcccacagan

SEQ ID NO: 784 - protein, 106 aa, Homo sapiens
MLPGYINSFSRFQLPPVSWRLTVLISQAYILSTSIRVLSLRLSDIYTWRCHQDLNSTSSIPHLSPSSYSALQEGPLINTAALKDGPAATPPELSVPAANNYYHLVL

SEQ ID NO: 785 - DNA, 336 bp, Homo sapiens
gcatacttctcttgtacctctgctcacacatgtacgggtgacggtaatgccatggtttcgcgtgctggtttccccttgcaagatttagagtttgttcaattccatccttcaggtatatatgggtctggttgcttaatcactgaaggtgctcgtggtgaaggtggttttttggttaattctgaaggtgaaagattcatggaacgttacgctcctacggccaaggatctagcttgtagagatgtcgtttccagagcaatcaccatggagatcagagaaggcagaggtgttggtaagaaaaaggaccacatgtacttacaattgagccatctacctccc

SEQ ID NO: 786 - protein, 112 aa, Homo sapiens
AYFSCTSAHTCTGDGNAMVSRAGFPLQDLEFVQFHPSGIYGSGCLITEGARGEGGFLVNSEGERFMERYAPTAKDLACRDVVSRAITMEIREGRGVGKKKDHMYLQLSHLPP

SEQ ID NO: 787 - DNA, 278 bp, Homo sapiens
cgcgtgccgcaggccgagatagaactgatcgtcgacgcaaacgacactttgttggcgggacttcgcgagggagaatttgatctcgtgatatcaacagtagaggtcagtgaggagctttatcgcatagacccactctatcaagaggcctatcgtgtggttgtggcgaaaggtcatcccctgtctgagttgccggccgtatcgcttgctgatttggcagatacaaccatgttggatcgcccaaattgtgaaatgcgagaggcattgcatggggcgtgcac

SEQ ID NO: 788 - protein, 92 aa, Homo sapiens
RVPQAEIELIVDANDTLLAGLREGEFDLVISTVEVSEELYRIDPLYQEAYRVVVAKGHPLSELPAVSLADLADTTMLDRPNCEMREALHGAC

SEQ ID NO: 789 - DNA, 265 bp, Homo sapiens
  misc_feature (1)..(1): Wherein n may be a, c, g or t
ncgtgaagtgcctgctcccactttaccttccaccatgagaagttccctgaggcctccccaaaagccgaggagatgcaggtgctatgcttgtacagcctgcagaaccacgagccaattaaactccttctttttttttttttttttttttttttaaaaaagggccccttttttcccccgggggggggggccaaaaaagggggggaacacccaaccggcccccccccccctaaaccccttatttggggggtttttccaccgggggaaa

SEQ ID NO: 790 - protein, 64 aa, Homo sapiens
MQVLCLYSLQNHEPIKLLLFFFFFFFLKKGPFFPPGGGAKKGGEHPTGPPPPKPLIWGVFPPGE

SEQ ID NO: 791 - DNA, 366 bp, Homo sapiens
  misc_feature (305)..(305): Wherein n may be a, c, g or t
gggcccagcaggtggcccaggatggaacccctctggaattgcctgggcggggccgcgtcagctgcagctgcaggtaatcatgcatgggaccccacaggagtggctgtccatgacacccatgtggagataggtctttggcctaagggaggagtgaagccccagggtaccacgtgacaggagggaagataatgttttcctgctaaatgggcaggccagatctcattgttcgaaggatttgactataactgttcttatgatcaattaaaagggagaggcaggtcacagtattttaggataaactaatntttaccttattctggggatcaagtgactatcatagctttaaatacaacacataaagtgttt

SEQ ID NO: 792 - protein, 50 aa, Homo sapiens [sequence omitted]

SEQ ID NO: 793 - DNA, 314 bp, Homo sapiens
caattgtgtaattctgtataccgtagtgcacagtacgctgtgcgcaactcttgcctaaaaaatctagttatcaagcggggtgaatatgctacaatgcctcttttacgttggactctattaaaggaaagaaaagcaggggcacatattgattgatacgacttttcgccgcgcggtaggcgaaaagcaaagaaaactacagtaatatccagaaatagatgcattttatgtgcgaaataaaactcatgctgaaaaaaatagtaataattaatagggtaacgaatagaatgcaaaccttatcacgtgaaagagagaac

SEQ ID NO: 794 - protein, 73 aa, Homo sapiens
MHLFLDITVVFFAFRLPRGEKSYQSICAPAFLSFNRVQRKRGIVAYSPRLITRFFRQELRTAYCALRYTELHN

SEQ ID NO: 795 - DNA, 255 bp, Homo sapiens
  misc_feature (1)..(1): Wherein n may be a, c, g or t
ngtgcacttagaggccgtctttacgacagcaacaaaaatttagtaatggcaaccttgtccaccattggtggtcttgcatctgctatgggaccttctgttgaaaagtcaagcaagggtattttggcagatgtgctgaagtgtcttggtgacaataagaagcacatgcgagaatgcacattgactgctctagattcgtgggttgctgcagcccaacttgaaaagatggttccatatattatagtgtctttgggtgat

SEQ ID NO: 796 - protein, 85 aa, Homo sapiens
  misc_feature (1)..(1): Wherein Xaa may be any naturally occuring amino acid
XALRGRLYDSNKNLVMATLSTIGGLASAMGPSVEKSSKGILADVLKCLGDNKKHMRECTLTALDSWVAAAQLEKMVPYIIVSLGD

SEQ ID NO: 797 - DNA, 284 bp, Homo sapiens
  misc_feature (274)..(274): Wherein n may be a, c, g or t
  misc_feature (279)..(279): Wherein n may be a, c, g or t
  misc_feature (280)..(280): Wherein n may be a, c, g or t
  misc_feature (284)..(284): Wherein n may be a, c, g or t
ggatccatccattcacccctcacccactcaccctgtggagcataaaacctttgcagtcagccagcatggcagaatgtctatgccttgcttcagtttccagggtaactaagcatgttttaatcccactgccccacccactattgctcattctgtctagtcttctgctacccagcttgtgtggctccgttcctgtcacgccttcagacgtcactggtctgtgacagcggtctctttcccctctgctccacccattctgagctctgggatacccccnccccnncccn

SEQ ID NO: 798 - protein, 51 aa, Homo sapiens
MAECLCLASVSRVTKHVLIPLPHPLLLILSSLLLPSLCGSVPVTPSDVTGL

SEQ ID NO: 799 - DNA, 384 bp, Homo sapiens
  misc_feature (28)..(28): Wherein n may be a, c, g or t
gtgatcccgggcggggtcaactcgccgntgcgggccttcagttcggtcgccggcaccccacgcttcatcacctcggccaatggctactggctgaccgacgccgacggcaatcgctacgtcgacctggtgtgctcctgggggccgatgatcctgggccatgcccacccggcagtggtcaaggcggtgcagaccacggccgtccacggtttgtcgttcggagcgccgacgcccgccgagaccgagttggcgcgcgagatcatcgatcgcgtcgctgccggggcgagcgaagcgacgggaaagggtcccgtcgagcgcatccgcttcgtgaactccggcaccgaagcccccatgagcgccatccggctggctcgcggcttcaccggt

SEQ ID NO: 800 - protein, 128 aa, Homo sapiens
  misc_feature (10)..(10): Wherein Xaa may be any naturally occuring amino acid
VIPGGVNSPXRAFSSVAGTPRFITSANGYWLTDADGNRYVDLVCSWGPMILGHAHPAVVKAVQTTAVHGLSFGAPTPAETELAREIIDRVAAGASEATGKGPVERIRFVNSGTEAPMSAIRLARGFTG

SEQ ID NO: 801 - DNA, 354 bp, Homo sapiens
acgcgtattcaaacgagggcttctacgatgacatggaagctgcggggcacacaccacacccagagacccatctgcgccaagtatttcctcatctaagcctctacgagaaccagacccctttctgggtgacacagccacacccacacgccaccgtaattcctgatagaactctgggaaggagcagaaaggatcctggcagttcgcagagcccaggacagtgcggggacaacaccggggcaggaagtggaaatgatggtgcagtctattccattctccagagacatccacatgccggtaaccgggaactaatgtcagcagcgcaggaccacatccataggaatgatattctcgggg

SEQ ID NO: 802 - protein, 107 aa, Homo sapiens
MEAAGHTPHPETHLRQVFPHLSLYENQTPFWVTQPHPHATVIPDRTLGRSRKDPGSSQSPGQCGDNTGAGSGNDGAVYSILQRHPHAGNRELMSAAQDHIHRNDILG

SEQ ID NO: 803 - DNA, 303 bp, Homo sapiens
  misc_feature (1)..(1): Wherein n may be a, c, g or t
ngtcgacgactaccgcaaggttgtaggccggcgtgccgtcattagttctggcaggccttcggtccggaggtgcccacctacgcccaggagcagggcaaggacgagttcttcatgttcggcgaggtcttcgacaccaccaagtccttcacctcgcagttcaccacgcgcaacaggatgcagtccgtcctcgacttccccttccaggcggcggcgcgtggctacgcatcgcagggcgccccggcctcggacctcgagaccttcttcgcgggtgacgactggtacaccgacgccgactccaacgct

SEQ ID NO: 804 - protein, 86 aa, Homo sapiens
FWQAFGPEVPTYAQEQGKDEFFMFGEVFDTTKSFTSQFTTRNRMQSVLDFPFQAAARGYASQGAPASDLETFFAGDDWYTDADSNA

SEQ ID NO: 805 - DNA, 332 bp, Homo sapiens
tctagagccaacttggttatcgtaatgaatagagagactacatctatatcaattattacgctctatagtaatcatgaagcttgggttatatgtatgacaaaaattgcagaaaaatcgaaacaagaatatggcgacttactaaaagaaaaagaccatttacaagatatggaacagcttgagatgactatcgtctcgatccatacgccgtatccgtccattgtcagaattcaaggaaaaatcaacacattacagccagagctttggcaagctcccaatttagcaattcggttaattgtgagcaatccgccagagggacaacccatctcacgcgt

SEQ ID NO: 806 - protein, 102 aa, Homo sapiens
MNRETTSISIITLYSNHEAWVICMTKIAEKSKQEYGDLLKEKDHLQDMEQLEMTIVSIHTPYPSIVRIQGKINTLQPELWQAPNLAIRLIVSNPPEGQPISR

SEQ ID NO: 807 - DNA, 301 bp, Homo sapiens
gctagcaacataggccaaaacaaatggttgaattcaagtcctgttgtgtaatgagaaagtttaattaaggccccacattacagctgtaaatgttcctttatataataaggtctaaatgaaaccgaacctaatcaaagttacaattccctcattagcaaattacaaacaagagcgcacagctgacacaccggctatgattatcacaactaattgcctcgttgttacaaaccagcctgaaacagtgttcagatgtccgtctgtgagagcaaattagggccacgtcgggctgttcctgtgatca

SEQ ID NO: 808 - protein, 52 aa, Homo sapiens [sequence omitted]

SEQ ID NO: 809 - DNA, 255 bp, Homo sapiens
  misc_feature (193)..(193): Wherein n may be a, c, g or t
ggccatgaagccgtaaaaaagggtatcttgcttcagatgctcggtggtgttcataagagtactgtagaaggtattaagttaagaggagatatcaacatctgtgttgttggtgatccctctacttctaagtctcaatttttaaaatacgtagtgggatttgcaccaagatcagtttacacttccggtaaggctncgtcggctgctggtttcacagctgcggttgtgagaggtgaggaaggaggtgattatacaatt

SEQ ID NO: 810 - protein, 85 aa, Homo sapiens
  misc_feature (65)..(65): Wherein Xaa may be any naturally occuring amino acid
GHEAVKKGILLQMLGGVHKSTVEGIKLRGDINICVVGDPSTSKSQFLKYVVGFAPRSVYTSGKAXSAAGFTAAVVRGEEGGDYTI

SEQ ID NO: 811 - DNA, 329 bp, Homo sapiens
ctcgagccatcacagcatcatcgagcaattcatcaattccgttgtgcggggctttggctggcgcattggcagcgatgccgctcacctcatcccctccggcctcttggtggtcatcatcctggccatcggcgtctacgtcggctacaggatgctgcgcagccgcagctgacgaacggggctcttacctgtcaggcaaggcctcaggcgtacagcgacgccagccaccggcgacagccgcgagagtcgccaccggcacagcggtctcggtattgtcggcaacccactgcgccaacagatttgggtcagctccggcagtcatgaagacccgc

SEQ ID NO: 812 - protein, 85 aa, Homo sapiens
MPLTSSPPASWWSSSWPSASTSATGCCAAAADERGSYLSGKASGVQRRQPPATAARVATGTAVSVLSATHCANRFGSAPAVMKTR

SEQ ID NO: 813 - DNA, 628 bp, Homo sapiens
cttgcatccatggcccctgaacagaaaacaccatgggatgcacatggcttatgggcattctggtgtgagtggctccgtggttctcatttcagaacagaaggaggaggactggctgtcacaaggttgtgttgacatggtgtgatttgactctccagcacaccaggacagggttctttctcccttaaattggcttcatcaaacagaagtgggtggtgggataagtcttaagactttggggattatttcctcctaacacctagtttgagaagggtaaccttacttaaggagactggtttaataaattacagtattctcacaggtgggccatgtggaccagtaagaaaccatcttttgatttatgatatagtttgagccaaaacacacttattagctgagttctgaacattagtacattggattctattttctctagtaaacaaaaccacaccagtatactgatgtaaaatcccagcactgaagctgacattgtcattacttttctccccactcttagctttgtattaggtaattgcatacataatagtaggaagtagcctctatgggactaggaaagtctgcctagagacaggaatctctgggcctgagccttgcaggatggataggataa

SEQ ID NO: 814 - protein, 73 aa, Homo sapiens
MQLPNTKLRVGRKVMTMSASVLGFYISILVWFCLLEKIESNVLMFRTQLISVFWLKLYHKSKDGFLLVHMAHL

SEQ ID NO: 815 - DNA, 389 bp, Homo sapiens
  misc_feature (1)..(1): Wherein n may be a, c, g or t
  misc_feature (335)..(335): Wherein n may be a, c, g or t
ncgccattgcatcgaccgacgagttgaccaacagtcatcgctgacggcagcgaattgctctttccaagacagcgaatcgtcattctaggcacggcgtttcgctgattcagcggtagcaaactactaatgacttagtatgcagttattacagcgcaacatcaccgcttgggtgcaagagctacgcccacagactggtccagcgagatgcctctgacatggcacagacccgaatccccatccttggcaagttactccaactgctggcggctgtcccccggggccgagctggtacaggacaggcttgcgcacaaactcgacgtggcacgcgggaccgnggttcgctatttcgatctcttagaatccttgttccttatccaccgtttgccggc

SEQ ID NO: 816 - protein, 61 aa, Homo sapiens
  misc_feature (44)..(44): Wherein Xaa may be any naturally occuring amino acid
MPLTWHRPESPSLASYSNCWRLSPGAELVQDRLAHKLDVARGTXVRYFDLLESLFLIHRLP

SEQ ID NO: 817 - DNA, 303 bp, Homo sapiens
  misc_feature (303)..(303): Wherein n may be a, c, g or t
actagttaggcacatttgaagaaacatgtatagaatatgttttgtatttgctgttcagtaagtagaactatttgatagtgaaatagatatatgtacttttctgtccctttgcatgcaaatgcagggaacattttcctatccgtacccattattggaattatgaaaaggcagagcatatgagtacagttgttccttggtatcactggaggatggttccaggcctcctgcagatattgaaatccaaggacgctcaagtaccttataccgtataaaatggtgtcgtatttccatatcatctgtgcn

SEQ ID NO: 818 - protein, 96 aa, Homo sapiens [sequence omitted]

SEQ ID NO: 819 - DNA, 315 bp, Homo sapiens
cagctgacccaggccatccagaaagccagggagtatggtcttctcagttactacgttccccaggttgagccccgagatgctgaccttcgcactgtacatggagctgtcagtgtgactccaccagcccccccgttgttgtcgggtgaaccttggtacccggggtacagctggcaacagccaccagaaagagagctctctcgccttcgccggctctatcaaggaaatctcctggaagcaagtggccccccacctgagtcaatgcctgagataccctctacagcaccagcagaagcctccactgagcagaccggatcc

SEQ ID NO: 820 - protein, 105 aa, Homo sapiens
QLTQAIQKAREYGLLSYYVPQVEPRDADLRTVHGAVSVTPPAPPLLSGEPWYPGYSWQQPPERELSRLRRLYQGNLLEASGPPPESMPEIPSTAPAEASTEQTGS

SEQ ID NO: 821 - DNA, 256 bp, Homo sapiens
agatcttttcaaggagatgcattgtagcaaaaagaaaggttttagtgaaaatgttcagaaagctattgttgacatggaagaaatggtagcagcaccagttcaggatggacaacaaccaaaatctcctacagaaagtggttcttaatgggctaccgggcttcagggtgttcctacgcaatgttggtcttcagtccgcctccaagaaaagctccacaacgactgtttctgcaaaggttcaacaactttcccccccccc

SEQ ID NO: 822 - protein, 50 aa, Homo sapiens
MDNNQNLLQKVVLNGLPGFRVFLRNVGLQSASKKSSTTTVSAKVQQLSPP

SEQ ID NO: 823 - DNA, 334 bp, Homo sapiens
attacctatccgcgcgccagtaaaacccgcgatgtgatggcgcaactaccgctcgcctcgctgctgcttgaaacagacgcgcccgatatgccgctgaacggttttcaggggcagcccaaccgcccggagcgggcggcaaatgtatttgcaaccctctgcgaactgcgcccggaagcgccggatgtgattgctaacgcgctgtttcacaatacccaacggctcttcgctctgcctgattagtagctgtaacgctttttcatcggcaggcacactctcctgtgttaaaattctcacattcaaatggcgtgggcttgctgcgattgccttcacgcgt

SEQ ID NO: 824 - protein, 79 aa, Homo sapiens
ITYPRASKTRDVMAQLPLASLLLETDAPDMPLNGFQGQPNRPERAANVFATLCELRPEAPDVIANALFHNTQRLFALPD

SEQ ID NO: 825 - DNA, 314 bp, Homo sapiens
  misc_feature (176)..(176): Wherein n may be a, c, g or t
  misc_feature (200)..(200): Wherein n may be a, c, g or t
  misc_feature (211)..(211): Wherein n may be a, c, g or t
  misc_feature (255)..(255): Wherein n may be a, c, g or t
  misc_feature (256)..(256): Wherein n may be a, c, g or t
  misc_feature (257)..(257): Wherein n may be a, c, g or t
gggcccttatcaagccgagacgtcactgtttagtatcaaatgccaaagtctaagtcgggaccatccacagtgtccccgatgacaccagataggggaggtccccaggttccccagctcatggcctgcaccctcggcactagctttccagtcaggaccagcaagggagccggggagcntgagccccttctagtctacccctnaaactggactnggctcgcctgacaactgcctgaggtcattgtagccatccccctnnntgatgagaaaggggggatgtcactgaggcctgcagggcgtaaagagggagggtggcg

SEQ ID NO: 826 - protein, 60 aa, Homo sapiens
  misc_feature (46)..(46): Wherein Xaa may be any naturally occuring amino acid
  misc_feature (54)..(54): Wherein Xaa may be any naturally occuring amino acid
  misc_feature (58)..(58): Wherein Xaa may be any naturally occuring amino acid
MPKSKSGPSTVSPMTPDRGGPQVPQLMACTLGTSFPVRTSKGAGEXEPLLVYPXNWTXLA

SEQ ID NO: 827 - DNA, 303 bp, Homo sapiens
  misc_feature (1)..(1): Wherein n may be a, c, g or t
nactccacgtcagcgcgtggcgcctggggcgaagttcaactcaaacgcatcgtcgaatactccggcctactcccccacgtcgatttcgacacccaagtcaccacccaacacggtcgccccgacatggtcgtccacctccccggcggaggcactatcgtcgtcgacgcgaaagtcccactttcttcccggctaagcgagggcaacagcgagtcagccaaacagcacgatcaagcacttcttcgacacgtcgacgcactcgccagcaaaacctactggaaatccttcgaccaatcccccgaattc

SEQ ID NO: 828 - protein, 101 aa, Homo sapiens
  misc_feature (1)..(1): Wherein Xaa may be any naturally occuring amino acid
XSTSARGAWGEVQLKRIVEYSGLLPHVDFDTQVTTQHGRPDMVVHLPGGGTIVVDAKVPLSSRLSEGNSESAKQHDQALLRHVDALASKTYWKSFDQSPEF

SEQ ID NO: 829 - DNA, 244 bp, Homo sapiens
gagctccccattctgatagcgctcctagcaggtctgccaacgatggcactcacaatcttcctgccttccaaacaaatctctactacccgcaacaaagacgataaatcatcactaaatttaaagccgattcttggcttaataaccatcggctttgcttttaactgtctagtcaacatgggaaatgttcgcgccccactacatttcctatccttagaaatcggttacagcggctattgctcccccc

SEQ ID NO: 830 - protein, 67 aa, Homo sapiens
MALTIFLPSKQISTTRNKDDKSSLNLKPILGLITIGFAFNCLVNMGNVRAPLHFLSLEIGYSGYCSP

SEQ ID NO: 831 - DNA, 313 bp, Homo sapiens
acgcgtccctcaaggtgaaatgaatggccttgctgtcacggtacatactaagcttgataaaaagcaacaacttggcaatattcaaatgagttactctgctaagaacatcgatgtggcaaactttaaagctcatgatcttaaacttgtcacagaaattaatcatttagacaaccagatctttattgattatgcaaaattgattaaagaatccgatgcgctgccagtagatcaacaagtcgcgtttttcttaaataatatgcaaagtattattgacggaaagcctgagctaaatataacagagttgagcgggttc

SEQ ID NO: 832 - protein, 98 aa, Homo sapiens
MNGLAVTVHTKLDKKQQLGNIQMSYSAKNIDVANFKAHDLKLVTEINHLDNQIFIDYAKLIKESDALPVDQQVAFFLNNMQSIIDGKPELNITELSGF

SEQ ID NO: 833 - DNA, 305 bp, Homo sapiens
  misc_feature (1)..(1): Wherein n may be a, c, g or t
ngtgctcccgagtgggcataccatccggtagctcacgcaaaatatcctgatagtaaatcgagggcgcttattcttccgggagttcacgttctcaatcagacgcatagtcccctacagattattaacgatcttgtgacggcatcggcagagatatatcagcagtcaggtttagtagaggctgataagaagcaagaataatcgccgtacgaaattgtgacaggagcatcactaatacagcgggaagtaggagtatctgattacgggaaagtagcacgcgttattgttaaccggttataccgtgatca

SEQ ID NO: 834 - protein, 65 aa, Homo sapiens
  misc_feature (1)..(1): Wherein Xaa may be any naturally occuring amino acid
XAPEWAYHPVAHAKYPDSKSRALILPGVHVLNQTHSPLQIINDLVTASAEIYQQSGLVEADKKQE

SEQ ID NO: 835 - DNA, 437 bp, Homo sapiens
  misc_feature (75)..(75): Wherein n may be a, c, g or t
  misc_feature (313)..(313): Wherein n may be a, c, g or t
  misc_feature (393)..(393): Wherein n may be a, c, g or t
  misc_feature (394)..(394): Wherein n may be a, c, g or t
  misc_feature (399)..(399): Wherein n may be a, c, g or t
tctagactttggtttacatacaggaaaaactttccagccattggtaagtactctgttttattacaacgcgggacnaaatatgtttttaggaaggaggaaaacttacgcttgtagatttgacttcaatatgccactgacttcatttgaatcttcacagcaatcctgcttaactgaattggccgaggcctcacgtgtagtagtggcaaagctagaatccacggcgcctgactctaggctagtgtgttttcaactgcaaatcccagcttattactggagctggaaatcagtatcatgagttatgaccaacgttgtnttaaatgtaggacagaatgtcatagaaagcggtgtgtgtccgccacgggcacgcagcatggcgcttcaggggatctcgtnntcgtntgcatttttgagtgtgtgttctgggtcacagctgtaca

SEQ ID NO: 836 - protein, 71 aa, Homo sapiens
MFLGRRKTYACRFDFNMPLTSFESSQQSCLTELAEASRVVVAKLESTAPDSRLVCFQLQIPAYYWSWKSVS

SEQ ID NO: 837 - DNA, 363 bp, Homo sapiens
  misc_feature (1)..(1): Wherein n may be a, c, g or t
  misc_feature (28)..(28): Wherein n may be a, c, g or t
  misc_feature (52)..(52): Wherein n may be a, c, g or t
  misc_feature (70)..(70): Wherein n may be a, c, g or t
  misc_feature (88)..(88): Wherein n may be a, c, g or t
  misc_feature (106)..(106): Wherein n may be a, c, g or t
  misc_feature (127)..(127): Wherein n may be a, c, g or t
  misc_feature (148)..(148): Wherein n may be a, c, g or t
  misc_feature (286)..(286): Wherein n may be a, c, g or t
  misc_feature (363)..(363): Wherein n may be a, c, g or t
nacgcgtgcaatgtgtgtgtgtgtatgngaccatgtctctgtgtgtgtatgngcatatgtgtgtgtatangaatgtgtgtatgtgtantggaatgtgtgtgtgtantggaagctgtgtgcatatgtnaatgtctgtgtgcatgtacgngaatgtgcgcgtgtatggaatgtatctgtgtatgtgtatggaccgtttgtgtgattatgcaatatgtccgtgtgtgcgtatggagtgtctcagtatggcatgtgtgtgtgtatctactgtgcgtctctgtgtgtgtantgacatgcatatgtatagaaagcgtctgcgctgtgtgcatgtgtgtcagtatcgaacgagtcggagatgtggtaatn

SEQ ID NO: 838 - protein, 121 aa, Homo sapiens
  misc_feature (1)..(1): Wherein Xaa may be any naturally occuring amino acid
  misc_feature (10)..(10): Wherein Xaa may be any naturally occuring amino acid
  misc_feature (18)..(18): Wherein Xaa may be any naturally occuring amino acid
  misc_feature (24)..(24): Wherein Xaa may be any naturally occuring amino acid
  misc_feature (30)..(30): Wherein Xaa may be any naturally occuring amino acid
  misc_feature (36)..(36): Wherein Xaa may be any naturally occuring amino acid
  misc_feature (43)..(43): Wherein Xaa may be any naturally occuring amino acid
  misc_feature (50)..(50): Wherein Xaa may be any naturally occuring amino acid
  misc_feature (96)..(96): Wherein Xaa may be any naturally occuring amino acid
  misc_feature (121)..(121): Wherein Xaa may be any naturally occuring amino acid
XACNVCVCMXPCLCVCMXICVCIXMCVCVXECVCVXEAVCICXCLCACTXMCACMECICVCVWTVCVIMQYVRVCVWSVSVWHVCVYLLCVSVCVXTCICIESVCAVCMCVSIERVGDVVX

SEQ ID NO: 839 - DNA, 409 bp, Homo sapiens
accggtgggatagacctcttttgtaccatcgagtgaaacaactgaggttcctgcacctgccgtcgtgcaagatttacccagcaacaactttccttggagggtttttgtagtattttgagatccggcataggcgggtatagcagtagtcgctaagattactggggcggcccatcctatacctttcacgagttccctgcgcttagggtttattgggggcattatcgttcctattagttctgataatttaggtgaccaggggaaattttggtagtaatttatctcctattttatagaattcaactacaaaagttactcacaaaaggtctaaagtcatagaaaattgatacccgtgctgaaccccgtttccgaacctaaggataggcaggagaggaaaaagcaaagtacgcgt

SEQ ID NO: 840 - protein, 73 aa, Homo sapiens
MPPINPKRRELVKGIGWAAPVILATTAIPAYAGSQNTTKTLQGKLLLGKSCTTAGAGTSVVSLDGTKEVYPTG

SEQ ID NO: 841 - DNA, 262 bp, Homo sapiens
tgatcaacatgggatcactcccaggtctttgcttgccgaaattggctctatcggtgggttctccgttggactcggagaagtggagggcgaataatttggttccttgagggacatggcgatagtacacgaggaggtgggacgtggatctgctgccgtcaggagttttcttacggtgcactgcatgcttcttcaggcagtgtgtcgatggggtcgtctacctgtaggagacaacaggttgcacgacctactcagggggacgcgt

SEQ ID NO: 842 - protein, 59 aa, Homo sapiens
MQCTVRKLLTAADPRPTSSCTIAMSLKEPNYSPSTSPSPTENPPIEPISASKDLGVIPC

SEQ ID NO: 843 - DNA, 557 bp, Homo sapiens
  misc_feature (27)..(27): Wherein n may be a, c, g or t
aaggccaaggatccagtgattttcttnggcgctgccccccgacgcggatcctcggtggtaacggtggccgcatcttcccccgccgccgcaggtaaggaacccggctcgatcaaactcacccccttcgaccagtacccgcccaagggacgagccaccggtggtatgaggtgtcagcgattcctcaagggagagacggccctggtgttcgcttggatcggccccgatccggccgtggcctgtgccgcgtccggggtgcctatcgaactgccagcacctaatatgcgtcgagacggctccggtgatcagggacgtcaaccgattctggccgtcgggagtcgtcgtcacgggtctaacaagggtaatccggtatccgacggatcgaacgatgcattggattccggtgacccgttatcgactaatgaaaagcagatcgatttcccaccccgactgttccagctgaccgatagcgggcgggttctggcccgcttggcttaggcaatgctcgctatgccgaatcctttgacccagcagacccgcccggactggctgctagagga

SEQ ID NO: 844 - protein, 164 aa, Homo sapiens
  misc_feature (9)..(9): Wherein Xaa may be any naturally occuring amino acid
KAKDPVIFXGAAPRRGSSVVTVAASSPAAAGKEPGSIKLTPFDQYPPKGRATGGMRCQRFLKGETALVFAWIGPDPAVACAASGVPIELPAPNMRRDGSGDQGRQPILAVGSRRHGSNKGNPVSDGSNDALDSGDPLSTNEKQIDFPPRLFQLTDSGRVLARLA

SEQ ID NO: 845 - DNA, 249 bp, Homo sapiens
attgagaaaatgaacgggatgttcctaaatgaccgcaaagtgttcgttgggcgctttaagtctcgtagagaccggcaggctgaacttggagccagggccaaggcgttctttaacgtttacatcaagaatttgggagaagacatggatgatgaacgactcccggatctcttcagcagatttggacctgccttaagtgttaaagtcatgactgatgaccgtggaaagtccaaattattcggatttgtaagc

SEQ ID NO: 846 - protein, 83 aa, Homo sapiens
IEKMNGMFLNDRKVFVGRFKSRRDRQAELGARAKAFFNVYIKNLGEDMDDERLPDLFSRFGPALSVKVMTDDRGKSKLFGFVS

SEQ ID NO: 847 - DNA, 218 bp, Homo sapiens
tgatcaatacaccatgaagctggagtcggtggacccgcaaggccaggcgctgagcaccggcaccaaccacgactcgatcaatacctggatgggcatctggtttatcccgttgatggccaacacgccgaaagaggcggtgaccgataccttcacccgccaggtcaatgccttgctcaagcaaatggtcgattcggtgagaggctgatgcacccaagggc

SEQ ID NO: 848 - protein, 63 aa, Homo sapiens
MKLESVDPQGQALSTGTNHDSINTWMGIWFIPLMANTPKEAVTDTFTRQVNALLKQMVDSVRG

SEQ ID NO: 849 - DNA, 408 bp, Homo sapiens
  misc_feature (290)..(290): Wherein n may be a, c, g or t
cggccgcgggacccgaaccgctgcgggacactctcctctctgcctggcgcgtctgcagcggtgtccgctcagcccggtgaagtgatgacaatggacgctatgttggctcgactgaaactcttgaatccagatgacctcagacaggaagttatgaaagctggactgaaatgtgggcccattacatcaactacaagatttatttttgagaagaaattagcgcaggccttactagaacaaggtggactgctgacttcctctcttccaaagcacagtgaggtgactggcacggnctttatccatggcacttcaggggctcctgcatttgtggacaggaaacaaactcagcaggcctgtttatctgaagacagagattttggttatagtgtgggcttgaaccctgcagaagaa

SEQ ID NO: 850 - protein, 108 aa, Homo sapiens
  misc_feature (69)..(69): Wherein Xaa may be any naturally occuring amino acid
MTMDAMLARLKLLNPDDLRQEVMKAGLKCGPITSTTRFIFEKKLAQALLEQGGLLTSSLPKHSEVTGTXFIHGTSGAPAFVDRKQTQQACLSEDRDFGYSVGLNPAEE

SEQ ID NO: 851 - DNA, 296 bp, Homo sapiens
accggtggtgggcgcacctcaatcattatcggcaacccggacctgcagccagagaagagcctgagcgaagagatcggcgtgatgtgggataaccaacagggcctgaacgccggcgtaaccctgttcaacaccgacttcaaagacaagatcaccgaagtccgtcgctgtgacagcggtgatggcgacgcacaatgcatgataggcaatacgccttactactttatcagtgaccgcactaacgttgataaagccaatatgcgcggcgtagaggccaccttcggctgggaaatcaccaa

SEQ ID NO: 852 - protein, 98 aa, Homo sapiens
TGGGRTSIIIGNPDLQPEKSLSEEIGVMWDNQQGLNAGVTLFNTDFKDKITEVRRCDSGDGDAQCMIGNTPYYFISDRTNVDKANMRGVEATFGWEIT

SEQ ID NO: 853 - DNA, 357 bp, Homo sapiens
tccggacctctgtctagtgtggagatcagtggtgctcaaaggttttggtcttaagagtcctttatactctcactatccatcgatttccaaaacagaaatgaaggcaggaaaaatattcactcatttaaaaacaacaataataaatccattatgtgttaatgcaaataatgtatttctgtgggaaattattttctccaaaacaacaaaaaaagttaaaaaaaagaacattacattttttgcaaatgtctttaatgtctggcttaataagacatagttggattttcatgttggtttctacatttggtctgctgtgatatgttggggagtgaagtatatgaagaaaatcaggcatgatca

SEQ ID NO: 854 - protein, 67 aa, Homo sapiens
MPDFLHILHSPTYHSRPNVETNMKIQLCLIKPDIKDICKKCNVLFFNFFCCFGENNFPQKYIICINT

SEQ ID NO: 855 - DNA, 281 bp, Homo sapiens
  misc_feature (1)..(1): Wherein n may be a, c, g or t
  misc_feature (2)..(2): Wherein n may be a, c, g or t
nnacgcgttaatgatggtgttgataaaccgcgtcctaagactttgtttgaagttggggaagtcgtgcgggttagcgaaggtccatttgctgatttcaacggtgttgttgaagaagtggattatgataaaagccgaatcaaagtggcggtgcttatttttgggcgctcgacaccggttgatttggaatttagtcaggttgaaaaagcctgattttgttaaacgggtagccttcgggcagtgacccatctggagtttaaaaatggctaagaaagtccaagctt

SEQ ID NO: 856 - protein, 69 aa, Homo sapiens
  misc_feature (1)..(1): Wherein Xaa may be any naturally occuring amino acid
XRVNDGVDKPRPKTLFEVGEVVRVSEGPFADFNGVVEEVDYDKSRIKVAVLIFGRSTPVDLEFSQVEKA

SEQ ID NO: 857 - DNA, 338 bp, Homo sapiens
  misc_feature (1)..(1): Wherein n may be a, c, g or t
ncgacgctggggatgctcgtaggccgaggaatggacatggacaacgacaccccgaaaagcagcaagctcaatgtcgtgcgtgcagcgagccggtttggcaacgccgatgccgaactggtgcagattaaaccgcagctgccaatgaggaccgcactgacggaggcctcgggcatcatgggctgcatcactgaaattacccgcaaggccatcgacaggccagccgaccgcaaggtgatgatgcatgccacgttctatctggccggcatggccaaggcactgatcgatggccagctgctgcgggtgcgtcaggcgcgtgaaggtgagcgcgaacccttgtc

SEQ ID NO: 858 - protein, 108 aa, Homo sapiens
MLVGRGMDMDNDTPKSSKLNVVRAASRFGNADAELVQIKPQLPMRTALTEASGIMGCITEITRKAIDRPADRKVMMHATFYLAGMAKALIDGQLLRVRQAREGEREPL

SEQ ID NO: 859 - DNA, 318 bp, Homo sapiens
  misc_feature (1)..(1): Wherein n may be a, c, g or t
  misc_feature (2)..(2): Wherein n may be a, c, g or t
  misc_feature (4)..(4): Wherein n may be a, c, g or t
nnanttcttggactacagtgatcctcctacatcagctccctaaattgctggattacaggtgtgtgcctgctttatgtgtttttctttctttctttctttcttttttttttttttttaaaacaaaattcccctttggtgccccgggctggaaggcaagggcccaattttggttcactgcaacctccccctcctgggttcaaaccaatttcctgcctcaacctcctgaacgactgggaatttaggccccctttcccccccccaactaattttggtttttttaaaaaaaaaggggtttccccatttgggccgggctggtct

SEQ ID NO: 860 - protein, 99 aa, Homo sapiens
SSYISSLNCWITGVCLLYVFFFLSFFLFFFFLKQNSPLVPRAGRQGPNFGSLQPPPPGFKPISCLNLLNDWEFRPPFPPPTNFGFFKKKGVSPFGPGWS

SEQ ID NO: 861 - DNA, 2058 bp, Homo sapiens
  misc_feature (1)..(1): Wherein n may be a, c, g or t
ntatgttcagcgttcaacgatattggctaccactatggtgccatggtcgtcgatgctgcgctgttcctgccacagtcacgacccagactatttatcattggtgtcagaaacgatatttttgttggcgatattacttctgaatcaccgtctaaaatgtggcataccagaactttattgaatgcctacagcaatctgaaagatgatgccaagtccaattgggtatggtgggaccttcctatgccagcccagagaaaatctgctttcgccgatttgattgaagaaaatcctagcagcgttaagtggcatacccggaaggaaacacagcagctcttggatatgatgactgatgttaacttagctaaggttgaggctgcaaaaaagctatcgatcgagtctaaggaaaatgttgtagggacaatttataaaagaactcgcaccgatagctttggagttaaagcgcagcgtgctgaagtgcggtttgatgatgttgccggttgtcttcgcacccctggaggggggtcaagtcggcaagtcataatggtcgttgataacgggactgtaaaaacgaggttgatctcaagtagagaaactgcaaggcttatggggttacccgacgaatacatattgccaaaaaattataatgaggcgtatcacttaacgggtgatggtgttgtagtgccggttgtatcccacatagccactcatatttttgacccagtgatggagcgtgtgtttgaggatgcggcgggactgcttaagcaaatcgcatagcatcgttttggcaggaagatatgagcgttattccgtgtaaaaaggaccttcagctaaaaaaattgattgaatcctatgcagaagccttgaaagttgaggcccataagctaggagagcatggattaactgaagctgaattttatgatagcggcctctttcggggggctatcgagcgaattcgaggacagttctccgcgaccatgcgggagaaaagaaatttcgttaagcatgttttaaattacatgcaggataacgactacattgctgattgggagtcggctggtgaatcgaatcgccatgattatatggtaactctcaattctgggcgcaaagctgctattgagctgaaagggtgccttgatggcaataacactaacatctttgatcgcccccctcaggcagaagaatttgttatctggagtgtatgcacaaatcctggtgctgaccctcagcataatgtttggtctgggcttcacaccagactaagtgctgaaatcatttcacgggagcaaaggattgatggaatggtcatttgggactgggcttgtggaacagtcggaaggccatgccccaaaatagcaactgaacctgagcgggctgtaacatttgggccgttcaaattgccgccaccatgtttgtatcttttaccttcgacgattccaagcccaagaaacaacccgtctccaagagctcagcagattgaagacgtgcagctaatcaaagcgtttcacgattgttttgggtgccggtctgaagaagttaatttcgttaactttgatgttggttatcatggtaaagataccgtccgtaaaacgactatcattcgaaacggcatggtggagcgtgaatcggaaatgacggcaataaggcggtcttaatttgtgcatgcctatgctgcatgaatccgcatgatcgtttgaggatcgtttttgctgaggcccgccagttctggtgggcttttgcttatgtcatgcacctgcatgaaaaccgctacataaagcgggcaggcgtggcggggatacgagcgcgcgcaacggggtgaaatggtgaatatcaggggcaatctccggcacgctggcggcttgaatcgggtagggtgagtgagaggcagcaataaagaagcgccccgcagaatgctgctggggcgctgtgagaggtggtcttgttgtcgcggtgcggtgggtcagtcgtagcgattgtcttctgtcagccccagcgtgtacggctcaaagcggatcacttcttcgcccagccagtcattaagctcccgcagtcgcttctgcaggc

SEQ ID NO: 862 - protein, 256 aa, Homo sapiens
  misc_feature (1)..(1): Wherein Xaa may be any naturally occuring amino acid
XCSAFNDIGYHYGAMVVDAALFLPQSRPRLFIIGVRNDIFVGDITSESPSKMWHTRTLLNAYSNLKDDAKSNWVWWDLPMPAQRKSAFADLIEENPSSVKWHTRKETQQLLDMMTDVNLAKVEAAKKLSIESKENVVGTIYKRTRTDSFGVKAQRAEVRFDDVAGCLRTPGGGSSRQVIMVVDNGTVKTRLISSRETARLMGLPDEYILPKNYNEAYHLTGDGVVVPVVSHIATHIFDPVMERVFEDAAGLLKQIA

SEQ ID NO: 863 - DNA, 207 bp, Homo sapiens
  misc_feature (1)..(1): Wherein n may be a, c, g or t
nagaacataaactacgacataatattaataatcaaaaccatcctaaacaaaataataataattattacatttgggaaaccaaaactcaaaggctacatagcaaaatacaccccttacaagtgcggcttcgaacctatataccccgcccgcgtccctttctacataaaatacttataagtaaataataactactaataatttgatcta

SEQ ID NO: 864 - protein, 56 aa, Homo sapiens
INYDIILIIKTILNKIIIIITFGKPKLKGYIAKYTPYKCGFEPIYPARVPFYIKYL

SEQ ID NO: 865 - DNA, 270 bp, Homo sapiens
cgcgttaagatgaaatcgagcttaagcaaggaaatagatcccaaaactttttatgaagagtacgaaccaaaagagggcaaaagttttgatgataacgatgatcaacaaaccaacatcggaagttttaaccttcatttgtttgatatgaattatggttccatcagcagcagtagcactaacagcattagtagcagtgatttagaagagaaagaagaacaagagcaacttcaagatttattggaaatagaaagagaagattctgctgagatc

SEQ ID NO: 866 - protein, 90 aa, Homo sapiens
RVKMKSSLSKEIDPKTFYEEYEPKEGKSFDDNDDQQTNIGSFNLHLFDMNYGSISSSSTNSISSSDLEEKEEQEQLQDLLEIEREDSAEI

SEQ ID NO: 867 - DNA, 285 bp, Homo sapiens
  misc_feature (1)..(1): Wherein n may be a, c, g or t
  misc_feature (2)..(2): Wherein n may be a, c, g or t
nncgacgtgatgggactcaagtgcctaaaagatgagcacaacatcatccatcgcgacgtcaaaccgaccaatatcttggtcaacacccgcggacaagtcaagatctgtgattttggcgtcagtggcaacctagttgcttctattgcaaagacgaacattggctgccagagctacatggctcccgaacggatatccggcggtggcgtagcacaggctgcggtgctggagtcctacagcgtgcagtctgatatctggtccttaggtcttaccatcatcgaatgtgca

SEQ ID NO: 868 - protein, 95 aa, Homo sapiens
  misc_feature (1)..(1): Wherein Xaa may be any naturally occuring amino acid
XDVMGLKCLKDEHNIIHRDVKPTNILVNTRGQVKICDFGVSGNLVASIAKTNIGCQSYMAPERISGGGVAQAAVLESYSVQSDIWSLGLTIIECA

SEQ ID NO: 869 - DNA, 310 bp, Homo sapiens
gatgagatcgagcttgatattgatgagatggatgttgagacacagtgggagcttgatcgtttcgtaactaacttcaacaaggcgctcaagaaatctcagcgtgctgtggtggtgaatggtggcgctgctgatgtaaccagtgctgctgtggctgagaatgacactgcacctgtcagcaatgtgcttgcgttggttgacaatgatgatgtggagagagagaaacctgtgaggagcgctacaatggctgagcaggtggatgaatatgttgatattggggatgagatgcccacagccacttaccaatccatgg

SEQ ID NO: 870 - protein, 103 aa, Homo sapiens
DEIELDIDEMDVETQWELDRFVTNFNKALKKSQRAVVVNGGAADVTSAAVAENDTAPVSNVLALVDNDDVEREKPVRSATMAEQVDEYVDIGDEMPTATYQSM

SEQ ID NO: 871 - DNA, 490 bp, Homo sapiens
ctccccttgggtttcactgtttcagggaggtccctgattgacataaaagtgtaaaggcctgactgcctgggttcagcagggctggttaggtccagctccagggatccatgcatccgtctagagcccatccttgtgggactggggagaccctgtggttcccagagagaagtacagtagggcatgagagggtagaggggtgaagccttgtaagacttcaggggaggatcagggccccagtcaaacagtgtggggttctcagaagggctcaagtcccagggtgatctgttattaggcagtgactaagcagaccttccagctggcaattgagataagctaggcccaaagacaggcccaaccaagaatggagggactcaagtggctccccacgtgcagtcagggaagggaagaaaaatgcacatttcctaagtgcccaccacgtggtagaccctttcctgtgcaacgagttgaagagtattttcaagctcgtcat

SEQ ID NO: 872 - protein, 74 aa, Homo sapiens [sequence omitted]

SEQ ID NO: 873 - DNA, 228 bp, Homo sapiens
  misc_feature (212)..(212): Wherein n may be a, c, g or t
cctaggtctcccaaagtactgggattacaggcatgagccacttcaccgggccactcccacacatacttttgaatctcaggttgaattttcacataataatatctgctttatggtatactactattaatgatattttcaggatgaaactactgaacatgttttgtacttttttgtttggtagcagtgataatcctatactgagctatatatantagttcatccagatct

SEQ ID NO: 874 - protein, 60 aa, Homo sapiens
  misc_feature (60)..(60): Wherein Xaa may be any naturally occuring amino acid
MSHFTGPLPHILLNLRLNFHIIISALWYTTINDIFRMKLLNMFCTFLFGSSDNPILSYIX

SEQ ID NO: 875 - DNA, 357 bp, Homo sapiens
  misc_feature (356)..(356): Wherein n may be a, c, g or t
  misc_feature (357)..(357): Wherein n may be a, c, g or t
gaattcacccctaccgaattgcgcgtggtgcgcatggtgctggagcaagccttcatcgacttgaaggaagcctggcaggcgatcatggaagtcaatttcgagtacatcaactcggaagtgaacccggccctgggccactcgccgggccccagcgaagccattgtggtctccaccttccacatcgaactcgatggcggtggcggcgacctgcacgtgaccatgccgtactcgatgatcgagccggtgcgtgaaatgctcgatgccggtttccagtccgacctcgacgaccaggacgaacgctgggtcaaggctctgcgcgaagacctgctggacgtcgatgtgcctttgagcgcccnn

SEQ ID NO: 876 - protein, 119 aa, Homo sapiens
  misc_feature (119)..(119): Wherein Xaa may be any naturally occuring amino acid
EFTPTELRVVRMVLEQAFIDLKEAWQAIMEVNFEYINSEVNPALGHSPGPSEAIVVSTFHIELDGGGGDLHVTMPYSMIEPVREMLDAGFQSDLDDQDERWVKALREDLLDVDVPLSAX

SEQ ID NO: 877 - DNA, 312 bp, Homo sapiens
  misc_feature (1)..(1): Wherein n may be a, c, g or t
nacgcgtaatgaggtgaagatagatcaatgaaatcacatattcattttagtatagatagagatttaatatgcgctatcatggtaggtgttttaagcggaattgtaacattagcaatgttctttttaaggggttatatgattactcaaagtgcgctaggtgcgccactttatgcattaatgattttagttgtatctgttaaattgtttggttttttaagagcaattacacgctatatagaaagattacttgcacacgagacgacatttacaatgttacgtattgtacgagtgcaatttttaaaaatgctatat

SEQ ID NO: 878 - protein, 95 aa, Homo sapiens
MKSHIHFSIDRDLICAIMVGVLSGIVTLAMFFLRGYMITQSALGAPLYALMILVVSVKLFGFLRAITRYIERLLAHETTFTMLRIVRVQFLKMLY

SEQ ID NO: 879 - DNA, 357 bp, Homo sapiens
  misc_feature (199)..(199): Wherein n may be a, c, g or t
tacactgtcgctttatccgctcaagctttgtgggcacctttggctaaaataccaagagtagtctggacaatggcaggtaatgctgccactttaggtatttccatccctgctacctattactttgacggctttatggagaattttatggattccattggttattatttggctatttatattgccattgcatgttcagagnattttatttataggcgttccttcagtgcttacaatattgatgattgggataattgggagcatctacctatcggtatcgcaggtactgctgccttaattgctggtgcctttggagtagcgttgggtatgtgccaaacttattgggttggtgagatcagt

SEQ ID NO: 880 - protein, 119 aa, Homo sapiens
  misc_feature (67)..(67): Wherein Xaa may be any naturally occuring amino acid
YTVALSAQALWAPLAKIPRVVWTMAGNAATLGISIPATYYFDGFMENFMDSIGYYLAIYIAIACSEXFIYRRSFSAYNIDDWDNWEHLPIGIAGTAALIAGAFGVALGMCQTYWVGEIS

SEQ ID NO: 881 - DNA, 341 bp, Homo sapiens
agatcttgccgtgctagccggtaacttaaacgcccgagccaccagcgcacccaccacgggtgccaagagcatgaaaccaatgtagacgggaataacaggcagcagcttgtccatgtctctgaccaccgttgaaatctgagagccgatcactacgaccaatacagccgccataactggggacgggcattccaagcccttacattgggtcccgcccctcaacgatgcgtgacccctttgccccggcagctgttgctactgccaaaaccaagggtaaagcgatcagcactacaaaggcctcaacaaatgggccgaccgatattaccaccgccgagtcatcactc

SEQ ID NO: 882 - protein, 57 aa, Homo sapiens
MAAVLVVVIGSQISTVVRDMDKLLPVIPVYIGFMLLAPVVGALVARAFKLPASTARS

SEQ ID NO: 883 - DNA, 214 bp, Homo sapiens
gaattcgaccagtatttgaacactcctggccacccagactccgccacaggggccatggccctcagtgggcatgttccggtctcccaggtgacaccaacgggtcccacagagaccagcctcatctccgtcctggctgatgccacggccacgtactacaacagctacagtgtgtcatagagctggaggcgccccgcccggtcagcccttcacgcgt

SEQ ID NO: 884 - protein, 58 aa, Homo sapiens
EFDQYLNTPGHPDSATGAMALSGHVPVSQVTPTGPTETSLISVLADATATYYNSYSVS

SEQ ID NO: 885 - DNA, 369 bp, Homo sapiens
  misc_feature (97)..(97): Wherein n may be a, c, g or t
  misc_feature (98)..(98): Wherein n may be a, c, g or t
atgacagacatgaatacaactatatcaatgaaaacattaaatgtgaatggattacagaatccaatcaaaagggaaagattgttagactgcataatannacataattcaactatatgctatctactagagacacactttagacttaaaggtattaataaattgaaagcaaaaggatagaaatggttatatcatgcaaactacgatcaaaagaacactggagtgctataccactatcatacaaaatatgccttaaaacaaaaaagctagaaataaaaggaacaatttataaacgtaaaagagacaaacaatcaggtagatataacaattataactatatgcacataatagcagaataccaaaatacacaaa

SEQ ID NO: 886 - protein, 58 aa, Homo sapiens
  misc_feature (33)..(33): Wherein Xaa may be any naturally occuring amino acid
MTDMNTTISMKTLNVNGLQNPIKRERLLDCIIXHNSTICYLLETHFRLKGINKLKAKG

SEQ ID NO: 887 - DNA, 519 bp, Homo sapiens
  misc_feature (1)..(1): Wherein n may be a, c, g or t
  misc_feature (2)..(2): Wherein n may be a, c, g or t
  misc_feature (253)..(253): Wherein n may be a, c, g or t
  misc_feature (430)..(430): Wherein n may be a, c, g or t
nnacgcgttccgattttgtgggccggataagcaaagcgcatccggcattcaacgcctggtgggacgctggggcgtcttgagcaggccaacacgctgcgattttggtaggccgggtaagcaaagcacaaccggcacgaaggagtcaactattaagaagatctcaaacgccaggtattagaggccaacctggggctgccaaaacataacctggtcacgctcacatggggcaacgtcagcgccgttgatcgcgagnccggggtctttgtgatcaaaccttccggcgtcgattacagcgtcatgaccgctgacgatatggtcgtggttagcatcgaaaccggtgaagtggttgaaggtacgaaaaagccctcctccgacacgccaactcaccggctgctctatcaggcattcccctccattggcggcattgtcnatacgcactcgcgccacgccaccatctgggcgcaggcgggtcagtcgattccagcaaccggccccacccacgccgactatttctacggc

SEQ ID NO: 888 - protein, 122 aa, Homo sapiens
  misc_feature (34)..(34): Wherein Xaa may be any naturally occuring amino acid
  misc_feature (93)..(93): Wherein Xaa may be any naturally occuring amino acid
EDLKRQVLEANLGLPKHNLVTLTWGNVSAVDREXGVFVIKPSGVDYSVMTADDMVVVSIETGEVVEGTKKPSSDTPTHRLLYQAFPSIGGIVXTHSRHATIWAQAGQSIPATGPTHADYFYG

SEQ ID NO: 889 - DNA, 388 bp, Homo sapiens
  misc_feature (1)..(1): Wherein n may be a, c, g or t
nacatgtctgccttggccctcgcgcacgacgcttcttcgaccgaatcaactcgctcttcgacgcccagccgtcagcctcacgaacctgacaagggcacgggtagcctcaattcgaaactcaattggttacgtgccgcagtgctgggcgccaacgacggcatcatttcgacagccggcatcgtgatgggcgtcgctggcgccaccgtcgaccgttcctccctccttattgctggtctggctggtctggccgccggcgctttgtcgatggctggcggcgagtatgtctccgtgagctcccagcgcgacattgaaaagaccgtcatggctaaggaagccgctgagctacgcgacttccccgacgaggagcttgaggagctcacggagatct

SEQ ID NO: 890 - protein, 129 aa, Homo sapiens
  misc_feature (1)..(1): Wherein Xaa may be any naturally occuring amino acid
XMSALALAHDASSTESTRSSTPSRQPHEPDKGTGSLNSKLNWLRAAVLGANDGIISTAGIVMGVAGATVDRSSLLIAGLAGLAAGALSMAGGEYVSVSSQRDIEKTVMAKEAAELRDFPDEELEELTEI

SEQ ID NO: 891 - DNA, 324 bp, Homo sapiens
gaattcatggaggtctatgaggaggatgaagaatatgcgtatgaaaaatatgaaacccatttcggcacgagctggatggaggagaccgcaggcaccttctcactgaactggtatcgcagcaggtactggaatgacaatgaagcagcagaaaggcttgcgttgatgtgggctaaaaccttcaaatatgcgtcgataaacgtctcctggcagaccgggattagcaatagcgacgacgagggcaatgaagatgaagacatgttctacgccggtatctccattccgctgggaggcggggcgtactctaactcctggtatcgtgaatat

SEQ ID NO: 892 - protein, 108 aa, Homo sapiens
EFMEVYEEDEEYAYEKYETHFGTSWMEETAGTFSLNWYRSRYWNDNEAAERLALMWAKTFKYASINVSWQTGISNSDDEGNEDEDMFYAGISIPLGGGAYSNSWYREY

SEQ ID NO: 893 - DNA, 348 bp, Homo sapiens
cccggggctaatctagaatcactgtgcctccacatacacgaggcacatcatctgtattttcacgttttgtgaaaatgctccttaatgttcacagacgtggttacccactgaagcaggagctaaggcacagagagagacaggtgttcgatagaaagccacagagacaaaaagcacccaaagagtcgctttataatttttatttgattttcaaaaactccacaatataaatgactgaaccttgaggttccaagtgtggcctcgaccagcagcctgaacattatcaaagatgcagggtcccagcctctaccttagacatactgaacaagaatctgcattttgacaagatct

SEQ ID NO: 894 - protein, 52 aa, Homo sapiens [sequence omitted]

SEQ ID NO: 895 - DNA, 357 bp, Homo sapiens
aggtcactttcgaagttcaagcgctggagaggaagatcaaatagcagtttatcgatggggtcgtctgagcagcaagaactgcaggacagtccaaatgaagcccgtagtgatgatgacgaaaacggttacaataacgataatgcagatgacttggcgaaatccaagtatatgatgaaaagtattgccggtttattaactactgctagtgtgtatgcagggatgaataatgctccagaaatgaatgtgttgtcgcaagttgattctgaagaatctgattccagtgatagtttccaggaaaacattggtcgaaatgaggtaaaaagcaaaaaggaaaatctcaaaactaaatcgcatccg

SEQ ID NO: 896 - protein, 119 aa, Homo sapiens
RSLSKFKRWRGRSNSSLSMGSSEQQELQDSPNEARSDDDENGYNNDNADDLAKSKYMMKSIAGLLTTASVYAGMNNAPEMNVLSQVDSEESDSSDSFQENIGRNEVKSKKENLKTKSHP

SEQ ID NO: 897 - DNA, 198 bp, Homo sapiens
tgtacaggactgggactccctggtttctatgaaggggttacacctagatgctacattggatgctgtgctagttagtcatgctgtgaccaccttatgggccagtgtaggacggccaaggccagacccggatgtcctgcagggatctttgaagcggctgctgacagatgtcctgtcacggcccttgactctaggtctaga

SEQ ID NO: 898 - protein, 56 aa, Homo sapiens
MKGLHLDATLDAVLVSHAVTTLWASVGRPRPDPDVLQGSLKRLLTDVLSRPLTLGL

SEQ ID NO: 899 - DNA, 264 bp, Homo sapiens
  misc_feature (1)..(1): Wherein n may be a, c, g or t
  misc_feature (2)..(2): Wherein n may be a, c, g or t
nntggccagatgggtcaccagcagctctactggagtcacccgcggaagttcggccagggttctcgctcttgccgcgtctgctctaaccgccacggtctgatccgtaaatacgggctgaacatgtgccgacagtgcttccgtcagtacgcgaaggacataggcttcattaagttggactaagcgacctgaatggatgattcgactgtctacccaatgaaaccaactgtctaccctgtgataccaatcatgctagtctttgtgcac

SEQ ID NO: 900 - protein, 56 aa, Homo sapiens [sequence omitted]

SEQ ID NO: 901 - DNA, 315 bp, Homo sapiens
gcgttggctgctgcggcactgacccgctcctttggtgttcctgcgcctgccgtcggacagggtttgcgtgacttgcatcttggtggacaccgcatcgagacggtgcaccaggccggtggcattacctgggtcgatgattccaaggcgacgaacccccatgctgcaaactcctcgatgcgggcctttgaacacatcgtgtggatcgctggtgggcaggccaagggcacgcattttgacaacctcgtgaccactcatgctggcaagctgcgtggcgtagtagtgctgggaactgaccgcggcatcatcgcgagatct

SEQ ID NO: 902 - protein, 105 aa, Homo sapiens
ALAAAALTRSFGVPAPAVGQGLRDLHLGGHRIETVHQAGGITWVDDSKATNPHAANSSMRAFEHIVWIAGGQAKGTHFDNLVTTHAGKLRGVVVLGTDRGIIARS

SEQ ID NO: 903 - DNA, 363 bp, Homo sapiens
acgcgttttcatgcgcgccacaccaccaaagaatcggccgaagaaaccattaatacgatccctctgggcagagcgggcacgccggaagatgtggcaaatgttattactttcctggctgcgcaatatgatggatttgtatcgggcgccaccattgatatcaacggcggaagttatcgcatgtaagcaaccagcaggcagcgcgctgtggctgcctgcattttgagagaatcaagatgataaaatccactatcattcacccagaattattatctgcactggcaaaatgtgggcacaaaacccaaatattaatcgcagacagtaactatgcttttgtcaccaacgcgccgcagaatgctgtcatcg

SEQ ID NO: 904 - protein, 60 aa, Homo sapiens
TRFHARHTTKESAEETINTIPLGRAGTPEDVANVITFLAAQYDGFVSGATIDINGGSYRM

SEQ ID NO: 905 - DNA, 297 bp, Homo sapiens
gtgcacttcctcatccagggaccctggtggatgggcgtggtgtggggcgttgcgcttgtcctctgcgccaccatgggcgacctcgtggagagccagttcaagcgcgagctgggaatcaaggacatgtcgaacttgcttcccggccacggcgggctgatggaccgcttggacgggatgctgcccgccgccagcgcgacctacatgctgctcaacgccgcggcgatcatgaacccgctgtagcggccctggcagcgaacgggccgcgtagattagtcaagacgcgggttacgtgccaaa

SEQ ID NO: 906 - protein, 79 aa, Homo sapiens
VHFLIQGPWWMGVVWGVALVLCATMGDLVESQFKRELGIKDMSNLLPGHGGLMDRLDGMLPAASATYMLLNAAAIMNPL

SEQ ID NO: 907 - DNA, 358 bp, Homo sapiens
  misc_feature (10)..(10): Wherein n may be a, c, g or t
  misc_feature (53)..(53): Wherein n may be a, c, g or t
  misc_feature (88)..(88): Wherein n may be a, c, g or t
  misc_feature (94)..(94): Wherein n may be a, c, g or t
  misc_feature (160)..(160): Wherein n may be a, c, g or t
  misc_feature (317)..(317): Wherein n may be a, c, g or t
  misc_feature (342)..(342): Wherein n may be a, c, g or t
gtgcacatgncaccactgaagccaaaattgactttttcctatcggaattaganatcttttgagtgactccaggtatcacgccactctntttcanagggcatattaataagcaaatgtgagagcccttctagctccacagctctcaagctattttcacccnctggcaccttctctgcagtcaacttcctccctccccacatgagacccactcacctctaccctgctacccctctgtgggtcccattgcctcgtggtgcttcctgcctctgcattcagagctgcctgactgcttgcttgtcccctgacctccactactntaagcaccttagcagcaggagatcntgtctttcatgctagc

SEQ ID NO: 908 - protein, 52 aa, Homo sapiens
  misc_feature (40)..(40): Wherein Xaa may be any naturally occuring amino acid
MRPTHLYPATPLWVPLPRGASCLCIQSCLTACLSPDLHYXKHLSSRRSCLSC

SEQ ID NO: 909 - DNA, 290 bp, Homo sapiens
tgtacactttccgaagattcacccgccaatggaagtgaaagttgtgcattgctccccgccaaatccaacactcgaaaatcgcgtggacccgcctggggtcctgacgcccagtgaagcatagaggcggcagcactagcaggttcaatccacaccagtgtccctgaatccctctgcttacggaatgccaaggccacttcgtcctcagaggccgaagggatgggtgcgtataccatagtggaccctgccaaaacaagcaccgtttttgctgccttgctcacttcccctccgga

SEQ ID NO: 910 - protein, 77 aa, Homo sapiens
MVYAPIPSASEDEVALAFRKQRDSGTLVWIEPASAAASMLHWASGPQAGPRDFRVLDLAGSNAQLSLPLAGESSESV

SEQ ID NO: 911 - DNA, 405 bp, Homo sapiens
  misc_feature (8)..(8): Wherein n may be a, c, g or t
  misc_feature (256)..(256): Wherein n may be a, c, g or t
  misc_feature (257)..(257): Wherein n may be a, c, g or t
  misc_feature (289)..(289): Wherein n may be a, c, g or t
  misc_feature (315)..(315): Wherein n may be a, c, g or t
  misc_feature (350)..(350): Wherein n may be a, c, g or t
  misc_feature (351)..(351): Wherein n may be a, c, g or t
  misc_feature (394)..(394): Wherein n may be a, c, g or t
  misc_feature (404)..(404): Wherein n may be a, c, g or t
  misc_feature (405)..(405): Wherein n may be a, c, g or t
gaattcanattgttgtagtatctccagtcaaaggaacttaggcttcttgagaaagtggttgattgcaggtctaaggcaggaaaatacaagatgaaactggaatatcttgtgatggcagaaaataaggaggtgctcacaaaaagatggcacatgtccgaaggctacaggaaccaacctgaaggagctctccagtggaaatgctggaacaatttgagcaaaacaataaaaattattatattggattattacccacacnnataatatctgtgtgtccatactgatgtagacnattgaatgagtgaatgaatgaatganaagaagaaacagttcttctcccccagtaattccannttgataatgtagaagaaatgggagaaaacaaaatcactatcangaaaacacann

SEQ ID NO: 912 - protein, 82 aa, Homo sapiens
  misc_feature (7)..(7): Wherein Xaa may be any naturally occuring amino acid
MDTQILXVWVIIQYNNFYCFAQIVPAFPLESSFRLVPVAFGHVPSFCEHLLIFCHHKIFQFHLVFSCLRPAINHFLKKPKFL

SEQ ID NO: 913 - DNA, 309 bp, Homo sapiens
tctcctacccctaccaatatgtcacaaataccgatgaactctgctggtaacattagttcatcagttcgtatgacaaataatacctcttctgccaactataacctgcagaataacatggccgctaatacaaaaaatgcaggtcataagactaatactatgcaggctcatagcagcaatgcaactaataacacctccattaataatatgcatgccaatcttcagagcaacatggattccaactccacaatacgacaatctcagcatcctcaccatcagcagaatataatacaacaacagttgcaatcgaat

SEQ ID NO: 914 - protein, 103 aa, Homo sapiens
SPTPTNMSQIPMNSAGNISSSVRMTNNTSSANYNLQNNMAANTKNAGHKTNTMQAHSSNATNNTSINNMHANLQSNMDSNSTIRQSQHPHHQQNIIQQQLQSN

SEQ ID NO: 915 - DNA, 305 bp, Homo sapiens
tctagaggctgggaaatccaggatcaagttgccagcagatccagtgcatcatgaggacacacctcctggtttgcagatggtcgtcttgctgtgtcctcacatggcagaaagaggaagcaagctctccttgtttgttttataagggcactaatcccatcacgagaggtccatcctcagaacctaatgaccccctaaagagcccacctaatgctgtcccactgggggttagggttttgacattggaattttgaggaggacacaaacatgcagtccataacacattccctctcatgatatgcaagacc

SEQ ID NO: 916 - protein, 66 aa, Homo sapiens
MRTHLLVCRWSSCCVLTWQKEEASSPCLFYKGTNPITRGPSSEPNDPLKSPPNAVPLGVRVLTLEF

SEQ ID NO: 917 - DNA, 290 bp, Homo sapiens
tgtacatactgacgaaggcggcggcaggtgggcagaagctggtctggcacgctctcgatccggttagcaaccaatggcagaggctgccgctcatgcctgggatcgagtgcaggagtggcggcgtgtacgggctgggcttgcgggacctggtgagcgtcggcgtaggtatcttcgacgtcatcagaggctggctcgggcagaaggaactgtcaggcggcgtaccaccgttctgtggctgcgccgtcggcgccgctggtggctgcctctatgtcctgggcggcttctccgga

SEQ ID NO: 918 - protein, 72 aa, Homo sapiens
MAEAAAHAWDRVQEWRRVRAGLAGPGERRRRYLRRHQRLARAEGTVRRRTTVLWLRRRRRWWLPLCPGRLLR

SEQ ID NO: 919 - DNA, 373 bp, Homo sapiens
gcctttggtgggtctggcggtgattccgatgccaatggcacatttatggacttcggggtagacccatcaatggacccagaactggcaatggccttgcgtctgtctatggaagaagagcagcaaagacaggaaaggttaagacagcagcaacaacaacaagatcagcctgagcagtctgaacagcctgaacaacaccaagacaaatagtagtgcacaaaaatatctatatgggtcatatataaaccaaataaagcatatataacatctcccttcactcttccaggtttgagtacgcttcctctaaataggggacgacttgctttctggtggcctcgacgttcagttgcttaaacatcggcacaccttcatcaag

SEQ ID NO: 920 - protein, 68 aa, Homo sapiens
AFGGSGGDSDANGTFMDFGVDPSMDPELAMALRLSMEEEQQRQERLRQQQQQQDQPEQSEQPEQHQDK

SEQ ID NO: 921 - DNA, 313 bp, Homo sapiens
  misc_feature (273)..(273): Wherein n may be a, c, g or t
  misc_feature (300)..(300): Wherein n may be a, c, g or t
gggccctctgcgcctcatgctcctgccccgggctggtcctccctcctccatctggagcccaaattggagctcaaggtctgcatctgtcttaggcccctgctccggcttcctttcccagaactcacggacctcaggggaggtggcagggaggaacagcagagaaggaagagaacagagaacaagagggagggtgagttggagcatcaaaagctggggccagaactgggagtttcttggacagccccatcttcaaatattctgtccaactgtctnaccacaggccagagcttgtggaccganttttattttagag

SEQ ID NO: 922 - protein, 99 aa, Homo sapiens
  misc_feature (86)..(86): Wherein Xaa may be any naturally occuring amino acid
  misc_feature (95)..(95): Wherein Xaa may be any naturally occuring amino acid
MLLPRAGPPSSIWSPNWSSRSASVLGPCSGFLSQNSRTSGEVAGRNSREGREQRTRGRVSWSIKSWGQNWEFLGQPHLQIFCPTVXPQARACGPXFILE

SEQ ID NO: 923 - DNA, 271 bp, Homo sapiens
  misc_feature (1)..(1): Wherein n may be a, c, g or t
  misc_feature (261)..(261): Wherein n may be a, c, g or t
  misc_feature (268)..(268): Wherein n may be a, c, g or t
  misc_feature (269)..(269): Wherein n may be a, c, g or t
  misc_feature (271)..(271): Wherein n may be a, c, g or t
ngctagaatgttctctccttgcctctcctctcacctctgccctggtcgggtcctctttacttcttacctggattatggcaagagccttctggttctgcctcctggaggcagggaagcatatggacagagtacaggccttaaggtcagaaagtccaggagtaaattcctgccttcataaggtactagcagtacagtccttgtgggcttctatttcctcattgtctacccatccacaggtcactgaagtaagctgtattgacnccccccnncn

SEQ ID NO: 924 - protein, 65 aa, Homo sapiens
  misc_feature (63)..(63): Wherein Xaa may be any naturally occuring amino acid
  misc_feature (65)..(65): Wherein Xaa may be any naturally occuring amino acid
MARAFWFCLLEAGKHMDRVQALRSESPGVNSCLHKVLAVQSLWASISSLSTHPQVTEVSCIDXPX

SEQ ID NO: 925 - DNA, 254 bp, Homo sapiens
tttcccacagggctccctgcctctactcttgagcatgacagtctttcctccctgctgcagggtggaatatacacctgtatcatagccctccacccttagaatgaaatgtacactcctctgtctggctgcaggtctcctcatgaaccagcatccagcagctccatcagaggtcatctctcccaacatcacactgagagtctcctgctttggctccattctgagcctctgcacaggctgttccctctgacgaccct

SEQ ID NO: 926 - protein, 72 aa, Homo sapiens [sequence omitted]

SEQ ID NO: 927 - DNA, 297 bp, Homo sapiens
cctaggcagccctgcatcgtggcctcactgccagaatgcgctctgctctggaaggaggcatctggaacagctccatcggttcatggaggtccatctgtcagagtctctgctcagcaccctgagaaagcagctcctccagagctggcagagatgcagctgtggatgcagctggggcctcatggggagcctcagggccacctggctggggagactcagaggccccaggtgggcactgggagataaagtaagaaaccaacagcaggggataggggcagatagagcaatacttccagatct

SEQ ID NO: 928 - protein, 71 aa, Homo sapiens [sequence omitted]

SEQ ID NO: 929 - DNA, 262 bp, Homo sapiens
gagtagagactttgggatagagttagctccaaagtgggagtatttgaagtgaaaaatgacgcctcagaactgatacttcagcctgggaaagggataatgctggagagaaatcgcagccagcttggacatcagtcccgggggcagccacagcttctttcttcaactcaaatcctggagatttgggcatgcaagggcctgtcgtgttgtggcgctttctcaatcaccaaagtgggactagggcagagcaggacagccacaattg

SEQ ID NO: 930 - protein, 55 aa, Homo sapiens
MLERNRSQLGHQSRGQPQLLSSTQILEIWACKGLSCCGAFSITKVGLGQSRTATI

SEQ ID NO: 931 - DNA, 312 bp, Homo sapiens
ttcgcatattgcacctttcgtgaactggcttggtgtatttaagtgaatatggaagagctgaatattgattttgacgtatttaagaaaaggattgaattgttgtattccaagtacaatgagtttgaaggttctccaaattcgctgctgtttgttttaggttcgtccaacgctgaaaacccgtaccagaagacgcccatattgcataattggttgctaagttacgaatttcccgctactttgattgcattagttcccggaaaggttattataattactagttctgccaaggccaagcatttacaaaaggcaatt

SEQ ID NO: 932 - protein, 88 aa, Homo sapiens
MEELNIDFDVFKKRIELLYSKYNEFEGSPNSLLFVLGSSNAENPYQKTPILHNWLLSYEFPATLIALVPGKVIIITSSAKAKHLQKAI

SEQ ID NO: 933 - DNA, 312 bp, Homo sapiens
  misc_feature (127)..(127): Wherein n may be a, c, g or t
  misc_feature (128)..(128): Wherein n may be a, c, g or t
gtcgacagtgtcatgggcgcccgaccggcgatcggcgttgcgagcacgttcggtaccgcgagaggaatcggtaccgcgcgacgaggaggacgggcgggcagctcggcgacgagtggtccggcgagcnncgatccgtctgcctccccaccaccgatctcggcagccaggttgtcgaggatgtcgctggtggagcgctgctccgcgtctgcttcttgctcagccgtcttgcgggactgggcctgctcctcggccttggtcagggcagcgtcaatgtcggcgaaatccgattctgccttcggctcagagacgcgt

SEQ ID NO: 934 - protein, 104 aa, Homo sapiens
  misc_feature (43)..(43): Wherein Xaa may be any naturally occuring amino acid
VDSVMGARPAIGVASTFGTARGIGTARRGGRAGSSATSGPASXDPSASPPPISAARLSRMSLVERCSASASCSAVLRDWACSSALVRAASMSAKSDSAFGSETR

SEQ ID NO: 935 - DNA, 330 bp, Homo sapiens
  misc_feature (1)..(1): Wherein n may be a, c, g or t
ncttctgtatacttaagaatgtttaacctaatctggatttccatgtaccatgacattggatctcctcggctaactttctaatcaggtatttaccacgaatgtaaaatgtagcatgatattggaagtccaatccttgtgcgaaatgaaacaggtccaaagaacatccaacagtatagtagggtaataaacgttgaacagtaacatcattacacatcaaacaaaaaatatatatagtgccggtagaagacatctaacaggttgcaactgcgattctgtcctgagtttccatgatacatccgggcttcatggatagtcgatgcacccaagggc

SEQ ID NO: 936 - protein, 75 aa, Homo sapiens
MSSTGTIYIFCLMCNDVTVQRLLPYYTVGCSLDLFHFAQGLDFQYHATFYIRGKYLIRKLAEEIQCHGTWKSRLG

SEQ ID NO: 937 - DNA, 213 bp, Homo sapiens
  misc_feature (213)..(213): Wherein n may be a, c, g or t
atgcaggtgcatgggggaccctggacataggacgaggacccctgaggggaaccaagcatgtgcaggtggaggtgatggtatgtatgaggtgacccttgagtgtccctttgagtgaccgtaacagccatgcttggtcccagctccgtcagggagggcagagaaaggaaggacctcatccccctttgaaggaatccggcccccccctgcacccgn

SEQ ID NO: 938 - protein, 58 aa, Homo sapiens [sequence omitted]

SEQ ID NO: 939 - DNA, 301 bp, Homo sapiens
  misc_feature (1)..(1): Wherein n may be a, c, g or t
ntgcattacgtcgcccccgcgaagctgtcgacgtcgtcgcccaagctcgcgctcccgaccggcaacgcgctcgcgaacatcggcagcgtcacgatcgagcccggctcgcgctggctcgtgatcggcaagtcgggttccggcaagagcacgttcatgcgcgcgctcgcggggctctggccgttcggcgacggcgcgatcgatgcgccggtcggcgcgcggatgatgttcgtgccgcaaacgagctatctgccgatcggcacgctgaaggccgcgctcacctatccggcgacagccgacgcgt

SEQ ID NO: 940 - protein, 100 aa, Homo sapiens
  misc_feature (1)..(1): Wherein Xaa may be any naturally occuring amino acid
XHYVAPAKLSTSSPKLALPTGNALANIGSVTIEPGSRWLVIGKSGSGKSTFMRALAGLWPFGDGAIDAPVGARMMFVPQTSYLPIGTLKAALTYPATADA

SEQ ID NO: 941 - DNA, 336 bp, Homo sapiens
  misc_feature (1)..(1): Wherein n may be a, c, g or t
  misc_feature (2)..(2): Wherein n may be a, c, g or t
nntcatgaaggtggccacaatgtgaccaaacttctttatgaaagtgctaatatcccagattttagaaaggaaaaaccatcatatcaagttattaattggcgtccacctgaagatcaggaaaagaaatttgctgatcttaggcatcgacttacagaagaaataacttatggcaggtccaaacatcacacccttctaaagatccatcaatactttggggacttatgcagtcaattattaagcagaaaggacatcatggacttcttaaaaaatgagaactttgacctagtacttcttgattcaatggatctctgttctttgctaattgttgaaaagctt

SEQ ID NO: 942 - protein, 112 aa, Homo sapiens
  misc_feature (1)..(1): Wherein Xaa may be any naturally occuring amino acid
XHEGGHNVTKLLYESANIPDFRKEKPSYQVINWRPPEDQEKKFADLRHRLTEEITYGRSKHHTLLKIHQYFGDLCSQLLSRKDIMDFLKNENFDLVLLDSMDLCSLLIVEKL

SEQ ID NO: 943 - DNA, 366 bp, Homo sapiens
accttgtcgcccggcctggtctgggtgacggcgctattggccgtgctgctctcgctggaagggctgttccgcagcgatttcgaggacggttctctggagcagtgggtcctttcgccgcaccccctggctcttctggtgctggccaaggtgctggcacactggctgttttccgggctggccctggtcctgatgtcgccgctgttcgcgctgatgctgggcctgccggcccgttgcataccggtgctgctgctttccctgttgctcggtacgccggtgctgagcctgctcggcgccgtcggcgcggccttgaccgtgggcctcaagcgcggcggcctgttgctggcgctgctgatcctgccgctgtac

SEQ ID NO: 944 - protein, 122 aa, Homo sapiens
TLSPGLVWVTALLAVLLSLEGLFRSDFEDGSLEQWVLSPHPLALLVLAKVLAHWLFSGLALVLMSPLFALMLGLPARCIPVLLLSLLLGTPVLSLLGAVGAALTVGLKRGGLLLALLILPLY

SEQ ID NO: 945 - DNA, 340 bp, Homo sapiens
actagtgactgtttttatgtaaatgagcaaaaattaccaaggtaccagcagaactaaaatcacttttttgggttctttcaaagaatactgttaattgagcagttattatgcaccctgtgccaggagaagataactgaaggaaggaaaaggattctttagtgaagtgggctttaacccataacttctaatgcctaattcaatgtctaccttcttttcatcacagactgtccttacgaatgccaggacacagcccttctctccttacccaggaaatatgtctcaggacattgctactcagctagatcttgattttctcctccaggagaataaaaggaaattt

SEQ ID NO: 946 - protein, 51 aa, Homo sapiens
MPNSMSTFFSSQTVLTNARTQPFSPYPGNMSQDIATQLDLDFLLQENKRKF

SEQ ID NO: 947 - DNA, 357 bp, Homo sapiens
  misc_feature (1)..(1): Wherein n may be a, c, g or t
nggacttgtcgacgccgcccacaccgagggggatcaggcaaccgacaggcccaccactcaagtactcggggatagcaatgacctcaacgatcgctattccaccgacatttctccttcaccggatgccgacgacagcaccgtgctcgaccacggacacgccgatatcttccgggtggtatcggcccccgacggcggtatcgacctctttctcaaagaggacgtcaccggtgacggggcactccacacccctgagaacgtccttctcaaaatcaaagattccgctctcaccgatatcccggccagccttcctggcgcccctcaaggatatgtcctgccgctgacgcagaaccaagatct

SEQ ID NO: 948 - protein, 87 aa, Homo sapiens
MTSTIAIPPTFLLHRMPTTAPCSTTDTPISSGWYRPPTAVSTSFSKRTSPVTGHSTPLRTSFSKSKIPLSPISRPAFLAPLKDMSCR

SEQ ID NO: 949 - DNA, 343 bp, Homo sapiens
tgtacagccgggacgcagacatcgtcatcaccgcccgcggcaagtcttccgagtagttttggatcctgtagcgtaagagccagaggaaggaggtcagaagtgaaaggctggagcggggcagcagggacaccccataatcgcagagacttcaacatacacaatgctctctgccgtccacgctctcatctataaattgcttccagactgttttttttgtttgtttgtttgttttttttgtctacttagaccctcacaatggccctggcaggaggacttggattgcaagagccatttccctgaaggagaaacaggagctcagaggtggggacactccccaggggcc

SEQ ID NO: 950 - protein, 61 aa, Homo sapiens [sequence omitted]

SEQ ID NO: 951 - DNA, 320 bp, Homo sapiens
  misc_feature (1)..(1): Wherein n may be a, c, g or t
  misc_feature (205)..(205): Wherein n may be a, c, g or t
ngtcccctgcctggggggcagaccaagattccccattaaaaaaaaaaaaaaaggaaatggcaaaagggtcctttcttcttggcccccccaaaaatccaaatactttctggagttttcaataaacatctctatgcaccccaactaaaaaaaaatctaaaagaaatggataaatttctgggcaaatacattctcccaataccaaacnagaaagaaactggagcccagaacagaacaataacaagctctaaaattgaattagtaaatagcctaccagccaaaaaaagcctaggacccaccgcccagcttctccctgagggccc

SEQ ID NO: 952 - protein, 93 aa, Homo sapiens
  misc_feature (56)..(56): Wherein Xaa may be any naturally occuring amino acid
KKKKRKWQKGPFFLAPPKIQILSGVFNKHLYAPQLKKNLKEMDKFLGKYILPIPNXKETGAQNRTITSSKIELVNSLPAKKSLGPTAQLLPEG

SEQ ID NO: 953 - DNA, 384 bp, Homo sapiens
gggcccacaccagggctggcacatgtcactggctgaaggaggggctggtctttgtctttacctgacattctcgggtagccacagctcttttgagccctgctggaggggaagggcagtgatttggggagctggaaaatgaatgttacctcgtggcgtctattttcacgagtgggacatgggcctctggtggccccagtgcagttggcttgggcagtcgtatatccaatggcaacttcccaagtaccctcctggacaccaggtcctttgctgggtttgaggggttcagtggggaaccatacacagttcatgccttgggggatttcccagtgtggtaaaggagatgttattagtaaaatgtttggcgcccctttggccactcagcca

SEQ ID NO: 954 - protein, 102 aa, Homo sapiens [sequence omitted]

SEQ ID NO: 955 - DNA, 297 bp, Homo sapiens
ggccgttgtgagtttgagttcgaagtgatccccggcatcaccagcgtgcaggccctggcggctcagcataaggtggcgctcaaccgtatcggccgctcgatcgaaaacaccacgggccgccggctggcggcggggcaggcaagtgatgccgataccttggtggtgatgcttgatgccgaggactcctaccgcactgtggccgaccaggatatggatatttactggggagcctacctgggcaccccggatgaaatactgatcaacggcaaagtcagtgaagtggccgacgaaatccac

SEQ ID NO: 956 - protein, 99 aa, Homo sapiens
GRCEFEFEVIPGITSVQALAAQHKVALNRIGRSIENTTGRRLAAGQASDADTLVVMLDAEDSYRTVADQDMDIYWGAYLGTPDEILINGKVSEVADEIH

SEQ ID NO: 957 - DNA, 217 bp, Homo sapiens
cgcgtgtgggtcacctgcaacgtcggcctggtgaacccggcggacccggccaactctgcgatcgcggcgtcgttcaccgatgtcaccgcacagcacgtgggccgggcgatgcttcagtacgcggccgatcacgacatgatgaccgagctgccgaaccgtgcatgcgtgatgcgccgactgaacgaagtggtcgcgaactcccagcggtgcgaaccgg

SEQ ID NO: 958 - protein, 72 aa, Homo sapiens
RVWVTCNVGLVNPADPANSAIAASFTDVTAQHVGRAMLQYAADHDMMTELPNRACVMRRLNEVVANSQRCEP

SEQ ID NO: 959 - DNA, 358 bp, Homo sapiens
caattgcacaaatgcccagtgaaagccagatgaagtcaaggatcaatctggacatagaggaaatgttgggaaaactgagtcgttgcatggcatgaggcagttcaatctactcagccataggattcgatgccatcttcacgctgtgagcagatgtgctatggggactttggctttttacatactaacacataccagcttataagcagaaacttgaggcataaacacacaaagaagaatggttctgtccctgattctgttagtaaatggattagatatccatttagtaccaattttaatatcaacacaatgcttaccctatcttccagtgagttaacaattttaaaaaaatttcaattga

SEQ ID NO: 960 - protein, 77 aa, Homo sapiens [sequence omitted]

SEQ ID NO: 961 - DNA, 434 bp, Homo sapiens
agatctaattttacccacagatgttttaatgtatcttttattatttgtaaacataacctcaataccatttatcatatctaaacaatttaaaataggtgtgaggaggaggaaaaaaatatagtgaggtggtggcatcaaattttcagtgtttaaatgcccaattatctcatcaagtctttttttccccgaagtttgttttgaataggattgagatgtggtctgcactttgaggttgggtggtatggtttttaatttattggctcctcagttgttgaagaagccggatcatttgttctgtcctgtggatgaattaataagtgaatatattacaggaactaggttatccttatttagtcaaacaccaaaccttgtttatttccttgggaatattttcattctagcattccttttcattcttctgacattaccctagg

SEQ ID NO: 962 - protein, 63 aa, Homo sapiens [sequence omitted]

SEQ ID NO: 963 - DNA, 352 bp, Homo sapiens
tcatgatcgatgatcttggtgtgaaggcttcggtagcgagacctgtccagcgggtggtgagcttagtgccgtcgattaccgaagctatcgcgatgacttgtccacatgtcttggtgggttgtaccgattactgcatccgtccgacccatctcgaagaaatcgtcgggcacgaagtggttagggtgaggggcaccaagaacccggatcgcaaggcgatcatcgaccttcgaccggacctcgtggtggccaaccaggaggagaaccgcgagcacgacgtcaccttgttacgcgaggctggggtggcagtgtgggtgacgcgcatcgacaccgttgaggaagccatctccagctt

SEQ ID NO: 964 - protein, 116 aa, Homo sapiens
MIDDLGVKASVARPVQRVVSLVPSITEAIAMTCPHVLVGCTDYCIRPTHLEEIVGHEVVRVRGTKNPDRKAIIDLRPDLVVANQEENREHDVTLLREAGVAVWVTRIDTVEEAISS

SEQ ID NO: 965 - DNA, 362 bp, Homo sapiens
  misc_feature (331)..(331): Wherein n may be a, c, g or t
  misc_feature (332)..(332): Wherein n may be a, c, g or t
  misc_feature (343)..(343): Wherein n may be a, c, g or t
  misc_feature (355)..(355): Wherein n may be a, c, g or t
  misc_feature (358)..(358): Wherein n may be a, c, g or t
tctagatattttctctgataggccaggaagtagtgacactcctgtagcaatgagcacatctagtgcatagatcttagttcctaaatttccttctctaatccagggttccttggagaaacagttaatttcagggctggggcagagaaaatacaagatgagcctgaagtatcttgaggtgacggaaactaaggaagtagtcacaagacaaggatggaggtatattgaaggacacaggagccaactggggagaattactcttccaaaattaagccagaacaacttgagcaacaaaatatataacagtaatactgtattatagtctagagaccannaataatatcantgaacccagganatntcca

SEQ ID NO: 966 - protein, 54 aa, Homo sapiens [sequence omitted]

SEQ ID NO: 967 - DNA, 315 bp, Homo sapiens
  misc_feature (1)..(1): Wherein n may be a, c, g or t
nacgcgttggtggacgtgatccgccgcggggtctcgtccccgggggcggagccgaagtgtgagaaggcgcaggtggtggtgaccatcggcttggacgacctgtacggaggcacccacggtgccggggtgacgtccaccggcgaggtcctggcgccgagcgtggtgcggcggatggcctgtgatgccgggataatcccggtcgtgctcggcggcgacagcgaagtcctcgacctggggcgctcggtgcggtggttcacgccggggcagacgcgcgcgatctggttgcgtgacggcggatgcacctacccggggtgc

SEQ ID NO: 968 - protein, 105 aa, Homo sapiens
  misc_feature (1)..(1): Wherein Xaa may be any naturally occuring amino acid
XALVDVIRRGVSSPGAEPKCEKAQVVVTIGLDDLYGGTHGAGVTSTGEVLAPSVVRRMACDAGIIPVVLGGDSEVLDLGRSVRWFTPGQTRAIWLRDGGCTYPGC

SEQ ID NO: 969 - DNA, 256 bp, Homo sapiens
  misc_feature (1)..(1): Wherein n may be a, c, g or t
  misc_feature (2)..(2): Wherein n may be a, c, g or t
nngcaagcgacagttaaaactatgacaccagaagaactaaaggctatgggttctcaagttattttgagtaatacctatcatttatttcttcccccggggccggaccttgtaaaaaaggctgggggcttacataaatttatgaattgggatcaagcgattcttactgatagtggtggattccaagtatttagtttaggcgatatgcgcaaaattactgaggatggtgttacatttagatcccacattgatggatcag

SEQ ID NO: 970 - protein, 85 aa, Homo sapiens
  misc_feature (1)..(1): Wherein Xaa may be any naturally occuring amino acid
XQATVKTMTPEELKAMGSQVILSNTYHLFLPPGPDLVKKAGGLHKFMNWDQAILTDSGGFQVFSLGDMRKITEDGVTFRSHIDGS

SEQ ID NO: 971 - DNA, 304 bp, Homo sapiens
  misc_feature (1)..(1): Wherein n may be a, c, g or t
  misc_feature (2)..(2): Wherein n may be a, c, g or t
  misc_feature (100)..(100): Wherein n may be a, c, g or t
  misc_feature (304)..(304): Wherein n may be a, c, g or t
nnccgcggtcttgctcttcgcggaaaccaagttagctttggtgaattcggattgaagtccactgaacgtggtcgtcttactgctcgtcaaattgaagcgncgcgtcgtgcaatgactcgtcacatcaaacgtggtggtaaaatctggattcgtgtgttccctgataagccgattactcagaaacctcttgaggttcgtcagggtaaaggtaagggtaatgtagaatactgggttgcacagattcaacctggtaaaatgctttatgaagttgagggcgtttcagaacagctagcgtgcgaagttn

SEQ ID NO: 972 - protein, 101 aa, Homo sapiens
  misc_feature (1)..(1): Wherein Xaa may be any naturally occuring amino acid
  misc_feature (34)..(34): Wherein Xaa may be any naturally occuring amino acid
XRGLALRGNQVSFGEFGLKSTERGRLTARQIEAXRRAMTRHIKRGGKIWIRVFPDKPITQKPLEVRQGKGKGNVEYWVAQIQPGKMLYEVEGVSEQLACEV

SEQ ID NO: 973 - DNA, 201 bp, Homo sapiens
cctggtggatcgatgcccggggccccgaaggaacggtccgtagaaatcctggccggtctggaggtcggcgcccggggaatctactcgggaatcctgggatatctcggcttcgatcgccccgccgacctcagcatcgtgatacggacggtgatccgaacggggtcgcaggtagcggtcggtgccggcggcgcaatcgtcgcg

SEQ ID NO: 974 - protein, 67 aa, Homo sapiens
PGGSMPGAPKERSVEILAGLEVGARGIYSGILGYLGFDRPADLSIVIRTVIRTGSQVAVGAGGAIVA

SEQ ID NO: 975 - DNA, 383 bp, Homo sapiens
acgcgtgaaggtgtaagctaaggatagagacctgggcaggggagagcatttgggagattggtggcaagaaaagaacattttggttagaggaaagctaaaacaagttaaattatggaaacctaggaatgagagaatttcagtaaagatgtatattacagtgccagtgctgctgagaggtcaagaggctgaggtgctggatttgacttgtaataaagtagttggactggatgataccaaaaatccaattcagttatcacattggcccctaatttgggaagttttctgtagatttttgaaagggaaaatgataatatgaggtaagtaggccaatttggaaaaagcctttaattcaaaaaatcatcaccagagggttattcccactt

SEQ ID NO: 976 - protein, 56 aa, Homo sapiens
MYITVPVLLRGQEAEVLDLTCNKVVGLDDTKNPIQLSHWPLIWEVFCRFLKGKMII

SEQ ID NO: 977 - DNA, 383 bp, Homo sapiens
  misc_feature (1)..(1): Wherein n may be a, c, g or t
  misc_feature (147)..(147): Wherein n may be a, c, g or t
  misc_feature (327)..(327): Wherein n may be a, c, g or t
  misc_feature (338)..(338): Wherein n may be a, c, g or t
  misc_feature (346)..(346): Wherein n may be a, c, g or t
  misc_feature (369)..(369): Wherein n may be a, c, g or t
  misc_feature (371)..(371): Wherein n may be a, c, g or t
  misc_feature (377)..(377): Wherein n may be a, c, g or t
ngcttggttgagctagcagctcttcttcaggaaatctgaaagctttgaaagagaaaaatatcgtttgttccagagtcaggaacactgttctctcagcctggggtacttttgtctctgttgaagcccccttaccaagagatatgtgtntggggtggaggtggggaaggtgaacattcacacacaaccttcacacacccgcacctgcacatttataacacacccccatacacacatgcctagcttctgtctttctcacacatacccttgcacactgattcatgcgagcatccactatacccatcctataatgtacacattcccacccancctttcacatnacacgatnccctgcgcactcacacataactntntcactntcatag

SEQ ID NO: 978 - protein, 50 aa, Homo sapiens
  misc_feature (32)..(32): Wherein Xaa may be any naturally occuring amino acid
  misc_feature (36)..(36): Wherein Xaa may be any naturally occuring amino acid
  misc_feature (38)..(38): Wherein Xaa may be any naturally occuring amino acid
  misc_feature (46)..(46): Wherein Xaa may be any naturally occuring amino acid
  misc_feature (47)..(47): Wherein Xaa may be any naturally occuring amino acid
  misc_feature (49)..(49): Wherein Xaa may be any naturally occuring amino acid
MPSFCLSHTYPCTLIHASIHYTHPIMYTFPPXLSHXTXPCALTHNXXTXI

SEQ ID NO: 979 - DNA, 231 bp, Homo sapiens
tgatcactaatcagcacagaggaggcttataatggtggccacagggctggggacttggccttccctgcgctaccctgtcactgacttggcagacagcgtgactggctggctcctcacatcgccgcctatccctgctcccaaacgtctgggcgctcagggaaaattaggagggaagggagacctggctcctgttctcagagaacaggacaggctctaggagctggaccgggg

SEQ ID NO: 980 - protein, 61 aa, Homo sapiens [sequence omitted]

SEQ ID NO: 981 - DNA, 231 bp, Homo sapiens
cgcgttgacgtgtaccggtcttcggggccaggtggccaaggagtcaataccaccgattcagctgttcgtcttacccacttgtctaccggcatcgtcgtcagctgccaaaatgagcgcagccagttgcagaacaaagcggaagcgatgcggatgttgcgggcaaaagtcgcggccttagcggcgcaacaggctgctgatgaaaatgaatcaatgcgtcgagaccaggtgcgt

SEQ ID NO: 982 - protein, 77 aa, Homo sapiens
RVDVYRSSGPGGQGVNTTDSAVRLTHLSTGIVVSCQNERSQLQNKAEAMRMLRAKVAALAAQQAADENESMRRDQVR

SEQ ID NO: 983 - DNA, 296 bp, Homo sapiens
acgcgtaccagcgcactaccggcgcaaccggaccacgcttcatcggcttccggttgggcgactccaacgcgacgaccgacaccactttcaccacctcgcttgatcttgactccgacggctccgccaaccgccagcacgtcgtcgacgaccgtgattccgccatctcgtaccagggttcgtgggtgcagcgcagcgatcctggagcctcgggcaaaaccctgacggtctcatcccgcaagggggacacggcgaccttgaccttcaccggcaccgggatctccgtcatctccggtacc

SEQ ID NO: 984 - protein, 95 aa, Homo sapiens
MTEIPVPVKVKVAVSPLRDETVRVLPEAPGSLRCTHEPWYEMAESRSSTTCWRLAEPSESRSSEVVKVVSVVALESPNRKPMKRGPVAPVVRWYA

SEQ ID NO: 985 - DNA, 276 bp, Homo sapiens
  misc_feature (1)..(1): Wherein n may be a, c, g or t
  misc_feature (2)..(2): Wherein n may be a, c, g or t
  misc_feature (3)..(3): Wherein n may be a, c, g or t
  misc_feature (223)..(223): Wherein n may be a, c, g or t
nnnagggcctctcccatgaactcctcacctcccacaccctcctctgacaggcctctcctctgcccacctcacctccctcaccctcctctgatagggcctctgccctgcccacctcacctccctcattctcctctgacagggcctctcccctgcccacctcacctccctcatcctcctctgacagggcctctcccctgcccacctcacctccctcatcctcctnctgacaggcctctcccatgaactcctcacccccctcactctctcctggcgcgc

SEQ ID NO: 986 - protein, 80 aa, Homo sapiens
  misc_feature (1)..(1): Wherein Xaa may be any naturally occuring amino acid
  misc_feature (75)..(75): Wherein Xaa may be any naturally occuring amino acid
XRASPMNSSPPTPSSDRPLLCPPHLPHPPLIGPLPCPPHLPHSPLTGPLPCPPHLPHPPLTGPLPCPPHLPHPPXDRPLP

SEQ ID NO: 987 - DNA, 339 bp, Homo sapiens
cggtcccgtgtgtgcgtggtaggacctgctacacctttgctgcaggaagtttttaagaatctggtgcttgccggaatatcatctcttacttggctcaaagtagagtgtgcagttcaatcgggttctctgtttttagcagagcttaaaaaagatcttgagccattggcttctaaacagctagaatatgaggaaaatgaccttagaaagacgttacagcaacctcagtatgattggacccgcttctcggtggtgatcttgacttgtattggtgagcaaactgcgatgctcgatttaaatgagattaggcggcagagaggaacaaagtttccgcctgttcta

SEQ ID NO: 988 - protein, 113 aa, Homo sapiens
RSRVCVVGPATPLLQEVFKNLVLAGISSLTWLKVECAVQSGSLFLAELKKDLEPLASKQLEYEENDLRKTLQQPQYDWTRFSVVILTCIGEQTAMLDLNEIRRQRGTKFPPVL

SEQ ID NO: 989 - DNA, 207 bp, Homo sapiens
  misc_feature (1)..(1): Wherein n may be a, c, g or t
ncgggttgggaggtcacgggcgtcctgcgccgtgtgtgcgacaatgtgctgaacgaaaagggcgtgagcgacaaggtgctcatccagcgcgcccgcgctgtcgctctgcttggatcgatttacagcccggtcgagcccgacgagtcggacgatgagcgtcgcgagctggagcatctcgtggctcaggccgcgcacaagaagaagaag

SEQ ID NO: 990 - protein, 69 aa, Homo sapiens
  misc_feature (1)..(1): Wherein Xaa may be any naturally occuring amino acid
XGWEVTGVLRRVCDNVLNEKGVSDKVLIQRARAVALLGSIYSPVEPDESDDERRELEHLVAQAAHKKKK

SEQ ID NO: 991 - DNA, 313 bp, Homo sapiens
  misc_feature (1)..(1): Wherein n may be a, c, g or t
ntaattcgggcgtagcgctcagggtcgacccgcggtgcaagccggtccgcatggccacggcacaaatgagctttgaacgcgccggatccataccagctttcgtccaacttcaatcgctgccttagctgctccagttcggagatcctggcccgcacgttagcgctgcgcaatgccacctgctgattgttcatcgccatgaccgcaccgctttcctcacacgccacacgccactctggagctttccaagcttggacgcgcgcaactgccgaaccttgcgttcggcaacatcgcgctgctccgttaatgcttcact

SEQ ID NO: 992 - protein, 65 aa, Homo sapiens
MAMNNQQVALRSANVRARISELEQLRQRLKLDESWYGSGAFKAHLCRGHADRLAPRVDPERYARI

SEQ ID NO: 993 - DNA, 260 bp, Homo sapiens
atctatactgctggttggtccatcaccccagaaggtaacttagctcttggtgaccaggatactttttaccaatgtttgtctggtgacttctataacctgtatgataagcacattggttctcagtgccatgaagtttatttgcaagctatagatttaattgactgttgaacgatgcatcgttatctaccgatgacgcagagtgagacgttctacacgatgtgcagtggcggcttgggtcacagcatgcctgccgcgggggg

SEQ ID NO: 994 - protein, 55 aa, Homo sapiens
IYTAGWSITPEGNLALGDQDTFYQCLSGDFYNLYDKHIGSQCHEVYLQAIDLIDC

SEQ ID NO: 995 - DNA, 321 bp, Homo sapiens
  misc_feature (1)..(1): Wherein n may be a, c, g or t
nacgcgtgtccttttttgttaagacaatagatattttagcattcagaaagtttcaatttccaagacttgacgtttcaattatatggcaatctcccaacaagcacccgctcatataataccatgcaagtgaccacaagatttatatctgcgatagtctcgttttgcctgtttgcttctttcacgttggctgaaaacagcgcaagagctacgccgggatcagatttactcgttctaacagagaagaaatttaaatcattcatcgaatctcatccgttagtcctcgtcgagttttttgctccatggtgtttgcattctcagatc

SEQ ID NO: 996 - protein, 67 aa, Homo sapiens
MQVTTRFISAIVSFCLFASFTLAENSARATPGSDLLVLTEKKFKSFIESHPLVLVEFFAPWCLHSQI

SEQ ID NO: 997 - DNA, 391 bp, Homo sapiens
  misc_feature (391)..(391): Wherein n may be a, c, g or t
agatctttgctatataatctcattatatgactacacattttcctttgagcttacaggtttctgggttaacctcctgacgtactttttaatggaaagtccccaactgtcagaaatggcaggggagaataattttttgtttagtctaagttttttgccctaggtctttagtgagaatacccaagttagtaagtctgtgttctctgcccatagagtatcccttaatgcaagttgtttctttcttttgaggcctttcttgttgccatcctcttacttgttgtatagtaggttgttgaaaactgctgagaaagttaggatgtttcccagccgttccaggctttaatgccctgcattgcatgaggagcattgccctggccttttatcctgtcccatn

SEQ ID NO: 998 - protein, 73 aa, Homo sapiens [sequence omitted]

SEQ ID NO: 999 - DNA, 356 bp, Homo sapiens
gcgcgccgggggcgcgatgtggagcgggcacttacccgtttcatggccaagacaggcgagactcagagtcttttcaaagatgacgtcagcacatttccattgattgctgccagacctttcaccatcccctacctgacagctcttcttccgtctgaactggagatgcaacaaatggaagagacagattcctcggagcaggatgaacagacagacacagagaaccttgctcttcatatcagcatggaggattctggagccgagaaagagaacacctctgtcctgcagcagaacccctccttgtcgggtagccggaatggggaggagaacatcatcgataacccttatctgcgaccggt

SEQ ID NO: 1000 - protein, 118 aa, Homo sapiens
ARRGRDVERALTRFMAKTGETQSLFKDDVSTFPLIAARPFTIPYLTALLPSELEMQQMEETDSSEQDEQTDTENLALHISMEDSGAEKENTSVLQQNPSLSGSRNGEENIIDNPYLRP

SEQ ID NO: 1001 - DNA, 174 bp, Homo sapiens
ttagtcctttttgtcccagttccagctttgtctgcataccataaggtccaaaccaaattggcccgtgaattggaaaagaaattccctgaccgtcatgttattttcttggctgaaagaagaatcttgccaaaaccatctagaacatctagacaagtccaaaagagaccaagatct

SEQ ID NO: 1002 - protein, 58 aa, Homo sapiens
LVLFVPVPALSAYHKVQTKLARELEKKFPDRHVIFLAERRILPKPSRTSRQVQKRPRS

SEQ ID NO: 1003 - DNA, 294 bp, Homo sapiens
tagatctgagagccggtggatcgtcttcgcgcgtgggttgcagccgatcgacgaatgacgcagcctccacgtagtaattacggagggagcggccatgagtccaacctatccgcagcgtgaggacctcccgaggacaccgcagcctgccgcgataacagcccgtccaccgtatgaggatgaaatcctccaagagcatatgcgacgattgcacaatgcgcgtgcgctcggcgtgcggcccgtcagtgcctagcgtcccggccctacgcctgagagtggcggcgtgctcgaacgcgt

SEQ ID NO: 1004 - protein, 65 aa, Homo sapiens
MLLEDFILIRWTGCYRGRLRCPREVLTLRIGWTHGRSLRNYYVEAASFVDRLQPTREDDPPALRS

SEQ ID NO: 1005 - DNA, 297 bp, Homo sapiens
  misc_feature (1)..(1): Wherein n may be a, c, g or t
nctatacacacccatgcctcatccatcctccggaattcctcgggtctccaactcagaaggtgtctgttacatcgtgaaataatatttttcactaaattaatcttgaccttaagtccaaggttgaaattgcaacattagcacatatattgcttggcagccctggccgaattctcatattaaattctccatcctgagccattctttgattatctgcaccccagctgataatattcaagcaaattaaactgtatattaaagctaccaacattttacgttgcccttggcggctgtatgctt

SEQ ID NO: 1006 - protein, 58 aa, Homo sapiens [sequence omitted]

SEQ ID NO: 1007 - DNA, 346 bp, Homo sapiens
  misc_feature (1)..(1): Wherein n may be a, c, g or t
ncgatcactttctgcaattgacaatttaaatgttcccaaattatacaaggagaaggaaaatcaggatctaaaaatataatgagggttgctgttttggagacacctctaaggccatcttacttagtccatttcccaagtttccagctgcactgtttcatcatagaatggaatttacaaattgcctcccaatgctgtcagattctattgtttataataaattaattcttacatgcgtttctaagaaaagttgtgaaaataattttctggaggtccttacatatagtgtttcccacagagaatgtgtgcgtctgttttgctggttagttggttagcatgattttgtaca

SEQ ID NO: 1008 - protein, 55 aa, Homo sapiens
MEFTNCLPMLSDSIVYNKLILTCVSKKSCENNFLEVLTYSVSHRECVRLFCWLVG

SEQ ID NO: 1009 - DNA, 273 bp, Homo sapiens
gttttagacattttatttccgaatctgctaaccccataaaatttcaatgacataggtataacgtatatctgcttgttttgaggctctttggaaggccacaaaggacggtaatatctacgatcttttttccccctaagaacatgagcaatatcacccatgttgagaatgcatgtccgagagataaatgacttggtcaaggtcacgtggctaatttagtggcagaattagacctaaattagaggtcacaaactggcagactagaaccagcttata

SEQ ID NO: 1010 - protein, 52 aa, Homo sapiens
MGDIAHVLRGKKDRRYYRPLWPSKEPQNKQIYVIPMSLKFYGVSRFGNKMSK

SEQ ID NO: 1011 - DNA, 386 bp, Homo sapiens
  misc_feature (370)..(370): Wherein n may be a, c, g or t
cggagcgccatcgacgtgtacggcgagaacacgcgcgtcgtgattccgatcaccacacaagagttcggccaggtgttccttatcgcgatcggcgcgatgatggttggctctaccgtcatgacggcgcgcgagggacagcatgttgagccacgtgatgagctaggctacttcaagttcggaggcagcaccctcgtcctcctcgtcgacgctgcacgcgtgcgctgggacggcgatttgctcgtcaactcggaggcatgcatcgagacgctggtacacgtcggcatgcgcatcggccgcacccccactgcttaggtgctcccttcacgcgccgagcgactcactgccagggcgtgtattcggccgagctgancaatgtgctgggtacc

SEQ ID NO: 1012 - protein, 103 aa, Homo sapiens
RSAIDVYGENTRVVIPITTQEFGQVFLIAIGAMMVGSTVMTAREGQHVEPRDELGYFKFGGSTLVLLVDAARVRWDGDLLVNSEACIETLVHVGMRIGRTPTA

SEQ ID NO: 1013 - DNA, 299 bp, Homo sapiens
  misc_feature (1)..(1): Wherein n may be a, c, g or t
ngttagatagaaggaataagttctaatgcttaatagtagagtagggtgactataattaacaataatacattgtgcatttcaatatagccagaagtgagaactcgaaatgttctcaacacataaaaatgataaatgctcatgatgatggatagcctaaatacgctgacttgaacaatacacattctatgcatgtaacaaaataacacatgtgctccataaatacatgccaatatatgtatcaattgtaaaatgtcattttaagaagcgtgtggcttacctgcacttgcactctgactgtg

SEQ ID NO: 1014 - protein, 53 aa, Homo sapiens [sequence omitted]

SEQ ID NO: 1015 - DNA, 406 bp, Homo sapiens
tctagattttgaagggtaccttaactctgactacctggaacagttaaattctgaaatggctggtttgatatgagacagacaagcaaagcttcttggttacagacacacataagtgttgctcatagatgttggggtttgggggatggtttctgaatacttccaagtagtcttttttgggagcatttaaatttttgttcccccaaacagtattggtatatactgacatgtcagtcacccaatgactctgaaaagtggtatgtcagaaatacctaataggctttctcctaacttttacctttaagtagaacatctactatctcacatcatccttactgcccagttcttagccatcttaccaaaagttacttcatataattccatgactatagagctaaactcttttctg

SEQ ID NO: 1016 - protein, 60 aa, Homo sapiens
MSVYTNTVWGNKNLNAPKKDYLEVFRNHPPNPNIYEQHLCVSVTKKLCLSVSYQTSHFRI

SEQ ID NO: 1017 - DNA, 489 bp, Homo sapiens
aagcttgtaggtggctgcgacacgcacagatacgacctttcctctatggtcatgctcaaagataatcatatttgggctactggttctataacaaacgcagttaagaacgccagggccgtgtgcgggtttgctgggaaaatcgaagtggagtgtttgagtgaagatgaaaccacagaggccattgaagctggtgcagacgttatcatgttggataatttcaaaggtgacggtttgaaaatgtgcgcccaaagtcttaagaacaaatggaatggtaaaaagcatttcctcttggaatgtagtggaggcttgaatttggacaacctcgaggagtatttgtgcgatgacattgacatttacagcactagtagcattcatcaaggcacaccagtgattgatttctcattgaaactggctcattgaaaatgcttaggcttcgatttttacttttttttatttacatattctaaataagattaagaagctacgcgt

SEQ ID NO: 1018 - protein, 139 aa, Homo sapiens
KLVGGCDTHRYDLSSMVMLKDNHIWATGSITNAVKNARAVCGFAGKIEVECLSEDETTEAIEAGADVIMLDNFKGDGLKMCAQSLKNKWNGKKHFLLECSGGLNLDNLEEYLCDDIDIYSTSSIHQGTPVIDFSLKLAH

SEQ ID NO: 1019 - DNA, 194 bp, Homo sapiens
gggaccagcaaggcgatggggtcggtgcgcgccgacgttctgttcatgtccaccaccgcggtcaccgccggtcactgctaccaccagtcgcaggagaccgtcgccgtcaagcgcgcgctcatggcagcggcgcgacgccgggtgctcctgctggaccacagcaagttccgcaagcagggcctgtaccggctagc

SEQ ID NO: 1020 - protein, 64 aa, Homo sapiens
GTSKAMGSVRADVLFMSTTAVTAGHCYHQSQETVAVKRALMAAARRRVLLLDHSKFRKQGLYRL

SEQ ID NO: 1021 - DNA, 253 bp, Homo sapiens
  misc_feature (253)..(253): Wherein n may be a, c, g or t
tgatcagagagggacagagctcgaggcagctctcgcaagactccaaaggatggagaggaaggcaggctggccggggacctcggactcatggaggaaccacttgactcaggccaagaaagaagcagagtctgcttcccagccacatggctgccacagacggaggggtctgtccctccctccccatgggagctgcctctagggacactgactggcaccaagcaagcaccagcagacatccccccccaactgtgcn

SEQ ID NO: 1022 - protein, 78 aa, Homo sapiens
MSAGACLVPVSVPRGSSHGEGGTDPSVCGSHVAGKQTLLLSWPESSGSSMSPRSPASLPSSPSFGVLRELPRALSLSD

SEQ ID NO: 1023 - DNA, 264 bp, Homo sapiens
  misc_feature (1)..(1): Wherein n may be a, c, g or t
  misc_feature (2)..(2): Wherein n may be a, c, g or t
nnaattcgtcggaccaacttccaatatccattcatcctagcccgggactttgagcgtcttgggcgcctaccctgtaaagctggcctgagccttcagcaggcccaggaaggctggtttgccttgactggctctgagctccgggctgtcttcccagaggggccctgggaagagccgctgcagctccggagactgcaagagctttctatccaaggagacagcgagaaccaagtgctggtgctggtagagcggaggaggacactgtac

SEQ ID NO: 1024 - protein, 88 aa, Homo sapiens
  misc_feature (1)..(1): Wherein Xaa may be any naturally occuring amino acid
XIRRTNFQYPFILARDFERLGRLPCKAGLSLQQAQEGWFALTGSELRAVFPEGPWEEPLQLRRLQELSIQGDSENQVLVLVERRRTLY

SEQ ID NO: 1025 - DNA, 244 bp, Homo sapiens
tccggaataaacgcatagttcatgtggcacatgtactgcaatggcatcgattgatactttgacaaattggtgacctcaaggccgatgtcaaacatggctgagccggctcgcagagttacagtgggtcgcgcaacataatggtgcccgaaacctacgtggtactcatattcactggacaatgtgacggcagtaacgccacagggttcgtgccttgtaacaagacgtgccgagcgcattggtgcac

SEQ ID NO: 1026 - protein, 78 aa, Homo sapiens
MRSARLVTRHEPCGVTAVTLSSEYEYHVGFGHHYVARPTVTLRAGSAMFDIGLEVTNLSKYQSMPLQYMCHMNYAFIP

SEQ ID NO: 1027 - DNA, 219 bp, Homo sapiens
gatcccgtatctccaaaggctggttccgaagaagagataagccctaattccacctctaatgtggttgtgtcaagagaatgcttggataacttcatgaaacaactccttaagttggaagaatcgttaaataagttggaattggagcaaaaggtcacaaataaagaacctaaccacagaataagcggtacgattgacataccagaagataggtccgaacta

SEQ ID NO: 1028 - protein, 73 aa, Homo sapiens
DPVSPKAGSEEEISPNSTSNVVVSRECLDNFMKQLLKLEESLNKLELEQKVTNKEPNHRISGTIDIPEDRSEL

SEQ ID NO: 1029 - DNA, 414 bp, Homo sapiens
  misc_feature (158)..(158): Wherein n may be a, c, g or t
tgatcacattaggtgtgaaaagaatctgtcctcagacatgtatatgcttgataaagtgctgcgtgggatttctcagaggaattctgttctgctcaagataaactttggcatgcaaacatttcatcttggcccatccttcattttctgcaacctctttntcttaccagctgtctttttcttacctattgctgtgctttaaatggacttgcccatttggaccaaggctattctataaatcattcgtggagagttagaaacctgatccttctttcccctgtgtataggatcctttattgttatcatctactgttagccgactggtgttccttagattactcagggtggggtctagtgtgttgctaactctgggtgtcagctccccttagacgatgtgttgtctctcttgcacaatcc

SEQ ID NO: 1030 - protein, 53 aa, Homo sapiens
  misc_feature (41)..(41): Wherein Xaa may be any naturally occuring amino acid
MYMLDKVLRGISQRNSVLLKINFGMQTFHLGPSFIFCNLFXLPAVFFLPIAVL

SEQ ID NO: 1031 - DNA, 192 bp, Homo sapiens
  misc_feature (1)..(1): Wherein n may be a, c, g or t
  misc_feature (2)..(2): Wherein n may be a, c, g or t
nnacgcgtgctgcccagcggcatcatcaacaccaaggccgtgtccttcattggcaacggggtggtcatccacttgccaggcttgtttgaggaagcagagaagaatgaaaagaaaggcctgaaggactgggagaagaggctcatcatctctgacagagcccaccttgtgtttgattttcaccaggctgtcgac

SEQ ID NO: 1032 - protein, 64 aa, Homo sapiens
  misc_feature (1)..(1): Wherein Xaa may be any naturally occuring amino acid
XRVLPSGIINTKAVSFIGNGVVIHLPGLFEEAEKNEKKGLKDWEKRLIISDRAHLVFDFHQAVD

SEQ ID NO: 1033 - DNA, 355 bp, Homo sapiens
  misc_feature (1)..(1): Wherein n may be a, c, g or t
ngaccttgcaggctccctcagcagataggctgctgcctccctctgtttgcttcctgcccgggattggccttggcattgcgcccctccctgtgccatactcccctcctggaaccagggcgttggtgcccctgccggctctatctgccggcccaggcatccgtgctaaccctcctgaggtgcttccagtgggggcttggggctgggtccagggcccctcccactcctggagccacgtgggtctatctccccgaccctcgcccgagcatcaccccagcccatcaaggtggggtcagtctgatagccacagcctctctcctccagctcctgtctgcctctccctcccagatgaagatct

SEQ ID NO: 1034 - protein, 52 aa, Homo sapiens
MPGPADRAGRGTNALVPGGEYGTGRGAMPRPIPGRKQTEGGSSLSAEGACKV

SEQ ID NO: 1035 - DNA, 411 bp, Homo sapiens
gctagctcagctaggcagaacatcgggccacctgacaactgctgtttgcagtagctccacaggccctcagcccagcccagctccctgtgcacgtgtgaggctgagacaggcaagagggcacctcactgtagggaccttggagctggcagagcatggtcttgggattcacatgcaaaatgcaacttctcacagctcctctcagcaccctgcagcccccgttgatccaggtcacatccacagactgggctctgcctgctccagaagcccttggcccctaagtacaggctgcaacaggaccgaggatcccagcccacagttagaagcagcctgagctgctggaaagatgccccccaaaaatggaagattgagtttttatctcctcaagcaattctcaacgtggctcattccaaa

SEQ ID NO: 1036 - protein, 53 aa, Homo sapiens
MQNATSHSSSQHPAAPVDPGHIHRLGSACSRSPWPLSTGCNRTEDPSPQLEAA

SEQ ID NO: 1037 - DNA, 246 bp, Homo sapiens
cggccgaacggctcggcgtatgtggtcggtgagtccgggctgaccaccgccctgcacgaaatcggctatgtcatcaccgatgtcgaccccgactatgtgggcctcggcgagacgcggacctattcgttcgaggcgatcaccaccgcgatccggctcgtcgagcgcggcgcccgggtcatcgcgaccaacccggacgcgaccggaccgtccacccagggctcgttgccggggaccggggcgggcggc

SEQ ID NO: 1038 - protein, 82 aa, Homo sapiens
RPNGSAYVVGESGLTTALHEIGYVITDVDPDYVGLGETRTYSFEAITTAIRLVERGARVIATNPDATGPSTQGSLPGTGAGG

SEQ ID NO: 1039 - DNA, 277 bp, Homo sapiens
  misc_feature (1)..(1): Wherein n may be a, c, g or t
ngcgcgcagtacgaccatgttttgatcgatctcccgcccgcccttgggccttgtacggtcaatggactgctggccgctacgcaggtcctcgtggtcacggagccgacatcattcgctgttcgaggagtgggggagttcctcgacacggtgcgtcaggtcaccgcgactccgcacctcaatcccggcctgaagactgccgggatcgtcgtcaataagacgtcgagcccgctgacgagcgagcactcgttccagatcggcgagctccgagaggcgtacg

SEQ ID NO: 1040 - protein, 92 aa, Homo sapiens
  misc_feature (1)..(1): Wherein Xaa may be any naturally occuring amino acid
XAQYDHVLIDLPPALGPCTVNGLLAATQVLVVTEPTSFAVRGVGEFLDTVRQVTATPHLNPGLKTAGIVVNKTSSPLTSEHSFQIGELREAY

SEQ ID NO: 1041 - DNA, 201 bp, Homo sapiens
gccagtgtccctcccgcctctctccaggccagcgtccctcccgcctcttccaggccagcgtccctcccgcctctctccaggccagcgtcctcccgcctctctccaggccagtgtccctcccgcctctctcccctgtcccgcgcgcctctctccacgccagtgtccctcccgcctctttccacgccagtgtccctcccgccg

SEQ ID NO: 1042 - protein, 67 aa, Homo sapiens
ASVPPASLQASVPPASSRPASLPPLSRPASSRLSPGQCPSRLSPLSRAPLSTPVSLPPLSTPVSLPP

SEQ ID NO: 1043 - DNA, 317 bp, Homo sapiens
  misc_feature (1)..(1): Wherein n may be a, c, g or t
nccttccttcttatgagacagaaagaaacttggtccaatcaacttatttcacaagtctaaataactctcctctgtcacatggaacattagtaacagaactaaatctatgttttttggcatgatgcaggtctactacattatgctacctcacaggttatggaacacaaatcattctgtatactacattgtgcacacacataaaaataccatcatatttgccattttgccaacttatcatttgataaagaatgctattgggactaacacttcactttggattatactaatattcaaagaaatcaagaacttaaaaatgt

SEQ ID NO: 1044 - protein, 70 aa, Homo sapiens [sequence omitted]

SEQ ID NO: 1045 - DNA, 357 bp, Homo sapiens
  misc_feature (1)..(1): Wherein n may be a, c, g or t
  misc_feature (2)..(2): Wherein n may be a, c, g or t
nnacgcgtcggtggtggcggcctggtcacaagtcttcgctgggatgcgcatggcaatatcctcgctgtgggtacggaccgaggttatacacaaatctgggatgtcgcacgcggtgcgcggctgcgtacactgcgacccagtgccgatggtggcgcagatgcgtcggcggtcaatgcagctgcatgggccgtcgacggcacactgagtgtcggttacgcaagtggtttgattcgtgaacatgatgtgcgacagcgatctagcgaaacacgctccttagaacatgcacatgcggcgcaggtatgtggcttgagctggcgcgatgacagtgccttgttggcagggggaggaaacgacaac

SEQ ID NO: 1046 - protein, 119 aa, Homo sapiens
  misc_feature (1)..(1): Wherein Xaa may be any naturally occuring amino acid
XRVGGGGLVTSLRWDAHGNILAVGTDRGYTQIWDVARGARLRTLRPSADGGADASAVNAAAWAVDGTLSVGYASGLIREHDVRQRSSETRSLEHAHAAQVCGLSWRDDSALLAGGGNDN

SEQ ID NO: 1047 - DNA, 404 bp, Homo sapiens
  misc_feature (404)..(404): Wherein n may be a, c, g or t
cctagggttgcacagtccatagcagggaagtcagtgttcaaacccaggtctgtctgatgcccatacccttgactgccatgccaggccacctccctgggggagctggagggcatggggtggggagaagaggctgcagcacgggtggggtgcacggaggggagggcagggggaggactcgggaccctacctcacacagatcctgcagcagcagcagtgaggggagacagagagatgagcgccgcctggcctgcccccgacacccccagccctcctcacccggggcagctcttggctgagagcaccacgccccctcactggatgagagctgagagctgaggctcagaggctgagcatgtagctggcctgaccctcacctcgcagggtctgctcaaccccgggatcgn

SEQ ID NO: 1048 - protein, 79 aa, Homo sapiens [sequence omitted]

SEQ ID NO: 1049 - DNA, 408 bp, Homo sapiens
tcagcctttcttagaggccaggatgtcagttccaggatgtgcgagaaacttatagagaaataatgtggaaaattgtagacaaaaacgtaggaaagagtttggtgctcattgcttacagattagggtaccatacatgattgttttcttgactgagtcttatctgcgtacctcaggtatttggaatttgtgtttagcattttatagtaatacacaacaaattagtttttatattaatatttgcctgcttttaacctgttgttcatatctatttagaagaatttcaaagataggctgtaagtgtcagaaggcttgtgactaaattttagctaaaagaggggaacttaggttttccacattcctaacctatgctaagagttgttaatttttaatgatactatttagcgatcg

SEQ ID NO: 1050 - protein, 61 aa, Homo sapiens
MIVFLTESYLRTSGIWNLCLAFYSNTQQISFYINICLLLTCCSYLFRRISKIGCKCQKACD

SEQ ID NO: 1051 - DNA, 388 bp, Homo sapiens
tgatcagtgtcttcctttgctggaggtttagctcgggatgtagtgacccctctgtgttgattatttcggtggccttacttgggaggacctggctaactaatgaaaggctcatgatgaatggttctgtagctgtcccatattactaggaagttatacattgagaagggtgaaaaagaacttggattcaaacaatgtaagttttggttattgtcgatcatccttttatagcacaaagaaaagttcaagcttttttgaagtatattcatgactcagccacctttattttgatcatgaaaatgacatcttaggttttctaaatatgattactctgtttagtcgtgatttgttttgtgctttttagcacatactctttgggagggattgtaca

SEQ ID NO: 1052 - protein, 57 aa, Homo sapiens
MNILQKSLNFSLCYKRMIDNNQNLHCLNPSSFSPFSMYNFLVIWDSYRTIHHEPFIS

SEQ ID NO: 1053 - DNA, 232 bp, Homo sapiens
gtgcaccaccatgcttggctattgtgttaaactactaagttttggggtaatttgttacatagccagagacaatgaacacagaggcctagagagcttgagcgagcagcccagtcgcccagctatgaatccagaatggtccaaccccaaacctatgctcataacccctacccagcttggccccctcttctgggcatcagctcaaagggtcattcttagaaacgaatatcccgaa

SEQ ID NO: 1054 - protein, 74 aa, Homo sapiens [sequence omitted]

SEQ ID NO: 1055 - DNA, 334 bp, Homo sapiens
aagcttctttatggcgcccttactggcgtcaaatgtacgtgagttgtcaagaagcatttaatgcaacacgcaatctttcaattgcaggtattgtgttagaagacgatgcaatgattgcaaaagcaaaagcatggacattaaaacttgcatcttatgatcctgaaggagcgacatctcgtggttataacgatgaagcggcttttcgagttatcgccgcaatggcctggggctatgattggctacacgcttacttttcagataaagaacgtgaaacaattaagcacgcattaattacgcggtcggagagaggctaagccgaattccagcacactgg

SEQ ID NO: 1056 - protein, 93 aa, Homo sapiens
MYVSCQEAFNATRNLSIAGIVLEDDAMIAKAKAWTLKLASYDPEGATSRGYNDEAAFRVIAAMAWGYDWLHAYFSDKERETIKHALITRSERG

SEQ ID NO: 1057 - DNA, 278 bp, Homo sapiens
gtgcactagcagcacgggtaccgtcagctccgcgtggtagacctcgtcgccttcaggccaatactggccactcatcatggcccgcagcacgaaggaggacacattgaacgcattggccttctttcagcagttgtttttttttggcccctggcgggcaaagccggccttgaggaaactccaggccaggcaaggtgacaggcagtgcgggacacatgtgggcatgttgaagatggagcataggctgggctccagtgccgtggggcccccaccgttgatca

SEQ ID NO: 1058 - protein, 67 aa, Homo sapiens
MARSTKEDTLNALAFFQQLFFFGPWRAKPALRKLQARQGDRQCGTHVGMLKMEHRLGSSAVGPPPLI

SEQ ID NO: 1059 - DNA, 468 bp, Homo sapiens
  misc_feature (1)..(1): Wherein n may be a, c, g or t
  misc_feature (2)..(2): Wherein n may be a, c, g or t
nntctctccgaatcgacttgttcctacctactattttgcatattataggaatagttcgagattatttgaaaccgccggacctttttgcgctgggcgatcttttacacgtagttttagtagccaataagtaaaaggagagcggaaacaagtgttcaaagcaaacaaagcataggcaagacgacgatgatcctcacactggcctatttcatgctgggcactctactactgggtgtgttcgcagaagacacggtgtcgcagattggtataaatgacagtttatggtatccgtacgacgaagcactggtgttgaagccgctgcccaacaatgatctgctactctcatttgcattccaactgcaatcggaaccgtttgacccggccgtatcatccatgtcatatgatgcgtatgagcactacacgactttcccacgggccatcccaccattgttggaatctactgccacgcgt

SEQ ID NO: 1060 - protein, 87 aa, Homo sapiens
MLGTLLLGVFAEDTVSQIGINDSLWYPYDEALVLKPLPNNDLLLSFAFQLQSEPFDPAVSSMSYDAYEHYTTFPRAIPPLLESTATR

SEQ ID NO: 1061 - DNA, 400 bp, Homo sapiens
gctagtccttttcaaactccccagatggttctactctactgccaggcttgagaacctctgtgatgggtgatgtctcagattccctcgctgacacactatgatcctgagagataatagttaactgctttttgacttggcttctctggacagaacccaattcaaacattcccattaaaatgaccaaaagtgtaaagagaggtaaagggtctttaattaagtttctggccccctggaagaaggaagctggggaaaagacagccatgagggcaaggttaatggtacatttttaagtaaaaacggctccagagactcacagccacagtggcagctaaaaagtcaaaattaagtttctctatgtgctctggcccagcctaggggcatggccttgtagccctgatca

SEQ ID NO: 1062 - protein, 86 aa, Homo sapiens [sequence omitted]

SEQ ID NO: 1063 - DNA, 316 bp, Homo sapiens
  misc_feature (1)..(1): Wherein n may be a, c, g or t
ntccggatgactcattgctgagtttgccctgatttgttttgttcatttttctacttgatgcatttgctcattggtaaccccctacccccaccaataagaaaaacagtttttaaaaattatcacttaagaacccagagcctcttaagatgaaaaataaaattaaaacttttaagaaaaggaaaggtacccaataaaaaggccatccacacgtggttccacaatttaaatcattcttggccaggcaccttggctcacacttgtaatctcagcaatttgggaggccaaggggaaaggatcccttgaggccaggagatct

SEQ ID NO: 1064 - protein, 50 aa, Homo sapiens
KIKLKLLRKGKVPNKKAIHTWFHNLNHSWPGTLAHTCNLSNLGGQGERIP

SEQ ID NO: 1065 - DNA, 359 bp, Homo sapiens
  misc_feature (1)..(1): Wherein n may be a, c, g or t
  misc_feature (359)..(359): Wherein n may be a, c, g or t
nacgcgttgaccgtcctcggcagcaacaacctcaccctcaacggcatcctcagtggtaccggctcactgaccaaggagggtgccgcgacgctgaccttgaatggtgccaacacctataccggcggtactttcatcaacgccggcactctggcactgggtgctggcgccagcctggcctcctcaggcaccgtcaacctggccacgggggcgaccttcgatctgtcagcaggcagcggcacgcagcagttcggtaccctgatcggcagcggtacagtgaatctgggcgccaacacgctgacgatcggaggccctgccgatggcaccttcagtggttcggtggccggctccggtggcctgcn

SEQ ID NO: 1066 - protein, 119 aa, Homo sapiens
  misc_feature (1)..(1): Wherein Xaa may be any naturally occuring amino acid
XALTVLGSNNLTLNGILSGTGSLTKEGAATLTLNGANTYTGGTFINAGTLALGAGASLASSGTVNLATGATFDLSAGSGTQQFGTLIGSGTVNLGANTLTIGGPADGTFSGSVAGSGGL

SEQ ID NO: 1067 - DNA, 330 bp, Homo sapiens
  misc_feature (1)..(1): Wherein n may be a, c, g or t
ntgatcaaggcgaggcttccgacaattatctggttcaggccgacttcggtcgtcgcctgaaggacgaccggttcggcgtcttcgcctcggtcaactacggccgttcgcacggggtcaccgaggagaccgaaaacgacggcgaatgggagccttacatctggcgcaagaacggcgaggaagcagtcgacgaacgctcgatgtacctgccggggatcgacctggactatcgccgcaacgaacagaaacgctatggcggcaacctgtcgctcgactatcgcggcgtcgatcacgacctctatctgcgcggccagtacaaccggttcgaacgcg

SEQ ID NO: 1068 - protein, 90 aa, Homo sapiens
RTTGSASSPRSTTAVRTGSPRRPKTTANGSLTSGARTARKQSTNARCTCRGSTWTIAATNRNAMAATCRSTIAASITTSICAASTTGSNA

SEQ ID NO: 1069 - DNA, 152 bp, Homo sapiens
gatcatacgtgttcatgcatggtctgcaaaaaatatacgcgcgcctacttacattgcctggtcacaaaagatgctatgggttctcagctgctgtcatatcataacttatcatttatgatgcgggtaaggagagacctccacatggcttatcc

SEQ ID NO: 1070 - protein, 50 aa, Homo sapiens
DHTCSCMVCKKYTRAYLHCLVTKDAMGSQLLSYHNLSFMMRVRRDLHMAY

SEQ ID NO: 1071 - DNA, 393 bp, Homo sapiens
  misc_feature (1)..(1): Wherein n may be a, c, g or t
  misc_feature (4)..(4): Wherein n may be a, c, g or t
ngcngcagtcgctcctgctgcaccttctgcggggtgctgcggaggcgcgcgctggaggagggtgcccgccttgtgggagctactcacattgtgacaggtcacaatgctgacgacatggctgagacggtgctcatgaacttcctgcgtggtgatgctgggaggctggcgaggggtggagtgctgggttccacaggcgaaggatgcacacttccccggtgccggcctctgcagtttgcctcgcagaaggaggtggtgctgtacgcacatttccgccacctccgctacttctcggaggagtgtgtgtatgcccctgaggctttccgtggccatgctcgggacctgcttaagctcctggaggcagccagaccatcggccgtgctggacctcgtgcac

SEQ ID NO: 1072 - protein, 131 aa, Homo sapiens
  misc_feature (1)..(1): Wherein Xaa may be any naturally occuring amino acid
  misc_feature (2)..(2): Wherein Xaa may be any naturally occuring amino acid
XXSRSCCTFCGVLRRRALEEGARLVGATHIVTGHNADDMAETVLMNFLRGDAGRLARGGVLGSTGEGCTLPRCRPLQFASQKEVVLYAHFRHLRYFSEECVYAPEAFRGHARDLLKLLEAARPSAVLDLVH

SEQ ID NO: 1073 - DNA, 413 bp, Homo sapiens
tgatcatcactgggccacttatgttcaggattaaaacaagaggaaaattgcaatttttcctaaatcctcaattctaaaaatggtaagccacattgggttatacttacaatattacctataatgctggctccaagaatagagatgtagcaaaaattatttccagacttattatacccaacacaatgtaatactaccatgaatgtatataaatgggtttatgatagcttttttatgtgtctatttctaatattatattctgaaaagaaagcattccgttcattcttcaacagctcttatcagattgctactaattttatagttcagttctctgcaaaaattagctctgcagtttggaacacagaccatataattttaaaaggtcatagaattgagactatgtgctgaaatgtaca

SEQ ID NO: 1074 - protein, 69 aa, Homo sapiens [sequence omitted]

SEQ ID NO: 1075 - DNA, 279 bp, Homo sapiens
ctaggtattgggggcgctgaaaggttagtcgtcgatgcagcattaggtctacagcaacaaggacatagtgtaatcatctatactagtcactgtgataaatcacattgtttcgaagaagttaaaaacggccaattaaaagtcgaagtttatggtgattttttaccgacaaactttttgggtcgtttttttattgttttcgcaacaattagacagctttatttagttattcaattgatcctacagaaaaaagtgaatgcgtaccaattaattatcattgat

SEQ ID NO: 1076 - protein, 93 aa, Homo sapiens
LGIGGAERLVVDAALGLQQQGHSVIIYTSHCDKSHCFEEVKNGQLKVEVYGDFLPTNFLGRFFIVFATIRQLYLVIQLILQKKVNAYQLIIID

SEQ ID NO: 1077 - DNA, 486 bp, Homo sapiens
tgatcagctggacggcactggttggatgcattcagctcccttctggatgctgggtgccatagaggctaattactggcctcttttgttgttcaaagttttgttttgtttatcagccatggcctgcaattgtagagatggcttgtgtttggcctgttttgctcattctagtggcatgtgttgtttgaaactactcctttagcttccagtagagcaaacaagtagtgacagcaacctccctgtctctgaggtgatagacttctagttaatgtagtcatccaaaaccattacagaagaatttgtatatggcattatttcatttgaataattcattcttgttcctaggatctcttttaaatttgtcatttaaattttttggaaaagagtaatagttacatagctcaaaaccaaaacaaagtatgcattaagatatgttgtaaattagccgggcgtgcactggcgggtgcctgtgatcccagctgctccgga

SEQ ID NO: 1078 - protein, 57 aa, Homo sapiens
MHSAPFWMLGAIEANYWPLLLFKVLFCLSAMACNCRDGLCLACFAHSSGMCCLKLLL

SEQ ID NO: 1079 - DNA, 334 bp, Homo sapiens
  misc_feature (276)..(276): Wherein n may be a, c, g or t
gggccctgttgccaatgcaggcacaccccatttggtggggagcagcagaagtaggaagccatgcagtgcgtagtctgcctgctcctccataccatgggtgcagcatctgtctttggggaatgcaaaagtgctcagcctccctctttggcatggtagcagcagctggtattaggctgttcagggatcaaaagcctgtaggattccacacaggtttgaggggtgcctctgtgctgtctccaggcagctccctggaggtctggggtacttgagtggtcnttctcatgtctaggaattttaaaggccatggcagaagtgttgaacacctggggtctct

SEQ ID NO: 1080 - protein, 84 aa, Homo sapiens
MQAHPIWWGAAEVGSHAVRSLPAPPYHGCSICLWGMQKCSASLFGMVAAAGIRLFRDQKPVGFHTGLRGASVLSPGSSLEVWGT

SEQ ID NO: 1081 - DNA, 209 bp, Homo sapiens
acgcgtcaacgggcacaagccatgcgtcaatccggcgaacccgaagaacgaatcgaagctctggcacacgcgcgaatcttcgggccacctccgggccaatacggttcggggctgaccgacatcgtcgattctggacagtggcaaagtcccgaagaccttgccacggccttcaccgctgcttcaggacacgtctacacccgttatgatca

SEQ ID NO: 1082 - protein, 69 aa, Homo sapiens
TRQRAQAMRQSGEPEERIEALAHARIFGPPPGQYGSGLTDIVDSGQWQSPEDLATAFTAASGHVYTRYD

SEQ ID NO: 1083 - DNA, 379 bp, Homo sapiens
aagcttgtagagctagtccgaagcggactgtcggtacgccaagctgctaaaagatgtgggatgcatcttaccgctgcgtatgccgtagctacggaagctgggtgccatatccggttaagtcagtatgctcggaaagtccgccagacgcagttaagagtggaatacctgcgccttcggctggcgagcctgcctggtggtgatgctggcgcggcagtaggaattgatcgtcgactgcgtttagatttcgaaaaaggactcaccaaatcccagggtcgacgagaagagttcatacccgtcggcgaagacgccagcacgtataacagacttatgaaagcgctgcgccaacgccatgatgtcatcaaatccggaaagcttgccc

SEQ ID NO: 1084 - protein, 106 aa, Homo sapiens
MHLTAAYAVATEAGCHIRLSQYARKVRQTQLRVEYLRLRLASLPGGDAGAAVGIDRRLRLDFEKGLTKSQGRREEFIPVGEDASTYNRLMKALRQRHDVIKSGKLA

SEQ ID NO: 1085 - DNA, 336 bp, Homo sapiens
gaaaccctgcgcttgctggtcggcgaaggcgtgtcgatccgcaaccagcgcgccttgctcgaagccatggtggagtggggcgcgcgtgaaactgatgccgggcgcctggctgaacatttgcgggccgcgttggcgcggcagatcagtcatcagtatgcggatcgcaaccgggtgatcggcgcactggtactggcgccgggcctggaagaccagcttcgtgcgtccttgcgtcgccaggagccgcagcgcgagttgatccccgaagacgtcagccgcgccttgcttgcgcaactgcgtcaggcttgcgagaacacccgtgaggccaacagcgccgtg

SEQ ID NO: 1086 - protein, 112 aa, Homo sapiens
ETLRLLVGEGVSIRNQRALLEAMVEWGARETDAGRLAEHLRAALARQISHQYADRNRVIGALVLAPGLEDQLRASLRRQEPQRELIPEDVSRALLAQLRQACENTREANSAV

SEQ ID NO: 1087 - DNA, 402 bp, Homo sapiens
  misc_feature (1)..(1): Wherein n may be a, c, g or t
nttgtgcccaccaatctgccttgccccccaccgactgaaacccgtgacttcaacacacccgcactagttaagaggagagaccctatgagccgtattatttccggtgccgccggaggcgttcgccttgcctcggttccgggggataatactcgccccaccaccgaccgggtgaaggaatccctcttctccaagctggagagctacgacattattcgtggcgctcgcgtgctggacgcctttggcggctcgggcgcgctcggctgcgaggcgctctcgcgcggtgcggcctccgtgactctgctggacacctactcgaaggctgttgcggtgattcgcaagaacgttgccgcggtggagaaggcgatggggcgcaccggctctggttcttctggcgctaccggt

SEQ ID NO: 1088 - protein, 106 aa, Homo sapiens
MSRIISGAAGGVRLASVPGDNTRPTTDRVKESLFSKLESYDIIRGARVLDAFGGSGALGCEALSRGAASVTLLDTYSKAVAVIRKNVAAVEKAMGRTGSGSSGATG

SEQ ID NO: 1089 - DNA, 244 bp, Homo sapiens
accggtgcctgggcggcccgtagaatccaaccgcaccaaggtactctggtgaagtgggtgctgtcgggtgtcatcagtccgcgctacttcgatgtggttggacgcgagagcgcactgaaatgtatcggtgcgacgcaggcgctgctctaccttggggctacgtgaatgttgcagccctgatgaccgcagaaccattggacgatccgaacattgctcccatgacttcgttgtggcagcgtgatca

SEQ ID NO: 1090 - protein, 65 aa, Homo sapiens
MVLRSSGLQHSRSPKVEQRLRRTDTFQCALASNHIEVARTDDTRQHPLHQSTLVRLDSTGRPGTG

SEQ ID NO: 1091 - DNA, 389 bp, Homo sapiens
tggccactcctcgaggaggactacagagagccgtgagagtgagagtgatatgatgactaaggtcctttcgaaggtatttgatatagttatcactcattggcccggagttagggggagatgttcgcttgcgggagcacgggagaaggaacagagcggcgttagcatcaagtctaaggttgaaaagctgcccaacctaagggcatacatcaagaattctttatagttttatataaaaaaatatatatatagataaatagacagatagatatgacacaaacagatagaaaaaaagcagagcgtggctctttgaggtggaaccccagccagtcttgctccttgcagccaaaaaagggtcttgttcaagagctatgttcagtgtcgctgcccag

SEQ ID NO: 1092 - protein, 57 aa, Homo sapiens
MMTKVLSKVFDIVITHWPGVRGRCSLAGAREKEQSGVSIKSKVEKLPNLRAYIKNSL

SEQ ID NO: 1093 - DNA, 371 bp, Homo sapiens
  misc_feature (1)..(1): Wherein n may be a, c, g or t
  misc_feature (2)..(2): Wherein n may be a, c, g or t
nncatccgcttcgcgacggcccgccacgcgctcagtgaaatgggcggcttcctgccgttgctcgggctgatctgccatgaggcggaaaacgctgccgagccccatacgcagggtctgtatgaacgcatcgtggccaacaagctgctggcattgctgggcagcaatgtgttgcgggtgatcccccaggcggcccacggcggtgggtttgaagcggtgcgcgaatttatccagcagccccttcgctttcacataagcgtcaagcagttgatggcggtggccaacgtcagcgaacgttcgctgtacagcctgtttgcgcgccaggtggggctgtcgccgcgcgactatgtacgccgctgcaagctcgaacgcgt

SEQ ID NO: 1094 - protein, 123 aa, Homo sapiens
  misc_feature (1)..(1): Wherein Xaa may be any naturally occuring amino acid
XIRFATARHALSEMGGFLPLLGLICHEAENAAEPHTQGLYERIVANKLLALLGSNVLRVIPQAAHGGGFEAVREFIQQPLRFHISVKQLMAVANVSERSLYSLFARQVGLSPRDYVRRCKLER

SEQ ID NO: 1095 - DNA, 162 bp, Homo sapiens
gccggcaccaagatgtgcgagcaggcgctgggcaaagcttgcggcggggactcaaagaagaagcgaccgcagcagccttctgaagacgggcagtcccaagcccaggtgaccccggcggccccacaccaccatcatcaccattctcactccggacccttgatc

SEQ ID NO: 1096 - protein, 54 aa, Homo sapiens
AGTKMCEQALGKACGGDSKKKRPQQPSEDGQSQAQVTPAAPHHHHHHSHSGPLI

SEQ ID NO: 1097 - DNA, 429 bp, Homo sapiens
accggtgcccagctcccacggctcgtccagacctacgttgagaaacttcgacgagacagtctccgtcagttcgcccaacaacctctgaacgaagtcaagattctccggcactggagccaaggtgcttgccctggcatgaacgccccaggggaggtcgacgccgtcgggattctcacaccgatggtgatgggactcggtttccaaccacggttccatgtgacccagacagttctggttggccccgagctcgatgcctcgtccgcgacacagaccatcgagccacctcatgtcctccgccgtcacggggctgcggtcggcccacacctcctcctcaccgcggtaggcaaatcccgcttcaccatagagctcaaggtgattgagaccacaccgcgccatgacgcgcgtcaggaaatcaagagtggaacgcgt

SEQ ID NO: 1098 - protein, 132 aa, Homo sapiens
MARCGLNHLELYGEAGFAYRGEEEVWADRSPVTAEDMRWLDGLCRGRGIELGANQNCLGHMEPWLETESHHHRCENPDGVDLPWGVHARASTLAPVPENLDFVQRLLGELTETVSSKFLNVGLDEPWELGTG

SEQ ID NO: 1099 - DNA, 261 bp, Homo sapiens
  misc_feature (1)..(1): Wherein n may be a, c, g or t
  misc_feature (2)..(2): Wherein n may be a, c, g or t
nntgatcaggaagacaaagtctgggtgtatcctcctgaaaagaaagagaacgggtatccaaagttgttccaagaagagtttcctggaatcccatacccaccagacgcagctgtggaatgccaccgtggagaatgccagagtgaaggtgtcctcttcttccaaggtaaccgcaagtggttctgggactttgccacaagaacccaaaaggaacgttcctggcctgctgttgggaattgcactgcggccttgaggtggcttgaa

SEQ ID NO: 1100 - protein, 87 aa, Homo sapiens
  misc_feature (1)..(1): Wherein Xaa may be any naturally occuring amino acid
XDQEDKVWVYPPEKKENGYPKLFQEEFPGIPYPPDAAVECHRGECQSEGVLFFQGNRKWFWDFATRTQKERSWPAVGNCTAALRWLE

SEQ ID NO: 1101 - DNA, 302 bp, Homo sapiens
tccggatcagtgatttttttcaagctacatttacagagagtcttaggattcttttgagtggcctccaggtttgcttgtggaatgaagattgaaatatagggaaaggtgcttagctttgcaccagagtatccacactgagtgaggtagtagttgctcattgacagttgagaaactactgcatgttattaccgatggatgagtttgtgtccctttagtatgactggacaaaaagaaagtggaaagacatctgatataaacttttgaggttttgtttttgttttttaaagaatggggtagaattc

SEQ ID NO: 1102 - protein, 52 aa, Homo sapiens
MSNYYLTQCGYSGAKLSTFPYISIFIPQANLEATQKNPKTLCKCSLKKITDP

SEQ ID NO: 1103 - DNA, 351 bp, Homo sapiens
acgcgtgaggggatggaggcccagagggctgacttgaacaaggtcgacacagctgattacagtcaaagctggggctaggactacatgcctctctcagtcactcagcaccaatttgttgagctcagttgtgtctggaaggagacactgcatgtctaacatgggtcagcagaggctgatcagagttccccaggaacccagatgatggaggcttcatcttgccaggaatttccaagatctctgcagcagtaggaaggcaacatggcagaccactcactggctcttacatctttgcctccaaagttacatcgcttccactcaacattctgctggctgaaccatgtcatatggtca

SEQ ID NO: 1104 - protein, 55 aa, Homo sapiens [sequence omitted]

SEQ ID NO: 1105 - DNA, 345 bp, Homo sapiens
atcataggcaagttttctgtcttcatgataagccatcactctaaaagatatacattgggtaacaatcttattgaagaaaaagaagagacgcaacacattttttatgaaagcccttggaatgttgaattactagatatgaaattacagcatattataaaacatcaaaaatacgagcatacagtattaaaggtgcacagcattgccatagaagaaaaagttcaacttttaccggatatattatgttctgcaaacgctgatatcgacacgctaatgctagatttatctaaacttccaacaatggttatgttgagtgaattagtacacaacttagatagtcagttaaca

SEQ ID NO: 1106 - protein, 115 aa, Homo sapiens
IIGKFSVFMISHHSKRYTLGNNLIEEKEETQHIFYESPWNVELLDMKLQHIIKHQKYEHTVLKVHSIAIEEKVQLLPDILCSANADIDTLMLDLSKLPTMVMLSELVHNLDSQLT

SEQ ID NO: 1107 - DNA, 305 bp, Homo sapiens
ggtaccacttgttggtggaatatcgacaagaaagacagacttttcatactgccaagatccatcccctcttggcatatggcctgtgtcatgatgcggaaagagctgttgtctggtgacaagtcaggtgaccacatgtccctttggttaccctggtcatcgtacatctcgtgcttcaggaaggcagatatgggcacagagaagaacttgcaccaccatagttgtcatttctatctcaaggtggttgccacggtttcccccttatttggagctggtattccaaattccatcccctctcaggctgatca

SEQ ID NO: 1108 - protein, 76 aa, Homo sapiens [sequence omitted]

SEQ ID NO: 1109 - DNA, 508 bp, Homo sapiens
  misc_feature (414)..(414): Wherein n may be a, c, g or t
gctagcttgagccatggaaccacggaggtggtgtgcctaggtaagggctgttgtgtgacttgcctgcttctttactggtgtgcatgtcgtatgcctcagagtgctgccgcacatctctttctctcacctctttctccacagcctttcccagcatctataaacaaatgggtattgggaaaaaacgatactagataatccatgcaaatgaaaaagcttatagaagtaagagcttttcaattggattctgaagaacagaaggttggaatggaatgctgaagaatggggagagccttcaagttcctttctataaaagggaaattgagactcattgtcacttagtgatttactggctctgtcatgatttagacattgaacttctgactccaagttcagtgttggtttgctacaattgtntcatcaaggtgaaatcaataatgaatcacaccacaagctgttacccaaaagcatattctggatggaaataattgcttattagggggttggtacc

SEQ ID NO: 1110 - protein, 71 aa, Homo sapiens
  misc_feature (49)..(49): Wherein Xaa may be any naturally occuring amino acid
MLKNGESLQVPFYKREIETHCHLVIYWLCHDLDIELLTPSSVLVCYNCXIKVKSIMNHTTSCYPKAYSGWK

SEQ ID NO: 1111 - DNA, 358 bp, Homo sapiens
tccggatagaatttagtgtcctcaggccctttgctctactgaggctgtctgagcagtgccaaattcagcctgccaaatgcactgcccttcagtatgttacgagaatataataaagggaagggaaagaatgtgagaaaaacttttccactgaaacaattacactcacctaagtatagcccaactctactttcaaatgttgattcattattcccagaactgctctttgccatcccctgcaaacacaacccccccatatacaaacacacacatacaaacatacactttcctataaataaagaggaaatataccctaagtccaagaacaataattggctttgggctggtgttgcataagctt

SEQ ID NO: 1112 - protein, 86 aa, Homo sapiens
MLREYNKGKGKNVRKTFPLKQLHSPKYSPTLLSNVDSLFPELLFAIPCKHNPPIYKHTHTNIHFPINKEEIYPKSKNNNWLWAGVA

SEQ ID NO: 1113 - DNA, 256 bp, Homo sapiens
  misc_feature (1)..(1): Wherein n may be a, c, g or t
  misc_feature (2)..(2): Wherein n may be a, c, g or t
  misc_feature (82)..(82): Wherein n may be a, c, g or t
  misc_feature (83)..(83): Wherein n may be a, c, g or t
nnaaaaaagtaatcttattgcaacaaaaccaaaagaagagaggtacacagacataattctaactctaataacaaaaataacnnaggaaaaaatcatttaatttttcttaacatcaatggactcaactccccaataaaaagacatagaatagcatgctggatatataaagaggacccagcattttgctgcatttaggaaacacacctgagtgacaaagacagccattacctcagagtaaaagccttgaaaaaaattt

SEQ ID NO: 1114 - protein, 60 aa, Homo sapiens
  misc_feature (24)..(24): Wherein Xaa may be any naturally occuring amino acid
SYCNKTKRREVHRHNSNSNNKNNXGKNHLIFLNINGLNSPIKRHRIACWIYKEDPAFCCI

SEQ ID NO: 1115 - DNA, 360 bp, Homo sapiens
atcccctttagttaccgtcccgcccagtgttgtttaaaattgcggcttaagcaccactccccagcctttttctcccgaggggccccgaggggccttccccggtgggggaagtgtccatcgcccggtgccccatcttttcgtttggccctcggcccggcacgccccaagaagaatcttgggcattggtttcgggcaccggcaacccccgttcagcacgggcgggttcttttccccagggcgcccaacgggcccgcatcgccaggggggctcctcgcgtagcgcatgggcgtgtagcgaccgtgcgctgaccagcacgggggtaaagttgtcccagctgcacggcacaggctgtagactagc

SEQ ID NO: 1116 - protein, 69 aa, Homo sapiens
MRARWAPWGKEPARAERGLPVPETNAQDSSWGVPGRGPNEKMGHRAMDTSPTGEGPSGPLGRKRLGSGA

SEQ ID NO: 1117 - DNA, 318 bp, Homo sapiens
  misc_feature (318)..(318): Wherein n may be a, c, g or t
cgcgtggctcaagcaattgctgacaaaatctattcggtggccgagaattcacaggtcctatgtattacccacttaccgcaagtagcagcgcgagccaatcatcatctatatattttcaagattattgaagatgatcgaactagaacacacgtgaaattgttaggagaagaagaaaaaattgaagaaattgcgcgtatgctttctggcgctgaaattacagaggtatccttagaagcggcacgcgatttataccgataatattttaaattaaaacgcatcattccataaaattgaaatgatgcgtttttatcgttgatn

SEQ ID NO: 1118 - protein, 85 aa, Homo sapiens
RVAQAIADKIYSVAENSQVLCITHLPQVAARANHHLYIFKIIEDDRTRTHVKLLGEEEKIEEIARMLSGAEITEVSLEAARDLYR

SEQ ID NO: 1119 - DNA, 312 bp, Homo sapiens
tcgacgagagaccaattggtaaaattaagtagaaagccagactacgattcgcaatcttttcacaaggaaatgatgaactttctatgtaattcattaaaggatatatctgatgacattttgataggcaaggtgtctgtcagcggatatggagctactcatctattgacttcatttaaagagctgtcatttgacgatgactgtattcgaatttgggaagcgtcaaagaatttgtccgacgagactacttcacaggcattccaagaaccaaaagtggttggttttatgctgccattactttatgcaaaaacgcgt

SEQ ID NO: 1120 - protein, 104 aa, Homo sapiens
STRDQLVKLSRKPDYDSQSFHKEMMNFLCNSLKDISDDILIGKVSVSGYGATHLLTSFKELSFDDDCIRIWEASKNLSDETTSQAFQEPKVVGFMLPLLYAKTR

SEQ ID NO: 1121 - DNA, 296 bp, Homo sapiens
tggccagttctcctgcagcatcagggacaaacatgtctgtgatcccataagcaccacgtgagcgttttagcttctttgggtgaaatctacccagaggccggctctcctacaggtgctcatggaacttggtggagtcttttctcaaagcctggggtcatagccttgagcacatcaaacagctgggggtcccaggtggctttgggggcttggcccgggatgcccctgcgttctacccgtcgggtgccttgttctgtcttggactgccttgctgatgccgagctgtcgggcatccgcgg

SEQ ID NO: 1122 - protein, 57 aa, Homo sapiens [sequence omitted]

SEQ ID NO: 1123 - DNA, 346 bp, Homo sapiens
  misc_feature (1)..(1): Wherein n may be a, c, g or t
ntacgtttccgggtatgcctccgctggaattgcagctccggccttcgacatgtcggcatcgagggctttctggttgatggagttttggctcagactaagcgtggcttcgatgatggcccgcatctgggcgtcacgattagcgcccggggggggcattcggccgctcacgtaggtagtagaggatggcggccataccaattgctgactggtcggcgtctccactgacctcctggacgttctgtccggggtaatggtcggggtttccgaccaggatggcacctgctagacgctgtggggtgtcggtctgggcaagggcctgcgtgatggcttgtgacccctgggaaaa

SEQ ID NO: 1124 - protein, 52 aa, Homo sapiens
  misc_feature (52)..(52): Wherein Xaa may be any naturally occuring amino acid
MPPPGANRDAQMRAIIEATLSLSQNSINQKALDADMSKAGAAIPAEAYPETX

SEQ ID NO: 1125 - DNA, 297 bp, Homo sapiens
  misc_feature (52)..(52): Wherein n may be a, c, g or t
ccggaagaatatccgcaggaaaatctaaattttttgaagttaacgggtatanaattatatcaagttggaatgagcggtaataaggagccatttgttaatataccgtctcatctactgacaaaggcactagaaatcgtgttgaatcctgcgaatcaaccgatactgatacattgtaatagaggcaaacatagaacggggtgtttgattggttgtataagaaaactacaaaattggtcgctaacgatgatttttgatgagtacagacgtttcgcatttccgaaggccagggcgcttgat

SEQ ID NO: 1126 - protein, 99 aa, Homo sapiens
  misc_feature (18)..(18): Wherein Xaa may be any naturally occuring amino acid
PEEYPQENLNFLKLTGIXLYQVGMSGNKEPFVNIPSHLLTKALEIVLNPANQPILIHCNRGKHRTGCLIGCIRKLQNWSLTMIFDEYRRFAFPKARALD

SEQ ID NO: 1127 - DNA, 421 bp, Homo sapiens
ccaccctgtttcagtgggtaaaacgttggttggagaatggaaaatctattgataaaggaagagacaagtaaggtggacctgggaggtgagaactagggaacacaagagaatatgggaagtaggcaggcaaattaactgagaagggtaaggggagaagccgtgccggggccagaagtgaagaagaacagaacaggaattatagagagaaactgctgaaaattcatttcagagtccaaagactgaaaacattcctcacctagcaaggatggagacatacatttctccatttcagaaaattcatgcaaaataactagaataaatactcttgaataagggatggaactttctaagtcattccatggtaaaaatttgaagcagtgcaatcacatgatattatgagaaagtcagcccctattggtgc

SEQ ID NO: 1128 - protein, 51 aa, Homo sapiens [sequence omitted]

SEQ ID NO: 1129 - DNA, 273 bp, Homo sapiens
cccggggggcaggcggtgcagatggtcaaggcaggtttcgaggcgatctacctttccggctggcaggtggccgccgacgcgaacttcgtcggcgggacgtaccccgaccagagcctctaccccgcaaactccgggcccgcgcccgcgcgacgcatctcgaacgcgctgcttcgggccgaccagatcgcccacgccgagggggacgacgagacgtactggctcgcgccgatcgtcgccgacgccgaggcggggttcggcgggccgctgaacgcg

SEQ ID NO: 1130 - protein, 91 aa, Homo sapiens
PGGQAVQMVKAGFEAIYLSGWQVAADANFVGGTYPDQSLYPANSGPAPARRISNALLRADQIAHAEGDDETYWLAPIVADAEAGFGGPLNA

SEQ ID NO: 1131 - DNA, 384 bp, Homo sapiens
gcgcgccatctcgggctggacgtggccaggacacgcaagatcgtcatcgcgatgacagccttgttgactggtaccagcgttgcattcacaggaactatcgggttcattggtcttgtcgtgccgcgcttggcgagactgctctgcggccccccgcaccgcagagtgttgccggtctcggccgtcctgggagcgctgttgattgtgtttgctgacaccctgtcgcgcaccatcgctcctcctgacgaggtgcccattagtctgttcactgcggcattgggggcgccgttcttcctgatcgtggtgttgcgtaccaaggaggcacagtcgtgaacgatcgaaatccccacgatccgtgcctgcgcgtggaggcagccacgttcatga

SEQ ID NO: 1132 - protein, 109 aa, Homo sapiens
ARHLGLDVARTRKIVIAMTALLTGTSVAFTGTIGFIGLVVPRLARLLCGPPHRRVLPVSAVLGALLIVFADTLSRTIAPPDEVPISLFTAALGAPFFLIVVLRTKEAQS

SEQ ID NO: 1133 - DNA, 433 bp, Homo sapiens
gctagcactgtccttgtttcccacacactagagatgagccagcagaggcaaactattgaggcaggtctttctccagcagaagagataaaaatctcctctcacctagtttaaccccaatactcaggcttcggttcccttccagggcattcctcggctctgaaagaataaagctgtattctctcttccctggcctggcctcctcagggtcacatttgcctgcccccagtcctcaccacaccccttcgggccagcctgctttaaacggggcctttctgtaagatgtgacacataatccattgcaccaactgctgtggggcttctggtgccaaaagaccattgagaaaaaggctgcttaaaaaagtatggagtgactcaatactgccaagtcctgtgggattacttattccaagcctgtccttcctgtgtcaggctt

SEQ ID NO: 1134 - protein, 58 aa, Homo sapiens [sequence omitted]

SEQ ID NO: 1135 - DNA, 336 bp, Homo sapiens
agatctccgggtgccagaaatgaagacggaacccatagccaaaggcagttagaggcactgaagtcaggcaggccccaggggaatctcaaccagacacatgtctcaggagctggggtttaacacctgtatggggataagagtgagttcctgggttctgtgcatggcagggagtggtaactggactgtctgggaaaaaggcaggagctggggaagtttctgtaccttgcgtgatctaataaatctctgcctaccggcccctgtggtagcaggagctgagctgacctagaactcagtgagatagaaagtctcagcctgtggcgtgtgtgggttgaattc

SEQ ID NO: 1136 - protein, 62 aa, Homo sapiens [sequence omitted]

SEQ ID NO: 1137 - DNA, 240 bp, Homo sapiens
ggccataccacgagatctagtacttcattgagaaggcgtaatcatggttccttttttggtgccaagaaccctcatactaatgacgccaagagagtgttgttcggaaaaagttttaatatgttcatcaaatccaaggaggcccacgatgaaaagaagaaaggcgatgatgcctcggagaatatggaacccttctttattgaaaaaccttattttactgcgccaacctggttaaatacaatt

SEQ ID NO: 1138 - protein, 80 aa, Homo sapiens
GHTTRSSTSLRRRNHGSFFGAKNPHTNDAKRVLFGKSFNMFIKSKEAHDEKKKGDDASENMEPFFIEKPYFTAPTWLNTI

SEQ ID NO: 1139 - DNA, 228 bp, Homo sapiens
aagctttggtgtaaaaaaacagcacaagagttaattgttcatctcgatagtctagaagcaaagctcattgagctagctcgtatccatcaaggtgttatcttacctggctatactcatctacaacgagcacaacccgttaccttttcacactggtgtttagcttacttagaaatgctagagcgcgatcattgccgtttagaaggttgcattgagcggatgaatacatgt

SEQ ID NO: 1140 - protein, 76 aa, Homo sapiens
KLWCKKTAQELIVHLDSLEAKLIELARIHQGVILPGYTHLQRAQPVTFSHWCLAYLEMLERDHCRLEGCIERMNTC

SEQ ID NO: 1141 - DNA, 229 bp, Homo sapiens
acgcgttgccgaggcgctccgaaaagccactggggagcctgccctgtgtgccgacgccgccgagctgctcccggtgatctgctcgtccgatccacgcgatccgttcagcgatcccgaggtggacggtccgcaacaacgtccggtgctgttggtcatggacgaccacgtcccggatccacgccgtgccggcctggaggaggtcgcacaacggtttgacgtgccggtgcac

SEQ ID NO: 1142 - protein, 52 aa, Homo sapiens
MTNSTGRCCGPSTSGSLNGSRGSDEQITGSSSAASAHRAGSPVAFRSASATR

SEQ ID NO: 1143 - DNA, 343 bp, Homo sapiens
aaatttcggagagaatggagaaggagctttccacggattgacggctcactttagggtgacgtgccttcagccccgaacatgctggatgattggcagcatgtcagagaaagtgaggccaggtccagggaagctgtgctgagccctccctccagcatgggtgccaccagcctgccaggctcctgcctccgtaggtggggtgggctgggcaggcctcgagagggccacggacatggagcttgtccctgcgggcttcccagcacccgggagtgaccacactcaggggagggaaggacattggcaaacctgctgctgaagcaaaatagcaggtgctgaatcccattga

SEQ ID NO: 1144 - protein, 79 aa, Homo sapiens [sequence omitted]

SEQ ID NO: 1145 - DNA, 312 bp, Homo sapiens
ccgcgggggggttattgctgagggaggaatggaagggctgaatagccagagacgtaaatgagggcaccaagctcctaaaatgtgtggaaaaggatacccagatgtgggagcaaaatgcagaaaaggagctgcaagtcaaaagttctgctgaaagctcattctgccttctatgtgtatcccaaaaacctacttcacatgtccttgcttcctaactcactgccagaaacgtgtgagtcattcgggacattttctcaccctcactcaacatactttgttatctggcacatccgtagttcaggaatccatcatgca

SEQ ID NO: 1146 - protein, 66 aa, Homo sapiens [sequence omitted]

SEQ ID NO: 1147 - DNA, 492 bp, Homo sapiens
actccctcaaaggatcaagcggatatttcaacttcatttagtccgtctccactcattagaagaccactgacgaaatccctgatagaattggccagggaacatactgaaattgtaaaagaatttggtgtcttacaggaagaagatattgaagaggaagaggaaggagaagaaggcgagaatggttacgatgagaaaaaccacgaagacgactttgggctagaagatgaactaattagaccaaaagttgtgaaggacatatttcaagaggatgatgataatgatgatagccaagcaagggaagataccttcataagaaagagacccaaaagaagaaaggttatcagaagattacgagacaatgatccagaaaccgagaccgcaggttttgagagagatgtccataaggagctggtgaaactcaaaagaaggaaagtggcagaatttttgggatccacctcacaaatctctgatactgaatttgaacttgatccg

SEQ ID NO: 1148 - protein, 164 aa, Homo sapiens
TPSKDQADISTSFSPSPLIRRPLTKSLIELAREHTEIVKEFGVLQEEDIEEEEEGEEGENGYDEKNHEDDFGLEDELIRPKVVKDIFQEDDDNDDSQAREDTFIRKRPKRRKVIRRLRDNDPETETAGFERDVHKELVKLKRRKVAEFLGSTSQISDTEFELDP

SEQ ID NO: 1149 - DNA, 229 bp, Homo sapiens
  misc_feature (1)..(1): Wherein n may be a, c, g or t
nttccactcttgcatttctaggatgggtattgacacttctattttaagtgttcaagaacagagtccctctgaatctcacctcttcctactgtactgtgtacgacaggcctctaattctcaccacgagctgatgctttcagtcgctgtcctcaaaagggaattccctgaagcgtgctaatccctccacttgccacacgtaagagtctgcatctacttaccaagatctgct

SEQ ID NO: 1150 - protein, 51 aa, Homo sapiens [sequence omitted]

SEQ ID NO: 1151 - DNA, 358 bp, Homo sapiens
tcatgaatccttacaatgctgtcttgaccaagaagttccaggtcaccatgcggggcctcctgtcttgtctgagtaagagcaacaaccgtctgaaatctctttccatccaatacctggagctggaccgcctgggtatggaggaccagcatcaggagctcattcatcagcagcttgagcttcttcttaaagaagatgggcaaacgcctggattatctcaacctaaaaggggccaggctgaccgtggagcaaggctgccaaattctcgactccctcagctacatgaggaatgagaatgtgatctcagagctcaacatcgaggactatttcagccatcaccttgctgtctacaacagcccca

SEQ ID NO: 1152 - protein, 95 aa, Homo sapiens [sequence omitted]

SEQ ID NO: 1153 - DNA, 260 bp, Homo sapiens
gggcccatgtctagttggtcagaacagggcaccaagttggcatttcctgctgtctctcacagcctcagtgcccccaccaggcccaggctcttccaagggcagcatagtatccatcaagtgggtgactacgagagccaggctggcaccttgagcaggaagagtaggccaggcccagctggctgatgtcagcagtcagcgttgagggccttggagtgaggtgggcctcggagctcctcatctgaggagcatggttccctagg

SEQ ID NO: 1154 - protein, 58 aa, Homo sapiens [sequence omitted]

SEQ ID NO: 1155 - DNA, 237 bp, Homo sapiens
  misc_feature (1)..(1): Wherein n may be a, c, g or t
  misc_feature (2)..(2): Wherein n may be a, c, g or t
  misc_feature (3)..(3): Wherein n may be a, c, g or t
nnntgcgcctctgccggatgcggcacgatggacggcttcggcacgtcggcggccgggaaatgggtggccgagaacggctggcgctacggattcatcgtgcgctacaagccggggcagacggcggtgtcggggtacgactccgagccctggcacctgctctacatcgggccgcagctcgcggcggtgtaccatgacggagggttgcacacgctcgaggcgtcttgcgactgcccgccc

SEQ ID NO: 1156 - protein, 79 aa, Homo sapiens
  misc_feature (1)..(1): Wherein Xaa may be any naturally occuring amino acid
XCASAGCGTMDGFGTSAAGKWVAENGWRYGFIVRYKPGQTAVSGYDSEPWHLLYIGPQLAAVYHDGGLHTLEASCDCPP

SEQ ID NO: 1157 - DNA, 379 bp, Homo sapiens
  misc_feature (1)..(1): Wherein n may be a, c, g or t
ncgcgggagttcgctgcgcgtttctcgctcgccggcacgcaggggaagttcgctctcgccagggtcgacggctcctggttctggccgaacagcacagtcccatcgacgcacatcctgaagcctggccgccccgatctgcgcggcatcgaggcggcggagtcgagcgccctccacctcgccctcaacgccggtgtcgacgcggcccgggctgctgtgttcgagatcggtgatcagacggcgttgatcgtcgaacgcttcgaccgtgatctcggtgcgggcttgctcgcgcgcaggcgtcacgcgaaggacctggcgcaggcgtttggcgtggcgtccgcgaacaagtacgacgtgaccgccaagcagatcgcggggatcc

SEQ ID NO: 1158 - protein, 126 aa, Homo sapiens
  misc_feature (1)..(1): Wherein Xaa may be any naturally occuring amino acid
XREFAARFSLAGTQGKFALARVDGSWFWPNSTVPSTHILKPGRPDLRGIEAAESSALHLALNAGVDAARAAVFEIGDQTALIVERFDRDLGAGLLARRRHAKDLAQAFGVASANKYDVTAKQIAGI

SEQ ID NO: 1159 - DNA, 235 bp, Homo sapiens
cggacacactttgcaagaccaaattggaaaaaagtcctatctaaaattgcctcgaagcatccatttgctaagataggtgtattctactgtggagctccagttcttgcacaagaactaaacaaactgtgccatgaattcaatgggaaaagcacaacgaaatttgagttccacaaggaacatttctgaattccagtaatacttggtgcgcagaaatgatatattatgtgtgtgtaca

SEQ ID NO: 1160 - protein, 61 aa, Homo sapiens
RTHFARPNWKKVLSKIASKHPFAKIGVFYCGAPVLAQELNKLCHEFNGKSTTKFEFHKEHF

SEQ ID NO: 1161 - DNA, 339 bp, Homo sapiens
tgatcagaatttttgttttgggatgaaagaatccaatttctggagctcagaagccacatagtccagaggacctgggggtgaggatgagtcagggtggttgcagccctgccaggcctcacggcctctggtccaagctgacacaggctcactcacaccctgctcttggcccctgggcatgccttctcagatgggacctcttcttggctactgcattctccctgctatttagctctctagcctctgacatcccaccaccacttcattacccaagagaatgaactaaggtctagcaaaggaaagtaacttgcctaggatcacagaggcaggggtagaaccaca

SEQ ID NO: 1162 - protein, 64 aa, Homo sapiens [sequence omitted]

SEQ ID NO: 1163 - DNA, 418 bp, Homo sapiens
  misc_feature (406)..(406): Wherein n may be a, c, g or t
  misc_feature (411)..(411): Wherein n may be a, c, g or t
  misc_feature (412)..(412): Wherein n may be a, c, g or t
  misc_feature (413)..(413): Wherein n may be a, c, g or t
  misc_feature (414)..(414): Wherein n may be a, c, g or t
  misc_feature (415)..(415): Wherein n may be a, c, g or t
  misc_feature (416)..(416): Wherein n may be a, c, g or t
  misc_feature (417)..(417): Wherein n may be a, c, g or t
  misc_feature (418)..(418): Wherein n may be a, c, g or t
caattgatgacattgcagctcttcagcaaatggatgtgggctcccgttcagatgccatcacgtcacccaagctgtggaacttctcgaagcttttgttcactcctctgtaaaatgagggtgtttaggaaaaccttactcattagccgttgatgagggttaaatggaataatgctcatgagcttcttagcagagtttccgacataatacatgctactcatattatttttaatgttaatatcgtttcaatgtttgcctcattttccacaagagggaagtccggctcacaaaagctaaatatcttacttacatgcagcagattagaaagtgacacagcagggatttatattcaagtttctctaatgccaaaattaattcataaaatcaaatctatcttgcctcacaatcnccccnnnnnnnn

SEQ ID NO: 1164 - protein, 89 aa, Homo sapiens
  misc_feature (86)..(86): Wherein Xaa may be any naturally occuring amino acid
  misc_feature (88)..(88): Wherein Xaa may be any naturally occuring amino acid
  misc_feature (89)..(89): Wherein Xaa may be any naturally occuring amino acid
MRVKWNNAHELLSRVSDIIHATHIIFNVNIVSMFASFSTRGKSGSQKLNILLTCSRLESDTAGIYIQVSLMPKLIHKIKSILPHNXPXX

SEQ ID NO: 1165 - DNA, 327 bp, Homo sapiens
gctagctgattcttcttcatggtttgcagatgaatgccttcttgctatatgttcacatggtggagggagaaaccatctctcccttatttcttattgtaaaggtactaatcccatttatgaaggttccagcttcaaatgccatcacactggagattagattttcaacatgtgaatttaatgggggacaccagcattcagtccctagtgctctgatagagtattcattaatgtcatgtatttgttaacatcttgtaagttatttgggctttgatgccttaaaagaagactctggccaggcatgctggctcatacctgtaatccttgcaa

SEQ ID NO: 1166 - protein, 71 aa, Homo sapiens
MNAFLLYVHMVEGETISPLFLIVKVLIPFMKVPASNAITLEIRFSTCEFNGGHQHSVPSALIEYSLMSCIC

SEQ ID NO: 1167 - DNA, 410 bp, Homo sapiens
  misc_feature (410)..(410): Wherein n may be a, c, g or t
tgatcagggctgttccgattccccaaatgtcttacatacctcaattaagtccacttttatcagagagttcttctgctccatgcatactgttcacctgggagtgaaaggaacttcaagcctagagctccgctttcttccctttaacatgcacgtgcgctactgtgtcatcatcttgagcaacaaaaagattggacaattaatatatgttgcggaaggaaaaggtatgacccccttgccttccagttgccttccaatgaatacgtcttcaagtccagtttattacagcactactcgagaagaagggcctaataagaaatacccagttctgtatttgaaatgcaaaccctatcaaatcctgtatgtggaccttaaattgccaatgactaatgaagccaaggaaaaggctttgn

SEQ ID NO: 1168 - protein, 110 aa, Homo sapiens
MHTVHLGVKGTSSLELRFLPFNMHVRYCVIILSNKKIGQLIYVAEGKGMTPLPSSCLPMNTSSSPVYYSTTREEGPNKKYPVLYLKCKPYQILYVDLKLPMTNEAKEKAL

SEQ ID NO: 1169 - DNA, 478 bp, Homo sapiens
gatcctgacctaacgacttttgtttgcgtttgtatcagtgaattcttatccttatatgaaactgaaagactaattcaggaattgatttcctacgatatggacgttaattccatcattgtcaaccaattattatttgctgaaaacgatcaagagcacaactgtaagagatgtcaggcaagatggaagatgcaaaagaagtacttggaccaaatcgacgaattgtacgaagatttccatgtcgttaaaatgccattatgtgctggagaaatcagaggcttaaataacttaacaaagttctcacagttcctaaacaaagaatataaccctattactgatggtaaagtcatttatgagctagaagataaggaatagaagcccctgaataccataaatagatacatacgacatataaccatagaaaaaatagtaatacgatggtatgtgtgtgaaaagaaaaaatttacgtgacgcgacgcgt

SEQ ID NO: 1170 - protein, 123 aa, Homo sapiens
DPDLTTFVCVCISEFLSLYETERLIQELISYDMDVNSIIVNQLLFAENDQEHNCKRCQARWKMQKKYLDQIDELYEDFHVVKMPLCAGEIRGLNNLTKFSQFLNKEYNPITDGKVIYELEDKE

SEQ ID NO: 1171 - DNA, 314 bp, Homo sapiens
  misc_feature (1)..(1): Wherein n may be a, c, g or t
  misc_feature (314)..(314): Wherein n may be a, c, g or t
ngtgatccaatgcccagatgaactgaggtgtggcaatttcccccagtcaggagcttacttcagaataatgttgctttgacgtgaagctgtaaggacattggatgaaaacaatccaggacctgcttatctttcagcatgaaagacatttgtgtgttttctgagtcatctgaaacacagagtgtaggattttcctgatggataaggaaacctgatgtactcatttattataacaatgagatcattggaagacccataaaactgaagtctgctatccaagttcagatctagtttgttgttcagataatggttccaan

SEQ ID NO: 1172 - protein, 53 aa, Homo sapiens
MSTSGFLIHQENPTLCVSDDSENTQMSFMLKDKQVLDCFHPMSLQLHVKATLF

SEQ ID NO: 1173 - DNA, 306 bp, Homo sapiens
  misc_feature (1)..(1): Wherein n may be a, c, g or t
  misc_feature (2)..(2): Wherein n may be a, c, g or t
nntccggaccgggtgatcgcgcgggtgaacagccagtcctaccaggctgtctgcactccgcccgacatccggcgccacccgcggacgagcgtacaggcacagttcagcattccctatacggtggcctgcgcgctgatcgacggccgggtcggtctcgagcatttcaccgacgaggctctcgtgcggccggatctcctggctctcgcggcgcgggtggaatgcgaggttgacgaggcgatcgagcgcgaatggtcccgcagcatctcgcccacgcacctgacggcgatccgcagcaccctggtgcac

SEQ ID NO: 1174 - protein, 102 aa, Homo sapiens
  misc_feature (1)..(1): Wherein Xaa may be any naturally occuring amino acid
XPDRVIARVNSQSYQAVCTPPDIRRHPRTSVQAQFSIPYTVACALIDGRVGLEHFTDEALVRPDLLALAARVECEVDEAIEREWSRSISPTHLTAIRSTLVH

SEQ ID NO: 1175 - DNA, 428 bp, Homo sapiens
accggtagatgaaaaacagttgattgaagtgattaggcaccacctcaacgcaggataggctctatggcagcaaatggatttatcgaattgcttcgcattgcgaaacggggaaataaaaactacgtttctaatgaaaatgaagtcaaccgatggtcaggcattgcttttgagatgatggggcaatattttgttgccccgctgggggaagtatccgaagtgatctatcctccaaaatatacgccagttcctaatactcaatcatgggttttaggattggccaatattcggggaaggttattatcagtttctgatttgactcaatatgtatcaggacagagtagccagttttcaccgactcaaaaagtattatgtattcaccacaatgaccaatatgtcggtttggtcgttgatcgtccgagagaggctgg

SEQ ID NO: 1176 - protein, 121 aa, Homo sapiens
MAANGFIELLRIAKRGNKNYVSNENEVNRWSGIAFEMMGQYFVAPLGEVSEVIYPPKYTPVPNTQSWVLGLANIRGRLLSVSDLTQYVSGQSSQFSPTQKVLCIHHNDQYVGLVVDRPREA

SEQ ID NO: 1177 - DNA, 406 bp, Homo sapiens
gtgtgtatgtgtatatgcatgtggatctgtgtgtgttcgagtggatgcatgtgactatgagtgtgtgtggccgggtgactgctctggacccctccagggcactgtggggaggggtgaggaataagcacgaggatgcctggagagccaggcactggcctgccctccctataccccaaggcgtcctgaaatctggcaaggatggcaaacaggaagggaacccccaaaggtcatctgaatccccaggctctgtggcagccagggctgggcctgcccagaccacaaggcctgggattaggagattaaatccagggtgaggaggctttagagaggcagcagcccctcctactcattccggcaaccccagcctctgagtcccacatccaagtcccatatccacacatccgga

SEQ ID NO: 1178 - protein, 99 aa, Homo sapiens [sequence omitted]

SEQ ID NO: 1179 - DNA, 276 bp, Homo sapiens
gaattccggtctggctcctcccgtgtgctcatcaccaccgacctgcttgctcgtggtattgatgttcagcaggtgtccctggtcatcaactatgatctccccacccagccagagaattacctgcatcgcattggtcgtagtggtcgtttcggtaggaagggtgttgccatcaactttgtgacccgcgacgacgagcggatgctgttcgacatccagaagttctacaacgtgttgattgaggagctgcctgccaacgtcgctgaccttctgtgatca

SEQ ID NO: 1180 - protein, 90 aa, Homo sapiens
EFRSGSSRVLITTDLLARGIDVQQVSLVINYDLPTQPENYLHRIGRSGRFGRKGVAINFVTRDDERMLFDIQKFYNVLIEELPANVADLL

SEQ ID NO: 1181 - DNA, 177 bp, Homo sapiens
  misc_feature (1)..(1): Wherein n may be a, c, g or t
nagatcttcgacttcgttcggcaggttattgagtccggcattgtccctgacgacgtcaccatctcggtgctgacccaggcccgtgaggatctcatcgagcgcaccatgcagagcttagtcggcgctcaccgtgccactatccacatgtataacgcagttgccgaactcttccgacgc

SEQ ID NO: 1182 - protein, 59 aa, Homo sapiens
  misc_feature (1)..(1): Wherein Xaa may be any naturally occuring amino acid
XIFDFVRQVIESGIVPDDVTISVLTQAREDLIERTMQSLVGAHRATIHMYNAVAELFRR

SEQ ID NO: 1183 - DNA, 435 bp, Homo sapiens
tccggagaacgactgggttggcgagcaactccgccaacgcaacacctcctggaatgaccgaggagcgatccagaatgcgcttcgtgagacaaagcaacaacctttcagcgacgcagcggtcgaagctgaacttgaacgactcggaaatgtcactgcacttgaactggaacggctcagaaaggaagaaggacgcctcacctatgatgatctgccaagacttgccgagctgattctcggttacgagagcgtcgcggacctctacgcgacacacttcggcgctgtcgtggttgacgaattccaagacctgactccccagcaactccgaatcgtaaacagaatcggttacaagcgcacaacctatggcggtgaccttgtgcaggggatctatggttttgcggagcgcagccactggcaattgatcgggacatacgtgcc

SEQ ID NO: 1184 - protein, 77 aa, Homo sapiens
MSRSIASGCAPQNHRSPAQGHRHRLCACNRFCLRFGVAGESGLGIRQPRQRRSVSRRGPRRSRNRESARQVLADHHR

SEQ ID NO: 1185 - DNA, 361 bp, Homo sapiens
agatctcagacactcacagtctagtctaaatgctggcaaacattttttgtataaagccagatagtaaatgttttaggctgtgtggtccatacagcctctgtggcaatcacttttgcacgcagagcaaaagcagcgttagaaaatatgtacactattaaatatggctatgtttgggttgtagtctgctttatatacaaaatcaggcaactgaatgaatttggcccacagggcgtagtttgccaactcttggtattcaggtacatttttttaaattgcaaaacagtgagctgtatgttgatgaaagcttccccttgcatttgcataacatttcataatttatgaagctatttcatatatatta

SEQ ID NO: 1186 - protein, 65 aa, Homo sapiens [sequence omitted]

SEQ ID NO: 1187 - DNA, 231 bp, Homo sapiens
  misc_feature (231)..(231): Wherein n may be a, c, g or t
tccggagttcgtcggagtggggacgccaacggtagagtcagcgaaattgtcgtcgctatcgactccgttgcgacgctcgatcgacgtcatccttgacctagctggagcagctttcgtctctaccatcgaagcagctccgtacccgaccagatcgactggcacacccgatgcgtcgctcatgcggaccgaaccattcgtcacactcatggacgcggtgcactcagcatccgn

SEQ ID NO: 1188 - protein, 69 aa, Homo sapiens
MSVTNGSVRMSDASGVPVDLVGYGAASMVETKAAPARSRMTSIERRNGVDSDDNFADSTVGVPTPTNSG

SEQ ID NO: 1189 - DNA, 276 bp, Homo sapiens
  misc_feature (247)..(247): Wherein n may be a, c, g or t
atcattctcaaatcaggactagctggatggtttaagttctggttcatgccatggatggtttatcatttttggatgagcacttttacaatggtacatcacacagctcctcatataccattcaagtcatctgaagaatggaatgctgcacaagctcaattaaacggcacagttcattgtaactatcctcaatggatagagatcctttgccatgacataaatgtgcatgtcccacaccatatttccccangcattcccagctataaccttcgcgctgct

SEQ ID NO: 1190 - protein, 92 aa, Homo sapiens
  misc_feature (83)..(83): Wherein Xaa may be any naturally occuring amino acid
IILKSGLAGWFKFWFMPWMVYHFWMSTFTMVHHTAPHIPFKSSEEWNAAQAQLNGTVHCNYPQWIEILCHDINVHVPHHISPXIPSYNLRAA

SEQ ID NO: 1191 - DNA, 386 bp, Homo sapiens
  misc_feature (81)..(81): Wherein n may be a, c, g or t
  misc_feature (251)..(251): Wherein n may be a, c, g or t
  misc_feature (311)..(311): Wherein n may be a, c, g or t
  misc_feature (315)..(315): Wherein n may be a, c, g or t
  misc_feature (329)..(329): Wherein n may be a, c, g or t
  misc_feature (330)..(330): Wherein n may be a, c, g or t
tgatcactttaccctaacacatcagaagaataactagccaagggaatgtcttccagaatagccttccagactggaaagcanaagaatggaatattgttgggatgcctactcaccagcccttcaacttgtgcccccgtactccttttttaagttggctacgaggagctgcttctggctaaaattatctgctttgatagctttacaaaaaagagagaacatttccaccacacccactaccattcctccgaatntctgaattttctcctttctattcctccagccatccccttagcttcagccctctatacagngacnatcttcccccctgnnctcatctcacaatgaagtatataggttagagtcccagtacacccatcctggatggg

SEQ ID NO: 1192 - protein, 56 aa, Homo sapiens
  misc_feature (56)..(56): Wherein Xaa may be any naturally occuring amino acid
MEYCWDAYSPALQLVPPYSFFKLATRSCFWLKLSALIALQKRENISTTPTTIPPNX

SEQ ID NO: 1193 - DNA, 277 bp, Homo sapiens
agatctcacaagaactcaggattacgagaccagcaagggggctgtccaccctcatcacccagtcaccccccagcagagccctgctccaacactcaggatcacagttccccgtgagacttgggtgggggctccgagccacagcccaccactggttcatgtgaccctgaagactcctccggctccgcgatgtcactcgctcacatagcttggcagcgttttcacatctttacgtgtctgcagatcgtcctcttgtcccgtcacccgccgaggaacgcgt

SEQ ID NO: 1194 - protein, 52 aa, Homo sapiens
MNQWWAVARSPHPSLTGNCDPECWSRALLGGDWVMRVDSPLAGLVILSSCEI

SEQ ID NO: 1195 - DNA, 336 bp, Homo sapiens
  misc_feature (1)..(1): Wherein n may be a, c, g or t
nacgcgtcccgtgcacaagcgggcgacattccagaaggagccccagtggcaaaggccaagttcgagcggaccaagccgcactgcaacatcggcaccatcggacacatcgaccacggcaagacgaccctcaccgcggcgatctccaaggtgctgcacgacaagtacccggagctgaatgaggagtcgccgttcgaccagatcgataaggctcccgaggagcgtcagcgcggcatcaccatctcgatcgcccacatcgagtaccagaccgagaagcgtcactacgctcacgtcgactgccctgggcacgctgactacgtcaagaacatgatcaccggt

SEQ ID NO: 1196 - protein, 97 aa, Homo sapiens
VAKAKFERTKPHCNIGTIGHIDHGKTTLTAAISKVLHDKYPELNEESPFDQIDKAPEERQRGITISIAHIEYQTEKRHYAHVDCPGHADYVKNMITG

SEQ ID NO: 1197 - DNA, 377 bp, Homo sapiens
  misc_feature (338)..(338): Wherein n may be a, c, g or t
  misc_feature (344)..(344): Wherein n may be a, c, g or t
gggcccgcatcgacaatgcaacccacgaactcgcacaaggcactgagcgtgtcgttggcaagatttgctttggcgttgtcgagcttgatccactccccaccaagcgtaggcgagctcgggcagtttttgcgacggcaggccatcgtgcttggagtacgcgagattgggaagggtgaaggtcatggggcgatgaggctccagtgccttctccatcgtcttgatcacgtcatgacggctgtactcgcgcgcgagcacgacgtgatacccaggatcgcacgagtgcaaacgtcgatgatgaccagcagccagatgcgctccatttcgaactcgtgctcaanacccanagggtcacgtaccaccaacttgagccgaacatt

SEQ ID NO: 1198 - protein, 120 aa, Homo sapiens
  misc_feature (108)..(108): Wherein Xaa may be any naturally occuring amino acid
  misc_feature (110)..(110): Wherein Xaa may be any naturally occuring amino acid
MQPTNSHKALSVSLARFALALSSLIHSPPSVGELGQFLRRQAIVLGVREIGKGEGHGAMRLQCLLHRLDHVMTAVLAREHDVIPRIARVQTSMMTSSQMRSISNSCSXPXGSRTTNLSRT

SEQ ID NO: 1199 - DNA, 442 bp, Homo sapiens
  misc_feature (1)..(1): Wherein n may be a, c, g or t
  misc_feature (354)..(354): Wherein n may be a, c, g or t
  misc_feature (361)..(361): Wherein n may be a, c, g or t
  misc_feature (397)..(397): Wherein n may be a, c, g or t
  misc_feature (405)..(405): Wherein n may be a, c, g or t
  misc_feature (442)..(442): Wherein n may be a, c, g or t
nctcttggggttgtgttctgactggccttcccccatggctctttgccctctggaagccaaggggcaatggcaggttcacagtggcactgcaagggtacagttgttgggggttcttgggagcaggggcaccagttctgctgtggccctggttgcctccccttgcccaggctccatgtgcaccctcagagtccccctggcacaacctttcttcttctcacgaggaacacccccacttccacttgggcctctgccaggaagaagggtgggagctctgccgaggtgtccctctgagtgaccaccctcagctggagccgccaggcctctgcacagtagctgcccctgggccttgtgtgntaaatgngggtaataacagtatctacctcataagggtgctgcnagaactanatgagttcctagaagctgaagacacttagaaccaggn

SEQ ID NO: 1200 - protein, 86 aa, Homo sapiens
MALCPLEAKGQWQVHSGTARVQLLGVLGSRGTSSAVALVASPCPGSMCTLRVPLAQPFFFSRGTPPLPLGPLPGRRVGALPRCPSE

SEQ ID NO: 1201 - DNA, 273 bp, Homo sapiens
  misc_feature (1)..(1): Wherein n may be a, c, g or t
ngtcgacgtatctacagaatgtccgagctgttaggctctgaaaatctggcgcagatgtataccggtttgatgtctcagtggcagtcggccgacaatgtggtgctgggtgtcgatgctcaacggcacgacgtaatttcctgggcgtcggcagtggattacgtcgaggaaatgcgtcgttgggacgtctctcagtatttgcctgacgatttgctggttaaagtggatcgtggtgcgatgagcgcaagtctggaaactcgcgctccattgcttgat

SEQ ID NO: 1202 - protein, 91 aa, Homo sapiens
  misc_feature (1)..(1): Wherein Xaa may be any naturally occuring amino acid
XRRIYRMSELLGSENLAQMYTGLMSQWQSADNVVLGVDAQRHDVISWASAVDYVEEMRRWDVSQYLPDDLLVKVDRGAMSASLETRAPLLD

SEQ ID NO: 1203 - DNA, 171 bp, Homo sapiens
  misc_feature (10)..(10): Wherein n may be a, c, g or t
  misc_feature (16)..(16): Wherein n may be a, c, g or t
  misc_feature (18)..(18): Wherein n may be a, c, g or t
  misc_feature (19)..(19): Wherein n may be a, c, g or t
  misc_feature (25)..(25): Wherein n may be a, c, g or t
  misc_feature (39)..(39): Wherein n may be a, c, g or t
  misc_feature (51)..(51): Wherein n may be a, c, g or t
  misc_feature (52)..(52): Wherein n may be a, c, g or t
  misc_feature (54)..(54): Wherein n may be a, c, g or t
  misc_feature (62)..(62): Wherein n may be a, c, g or t
  misc_feature (67)..(67): Wherein n may be a, c, g or t
  misc_feature (72)..(72): Wherein n may be a, c, g or t
  misc_feature (76)..(76): Wherein n may be a, c, g or t
  misc_feature (77)..(77): Wherein n may be a, c, g or t
  misc_feature (79)..(79): Wherein n may be a, c, g or t
  misc_feature (83)..(83): Wherein n may be a, c, g or t
  misc_feature (94)..(94): Wherein n may be a, c, g or t
  misc_feature (96)..(96): Wherein n may be a, c, g or t
  misc_feature (101)..(101): Wherein n may be a, c, g or t
  misc_feature (103)..(103): Wherein n may be a, c, g or t
  misc_feature (107)..(107): Wherein n may be a, c, g or t
  misc_feature (117)..(117): Wherein n may be a, c, g or t
  misc_feature (128)..(128): Wherein n may be a, c, g or t
  misc_feature (130)..(130): Wherein n may be a, c, g or t
  misc_feature (138)..(138): Wherein n may be a, c, g or t
  misc_feature (139)..(139): Wherein n may be a, c, g or t
  misc_feature (144)..(144): Wherein n may be a, c, g or t
  misc_feature (151)..(151): Wherein n may be a, c, g or t
  misc_feature (158)..(158): Wherein n may be a, c, g or t
  misc_feature (162)..(162): Wherein n may be a, c, g or t
  misc_feature (163)..(163): Wherein n may be a, c, g or t
  misc_feature (167)..(167): Wherein n may be a, c, g or t
ggcctaatgngaagtngnncagtangcggtacggctggnggtacaaatggnncnctggcagngacanattcnatgnngncccncatgcaatgtntnctgantncttnggtgccaganatccctttganancttttttnngaagnggaaccnggagganatcnngganattg

SEQ ID NO: 1204 - protein, 57 aa, Homo sapiens
  misc_feature (4)..(4): Wherein Xaa may be any naturally occuring amino acid
  misc_feature (6)..(6): Wherein Xaa may be any naturally occuring amino acid
  misc_feature (7)..(7): Wherein Xaa may be any naturally occuring amino acid
  misc_feature (9)..(9): Wherein Xaa may be any naturally occuring amino acid
  misc_feature (18)..(18): Wherein Xaa may be any naturally occuring amino acid
  misc_feature (21)..(21): Wherein Xaa may be any naturally occuring amino acid
  misc_feature (23)..(23): Wherein Xaa may be any naturally occuring amino acid
  misc_feature (26)..(26): Wherein Xaa may be any naturally occuring amino acid
  misc_feature (27)..(27): Wherein Xaa may be any naturally occuring amino acid
  misc_feature (28)..(28): Wherein Xaa may be any naturally occuring amino acid
  misc_feature (32)..(32): Wherein Xaa may be any naturally occuring amino acid
  misc_feature (34)..(34): Wherein Xaa may be any naturally occuring amino acid
  misc_feature (35)..(35): Wherein Xaa may be any naturally occuring amino acid
  misc_feature (36)..(36): Wherein Xaa may be any naturally occuring amino acid
  misc_feature (39)..(39): Wherein Xaa may be any naturally occuring amino acid
  misc_feature (43)..(43): Wherein Xaa may be any naturally occuring amino acid
  misc_feature (44)..(44): Wherein Xaa may be any naturally occuring amino acid
  misc_feature (46)..(46): Wherein Xaa may be any naturally occuring amino acid
  misc_feature (47)..(47): Wherein Xaa may be any naturally occuring amino acid
  misc_feature (48)..(48): Wherein Xaa may be any naturally occuring amino acid
  misc_feature (51)..(51): Wherein Xaa may be any naturally occuring amino acid
  misc_feature (53)..(53): Wherein Xaa may be any naturally occuring amino acid
  misc_feature (55)..(55): Wherein Xaa may be any naturally occuring amino acid
  misc_feature (56)..(56): Wherein Xaa may be any naturally occuring amino acid
GLMXSXXVXGTAGGTNGXLAXTXSMXXXMQCXLXXXVPXIPLXXFXXXGTXRXSXXL

SEQ ID NO: 1205 - DNA, 233 bp, Homo sapiens
acctgggaacacccaatggtgcagggcggcatggacctggtgctgtccggctcgatgggcacccccgccgtggcgctgatcaagaacaaggcgctcaagccgggcaccgtgttgctggaactgctctacgtcagtgaagtggttgcgccgcgctcgctgcaactgggccgctacctgccaccggccgccttgcgctgcctgctggatgccaacggcaatgacttgtccggccg

SEQ ID NO: 1206 - protein, 77 aa, Homo sapiens
TWEHPMVQGGMDLVLSGSMGTPAVALIKNKALKPGTVLLELLYVSEVVAPRSLQLGRYLPPAALRCLLDANGNDLSG

SEQ ID NO: 1207 - DNA, 378 bp, Homo sapiens
  misc_feature (1)..(1): Wherein n may be a, c, g or t
nagcgcttccaacttcccgaggcagcattggacgtggacgagccagctgaacgtgctccccttagttctgtggaaacgtcgctgcgatctcatgcatggtggcttgatatccattgccccacctacaaggacatgcaagaactcagcttgcactttccgctgcatccacttaccgttgaagacattctcaagcaggagccacgtgaaaaatacgaggtgtacgagcggttggggtactactttattgtactgcgggccattgacgaaaactactttcgcctaattcgaaaagggaaaacagaagaggtcaaggacattcctacttcgccaggtatgctagaaaaacgcatggaaaaccacatctccgaacgcgtgcac

SEQ ID NO: 1208 - protein, 126 aa, Homo sapiens
  misc_feature (1)..(1): Wherein Xaa may be any naturally occuring amino acid
XRFQLPEAALDVDEPAERAPLSSVETSLRSHAWWLDIHCPTYKDMQELSLHFPLHPLTVEDILKQEPREKYEVYERLGYYFIVLRAIDENYFRLIRKGKTEEVKDIPTSPGMLEKRMENHISERVH

SEQ ID NO: 1209 - DNA, 348 bp, Homo sapiens
  misc_feature (1)..(1): Wherein n may be a, c, g or t
naactggacaattcttttttttttattgatggatttcttgtcaaaaagaataacaatcaacatactattgttaattccgaaacttacaaaaataaaatgaaagtttccgataggcgtaagtttgaaaaagcgaactttgacgagtttgagtcggctctaaataacaaaaacgaattggtacattgtccctcaataactttatttgaatcgatccccacggaagtgcggtcattctacgaagacgaaaagtctggtctaatcaaagtggtaaaattcagaactggtacaatgaataggaaaaggtcttttgaaaaaattgtcatttccgtcatggtcgggaaaaatgta

SEQ ID NO: 1210 - protein, 116 aa, Homo sapiens
  misc_feature (1)..(1): Wherein Xaa may be any naturally occuring amino acid
XLDNSFFFIDGFLVKKNNNQHTIVNSETYKNKMKVSDRRKFEKANFDEFESALNNKNELVHCPSITLFESIPTEVRSFYEDEKSGLIKVVKFRTGTMNRKRSFEKIVISVMVGKNV

SEQ ID NO: 1211 - DNA, 278 bp, Homo sapiens
ggtaccctgggctcagtgacaagaggggtgggcaggtcaggactgcactgccttggggcccgtgccctgggagccgctagccctatgatcctgagtcctgggggactgagtgcatcggcagggcctggagcagctgggagtggccgactgcctcagtgtgcactgtggccgcacaggagggacagcggccttgagagtgttcagagctgttgcacagccatcctgcaccgcgttggccctgggatggactgctgtataagctttgtcatgcggctagc

SEQ ID NO: 1212 - protein, 64 aa, Homo sapiens [sequence omitted]

SEQ ID NO: 1213 - DNA, 213 bp, Homo sapiens
accggtacctccgctttcggtatcaaccaaaccactttcccaaacaacacctacggtatctctcaagtcttatggggttccattggtttcaccactggtgctaccttgggtgctgctttcgctgctgaagaaattgatccaaagaagagagttatcttattcattggtgacggttctttgcaattgactgttcaagaaatctccaccatgatc

SEQ ID NO: 1214 - protein, 71 aa, Homo sapiens
TGTSAFGINQTTFPNNTYGISQVLWGSIGFTTGATLGAAFAAEEIDPKKRVILFIGDGSLQLTVQEISTMI

SEQ ID NO: 1215 - DNA, 213 bp, Homo sapiens
agatctttgatttggacctgcagaatttgacatgcctgtgatggaggcaaagtgggtgcttgggggaggaggagaggttgcagaaataggaggaagagttgaaggagaaatagaagctcagtgtcttttatacgtggcagcagtatttactaaatatatttttgagacagggtctcactcttgtcacctaagctggatgggagtgcagggtgc

SEQ ID NO: 1216 - protein, 60 aa, Homo sapiens [sequence omitted]

SEQ ID NO: 1217 - DNA, 463 bp, Homo sapiens
  misc_feature (1)..(1): Wherein n may be a, c, g or t
  misc_feature (2)..(2): Wherein n may be a, c, g or t
nnacgcgtgattgttggggccaaggaatgccatgtggagagtgcaggtgaagtgataagtcttttggagatggggaatgcagccagacatacaggtaccactcaaatgaatgagcactccagcagatcacatgcaatttttacaatcagcatttgtcaagttcataaaaatatggaggcagctgaagatggatcatggtattcccctcggcatattgtctcaaagttccactttgtggatttggcaggatcagaaagagtaaccaaaacggggaatactggtgaacggttcaaagaatccattcaaatcaatagtggattgctggctttaggaaatgtaataagcgctcttggggacccacgcaggaagagttcacatattccatatagggatgctaaaattacccggcttctgaaagattctctgggaggcagtgctaagactgtcatgatcacatgtgtca

SEQ ID NO: 1218 - protein, 154 aa, Homo sapiens
  misc_feature (1)..(1): Wherein Xaa may be any naturally occuring amino acid
XRVIVGAKECHVESAGEVISLLEMGNAARHTGTTQMNEHSSRSHAIFTISICQVHKNMEAAEDGSWYSPRHIVSKFHFVDLAGSERVTKTGNTGERFKESIQINSGLLALGNVISALGDPRRKSSHIPYRDAKITRLLKDSLGGSAKTVMITCV

SEQ ID NO: 1219 - DNA, 222 bp, Homo sapiens
ggtggtcagaatccagagcagtgcgttgtggcgttgtgggagtatgatgtgccgtattacttgcgtgtggccattgacaatgatattcgtgttgggctttggtatgatgtaagctttcacgaaagaacggggtctatgcgagcagtgcctgagcgtgtgaagcgtgcggatcctgtggttatggcgttcgatatagagaccactaagcaaccgctcaagttt

SEQ ID NO: 1220 - protein, 74 aa, Homo sapiens
GGQNPEQCVVALWEYDVPYYLRVAIDNDIRVGLWYDVSFHERTGSMRAVPERVKRADPVVMAFDIETTKQPLKF

SEQ ID NO: 1221 - DNA, 381 bp, Homo sapiens
agaacattcacgctatattgaaagaagccaaacaaaagaaagatttccaatcctcaacatgggtttcccaaactgccttcataggacatcaatagctcctagagcagggggaaagggtgtacaaacacatctgagggaccctgagttaaacaaagatccttttcttggaggtggcacctctcagagatttcaatacaccgatgggaactgtgaaaccccagatcttctaaggcaggttcaaagctgtttctactatactatcttgagtctccaaaatggtttggaatgtactgcctgccactggagacagtagctgaatacactttatgctacagaaatgtttcttgaaggttgtatgagttcagaacatgcagttcatga

SEQ ID NO: 1222 - protein, 84 aa, Homo sapiens
MGFPNCLHRTSIAPRAGGKGVQTHLRDPELNKDPFLGGGTSQRFQYTDGNCETPDLLRQVQSCFYYTILSLQNGLECTACHWRQ

SEQ ID NO: 1223 - DNA, 443 bp, Homo sapiens
  misc_feature (413)..(413): Wherein n may be a, c, g or t
  misc_feature (414)..(414): Wherein n may be a, c, g or t
  misc_feature (431)..(431): Wherein n may be a, c, g or t
ggatccctggctgccacccaggagcccaggctcctctccaggccaagcagtatcatcttcaccctgggcttgtcaaggtcaaataaaaatataaagctgaatccctaaaacagtttcatttgggaaaagagaattgcaacttggggcatagagaaagaccaggtgctcttcggtatgtgcgaagaaaaaacggaaggctgggggttttatgagaaagagaaaagtcatcatctatgtggccccgctgcgagccgctcctttgatcttaaagaaacttgacagcatatgaagactgaatatccatgtgaatgcatgacacgaagaacatggtgacagcgtctgctctctgcaagtgaacaggctcagaaaagtctgagggactctctgaatgaacttaaaaattctgcttgttnnacacaagtttgactctnggtaatgggcct

SEQ ID NO: 1224 - protein, 50 aa, Homo sapiens
MMTFLFLIKPPAFRFFFAHTEEHLVFLYAPSCNSLFPNETVLGIQLYIFI

SEQ ID NO: 1225 - DNA, 558 bp, Homo sapiens
tccggacaaaagggttcaatcgaagtatggttagccttttccaagtcgccaggacggacctgcaatgctgtttgtcgtcatgctcgggggcaagcacccacgggctaaaatcgaaattcacgatgtggtattcgcagtcgcggatacgctgcaacacacctacacccaattgcgcgacggctggttcggcagccctaaggtgtgcatatcgatgcgtggatggccgtcgatggcgtcgacggctggaaagtcgaactcagccagatggcgccgcctgccgacgcgcatcacctgtacttcatcaacctcggcggctacgaggccaacgcttttggcgaggcccatcattacctgctggtggtcgcccgggacaaacaggaagccaagcgcaaggggcagcggcaaatgttgcaacactggtcccaggcccacaccgatggcgtaatggatatcgacgactgcttgccgattgatctggtggacggtcgctatgttcacctggtgcaaggcccgcaccagccgatcatccagcacaacgactacatcatcctgccgcga

SEQ ID NO: 1226 - protein, 148 aa, Homo sapiens
MVSLFQVARTDLQCCLSSCSGASTHGLKSKFTMWYSQSRIRCNTPTPNCATAGSAALRCAYRCVDGRRWRRRLESRTQPDGAACRRASPVLHQPRRLRGQRFWRGPSLPAGGRPGQTGSQAQGAAANVATLVPGPHRWRNGYRRLLAD

SEQ ID NO: 1227 - DNA, 417 bp, Homo sapiens
acgcgttgcgttgcggagtgaacccggaacgatggatggattgacactattcggcctgttcgccgtcactgcgatgctggtctgctatgccatggaggaccgcagccactggttcgtgctgctgttcgcggccgcttggcgctcggttcggcctacggcttcctccaaggcgcctggccgttcggcttcgtcgaggcgatatgggcgctcgttgcctgcggcgtggtggacgatcaggccgcgatgaccgcatcgtccggcttaagcccggaaacgaaaccgaccagtgcgctggtttgatgggcggcgcgtcgctggatgcacagcgtctcgacgcgagcgtgatgatggcctcagcgcgtgcatgccgacgctgtcgctcatcgcgctacgctcgaccacggcgcgcggcaatag

SEQ ID NO: 1228 - protein, 110 aa, Homo sapiens
MPWRTAATGSCCCSRPLGARFGLRLPPRRLAVRLRRGDMGARCLRRGGRSGRDDRIVRLKPGNETDQCAGLMGGASLDAQRLDASVMMASARACRRCRSSRYARPRRAAI

SEQ ID NO: 1229 - DNA, 348 bp, Homo sapiens
ggatcctcaaacccaaactcaacgtagtcaagtggactcaagtacctcctctttcctctcctgctcccacctgacaatggtgaggcctcacaaggagaaggggtccacgatgcagtcagaggtgagcagaatgtaacgcattcctgcaattcctgttgccttttgggtggcatcaacgtcacaacaaaacataaattgattctgttaactttgtaaaatacaaaatgctgtcaatttcgttggaaagcccctgagaggtggaatttgggcctgtgagaatgcctgtgttccatgagccagtggtcccagcctgacagtcatgtgatgctgatcagtgtagtcacgcgt

SEQ ID NO: 1230 - protein, 57 aa, Homo sapiens [sequence omitted]

SEQ ID NO: 1231 - DNA, 259 bp, Homo sapiens
ggatcctccctagtcagccaagatgcctgcgcccccacagccacaggagctgctggcagatgagggtccgagactggctcccgtctcccagcaccggcaagggaggcgggccaggtgcacacaggaccccagcctcctcttcagtgtacacagtggctcagcttagggcacaggaggagctcactgaggtcactgggcccacaccggggtgacaggtcgggggctgagaaccagacccacccttgcgaatgtcactagt

SEQ ID NO: 1232 - protein, 50 aa, Homo sapiens [sequence omitted]

SEQ ID NO: 1233 - DNA, 375 bp, Homo sapiens
  misc_feature (1)..(1): Wherein n may be a, c, g or t
  misc_feature (2)..(2): Wherein n may be a, c, g or t
  misc_feature (375)..(375): Wherein n may be a, c, g or t
nncggccggtatgtcggcccctgggtcggcgcgaagaagaagcgcgccctccgaaaggacaaagagtatcagcggaggctggatttgatccacgacctgaggttcgagacagccaccaccaagatcaagctgacgcccgatgaccagtacctgatcgcctcaggtatttaccccccgcaagttaaagtctacgagttgaaggaattgtctatgaagttcgagcggcacatgatctcagaaattgtagatttccagatccttggtgatgactattccaaactcgcatttttgtgtgctgatcgttctgtaaatttgcacgctaagtatggaagccattatagcttgagaattccaagagtgggaagggacatgggn

SEQ ID NO: 1234 - protein, 125 aa, Homo sapiens
  misc_feature (1)..(1): Wherein Xaa may be any naturally occuring amino acid
XGRYVGPWVGAKKKRALRKDKEYQRRLDLIHDLRFETATTKIKLTPDDQYLIASGIYPPQVKVYELKELSMKFERHMISEIVDFQILGDDYSKLAFLCADRSVNLHAKYGSHYSLRIPRVGRDMG

SEQ ID NO: 1235 - DNA, 394 bp, Homo sapiens
gaattctgaagtggaagcagttcatgaggattctcttgctttggttggcctgctaaatagaatagggtcatgatatcgcgtgccattgctggaatcctggactatttagtactaatcatagaagtccacagtcctctcagatatctactgatggagccagctcttcttatcagatatatactgatggagtcagttctttttttctgtccctggagcaataaacttttcacatagttttgtatagagatatccaagctgaaatttaaaggataggtatgggttagtcataacgaggggaattagtgagggaggggtgacagaaagcatttcaagaaatgaaaatataacatgcacaggaggagaaagcacagtgcatgagggaaaacagaaaaca

SEQ ID NO: 1236 - protein, 54 aa, Homo sapiens
MISRAIAGILDYLVLIIEVHSPLRYLLMEPALLIRYILMESVLFFCPWSNKLFT

SEQ ID NO: 1237 - DNA, 300 bp, Homo sapiens
gcgtcagtgaaaagttataacgattatttgtccaaaattaacagcacctctgttgttgctaccacctgcttaggaattaacgatatactatttacactaaatgaaaaggattttgattatgtgattttggacgaggcaagtcaaatttcaatgcctgtcgctttgggacctctgcggtatggaaataggtttattatggtaggagatcattaccagctaccgccattagttaaaaatgacgcagctcgattaggtgggttagaagagtcactgttcaagactttctgtgaaaagcatccg

SEQ ID NO: 1238 - protein, 100 aa, Homo sapiens
ASVKSYNDYLSKINSTSVVATTCLGINDILFTLNEKDFDYVILDEASQISMPVALGPLRYGNRFIMVGDHYQLPPLVKNDAARLGGLEESLFKTFCEKHP

SEQ ID NO: 1239 - DNA, 248 bp, Homo sapiens
ccggaactgacacggcttctgcttcctgggatcaaacatgcccccagccctccaggcagccaccagggcaggtgcaggtgggcaggcacctagacccaacccggagctgatgccccgtgccctcggcccccaccctgagggtcctctgagagcacctgccagggcaggctgcaagtccgccccaggaccccctccacgggataccccagttttcttttccaatgagcctaaaaaccctccacaggctg

SEQ ID NO: 1240 - protein, 70 aa, Homo sapiens [sequence omitted]

SEQ ID NO: 1241 - DNA, 304 bp, Homo sapiens
tgtacaaggtcacaaataccagggattgtgggtgatggggtatacactggaaccctgactctctgcatgtagttcagagtcaccctaagcactatcccaaagtctggagtcggcaacatttgtcttcagtgaccgcctactgccgtagatagcatgggagcctaatttcccacctctgccatcacccgtcagccataattctctgaggaggttcttattccccgggaaaagaaaacccccacgcattgattcgcactgaaatgtaaatggctgatggggaaataaatgtgttgcctcttccgga

SEQ ID NO: 1242 - protein, 53 aa, Homo sapiens
MRGGFLFPGNKNLLRELWLTGDGRGGKLGSHAIYGSRRSLKTNVADSRLWDSA

SEQ ID NO: 1243 - DNA, 354 bp, Homo sapiens
tccggatccgagaagttcccgggggctgctgtgctcggcgttctcggagcgttgcgcactggcccgggaatggtgcggttttctgggccaagcgccatcatggctttcattctgagccgggctccgtccgttgttattggtgagggtcgcgttcagtcctgggttattgggtctggttggggcactcacgatggcaacgctgaccgatttattcagcgggcggctgaaggcgtccccatggtgatcgacgctgatgccctggccctcctcccggcagagttgccggaaggatgtctacttacgccccacgctggggagctggcccgaatgctgcggatagaggcgcagtaggga

SEQ ID NO: 1244 - protein, 116 aa, Homo sapiens
SGSEKFPGAAVLGVLGALRTGPGMVRFSGPSAIMAFILSRAPSVVIGEGRVQSWVIGSGWGTHDGNADRFIQRAAEGVPMVIDADALALLPAELPEGCLLTPHAGELARMLRIEAQ

SEQ ID NO: 1245 - DNA, 401 bp, Homo sapiens
gctagcctgctgggcatggctctgcatcctctagtggactgcaaggcatgtgagtaagcccagctgaaacaagaataactgctcagtcaagttcagcctaaatcactgactgcagagtcatgggctaaataaatagtgttttaagtcactgagctttgaggtggtttgttatacagcatttgtgtagtgatggataaccaatacaaccaatacaactcaggctctaccaagcacttacagatctcttccaaccatgagatactagatcctttgtacttcaggatgcccgtctttccagtccccatcttcagagaattttcagaaaagggtgactaaaagcaacccttttctcaaacgatggaatctattttcatttgtatatacatatctggacaccatat

SEQ ID NO: 1246 - protein, 54 aa, Homo sapiens
MGTGKTGILKYKGSSISWLEEICKCLVEPELYWLYWLSITTQMLYNKPPQSSVT

SEQ ID NO: 1247 - DNA, 299 bp, Homo sapiens
  misc_feature (1)..(1): Wherein n may be a, c, g or t
nttaccccctagtactcacataattcagcttagagatcagttcctcaggggataccttctctgataccggagctaaggtctgggccccctattatgagttcagagaacaccttaggtttaggtttccactttatagcacttactatacttttatttatgtaatgtttgtgttctgtactggaataagacccccaggaagtctgtaacatcctcttattctcagtgctattatttataagaaatgcctaggacacaatagatgctcagtaaacatttccagaataaatgagttttgatca

SEQ ID NO: 1248 - protein, 54 aa, Homo sapiens
MLQTSWGSYSSTEHKHYINKSIVSAIKWKPKPKVFSELIIGGPDLSSGIREGIP

SEQ ID NO: 1249 - DNA, 382 bp, Homo sapiens
caattggcgtgaaagccgcgatggcggcatcgacagctcagccgcactgcgcagcgcatgcggcagcgcgaaatagaaatggtggccggcgtaaaacggcatcggcgcctggatatcgcctttgtcgaggtgcttgaccgagaacgttgcctccagcccgtcaatcagcagtcgatacgtgatgcgaaattcgagtgcgaacggatagccttcgcgcgtttgcgggccgtcacgcagcagcatgacgatgtgcgtgtcgctcgcgtcttccacctcaaacggcaggtctcgtgcaaagccgtgttgcggcagggcatgtcgttgcccgcgtgcgtcgcgccactggccgatctcgccgtcgacaaagtgccgggccatgaag

SEQ ID NO: 1250 - protein, 126 aa, Homo sapiens
MARHFVDGEIGQWRDARGQRHALPQHGFARDLPFEVEDASDTHIVMLLRDGPQTREGYPFALEFRITYRLLIDGLEATFSVKHLDKGDIQAPMPFYAGHHFYFALPHALRSAAELSMPPSRLSRQL

SEQ ID NO: 1251 - DNA, 336 bp, Homo sapiens
gtcgacggtgccgaggaattcggttcgttcgagcgcctgttcgacctgttcgacggcaacgaccccgaccgcgtggccgcggcgcggctgcgatggagcgcgcgcaaagccggcggccattccttgaactattttccccagaaggcgggcggttgggtgcgcggcggttgacgtcggggtcgcggcggccctatcagcgttcctgcatcaggagttgggtggtcgcccgacgccaacctgcccgcccgggcaaggtggcgcctctcgcgaaagcgagggggatgcggcctcgccgttcccggccacgggaacggggcaaccaaacgggttgatccg

SEQ ID NO: 1252 - protein, 79 aa, Homo sapiens
MERAQSRRPFLELFSPEGGRLGARRLTSGSRRPYQRSCIRSWVVARRQPARPGKVAPLAKARGMRPRRSRPRERGNQTG

SEQ ID NO: 1253 - DNA, 265 bp, Homo sapiens
  misc_feature (1)..(1): Wherein n may be a, c, g or t
  misc_feature (2)..(2): Wherein n may be a, c, g or t
  misc_feature (3)..(3): Wherein n may be a, c, g or t
nnnaccggggtcgatgacaaggacaatgccttctatgtcgtacgggtgcgcacgctgaagaccagcctcggcgagaatctgcccatcatcccgggcatggtggcccaggtggacgtactcaccggcaagaagagcatcctttcctacctgctgaagcccgtgctgcgggcgaaggcaaacgcgctttccgaacgatgatgcgacatttgttcctgacccaggccggcgttgcgccctccgcgcgctggtgcgaggcctttccgga

SEQ ID NO: 1254 - protein, 65 aa, Homo sapiens
  misc_feature (1)..(1): Wherein Xaa may be any naturally occuring amino acid
XTGVDDKDNAFYVVRVRTLKTSLGENLPIIPGMVAQVDVLTGKKSILSYLLKPVLRAKANALSER

SEQ ID NO: 1255 - DNA, 279 bp, Homo sapiens
  misc_feature (205)..(205): Wherein n may be a, c, g or t
caccgtgtcagctgaaccctcatccccaggtgcaggtcagaggcaggcagcaggccagacggtggtgcaggggggccctcaactgggcaggagggggctgggcgatggccaagggctcacgacccgcccagcaggacctggaacagccgtcctccacctccagaccccagacccctcttgagggcgctcccacctggctcacccnctgcttcccggccggggccactggctggagctggcacacctccgcctccctctgggatcctgcctccctccgga

SEQ ID NO: 1256 - protein, 88 aa, Homo sapiens
  misc_feature (64)..(64): Wherein Xaa may be any naturally occuring amino acid
TLIPRCRSEAGSRPDGGAGGPSTGQEGAGRWPRAHDPPSRTWNSRPPPPDPRPLLRALPPGSPXASRPGPLAGAGTPPPPSGILPPSG

SEQ ID NO: 1257 - DNA, 210 bp, Homo sapiens
ccggagcccatgcccatgtccatggcacctatctctggggacaacatccggcccttcattagcaggtgtgcagtttgcgaagcgcccgccatggtgatggcggtgcacagtcagaccatccagatcccgcagtgccccaacggttggtcctcactgtggattggctattcctttgtgatgcacaccagcgctggtgctgaaggttctggc

SEQ ID NO: 1258 - protein, 70 aa, Homo sapiens
PEPMPMSMAPISGDNIRPFISRCAVCEAPAMVMAVHSQTIQIPQCPNGWSSLWIGYSFVMHTSAGAEGSG

SEQ ID NO: 1259 - DNA, 276 bp, Homo sapiens
ccggagggcaatcgagctaatgtcgacgacgctctgccccctgacgagctcaccgtcgaggccgccaaggagctgctggtaagcccgaacggtcaggaccgcgagctcggtctggatccgtacagccatcgtccgatcgtggcccgcaacgggcgtttcggcccttatgtcaccgaggtccttgacgatgacgaggccactgagatcgttgagacaacaaccaaggatggcaagaagcgtcgcaccaagcacaaggtgaagccgcgcactgctagc

SEQ ID NO: 1260 - protein, 92 aa, Homo sapiens
PEGNRANVDDALPPDELTVEAAKELLVSPNGQDRELGLDPYSHRPIVARNGRFGPYVTEVLDDDEATEIVETTTKDGKKRRTKHKVKPRTAS

SEQ ID NO: 1261 - DNA, 315 bp, Homo sapiens
  misc_feature (297)..(297): Wherein n may be a, c, g or t
gagaacaacacgatcatcgacacacacaggctgctgagcatccatatgcctccttactacaactctatcatccgaggtgtctccacggtcatggtctcctactccagctggaacggagtgaagatgcacgcgaaccatttcctagtcacggattttctcaagaacaagctcaagtttaggggttttgtgatttccgactgggagggcattgatcggatcactactcctcctcacgccaactactcttactcaattgaggctggtgttggtgctggaattgacatgatcatggttccnattcagtacacagaattc

SEQ ID NO: 1262 - protein, 105 aa, Homo sapiens
ENNTIIDTHRLLSIHMPPYYNSIIRGVSTVMVSYSSWNGVKMHANHFLVTDFLKNKLKFRGFVISDWEGIDRITTPPHANYSYSIEAGVGAGIDMIMVPIQYTEF

SEQ ID NO: 1263 - DNA, 419 bp, Homo sapiens
  misc_feature (1)..(1): Wherein n may be a, c, g or t
ngccggcgtttccgcagtgttgttgcactccatctggaccacctcttcggttgcgctcttcggttgcgaatactgggctcgctcaatccgccgatcattgcttgaacgattcaaaacatatattgagtcaattattttcgggaagcagaatattgctacgattgcagcatgactgctgagtcgatcggacgccgagcgagaaagaacatgccgacgcgccacgcgctggccgatgccgcgacgaggctgttcctcgagaagggctacgaccacgtcaccatcaaggagatcgccgacgcagtagatgtatcggcgccgacggtgttcaaacatgtacccgatggcgaggaggcaatcatcttcgacaacggcgccgagcgtctggacaacctgcttgctgctgtcagggaacgacgcgt

SEQ ID NO: 1264 - protein, 83 aa, Homo sapiens
MTAESIGRRARKNMPTRHALADAATRLFLEKGYDHVTIKEIADAVDVSAPTVFKHVPDGEEAIIFDNGAERLDNLLAAVRERR

SEQ ID NO: 1265 - DNA, 345 bp, Homo sapiens
ggcccgtacaacccgtcgcaggtttccgccggttcgcagcccgacatctacatgctgtggactgacggcgcggcccgagtcatgccggcgtgggagctctacatcggcccctacaccatcccgtccgtcgtgtgggtaaacctgctgctcggcctgctggtcgtgctgatgttcgcctacccgttcatcgaggcgaagatgaccggcgacaccgcgcaccacaacctgctgcagcgtccgcgcgacgtgccggttcgctccggcatcggcgcgatggccctggtcttctacaccctgctgaccctgtcgggcggtaacgacctgatcgcctaccacttccagatc

SEQ ID NO: 1266 - protein, 115 aa, Homo sapiens
GPYNPSQVSAGSQPDIYMLWTDGAARVMPAWELYIGPYTIPSVVWVNLLLGLLVVLMFAYPFIEAKMTGDTAHHNLLQRPRDVPVRSGIGAMALVFYTLLTLSGGNDLIAYHFQI

SEQ ID NO: 1267 - DNA, 423 bp, Homo sapiens
ctagctaatgtagatcacctcaaaatatactccgattccatcgagtaccatttatgtaatttacttggaagtaccagcaaagccatagaacagtatgtcaaatattttgagtcacatttattcatcatcgtcagaaagataaaaacaactaaaaaagacctacccagagatatgaaaataaagtatttcaacgaaaatcttcctatattgagactgaagttcgttaaccttcccacatttcctaattttttcgaaagatcaattttcagaaagacgatcttacaaagcgatcaaaattcctcatttattaaggatatattacctgtttacaaagacagcctcatggaacttttcaaacaaagaatcataacaaatgtctcacaagaggatgaaatgcgataccgagatcaatatcaaccctat

SEQ ID NO: 1268 - protein, 141 aa, Homo sapiens
LANVDHLKIYSDSIEYHLCNLLGSTSKAIEQYVKYFESHLFIIVRKIKTTKKDLPRDMKIKYFNENLPILRLKFVNLPTFPNFFERSIFRKTILQSDQNSSFIKDILPVYKDSLMELFKQRIITNVSQEDEMRYRDQYQPY

SEQ ID NO: 1269 - DNA, 425 bp, Homo sapiens
  misc_feature (1)..(1): Wherein n may be a, c, g or t
  misc_feature (13)..(13): Wherein n may be a, c, g or t
  misc_feature (188)..(188): Wherein n may be a, c, g or t
ntgcgtgacgggngagggggcgcccccctttccgcccgcgccccacagtactatctgactttctccaccaaaacgtgcaaagagtgtgattggagctgcagtgcatgcagtggccccctgaaaacagactgcctgcagtgcatggatggctatgttctcaggatggggccctgcgtggagcagtgctngttatcattttaccaggactcgggcctctgcaagaactgtgacagctactgtctccagtgccaaggtccccatgagtgtacccgctgcaaagggccatttctcctcttggaagcccagtgtgtccaggaatgtgggaaggggtactttgcagatcatgcaaagcacaaatgcacagcctgccctcaggggtgcttgcagtgcagccacagggacagttgtcacctctgtgaccatgg

SEQ ID NO: 1270 - protein, 141 aa, Homo sapiens
  misc_feature (1)..(1): Wherein Xaa may be any naturally occuring amino acid
  misc_feature (5)..(5): Wherein Xaa may be any naturally occuring amino acid
  misc_feature (63)..(63): Wherein Xaa may be any naturally occuring amino acid
XRDGXGGAPLSARAPQYYLTFSTKTCKECDWSCSACSGPLKTDCLQCMDGYVLRMGPCVEQCXLSFYQDSGLCKNCDSYCLQCQGPHECTRCKGPFLLLEAQCVQECGKGYFADHAKHKCTACPQGCLQCSHRDSCHLCDH

SEQ ID NO: 1271 - DNA, 628 bp, Homo sapiens
  misc_feature (1)..(1): Wherein n may be a, c, g or t
nagatctttgacatctacgtggtcaccgctgactacctgcccctaggggctgagcaggatgccatcacgctgcgggaaggccagtatgtggaggtcctggatgcagcccacccactgcgctggcttgtccgcaccaagcccaccaagtccagcccctcacggcagggctgggtgtcaccagcctacctggacaggaggctcaagctgtcacctgagtggggggccgctgaggcccctgagttccctggggaggctgtgtctgaagacgaatacaaggcaaggctgagctctgtgatccaggagctgctgagttctgagcaggccttcgtggaggagctgcagttcctgcagagccaccacctgcagcacctggagcgctgcccccacgtgcccatagctgtggccggccagaaggcagtcatcttccgcaatgtgcgggacatcggccgcttccacagcagcttcctgcaggagttgcagcagtgcgacacggacgacgacgtggccatgtgcttcatcaagaaccaggcggcctttgagcagtacctggagttcctggtgggacgtgtgcaggctgagtcggtggtcgtcagcacggccatccaggagttctacaagaaatacgcgt

SEQ ID NO: 1272 - protein, 209 aa, Homo sapiens
  misc_feature (1)..(1): Wherein Xaa may be any naturally occuring amino acid
XIFDIYVVTADYLPLGAEQDAITLREGQYVEVLDAAHPLRWLVRTKPTKSSPSRQGWVSPAYLDRRLKLSPEWGAAEAPEFPGEAVSEDEYKARLSSVIQELLSSEQAFVEELQFLQSHHLQHLERCPHVPIAVAGQKAVIFRNVRDIGRFHSSFLQELQQCDTDDDVAMCFIKNQAAFEQYLEFLVGRVQAESVVVSTAIQEFYKKYA

SEQ ID NO: 1273 - DNA, 249 bp, Homo sapiens
atccagctatgggacacagcaggacaagaacgattcagaaagagcatggttcagcactactacagaaatgtacatgctgttgtcttcgtgtatgatatgaccaacatggctagttttcatagcctaccatcttggatagaagaatgcaaacaacatttgctagccaatgatataccacggattcttgttggaaataaatgtgacttgagaagtgccatacaggtacccacagacttggcacaaaaattt

SEQ ID NO: 1274 - protein, 83 aa, Homo sapiens
IQLWDTAGQERFRKSMVQHYYRNVHAVVFVYDMTNMASFHSLPSWIEECKQHLLANDIPRILVGNKCDLRSAIQVPTDLAQKF

SEQ ID NO: 1275 - DNA, 405 bp, Homo sapiens
ggatcctgcaatatttgtttataatatgtcttttcaacctcatttcctacctaccattgttcagtccacactccacccccaacacgtaactctgccttatccacactgtcctactttgtttctctaaaacatcagatgtgttccggcctcagagccatggtacttgctgcttccttgatgattctctactgctcatactgtactcactttctttctgcaggtgtttgcccaaaggccattctttggcccccaggactgcccaatccgttctcccatttcatttcctgccatagcacttatttcatgcctatttcatgtatatttgcactgcttaattgttcattattttcatccctttccccaataaatgttaagcccccgataggaggaatattttatatttgt

SEQ ID NO: 1276 - protein, 90 aa, Homo sapiens [sequence omitted]

SEQ ID NO: 1277 - DNA, 330 bp, Homo sapiens
acgcgtcgacgaactgacgacaccaccgagtacgcccaatgttcggactacacagcaggttcgtcgtagggtggatgccggtagtggcggatcccgattgtggtggatcccggtggtacagaaggaggagccatggcatctggtcgagcacaggccccacggacgacaccgcacatcgatgtgcaccgctccggcgatcgcttgaaatcccgcgtctcctggctggattcgaaacattcgttctcgttcggacagcactacgatccggacaacactcatcacggattgctgctcgtcaacaacgacgacaccgtactggcgggaaccggt

SEQ ID NO: 1278 - protein, 66 aa, Homo sapiens
MASGRAQAPRTTPHIDVHRSGDRLKSRVSWLDSKHSFSFGQHYDPDNTHHGLLLVNNDDTVLAGTG

SEQ ID NO: 1279 - DNA, 327 bp, Homo sapiens
  misc_feature (327)..(327): Wherein n may be a, c, g or t
cctaggcctttaaatgactcatagaaaattaacattttgtgactatacaaaaaattaaatcctacttttttctatccagaaacacctaagaaacagttgcccagacttttttgcttgtttgtttgttttttcaccaaacctgtcttgggagggaaccagtcctgaggaaggcctgcctgagtgttgcctaacagcgatagcaaagtgacttcggggtgccatccatgcagccaagctgaggctaactcataggggctttgagtgctcctttaaaaatgttattaggttctggggtacatgtacttcggagagaggctggagtgtgcn

SEQ ID NO: 1280 - protein, 55 aa, Homo sapiens [sequence omitted]

SEQ ID NO: 1281 - DNA, 408 bp, Homo sapiens
acgcgttacttaaacttatctgtaaataataaattcattatttctagttggttaggtactatgggctgtggtttaccaggtgctatggcagctaaaattgcttatccaaaccgtcaagcagtagctatcacaggcgacggtgcgttccaaatggtaatgcaagactttgctacagctgttcaatataacttaccaatgacaatctttgtattaaataacaaacaattgtcattcattaaatatgaacaacaagctgctggtgaattagagtatgccattgatttctctgatatggatcatgctaaatttgctgaagctgctggtggtaaaggctatgttgtgagagatgtaagtcgtcttgacgacatcgttgaagaggcaatggctcaagatgttccaacaatcgtt

SEQ ID NO: 1282 - protein, 136 aa, Homo sapiens
TRYLNLSVNNKFIISSWLGTMGCGLPGAMAAKIAYPNRQAVAITGDGAFQMVMQDFATAVQYNLPMTIFVLNNKQLSFIKYEQQAAGELEYAIDFSDMDHAKFAEAAGGKGYVVRDVSRLDDIVEEAMAQDVPTIV

SEQ ID NO: 1283 - DNA, 219 bp, Homo sapiens
  misc_feature (1)..(1): Wherein n may be a, c, g or t
ntggtctcagtggtcccctggcgtgagtacagcatggtacactgcgtgggctcactggagatactgtcatgtgaatctaaactatccatcctgtgggctgtctgtgcacctgaagcagctccgggatgctcggcaatggggtccagtcccgactctctggaaaggttcatgatgtgggtctgatagtacatgtggatgctctcccgagttggaacattg

SEQ ID NO: 1284 - protein, 63 aa, Homo sapiens
MYYQTHIMNLSRESGLDPIAEHPGAASGAQTAHRMDSLDSHDSISSEPTQCTMLYSRQGTTET

SEQ ID NO: 1285 - DNA, 342 bp, Homo sapiens
acgcgtgccaatatcgatgaatttacggaaaccacttcccgagccattgaagtggtgggcggcgcggcaaaagggaaggcgattattgtgcttaacccagcagagccaccgttgatgatgcgtgacacggtgtatgtattgagcgacgaagcttcacaagatgatatcgaagcctcaatcaatgaaatggctgaggcggtgcaggcttacgtaccgggttatcgcctgaaacagcgcgtgcagtttgaagttatcccgcaggataaaccggtcaatttaccgggcgtggggcaattctccggactgaaaacagcggtctggctggaagtcgaaggcgcagcg

SEQ ID NO: 1286 - protein, 114 aa, Homo sapiens
TRANIDEFTETTSRAIEVVGGAAKGKAIIVLNPAEPPLMMRDTVYVLSDEASQDDIEASINEMAEAVQAYVPGYRLKQRVQFEVIPQDKPVNLPGVGQFSGLKTAVWLEVEGAA

SEQ ID NO: 1287 - DNA, 270 bp, Homo sapiens
atggcttgctatctgaagcaggtggctgccaccgtctgcataaatgggcccagcgcagtctttgatgttccactaagatacggggatctggtggtgacacccatgcgactggcttcggaattgatgcaagtccatccctcaggggctgtacgcttccgtcactgttcagttccccagaataaactcaactcacaaaagatacttccggtggaaaaggcccaagggaagatcctcttcattgcaggagagaatgacgaaagcttggctagc

SEQ ID NO: 1288 - protein, 90 aa, Homo sapiens
MACYLKQVAATVCINGPSAVFDVPLRYGDLVVTPMRLASELMQVHPSGAVRFRHCSVPQNKLNSQKILPVEKAQGKILFIAGENDESLAS

SEQ ID NO: 1289 - DNA, 203 bp, Homo sapiens
aaatttccgagattgtctccagggtagtgaggaatctgagcaggcccagcgtactattttactatgataaccaggggataatgttacacatgaggcagcctggagatcctggccacacagagctttctcacacaggtaacgagggttgctgcaagcatcccagtgcaggcaggagccgatgcccatggtggcagctcacgcgt

SEQ ID NO: 1290 - protein, 62 aa, Homo sapiens
MGIGSCLHWDACSNPRYLCEKALCGQDLQAASCVTLSPGYHSKIVRWACSDSSLPWRQSRKF

SEQ ID NO: 1291 - DNA, 338 bp, Homo sapiens
  misc_feature (1)..(1): Wherein n may be a, c, g or t
  misc_feature (2)..(2): Wherein n may be a, c, g or t
  misc_feature (175)..(175): Wherein n may be a, c, g or t
nngaattccacaacactttaaaaattcatttaaatacattgactttagagttcagtgtgtgggtgggaagagtcattggtttttatctgttccacaaaattaacttcatctcaaaaaggagcaaaaacagggactgaagaggtggcccggttgttatcttgtagagaacccaggnttcagcttccaggacccacattgaaaatcacaagcacccttagctccagttcccggggatccagtggccccatctgcccttcacgggcaccaggtactgatgtggtgcacagacatacatgcaggcaaaacatacatataaaaataaaagctaaaaatctaga

SEQ ID NO: 1292 - protein, 96 aa, Homo sapiens
  misc_feature (43)..(43): Wherein Xaa may be any naturally occuring amino acid
SSVCGWEESLVFICSTKLTSSQKGAKTGTEEVARLLSCREPRXQLPGPTLKITSTLSSSSRGSSGPICPSRAPGTDVVHRHTCRQNIHIKIKAKNL

SEQ ID NO: 1293 - DNA, 474 bp, Homo sapiens
  misc_feature (1)..(1): Wherein n may be a, c, g or t
ngtgcacgggagaagacgtgcgcgcagttcggcggaacctatccgggttcggccggcagtgggggtcacgagctcaccgacgcgcgcgcgttcgcctcgtggggcgtcgatttcgtcaaatacgatcggtgctccggtgactccgcgcacgacgaccaggtcgcctcgttcaccgcgatgcgtgacgcaatccgatccaccggacgccccatggtgtacagcatcaaccccaacagcgaatcgccggatcggtccggagcccaattcgattggggcggtgtggcaaccatgacacgtaccaccaacgacatctcgccggtgtggaccactcggccggccggtgccgatgcgacaccggcatcggggtatcaggggatccgcgacatcatcgacgccgtggccccgatcggcgcacgggttgcgacggcagcttcgtcgacatggacatgctcgtcgtcggtgtcggcaacgcgt

SEQ ID NO: 1294 - protein, 158 aa, Homo sapiens
  misc_feature (1)..(1): Wherein Xaa may be any naturally occuring amino acid
XAREKTCAQFGGTYPGSAGSGGHELTDARAFASWGVDFVKYDRCSGDSAHDDQVASFTAMRDAIRSTGRPMVYSINPNSESPDRSGAQFDWGGVATMTRTTNDISPVWTTRPAGADATPASGYQGIRDIIDAVAPIGARVATAASSTWTCSSSVSATR

SEQ ID NO: 1295 - DNA, 202 bp, Homo sapiens
  misc_feature (1)..(1): Wherein n may be a, c, g or t
  misc_feature (201)..(201): Wherein n may be a, c, g or t
  misc_feature (202)..(202): Wherein n may be a, c, g or t
ntgcttctgctggttgtcgttgctgttagtaggcacgcctatggccgccaccgtcgctgtcgtcgtggtcatcgttggcatggctctgctggcctcggcgggcgtcagcgccaggatgacaaccaggagcacccggctgctgcagcacgcaacgattccggcggtgttgcgccacccgctaggcataccggatcaataacnn

SEQ ID NO: 1296 - protein, 62 aa, Homo sapiens
  misc_feature (62)..(62): Wherein Xaa may be any naturally occuring amino acid
MPSGWRNTAGIVACCSSRVLLVVILALTPAEASRAMPTMTTTTATVAAIGVPTNSNDNQQKX

SEQ ID NO: 1297 - DNA, 268 bp, Homo sapiens
cgcaagcagagcaagaagatccaggtcgccatgggcgacgtgacccacgtggcttccgaaaccatccagggctatcgcgtggtgcgcagcttcgggggtgaagtctacgaagagaagcgctttttcaaggccagccagggcaacaccgacaagcagttgcggcatacttggccccggggccgttttaccaccccgttgctgcaactggtgatctacaccgccatggccgtgctgatgttctgggtgctttaccttcgcggcgacgcgt

SEQ ID NO: 1298 - protein, 89 aa, Homo sapiens
RKQSKKIQVAMGDVTHVASETIQGYRVVRSFGGEVYEEKRFFKASQGNTDKQLRHTWPRGRFTTPLLQLVIYTAMAVLMFWVLYLRGDA

SEQ ID NO: 1299 - DNA, 291 bp, Homo sapiens
  misc_feature (281)..(281): Wherein n may be a, c, g or t
  misc_feature (289)..(289): Wherein n may be a, c, g or t
  misc_feature (291)..(291): Wherein n may be a, c, g or t
agatctctgagttcaaaaccagcctggagcagggcaagttgtaggtaaagaaaaacttaaatctgggtgtggtggtcaacacctttaatcccaggagacaggcatacagacctctaaattcaaggtcaatctacagagcaagatccagaatagccaagcttttaggcagtgaaggagctggaaatataatagaacaagggggctgtgttccagctcctgtaagcagcagaactcagcagcttcagccatgtgtctctggctttatattcaagaagagaagngaaactangn

SEQ ID NO: 1300 - protein, 54 aa, Homo sapiens
MAEAAEFCCLQELEHSPLVLLYFQLLHCLKAWLFWILLCRLTLNLEVCMPVSWD

SEQ ID NO: 1301 - DNA, 749 bp, Homo sapiens
  misc_feature (373)..(373): Wherein n may be a, c, g or t
  misc_feature (385)..(385): Wherein n may be a, c, g or t
cttgacgaatgcacaactggtgagtatccagtgaagtttcataggccttattgggattccgtttccaataaagcaaaacaattcatcttgaaggctcttaatttggatccttcaaagagaccgaccgccgcagaactcttggaagatccatggattatttgtaccgaattgaagacgcacaatttattgcctgggttaaaggaaggattggatgctcgtcaaaagttccgtaattctgttgagagagtcagatttaacatgaaaatccaaaaattaagagatctgtatcttgaacagacagagagtgattcagattttgacgaaggaagtcaagcaaacgggtcagttcctccattgaaagcaacggatacangtcaactatcanagaagctatcagaagaagaacagtttaagttgaagtccgagttaaccagcaaagcttttgcacaattagttaacacagtgcttgccgaaaaggaaaaatttttaaatattaacagagtctgtagttttgatagcgatcttcctgggagtgatataaagtctttggatgaggcgaaggagaaaccagaggggaaggataccaaaacagaagaatgataacagtatgccgttttaccacactggcgaataaatcttcaatgactttgtaagctcgaatatgcgcaagatttgactttgatattttgcactttttcgtcctcactttctaccttttttttttatgccttagttgaaaagatacgcgt

SEQ ID NO: 1302 - protein, 199 aa, Homo sapiens
  misc_feature (125)..(125): Wherein Xaa may be any naturally occuring amino acid
  misc_feature (129)..(129): Wherein Xaa may be any naturally occuring amino acid
LDECTTGEYPVKFHRPYWDSVSNKAKQFILKALNLDPSKRPTAAELLEDPWIICTELKTHNLLPGLKEGLDARQKFRNSVERVRFNMKIQKLRDLYLEQTESDSDFDEGSQANGSVPPLKATDTXQLSXKLSEEEQFKLKSELTSKAFAQLVNTVLAEKEKFLNINRVCSFDSDLPGSDIKSLDEAKEKPEGKDTKTEE

SEQ ID NO: 1303 - DNA, 404 bp, Homo sapiens
  misc_feature (163)..(163): Wherein n may be a, c, g or t
  misc_feature (164)..(164): Wherein n may be a, c, g or t
caattggactttatttatttcttactgagttacttacttacttacttacttacatagccagattgctggccagttttcctgctgttgcaaataaatgacttactttacacaagtctttgtaagtaagaatcactggagggagaaaggggtgtagaacaggctnncttccagcagggacaccagatgatggatcacattcacatcagccgtcagttaacagaaaagaacaaggaatgtagaattccattatgtctcctgctcatgtattttgaggaagcatttcattccattgaatagagtacagttctcaccattgtgacacaaaaataacacctccttttatgctaaaggtccatttaagaaataccagttaaaaattgaacatttctaacggagagaagctt

SEQ ID NO: 1304 - protein, 56 aa, Homo sapiens
  misc_feature (13)..(13): Wherein Xaa may be any naturally occuring amino acid
ESLEGERGVEQAXFQQGHQMMDHIHISRQLTEKNKECRIPLCLLLMYFEEAFHSIE

SEQ ID NO: 1305 - DNA, 261 bp, Homo sapiens
accggtggttgcgataaggacgcatatatccccgtggtcgctactggttcgaattctttgtgtatccattacacaagaaacgatgatgtgatgtttgacgacgaaatggttcttgtagacgctgctggctccttgggtggttattgtgctgatatttcgagaacgtggcccaatagtgggaaattcactgatgcacaaagagatctctacgaagctgtattaaatgttcagcgtgattgcattaagttatgtaaagctagc

SEQ ID NO: 1306 - protein, 87 aa, Homo sapiens
TGGCDKDAYIPVVATGSNSLCIHYTRNDDVMFDDEMVLVDAAGSLGGYCADISRTWPNSGKFTDAQRDLYEAVLNVQRDCIKLCKAS

SEQ ID NO: 1307 - DNA, 291 bp, Homo sapiens
tccggaagccatgacgggagctgcaagatctgggacgccaagagcggggcttgcctcaagacggtcatcgatgaaaagaagcccgcggtgtccttctccatgttctcgcccaatggcaagtttatcctcgttgccatgctcgataactcactgaagctatgcaattttgccaccggcaagttcttgaaggtatacagtggacatgtgaacagacaatactgcatacagtccgcgttttctgttacgaatggaaagtacattgtcagtggatcagaagacaactgcgtgtac

SEQ ID NO: 1308 - protein, 97 aa, Homo sapiens
SGSHDGSCKIWDAKSGACLKTVIDEKKPAVSFSMFSPNGKFILVAMLDNSLKLCNFATGKFLKVYSGHVNRQYCIQSAFSVTNGKYIVSGSEDNCVY

SEQ ID NO: 1309 - DNA, 327 bp, Homo sapiens
  misc_feature (1)..(1): Wherein n may be a, c, g or t
nacgcgtccgaggatgaggtcatgcgattctgccagtccttcatgagtgagctctaccgtcaccttggtgaacacaccgacgtgccagctggtgatatcggcgttggcagccgtgagatcggactcctcttcggccaatacaagcgcattactaaccgtcatgagtccggcgtgctcaccggtaaaggactcacctggggtggatccttggtgcgcactgaagctaccggatattgcacagtcttcttcgtccaacgaatgctggcgaccaacggcaagtctttagacggcctgcgagttaccgtctccgggtcagggcacgtcgcg

SEQ ID NO: 1310 - protein, 109 aa, Homo sapiens
  misc_feature (1)..(1): Wherein Xaa may be any naturally occuring amino acid
XASEDEVMRFCQSFMSELYRHLGEHTDVPAGDIGVGSREIGLLFGQYKRITNRHESGVLTGKGLTWGGSLVRTEATGYCTVFFVQRMLATNGKSLDGLRVTVSGSGHVA

SEQ ID NO: 1311 - DNA, 343 bp, Homo sapiens
  misc_feature (1)..(1): Wherein n may be a, c, g or t
  misc_feature (2)..(2): Wherein n may be a, c, g or t
nntcatgagctattcggggttcttcgccaccgaggatctttacgaggtggcccacgacggtaacccgcagaaagggtcgtgggtggtgccactgagccgggcccacgacattgctcaggaggacttcgtcaccgtcgtcgacgaccatggcgcacgacacccgcgcatccaccggcgcggcgagttcgtcttccgcctctcgggccgggcccgccagccagtcggcctcctattacacccccgaggtgctgacgaggttcaccgtcggtcaggcgttggaggagctacttgacgacaccaccaccgccgaggaaatcctccacctgtcggtgtgtgagccggc

SEQ ID NO: 1312 - protein, 62 aa, Homo sapiens
PAERVVGGATEPGPRHCSGGLRHRRRRPWRTTPAHPPARRVRLPPLGPGPPASRPPITPPRC

SEQ ID NO: 1313 - DNA, 314 bp, Homo sapiens
  misc_feature (270)..(270): Wherein n may be a, c, g or t
gtgcactttgttccgtggtggatggttattgttcttatctgtcgcgatgttattctcgcgggaatattttttatctaccaaaatcgtggccttcgtatgtcagtgatttatctaggaaaagttgcgacagcaagtctcatggttgctttccccacgataatttttgctaaccttccttattcaggttgtaaatgggcaataccacttgggtgggcagtattcatttgggcgtttgttctctatgtatggacagggctgctttatatatantcgggatatttactggctaaaaaagttccagtattgactccgga

SEQ ID NO: 1314 - protein, 104 aa, Homo sapiens
  misc_feature (90)..(90): Wherein Xaa may be any naturally occuring amino acid
VHFVPWWMVIVLICRDVILAGIFFIYQNRGLRMSVIYLGKVATASLMVAFPTIIFANLPYSGCKWAIPLGWAVFIWAFVLYVWTGLLYIXSGYLLAKKVPVLTP

SEQ ID NO: 1315 - DNA, 321 bp, Homo sapiens
gccggccaggccagccttcaccttgtcaccggcgaaatccacggcggtgaggcaaccggcagttgagagtgcgcctacagttggggggcggagatggggaagaagcagcacagcaaggaccgcatgttcatcacacggacggagtgggcgactgaatggggcggcgccaagcagaaggacggcggcacaccgttcaagcgcctccccttctactgttgctcgctcacgtttcttccattcgaggatccagtgtgcaccgccgatggaagcatctttgatttaatgagcataatcccataccttaaaaagtttgggaagctt

SEQ ID NO: 1316 - protein, 76 aa, Homo sapiens
MGKKQHSKDRMFITRTEWATEWGGAKQKDGGTPFKRLPFYCCSLTFLPFEDPVCTADGSIFDLMSIIPYLKKFGKL

SEQ ID NO: 1317 - DNA, 391 bp, Homo sapiens
gaattccagctcaaccatttgtactatcagccacctttcacttgccagatgcttagaaactcgaggggagaactggctccacaagtgggagaccaactgaatattgtaacctcatattttgattccagtaatgctttttctgagtctttccatgatatatttgtggtcaagacaaagatatgtggatctaatgatagtaaagtcaggaggatttgtaactggttgagcaactatacccaacgggtcttgattaatgtgtcagtgtcagagtaatgcatggtctctgatgttatgttatggggatcagtacttgctggttgccttttcaacatttttattaggggcttagaatagagaaagacacagaaagcgcacttagtgcattgcagat

SEQ ID NO: 1318 - protein, 90 aa, Homo sapiens
EFQLNHLYYQPPFTCQMLRNSRGELAPQVGDQLNIVTSYFDSSNAFSESFHDIFVVKTKICGSNDSKVRRICNWLSNYTQRVLINVSVSE

SEQ ID NO: 1319 - DNA, 198 bp, Homo sapiens
  misc_feature (1)..(1): Wherein n may be a, c, g or t
ntctagaaagtcgacaacaagaacaaaggatatacaaaaatgcctccaaagtttgatcctaatgaagttaaatacttgtacctaagagccgttggtggtgaagtcggtgcctccgctgctttggctccaaagattggtcctttaggtctatcgccaaagaaggttggtgaagatattgctaaggccaccaaagaattc

SEQ ID NO: 1320 - protein, 53 aa, Homo sapiens
MPPKFDPNEVKYLYLRAVGGEVGASAALAPKIGPLGLSPKKVGEDIAKATKEF

SEQ ID NO: 1321 - DNA, 339 bp, Homo sapiens
gtcgatggctggtcccccccgcgtccggggacgtggcggcgcaggcgccccgcgccgcgctatgcctggtatgtgctgggcatcctgttcgtcgtctacgtcctcaacttcgtcgaccggcaggtgatctcgatcctggccgaagacatcaagcgcgacctcaatctgaaggacgaggacctcggcttcctctacggcaccgccttcggcgtgttctatgcgctgttcggcatcccgctcggccgcctcgcggacagctggcatcgtgtgcggctgatgaccgtcggcctcgcgctctggtcgacgatgaccgcattgtccggcttttcgcgcaccggt

SEQ ID NO: 1322 - protein, 113 aa, Homo sapiens
VDGWSPPRPGTWRRRRPAPRYAWYVLGILFVVYVLNFVDRQVISILAEDIKRDLNLKDEDLGFLYGTAFGVFYALFGIPLGRLADSWHRVRLMTVGLALWSTMTALSGFSRTG

SEQ ID NO: 1323 - DNA, 552 bp, Homo sapiens
  misc_feature (1)..(1): Wherein n may be a, c, g or t
ngtgcaccaccttcaaatttactcattgtttaagacaggcagtgggaaagaagccgtcatattgctcgaatccttaacaagcaaaatatacaaccactaaattattccgaaagggcctgcttaataatttgcctactaacttgtgcatagaacagcaaacagaaacaaagcgtaagaaccatggggtatccgccacctacacgaaggcttggagataagaaaaggtaccattattccaataatcctaaccgaaggcatccttccgctgtttattccaagaatagctttccaaaatcaagcaataatggatttgtatcttctcctactgccgataattcaacaaatccgtctgtaactcccagtactgcatctgtacctcttcctacagcggcacctggaagcacgtttggtatcgaagcacccaggccatctcgatatgatccgagctcagtcagtaggccttcgtcatcatcttattcgtcaacaagaaaaattggaagccgttataacccagatgtggaaagatcctcttcaaccactagttcaactccg

SEQ ID NO: 1324 - protein, 124 aa, Homo sapiens
MGYPPPTRRLGDKKRYHYSNNPNRRHPSAVYSKNSFPKSSNNGFVSSPTADNSTNPSVTPSTASVPLPTAAPGSTFGIEAPRPSRYDPSSVSRPSSSSYSSTRKIGSRYNPDVERSSSTTSSTP

SEQ ID NO: 1325 - DNA, 269 bp, Homo sapiens
cctaggggcttctatgcttgaacagtttctagagtaggaccctatgtggaaatgttatttttataagacacaaaatctggctcttttagtttcttaccacagcacaagtggtacaattcttacttacctgcctttagcagatgctcagagtattagtgcacctggcaaggaacctaatcacaagttttctcaatgactagattggaagaaggtgtaaagacacaacagtgctgctcagaagtccctgcaattcctaccccttcacgcgt

SEQ ID NO: 1326 - protein, 50 aa, Homo sapiens [sequence omitted]

SEQ ID NO: 1327 - DNA, 365 bp, Homo sapiens
agatcttgtagatgtggccagtggagtagaagaagatgaattagaggcccttacaccaattataagcaaccttcctccaactcttgaaactccccagcctgcagagaactccatgttagtacagaaattagaagatgaaattagtttgttaaatagtgagaaatggtcattgatggagcaaatcagaagacttaaaagtgaaatggacttcctcaaaaatgaacactttgccatcccagcagtttgtgactctgttcagcctcctttggatcagttgccccacaaagactctgaggacagtggacagcatccagatgtaaatagttcagacaagggaaaaaacacagacgtccttctttcattat

SEQ ID NO: 1328 - protein, 84 aa, Homo sapiens
MLVQKLEDEISLLNSEKWSLMEQIRRLKSEMDFLKNEHFAIPAVCDSVQPPLDQLPHKDSEDSGQHPDVNSSDKGKNTDVLLSL

SEQ ID NO: 1329 - DNA, 320 bp, Homo sapiens
tgatcagtttttctcaaaatactaaagtattaacttttctcactagttctaactaagtgtatattccccttccagatacagtgacatgtttagatgggtgtttaataaatacattgatgataaaagaaaaaattatatttcctatattcagatgacccaaaactaccatttccaaaaacataataaaccacagtctgaattctatacaggaaaatgacacatgcttctcagctttcaggtatgacattttaccttctgtaaataaatcctacccactcctaggagagccatgacccacatgaaggatgacagtctgatca

SEQ ID NO: 1330 - protein, 64 aa, Homo sapiens
MSYLKAEKHVSFSCIEFRLWFIMFLEMVVLGHLNIGNIIFSFIINVFIKHPSKHVTVSGRGIYT

SEQ ID NO: 1331 - DNA, 373 bp, Homo sapiens
cgacaaaaatatacggaagaaatggacaaggcgattaatctactgaaaacaaatataaagaaggagtatagacatgataagtatttggagcggacaaaggtaggaacgtatcctggtagaagaacatatcctggtaggagaacatatcccgctaggagaacatatcccgctagcagaacatattcagatagcaattcatacacttttcggataaatgtccagaagattaggcacgcattagtatgttacaatcaagatggtgttcaaaaacacaaccaaaagcctcctaggattggtcatggattaacgagagtgttataccaaccgttgtcgctacaaaaattgagagataataggagcagaatgtataagt

SEQ ID NO: 1332 - protein, 124 aa, Homo sapiens
RQKYTEEMDKAINLLKTNIKKEYRHDKYLERTKVGTYPGRRTYPGRRTYPARRTYPASRTYSDSNSYTFRINVQKIRHALVCYNQDGVQKHNQKPPRIGHGLTRVLYQPLSLQKLRDNRSRMYK

SEQ ID NO: 1333 - DNA, 363 bp, Homo sapiens
tccggataaaatttgcgggtcagggagatcagcggtcaccacccatgaaagagtgatggaagcccaaagtagtacttgcttttcaaaagtcgtgggacctaacttatggtatggcgatcgcacaagacttacacccaagcaagaagaagctgcgcttggtttgtcacgtgcctgtggctctggcattccagcatacatttgcaccatgaagaagtctaatgttgtcaagagacagatggtattttcaagacagttcagtaagcgacacatattcggtcgtctgggcacttatgggtgtgaaaccagagtttttgcaggcagggacctgttcggcagtaagctcaacttctcaatgatccatgg

SEQ ID NO: 1334 - protein, 102 aa, Homo sapiens
MEAQSSTCFSKVVGPNLWYGDRTRLTPKQEEAALGLSRACGSGIPAYICTMKKSNVVKRQMVFSRQFSKRHIFGRLGTYGCETRVFAGRDLFGSKLNFSMIH

SEQ ID NO: 1335 - DNA, 261 bp, Homo sapiens
  misc_feature (1)..(1): Wherein n may be a, c, g or t
nacgcgttcggcaccggcgagttctcctggggcatcagcaacggctggtcgctgtttggcggcggcatgaccgacaacaactaccgcgcgctcacggtcggtgcggggcgtgacctgttggcgttcggggctgtctcgctggacgttacccaatcccatgccaatgtgtggaacgagtcactgtcgggtaaatcctatcgccttcaatactccaagaacttcgaacagtacgacagccaggtgacctttgccggttaccgg

SEQ ID NO: 1336 - protein, 87 aa, Homo sapiens
  misc_feature (1)..(1): Wherein Xaa may be any naturally occuring amino acid
XAFGTGEFSWGISNGWSLFGGGMTDNNYRALTVGAGRDLLAFGAVSLDVTQSHANVWNESLSGKSYRLQYSKNFEQYDSQVTFAGYR

SEQ ID NO: 1337 - DNA, 274 bp, Homo sapiens
tcatgaaagctgtcgagaaattgatgttcgccgtctatgttgggtggtcttatcatccacagcccgttgtgtcgtctgccgaggcagccgccatcgacatgacggatcaggctctgcgctacatcaacgcctatctggaggctacagatgagcgcccatgaaatctctcctggcgcgcattgacagtgccgccgagacagctggcctgtcacgttcggagtggatcaggcgatgctgcgccgaagccaccaccgccctcatcgacgccgccggc

SEQ ID NO: 1338 - protein, 52 aa, Homo sapiens
MKAVEKLMFAVYVGWSYHPQPVVSSAEAAAIDMTDQALRYINAYLEATDERP

SEQ ID NO: 1339 - DNA, 282 bp, Homo sapiens
  misc_feature (159)..(159): Wherein n may be a, c, g or t
  misc_feature (197)..(197): Wherein n may be a, c, g or t
  misc_feature (236)..(236): Wherein n may be a, c, g or t
  misc_feature (281)..(281): Wherein n may be a, c, g or t
  misc_feature (282)..(282): Wherein n may be a, c, g or t
agatctagattaaggacaccaccagagagaagaagccaaaaaccttgtgaatatcttcagaggaatgtttattttccccctcctgcctttgcccttcctccccttcctgcctttggccttcctccccttcctcttgtacttttgtttcattcccctttngcatcccagtttgtatttattcgtctggcagtggcatntgattggttgaagaatagaaaccctgatgtatggagcanaatcctcagtacttaacagtgaagggcaggtcttgtgtctacctnn

SEQ ID NO: 1340 - protein, 52 aa, Homo sapiens
  misc_feature (2)..(2): Wherein Xaa may be any naturally occuring amino acid
MXKGNETKVQEEGEEGQRQEGEEGQRQEGENKHSSEDIHKVFGFFSLVVSLI

SEQ ID NO: 1341 - DNA, 496 bp, Homo sapiens
atcgatcaaggccatggggctctacaatcagcaggtagcaaagccaaccaggcacgtgtccttcccttcagggagatgagttccctcagccccagagcagatctgggggtgctgtccaggagtcaaggactagagtcaaaaaggttcaaagtttacctggtgtcctgttgtactgtggctgagctgggagtcaaaccacaagatgcagtccttcctgctctttcctccccattccaaagtcagaaggacttcaccccatggccaccactactgcaggcccatggagagtactaccagactaatgcaggttcccttaagacccaagagttcttcagtcagtttgtggtgaatgctgcctcgcctgggactcaccctttaggacagtgaatcctcgggcccagggaaggtccagaaatgctatctaagagccaagtcctagaataaggagcccaagatcctgtttggtactctacctttctgtggctgtgctggtacc

SEQ ID NO: 1342 - protein, 103 aa, Homo sapiens [sequence omitted]

SEQ ID NO: 1343 - DNA, 180 bp, Homo sapiens
cggaaggcgaagcgggacgtggagctcggcggctgcgtggtgccggcgggcacggagatcatgatccccatcatggcggtgcaccacgacgccggcgtgtggggcgacgacgccacggagttcgaccccgcgcgcttcgcggacgacggtggccgccggccgcggcagcagatggcgttc

SEQ ID NO: 1344 - protein, 60 aa, Homo sapiens
RKAKRDVELGGCVVPAGTEIMIPIMAVHHDAGVWGDDATEFDPARFADDGGRRPRQQMAF

SEQ ID NO: 1345 - DNA, 546 bp, Homo sapiens
ggatcccccaacactgctgctcgaactacaggtgtctacaagtggcaggaagaccgcaagagagggacgtgactttctggcttcacagtctgacaagacctttggcctaagttgtgacctgtgtcagacgggctgtaggtgctatttctagaccggggagcagtgacgggcacctggggctggcctcaaagggcctgacggggtcaggaaggcctgggtgacagagagaaagagctggtcagccccagggaaggtaagtgtccggtctgcttatagaatatgtgcagggtgtgggggctacatggcgggttgccccatagagatgacccgtgggcagttggaaacctgcgtctgtggcttagaagacagggctgtgcagccacctcccagtaactgagggaggcagcgccatgtgagccgaccatccagggtgctggacaagagaagaggccaaagagcagcactgcatggctgaggcctgaggctgcagagggactgaggagtgaggcgcacaggccaccggaggagctgggtgtgaccacgcgt

SEQ ID NO: 1346 - protein, 73 aa, Homo sapiens
MVGSHGAASLSYWEVAAQPCLLSHRRRFPTAHGSSLWGNPPCSPHTLHIFYKQTGHLPSLGLTSSFSLSPRPS

SEQ ID NO: 1347 - DNA, 403 bp, Homo sapiens
agatctaagctggaatcagcatctgttggcgtttggactgagagaccgagttaatttacttcggagagctaagtgggaaggccacatggactgacagatggaacctactgcctggttcacccacaatgggtcctgtgcttgtggatgaaagagcaggagcccatctgtgaagaagagagtgctacagctccaggatgtaggtgtggctcacagaggggctacacttcccacacctaagttctgtgctatttccctgtaatggcctaataaagctcccttttacttttgcttctctgagtaggcttctattctcacaaccagatgatctccaagaaaaagcctgtacctgtctcagaaggtggttgttgtgacataatttggaagcatctggcatttagtcgac

SEQ ID NO: 1348 - protein, 70 aa, Homo sapiens
MPDASKLCHNNHLLRQVQAFSWRSSGCENRSLLREAKVKGSFIRPLQGNSTELRCGKCSPSVSHTYILEL

SEQ ID NO: 1349 - DNA, 287 bp, Homo sapiens
tctagatggtaaaaaaaataaaaaataattatgtttctttcaagcacttcatagtccttttgggcgctagacatgtggacaattacaataatgcagattaacttttttaagaacacacagtttcatgcagtttgttaaattattttgaccaaatatctcatcaatccttttacaaccatttttttcatatgggacaaccaagacttcaagaactctagtaatttggcaagtacccatagtttctaagtgacacagctaggattaaatccagtttcctcttctgtaca

SEQ ID NO: 1350 - protein, 56 aa, Homo sapiens
MGTCQITRVLEVLVVPYEKNGCKRIDEIFGQNNLTNCMKLCVLKKVNLHYCNCPHV

SEQ ID NO: 1351 - DNA, 266 bp, Homo sapiens
  misc_feature (266)..(266): Wherein n may be a, c, g or t
cgatcgctggagcccttagacaaactggaaagaaggcatcaaagggatcaggcaagctgggcgtcttgcccttgtcccccagagatgataccctcccagcaagtggagaagttctcacttccttctttagagcagctaaaggggctacccagatcagggttgaagagaaaactcaattaccagggtgggaagaatgaaggcactagaaccagaaaccctgcaaatgctcttcttgtcacccagcatatccacctgcagaagtcatn

SEQ ID NO: 1352 - protein, 60 aa, Homo sapiens
MIPSQQVEKFSLPSLEQLKGLPRSGLKRKLNYQGGKNEGTRTRNPANALLVTQHIHLQKS

SEQ ID NO: 1353 - DNA, 292 bp, Homo sapiens
  misc_feature (280)..(280): Wherein n may be a, c, g or t
cccccaatttcacatttcaattcttaaatctggggaaatccaccactcatgtataacaaatatttattttataacagacaattatcaaagcagattcagctaaacacaggaaaggtcaagatgagtaagactcaattcctattcctgaagggttcatcgccccaaaggattgacaggcaggcaaaattaccatcaagatttgatgactgctctaacacaggtatgcagatggtgcacctgcgggtcacaggaagaaacgccactttcttaggaatccagnaatgtcttacag

SEQ ID NO: 1354 - protein, 81 aa, Homo sapiens
  misc_feature (78)..(78): Wherein Xaa may be any naturally occuring amino acid
MYNKYLFYNRQLSKQIQLNTGKVKMSKTQFLFLKGSSPQRIDRQAKLPSRFDDCSNTGMQMVHLRVTGRNATFLGIQXCLT

SEQ ID NO: 1355 - DNA, 588 bp, Homo sapiens
  misc_feature (1)..(1): Wherein n may be a, c, g or t
ngctagctcaccaccgcctactcgaagccgagtacgagcaagtcatcctgccgcaaaacatcacgacgcgagaggagtatctgcgagcacgccgcccagggcgagggttccggctcaatcgccgcgatcgtgatgccgtgtggacgcttgtcaaaaagtaccgagacgactctcgcatcagcggcacgatctcgttccccgaggcagccgccatcgccgcgcaatacctcacccgccacagtcccctcgccgaccatgttctcgtggacgagggccaagacctcacgccggcccactggaggctcattcggtcgctggtccccgagggaccaaacgacattttcatcgccgaggactcacaccagcgcatctacggtcaccggttggtcctatctcggtacggcatcatgacgaggggccgttcgcggcggctcaccctcaactaccgcaccattgcgcagatcctcaggtggtcgacccacgtgatagagggcggattttacgtcgacctcgacggcgatgacgatgacaagctgtcggggtaccggtcggcccgtcgcggccccgacgtcatcgctcacccgtgca

SEQ ID NO: 1356 - protein, 92 aa, Homo sapiens
MPCGRLSKSTETTLASAARSRSPRQPPSPRNTSPATVPSPTMFSWTRAKTSRRPTGGSFGRWSPRDQTTFSSPRTHTSASTVTGWSYLGTAS

SEQ ID NO: 1357 - DNA, 640 bp, Homo sapiens
  misc_feature (226)..(226): Wherein n may be a, c, g or t
ggtaccctcggctgccatgagcacgggcaccccacggggacagcaagctcagcacccagtgggcctgatcagacagccacctgcgtcgtttcatggctttctccttcatgttgaaggagtgacagggacactgagggatgaaagcccccacgctctggcctgccctgctcagtcagggccgctggcatgggccgttcttcccctgggactgcacagcctggacccnccaccaagtcctgttgcccaccctggctcagctctcctccagccgcatgcctgccttcctccctcctttccccatacccagtcctgccatctcccagctgcaaggtccatgccaccccacaggaagagcctcagcggctgtcctcagaccccaccctgtctgccccgaccctgccgcctcaccaaattctaagcacaccatgacccggcctgccctggtgtgctgcccatggcccggcgtgacccagtgtgctgcccatggcccagcgtcccagtgtgctgcccacggcccagcctgaccgacccggtgtgctgcccgcggcccggcctgacccagtgtgctgctctgggaaggaagcctggtgggaacagtgctcactcactcactctgtcactcgctcaccccttcacgcgt

SEQ ID NO: 1358 - protein, 95 aa, Homo sapiens
  misc_feature (29)..(29): Wherein Xaa may be any naturally occuring amino acid
KPPRSGLPCSVRAAGMGRSSPGTAQPGPXTKSCCPPWLSSPPAACLPSSLLSPYPVLPSPSCKVHATPQEEPQRLSSDPTLSAPTLPPHQILSTP

SEQ ID NO: 1359 - DNA, 725 bp, Homo sapiens
  misc_feature (9)..(9): Wherein n may be a, c, g or t
  misc_feature (12)..(12): Wherein n may be a, c, g or t
  misc_feature (15)..(15): Wherein n may be a, c, g or t
  misc_feature (21)..(21): Wherein n may be a, c, g or t
  misc_feature (24)..(24): Wherein n may be a, c, g or t
  misc_feature (27)..(27): Wherein n may be a, c, g or t
  misc_feature (30)..(30): Wherein n may be a, c, g or t
  misc_feature (32)..(32): Wherein n may be a, c, g or t
  misc_feature (33)..(33): Wherein n may be a, c, g or t
  misc_feature (36)..(36): Wherein n may be a, c, g or t
  misc_feature (47)..(47): Wherein n may be a, c, g or t
  misc_feature (50)..(50): Wherein n may be a, c, g or t
  misc_feature (54)..(54): Wherein n may be a, c, g or t
  misc_feature (57)..(57): Wherein n may be a, c, g or t
  misc_feature (60)..(60): Wherein n may be a, c, g or t
  misc_feature (65)..(65): Wherein n may be a, c, g or t
  misc_feature (68)..(68): Wherein n may be a, c, g or t
  misc_feature (70)..(70): Wherein n may be a, c, g or t
  misc_feature (73)..(73): Wherein n may be a, c, g or t
  misc_feature (76)..(76): Wherein n may be a, c, g or t
  misc_feature (79)..(79): Wherein n may be a, c, g or t
  misc_feature (80)..(80): Wherein n may be a, c, g or t
  misc_feature (86)..(86): Wherein n may be a, c, g or t
  misc_feature (89)..(89): Wherein n may be a, c, g or t
  misc_feature (90)..(90): Wherein n may be a, c, g or t
  misc_feature (93)..(93): Wherein n may be a, c, g or t
  misc_feature (99)..(99): Wherein n may be a, c, g or t
  misc_feature (102)..(102): Wherein n may be a, c, g or t
  misc_feature (105)..(105): Wherein n may be a, c, g or t
  misc_feature (111)..(111): Wherein n may be a, c, g or t
  misc_feature (114)..(114): Wherein n may be a, c, g or t
  misc_feature (117)..(117): Wherein n may be a, c, g or t
  misc_feature (120)..(120): Wherein n may be a, c, g or t
  misc_feature (123)..(123): Wherein n may be a, c, g or t
  misc_feature (126)..(126): Wherein n may be a, c, g or t
  misc_feature (129)..(129): Wherein n may be a, c, g or t
  misc_feature (132)..(132): Wherein n may be a, c, g or t
  misc_feature (135)..(135): Wherein n may be a, c, g or t
  misc_feature (138)..(138): Wherein n may be a, c, g or t
  misc_feature (141)..(141): Wherein n may be a, c, g or t
  misc_feature (144)..(144): Wherein n may be a, c, g or t
  misc_feature (147)..(147): Wherein n may be a, c, g or t
  misc_feature (150)..(150): Wherein n may be a, c, g or t
  misc_feature (155)..(155): Wherein n may be a, c, g or t
  misc_feature (158)..(158): Wherein n may be a, c, g or t
  misc_feature (164)..(164): Wherein n may be a, c, g or t
  misc_feature (167)..(167): Wherein n may be a, c, g or t
  misc_feature (170)..(170): Wherein n may be a, c, g or t
  misc_feature (173)..(173): Wherein n may be a, c, g or t
  misc_feature (179)..(179): Wherein n may be a, c, g or t
  misc_feature (182)..(182): Wherein n may be a, c, g or t
  misc_feature (185)..(185): Wherein n may be a, c, g or t
  misc_feature (188)..(188): Wherein n may be a, c, g or t
  misc_feature (191)..(191): Wherein n may be a, c, g or t
  misc_feature (197)..(197): Wherein n may be a, c, g or t
  misc_feature (201)..(201): Wherein n may be a, c, g or t
  misc_feature (204)..(204): Wherein n may be a, c, g or t
  misc_feature (207)..(207): Wherein n may be a, c, g or t
  misc_feature (210)..(210): Wherein n may be a, c, g or t
  misc_feature (216)..(216): Wherein n may be a, c, g or t
  misc_feature (219)..(219): Wherein n may be a, c, g or t
  misc_feature (222)..(222): Wherein n may be a, c, g or t
  misc_feature (226)..(226): Wherein n may be a, c, g or t
  misc_feature (229)..(229): Wherein n may be a, c, g or t
  misc_feature (235)..(235): Wherein n may be a, c, g or t
  misc_feature (239)..(239): Wherein n may be a, c, g or t
  misc_feature (241)..(241): Wherein n may be a, c, g or t
  misc_feature (244)..(244): Wherein n may be a, c, g or t
  misc_feature (247)..(247): Wherein n may be a, c, g or t
  misc_feature (250)..(250): Wherein n may be a, c, g or t
  misc_feature (253)..(253): Wherein n may be a, c, g or t
  misc_feature (256)..(256): Wherein n may be a, c, g or t
  misc_feature (259)..(259): Wherein n may be a, c, g or t
  misc_feature (262)..(262): Wherein n may be a, c, g or t
  misc_feature (265)..(265): Wherein n may be a, c, g or t
  misc_feature (268)..(268): Wherein n may be a, c, g or t
  misc_feature (271)..(271): Wherein n may be a, c, g or t
  misc_feature (274)..(274): Wherein n may be a, c, g or t
  misc_feature (277)..(277): Wherein n may be a, c, g or t
  misc_feature (280)..(280): Wherein n may be a, c, g or t
  misc_feature (283)..(283): Wherein n may be a, c, g or t
  misc_feature (286)..(286): Wherein n may be a, c, g or t
  misc_feature (289)..(289): Wherein n may be a, c, g or t
  misc_feature (292)..(292): Wherein n may be a, c, g or t
  misc_feature (295)..(295): Wherein n may be a, c, g or t
  misc_feature (298)..(298): Wherein n may be a, c, g or t
  misc_feature (301)..(301): Wherein n may be a, c, g or t
  misc_feature (304)..(304): Wherein n may be a, c, g or t
  misc_feature (318)..(318): Wherein n may be a, c, g or t
  misc_feature (321)..(321): Wherein n may be a, c, g or t
  misc_feature (324)..(324): Wherein n may be a, c, g or t
  misc_feature (327)..(327): Wherein n may be a, c, g or t
  misc_feature (330)..(330): Wherein n may be a, c, g or t
  misc_feature (333)..(333): Wherein n may be a, c, g or t
  misc_feature (336)..(336): Wherein n may be a, c, g or t
  misc_feature (339)..(339): Wherein n may be a, c, g or t
  misc_feature (342)..(342): Wherein n may be a, c, g or t
  misc_feature (345)..(345): Wherein n may be a, c, g or t
  misc_feature (348)..(348): Wherein n may be a, c, g or t
  misc_feature (351)..(351): Wherein n may be a, c, g or t
  misc_feature (357)..(357): Wherein n may be a, c, g or t
  misc_feature (359)..(359): Wherein n may be a, c, g or t
  misc_feature (362)..(362): Wherein n may be a, c, g or t
  misc_feature (368)..(368): Wherein n may be a, c, g or t
  misc_feature (371)..(371): Wherein n may be a, c, g or t
  misc_feature (376)..(376): Wherein n may be a, c, g or t
  misc_feature (382)..(382): Wherein n may be a, c, g or t
  misc_feature (385)..(385): Wherein n may be a, c, g or t
  misc_feature (388)..(388): Wherein n may be a, c, g or t
  misc_feature (391)..(391): Wherein n may be a, c, g or t
  misc_feature (394)..(394): Wherein n may be a, c, g or t
  misc_feature (397)..(397): Wherein n may be a, c, g or t
  misc_feature (403)..(403): Wherein n may be a, c, g or t
  misc_feature (406)..(406): Wherein n may be a, c, g or t
  misc_feature (409)..(409): Wherein n may be a, c, g or t
  misc_feature (415)..(415): Wherein n may be a, c, g or t
  misc_feature (418)..(418): Wherein n may be a, c, g or t
  misc_feature (421)..(421): Wherein n may be a, c, g or t
  misc_feature (424)..(424): Wherein n may be a, c, g or t
  misc_feature (427)..(427): Wherein n may be a, c, g or t
  misc_feature (430)..(430): Wherein n may be a, c, g or t
  misc_feature (432)..(432): Wherein n may be a, c, g or t
  misc_feature (438)..(438): Wherein n may be a, c, g or t
  misc_feature (444)..(444): Wherein n may be a, c, g or t
  misc_feature (453)..(453): Wherein n may be a, c, g or t
  misc_feature (456)..(456): Wherein n may be a, c, g or t
  misc_feature (459)..(459): Wherein n may be a, c, g or t
  misc_feature (462)..(462): Wherein n may be a, c, g or t
  misc_feature (477)..(477): Wherein n may be a, c, g or t
  misc_feature (483)..(483): Wherein n may be a, c, g or t
  misc_feature (486)..(486): Wherein n may be a, c, g or t
  misc_feature (495)..(495): Wherein n may be a, c, g or t
  misc_feature (499)..(499): Wherein n may be a, c, g or t
  misc_feature (502)..(502): Wherein n may be a, c, g or t
  misc_feature (503)..(503): Wherein n may be a, c, g or t
  misc_feature (505)..(505): Wherein n may be a, c, g or t
  misc_feature (509)..(509): Wherein n may be a, c, g or t
  misc_feature (515)..(515): Wherein n may be a, c, g or t
  misc_feature (521)..(521): Wherein n may be a, c, g or t
  misc_feature (524)..(524): Wherein n may be a, c, g or t
  misc_feature (527)..(527): Wherein n may be a, c, g or t
  misc_feature (530)..(530): Wherein n may be a, c, g or t
  misc_feature (533)..(533): Wherein n may be a, c, g or t
  misc_feature (536)..(536): Wherein n may be a, c, g or t
  misc_feature (538)..(538): Wherein n may be a, c, g or t
  misc_feature (541)..(541): Wherein n may be a, c, g or t
  misc_feature (544)..(544): Wherein n may be a, c, g or t
  misc_feature (550)..(550): Wherein n may be a, c, g or t
  misc_feature (556)..(556): Wherein n may be a, c, g or t
  misc_feature (558)..(558): Wherein n may be a, c, g or t
  misc_feature (564)..(564): Wherein n may be a, c, g or t
  misc_feature (577)..(577): Wherein n may be a, c, g or t
  misc_feature (580)..(580): Wherein n may be a, c, g or t
  misc_feature (583)..(583): Wherein n may be a, c, g or t
  misc_feature (588)..(588): Wherein n may be a, c, g or t
  misc_feature (591)..(591): Wherein n may be a, c, g or t
  misc_feature (597)..(597): Wherein n may be a, c, g or t
  misc_feature (600)..(600): Wherein n may be a, c, g or t
  misc_feature (606)..(606): Wherein n may be a, c, g or t
  misc_feature (609)..(609): Wherein n may be a, c, g or t
  misc_feature (611)..(611): Wherein n may be a, c, g or t
  misc_feature (614)..(614): Wherein n may be a, c, g or t
  misc_feature (623)..(623): Wherein n may be a, c, g or t
  misc_feature (638)..(638): Wherein n may be a, c, g or t
  misc_feature (641)..(641): Wherein n may be a, c, g or t
  misc_feature (643)..(643): Wherein n may be a, c, g or t
  misc_feature (646)..(646): Wherein n may be a, c, g or t
  misc_feature (651)..(651): Wherein n may be a, c, g or t
  misc_feature (654)..(654): Wherein n may be a, c, g or t
  misc_feature (657)..(657): Wherein n may be a, c, g or t
  misc_feature (663)..(663): Wherein n may be a, c, g or t
  misc_feature (666)..(666): Wherein n may be a, c, g or t
  misc_feature (672)..(672): Wherein n may be a, c, g or t
  misc_feature (674)..(674): Wherein n may be a, c, g or t
  misc_feature (683)..(683): Wherein n may be a, c, g or t
  misc_feature (686)..(686): Wherein n may be a, c, g or t
  misc_feature (689)..(689): Wherein n may be a, c, g or t
  misc_feature (692)..(692): Wherein n may be a, c, g or t
  misc_feature (695)..(695): Wherein n may be a, c, g or t
  misc_feature (698)..(698): Wherein n may be a, c, g or t
  misc_feature (704)..(704): Wherein n may be a, c, g or t
  misc_feature (707)..(707): Wherein n may be a, c, g or t
  misc_feature (710)..(710): Wherein n may be a, c, g or t
  misc_feature (713)..(713): Wherein n may be a, c, g or t
  misc_feature (719)..(719): Wherein n may be a, c, g or t
  misc_feature (722)..(722): Wherein n may be a, c, g or t
atgtgyytnytngtnttyccnytngtnccngnnccngaytayatytnccntgynccnggntgggnytngnytngcngcnnttyytnytnngtnttyccnytnytngayytnytnccngtngcnytnccnccnggngcnggnccnggnccnatggnytngargtnytngcnggntgygtngcngcngtngcntggatncaynytngcnytntgggtnytngcncaynccncayggncayngnggnccnytngcnytngcnytngtngcnytnytnccngcnccngcnytngtnytnacngtnytntggcaytgycargnggnacnytnytnccnccnytnytnccnggnccnatggcngnytntgyytnytnatytncarytngcngcnytnytngcntaygcnytnggntgggcngcnccnggnggnccngngarccntgggcncargarccnytnytnccngargarcargarccngargtngcngargayggngarnytnngnttyntaygcntggytngcnccnytnytngcngnggngcntgyggngarytngncarccncargayattgygnytnccncaygnytncarccnacntayytngcngngtnttycargcncaytggcargarggngcngnytntgggngcnytntayggngcnttyggngntgytayytngcnytnggnytnytnaarytngtnggnacnatgytnggntty

SEQ ID NO: 1360 - protein, 241 aa, Homo sapiens
  misc_feature (2)..(2): Wherein Xaa may be any naturally occuring amino acid
  misc_feature (3)..(3): Wherein Xaa may be any naturally occuring amino acid
  misc_feature (4)..(4): Wherein Xaa may be any naturally occuring amino acid
  misc_feature (6)..(6): Wherein Xaa may be any naturally occuring amino acid
  misc_feature (8)..(8): Wherein Xaa may be any naturally occuring amino acid
  misc_feature (11)..(11): Wherein Xaa may be any naturally occuring amino acid
  misc_feature (13)..(13): Wherein Xaa may be any naturally occuring amino acid
  misc_feature (14)..(14): Wherein Xaa may be any naturally occuring amino acid
  misc_feature (15)..(15): Wherein Xaa may be any naturally occuring amino acid
  misc_feature (16)..(16): Wherein Xaa may be any naturally occuring amino acid
  misc_feature (17)..(17): Wherein Xaa may be any naturally occuring amino acid
  misc_feature (18)..(18): Wherein Xaa may be any naturally occuring amino acid
  misc_feature (22)..(22): Wherein Xaa may be any naturally occuring amino acid
  misc_feature (23)..(23): Wherein Xaa may be any naturally occuring amino acid
  misc_feature (24)..(24): Wherein Xaa may be any naturally occuring amino acid
  misc_feature (25)..(25): Wherein Xaa may be any naturally occuring amino acid
  misc_feature (26)..(26): Wherein Xaa may be any naturally occuring amino acid
  misc_feature (27)..(27): Wherein Xaa may be any naturally occuring amino acid
  misc_feature (28)..(28): Wherein Xaa may be any naturally occuring amino acid
  misc_feature (29)..(29): Wherein Xaa may be any naturally occuring amino acid
  misc_feature (30)..(30): Wherein Xaa may be any naturally occuring amino acid
  misc_feature (32)..(32): Wherein Xaa may be any naturally occuring amino acid
  misc_feature (34)..(34): Wherein Xaa may be any naturally occuring amino acid
  misc_feature (35)..(35): Wherein Xaa may be any naturally occuring amino acid
  misc_feature (36)..(36): Wherein Xaa may be any naturally occuring amino acid
  misc_feature (37)..(37): Wherein Xaa may be any naturally occuring amino acid
  misc_feature (38)..(38): Wherein Xaa may be any naturally occuring amino acid
  misc_feature (42)..(42): Wherein Xaa may be any naturally occuring amino acid
  misc_feature (52)..(52): Wherein Xaa may be any naturally occuring amino acid
  misc_feature (53)..(53): Wherein Xaa may be any naturally occuring amino acid
  misc_feature (54)..(54): Wherein Xaa may be any naturally occuring amino acid
  misc_feature (55)..(55): Wherein Xaa may be any naturally occuring amino acid
  misc_feature (56)..(56): Wherein Xaa may be any naturally occuring amino acid
  misc_feature (57)..(57): Wherein Xaa may be any naturally occuring amino acid
  misc_feature (58)..(58): Wherein Xaa may be any naturally occuring amino acid
  misc_feature (59)..(59): Wherein Xaa may be any naturally occuring amino acid
  misc_feature (60)..(60): Wherein Xaa may be any naturally occuring amino acid
  misc_feature (61)..(61): Wherein Xaa may be any naturally occuring amino acid
  misc_feature (62)..(62): Wherein Xaa may be any naturally occuring amino acid
  misc_feature (63)..(63): Wherein Xaa may be any naturally occuring amino acid
  misc_feature (64)..(64): Wherein Xaa may be any naturally occuring amino acid
  misc_feature (66)..(66): Wherein Xaa may be any naturally occuring amino acid
  misc_feature (67)..(67): Wherein Xaa may be any naturally occuring amino acid
  misc_feature (68)..(68): Wherein Xaa may be any naturally occuring amino acid
  misc_feature (70)..(70): Wherein Xaa may be any naturally occuring amino acid
  misc_feature (73)..(73): Wherein Xaa may be any naturally occuring amino acid
  misc_feature (75)..(75): Wherein Xaa may be any naturally occuring amino acid
  misc_feature (76)..(76): Wherein Xaa may be any naturally occuring amino acid
  misc_feature (77)..(77): Wherein Xaa may be any naturally occuring amino acid
  misc_feature (78)..(78): Wherein Xaa may be any naturally occuring amino acid
  misc_feature (79)..(79): Wherein Xaa may be any naturally occuring amino acid
  misc_feature (80)..(80): Wherein Xaa may be any naturally occuring amino acid
  misc_feature (81)..(81): Wherein Xaa may be any naturally occuring amino acid
  misc_feature (82)..(82): Wherein Xaa may be any naturally occuring amino acid
  misc_feature (83)..(83): Wherein Xaa may be any naturally occuring amino acid
  misc_feature (84)..(84): Wherein Xaa may be any naturally occuring amino acid
  misc_feature (85)..(85): Wherein Xaa may be any naturally occuring amino acid
  misc_feature (86)..(86): Wherein Xaa may be any naturally occuring amino acid
  misc_feature (87)..(87): Wherein Xaa may be any naturally occuring amino acid
  misc_feature (88)..(88): Wherein Xaa may be any naturally occuring amino acid
  misc_feature (89)..(89): Wherein Xaa may be any naturally occuring amino acid
  misc_feature (90)..(90): Wherein Xaa may be any naturally occuring amino acid
  misc_feature (91)..(91): Wherein Xaa may be any naturally occuring amino acid
  misc_feature (92)..(92): Wherein Xaa may be any naturally occuring amino acid
  misc_feature (93)..(93): Wherein Xaa may be any naturally occuring amino acid
  misc_feature (94)..(94): Wherein Xaa may be any naturally occuring amino acid
  misc_feature (95)..(95): Wherein Xaa may be any naturally occuring amino acid
  misc_feature (96)..(96): Wherein Xaa may be any naturally occuring amino acid
  misc_feature (97)..(97): Wherein Xaa may be any naturally occuring amino acid
  misc_feature (98)..(98): Wherein Xaa may be any naturally occuring amino acid
  misc_feature (99)..(99): Wherein Xaa may be any naturally occuring amino acid
  misc_feature (100)..(100): Wherein Xaa may be any naturally occuring amino acid
  misc_feature (101)..(101): Wherein Xaa may be any naturally occuring amino acid
  misc_feature (102)..(102): Wherein Xaa may be any naturally occuring amino acid
  misc_feature (104)..(104): Wherein Xaa may be any naturally occuring amino acid
  misc_feature (105)..(105): Wherein Xaa may be any naturally occuring amino acid
  misc_feature (106)..(106): Wherein Xaa may be any naturally occuring amino acid
  misc_feature (109)..(109): Wherein Xaa may be any naturally occuring amino acid
  misc_feature (110)..(110): Wherein Xaa may be any naturally occuring amino acid
  misc_feature (113)..(113): Wherein Xaa may be any naturally occuring amino acid
  misc_feature (114)..(114): Wherein Xaa may be any naturally occuring amino acid
  misc_feature (120)..(120): Wherein Xaa may be any naturally occuring amino acid
  misc_feature (121)..(121): Wherein Xaa may be any naturally occuring amino acid
  misc_feature (122)..(122): Wherein Xaa may be any naturally occuring amino acid
  misc_feature (123)..(123): Wherein Xaa may be any naturally occuring amino acid
  misc_feature (124)..(124): Wherein Xaa may be any naturally occuring amino acid
  misc_feature (125)..(125): Wherein Xaa may be any naturally occuring amino acid
  misc_feature (126)..(126): Wherein Xaa may be any naturally occuring amino acid
  misc_feature (127)..(127): Wherein Xaa may be any naturally occuring amino acid
  misc_feature (128)..(128): Wherein Xaa may be any naturally occuring amino acid
  misc_feature (129)..(129): Wherein Xaa may be any naturally occuring amino acid
  misc_feature (130)..(130): Wherein Xaa may be any naturally occuring amino acid
  misc_feature (131)..(131): Wherein Xaa may be any naturally occuring amino acid
  misc_feature (132)..(132): Wherein Xaa may be any naturally occuring amino acid
  misc_feature (133)..(133): Wherein Xaa may be any naturally occuring amino acid
  misc_feature (134)..(134): Wherein Xaa may be any naturally occuring amino acid
  misc_feature (135)..(135): Wherein Xaa may be any naturally occuring amino acid
  misc_feature (136)..(136): Wherein Xaa may be any naturally occuring amino acid
  misc_feature (137)..(137): Wherein Xaa may be any naturally occuring amino acid
  misc_feature (139)..(139): Wherein Xaa may be any naturally occuring amino acid
  misc_feature (140)..(140): Wherein Xaa may be any naturally occuring amino acid
  misc_feature (141)..(141): Wherein Xaa may be any naturally occuring amino acid
  misc_feature (142)..(142): Wherein Xaa may be any naturally occuring amino acid
  misc_feature (143)..(143): Wherein Xaa may be any naturally occuring amino acid
  misc_feature (144)..(144): Wherein Xaa may be any naturally occuring amino acid
  misc_feature (145)..(145): Wherein Xaa may be any naturally occuring amino acid
  misc_feature (149)..(149): Wherein Xaa may be any naturally occuring amino acid
  misc_feature (150)..(150): Wherein Xaa may be any naturally occuring amino acid
  misc_feature (152)..(152): Wherein Xaa may be any naturally occuring amino acid
  misc_feature (153)..(153): Wherein Xaa may be any naturally occuring amino acid
  misc_feature (155)..(155): Wherein Xaa may be any naturally occuring amino acid
  misc_feature (156)..(156): Wherein Xaa may be any naturally occuring amino acid
  misc_feature (157)..(157): Wherein Xaa may be any naturally occuring amino acid
  misc_feature (158)..(158): Wherein Xaa may be any naturally occuring amino acid
  misc_feature (160)..(160): Wherein Xaa may be any naturally occuring amino acid
  misc_feature (163)..(163): Wherein Xaa may be any naturally occuring amino acid
  misc_feature (164)..(164): Wherein Xaa may be any naturally occuring amino acid
  misc_feature (166)..(166): Wherein Xaa may be any naturally occuring amino acid
  misc_feature (167)..(167): Wherein Xaa may be any naturally occuring amino acid
  misc_feature (168)..(168): Wherein Xaa may be any naturally occuring amino acid
  misc_feature (169)..(169): Wherein Xaa may be any naturally occuring amino acid
  misc_feature (170)..(170): Wherein Xaa may be any naturally occuring amino acid
  misc_feature (171)..(171): Wherein Xaa may be any naturally occuring amino acid
  misc_feature (172)..(172): Wherein Xaa may be any naturally occuring amino acid
  misc_feature (173)..(173): Wherein Xaa may be any naturally occuring amino acid
  misc_feature (174)..(174): Wherein Xaa may be any naturally occuring amino acid
  misc_feature (175)..(175): Wherein Xaa may be any naturally occuring amino acid
  misc_feature (176)..(176): Wherein Xaa may be any naturally occuring amino acid
  misc_feature (177)..(177): Wherein Xaa may be any naturally occuring amino acid
  misc_feature (178)..(178): Wherein Xaa may be any naturally occuring amino acid
  misc_feature (179)..(179): Wherein Xaa may be any naturally occuring amino acid
  misc_feature (180)..(180): Wherein Xaa may be any naturally occuring amino acid
  misc_feature (181)..(181): Wherein Xaa may be any naturally occuring amino acid
  misc_feature (182)..(182): Wherein Xaa may be any naturally occuring amino acid
  misc_feature (183)..(183): Wherein Xaa may be any naturally occuring amino acid
  misc_feature (184)..(184): Wherein Xaa may be any naturally occuring amino acid
  misc_feature (185)..(185): Wherein Xaa may be any naturally occuring amino acid
  misc_feature (186)..(186): Wherein Xaa may be any naturally occuring amino acid
  misc_feature (187)..(187): Wherein Xaa may be any naturally occuring amino acid
  misc_feature (189)..(189): Wherein Xaa may be any naturally occuring amino acid
  misc_feature (190)..(190): Wherein Xaa may be any naturally occuring amino acid
  misc_feature (192)..(192): Wherein Xaa may be any naturally occuring amino acid
  misc_feature (193)..(193): Wherein Xaa may be any naturally occuring amino acid
  misc_feature (194)..(194): Wherein Xaa may be any naturally occuring amino acid
  misc_feature (195)..(195): Wherein Xaa may be any naturally occuring amino acid
  misc_feature (196)..(196): Wherein Xaa may be any naturally occuring amino acid
  misc_feature (197)..(197): Wherein Xaa may be any naturally occuring amino acid
  misc_feature (198)..(198): Wherein Xaa may be any naturally occuring amino acid
  misc_feature (201)..(201): Wherein Xaa may be any naturally occuring amino acid
  misc_feature (202)..(202): Wherein Xaa may be any naturally occuring amino acid
  misc_feature (204)..(204): Wherein Xaa may be any naturally occuring amino acid
  misc_feature (205)..(205): Wherein Xaa may be any naturally occuring amino acid
  misc_feature (206)..(206): Wherein Xaa may be any naturally occuring amino acid
  misc_feature (207)..(207): Wherein Xaa may be any naturally occuring amino acid
  misc_feature (208)..(208): Wherein Xaa may be any naturally occuring amino acid
  misc_feature (209)..(209): Wherein Xaa may be any naturally occuring amino acid
  misc_feature (211)..(211): Wherein Xaa may be any naturally occuring amino acid
  misc_feature (212)..(212): Wherein Xaa may be any naturally occuring amino acid
  misc_feature (213)..(213): Wherein Xaa may be any naturally occuring amino acid
  misc_feature (214)..(214): Wherein Xaa may be any naturally occuring amino acid
  misc_feature (215)..(215): Wherein Xaa may be any naturally occuring amino acid
  misc_feature (216)..(216): Wherein Xaa may be any naturally occuring amino acid
  misc_feature (219)..(219): Wherein Xaa may be any naturally occuring amino acid
  misc_feature (220)..(220): Wherein Xaa may be any naturally occuring amino acid
  misc_feature (223)..(223): Wherein Xaa may be any naturally occuring amino acid
  misc_feature (225)..(225): Wherein Xaa may be any naturally occuring amino acid
  misc_feature (226)..(226): Wherein Xaa may be any naturally occuring amino acid
  misc_feature (227)..(227): Wherein Xaa may be any naturally occuring amino acid
  misc_feature (228)..(228): Wherein Xaa may be any naturally occuring amino acid
  misc_feature (229)..(229): Wherein Xaa may be any naturally occuring amino acid
  misc_feature (230)..(230): Wherein Xaa may be any naturally occuring amino acid
  misc_feature (231)..(231): Wherein Xaa may be any naturally occuring amino acid
  misc_feature (232)..(232): Wherein Xaa may be any naturally occuring amino acid
  misc_feature (233)..(233): Wherein Xaa may be any naturally occuring amino acid
  misc_feature (234)..(234): Wherein Xaa may be any naturally occuring amino acid
  misc_feature (235)..(235): Wherein Xaa may be any naturally occuring amino acid
  misc_feature (236)..(236): Wherein Xaa may be any naturally occuring amino acid
  misc_feature (237)..(237): Wherein Xaa may be any naturally occuring amino acid
  misc_feature (238)..(238): Wherein Xaa may be any naturally occuring amino acid
  misc_feature (239)..(239): Wherein Xaa may be any naturally occuring amino acid
  misc_feature (240)..(240): Wherein Xaa may be any naturally occuring amino acid
  misc_feature (241)..(241): Wherein Xaa may be any naturally occuring amino acid
MXXXVXPXVPXPXXXXXXPGWXXXXXXXXXVXPXXXXXPVAXPPGAGPGPMXXXXXXXXXXXXXGXXXAXWVXAXXXXXXXXXXXXXXXXXXXXXXXXXXXXAXXXGTXXPPXXPGPMAXXXXXXXXXXXXXXXXXXGXXXXXXXPWAXXPXXPXXXXPXVAXXGXXXXXXXXXXXXXXXXXXXXXXPXXIXXXXXXXPTXXAXXXXXXGXXXXXXGAXXGAXGXXXXXXXXXXXXXXXXX

SEQ ID NO: 1361 - DNA, 189 bp, Homo sapiens
ctagaaatctctgcaaatctaccaaattatggccgtgtttcaggtttgtggcccggtctttggactatgggtaatttagggaggcccggttatttggctagtacccaaggtgtctggccttattcttatgaatcgtgtgatgctggtattacacccaaccaaagttccccggatggtatttcttacttg

SEQ ID NO: 1362 - protein, 63 aa, Homo sapiens
LEISANLPNYGRVSGLWPGLWTMGNLGRPGYLASTQGVWPYSYESCDAGITPNQSSPDGISYL

SEQ ID NO: 1363 - DNA, 495 bp, Homo sapiens
gcgttgggcatcaaggatgctgttgagaacgtgtgggttccggctgctgagaacctgattgaggttctgctgaagctggctgaggaaggccgcgacgtgccgatgctgtgccgcactcacggtcagcctgcaactccctccaccctgggtaaggagttgggtgttctcgcctaccgtctgaagcgtcaggtgaagcacgctgctgctaccgagttcctcggcaagattaatggtgcgaccggcacttacgctgctcactatgcgtcggttcctgacgctgattggcaggctgtttctcgtggttttgtggagcacctgggcctgacctggaacccgctgaccacccagattgagtcgcacgactggcaggccgagctgtactcggatatcgcgcacttcaaccgtgtgctgcacaacctctgcaccgatgtgtggagctacatttcgattggtttcttccgtcagattccggtggctggtgcgaccggttcgtcg

SEQ ID NO: 1364 - protein, 165 aa, Homo sapiens
ALGIKDAVENVWVPAAENLIEVLLKLAEEGRDVPMLCRTHGQPATPSTLGKELGVLAYRLKRQVKHAAATEFLGKINGATGTYAAHYASVPDADWQAVSRGFVEHLGLTWNPLTTQIESHDWQAELYSDIAHFNRVLHNLCTDVWSYISIGFFRQIPVAGATGSS

SEQ ID NO: 1365 - DNA, 193 bp, Homo sapiens
  misc_feature (193)..(193): Wherein n may be a, c, g or t
acgcgtgcagcacactccagcctgttattacaagcaggtgctaagttagcaaaaaacaaaggtaactataacggtacagaaattccaaagctagtcaccatcccattcttaagaaagtacgttcaatatgccaaggaaagggttattccacagttaacacaagaagccatcaatgttattgtgaaaccccccn

SEQ ID NO: 1366 - protein, 64 aa, Homo sapiens
TRAAHSSLLLQAGAKLAKNKGNYNGTEIPKLVTIPFLRKYVQYAKERVIPQLTQEAINVIVKPP

SEQ ID NO: 1367 - DNA, 313 bp, Homo sapiens
atggtcagaggccaagatttcgctccagcctttgatgtcgctccagactgggaatcttacgaatacaccaagttggacccaaccaaggaagaagacaaagaatttgtcaacaacatgtgggcttgggataagcctgttgttgtcaatggcgaagataaggaaattgttgacggtaagggtttgaaaataatctcaataactcttcttccatattttcttcccaatatacataagagtcaaacaaaacgaattttcaaaagaaaaaagaaaaaagccctgaagtctacttcatgattaccccatacttacgcgt

SEQ ID NO: 1368 - protein, 97 aa, Homo sapiens
MVRGQDFAPAFDVAPDWESYEYTKLDPTKEEDKEFVNNMWAWDKPVVVNGEDKEIVDGKGLKIISITLLPYFLPNIHKSQTKRIFKRKKKKALKSTS

SEQ ID NO: 1369 - DNA, 439 bp, Homo sapiens
cgtacggaaaaagttgcggtggataacctactagagacaggattattaccgatttttgagttggatgaaatccaagatgtcaagatgaaacgaattactagcattttatccgttctttctaaaatcttcttgggccaacttgtggaaggcgtaacgagtaacgaaacttttttgagagtgcttaacgtatttaacaagtatgtagatgatcctacggtggaaaggcagttgcaagagttgattatttctaagagggaaatcgagaaggagtagaccaacgataatgtaactataccaagaaacttagtatgatggaattttttttcaaggagtcgtaaattagattttcgcaggtaatagtgcgatatataagcaatctcatttaaatatcgacggtggcatttataccatcatttactgttatatttctctaacgcgt

SEQ ID NO: 1370 - protein, 90 aa, Homo sapiens
RTEKVAVDNLLETGLLPIFELDEIQDVKMKRITSILSVLSKIFLGQLVEGVTSNETFLRVLNVFNKYVDDPTVERQLQELIISKREIEKE

SEQ ID NO: 1371 - DNA, 234 bp, Homo sapiens
tctagacctcccaacttcactaaggaaggctggatagagttacagatgtgaagggcaccattccatttctgaataactgttgacttgggttttttttttgtgtgtgtgtttttgtcgttgttctttgtttgtttgtttttgtttcctcgaaacagggtttccctggctgtcctgggctttgtagattaggctgtcctggaactcacaggacatactcctgtctcgggctccgga

SEQ ID NO: 1372 - protein, 57 aa, Homo sapiens
MSCEFQDSLIYKAQDSQGNPVSRKQKQTNKEQRQKHTHKKKTQVNSYSEMEWCPSHL

SEQ ID NO: 1373 - DNA, 387 bp, Homo sapiens
gaacaggtgaatcaggtgtcggctgcccgccgcaacctcgagcgtcagctgggtcgcgaacccgaaaccttcgaaatcgccgacgagttggagatcaccgaggagcgtgtcatcgagctcatccgctttggacgcgaccacgtctctctcgacgctccggttgaggacgacggcgacactagcctgggcgacctcatcgcccgcgagacctctcctggtcctgacgacattgtgctcgacgccgaggaccgcagtcgacttgaagggctccttgacgatctcgacgagcgctctgccgacgtggtgcgtcgccgctatggactcgtcgatggacgccaagccaagcttgccgacatcggcaaggtgtggggaatcaccgccgaacgc

SEQ ID NO: 1374 - protein, 129 aa, Homo sapiens
EQVNQVSAARRNLERQLGREPETFEIADELEITEERVIELIRFGRDHVSLDAPVEDDGDTSLGDLIARETSPGPDDIVLDAEDRSRLEGLLDDLDERSADVVRRRYGLVDGRQAKLADIGKVWGITAER

SEQ ID NO: 1375 - DNA, 420 bp, Homo sapiens
cgcgtgatactgcctcatattctacaggaaaatgaagaatatgatactggtgagggtgttacaggattgcatagcatgccaaatgacagtatggccatacttgcgaataacagtgctaataattcgcaaaatgaggaagtatcagaggaggatgaaatatcatacgattatgatgcagagttcgatcatgttgtagatgaggatgataatgaggagggagaagtgccgggggaaggtgtggaaggtatagaagttcagagagagagaattgtgccggatgacttattaatgagacccacttcactgtcacgctccctacaacagtttgtggaagaggctcatcatttagatagaaacccatatgatattgacagtgataacgacggagaagattcaaaggtagaactggacatgaatccg

SEQ ID NO: 1376 - protein, 140 aa, Homo sapiens
RVILPHILQENEEYDTGEGVTGLHSMPNDSMAILANNSANNSQNEEVSEEDEISYDYDAEFDHVVDEDDNEEGEVPGEGVEGIEVQRERIVPDDLLMRPTSLSRSLQQFVEEAHHLDRNPYDIDSDNDGEDSKVELDMNP

SEQ ID NO: 1377 - DNA, 373 bp, Homo sapiens
  misc_feature (373)..(373): Wherein n may be a, c, g or t
gctagcagtttatttcgtgcagttttatagtggtcaggcacatggactcaaagctggactgctgggttccattcatagctaggtattttttggacattttccttaacctctctgccttcgtttcatcatacataattcaggataatagcagtaccgaccccataaagttgttgggaagtgtaaatgaattattgtatgaaaagctctgggaatattacctagcacattacaaatgctatattagagttggctattattatttattcatatataaaaacaacactaaattataataatagctcatgtttattgagtgcttactgtgagtcatatattttcccaagcattttatatgcaagtcagtcatcagatn

SEQ ID NO: 1378 - protein, 83 aa, Homo sapiens [sequence omitted]

SEQ ID NO: 1379 - DNA, 322 bp, Homo sapiens
accggtaaagacggtaaaacgaaatttgcgattgaaaacgctacaagaacaagaattgtcttagctgactctaaaatccacattttgggcgggttcacccacatcagaatggcaagagaatctgtggttagtttaattttgggttcccctccaggtaaagtttatgggaacttacgtaccgttgcatctagattaaaagaacgctactaaacataatttgtgggctttcatcatctgtataatatttatatgtcgttttatggcgaaatagagtgaataaataggttttttttccttcttttttttaggacgccaaacgcgt

SEQ ID NO: 1380 - protein, 69 aa, Homo sapiens
TGKDGKTKFAIENATRTRIVLADSKIHILGGFTHIRMARESVVSLILGSPPGKVYGNLRTVASRLKERY

SEQ ID NO: 1381 - DNA, 411 bp, Homo sapiens
  misc_feature (90)..(90): Wherein n may be a, c, g or t
  misc_feature (94)..(94): Wherein n may be a, c, g or t
cccgggataatcggggtgagcgggggagcgtcgatgggagctgtggccgcgatcgtcctgctgccgtcgctgtcgggaatcgccgtgggntggngtggtgccggcggtgctttcctcggaggacttctcgtgacatctgtgatctatgcactggcacgtccgcgcgcggcttctgggacggctcgactgttgttagtcggtatcgctattggctcggctgccgcagccgttaccggctttctcacgtatgcggccgacgacgacgaacttcagaccgtggtcttctggcagatggggtcattgggacacctcgattggatcaaactcgcggttgctgccccggtcatcattggctgctgcatcgtcctgacgctgttggccagacaccttgacctgttgtccttgggggat

SEQ ID NO: 1382 - protein, 137 aa, Homo sapiens
  misc_feature (32)..(32): Wherein Xaa may be any naturally occuring amino acid
PGIIGVSGGASMGAVAAIVLLPSLSGIAVGWXGAGGAFLGGLLVTSVIYALARPRAASGTARLLLVGIAIGSAAAAVTGFLTYAADDDELQTVVFWQMGSLGHLDWIKLAVAAPVIIGCCIVLTLLARHLDLLSLGD

SEQ ID NO: 1383 - DNA, 315 bp, Homo sapiens
acagagttgctgttggacctgaactcattcttagaaggtaattcatacgcgagagatacagaatgttcaacaagaggaattgaagccattttccaacttcaatctatccaaggcagcggtacatcaagtagaatgactatgacacccgacttgattgaaaaatggtttccaggtgatcattctgacgttggtgaaggttgggcgcctgactgtgagacagaagagaacttgtcaaatttaacgctgcgatggattttagcagaggcaatcaaatttggtgttaaattcaaacctggtgcaatacatgatttcgcg

SEQ ID NO: 1384 - protein, 105 aa, Homo sapiens
TELLLDLNSFLEGNSYARDTECSTRGIEAIFQLQSIQGSGTSSRMTMTPDLIEKWFPGDHSDVGEGWAPDCETEENLSNLTLRWILAEAIKFGVKFKPGAIHDFA

SEQ ID NO: 1385 - DNA, 210 bp, Homo sapiens
attgagaccacagatgttacaaggagctttggatgggatagcactgaggcttggcaacagcatgatgtacaagaactgtgccgtgttatgtttgatgctttggaacagaaatggaagcaaacagaacaggctgatcttataaatgagctgtaccaaggcaagctgaaagattatgtgaggtgtctggaatgcgggtatgaaggctggaga

SEQ ID NO: 1386 - protein, 70 aa, Homo sapiens
IETTDVTRSFGWDSTEAWQQHDVQELCRVMFDALEQKWKQTEQADLINELYQGKLKDYVRCLECGYEGWR

SEQ ID NO: 1387 - DNA, 433 bp, Homo sapiens
ggatccggcgggccgcatgccgcctcctgggaagcagcccagcagcccccagcttgttttctcccattgagagatgaagcagttttctctctttttctgctgtgtccagaacatggccctgcgctgttggggcccattcttccctctgaccttgggtgggtgtgcagcgtgggcagggctttttcagggaggtgcggggtgagtttgccccttggcgtccccagtctttaacaagggctacctggaggctcaggtctgggtggtccagcctgcccagtttcctacctcttttccataaatgtctgactcctccccagcggtgagctgagggatggggacagagagcattgccaccaccaggcttttccggagaagtgtgggtggagagagacagagacatcctttccttggacagaatccctctggtgtgaag

SEQ ID NO: 1388 - protein, 133 aa, Homo sapiens
MSLSLSTHTSPEKPGGGNALCPHPSAHRWGGVRHLWKRGRKLGRLDHPDLSLQVALVKDWGRQGANSPRTSLKKPCPRCTPTQGQREEWAPTAQGHVLDTAEKERKLLHLSMGENKLGAAGLLPRRRHAARRI

SEQ ID NO: 1389 - DNA, 565 bp, Homo sapiens
  misc_feature (272)..(272): Wherein n may be a, c, g or t
  misc_feature (309)..(309): Wherein n may be a, c, g or t
  misc_feature (343)..(343): Wherein n may be a, c, g or t
  misc_feature (374)..(374): Wherein n may be a, c, g or t
  misc_feature (403)..(403): Wherein n may be a, c, g or t
  misc_feature (422)..(422): Wherein n may be a, c, g or t
  misc_feature (443)..(443): Wherein n may be a, c, g or t
  misc_feature (455)..(455): Wherein n may be a, c, g or t
  misc_feature (456)..(456): Wherein n may be a, c, g or t
acgcgtggaataagattgatttcgtttctctgagattagtttctactcttatgtgcacggagatacaagggaggctcggcattttctacaatcttgaatgttatctccagaccagggaggatttgggtttcatcagcattgaaggtgggagatgaggtgggcatcgcgtcgatgctgagtctcggggagaaagctaggaaatgtccccagcaggtagggaaacgcttggcaaagcacaaaggcaggagggacccacatagctgggccattcntgctaacgccctgcaactactgcaagaactgtggttntccgggtcaaccatagcgaggagggagcacaagnagagcttctctgcggagaaggcagatttcangctcctaagaacaccctgttcacaagganagctgacgtgcccctcccnagggaccaacgccaaaaggcnattcttcaggcnnagcgtcccagggcgctgctgtgcgtggttcgcagccccggcaaacgatggcctgcactgcgtgctgtccgccctgttcctgatggactctctgcactgtgtcctgatca

SEQ ID NO: 1390 - protein, 131 aa, Homo sapiens
  misc_feature (34)..(34): Wherein Xaa may be any naturally occuring amino acid
  misc_feature (46)..(46): Wherein Xaa may be any naturally occuring amino acid
  misc_feature (58)..(58): Wherein Xaa may be any naturally occuring amino acid
  misc_feature (68)..(68): Wherein Xaa may be any naturally occuring amino acid
  misc_feature (78)..(78): Wherein Xaa may be any naturally occuring amino acid
  misc_feature (84)..(84): Wherein Xaa may be any naturally occuring amino acid
  misc_feature (91)..(91): Wherein Xaa may be any naturally occuring amino acid
  misc_feature (95)..(95): Wherein Xaa may be any naturally occuring amino acid
MLSLGEKARKCPQQVGKRLAKHKGRRDPHSWAIXANALQLLQELWXSGSTIARREHKXSFSAEKADFXLLRTPCSQGXLTCPSXGTNAKRXFFRXSVPGRCCAWFAAPANDGLHCVLSALFLMDSLHCVLI

SEQ ID NO: 1391 - DNA, 339 bp, Homo sapiens
atcaacacctccatagcttcttcaactatggatgtcactaaaacagcctccatcagtcccactagcatctcaggaatgacagcaagttcctccccatctctcttctcttcagatagaccccaggttcccacatctacaacagagacaaatacagccacctctccatctgtttccagtaacacctattctcttgatgggggctccaatgtgggtggcactccatccactttaccaccctttacaatcacccaccctgtcgagacaagctcggccctattagcctggtctagaccagtaagaactttcagcaccatggtcagcactgacactgcctccgga

SEQ ID NO: 1392 - protein, 113 aa, Homo sapiens
INTSIASSTMDVTKTASISPTSISGMTASSSPSLFSSDRPQVPTSTTETNTATSPSVSSNTYSLDGGSNVGGTPSTLPPFTITHPVETSSALLAWSRPVRTFSTMVSTDTASG

SEQ ID NO: 1393 - DNA, 430 bp, Homo sapiens
  misc_feature (384)..(384): Wherein n may be a, c, g or t
actagtgacacaaggtagaagtcactggatggaatgaacttgtaggatattcccttttggggcactaatcacaaaggcaaattgaatggtagagtgtcaaggtgaactttaatactttgtaacatgagctccaggccaggtcttaaaacatcttggacatattgcaagaaatagctcagccctatagcacattgaatgagaatggagagtggatcctgggttggctttagactctggccttggcgtttgtgtgtacacatgtgcgtcgtcatctgtgcacacaggtacacaaatgtgtctttataatctctggggaagcaggttcacttttaatgttctttcatctgctatttgattttaaaatcttgggggaaagtattgaanatcagatgtactcatctgtcctgtgttaaaataggagtccaaattt

SEQ ID NO: 1394 - protein, 67 aa, Homo sapiens
MTTHMCTHKRQGQSLKPTQDPLSILIQCAIGLSYFLQYVQDVLRPGLELMLQSIKVHLDTLPFNLPL

SEQ ID NO: 1395 - DNA, 347 bp, Homo sapiens
gccatcggtgccggcaacggcgatgcctacgagctggcctacgccaccgacccgaccagcgccttcggcggcatcatcgccttcaacaaaccgctggacgccgccaccgccaaggtgatcctggaccgccagttcgtcgaagtgctgattgccccggactacgagccggccgacctgcgctggcgcgtggtacgcggtggcctgcgcttcggcggcacgctgtccgaaggcatagcgctgggcctgcagaccggtttcgattcgggcagtacgctcgactacatctatcgcgacgaagcgcgcggcaaggggccgctgggtcgcatggtcgaccgcaactacctgga

SEQ ID NO: 1396 - protein, 115 aa, Homo sapiens
AIGAGNGDAYELAYATDPTSAFGGIIAFNKPLDAATAKVILDRQFVEVLIAPDYEPADLRWRVVRGGLRFGGTLSEGIALGLQTGFDSGSTLDYIYRDEARGKGPLGRMVDRNYL

SEQ ID NO: 1397 - DNA, 309 bp, Homo sapiens
aaggctatgggaattcaaaagtatgtgttctattccatccacaactgtgacaagcagcctgaggttcccttgatggaaatcaagtattgtactggtaaatttattcaggacagtggtctggattatatcatcatccgtttgtgtggtttcatgcagggtcttattgggcaatatgctgttcctatactagaagagaagtccgtctggggaactgatgctccaactcggattgcttacatggatacccaggacgtagctcgactaacgtttatagctatgcggaatgagaaggccaacaagaaactcatg

SEQ ID NO: 1398 - protein, 103 aa, Homo sapiens
KAMGIQKYVFYSIHNCDKQPEVPLMEIKYCTGKFIQDSGLDYIIIRLCGFMQGLIGQYAVPILEEKSVWGTDAPTRIAYMDTQDVARLTFIAMRNEKANKKLM

SEQ ID NO: 1399 - DNA, 237 bp, Homo sapiens
  misc_feature (237)..(237): Wherein n may be a, c, g or t
gtgcacgacaaggaagccgccggcgacacgaagcggtggcagctggagaagacgatccagctgccgtggccgtcagaccaccggtctttctgcctccggggcacggccaacgggtgcctcaacgttggcctcatcattgaagtcggcgagaaaaagtcggtattcatgggaagccaccgcatcagggacgccgagctattcaagatcgacgtcaagagtttccagctccaaaagatn

SEQ ID NO: 1400 - protein, 60 aa, Homo sapiens
MRWLPMNTDFFSPTSMMRPTLRHPLAVPRRQKDRWSDGHGSWIVFSSCHRFVSPAASLSC

SEQ ID NO: 1401 - DNA, 261 bp, Homo sapiens
  misc_feature (1)..(1): Wherein n may be a, c, g or t
  misc_feature (2)..(2): Wherein n may be a, c, g or t
nnacgcgttccacttcccccgaccggaagacaattagcaataccaatggggaaaagaccaatgaagagtcgcaagatcaacaagtcacgactggccctggccatcactgccggtaccctcggggccctggcgcaacaggcgggcgccgccggtttcatcgaggacagcaaggcatcgctgaccctgcgcaacttctacatcaataccgacaaccgcaatggcagcgcctcgccgagcaagcaggaagagtggggccagggc

SEQ ID NO: 1402 - protein, 67 aa, Homo sapiens
MKSRKINKSRLALAITAGTLGALAQQAGAAGFIEDSKASLTLRNFYINTDNRNGSASPSKQEEWGQG

SEQ ID NO: 1403 - DNA, 360 bp, Homo sapiens
acgcgtcatgggtcgccgcgtgttatcacacgtacaacaccgagttctatcggtacgacccggtcgtgccggtcgccggcaactggccggcgggccgctggttcgaggacgtcaggcacctgtccgcgcaccagcgcgcgcacagcgagttctaccaggagttccttcacccttatgggatcggcagcatctcgggcctgtacatccatcgcagcgagggttcgggtgcattcctcagcgtccagggcggcctcgaatcgcaggggctgtccgacgatcagcgccgcgcgatcgaaaacatgggcatgcacatcagccgcgcgctgcagatccaggcgcggatcggcgagctcgaggcgc

SEQ ID NO: 1404 - protein, 120 aa, Homo sapiens
TRHGSPRVITRTTPSSIGTTRSCRSPATGRRAAGSRTSGTCPRTSARTASSTRSSFTLMGSAASRACTSIAARVRVHSSASRAASNRRGCPTISAARSKTWACTSAARCRSRRGSASSRR

SEQ ID NO: 1405 - DNA, 338 bp, Homo sapiens
  misc_feature (1)..(1): Wherein n may be a, c, g or t
nctaaggattgaaattaaacttacataaaaatggaaatcttagtagaatgttctgtgcctaaaggtagtggtcttgacatccatttaacctcttctgcctttattccaatagtctgcaacattctttttgaagaattataatcattctgtctctgatcacttcttgcatttccccagaccttagctctcagctgtccctggaggacatttccttcccccagccccatgtattattgtcgtttttggttttattcttgttggcatttttcatcctgagtactcaacattcagtattaaagggctcaagtcctcgggtttgtttgtgacatcagggatcc

SEQ ID NO: 1406 - protein, 68 aa, Homo sapiens [sequence omitted]

SEQ ID NO: 1407 - DNA, 293 bp, Homo sapiens
cctaggtcccatgcgagtttgagggctggcaggacagtcattaaacctcaaaacttcaaaataattttgttttactacatgtcccacatccaaggcacactgctgcaaggggttggctcccaagggcttggacagctccacctctgtggccactgctctatcaggctgttgggtgtttttccaagtgcaggatgcaaactgctggtgatctaccattctgaggtctctagggcagtgtcctccttcccccagcttcactaggcaatgccacagtgggaactccttgtgggccc

SEQ ID NO: 1408 - protein, 72 aa, Homo sapiens [sequence omitted]

SEQ ID NO: 1409 - DNA, 356 bp, Homo sapiens
  misc_feature (1)..(1): Wherein n may be a, c, g or t
  misc_feature (2)..(2): Wherein n may be a, c, g or t
  misc_feature (356)..(356): Wherein n may be a, c, g or t
nngcgcgctgatggctgggtctcccccgtcgtcgacggatacaagaaagaccagtgtggccagatgtgcaagtacgacaaggacaaagccgtcgagctgtacaagaagtccggtgggtacaagggcaccctgaccattgcggtcaacggtgatggcgaccacaaggcatggtctcaggcgatctgcaacggctggaagaacgaccttggcctcaagtgccagctcaaggtcaccccggacttcaagaccctgcgcgacatgatcaccaagcgtcagctccagggcttcttccgcaccggatggcagatggattacccctccatcgagaacttcttgaccccgatgtacgccaccgn

SEQ ID NO: 1410 - protein, 118 aa, Homo sapiens
  misc_feature (1)..(1): Wherein Xaa may be any naturally occuring amino acid
XRADGWVSPVVDGYKKDQCGQMCKYDKDKAVELYKKSGGYKGTLTIAVNGDGDHKAWSQAICNGWKNDLGLKCQLKVTPDFKTLRDMITKRQLQGFFRTGWQMDYPSIENFLTPMYAT

SEQ ID NO: 1411 - DNA, 330 bp, Homo sapiens
  misc_feature (330)..(330): Wherein n may be a, c, g or t
gaaaaggaggagagacacaacctattacttcccgacccggaagcaggaaaaagggtgatcgaacactacaaattaccaataactttagatgagtacgacgaaagaaatgttgcattgcaatctcttaaatggggtacttgcgaatttcttcccggtgcattgaatttgttgaaatacttaaagttaaagaacattcctattgcattatgtacgtcttcgaacaagactaaatttcgcggcaaaacaagtcatttagaggaaggttttgatcttttcgataccattgtgactggtgatgatccaaaaattgaaaaaggtaggggtaaggtn

SEQ ID NO: 1412 - protein, 110 aa, Homo sapiens
EKEERHNLLLPDPEAGKRVIEHYKLPITLDEYDERNVALQSLKWGTCEFLPGALNLLKYLKLKNIPIALCTSSNKTKFRGKTSHLEEGFDLFDTIVTGDDPKIEKGRGKV

SEQ ID NO: 1413 - DNA, 504 bp, Homo sapiens
atcttcggcccggtggtctgcctgatcccgttcaaggacgaagccgaggcgctgcgcctggccaacgacgtggaatacggcctggcctcctacatctggacccaggacatcggcaaggcccatcgcctggcacgcggcatcgaggccgggatggtcttcatcaacagccagaacgtgcgcgacctgcgccagccgttcggcggggtgaaggcctcgggcaccggacgcgaaggcggggaatacagcttcgaagtgttcgccgagatcaagaacgtgtgtatatccatgggcagccatcacatcccccgctggggtgtttgagcgatccctgtaggagcttgcgatgcaggagctacggtctgccagatacagcgcggtgatcccatcgctgcctcgctggggctcgacagctcccacatttgatctttgacaacacgcttccaagacaaaaacaattattcaggagaatcatcatgggcgaagtcgtcctggccgcgaagatca

SEQ ID NO: 1414 - protein, 106 aa, Homo sapiens
IFGPVVCLIPFKDEAEALRLANDVEYGLASYIWTQDIGKAHRLARGIEAGMVFINSQNVRDLRQPFGGVKASGTGREGGEYSFEVFAEIKNVCISMGSHHIPRWGV

SEQ ID NO: 1415 - DNA, 315 bp, Homo sapiens
ccgcggtacggtctgccccgtgtctggtgggagatggcctccaggagccaaaacgtcaggcaggagacattgcctggggaagggaaggagctcagtgccatggggaaaggagaaggttgtcccacatctactcatggaagcacatcgccagggagaggaccatgacatgggctgccatcctcatgctttgcagagggacctcatcctgctcctcctgtgcctggcagctctgcctgtccggtgggctcctccccagccccgtgctgctgagctgctctgagctcctccagcttccccagcactgctcttgggccc

SEQ ID NO: 1416 - protein, 56 aa, Homo sapiens
MSWSSPWRCASMSRCGTTFSFPHGTELLPFPRQCLLPDVLAPGGHLPPDTGQTVPR

SEQ ID NO: 1417 - DNA, 302 bp, Homo sapiens
cggctgccagcaagtgtctccgccgcgggacctgtcatcccagctggtggggagaaaacgaagctgggtaaaaggggctgagagaaagctggccaaaggttgggcttttgaagtactagaaacttcctcttctggggacgtggcagacaagtcatcttacaggctcttgtgctgtggaaaccccaggttctgcataagacataccttctgtcacactgctgggctcaccagcagtaaggaaaccctccaacaagccagaaatatataattaagggaaacaaaagcaactcgattccgagaga

SEQ ID NO: 1418 - protein, 51 aa, Homo sapiens
MTCLPRPQKRKFLVLQKPNLWPAFSQPLLPSFVFSPPAGMTGPAAETLAGS

SEQ ID NO: 1419 - DNA, 316 bp, Homo sapiens
  misc_feature (1)..(1): Wherein n may be a, c, g or t
ncaaactctggggccagctgccacctattggccatgtgaccatggcaagtgcctggagctttctcttcctgtttccccatctggaaaatggggatagtaactgtgctacctaatgtggttgtcaaaactattaaatgaataaatgtgctttagaacaatgtctggcacgtagcaagagctatgtgcataagggtttattaaataaaattggaaaatgcatgggaaagccctttgcttttccacaatggaatcttgccttattccttagactcagagaaggctgtaagctgatcgaggatgtggcataccttgatca

SEQ ID NO: 1420 - protein, 60 aa, Homo sapiens
MNKCALEQCLARSKSYVHKGLLNKIGKCMGKPFAFPQWNLALFLRLREGCKLIEDVAYLD

SEQ ID NO: 1421 - DNA, 385 bp, Homo sapiens
  misc_feature (370)..(370): Wherein n may be a, c, g or t
  misc_feature (381)..(381): Wherein n may be a, c, g or t
cctaggttatagattagatcaggctaaaatcatcaatggttgtaacatctaagaggacagacatgttgatgaagaacagaatatttacatggtcttgaaatgttgtatgggagaagagaaaaacagcaacaatgcagtggagaaatcagacaacacattgacagggtgatcacaagtatcacctccagtgagagtcaaatgaacattgtttgcctccttatgtgtttatctgtccctgagaagtacacaacatcatctatgcagtttctggcccagaatgcatctcaactcactcacaagagaatattatgcatacatacagaagaagaaagaatacaactgaacatatattaataagaacatgaggtanaaatgtgacancgga

SEQ ID NO: 1422 - protein, 84 aa, Homo sapiens [sequence omitted]

SEQ ID NO: 1423 - DNA, 366 bp, Homo sapiens
cggaacttcctcagtaccaatgaaggcaaactagacaagctccagcgggacgccaagacggctgaggaggcctacaatgcagttgtgcgctactttggcgagagtcccaagactacacctccttctgtattcttcccagtatttgtccgattcattcgttcttacaaggaagcagaacaagagaatgaagcccgcaagaagcaggaggaggtaatgcgggagaagcagctggctcaggaagccaagaaactggatgccaagaccccatcccagcggaacaagtggcaacagcaggagttaatagcagagttgaggcggcgccaggccaaggaacaccggtctgtttatgaggggaaggattgtaca

SEQ ID NO: 1424 - protein, 122 aa, Homo sapiens
RNFLSTNEGKLDKLQRDAKTAEEAYNAVVRYFGESPKTTPPSVFFPVFVRFIRSYKEAEQENEARKKQEEVMREKQLAQEAKKLDAKTPSQRNKWQQQELIAELRRRQAKEHRSVYEGKDCT

SEQ ID NO: 1425 - DNA, 374 bp, Homo sapiens
acgcgtttcacttcctgttggcaaatagagccttgaggtggggccacgggagggcggcgctggcttcgtctccacggcagaggggaccctccctccctcacggggtggcaggcccagagcaggcgcaggtgacggacatttaggtacccagagcccggcacccatcaggagccactgggagagtccggccgtggccgtgaacagccttggggcaggtctcacctgggtctgcccctccaggggcgccgtgagtaggaaatgctggcactcaggaagccaggcctgaatcccgaatcccgcctggcgccttcctggttgtggcccttgagtggtgtgtgggtaagcgcagagggtagggcagcccggggcctagg

SEQ ID NO: 1426 - protein, 55 aa, Homo sapiens
MGAGLWVPKCPSPAPALGLPPREGGRVPSAVETKPAPPSRGPTSRLYLPTGSETR

SEQ ID NO: 1427 - DNA, 270 bp, Homo sapiens
tcgcgagcacactccagcctctggcatggatgtacctgtgcttagtcaagctcctcagcccatcagatcatttcctcaaatgacagggcatgtttccacgaaaaggaacgtgcatatgcaattgtccggcagagcctagatatcacggacgtactcgccctccatcaagcttatccccgacaccaccacatcatgcaactgtctgccaagctcctcatcgctgcttctctggtggcgagcacttctgccacgctccaaaatggtgtgcac

SEQ ID NO: 1428 - protein, 60 aa, Homo sapiens
MFPRKGTCICNCPAEPRYHGRTRPPSSLSPTPPHHATVCQAPHRCFSGGEHFCHAPKWCA

SEQ ID NO: 1429 - DNA, 330 bp, Homo sapiens
  misc_feature (1)..(1): Wherein n may be a, c, g or t
  misc_feature (2)..(2): Wherein n may be a, c, g or t
  misc_feature (330)..(330): Wherein n may be a, c, g or t
nnaccttctctccgcgttattaccaaagatgctatgcacgtaactgcggaggaaattcttcacacaggccaccccgcccccactgcgctcgtcgctaatcttccctataacgttgcggtacccgtactgctacacatgctagatattctcccctccttgcggactacagtggtgatggtgcaggcagaagtagccgatcgattggctgccacaccaggcagccgcatttacggtgtccccagcgtcaaagtcaacttttacgggactgtctcgcgtgcgggagcaattggacgcaatgtcttctggccggctcccaatgttgattctggn

SEQ ID NO: 1430 - protein, 110 aa, Homo sapiens
  misc_feature (1)..(1): Wherein Xaa may be any naturally occuring amino acid
XPSLRVITKDAMHVTAEEILHTGHPAPTALVANLPYNVAVPVLLHMLDILPSLRTTVVMVQAEVADRLAATPGSRIYGVPSVKVNFYGTVSRAGAIGRNVFWPAPNVDSG

SEQ ID NO: 1431 - DNA, 253 bp, Homo sapiens
acgcgtgattcccaccccagccgggggcgaccgcgaacgtgcggcgaccggtgagcatggcaccgagttcggaccagagaccgcgaaggtgctcggcgctcgcctcggacaccttgaacgtcagggcgtccgagcctccggcgtggaactcgacgtcccccgaattgaagtaccaatcgaacacttcggccacaccatcgttggggtcggcgatatagccggggagcgacatggacatgatggcgacaacctt

SEQ ID NO: 1432 - protein, 79 aa, Homo sapiens
MSMSLPGYIADPNDGVAEVFDWYFNSGDVEFHAGGSDALTFKVSEASAEHLRGLWSELGAMLTGRRTFAVAPGWGGNHA

SEQ ID NO: 1433 - DNA, 207 bp, Homo sapiens
  misc_feature (1)..(1): Wherein n may be a, c, g or t
nccacatccttcaggatgaaagctgcagtgttggctgtggcccttgtcttcctgacaggttgccaagcttgggagttctggcagcaagatgagccccagtcccaatgggacagggtgaaggatttcgccactgtgtatgtggatgcagtcaaggacagcggcagaaactatgtgtcccagtttgaatcctccactttgggccaacag

SEQ ID NO: 1434 - protein, 64 aa, Homo sapiens
MKAAVLAVALVFLTGCQAWEFWQQDEPQSQWDRVKDFATVYVDAVKDSGRNYVSQFESSTLGQQ

SEQ ID NO: 1435 - DNA, 156 bp, Homo sapiens
tccgatgccgtgttcacctttgatcatgtatttccgatggatacgagccaggcgcatgtatttgaccacagcatcaagggcacggtgaatgatgtgctacagggctacaatggcacgatttttgcgtacggccaaacgggctctgggcagacatat

SEQ ID NO: 1436 - protein, 52 aa, Homo sapiens
SDAVFTFDHVFPMDTSQAHVFDHSIKGTVNDVLQGYNGTIFAYGQTGSGQTY

SEQ ID NO: 1437 - DNA, 363 bp, Homo sapiens
  misc_feature (1)..(1): Wherein n may be a, c, g or t
ngctggccaaccgggttccttccagcgacatgggtctctttggtggcagcagctcgggcagtgcctctgcagcatcgtcgccccaactggaagcggctacggctgaggtaggtcgacatggcaactgacggttcgcagctcgatatgattacggacgtgttcaaccgccttgtcgaatcgtgtcatgccaagtgcattagcccacgctacgccgaggccgacctcaataagggcgaaagcgtatgcgttgatcggtatgtatacgctagctgaccttgcagctgcgtgagcaagttctttgccgtcaatgccaaggtcggcgagcagatgcaggcattgggacaagctgccagcgccgccggc

SEQ ID NO: 1438 - protein, 53 aa, Homo sapiens
VDMATDGSQLDMITDVFNRLVESCHAKCISPRYAEADLNKGESVCVDRYVYAS

SEQ ID NO: 1439 - DNA, 297 bp, Homo sapiens
  misc_feature (109)..(109): Wherein n may be a, c, g or t
ccgcgggcatccccttgcatgcacatatacctgtgtgccatgtatgcacacctgcacatgctgcaaacacacccatgcacacacacacactgcacacacacccatactngcacacacacccatgcacacacatgccacacacacccatgcgcacacactcacacacacctatgcacacacacacctatgcacatgcacaccatgctgcacacacccatgcgcacacacgcacacacgcgggagagaggcggggggcaaaaggaggcagggtagagagacgggagtggaggccagggg

SEQ ID NO: 1440 - protein, 90 aa, Homo sapiens
  misc_feature (37)..(37): Wherein Xaa may be any naturally occuring amino acid
PRASPCMHIYLCAMYAHLHMLQTHPCTHTHCTHTHTXTHTHAHTCHTHPCAHTHTHLCTHTPMHMHTMLHTPMRTHAHTRERGGGQKEAG

SEQ ID NO: 1441 - DNA, 191 bp, Homo sapiens
  misc_feature (64)..(64): Wherein n may be a, c, g or t
aaggggctggagtgggtctccgctgttggtggaagtggtggcgctacatattacggagactcgntgaagggccggttcaccgtttccagagacaatcccgagaacacactgtatctgcgaatgacgagcctgagagccgaggacacggccgtctattactgtgcaaaagatggtccctatggagccgtacg

SEQ ID NO: 1442 - protein, 63 aa, Homo sapiens
  misc_feature (22)..(22): Wherein Xaa may be any naturally occuring amino acid
KGLEWVSAVGGSGGATYYGDSXKGRFTVSRDNPENTLYLRMTSLRAEDTAVYYCAKDGPYGAV

SEQ ID NO: 1443 - DNA, 258 bp, Homo sapiens
gccagaaggaacccctttgccttcgccccagttcttctgaacgttgccgctaggtttgaggaggcggcgaccacgtgctgtgaacagcaacagaaagccacctgctttcaagacaaggcagcccccatcacacagtatttaaaagcgttatcttcttatcaaagaaatgtttgtggagcccttttaaaatttggacccaagaccttaaactctataaacatcggcgtgtttagtaagaagttccccaagattggattt

SEQ ID NO: 1444 - protein, 86 aa, Homo sapiens
ARRNPFAFAPVLLNVAARFEEAATTCCEQQQKATCFQDKAAPITQYLKALSSYQRNVCGALLKFGPKTLNSINIGVFSKKFPKIGF

SEQ ID NO: 1445 - DNA, 183 bp, Homo sapiens
  misc_feature (1)..(1): Wherein n may be a, c, g or t
  misc_feature (2)..(2): Wherein n may be a, c, g or t
  misc_feature (3)..(3): Wherein n may be a, c, g or t
nnngcacacccgagcgcgactccactggaactgcgcactgacgcaacgtatctggtgaccggggggctcggattcatcgggctggagatcgcggaacacctggccgcgcacggcgccgggcatgtggtgctgatcggccgacgcgcgcccggcgatgccgcccaacagcgcattgacgctatt

SEQ ID NO: 1446 - protein, 61 aa, Homo sapiens
  misc_feature (1)..(1): Wherein Xaa may be any naturally occuring amino acid
XAHPSATPLELRTDATYLVTGGLGFIGLEIAEHLAAHGAGHVVLIGRRAPGDAAQQRIDAI

SEQ ID NO: 1447 - DNA, 348 bp, Homo sapiens
  misc_feature (1)..(1): Wherein n may be a, c, g or t
ntcatgaccctgctgaccggcgacagcgcgctcctgatgccctggcacggcccctacgacatgatcctggtcgatcccccctatggcgatacgtcgctcgcatgggaccggcgcatagcggattggcccggcaaggcgctcgctgccctgaaacccagcggctcgctctgggttttcggctccctgcggagtttccttgcatccaacgcggcatttcggaatgcgggctggaaatatgcccaggaactggtctgggagaagcagaacggttccagcttccatgccgatcggttccggcgcgtgcatgaactgatcgtccagttctatcgcgacgatacgtcctggcgc

SEQ ID NO: 1448 - protein, 116 aa, Homo sapiens
  misc_feature (1)..(1): Wherein Xaa may be any naturally occuring amino acid
XMTLLTGDSALLMPWHGPYDMILVDPPYGDTSLAWDRRIADWPGKALAALKPSGSLWVFGSLRSFLASNAAFRNAGWKYAQELVWEKQNGSSFHADRFRRVHELIVQFYRDDTSWR

SEQ ID NO: 1449 - DNA, 296 bp, Homo sapiens
  misc_feature (1)..(1): Wherein n may be a, c, g or t
natcaaacacattccaaatccagtgaggaattgtcactgccaccacctcctcctccaccaccaccaccgccgccaccaccgcccccaccccctcctctccgtgctctgtcctcatcctctcaagctgcaactcatgaacttaggcttccgggctccagtgaaagatgaccagccacgtcctctagtgtgcgaatcacctgctgagcgaccacgtgactccttggaaagtttttcatgtccaggatctatggatgaagtgttggcctccttaaggcatggcagagctcctctccgga

SEQ ID NO: 1450 - protein, 55 aa, Homo sapiens
  misc_feature (1)..(1): Wherein Xaa may be any naturally occuring amino acid
XQTHSKSSEELSLPPPPPPPPPPPPPPPPPPPLRALSSSSQAATHELRLPGSSER

SEQ ID NO: 1451 - DNA, 190 bp, Homo sapiens
  misc_feature (190)..(190): Wherein n may be a, c, g or t
cctaggggtgggagacacagggggcatcgctgagacccgagaagaggaaggagagaaaggaacgtctttccagaaaagtgaaactgaaaatccctcagagtggcatttctcaaacttgggggtgagggtgggagttgaggattttccaactgtttttctcattttgagaaatgataaagagaataaaggn

SEQ ID NO: 1452 - protein, 54 aa, Homo sapiens
MRKTVGKSSTPTLTPKFEKCHSEGFSVSLFWKDVPFSPSSSRVSAMPPVSPTPR

SEQ ID NO: 1453 - DNA, 387 bp, Homo sapiens
aggcctcatgcttcatgcaagcccttaacagctgtggcaggcaggtggacattaggtgtggccttattagatgcctttttttttctcttgctttcaaagcttgtctcttgggaagggattttctggagctgttaggtttggacggggagaggctgagcggtcctgcaggtcttccacacacaggtgatgtgctctctgcctttatttatcagagctacagaagtccactgagcacagagttgtccattgtactaaaagaaaagggaaataattgctccagctgcacgggcttcttagctgttgcctgtaaaaagcatttaacattaaaagagccgggcacacagggagaaagccgaggtggagggagaaagcctccgtggaggagat

SEQ ID NO: 1454 - protein, 124 aa, Homo sapiens
MQALNSCGRQVDIRCGLIRCLFFSLAFKACLLGRDFLELLGLDGERLSGPAGLPHTGDVLSAFIYQSYRSPLSTELSIVLKEKGNNCSSCTGFLAVACKKHLTLKEPGTQGESRGGGRKPPWRR

SEQ ID NO: 1455 - DNA, 222 bp, Homo sapiens
tgtacacatagcacagtgcctgaaacatagtaggtgagctggataggtctcctgaacatgtaggactgagagaaagacactgggctgaaggagaggtcatggagttaactaccaactctacttctgctaaggtgggtagcaccaggtaagttaactttacctctctgagcctcaatttctgaacaaatgaaaaagctggatgatacatgtaatgccctttac

SEQ ID NO: 1456 - protein, 69 aa, Homo sapiens [sequence omitted]

SEQ ID NO: 1457 - DNA, 291 bp, Homo sapiens
tccggagtcgcctcggtggatgctgacgcacggttacggtgagcaggccgaagagatcgttgccggaattgagcaggatgttcgggagtcggggcatgaacttgagccggttagcgacgaccaggccatcaccttggaacccgaggtgaggcgtcaaggtcgccgcaacttctcccagcgttgggtagagtttaaggagtctggtgctgagctggtcgaggtgttcctgcgtcgctattggaagcgcactgtgctgggtgtcacccttatggtgacccagtccttcctgta

SEQ ID NO: 1458 - protein, 90 aa, Homo sapiens
MLTHGYGEQAEEIVAGIEQDVRESGHELEPVSDDQAITLEPEVRRQGRRNFSQRWVEFKESGAELVEVFLRRYWKRTVLGVTLMVTQSFL

SEQ ID NO: 1459 - DNA, 420 bp, Homo sapiens
acgcgtcccgtcacctgcggtatggaccaagtgagttgtgtgctcgacaatgggttcgccgccatcatggatgtgccgggtttcaactatcgcgcccatcgttacaccgaagcctatcggcgtttgccgcaaaatgtggtgctaggttcggaaacgacctcgacggtgagcagccgtggtgtctacaagtttcctgttgtgctgaagtccgatgccatctatcccgaccatcagtcgtcaggctacgacacagagtattgttcgtggtcgaacacccccgatgtcgatttcgccctcgccgaagactatccctggacgatggggcagtttgtctggacgggcttcgactacctcggtgaaccttcgccttacgacaccgatgcctggccctctcacgcctccctcttcggcattgtcgac

SEQ ID NO: 1460 - protein, 133 aa, Homo sapiens
MDQVSCVLDNGFAAIMDVPGFNYRAHRYTEAYRRLPQNVVLGSETTSTVSSRGVYKFPVVLKSDAIYPDHQSSGYDTEYCSWSNTPDVDFALAEDYPWTMGQFVWTGFDYLGEPSPYDTDAWPSHASLFGIVD

SEQ ID NO: 1461 - DNA, 321 bp, Homo sapiens
gccggcttacgggtcagtaaagagaaatgaaaacctctccgcagccccaaagcccaccattttccatttattgacaaggaggccacaaggcaagtgcctctagcccccattccaaacatcagacagcaccaggctccactttgcaaactgttccagctggacaaggagtctttagaaagctcaagtattagaagattcgcccccaaccgattccacatctaaaaggtctttaaggagcagggaagaggggtctaaactcgggtaaagtgcacaccctctaccctctcactcagctcccgccctgccaggagctaggcgcgc

SEQ ID NO: 1462 - protein, 72 aa, Homo sapiens
MWNRLGANLLILELSKDSLSSWNSLQSGAWCCLMFGMGARGTCLVASLSINGKWWALGLRRGFHFSLLTRKP

SEQ ID NO: 1463 - DNA, 378 bp, Homo sapiens
aggcctgtcggcgacgtgctgagcgaggccgagcgcctggtcaaggccggggtcaaggaactcctggtgatttcccaggacaccagcgcctacggcgtggacctgaagtacaagaccgacttctggaacggccagccggtcaaggcccgcatgaaggaactctgcgaggcgctgagcttcatgggcgtgtgggttcgcctgcactatttctacccgtaccccaacgtcgacgacgtgatcccgctgatggccgccggcaagctcctgccgtacctcgacatccccttccagcacgccagcccgaaggtgctcaaggccatgaagcgcccggccttcgaggacaagaccctggcccggatcaagcagtggcgcgagatc

SEQ ID NO: 1464 - protein, 126 aa, Homo sapiens
RPVGDVLSEAERLVKAGVKELLVISQDTSAYGVDLKYKTDFWNGQPVKARMKELCEALSFMGVWVRLHYFYPYPNVDDVIPLMAAGKLLPYLDIPFQHASPKVLKAMKRPAFEDKTLARIKQWREI

SEQ ID NO: 1465 - DNA, 429 bp, Homo sapiens
  misc_feature (48)..(48): Wherein n may be a, c, g or t
  misc_feature (50)..(50): Wherein n may be a, c, g or t
  misc_feature (54)..(54): Wherein n may be a, c, g or t
  misc_feature (429)..(429): Wherein n may be a, c, g or t
gctagcagtgggttggggagttgggggaagggtggaggcagggctgtntntgtntctcctaagccaggaagttgtgtggatgagtcaacgttgaatggagagccctaggcagtgttgtcccgcccgccctgactcacctgtcccccacatcccctgatgccctcactgaagggtcaggtgcctgctccctcctgaggggtcaatcccatgtgccccacgtggcctcatagtactggcccagtgtttggagaacaggctgggggctgggattgcaggttctcccacgtctcagccccggccaaggggtctgctgcgttcctgcggagcacgtgccagccccacctccacctctagtgctcgtctttgcctgctgtcctgtctttacttgtcttgagtgtctgtgcagcccccctatagtgatagacatgn

SEQ ID NO: 1466 - protein, 75 aa, Homo sapiens [sequence omitted]

SEQ ID NO: 1467 - DNA, 353 bp, Homo sapiens
tgatcaatgcaacgttcaaagtcccggacccctgcctccattccagacattataaaggccacccagctccagagctccctttgggatctgctgaggctttgttatagcaacatcacagctcatcttctccctctctccaagcctgcttctcttaacacctcataggtgttactgagagcacttcccagtaaacctcctgcaagaaaacctccgtaacagagtctgtttctcaggaaatctaccctaccatagaggcctaggtgggaagaagaccaaggatcctgactcctggcccagtgttttcccctcacaccagctgatggtgggtagaatttactgtgaaaatctctaga

SEQ ID NO: 1468 - protein, 52 aa, Homo sapiens
MQRSKSRTPASIPDIIKATQLQSSLWDLLRLCYSNITAHLLPLSKPASLNTS

SEQ ID NO: 1469 - DNA, 384 bp, Homo sapiens
  misc_feature (340)..(340): Wherein n may be a, c, g or t
  misc_feature (368)..(368): Wherein n may be a, c, g or t
gaattcctcactatgaaagcatctactccccatagacactgtacttaaaagtcagggagccaggcgtggtagttgctgggcaagacttcatctcaaagtagctaatggctactgagaaatgtcggtgggtaaaggtgtttgctgcccagcctgacagccttggggatccacaccatggggggagagagacaacgactcccgcaagttgtcgtctcacctccagccttgcaacatggaacatgcatccccatagtcccacctcccacatataaatgtaacttaaaaattaaaagtaaaatattatattctgctctttgccctgtttattccttttcattgntttcactcttatacacgctaaaccctcnaggccaaaaggtgcac

SEQ ID NO: 1470 - protein, 81 aa, Homo sapiens
MWEVGLWGCMFHVARLEVRRQLAGVVVSLPPWCGSPRLSGWAANTFTHRHFSVAISYFEMKSCPATTTPGSLTFKYSVYGE

SEQ ID NO: 1471 - DNA, 162 bp, Homo sapiens
  misc_feature (1)..(1): Wherein n may be a, c, g or t
  misc_feature (2)..(2): Wherein n may be a, c, g or t
  misc_feature (3)..(3): Wherein n may be a, c, g or t
nnncgcacactcatagtcagtaatctgaataatgataaaattgatgaggataagctcttcaatctgttttccttgtacggaaacatagttcgtatcaaggtactgcgtaataaaccagatcatgctcttgttgagatggttgacgggttgcaggctgagcta

SEQ ID NO: 1472 - protein, 54 aa, Homo sapiens
  misc_feature (1)..(1): Wherein Xaa may be any naturally occuring amino acid
XRTLIVSNLNNDKIDEDKLFNLFSLYGNIVRIKVLRNKPDHALVEMVDGLQAEL

SEQ ID NO: 1473 - DNA, 417 bp, Homo sapiens
aaattaaatgaaaaaaaaagttttaatagcgcaatagacagaaccctgggaacataaagacaaggccccacaactccctatctccgaggaggtcaggaagacttctcagcagagacgaccctgaaagatgagcagggtcttgccaggaagagtgggaggcagggtactccaagcagaggcaggagcacaccctgggaggcagctggagctgatgcctggtggcagctgggggaatcccaggggtgcagcccgtgtggcggggagaacaacaaaggcaatgggacagatgctagaaagcagactgagacaagtgtgtgggaggtcaacttcactttgcttgtaggaggagtgttcaaagtcctcaacatgcatcaggaccacttgaaggaactgttaaaacgccagagtgaggcccta

SEQ ID NO: 1474 - protein, 91 aa, Homo sapiens
MLRTLNTPPTSKVKLTSHTLVSVCFLASVPLPLLFSPPHGLHPWDSPSCHQASAPAASQGVLLPLLGVPCLPLFLARPCSSFRVVSAEKSS

SEQ ID NO: 1475 - DNA, 193 bp, Homo sapiens
accggtgcagagattgaccagttcacaccatgagcctgcaccatcacgagagaccacagaaggatccagagactccccgtccagaattctactcgtcagctttaggcttccacagcccttgtaagtttaccatctgcacagggatgggacacagactcactcctcattctcctctgggaacctgacccgacca

SEQ ID NO: 1476 - protein, 51 aa, Homo sapiens
MSLHHHERPQKDPETPRPEFYSSALGFHSPCKFTICTGMGHRLTPHSPLGT

SEQ ID NO: 1477 - DNA, 154 bp, Homo sapiens
atctttgccgtcggaggccacaacggcaatgcctacctaaacacagttgaggcgtttgaccccgtgctgaataaatgggagctggtcggacctgtgtctcactgccgagctggtgccggtgtggccgtgtgtgactgtttaactagccagatct

SEQ ID NO: 1478 - protein, 51 aa, Homo sapiens
IFAVGGHNGNAYLNTVEAFDPVLNKWELVGPVSHCRAGAGVAVCDCLTSQI

SEQ ID NO: 1479 - DNA, 186 bp, Homo sapiens
tctataaccatggagggctccatccctactgagctctataacatgcaggcactgcccaggaagctccaacctggggaatactgtacacaaagaacatccacgactcccaacagtgtaacccagcccatctgggggaccatcaaaaacagctgggagtaccactagcccaggggcaaagtgtctaga

SEQ ID NO: 1480 - protein, 51 aa, Homo sapiens
MEGSIPTELYNMQALPRKLQPGEYCTQRTSTTPNSVTQPIWGTIKNSWEYH

SEQ ID NO: 1481 - DNA, 454 bp, Homo sapiens
  misc_feature (396)..(396): Wherein n may be a, c, g or t
tccggaggccgagggtcctccgggcttccgaaggaagccgacctcaacgctggacgcttcttggagaatgattgcgttgagtggagatgtggtctgtctataaaaggccgggagggaacaatatctgttaccactcagtccgtctctaaagagacactctttaccgctgaaaacctcaagagtgagcactcccacgcccccgtctctggtcctacctgggtccaaggccgatgtgttttaaatatatttctgcagattctggagttctggagacaagtgcttctggatccctcttcccttcccttttgctcctctaaagagtatggagacatgaactcaaacctaactaactggctgcctcccaaagaaagtgcttgattttaagggggagttgtnttccagaattgttaaagtcacatcagtctctaggaacccccaggtcctggtgctgcag

SEQ ID NO: 1482 - protein, 65 aa, Homo sapiens
MSPYSLEEQKGREEGSRSTCLQNSRICRNIFKTHRPWTQVGPETGAWECSLLRFSAVKSVSLETD

SEQ ID NO: 1483 - DNA, 304 bp, Homo sapiens
cctaggagctgaggaagcttattcgagggaatactagaaatttcaagctggcaaagctattttacacactaaatgtcctggataagaagaaatggaactcccgttatcagctttaaaaaataactactaatggcaaataggagtcaagcccggaggggcttcttcatcaggacagttgtcacccatccccaagatgggcacggtctcaccttctctgcctgcatcgtcaacctgcctgctctctgccggctgaccgtgttgcccaacaagctgtctaaacccagagtccagcaagcccggatcc

SEQ ID NO: 1484 - protein, 58 aa, Homo sapiens
MANRSQARRGFFIRTVVTHPQDGHGLTFSACIVNLPALCRLTVLPNKLSKPRVQQARI

SEQ ID NO: 1485 - DNA, 414 bp, Homo sapiens
  misc_feature (1)..(1): Wherein n may be a, c, g or t
  misc_feature (2)..(2): Wherein n may be a, c, g or t
  misc_feature (411)..(411): Wherein n may be a, c, g or t
nncagactcactcaccacaagggagtaaacctcactgacatcaaactcaacagttcccaggagtttgctcagctctctcctagactgggaggcttcctggaggaggcgtggcagcccaggaacaactgcacttctggtcaagttgtttccctcagatgctctgagtgtggagcgaggcccctggcttcccggatagttggtggtcagtctgtggctcctgggcgctggccgtggcaggccaacgtggccctgggcttccggcacacgtgtgggggctctgtgctagcgccacgctgggtggtgactgctgcacattgtatgcacagtttcaggctggcccgcctgtccagctggcgggttcatgcggggctggtcagccacagtgccgtcaggccccaccaagggcgtctntgg

SEQ ID NO: 1486 - protein, 138 aa, Homo sapiens
  misc_feature (1)..(1): Wherein Xaa may be any naturally occuring amino acid
XRLTHHKGVNLTDIKLNSSQEFAQLSPRLGGFLEEAWQPRNNCTSGQVVSLRCSECGARPLASRIVGGQSVAPGRWPWQANVALGFRHTCGGSVLAPRWVVTAAHCMHSFRLARLSSWRVHAGLVSHSAVRPHQGRLW

SEQ ID NO: 1487 - DNA, 387 bp, Homo sapiens
  misc_feature (1)..(1): Wherein n may be a, c, g or t
ntcgaatatccatgcagccgcgttgcaaacaagaatggagccaagtacttggcgccaatccatccctgggatgactactctattacagatggaaagctagttacgggtgttaacgcaaattcttcctattcgaccacaattagagctataaacgcattatatagctgaaacaaaagacaagggaattgttgaaggggaggcttctaatggctttcagtttctgtgaagagaaggctaacagctcaatggttcgaaaggtaaagaaaacggcaggtcggtagcactcgattttgctagaatggaaatcatatagagaacaattgaatagtaggccttggtttttagtgttgtactcatcatggtcatatgtgacataggtaatgtaca

SEQ ID NO: 1488 - protein, 55 aa, Homo sapiens
  misc_feature (1)..(1): Wherein Xaa may be any naturally occuring amino acid
XEYPCSRVANKNGAKYLAPIHPWDDYSITDGKLVTGVNANSSYSTTIRAINALYS

SEQ ID NO: 1489 - DNA, 261 bp, Homo sapiens
gtgcacgacgggctctggccgttcgagaccccaggcttcctggatgaggcgcgttcggatcgccgccagcgtctggatgtcgtcgcggaaggtttcaccgtgaacgcgtccccgctcacgcgcggagagtcctggctcgagtcgcagttctttcatagcccttttattaggccttggcggcgcgcttgccttcccctagaagaagggagagtccgggttgaagaatggactcgcgtgaaggtaaaacccgcgtattccgga

SEQ ID NO: 1490 - protein, 52 aa, Homo sapiens
MKELRLEPGLSARERGRVHGETFRDDIQTLAAIRTRLIQEAWGLERPEPVVH

SEQ ID NO: 1491 - DNA, 190 bp, Homo sapiens
tgatcatggtgcgcagggacgagctcagtgagttgcgcgttggggagttcgacgccgaactcacgcgcgacgcagggaggaatccgcgcgctggagaggaactcagcatcgagcgaactgagacggcctgaggaacggcgacagggccacccggccaaccgtgcgaaggggaggacgagcatcacctagg

SEQ ID NO: 1492 - protein, 60 aa, Homo sapiens
MLVLPFARLAGWPCRRSSGRLSSLDAEFLSSARIPPCVAREFGVELPNAQLTELVPAHHD

SEQ ID NO: 1493 - DNA, 153 bp, Homo sapiens
  misc_feature (1)..(1): Wherein n may be a, c, g or t
  misc_feature (2)..(2): Wherein n may be a, c, g or t
  misc_feature (3)..(3): Wherein n may be a, c, g or t
nnncaggcagtgggtgctgtggccgtgtgggtggccagagtccgacatcggaagaatgtagaccgcatgccaatcagcagctacaggacagacattagcatgggagacttcaggaactccagggatttgggaggcaatgacaacatgggcgcc

SEQ ID NO: 1494 - protein, 51 aa, Homo sapiens
  misc_feature (1)..(1): Wherein Xaa may be any naturally occuring amino acid
XQAVGAVAVWVARVRHRKNVDRMPISSYRTDISMGDFRNSRDLGGNDNMGA

SEQ ID NO: 1495 - DNA, 177 bp, Homo sapiens
ggagccatcttatgcctttttgcgggtcagccgcttaccatcttgagcagcacggcaccagtgttggtgtttgagaggcttctttttaacttcagcaaggaccataattttgactccttggagtttcgtctttggattggcctgtggtcagccttcatgtgtcttgtcctggtggcc

SEQ ID NO: 1496 - protein, 59 aa, Homo sapiens
GAILCLFAGQPLTILSSTAPVLVFERLLFNFSKDHNFDSLEFRLWIGLWSAFMCLVLVA

SEQ ID NO: 1497 - DNA, 515 bp, Homo sapiens
gtgcactcctcaagtgagccaggaggtctacgacctgaatgtggagctgtccaaggtctctgtgacttcagacttctcagcctgccgagtgtactggaagacgggggtctctgcggagcagaacaagcacacggagtcggtgctgcagaggagcgctgcctacatgaggcatcttctgatatctcagcaaaccctgagaaatgttccacccatagtgtttgttcaagacaaaagagacttggtcctggctgaggtagatcggttgctggcagaggctgactttggacccccagatgaaagggacgacttggacggtttgaggaacgccgatgcccaggtaccacatgactccccagaaccagccgcacacccaaatctgtgtgggattgaccacgaggcgctgaataagcaaataatggagtacaaacgcaagaaggagcgagggcttcagtgtcagagtctggcgccaccatcagggcgggagcaggcacctgaaccgacccgtctgctccgga

SEQ ID NO: 1498 - protein, 157 aa, Homo sapiens
MVAPDSDTEALAPSCVCTPLFAYSAPRGQSHTDLGVRLVLGSHVVPGHRRSSNRPSRPFHLGVQSQPLPATDLPQPGPSLFCLEQTLWVEHFSGFAEISEDASCRQRSSAAPTPCACSAPQRPPSSSTLGRLRSLKSQRPWTAPHSGRRPPGSLEEC

SEQ ID NO: 1499 - DNA, 363 bp, Homo sapiens
actagtggggctcaggtcagacttcctgtcaccagctgggcttgcacacgtagggaacactgacgaatggcttgggctttgtgccccatcaacactgggccctcatggcccagtcacaggaatatggctagcaaggcagcacgactgctttacaccagagttcaaggaaaggcatcacatccctcaagccaccccaagcaagaagtctgggggtcgccctaacctcttgctctgcctcatacctcacagacgatttgtttaccacgtcataaagattttacttcttaaatacctctcaaatccatcccctttcctctcaatggctctggccactgacttaattcaggtcctcatcattgatca

SEQ ID NO: 1500 - protein, 51 aa, Homo sapiens [sequence omitted]

SEQ ID NO: 1501 - DNA, 471 bp, Homo sapiens
ctgcagcatagatgaaatttcatctcatccccttcaaaagcttctttagactgagtcagcagatatgaccaaataatcctatttgcatcacagatccactcctttcctggcacacatgaagatgaacaactttagggtttcaggggggagcagaggggtactgtacactttctggagcagagggatgtgtgtcagcgctctgctatgcccttttcttacccaaggcggggtgagggaagagtttcctgccatttaaaccataccactcagtgactcactccatgagttcccccacccttgatacatacacatggatacccaagcccattaagtgctgggtgttcagaatacagctaaactgtctgattacaacccaaagcctgggaaaccttaatctctgttcccttttccttcatgtattccttcaagatatcccaactcagaggtcgaggctacagtgagccatgatca

SEQ ID NO: 1502 - protein, 59 aa, Homo sapiens [sequence omitted]

SEQ ID NO: 1503 - DNA, 182 bp, Homo sapiens
gtgcaccgagctgggtctcgacccaacgttggagccgaggcgtcccggggctgaacgaccctgggtgcgggtgctccggctgctgctgcggttcctgctgtgctcggctgggcggcggctgataccagcgcccaccagaagtgcaggagccatcccgcaggcgggaggaggtgctagctagc

SEQ ID NO: 1504 - protein, 51 aa, Homo sapiens
MAPALLVGAGISRRPAEHSRNRSSSRSTRTQGRSAPGRLGSNVGSRPSSVH

SEQ ID NO: 1505 - DNA, 249 bp, Homo sapiens
  misc_feature (1)..(1): Wherein n may be a, c, g or t
  misc_feature (2)..(2): Wherein n may be a, c, g or t
  misc_feature (130)..(130): Wherein n may be a, c, g or t
nnacgcgtattccgcctggcagccagccacaagcgttcgctgctggcgcacctgatcacccacggcgcgtgggagcaggtgctggtgtttacccgcaccaagcacggcgccaaccgcctgggccgagtancctggacaagcacgggcctcaccgccgtcgccatccacggtaacaagagccagaacgcgcgcaccaaagccctggccaatttcaaggccggcactgtgcgcatcctggtcgccaccgat

SEQ ID NO: 1506 - protein, 83 aa, Homo sapiens
  misc_feature (1)..(1): Wherein Xaa may be any naturally occuring amino acid
  misc_feature (44)..(44): Wherein Xaa may be any naturally occuring amino acid
XRVFRLAASHKRSLLAHLITHGAWEQVLVFTRTKHGANRLGRVXWTSTGLTAVAIHGNKSQNARTKALANFKAGTVRILVATD

SEQ ID NO: 1507 - DNA, 414 bp, Homo sapiens
ggcccggggggccccccgtgttggggaaatttccgaaaatggggttacccggcagggaaaaacccaacgcccccgggggggaaatttttttttttttttttttttcgttcttcggcgactataccgaaacaaggcttgaaatatttagaatcaaagaaagtttacgtcttgtaaattagtaaatggtaacgtgaaagaagtagacgtacgggtccagtaacagtcatttgagcttgttgacctaccaattaacacaaaaaaatgggcatgttttttaatttaaggtcaaatataaagaagaaagccatggacaatggactaagcctgcccatttcaaggaacggtagctcgaacaacatcaaggaccaacgctcagagcataactccaactcattaaagggtaaatacaggtac

SEQ ID NO: 1508 - protein, 51 aa, Homo sapiens
MGMFFNLRSNIKKKAMDNGLSLPISRNGSSNNIKDQRSEHNSNSLKGKYRY

SEQ ID NO: 1509 - DNA, 481 bp, Homo sapiens
  misc_feature (1)..(1): Wherein n may be a, c, g or t
ntgatcacgcaggtggtactggattgtacaaggcacgggaaaaatggggtaccgatccggcatcgggtgtaccccgtcatccacagggccaacctcaccccctgcatttctttaaagtctctctttgtttaggaaggagacgcgagacaggagcgtgactgggtgagcggcaagaaactgatgcgggtgctggacggcgaggcgctctggccgccgcccatgtggctgatgcgccaggccggtcgctacctgccggaattccgggccatgcgcgaacgcgccgacttcctgacccgctgtctgaccccggagatcgcggtcgagctcactttgcagccgatcggccgctacgcgatggacggcgccatcctgttcagcgatatcctgatcctgccctgggcgatgggacagtcgctgcggttcgtcgacggggaagggccggtgatgacaccgatccgcgaccgcgccggtctcgacgcgt

SEQ ID NO: 1510 - protein, 106 aa, Homo sapiens
VSGKKLMRVLDGEALWPPPMWLMRQAGRYLPEFRAMRERADFLTRCLTPEIAVELTLQPIGRYAMDGAILFSDILILPWAMGQSLRFVDGEGPVMTPIRDRAGLDA

SEQ ID NO: 1511 - DNA, 354 bp, Homo sapiens
  misc_feature (1)..(1): Wherein n may be a, c, g or t
  misc_feature (2)..(2): Wherein n may be a, c, g or t
nnacgcgtaagcacttacataacctacctgtagtcgataaagcggtattagcagacattaatctagagattaatacagcttttacgaaataattaggagtaaataatgctaaacatcacgtttatattacctgacgaaaataccatgacagttactgcaaatgaaggcgatagcctaatgcaagttgctgtcgataatggcattgaacaaattagtgcagattgtggcggttgctgctcctgcgccacgtgtccctgtgtcattgatacggattgggctggcaaaatggccccgccagatgacaatgaaatgagccttttaagtaacgccattgatgattgtcaaccaactagt

SEQ ID NO: 1512 - protein, 83 aa, Homo sapiens
MLNITFILPDENTMTVTANEGDSLMQVAVDNGIEQISADCGGCCSCATCPCVIDTDWAGKMAPPDDNEMSLLSNAIDDCQPTS

SEQ ID NO: 1513 - DNA, 516 bp, Homo sapiens
ggatccttcacctcaggaaacgcaatcccttccctggcctgtgaatatttcatcagcagattaaaaattgaagctgaacctccctgctcccccgggagggggggaggaggggccggctccggttcaagccgggttggagatttttcttggttaatgggcctggcgcaattaaaaaaggaacttgcgggtaaaaaagcccgttctgcgcccctttttatttaagcccgaaaagtaataaccaatccgctgctgcgaacttgtttttaaccatcagaacgcgaggtgaatgacatggagttgggttgatcaaagggggggtgtggcggggccccgggaaaaattaaaggaggcccccccagcagctgcgcttctgccggggcgtggggtgtgccagtgtgtgttgggtcagatgggtgctctgttctgtgtgcacgtgtgcgtgcatgtggcatatgtgtgttgggaccagaagggcctgggggctgaggttcagagtcctaccaagtttgcctgcag

SEQ ID NO: 1514 - protein, 59 aa, Homo sapiens [sequence omitted]

SEQ ID NO: 1515 - DNA, 365 bp, Homo sapiens
  misc_feature (262)..(262): Wherein n may be a, c, g or t
  misc_feature (263)..(263): Wherein n may be a, c, g or t
tgtacatgcacgaagcctgttttacctggatggttttactgtttttccattggattatgttccatttagctctcaactctttttggccattggtcacaacccatacctcatttttgttagtatgccttgactattctgccttatctcttttaataagattcaattcagtctttgaattatacttgctagtgggtagctctagatcaatgtctacagcaaatctgtttggcctcccaagatccaaatttaattctaatggacnncaacccaccaacacatctctctctttacccactcaatagaaaaaagaccccccaaaattttcacttatatgtgctttgtcatatctctcaatcaatttccag

SEQ ID NO: 1516 - protein, 98 aa, Homo sapiens
  misc_feature (86)..(86): Wherein Xaa may be any naturally occuring amino acid
MHEACFTWMVLLFFHWIMFHLALNSFWPLVTTHTSFLLVCLDYSALSLLIRFNSVFELYLLVGSSRSMSTANLFGLPRSKFNSNGXQPTNTSLSLPTQ

SEQ ID NO: 1517 - DNA, 184 bp, Homo sapiens
gtcgacaaatttaaggccagggtctaccgcgtgccaattgatgtcggctttgactgccccaatagagacggcacgaaagcgtttgggggctgcaccttttgcgacgagagaggctcgggcgcccctacaatcaatgctgctgttgctgtaaaacaacagttggatgaaggtgttttgcgaattc

SEQ ID NO: 1518 - protein, 61 aa, Homo sapiens
VDKFKARVYRVPIDVGFDCPNRDGTKAFGGCTFCDERGSGAPTINAAVAVKQQLDEGVLRI

SEQ ID NO: 1519 - DNA, 330 bp, Homo sapiens
accggtatcgaaaagaacatggaatttcgcacctggactcagggcgtcaccttcatgacccggtgcaactatgttgcgaacttcttcaacgagttggtgtattgcctggcggtcgagaaactgctcggtattaccgacgatgtccccgagcgtgctcgcgtacttcgggtcatgattaccgagttgaaccgcatttcatcccacctcattgcggtgggtactggcggtctggagcttggtgcttcctcggtggctgaggttggcctgagggaacgcgagatcattctggagttcaaccaggccgtcacgggtctgcgcatgaacaacgcg

SEQ ID NO: 1520 - protein, 110 aa, Homo sapiens
TGIEKNMEFRTWTQGVTFMTRCNYVANFFNELVYCLAVEKLLGITDDVPERARVLRVMITELNRISSHLIAVGTGGLELGASSVAEVGLREREIILEFNQAVTGLRMNNA

SEQ ID NO: 1521 - DNA, 348 bp, Homo sapiens
agatctgctgagcggcatcgcgggcaattacataagctgcctcggtgattacccggaactgtgatgcgagctcccggttctcgaaagacaagcctgaaagtttgcctgcttggggagtgtaagtaccggggcgccccccaccccggcctgggtagctaggatacgcctcgcaccacggcgcccacttgtgcgatgggcgtcgggtgctgatgctgctgtccccaaagaaccggttaccgaggcagggactaagtgggggcatccggaattgatcgcagaggaggagtcagtcagaactgaagtttcattgggtcttcagagctccaagtcttccctcggaggtgttgg

SEQ ID NO: 1522 - protein, 87 aa, Homo sapiens
MPPLSPCLGNRFFGDSSISTRRPSHKWAPWCEAYPSYPGRGGGRPGTYTPQAGKLSGLSFENRELASQFRVITEAAYVIARDAAQQI

SEQ ID NO: 1523 - DNA, 416 bp, Homo sapiens
ctgggtgagagaacaacactccatctcaaaagaaaaacaaaaacaaaacaaagaagagcttagacactcttcaataaaggccaacttcttcccctgcttgagtggatgttaccctctggggtaacattatcttaacaggaatgaatgcttccaccctgacctctgccagggagctgaggtagccacaaaagagttgactgctttgaggaacatgaggaagatgacaatgatagtgctgatggcagtgtttattatgtgctgggccccatgctaggtgtgtccatgtacgatgtaatttaattctcatagcaacactacaataacaataatgactagtatctgttcattagtattttacatgctagtttttatgtcaaactctacaggtgacaagcaatctctgccctgttagatct

SEQ ID NO: 1524 - protein, 78 aa, Homo sapiens [sequence omitted]

SEQ ID NO: 1525 - DNA, 282 bp, Homo sapiens
  misc_feature (1)..(1): Wherein n may be a, c, g or t
ngtcccaggatgacaccaagccatcctttcccagaaaatttgaataggggtagtggtgggcctgcctgaatctacagtaacagttttcaatcagttttgccccacaggggacttctggcaatgtttgaagacattgtagttggtcacaattggggaagtgctgctgacataagtagaatccaggggttaattctatagggaataggacagtccccatcaacaaagaattatgcagcccaaaatgcatgtcaagattgagaagactgattgatctagaccccc

SEQ ID NO: 1526 - protein, 82 aa, Homo sapiens [sequence omitted]

SEQ ID NO: 1527 - DNA, 314 bp, Homo sapiens
ctgcccagcggcatcaccccgttgaataacaacggcatcaaccaggatggccccactaccttgtccggcaccgcccagaccggcaagggtaccgtcatcgcgctgctatccggcggcgttaatacccaagagtcccactgcaatttcgcccccactgccgctttccttgaggtgaagtaaatggcggcggacctccatccggtcaagcgcgagacctttaataccgccgattacaccaacaccgaccccaaaggtttcctgcgcgaggtcgatacctacaccgaaaccgagtttggtctgtacatggcccgcgg

SEQ ID NO: 1528 - protein, 59 aa, Homo sapiens
LPSGITPLNNNGINQDGPTTLSGTAQTGKGTVIALLSGGVNTQESHCNFAPTAAFLEVK

SEQ ID NO: 1529 - DNA, 324 bp, Homo sapiens
  misc_feature (1)..(1): Wherein n may be a, c, g or t
nacgcgttgcacaatgcggcgctggcggaaatcgaagacaccttcggttcggtgctgagcactgcgcaaatcgtcgccttgcccgtgcactgatccaccggactgctcgcctggagtcacactcgcttcatgaaccagttatctgccatgcgcgcctttcggtgcatcgtcgaggccaagggcttctctgcggcggcagagcggctcgacaccacccactcgacgatttcccggcaattgcagcaactggaagtggcgctgggcgttcagttgatcaaccgcaacacccggcgtttcagcctgaccagccccggtgagcactac

SEQ ID NO: 1530 - protein, 65 aa, Homo sapiens
MNQLSAMRAFRCIVEAKGFSAAAERLDTTHSTISRQLQQLEVALGVQLINRNTRRFSLTSPGEHY

SEQ ID NO: 1531 - DNA, 321 bp, Homo sapiens
cccaccacgctcggcgtgagcaaacagctggtccccgtctacgacaaacggatgatctattacccactcagcaccctgatgttggccgggattcgcgacatcatgatcatcaccacagaagacgatgcaccgcagttccagcggttgctcggcgccggctcgcagttcggcgtcgacctgacctaccagatccagcacgagccgaatggtctcgcacaagccttcgtactcggagccggccacatcggttcggaatccgcggccctggtcctcggcgacaacatcttctacggcccaggtctgggcagtaagctcacgcgt

SEQ ID NO: 1532 - protein, 107 aa, Homo sapiens
PTTLGVSKQLVPVYDKRMIYYPLSTLMLAGIRDIMIITTEDDAPQFQRLLGAGSQFGVDLTYQIQHEPNGLAQAFVLGAGHIGSESAALVLGDNIFYGPGLGSKLTR

SEQ ID NO: 1533 - DNA, 378 bp, Homo sapiens
gctagcggtactaatactactggtgctagtactaatactaaagctaacatttgttgaccttatattgttgccagaaagtgtaagtctttcattttttcttagtcccaaagaatacgtgtacaagatgaataccactaataattttccagaggaggaaataggcttagagaaaagtgtctgggccaaaataatgcacatccaaagcggtggagctggaatttgaagcgaaaggtcctgatccccagaacccatcatccttttacctgttttaccaagcatttcagcagaaacctggcacttgtacctcattgaccattactggcaagtcttctcatttgtatatatgtgcattcttcatgatccttttgaaagagatct

SEQ ID NO: 1534 - protein, 103 aa, Homo sapiens [sequence omitted]

SEQ ID NO: 1535 - DNA, 438 bp, Homo sapiens
  misc_feature (1)..(1): Wherein n may be a, c, g or t
  misc_feature (175)..(175): Wherein n may be a, c, g or t
ntgtcgggcttgaggttgcaggggcgcaaggtgctggtcgtcggtgcggggcacgtggcggagcgtcgcgtggtgcggttgttggaggcgggcgccgacgtgcatgtcgtggccccaaattctggctccagcttacccgcatgttccgtaaaggattggtgaacctggagcgtcngggctttccagactgaggatcttgacggagtctggttcgtccaggcactcacgaacgatccagaagtcaatgccctggtggccgaagaggccgacaggcgaggcatcttctgcgtgcgtggcgataacagccgcaagggcagtgctttcaccccggccacccagcaggctggcggcatgacagtcagcgtcgtcggtgaccgcaccccacgtcgttctgccaggctgcgggatgaggtgctgcgagccttgcaaggccgatcg

SEQ ID NO: 1536 - protein, 53 aa, Homo sapiens
  misc_feature (1)..(1): Wherein Xaa may be any naturally occuring amino acid
XSGLRLQGRKVLVVGAGHVAERRVVRLLEAGADVHVVAPNSGSSLPACSVKDW

SEQ ID NO: 1537 - DNA, 322 bp, Homo sapiens
atgggggcagcgtctacctattacacggactggtatcggaaagatcgtgttttaggttataagcccatgtgggaaacctacctgtcgaaggaactaccgccggttatcaatcacacactcaacaccactgggcgtaatgctatcggcgggtattccatgtccgccgggaccgctttagcgttgcttgctaaccatggtaatgtttttaaggcgggggcgtcgtattccgggtgcccagtatcgtcaaatcttcccatgaagatggtgacgatgaactcgatgatcctcaacacgccaggtgtgaacccgctgaacgcctagg

SEQ ID NO: 1538 - protein, 106 aa, Homo sapiens
MGAASTYYTDWYRKDRVLGYKPMWETYLSKELPPVINHTLNTTGRNAIGGYSMSAGTALALLANHGNVFKAGASYSGCPVSSNLPMKMVTMNSMILNTPGVNPLNA

SEQ ID NO: 1539 - DNA, 332 bp, Homo sapiens
  misc_feature (322)..(322): Wherein n may be a, c, g or t
  misc_feature (323)..(323): Wherein n may be a, c, g or t
  misc_feature (325)..(325): Wherein n may be a, c, g or t
  misc_feature (326)..(326): Wherein n may be a, c, g or t
  misc_feature (328)..(328): Wherein n may be a, c, g or t
  misc_feature (331)..(331): Wherein n may be a, c, g or t
gcgcgccgttgctggtcaagatcgtctgggcggccggcattaccgcgctgatcgtcagcgtgacggcgggcgtgggacgcatgctggcctgagcgcccgttagtgaacgattgcccagcaacatttcgggataaataacaaagtcagcgatgacgagaggatggcatgctgaattggtctcaactttctttacggcagcgcatgatcagcgtgctgttcctgtcctgggtctgtggcagcctgtatgccgtctgttttcctgagcagccgcatgtcagcttgccgcaggtgggcttgcccttgctgatgctgggatttttcnncnncnccnc

SEQ ID NO: 1540 - protein, 55 aa, Homo sapiens
  misc_feature (53)..(53): Wherein Xaa may be any naturally occuring amino acid
  misc_feature (54)..(54): Wherein Xaa may be any naturally occuring amino acid
  misc_feature (55)..(55): Wherein Xaa may be any naturally occuring amino acid
MLNWSQLSLRQRMISVLFLSWVCGSLYAVCFPEQPHVSLPQVGLPLLMLGFFXXX

SEQ ID NO: 1541 - DNA, 470 bp, Homo sapiens
  misc_feature (1)..(1): Wherein n may be a, c, g or t
  misc_feature (300)..(300): Wherein n may be a, c, g or t
ncccggactgaccaggggcccacacagagcttgcttctgtgtcaagggcaaccagctaagtcttgcacttactcacccacgtgctccctcccacaatgggctgagcacggcaggccaagtagatggggcactcctgctgtgagtccagcaaaggggccaagaaaaatcctacatcaatctctatttcctcaaaacttacaatttcagtacttgaagatacttcctttaacaagccaggataaagaatatggaatattcagctagtctcagagcatgcgctacagagagcgtggggaaacntatcctaggaagggaaaccttggggaacctaagagattcttcaaacctaaatttgacactgtgattttactttttctaatgtcagcacatagatatatggtatacgccacaggatccgagacacaatgcaaaaagaggtgaggaagtagggaagaaataccccctagctg

SEQ ID NO: 1542 - protein, 55 aa, Homo sapiens
MRYRERGETYPRKGNLGEPKRFFKPKFDTVILLFLMSAHRYMVYATGSETQCKKR

SEQ ID NO: 1543 - DNA, 368 bp, Homo sapiens
gggcccctctgaggagcgggttctgagtggaaatgctggagataggaaggaggaaactgtgggaagagctggcggagagaattctcacctgggaagaagaaatagcaagtgcagctgccgatctggaaaggaacgctcgagaaggaaaacaggccggcaaggctagggcatcaggaatcggaaggcaggagcagagaggctggaaagccagctgtggtggagggccacagactacggctcccatttgcctgccttatcacccagcttcatgagctgtcccatgaccccatgtcacttggcccactgtcttggtatgggcaccagcctccaagctggggaacctgagttcttagcctagttctaactct

SEQ ID NO: 1544 - protein, 81 aa, Homo sapiens [sequence omitted]

SEQ ID NO: 1545 - DNA, 232 bp, Homo sapiens
ggatccccgcagcccactttgtgatggctttgctgtcacccttccatgctagccagtcatcttccccatggccgacagccggtcctgtccctgactgtagaatcctcatgcccacgagacaggtgtccgctcatttccataactcccagctgagatccaggctctgctggagctggggttagtaaccgtcccctctgaatacaggagggaaccaaggctctgagcagagaag

SEQ ID NO: 1546 - protein, 52 aa, Homo sapiens
MALLSPFHASQSSSPWPTAGPVPDCRILMPTRQVSAHFHNSQLRSRLCWSWG

SEQ ID NO: 1547 - DNA, 357 bp, Homo sapiens
ggatcctgtctggccctcgtgcaggcgctgtgcccgccagcttttgtcaccggactgccaccacattgcgccctgtccgtgctggctgaggttgagcacgtcgaccgtggccgcgtctccggcccaactggctgggtcgattccttgggcaatggccagtgggtcaccgactggccgtggcggtcagatcgacgcaaccgacccttcacttgtccatattttttccggccaatccggtgggcaatgacgacgacgcggacgtcttgtcggcccgaggcagagcaccgcatcgatgtgctgcgggacctcttcttgacgtaagttgaggcctcaccatatgaaagcggtgggacgcgt

SEQ ID NO: 1548 - protein, 106 aa, Homo sapiens
GSCLALVQALCPPAFVTGLPPHCALSVLAEVEHVDRGRVSGPTGWVDSLGNGQWVTDWPWRSDRRNRPFTCPYFFRPIRWAMTTTRTSCRPEAEHRIDVLRDLFLT

SEQ ID NO: 1549 - DNA, 339 bp, Homo sapiens
  misc_feature (339)..(339): Wherein n may be a, c, g or t
ggatcctttaccccgcacgccggaacagtgctggaacaaggtgacgagttgctaatcgtcgtgccccaggggaagcgtcggaccgtcgctgagaggcttatcgagatcagtcggggcggtcgtttggcacgctggcacggcctgcgggtgcagactgctgactgaggagccgctgcgcaagagttccggtaagccctaggagggctgttcccccggcgacgcgagtatggatggagtcggtgagggagatggcagacacaccgacccgttgactttcactgacttcggcgcagtcgtcttgaagtttgggtcgcgatcgctgagtaccacctcgaccgn

SEQ ID NO: 1550 - protein, 54 aa, Homo sapiens
GSFTPHAGTVLEQGDELLIVVPQGKRRTVAERLIEISRGGRLARWHGLRVQTAD

SEQ ID NO: 1551 - DNA, 351 bp, Homo sapiens
  misc_feature (1)..(1): Wherein n may be a, c, g or t
  misc_feature (2)..(2): Wherein n may be a, c, g or t
  misc_feature (12)..(12): Wherein n may be a, c, g or t
  misc_feature (30)..(30): Wherein n may be a, c, g or t
  misc_feature (36)..(36): Wherein n may be a, c, g or t
nnaccccctttncacttttttcattttatncgatanaaagaagagatgagcagcacatacatagtgtgataaagaggaaaaaagcagaagaagcagaagaagaagagcatagtaaaaaagtagtgctaaaaaggtgcggtacggaaacacaggaaatatatcagagaagaaataatgtcacgtcctgaggagttggcaccaccggagattttctataatgatagcgaagcacacaagtacacgggttcgaccagagtgcagcatatccaggcgaagatgacgctgagggcgttggagcttttgaatctgcagccgtgcagtttcattctggatatcgggtgcgggtccgga

SEQ ID NO: 1552 - protein, 59 aa, Homo sapiens
MSRPEELAPPEIFYNDSEAHKYTGSTRVQHIQAKMTLRALELLNLQPCSFILDIGCGSG

SEQ ID NO: 1553 - DNA, 328 bp, Homo sapiens
tctagagttcaggaggcgccttccagtctgaacctctcctccaccctagcacagagggaggtaggaggggagaccgaggcactagggtgtgccccaggtcacacggggggggccatggatgggcaggcacacatctgcctaggtgctcctaccacctgccttccctcctgggacagcagaaaggtgctccagtgctcagggtctgtccccactgcctcctggaggcagccccacctgcacccctcttccttcctccatcattaccatcagtatatgaacgtgtcccagtaacaaacgggtggggctctcttcccttccccttccccct

SEQ ID NO: 1554 - protein, 58 aa, Homo sapiens
MDGQAHICLGAPTTCLPSWDSRKVLQCSGSVPTASWRQPHLHPSSFLHHYHQYMNVSQ

SEQ ID NO: 1555 - DNA, 303 bp, Homo sapiens
  misc_feature (1)..(1): Wherein n may be a, c, g or t
nacgcgtggtttatcttcagcatggtgatcgcgattggtttagccgttatggctgcggtcgtattcatcgagcaaggccagcgacgtatcccggtgcagtacgccaagcggatggtggggcgccgaatgtttggtggctcgacgacgtacattccgctcaaggtaaaccaatctggcgttatcccggtcatctttgcctcgtcgatcctgtaccttccggtgctctacgcaactttccggccgcagacgtccgcggcaaagtggatcggtcactacttcacgcgcggtgaccatccggtgtac

SEQ ID NO: 1556 - protein, 101 aa, Homo sapiens
  misc_feature (1)..(1): Wherein Xaa may be any naturally occuring amino acid
XAWFIFSMVIAIGLAVMAAVVFIEQGQRRIPVQYAKRMVGRRMFGGSTTYIPLKVNQSGVIPVIFASSILYLPVLYATFRPQTSAAKWIGHYFTRGDHPVY

SEQ ID NO: 1557 - DNA, 211 bp, Homo sapiens
  misc_feature (1)..(1): Wherein n may be a, c, g or t
ntctaggggggtcactctggcagccatggacatgactgcttgctcctgagaagagcagagacatggaatgacagtccaataatttgatatgcccacccagcttccatctccctgtgctgtactaatggtgccatgcttcctgtggagatccatcccatattgttaagtcaggctgatggcctagccactgccacagccaagcagtgggccc

SEQ ID NO: 1558 - protein, 51 aa, Homo sapiens
  misc_feature (51)..(51): Wherein Xaa may be any naturally occuring amino acid
MDLHRKHGTISTAQGDGSWVGISNYWTVIPCLCSSQEQAVMSMAARVTPLX

SEQ ID NO: 1559 - DNA, 288 bp, Homo sapiens
gctagcaggcaaggtttcttcggatggagaacttcttccaataaagatgaccccgattttggtatgtgcgcatcacatattccatttgtattcgtggagttcgataatggagagcataaacttattgcacatttagcacggaagaataaacatgtggaaatgctggaaagagttcaaaaatgcttagtggtatttcagagcgtcgattcatacatttctccggcgtggttcccaatgaagaaaaagacccataagttcgtaccaacatgggattttgccgctgtgcac

SEQ ID NO: 1560 - protein, 96 aa, Homo sapiens
ASRQGFFGWRTSSNKDDPDFGMCASHIPFVFVEFDNGEHKLIAHLARKNKHVEMLERVQKCLVVFQSVDSYISPAWFPMKKKTHKFVPTWDFAAVH

SEQ ID NO: 1561 - DNA, 241 bp, Homo sapiens
gtcgaatatcatgcagcgatcatggctgaggagcagaacaccgatctgaccactgagatcgagggacaggatcacggcgtgcggttgccgcccgacccggccattcgcaaacttgctaagcgtggacgtgcggagttcattacggttgtcaaggagcacccttcctcatccctgtgctgggctctcctggctgaagggtcgctgttgagcgatacagatgccgctgatgtcgccgcgtacg

SEQ ID NO: 1562 - protein, 73 aa, Homo sapiens
MAEEQNTDLTTEIEGQDHGVRLPPDPAIRKLAKRGRAEFITVVKEHPSSSLCWALLAEGSLLSDTDAADVAAY

SEQ ID NO: 1563 - DNA, 439 bp, Homo sapiens
  misc_feature (439)..(439): Wherein n may be a, c, g or t
ggatcctggttagccctacccttttgtggaatttcttaggccaagacagttactgttgttaatgattttagaaagacgttaaccttggggtcctgagaacacacacagtcatttgtggagaacacagcatttcctctaggaaggagctggcagagttgagtgccatgatctgtggctttgggtcctgagtgacttttcaccagtgtgggtgagtacagcataaaggaagactttactctggttcctggcatcagagattgaacctgcttggacttctcagcctctagaacagagacacaggtgtctactgtttataatgacctagtttgctattttgctatatcggcctgaatgaattaagaagccatcgaagcagacgtggcctttaaaaatggcttgatacacaaggggaaaaggggctttataattctgtgggctn

SEQ ID NO: 1564 - protein, 71 aa, Homo sapiens
MPGTRVKSSFMLYSPTLVKSHSGPKATDHGTQLCQLLPRGNAVFSTNDCVCSQDPKVNVFLKSLTTVTVLA

SEQ ID NO: 1565 - DNA, 522 bp, Homo sapiens
gccggcctatctgccgcctaccacctcgcaatgctcggccacgacgtcgagatccacgacgcgggcgacaaagtcggcggcatgatgcgctacggcatccccgaataccgtctaccgcgcgaaatcctcgacgccgaggtagcacgtttcaccgacctcggcatcaagatcgtcctcaaccatcccgtcaacgacctcatggaagaaaaggccaaggggcgtttcgacgccgtcttcgtggccatcggcgcccatctatccaaacgcgtcgacatcccgaccgttgatgcctcccgaatggtcgacgccgtgagctttttgcacaacgttgcctccggcgagaagccactcattggacgccgcgtagctgtttacggcggcggcaacaccgccatggacgccgcgcgcgtcgccaagcgcctcggcgccgaggagtccatcgtcgtctaccgacgcaccgcagagcagatgcccgcccacgccgaagagcgcgaagaagccgagcgcgagggcgtccagatg

SEQ ID NO: 1566 - protein, 174 aa, Homo sapiens
AGLSAAYHLAMLGHDVEIHDAGDKVGGMMRYGIPEYRLPREILDAEVARFTDLGIKIVLNHPVNDLMEEKAKGRFDAVFVAIGAHLSKRVDIPTVDASRMVDAVSFLHNVASGEKPLIGRRVAVYGGGNTAMDAARVAKRLGAEESIVVYRRTAEQMPAHAEEREEAEREGVQM

SEQ ID NO: 1567 - DNA, 354 bp, Homo sapiens
  misc_feature (1)..(1): Wherein n may be a, c, g or t
naagcttttggtaaaacggtaactattccacaatctaaaggtgcatatcttgtgattgaacatacagaagcgttacacgtaattgatgtgaattcgggaaatatttctcgtaattctaaaaatcaggaagattcagcttttgccgtaaacaaaattgctgcttctgaaattgcacgtcagttgcgattacgtgatatgggaggaattgttgtggtcgattttattgacatgacggatgtagaacataagaaagaattgttcgaacatctgagagctgaaatggcgaaagataaagcaaaacataagattttgccaccaagtaaatttggattgattcagattacaagacaacgc

SEQ ID NO: 1568 - protein, 118 aa, Homo sapiens
  misc_feature (1)..(1): Wherein Xaa may be any naturally occuring amino acid
XAFGKTVTIPQSKGAYLVIEHTEALHVIDVNSGNISRNSKNQEDSAFAVNKIAASEIARQLRLRDMGGIVVVDFIDMTDVEHKKELFEHLRAEMAKDKAKHKILPPSKFGLIQITRQR

SEQ ID NO: 1569 - DNA, 428 bp, Homo sapiens
  misc_feature (327)..(327): Wherein n may be a, c, g or t
  misc_feature (352)..(352): Wherein n may be a, c, g or t
  misc_feature (361)..(361): Wherein n may be a, c, g or t
cctaggtcccccacatcaattctccagttcttgtccattcacctgaaaaatgggctaataacacctacctacaaggttctgcaacacaaagggactcagaacacagggcgggtacaatgcaaggggaggcggtgggctctgatctaactgcggagaatatgcccctgcctaaatgcagtcttgctccacttaaaagcaaaacaaacaacaagtgaaaacactctgtgatggccaaaacaaaacattgcaaggtgagtttgggcttgaagctacctgttttgaactccacagggactaagtgagacaatatttgagagagaggccttnaaatccacattccctagagtggacnatgcccacnatttacctcctaaggtgagtgagcatgaggaccttccctccatgaagggtggctctgacggggtggg

SEQ ID NO: 1570 - protein, 90 aa, Homo sapiens
  misc_feature (4)..(4): Wherein Xaa may be any naturally occuring amino acid
MWIXRPLSQILSHLVPVEFKTGSFKPKLTLQCFVLAITECFHLLFVLLLSGARLHLGRGIFSAVRSEPTASPCIVPALCSESLCVAEPCR

SEQ ID NO: 1571 - DNA, 336 bp, Homo sapiens
  misc_feature (238)..(238): Wherein n may be a, c, g or t
  misc_feature (259)..(259): Wherein n may be a, c, g or t
  misc_feature (260)..(260): Wherein n may be a, c, g or t
ggcgcccgtcgggctgttccttcagcgatgcggccagtggttcgctggacttgcgggcgatgtccagcaggcgagacggctccgtggccagccgctgtcgcgcgggcggcgtagctgctcctgtaggcggcctgaggtggcctgtcgaggttgggatggcctggatgctgcgcaccaggctctggccgtcgtcgcgttccaccaggttgccggcggacaccacgtagtggccgtcctncgttgcgggcgatggctaccnngtggccgccgcctcgtgttcgccgtagcccttgagattggcgtagtggcggatgttctgcctcatctcgatgtaca

SEQ ID NO: 1572 - protein, 52 aa, Homo sapiens
  misc_feature (35)..(35): Wherein Xaa may be any naturally occuring amino acid
  misc_feature (42)..(42): Wherein Xaa may be any naturally occuring amino acid
GGLSRLGWPGCCAPGSGRRRVPPGCRRTPRSGRPXLRAMATXWPPPRVRRSP

SEQ ID NO: 1573 - DNA, 189 bp, Homo sapiens
gttgccttcccgttcctgaactccctgagcttctacctgctgctggcaggcgtgctgctggtcaacatctcgctgggcgttggtgaattcgccaagaccggctgggttgcctatccgccgctcgcgggcattcagtacagccctggggtgggtgtcgactactacatctgggcgctacagctatccgga

SEQ ID NO: 1574 - protein, 63 aa, Homo sapiens
VAFPFLNSLSFYLLLAGVLLVNISLGVGEFAKTGWVAYPPLAGIQYSPGVGVDYYIWALQLSG

SEQ ID NO: 1575 - DNA, 297 bp, Homo sapiens
gtcgacaactccatccagtacagcgacttcaactcgccgaaagagcgttcctggatgctgcgctatgacctgaacttcaccagctacggcattccaggcctgacgttcatgacgcgctacgccagaggctcgggtgcggattactcgaacgctaaccagttctacatgcgcaccgacgacaacggcaacccgctcgacaatcagaagcgttgggagcgtgacgtcgaagtcaaatacgttgtccaaaccggtccggcaaaagatctgtccttccggttgcgccaggcaaccacgcgt

SEQ ID NO: 1576 - protein, 99 aa, Homo sapiens
VDNSIQYSDFNSPKERSWMLRYDLNFTSYGIPGLTFMTRYARGSGADYSNANQFYMRTDDNGNPLDNQKRWERDVEVKYVVQTGPAKDLSFRLRQATTR

SEQ ID NO: 1577 - DNA, 418 bp, Homo sapiens
  misc_feature (1)..(1): Wherein n may be a, c, g or t
ncgcacatttgaccaagggaagaatcagcccagaaatgtacactgatgagtctgctatttcttgctagctatctactgtccttgacgtctactgcgtcagcactagcacacagaagatgtctggtcctagacactgcaccgtaccagtgtcttgtgggtgtttggtgcctgtgagcagagcaggagagattccaggtgccattgagagtgatggtacaaattcaccatcaggagccccaagagtcctgcaagccacattataaatgctttggctagccctggggagatgaagggagtatgactgggaggcttatcaggatcacatcttaaagagaaccaatgggttttatacattttaaagtataatgcgatgccacgttccctctggtgggtgctgcaaggtcacgggaagacttgg

SEQ ID NO: 1578 - protein, 75 aa, Homo sapiens [sequence omitted]

SEQ ID NO: 1579 - DNA, 448 bp, Homo sapiens
  misc_feature (1)..(1): Wherein n may be a, c, g or t
  misc_feature (2)..(2): Wherein n may be a, c, g or t
nntgcagccgcgtggaacagcgtttcttctcgccgtgccgataataacaaccaagacatgatggacccccaaacggcttcctcagacaggtacaatgagaaaatgatgagagaagaaaatagcggcgtctctgcttcttcttacaccactaaagtgcagggatatcccgcaagtattccatcattcaatcaggaaactgaggaaaaggaaacctacgccacggtgtgggtgatcggcacaatgtcccaagaaaccaaattatggatgagactaatccttcggctaacgttctaaacgctactgatcatagtatttcgcaccctgagaataaggtcttgcataagtagtttttgtttttcctacagtttttatttataaccaaccttatacttttatatccttgtctacatattattgtcataacgaattttttattggttaaatgcat

SEQ ID NO: 1580 - protein, 97 aa, Homo sapiens
  misc_feature (1)..(1): Wherein Xaa may be any naturally occuring amino acid
XAAAWNSVSSRRADNNNQDMMDPQTASSDRYNEKMMREENSGVSASSYTTKVQGYPASIPSFNQETEEKETYATVWVIGTMSQETKLWMRLILRLTF

SEQ ID NO: 1581 - DNA, 320 bp, Homo sapiens
cggccggaacagcatgtatgtaccggtgaggatgtatggttcaagcgaatatcccctacagccgatctcatccaatggaacaacgagcagaaacctgaacaacttcgggaagctctcccgcgccgaaaagcgcgtcatgatcttcatacggcgggacatccccaaacagaagcagcgtcagcagaccagcgagcatcctttcggaacgatcaagcattacgatggcgccggatattttctatgcaagggaaatgaaaaagtgacagccgaatacgcgctgagctgtcttggctatgatatcaggcgggctgtcaagatct

SEQ ID NO: 1582 - protein, 102 aa, Homo sapiens
MYVPVRMYGSSEYPLQPISSNGTTSRNLNNFGKLSRAEKRVMIFIRRDIPKQKQRQQTSEHPFGTIKHYDGAGYFLCKGNEKVTAEYALSCLGYDIRRAVKI

SEQ ID NO: 1583 - DNA, 258 bp, Homo sapiens
aagcttcatggacgccatatgcccagaaggcctgttaacaaagaaaacttggaatcagtggcaatctggaagatttttttttccttttaattgtaaatggttctttgccagtttaagcaagccggtgaaatgttgacctgttttgatatgtattgtcagacttttgaccgtgaagtggctgttgatctacaatacaggtttttcctttgtcttggtatatgtaattacatggatactattaaaatagacgggtctaga

SEQ ID NO: 1584 - protein, 54 aa, Homo sapiens
MVLCQFKQAGEMLTCFDMYCQTFDREVAVDLQYRFFLCLGICNYMDTIKIDGSR

SEQ ID NO: 1585 - DNA, 288 bp, Homo sapiens
atttggaatagccctatttttgccccttggaaaggagaaagcgaacagagcagtgtacttgccttgcccgttcatttgcataatccaccttataaaatgaccgcactttcgctaggcgaacaagtgctttggattcatcaagtacccgcgaaagtaggcgagcgagtgcgagtttgtatttatagttcagatgtttctatcactctgcaaaagccagaacaaacaagcattcgtaatattttacgtggcaaaattacacaaattgagatacaagattctcgagtggat

SEQ ID NO: 1586 - protein, 96 aa, Homo sapiens
IWNSPIFAPWKGESEQSSVLALPVHLHNPPYKMTALSLGEQVLWIHQVPAKVGERVRVCIYSSDVSITLQKPEQTSIRNILRGKITQIEIQDSRVD

SEQ ID NO: 1587 - DNA, 397 bp, Homo sapiens
atcgctaagcatgcggcgaactgggaaggggtggactacctgatcttcaacacttacatctggtggatgaacacgccacagatgaaaactctgcacggtggatctttttcgaggaaacatgtcaagtatgacgaaatcgaacgtgtggaggcgtaccggaaggtcctcaagacatggtctagatgggtagaggcgcacgtagatcccaagagaacaacggtcttattcatgagcgtgtcaccagtacatgtgcagagcgaaggttggggcagccccaacgccgtaaaatgcttctccgagacacagccggcgatcagctacaataagaaactggaggggggcacggactgggacctcttcgcgaccgcccagcgcgtgacggggtcgatgaagaaag

SEQ ID NO: 1588 - protein, 132 aa, Homo sapiens
IAKHAANWEGVDYLIFNTYIWWMNTPQMKTLHGGSFSRKHVKYDEIERVEAYRKVLKTWSRWVEAHVDPKRTTVLFMSVSPVHVQSEGWGSPNAVKCFSETQPAISYNKKLEGGTDWDLFATAQRVTGSMKK

SEQ ID NO: 1589 - DNA, 495 bp, Homo sapiens
  misc_feature (1)..(1): Wherein n may be a, c, g or t
  misc_feature (2)..(2): Wherein n may be a, c, g or t
nnacgcgtcgtcactttcgacgtctcgacgccgcgaccgtgttggaggccgacggtgacggatcctaatcgcgtcgagccgacgttaaccggaccggtccttatcgttggtgtcggccttattggggcatccatcggtaaggccctgatgcgggagggaaccgatgttcatctgtgggacatcgatcgcgataattccctcattgcagccgggcacggagcgggcagactcggtaacctggctgacgatgcgtaccggatgatcgtgatcgcgaccccaccggccgttgtcgcgcagacggtcgttgagcggctgacgcgacatccccaagccgtggtcaccgacaccgcgtcagtgaagggggctgtgttggccgagttgaccacgctggctaccgagcacgaaatcgacatttcccgctatgtgggttcccaccccatggccggaacccagtgcaccggccctctgacagcctgcagcgaactcttcgtcgac

SEQ ID NO: 1590 - protein, 165 aa, Homo sapiens
  misc_feature (1)..(1): Wherein Xaa may be any naturally occuring amino acid
XRVVTFDVSTPRPCWRPTVTDPNRVEPTLTGPVLIVGVGLIGASIGKALMREGTDVHLWDIDRDNSLIAAGHGAGRLGNLADDAYRMIVIATPPAVVAQTVVERLTRHPQAVVTDTASVKGAVLAELTTLATEHEIDISRYVGSHPMAGTQCTGPLTACSELFVD

SEQ ID NO: 1591 - DNA, 201 bp, Homo sapiens
cgcgttaagttagcgacagagctttccaaacccgataccggtaaaaaccctttaatttttaatgacccgacacttggtctgcattttgccgatattaaacaacttctcgaagtgttacaccgcttgcgcgatcaaggcaatactatcgtggtgatcgaacacaatttagatgtgatcaaaaccgcagactggattgtggat

SEQ ID NO: 1592 - protein, 67 aa, Homo sapiens
RVKLATELSKPDTGKNPLIFNDPTLGLHFADIKQLLEVLHRLRDQGNTIVVIEHNLDVIKTADWIVD

SEQ ID NO: 1593 - DNA, 398 bp, Homo sapiens
cctagggaatgtcttgagtgctgtcccttggctgcatcttagggaatgtcttcagtgtgtaaatggtagcagtcccttagccacatgcttagggaacgtcttcagtgtgcacacagcagaggtcccttgcgccacatacttagggaacgtcttcaatgtgtacatggtggtgggcccttggccacatccttaaggaacatcttcaggttctacacaggggccatcccgctgccacatccttaggaaacgccttcagggcctacatggaggcggtcccttggccacattcttagggatcatctgcagtgcggacccttggctacattcttagaaaacgtcttcagctcatacatggggacgatcccttggccactttcttctgagtgtctgtgtcattt

SEQ ID NO: 1594 - protein, 52 aa, Homo sapiens
MLRERLQCAHSRGPLRHILRERLQCVHGGGPLATSLRNIFRFYTGAIPLPHP

SEQ ID NO: 1595 - DNA, 646 bp, Homo sapiens
acgcgtgaggtatccgccttcggtttgctggcctgcacgcgcaccgccgccagttcggtaagcgaacgttcggcgccggtggcagccacatcgggagcagcgtcggcctcgctggcatgcagcggcagcgcggcgcagagggcgagggagagcgggtggggcgccagcagcggttcattcggttcgtctttcgacaacaagggagacgaagcgatggcgcgcaggtgcacggcccatgacgggggtgtggctgcggctcaaagctccctacgccgggtgcaaacggataaggttccaagggactcatcacgcctggcagatccagacaccccgccttcaggtgaccatttcacacaaaatggtacggatttgcgagccggtggcgttcatgccgcggcgtgcagggcctgcagcagtgcctgaccgggcgggctgtggaaccatgccggatgccccagcatgaagggctgccaggccacgtcggcgttcgcggtcgagctggtgacaccttcgaagtactccacttcggacagtgcgaagtcgaaatggaccatcggcagcaggtcggccagcaggtgcacgcgcgcggccgacagtggcagcacctggcgatagccgtccagcaacgccagtgcgatgtcgatgc

SEQ ID NO: 1596 - protein, 140 aa, Homo sapiens
TREVSAFGLLACTRTAASSVSERSAPVAATSGAASASLACSGSAAQRARESGWGASSGSFGSSFDNKGDEAMARRCTAHDGGVAAAQSSLRRVQTDKVPRDSSRLADPDTPPSGDHFTQNGTDLRAGGVHAAACRACSSA

SEQ ID NO: 1597 - DNA, 497 bp, Homo sapiens
agatctgagggttggtactgcattaacagctgtgaccggggacagccacttaacctttttgagaaagagttgtctcccgtacggagaccggaccgggtgaactgtgctgccgcatccgcgtgcacgttctctctgttgtttattgtgcttcctgactttgcattgcattaaaaagtgagaatccaattcgaaataacgtctaaaaatcgcctggggctttttgagcacgctgtcttgtcttagagtgaaattagaggtgactagtgtcatttttgaaaggtgctctaattttgtttaacctgacataggcaaaaaacttgttagctttttgatttttcattgctcttctcaaaagtttagtgtaatttgtttcaaaatagaagtaacattttaaagtttgctgggttggttggttttggctttgtttttaagcttgcttggaagattgtagggctggaagttagtggagaacgtatactgaactcttcatttccgga

SEQ ID NO: 1598 - protein, 90 aa, Homo sapiens
MTLVTSNFTLRQDSVLKKPQAIFRRYFELDSHFLMQCKVRKHNKQQRERARGCGSTVHPVRSPYGRQLFLKKVKWLSPVTAVNAVPTLRS

SEQ ID NO: 1599 - DNA, 393 bp, Homo sapiens
actagtgccgcagagagctaccctttctggaatccatagagggtctggccttttattcccaggcccaggcccaacccaagcctgggggcccgggttttgtcatgggcacctcctgctgctgtgccctggctgttccacatgagcagagagagacaggaggcaggcccctctgacacctacttaaccaaggcagatggagaggggagcatgggggatgcctttacttccccctcaggaggagcccagcaggagtccacagagccagcagctccaaaatcggatttccacacatcctcgccctcagaacatgccttacccctctggcaggaggaaacagagccttaagcaagtgtggctctggtgtatgaggggcttttagaagacctggcgcgc

SEQ ID NO: 1600 - protein, 68 aa, Homo sapiens [sequence omitted]

SEQ ID NO: 1601 - DNA, 295 bp, Homo sapiens
actagtcacgtgctcaaaagtttttgatgttggtgttccgtcctgcgagaagaggcttaactatcgttacttattttcaacaagctgactggcacgtttctctcctcatacccgagtcttttgcagccagtcggcccgtgtcatggctatgagacgaagacttccacagtaatggtggggtcaggttcactttgaaaaataagccctcaaggttaagacagaccttgctgctagcctgtttgcatggtgctgccactacattgttctctgaggaaagctgctgcatggatattcg

SEQ ID NO: 1602 - protein, 69 aa, Homo sapiens
MQQLSSENNVVAAPCKQASSKVCLNLEGLFFKVNLTPPLLWKSSSHSHDTGRLAAKDSGMRRETCQSAC

SEQ ID NO: 1603 - DNA, 433 bp, Homo sapiens
agatctcagccagccctgaaattctctgattctaaaagggaaaattatacaaaaatgaagctgagcttcacttgtggtctgtggacagcatccccttattttatgatcgaaacacttaaattgaccagtccatttaacgcaagtcatagttactttgactgggatagtcaagaaacccttttcaatttctttcttgtttgctgtagggccttgttaggacacctcagaaacactgtcttaaacaatttgcaaagaagagagttaaaaagatcctcccacttcacgcttcattaaatcgcaccacaggcaatcctctcaagcatccacagcttccaggaagcatgggatgagataactaaaggtcagcacataaaatacagttgtcctcaagttcctctggcaccatttactctctagctgcatgaatcgacgt

SEQ ID NO: 1604 - protein, 79 aa, Homo sapiens [sequence omitted]

SEQ ID NO: 1605 - DNA, 261 bp, Homo sapiens
ccgggactcgacatcgtccgtcccgccgacgccaacgagaccggcgtggcatggcgcaccatcggggagcacaccgaccgtcccgtcggcctagtgctgtcgcgtcaggacctgccgacgattgaccgcagcaaatacgcctctgccggaggcgtcgccaggggtgcctacgtggtttgcgaggctagcgccgagcccaaagtcatcctcatcggtactgggtccgagctgtcggtggccctcgaagcacgcgaaaagctt

SEQ ID NO: 1606 - protein, 87 aa, Homo sapiens
PGLDIVRPADANETGVAWRTIGEHTDRPVGLVLSRQDLPTIDRSKYASAGGVARGAYVVCEASAEPKVILIGTGSELSVALEAREKL

SEQ ID NO: 1607 - DNA, 380 bp, Homo sapiens
  misc_feature (1)..(1): Wherein n may be a, c, g or t
ntgccctaatcaatatttcttagagaaagaataaactaaaaaaaagaatacttgccttttctcgagacacattgattctctttgtcaagcagcacatgcagctgctggcaggtggaacgcagggtgcctgaggtgtgctccagcagctggtgaagggcactgctgagttcctgacccagaaagaccacagtggccatccaagtggccccaccagccccctcacaaaggtcatcacccaagagtgcctgctttagcatctggttttgtctccaaatctgcttcaatatttggcccagtttacctgagcccatgtattccatatccattttatgatccaaaagtggaattttctctcctgccagcaaagcctaaggttttgc

SEQ ID NO: 1608 - protein, 96 aa, Homo sapiens [sequence omitted]

SEQ ID NO: 1609 - DNA, 294 bp, Homo sapiens
  misc_feature (1)..(1): Wherein n may be a, c, g or t
  misc_feature (5)..(5): Wherein n may be a, c, g or t
  misc_feature (37)..(37): Wherein n may be a, c, g or t
  misc_feature (269)..(269): Wherein n may be a, c, g or t
nctangctccttcctctaacacgaaggtggaaatcanttcgctttccccttctaacccttgaatccctggataacgatcgtatttggatggcctacgaatgctcagctttccggtattgccccagacgaggaatccatccatccaagtattgttcttacctcccactacctcctacgtcaggggaggggaccgggcacattgttccgaggtcatgctcctcacttagaggatcgtgtgaatgcttacggaaacacttgtcactgcgctnccagtctgaatcgctgcttatgaag

SEQ ID NO: 1610 - protein, 69 aa, Homo sapiens
  misc_feature (61)..(61): Wherein Xaa may be any naturally occuring amino acid
MAYECSAFRYCPRRGIHPSKYCSYLPLPPTSGEGTGHIVPRSCSSLRGSCECLRKHLSLRXQSESLLMK

SEQ ID NO: 1611 - DNA, 309 bp, Homo sapiens
  misc_feature (1)..(1): Wherein n may be a, c, g or t
nagggcggcatgcacgaaagcttgcgcaaacgctcgctggaaggcttggacaagatcggcttcgacggcctggccatcggcggtctgtcggtgggcgagcccaagcacgagatgatcaaggtgctggattacctgccgggcctgatgccggctgacaaacctcgttaccttatgggcgttggcaaaccggaagacctcgtagagggtgtgcgccgcggtgtggacatgttcgattgcgtgatgccaacccgtaatgcccgcaatgggcatctgttcatcgatacaggcgtgctgaagatccgtaacgcg

SEQ ID NO: 1612 - protein, 103 aa, Homo sapiens
  misc_feature (1)..(1): Wherein Xaa may be any naturally occuring amino acid
XGGMHESLRKRSLEGLDKIGFDGLAIGGLSVGEPKHEMIKVLDYLPGLMPADKPRYLMGVGKPEDLVEGVRRGVDMFDCVMPTRNARNGHLFIDTGVLKIRNA

SEQ ID NO: 1613 - DNA, 334 bp, Homo sapiens
ggtaccatactgcaaaactttcaggattatctctgtgattggaaagaagtctgagtacattctatggatagtcatcccttaggcagaggagagagataatctctctcatttcatcacattaaagtcccataagagtttcctgggatgcttctgcttgttcttagcagagaatgagaatgtcaaccagcctatcaaggataatatgaccaaagtaccccatccttttaccctgccacctcttcatcctccagcccctgtcactttctaagatcctaatatttctgctctcaactctgttttgcttttgtagaaacatccgataatatggtgatca

SEQ ID NO: 1614 - protein, 51 aa, Homo sapiens [sequence omitted]

SEQ ID NO: 1615 - DNA, 249 bp, Homo sapiens
  misc_feature (1)..(1): Wherein n may be a, c, g or t
  misc_feature (2)..(2): Wherein n may be a, c, g or t
nnacgcgttcttccggaagtgttgcagcagttcatcgaactgcgcgcctcactggaggctagtgctgaggttgaagtcacttcagcaagtccactttcggaagaacagcaggcaaaaattgctgctgctatggaaaaacgtttgtctcgcaaagttaagctgaattgcaaaattgacaagtctgttcttgccggtgtcattatccgtgcaggtgatatggtgattgatggcagcgttcgcagtcgtcta

SEQ ID NO: 1616 - protein, 83 aa, Homo sapiens
  misc_feature (1)..(1): Wherein Xaa may be any naturally occuring amino acid
XRVLPEVLQQFIELRASLEASAEVEVTSASPLSEEQQAKIAAAMEKRLSRKVKLNCKIDKSVLAGVIIRAGDMVIDGSVRSRL

SEQ ID NO: 1617 - DNA, 452 bp, Homo sapiens
  misc_feature (1)..(1): Wherein n may be a, c, g or t
  misc_feature (2)..(2): Wherein n may be a, c, g or t
nngcctctctccgaccgcgagatcagccatgacgagatctgggatctgtttaaccgcgagtacctgcaggtgcccggcatcaagttggtgagccgcatgacgtccaccgagaccggtacccatcagctcaccgccaaccttcggattgatggcgaggacgttcagatccggggcgaaggcaacggtgcggtgtcggctttcatcgacgctctggcttccctcgacatcgtcgtgcaagtgctcgactattctgagcacgccatgacagcgggtggtactgcgagggccgccgcgtatgtcgagtgtgaaattggggatggcgagacctcacaaattctattgggagtcggcattgaccctgatatcgcgcaggcctccctcaacgcggtcgtcaacgcggtaaaccgctcccgtcggcaaaccttggatagggagtcatgaccccgtgatca

SEQ ID NO: 1618 - protein, 146 aa, Homo sapiens
  misc_feature (1)..(1): Wherein Xaa may be any naturally occuring amino acid
XPLSDREISHDEIWDLFNREYLQVPGIKLVSRMTSTETGTHQLTANLRIDGEDVQIRGEGNGAVSAFIDALASLDIVVQVLDYSEHAMTAGGTARAAAYVECEIGDGETSQILLGVGIDPDIAQASLNAVVNAVNRSRRQTLDRES

SEQ ID NO: 1619 - DNA, 243 bp, Homo sapiens
gtgcacgagcgggtagttgccgtacagcgcgtcgtacagcaggtagttgaggccgttttcccagtggtgcgacacgacgatgtcggtgtgatgcgcggcccatgcgacgaacggcgcgcgcacgtcggcggtcgccttgccgtcgcgcaccatctcgagcccgagcgcgagatgcttgaaggcgacgttttccttcttgtcgaacgtgttgggtcatggtacacgtgctcggacgaggcttcc

SEQ ID NO: 1620 - protein, 72 aa, Homo sapiens
MTQHVRQEGKRRLQASRARARDGARRQGDRRRARAVRRMGRASHRHRRVAPLGKRPQLPAVRRAVRQLPARA

SEQ ID NO: 1621 - DNA, 390 bp, Homo sapiens
gtgcacgtcaacttctaccgcaactatggtaagacgttcaagaaaccaaggcgtccttatgagaaggagcgtcttgatgctgaactgaagctggttggtgagtatgggctgaggtgcaagcgtgagctttggagggtccagtatgcactgagcaggatccgtaatgctgcaaggcacttgctcacccttgacgagaagaacccccgtcgtatctttgagggtgaggcacttcttcgccgcatgaaccgctatgggctgcttgctgagggtcagaacaagcttgattatgttcttgccctcaccgctgagaacttcctcgcaaggcggcttcaaacacttgtcttcaaggctggcatggccaagtccattcaccatgctcgtgtcttgatc

SEQ ID NO: 1622 - protein, 130 aa, Homo sapiens
VHVNFYRNYGKTFKKPRRPYEKERLDAELKLVGEYGLRCKRELWRVQYALSRIRNAARHLLTLDEKNPRRIFEGEALLRRMNRYGLLAEGQNKLDYVLALTAENFLARRLQTLVFKAGMAKSIHHARVLI

SEQ ID NO: 1623 - DNA, 209 bp, Homo sapiens
  misc_feature (1)..(1): Wherein n may be a, c, g or t
  misc_feature (209)..(209): Wherein n may be a, c, g or t
naagcttttttaagtttacgtgaagaggaagagtttgaagatgagccatttaccctagaaggcttgtctggttatttattgcgagcagacatgctggaagcgctgttacaaggtgatgatgagaccttttttaaacgactgcctttaatgggtgtattgccctatggcgcttttggtcggctctcgttacagcaatatcaagaccaatn

SEQ ID NO: 1624 - protein, 69 aa, Homo sapiens
  misc_feature (1)..(1): Wherein Xaa may be any naturally occuring amino acid
XAFLSLREEEEFEDEPFTLEGLSGYLLRADMLEALLQGDDETFFKRLPLMGVLPYGAFGRLSLQQYQDQ

SEQ ID NO: 1625 - DNA, 357 bp, Homo sapiens
  misc_feature (1)..(1): Wherein n may be a, c, g or t
nagatctcgtgcagacgagaagacaaggaagtatttattggcttcacaagctttctttctccaggcattattttcaggtgtaacttagcatctacaatccctgaaatgaagatgtttcgagaaatttcagttcctggatttgatcgcacaagttttcaagttaagcaggtttttgttcctagcaaggatggaaccaaaattcccatgttcataatgtcgaagaaagatatcgatcttaatggatcgcatccaactttgctatacggttatggaggattcaacataagcataacaccttcatttagtgttggtcgcgttgtgctatgcaagaacatgggctttgttgtctgtgtagca

SEQ ID NO: 1626 - protein, 119 aa, Homo sapiens
  misc_feature (1)..(1): Wherein Xaa may be any naturally occuring amino acid
XISCRREDKEVFIGFTSFLSPGIIFRCNLASTIPEMKMFREISVPGFDRTSFQVKQVFVPSKDGTKIPMFIMSKKDIDLNGSHPTLLYGYGGFNISITPSFSVGRVVLCKNMGFVVCVA

SEQ ID NO: 1627 - DNA, 271 bp, Homo sapiens
tccggacaataggtcaaatgttagttaattaaccacctagcatgttcattcgtttgttcattccttcatccctattgttggcttcatagatggatgtcagctccacgagggcaggcttatctgtcctattccaggctgtacccacagaatctaggacagctcctggcactggaggttgctgagtcagtgacagtgactgctctgtgcctggcagtgtgtggatccagggcccagcagtggccactgctggagtcagaggctggtgggatcc

SEQ ID NO: 1628 - protein, 59 aa, Homo sapiens [sequence omitted]

SEQ ID NO: 1629 - DNA, 301 bp, Homo sapiens
ggctgggtcaggcaggcctgcactctggctttctgcttccagggcaaactgtggcccctgtggtgtgagggggcagttctctggacactggggtcatgttccagggcagaatgcagctgcctctgctgtgaagaagtgttggcacagggagtggggagtaagcaggcagcagtaagccccacccagcttccatgcatttggcaaggaaggtcccacacccacactgctccaccagctgaagctagctaagtttaaggaagtctgtgctcagaactaaaatctgacccaggccataaaccgt

SEQ ID NO: 1630 - protein, 65 aa, Homo sapiens
MHGSWVGLTAACLLPTPCANTSSQQRQLHSALEHDPSVQRTAPSHHRGHSLPWKQKARVQACLTQ

SEQ ID NO: 1631 - DNA, 479 bp, Homo sapiens
gcgtgtccgggtgcatgcatgaacggtggtggcctactcaatggcgagcaaaacagtctcaagcggaagcagttggttcagacactgaataagcgtcacggagaggagctagcaatggtagatcctctaaccctgggacccaagctagaagaggcggcaccgcccgctttcgctagagtacgtcttcgcgcccgtcaagcaggccgtcgaaaaggatctcgtctctgttgggagcacctggtaagtaaggtgtagttttgcacccgtgtacataagcgtgaaatcaccacaaactgtgtgtatcaagtacatagtgacatttaaataatagcaagaacaacaataatagtagcgctactggaagcaccacgtaatagtggaaaagaactggaaaaaccgctataagatgcatactccggcggtcttacgcggagatacaagcttccaacggtgctaaaagcccggtttcggctcggccg

SEQ ID NO: 1632 - protein, 84 aa, Homo sapiens
ACPGACMNGGGLLNGEQNSLKRKQLVQTLNKRHGEELAMVDPLTLGPKLEEAAPPAFARVRLRARQAGRRKGSRLCWEHLVSKV

SEQ ID NO: 1633 - DNA, 248 bp, Homo sapiens
  misc_feature (1)..(1): Wherein n may be a, c, g or t
ngaattcaagccacggtcctaagggcagacaagcgtcacgggtgtcatttgtgtgggaagagttttgcccggcggtccacgttggaggcacacatgtacactcacacaggtgaaaagccgtttcagtgcccagactgcaacaaacgatttggccggtattcttccctgagcactcaccgagccatacaccgaggggaacggccgcaccaatctcctgactgtgggaagggttttacccagcggtgcac

SEQ ID NO: 1634 - protein, 82 aa, Homo sapiens
  misc_feature (1)..(1): Wherein Xaa may be any naturally occuring amino acid
XIQATVLRADKRHGCHLCGKSFARRSTLEAHMYTHTGEKPFQCPDCNKRFGRYSSLSTHRAIHRGERPHQSPDCGKGFTQRC

SEQ ID NO: 1635 - DNA, 219 bp, Homo sapiens
  misc_feature (1)..(1): Wherein n may be a, c, g or t
  misc_feature (2)..(2): Wherein n may be a, c, g or t
nnggttggtcgtgagcacttgagcctcgcagggcccggcattcgcgacgtcacccggatcgctcgttcccagacgacaatgtggcgtcagatcctcagttccaactgtgttgaggtccgcagccagttggaagctattcgtgacgacctcgatgacttgctgtctcgtcttaacgattcggaacgcttagaagagttcctcagcgttggtcaggccggc

SEQ ID NO: 1636 - protein, 73 aa, Homo sapiens
  misc_feature (1)..(1): Wherein Xaa may be any naturally occuring amino acid
XVGREHLSLAGPGIRDVTRIARSQTTMWRQILSSNCVEVRSQLEAIRDDLDDLLSRLNDSERLEEFLSVGQAG

SEQ ID NO: 1637 - DNA, 324 bp, Homo sapiens
aagcttaaaataaaaaatgtataatacacagtgccagaaacaaaaaaggaatccagagacgaaagcagaagctgagatagaggagatccgtgaatcccatgagtcagacgaataaagaaagaggctccagggccagagcctaaaaaccacactgtgaactccaccaacctgacctcagcctgtggatggcaaggagctgatgtggcacccactttatagcagggacacttgaagggccattccatccttacaggaacttacaaaaagaaccttctttgcggaagcgggcaagaaaccattcacagacagtgagagagaaaattt

SEQ ID NO: 1638 - protein, 81 aa, Homo sapiens
MEWPFKCPCYKVGATSAPCHPQAEVRLVEFTVWFLGSGPGASFFIRLTHGIHGSPLSQLLLSSLDSFFVSGTVYYTFFILS

SEQ ID NO: 1639 - DNA, 189 bp, Homo sapiens
  misc_feature (1)..(1): Wherein n may be a, c, g or t
  misc_feature (2)..(2): Wherein n may be a, c, g or t
nncgctccagcaccatgccctaccgaacttcaacccacaccatcaccaccacgcatgcatctccctgtcttgcatgtgccagaccaatcaatgcaccctcttactcatcaaagcaccccaaatgatccagatagcccagaaccacggtccccgactgtattttataacattccacctatgccattaccc

SEQ ID NO: 1640 - protein, 63 aa, Homo sapiens
  misc_feature (1)..(1): Wherein Xaa may be any naturally occuring amino acid
XAPAPCPTELQPTPSPPRMHLPVLHVPDQSMHPLTHQSTPNDPDSPEPRSPTVFYNIPPMPLP

SEQ ID NO: 1641 - DNA, 307 bp, Homo sapiens
cctaggtcatgggaggttgaattgtgatgctttttcttcttagtaggagatagaggaaatctgtggggacttagtttggctacctctgtctgttctatggaacgaatgtggaaacagatctgggaattgctctccccagggtcgatgcagctctgtcctttccccactgtccttaaccaggagcctcggggaaagggacacctccaccatgcgtcagttttgcctgggcctcaccttgtgctgtaggtctgtgtggaaacattttgggtaatacaaatgcgtgaggtgagggacaggacacgggccc

SEQ ID NO: 1642 - protein, 56 aa, Homo sapiens
MVEVSLSPRLLVKDSGERTELHRPWGEQFPDLFPHSFHRTDRGSQTKSPQISSISY

SEQ ID NO: 1643 - DNA, 299 bp, Homo sapiens
agatcttatttagcctcttcccacataacctgctcttgactgcagagactcaggaggaagagtgacggttaagaaggatctcaatactaactgatgagtgcagtactcagctgtgtgttgccaattgctgataccccagtgactatacagatgaaagtcataattatcagtggaatctagcccatgcaacttgaccctcaatccaggagatatgatttctgaaactacatctaatctgtgcatatgcttagttagtgttaaattaaagtagaaactgagagataaggaggtggctcagt

SEQ ID NO: 1644 - protein, 77 aa, Homo sapiens
MHRLDVVSEIISPGLRVKLHGLDSTDNYDFHLYSHWGISNWQHTAEYCTHQLVLRSFLTVTLPPESLQSRAGYVGRG

SEQ ID NO: 1645 - DNA, 190 bp, Homo sapiens
gaagccaaaggcgggcgcccccccccttataccttcccacccccccccccccccccacacacacacacacaccacagcacacacacccatccctgttttaatgtgtactttatatttccaggtatgatattggaaacacctggctgtgaattatgtaaacttcattcaaaaatatttgctaaatagatct

SEQ ID NO: 1646 - protein, 61 aa, Homo sapiens [sequence omitted]

SEQ ID NO: 1647 - DNA, 169 bp, Homo sapiens
cctaggtgagatgattccaaagttacctttcaggtatctgggctgtagtttaaagaagtctccactggtgactccggcaggttgtgagatccttagcaaaatcattcatagcccatggtttcagctactagggacaatgtccacctcagatcccatcgcagtcaggacc

SEQ ID NO: 1648 - protein, 53 aa, Homo sapiens
MIPKLPFRYLGCSLKKSPLVTPAGCEILSKIIHSPWFQLLGTMSTSDPIAVRT

SEQ ID NO: 1649 - DNA, 579 bp, Homo sapiens
  misc_feature (1)..(1): Wherein n may be a, c, g or t
  misc_feature (2)..(2): Wherein n may be a, c, g or t
nncctaaatgaacaatgctcagaacatcttcttgttatctcagcctcgccacccttatcttatcatagcggccttttattttcccctttgggcaaaatacgatacagccttccaaggtcgggcaagaaagtttatgacatataaaagaaacgggtaccccaaatacgtctcttcccattgtaaaactaatcctgcatcatcacattaaggaatcattcatctaacaattacattatgatcgccttaccagtagagaaggcccctagaaagtccctatggcaaaggcacagagcctttattagtggaatagttgcccttattatcatcggcaccttcttcctcacttcgggtctccacccagcaccacctcatgaggcaaagcgtccacaccatggaaaaggtcccatgcactcacccaaatgtgagaagattgaaccattaagtccatcattcaaacattccgtcgacacaattcttcatgaccctgcctttagaaacagctccattgagaaactgtccaatgctgttagaatccccactgtagtccaagacaaaaaccccaaccccgcagatgatccg

SEQ ID NO: 1650 - protein, 115 aa, Homo sapiens
MIALPVEKAPRKSLWQRHRAFISGIVALIIIGTFFLTSGLHPAPPHEAKRPHHGKGPMHSPKCEKIEPLSPSFKHSVDTILHDPAFRNSSIEKLSNAVRIPTVVQDKNPNPADDP

SEQ ID NO: 1651 - DNA, 157 bp, Homo sapiens
tcatgacgggcggcatttgcacggccaaggacatgccctccttcttccgtgacgagggcgagaggcactcctcgaccgcgcctgacgaaacgagtttgatgagtatgccatcgtcacaggccccgcgcgccaagcaggaggcggcaccgaagccggc

SEQ ID NO: 1652 - protein, 51 aa, Homo sapiens
MTGGICTAKDMPSFFRDEGERHSSTAPDETSLMSMPSSQAPRAKQEAAPKP

SEQ ID NO: 1653 - DNA, 244 bp, Homo sapiens
tgatcacatacaaaggcactctgggccagcatgaaaatcgtgacctagaagtactgctttccttgacacagtggcttggctcacagggaggtggcatggcacagaataggcagagaacatggtggactccacccattctttccctgggccagggggtcatgggtgaatttgaatcactactccctctactttcacatccggtgactgttccctggaccaatccaaggagagcagagtttccgga

SEQ ID NO: 1654 - protein, 53 aa, Homo sapiens
MTPWPRERMGGVHHVLCLFCAMPPPCEPSHCVKESSTSRSRFSCWPRVPLYVI

SEQ ID NO: 1655 - DNA, 340 bp, Homo sapiens
aaatatggcaagtctccggctcagattgtgcttcggtggcatatacaaatgggtaatttagttattcctaaggctatgcatcgaagctatatgcaggagaatttcactatttttgatttctggctgacagatgaagagctagcgtcaataactagtctcgatagatttgacggaagaatgagcaaggacccagacgagttcaatagtgatttgtagacggaaggacaagcacgctatgcacagtacgcacaatatgcacagcgtgcactgtgatcctttcctgtctggtcagtatcggcggtagtaaaaggttaaggacgaagagaggtatctcacgcgt

SEQ ID NO: 1656 - protein, 71 aa, Homo sapiens
KYGKSPAQIVLRWHIQMGNLVIPKAMHRSYMQENFTIFDFWLTDEELASITSLDRFDGRMSKDPDEFNSDL

SEQ ID NO: 1657 - DNA, 450 bp, Homo sapiens
  misc_feature (1)..(1): Wherein n may be a, c, g or t
natgccggctgctccagagtcaagatcctccgcagacaggaaatgtctctgccagctccaaggtcccctcgtagcagccctctgtgttatccagagagatttgtgtacatccgactgaagaggtttcccgcctgcaactgcgaacccaagagctgtctcaaaagaagggattcactcggggtgtctaccttttctgattgacactcggggcccacggcgtgccagggacgccgcctcctctcgggggagccacgctccgctctaggaactgagggaccggaggctgaggatgcgggtgtcccccggggccccagccagcaagggaggggtagagagttccatctcacctgctgctagccatgcttgtatccacaacggggtgattctggttttcctacagccacatgtgaaggggtagctgctcctctgtagacctggggtctcagatct

SEQ ID NO: 1658 - protein, 52 aa, Homo sapiens [sequence omitted]

SEQ ID NO: 1659 - DNA, 425 bp, Homo sapiens
  misc_feature (1)..(1): Wherein n may be a, c, g or t
ncccgtccccccagttgtgtctcccacgtggcatttgaaccgtgtgcccacgcggcttctcaaggccaacggaggacaagtggatgcgggcggtggaatcagggccttggcaacttgtggcgttcgcttcttaatgtgcctttgccctgagtcttgatgctgcgcaacgtccactccctacgtacaatgaacatgtcgtgctgccgtaacaggctggacgcctccatgcggctgccctcacggccgagctcgatgcggacgaattgtggggcgaagaggatgctccggatgctgacttgtacgacgaccagctgacactgtatgctacactggctcggacttgcgtgcgtgaggccctcgcgcatctttcttcgatcgtgcagcagccggctatgcgtgacatcgtcaagatgcggccggcgacg

SEQ ID NO: 1660 - protein, 90 aa, Homo sapiens
MSRIAGCCTIEERCARASRTQVRASVAYSVSWSSYKSASGASSSPHNSSASSSAVRAAAWRRPACYGSTTCSLYVGSGRCAASRLRAKAH

SEQ ID NO: 1661 - DNA, 354 bp, Homo sapiens
gggcccacatacaccttggtaaatctttgtccacctttaatgctacagtttgaagattgctaccttagagggtaatttatagagattatgttaactagattgtcacatatgtgattaagtggacaagatgattgtagcgaacatgtgttgtttttttctacctcttccttttccattccaggtggttctggcaggactgtcaatgatacaacctcatctcctacaggcagcctggcctggccaatcatattaaatctattcccatggatatagtagtttgtccacagtacgcataaaaaccaagcagatcgattaaagtctttccctggaattggtatataaacattggggaag

SEQ ID NO: 1662 - protein, 62 aa, Homo sapiens [sequence omitted]

SEQ ID NO: 1663 - DNA, 289 bp, Homo sapiens
aagctttaagccgaactccattcccgcccttgtcaagtgctccctagtcctgtgcgaattagctatcttgccgtgatggtgagcccagaccataaagaaaaagagtttgaacatttttgtcgtttatacgaatattttcaacaagtcgcacctagtgaagacggtgtctgttatgaagtgaactttggtgccttacttgtgcgccgcgaaaaacatctcgagttcacgtcttatatgtttattaataatgagacaagcgaaggagaggcaccatttgatgacaacgcgt

SEQ ID NO: 1664 - protein, 71 aa, Homo sapiens
MVSPDHKEKEFEHFCRLYEYFQQVAPSEDGVCYEVNFGALLVRREKHLEFTSYMFINNETSEGEAPFDDNA

SEQ ID NO: 1665 - DNA, 375 bp, Homo sapiens
  misc_feature (1)..(1): Wherein n may be a, c, g or t
ngtagagatgttctttgacgatgctgcacaattctcaactaaggtgagtttcgctctatttttttgagccaaatagccgatcaattaacgcctaagtcacaagtattccgacacgcagtacgcatgtctattgccctaacgtgcggctatgccattatccaaaatatgaacctcgcagtcgggtattgggtcatgctgacgaccttatttgtgtgtttaccaacctttggttccactcgaaaacgcctgtatgaacgtattacaggaaccgtggtgggattagtggcagcctggtctctgattactttatttccggtggaggttatccagttgatcgttgctgtggcggctggcgtggtgttcttcttaacgcgt

SEQ ID NO: 1666 - protein, 111 aa, Homo sapiens
GEFRSIFLSQIADQLTPKSQVFRHAVRMSIALTCGYAIIQNMNLAVGYWVMLTTLFVCLPTFGSTRKRLYERITGTVVGLVAAWSLITLFPVEVIQLIVAVAAGVVFFLTR

SEQ ID NO: 1667 - DNA, 302 bp, Homo sapiens
  misc_feature (1)..(1): Wherein n may be a, c, g or t
  misc_feature (79)..(79): Wherein n may be a, c, g or t
  misc_feature (302)..(302): Wherein n may be a, c, g or t
ncaatgtttctctgctgctagtattctcagtgtccatttcccaaaatgtgttctataacatggtccccaaataaaatgngttccataaaagcaaaaactgaaaataatgcaaattacataatacaaatgccttttgtgaaattaaaaatacacattagcatagtgaagaatcagaaaactcaaagaacaaaaatctattcgacttggtttaactcaggattcctgagtttactttttgtccaagcctttaacatagcatgaataaaacagctaacactttgggaaatgctgggagctaggtn

SEQ ID NO: 1668 - protein, 71 aa, Homo sapiens
  misc_feature (12)..(12): Wherein Xaa may be any naturally occuring amino acid
MCSITWSPNKMXSIKAKTENNANYIIQMPFVKLKIHISIVKNQKTQRTKIYSTWFNSGFLSLLFVQAFNIA

SEQ ID NO: 1669 - DNA, 264 bp, Homo sapiens
  misc_feature (127)..(127): Wherein n may be a, c, g or t
ccggaagcagggatacagtactcaagcagcaccacgggtgacggaaggcccctcgacatagagtttagtggcagctgtagtttagagaaattttatgacaatcccaaaagcaacgacggcaacactnaccgcctacagtcctggctttatgccagccgcctcctgcagtactcagatgccctggagcacctcttgagcacaggacaaggtgtggtcttggagcgttccatctacagtgactttgtcttcccggaggcaatgtac

SEQ ID NO: 1670 - protein, 88 aa, Homo sapiens
  misc_feature (43)..(43): Wherein Xaa may be any naturally occuring amino acid
PEAGIQYSSSTTGDGRPLDIEFSGSCSLEKFYDNPKSNDGNTXRLQSWLYASRLLQYSDALEHLLSTGQGVVLERSIYSDFVFPEAMY

SEQ ID NO: 1671 - DNA, 198 bp, Homo sapiens
  misc_feature (1)..(1): Wherein n may be a, c, g or t
  misc_feature (2)..(2): Wherein n may be a, c, g or t
nnaagcttccaggatgtgcatgtcatggtcttcgtgggctttggcttcctcatggtctttctacagcggtacggcttcagcagtgtgggctttaccttcctcgtggccaccttcaccctgcagtgggccacactactccaaggcttcctccactctttccatggtggccacatccacattggcgtggagagtttgatc

SEQ ID NO: 1672 - protein, 66 aa, Homo sapiens
  misc_feature (1)..(1): Wherein Xaa may be any naturally occuring amino acid
XSFQDVHVMVFVGFGFLMVFLQRYGFSSVGFTFLVATFTLQWATLLQGFLHSFHGGHIHIGVESLI

SEQ ID NO: 1673 - DNA, 405 bp, Homo sapiens
tacacagttgatccccagacagctttgaagacaagactcaataacactggaacgcttgccgcgcttcttcagcatgagcttaaacccaagtcgctcttgaaaatctctggtgaattcgacacaaaggccctggacagatccccaaagtttgggttggcgcttgcactgaagccctgatcagatcatcccatgttgattggtggtgaatcttgaattcattttttttgcaaagctgtagccaataatccgttccacgaaccttttctgttattctggcaaacgtttggagcactgtggcttggatccggatgggtcgtctacaggaattttacctgcctgcttttattgttggaagcatctggccgtcggtagacgtacactgtgctcgcttctttagcacctagg

SEQ ID NO: 1674 - protein, 58 aa, Homo sapiens
YTVDPQTALKTRLNNTGTLAALLQHELKPKSLLKISGEFDTKALDRSPKFGLALALKP

SEQ ID NO: 1675 - DNA, 368 bp, Homo sapiens
  misc_feature (1)..(1): Wherein n may be a, c, g or t
  misc_feature (368)..(368): Wherein n may be a, c, g or t
nccccacctgcagggaaacccaggctccagccaagtgcattatccaagctgtgaccacaggctctgggagtgatctgcaagggagacaggggtcacctctgctccagcccagcctgcctgtgcctccatcactgtctggagtcaacactaccctgccctggggggggggaaaggggaagggcaggggcccaacccggtttcccccctccaggatccttccaggacaagtgggccaggcgagggctcctggagcctgggctgggttcctccctgactttctctgttggactctgggtgcacaggtcccgctcctgggcctctgtctcctcatctgtaaaatgggaggatgttccctgctatggttgtcn

SEQ ID NO: 1676 - protein, 110 aa, Homo sapiens [sequence omitted]

SEQ ID NO: 1677 - DNA, 349 bp, Homo sapiens
acgcgttcctgttaataacatctctaatgacactgtaatggttcccaaaaaccaaggaagaggcataccttcctcttactctgcctctcgctgccctgagaatcactaaaataatttacgcccccaatacagacagagactacaatgaatattaatacaagaagtctgccagagaactacctgctggcttcttaaaattactgaatgcaaaccaggtatgaagaccctagtcattgccaggaagcataggaggatcctacttttaatgcccatcgcttttaatgcccagagccaccctgcaagagctcaggggagtcagggaacttgatctcctcaggtcacacctagg

SEQ ID NO: 1678 - protein, 55 aa, Homo sapiens
MGIKSRILLCFLAMTRVFIPGLHSVILRSQQVVLWQTSCINIHCSLCLYWGRKLF

SEQ ID NO: 1679 - DNA, 406 bp, Homo sapiens
  misc_feature (1)..(1): Wherein n may be a, c, g or t
ntccgccaagggtgagaagaatacaccaaacgggatgaaaggagaaaaaaaaaactcacctccaagttttgcctaacaggcactcaggcgtgttggtgaaatagagacattttcagatcagacacacatacacacgcaaggactgtatcaccaacaggtctactaaagctactcctaaggggtatgtgtgcataaagaaaaaaaaaaagggaccccaacaggagagtgtctgatgcaagcaggaaggacaagtgcacagggagttggacactggcctgggcagggaatgtcctggggacctctcggacaatacgaggcatttgatcacgtctataccaggatggggcatgcgtcacacttcgtgagcccacagggatccatcagcatgaactgcagccgtgcctgg

SEQ ID NO: 1680 - protein, 78 aa, Homo sapiens [sequence omitted]

SEQ ID NO: 1681 - DNA, 309 bp, Homo sapiens
cgcggaggacaagtttattacttacataataacgttgaaagtatcggtaaagctgccgaggatctacaagcgctattaccgcaggcacgtatctcagttgcacatggccaaatgaatgagcagcaacttgagcgtgtcatgtcagatttctatcatcaacgacagaatgtactggtttgtaccactatcattgaaacgggaattgatataccaacagcaaatacgattattatcaatcgagcagatcatttagggcttgcacaactacatcaattacgagggcgggtcggtcgttcacatcatcaagct

SEQ ID NO: 1682 - protein, 103 aa, Homo sapiens
RGGQVYYLHNNVESIGKAAEDLQALLPQARISVAHGQMNEQQLERVMSDFYHQRQNVLVCTTIIETGIDIPTANTIIINRADHLGLAQLHQLRGRVGRSHHQA

SEQ ID NO: 1683 - DNA, 363 bp, Homo sapiens
cttaagctcttatctacaaaaatagcatttcagaaccaaaaaacaacgatggatattcgtggtagaaaaatgaaaaaaccgcctgcatgcgtgcagtgccgtaagaggaagataggctgcgatcgtgttaagccgatttgtgggaactgtatgaagcataataaaatggactgcttttatccggacgttcccggacaatacgttccctctagttcttcctcttccaatacacgccaagtagccaacggtccgtacttaaactcttattacgcttctcgtcgtgtctccaaggaaactgctgcacttttgcagaaaaatccagaactggcttctttggagcaaataagagaatacaacacgcgt

SEQ ID NO: 1684 - protein, 105 aa, Homo sapiens
MDIRGRKMKKPPACVQCRKRKIGCDRVKPICGNCMKHNKMDCFYPDVPGQYVPSSSSSSNTRQVANGPYLNSYYASRRVSKETAALLQKNPELASLEQIREYNTR

SEQ ID NO: 1685 - DNA, 303 bp, Homo sapiens
tgtacatcaaactcctttcacatgtcttggaacaatgaaaaaggtttggcttggcctttcagggcttgtaagagcctagtttcctctgggatttacagaacactggtcttgtcctctctgggtggtataggaaaaatgcttccatcacaagtttctctggtggcacatccatttttcacctgggaggaacctacaaattgaaatgtttggctcataatgtggaatagcagaatgttgttagcgcttctgtggtggggttggttgaaaggatattgtcttcatgctaggctctgaggtgttaaa

SEQ ID NO: 1686 - protein, 59 aa, Homo sapiens
MSWNNEKGLAWPFRACKSLVSSGIYRTLVLSSLGGIGKMLPSQVSLVAHPFFTWEEPTN

SEQ ID NO: 1687 - DNA, 371 bp, Homo sapiens
  misc_feature (1)..(1): Wherein n may be a, c, g or t
nacgcgttgctcgtcattggtggctactcggcctacgaaggtatctacaccatgatgactgagcgggaccggtacccggctttccgtattccgacggtgtgcatcccggcttctatcgacaacaacctccccggttcggaactgtccatcggcaccgacaccgctctcaacgtcatcgtcgaggcgatggacaagattaaggagtcgggtatcgcgtccagacgctgcttcgtcgtcgagacgatgggtcgtgactgcggatacctcgcgttgatgtcgggtatcgcagctggcgctgagcggatctataccaacgaggacggtatctccctggacgatctagccaacgacgtccattggttgcgggagtc

SEQ ID NO: 1688 - protein, 123 aa, Homo sapiens
  misc_feature (1)..(1): Wherein Xaa may be any naturally occuring amino acid
XALLVIGGYSAYEGIYTMMTERDRYPAFRIPTVCIPASIDNNLPGSELSIGTDTALNVIVEAMDKIKESGIASRRCFVVETMGRDCGYLALMSGIAAGAERIYTNEDGISLDDLANDVHWLRE

SEQ ID NO: 1689 - DNA, 221 bp, Homo sapiens
  misc_feature (1)..(1): Wherein n may be a, c, g or t
  misc_feature (2)..(2): Wherein n may be a, c, g or t
nngtgcacatctcatatcgggtaggaaagagatagaaaaatgaatgaggccgcaataaagattcgggaaggtcgctactccattgctaagcgcaccttgtggtccggcgtggatttagatatcgctccagggcaagtggtggcattgaccgggccttcgggctgcggaaaaaccacgctattaaattgcttaggccttctggactcgctcagcggcggaag

SEQ ID NO: 1690 - protein, 60 aa, Homo sapiens
MNEAAIKIREGRYSIAKRTLWSGVDLDIAPGQVVALTGPSGCGKTTLLNCLGLLDSLSGG

SEQ ID NO: 1691 - DNA, 493 bp, Homo sapiens
tgtttggagaatccttcatcttcctagttgcctcccaccaaaaaagctaaaaatcccagataggggcactttcccagccgccattgcagttggtataggctcttaccttaagctcaatccatcaaaagcccccaatcaaaggctgggagtgggaaactaataatacagagatgcaaggagcacagaagtccattctggtggatgggggcagtcgccaagtcaatggcattccagttcctggggcggcagggaccatatccacgtcccaaggtggcagtgtatgccagggagtcctggattggcagcgaggtcatccctggatgcctgactttggcggggccccacctgcggggagcccccttggtggatcccccaccggaattctcagccttctgggttatttggggagttccccaaaaatccttttgataaagtccttttctgcttaaataagccagaattgtttcctgttgcttgggagccaagagctccg

SEQ ID NO: 1692 - protein, 92 aa, Homo sapiens [sequence omitted]

SEQ ID NO: 1693 - DNA, 237 bp, Homo sapiens
  misc_feature (1)..(1): Wherein n may be a, c, g or t
  misc_feature (2)..(2): Wherein n may be a, c, g or t
nncagcctgtcctcggtgatgctaggacccaaaggccggagtctgggtgccaggtcctggtgtgaggacggcctcttccacttctgctacagcatcttgtttaaggctggcttcctgagcttgtttggctgcaccaaggacaaggagcaggacctggatgaggccgatgagctgttcaggaagttccgcagatttgacctacttttccccaggtttgtctactccctgctggggccc

SEQ ID NO: 1694 - protein, 79 aa, Homo sapiens
  misc_feature (1)..(1): Wherein Xaa may be any naturally occuring amino acid
XSLSSVMLGPKGRSLGARSWCEDGLFHFCYSILFKAGFLSLFGCTKDKEQDLDEADELFRKFRRFDLLFPRFVYSLLGP

SEQ ID NO: 1695 - DNA, 370 bp, Homo sapiens
  misc_feature (342)..(342): Wherein n may be a, c, g or t
aaatttctctaagcctgacactttttctccttctctggctttaaagatgtgctggaaggctcaccctgactccactgcagggattcagcttcaacattattcccctcataggacatgtaacctcacccacacttctatccagatttcaaaattccaagaaatgaaaactatctccttaaacaaagagaactttaggtttaataattcttcagataaagtatctcgtgcccggagagcatgagaaactagactaaggcacagatctaggagtagaaataaaatggaggtccaaacatggatcgactattatggaacacccctgataaactcagagagtttcancaaaggacactcacgtgtgtcattcata

SEQ ID NO: 1696 - protein, 64 aa, Homo sapiens [sequence omitted]

SEQ ID NO: 1697 - DNA, 246 bp, Homo sapiens
gctagcctccccaaagcattcgttactgttggcgatcacacgctgctagaacacgccctgctgcgtattgatgccagccatgttgtggatgaaattatcatcatggcggcttttgatatgtgtgccaccgcgcaggaacaagcccagggtctcagcctcgccacgcctgtgcgagtattccccggtggtgaactccgctccgactctatctatgaggggctgaagtacatcatgcgggatgatccg

SEQ ID NO: 1698 - protein, 50 aa, Homo sapiens
MPAMLWMKLSSWRLLICVPPRRNKPRVSASPRLCEYSPVVNSAPTLSMRG

SEQ ID NO: 1699 - DNA, 280 bp, Homo sapiens
ccatggtatttcattagttgtatatggatgagtgggttctgagaacaatagctctctccatacataatagcaaagtaatcaaggtaaaatttactttgagctatcctcagtccaaaaaaactttgtttcgtatttgtactcttgattcctgccagcatattcatttctaattgtacactatgttcaaccttgttgatgtagagatgaagtacccactcctaaagtattgtctgtggtaattttttttagaatgaagaaaagtgattttaaaaaaagatct

SEQ ID NO: 1700 - protein, 54 aa, Homo sapiens
MNMLAGIKSTNTKQSFFGLRIAQSKFYLDYFAIMYGESYCSQNPLIHIQLMKYH

SEQ ID NO: 1701 - DNA, 552 bp, Homo sapiens
ctcgagcgtctcgacgccgacgccgcccagggagccaaggaagacctctcgcagcgcgacccctacgacgtgctcgtcgtaggggcgggtcccgccggtgccgcggccgccgtgtacgcggctcgtaagggcattcgcaccgccatggtcgggtctcggatcggcggccaggtactcgataccgaggccatcgacaacctcatctcggtgccgcacaccaccggtccgcgtctggccgacgccctccgcagccacgtcaacgactacaacattgacgttattgagcgtcagaccgccagcgccatagagaccaccggcggtatgaccaccgtgcatctgaccgacggcgacctgcgggcgcgctcagtcatcgtggccaccggtgcccgctggcgcaaccttggcgtacctggcgaggaggaataccgcaccaagggtgtgacctactgcccgcactgcgatggcccgctattcacaggcaaaaaggtggccgtcgtcggaggtggaaactccggtattgaggccgctatcgacctcgccggcgtcgtcgac

SEQ ID NO: 1702 - protein, 184 aa, Homo sapiens
LERLDADAAQGAKEDLSQRDPYDVLVVGAGPAGAAAAVYAARKGIRTAMVGSRIGGQVLDTEAIDNLISVPHTTGPRLADALRSHVNDYNIDVIERQTASAIETTGGMTTVHLTDGDLRARSVIVATGARWRNLGVPGEEEYRTKGVTYCPHCDGPLFTGKKVAVVGGGNSGIEAAIDLAGVVD

SEQ ID NO: 1703 - DNA, 464 bp, Homo sapiens
  misc_feature (416)..(416): Wherein n may be a, c, g or t
agtacagatacattagttaattttaaaacattaattaagcactaatgggtcaggcctcatcaacactttgtcctgggcataggtagtgtaagacacaggaggagagaaaaaggaaatgagtcatgtgaaatggctgaaaggtaacatgcaaattccgagccacctctcagaagaggcctgagatgggctgcagcctgtgggcaggcccgtgccacgcagcctgcaccctgtactgggctctaggcacagcctcacctcagctacttccttcctccctcaccgcacccttcttcctgtctcctctacctccagcccctttgggtgcagtggaaaaacttgggacactgagttccagtctctgctggctctcagccatgacgtaaccttgaccaggccactctgctggcctggatggnggtttctttttatgtgaaagaaagcacttaactgtagatgctttaaag

SEQ ID NO: 1704 - protein, 66 aa, Homo sapiens
MGCSLWAGPCHAACTLYWALGTASPQLLPSSLTAPFFLSPLPPAPLGAVEKLGTLSSSLCWLSAMT

SEQ ID NO: 1705 - DNA, 351 bp, Homo sapiens
  misc_feature (1)..(1): Wherein n may be a, c, g or t
  misc_feature (250)..(250): Wherein n may be a, c, g or t
  misc_feature (304)..(304): Wherein n may be a, c, g or t
nacgcgtccccctcccccaccgctcccgggtctggacacaccggggccgccctgtcgggacatcccggtccccacagcaatctgcaggatgctccgaggctaagactcccggggcctggcctttcactagggcacccacgccagctgcctcccttgctttcccgagccctaatcggctcctcccgacagtgactgccagtcacttggcaccctaactgtgcctctcttcgggccgagcaaacgggaccanaggacactctctccccttcggcttctcacagcgtctcccgcttccctccgcctncccggccttctccggagagcgcgcctggaaaaccctgggctcggccg

SEQ ID NO: 1706 - protein, 63 aa, Homo sapiens
  misc_feature (1)..(1): Wherein Xaa may be any naturally occuring amino acid
XASPSPTAPGSGHTGAALSGHPGPHSNLQDAPRLRLPGPGLSLGHPRQLPPLLSRALIGSSRQ

SEQ ID NO: 1707 - DNA, 296 bp, Homo sapiens
  misc_feature (85)..(85): Wherein n may be a, c, g or t
tctcgtccccgggagacaggatctcagtcaagccgtccccggcaagtaggggacaggcttcctccaggacagtgggggccccatntcccaccaggcccaggcgcccggctctcagctactggaggtgccagcctgcctgggtccccaggaggagcctgcagggtccccggggtctcgggctctggcatgaggtacgggagtttgctcttggtggatgggctcgggtcagcatcccgggttccctcctggtagccagaagtctctcctcctttgccgaaatctgccccttcacgcgt

SEQ ID NO: 1708 - protein, 83 aa, Homo sapiens
  misc_feature (29)..(29): Wherein Xaa may be any naturally occuring amino acid
SRPRETGSQSSRPRQVGDRLPPGQWGPHXPPGPGARLSATGGASLPGSPGGACRVPGVSGSGMRYGSLLLVDGLGSASRVPSW

SEQ ID NO: 1709 - DNA, 309 bp, Homo sapiens
attgcggccaacttagaccaagcaaaggagattgtcaagatagcagaatccaccccattgcccgttggtgtggctgaaaattggttatatttaccatgtattaaaatcgcaaaggagcagatcgagaaaattggtcctgtagtagcattcacccacaattctaccggtccatttgttactcaaaataaatatttgaccacaacctggagacaaaaaccagagcacattggcggatttctatctgatggtggtgtccaccaattagctctcgttatttccctactcggtgaatttggatctgtttctgca

SEQ ID NO: 1710 - protein, 103 aa, Homo sapiens
IAANLDQAKEIVKIAESTPLPVGVAENWLYLPCIKIAKEQIEKIGPVVAFTHNSTGPFVTQNKYLTTTWRQKPEHIGGFLSDGGVHQLALVISLLGEFGSVSA

SEQ ID NO: 1711 - DNA, 320 bp, Homo sapiens
  misc_feature (320)..(320): Wherein n may be a, c, g or t
aaatttgtcagttcacacacctgtaagcaaagatgggcacagagtgggcatggaaggaatgtcatgtggtatcttacaggctctgcatggcagccagtggtggctcatgggtttttcaattgctggggtttatagcctgtttatggagtcctaaaaggggcagttcctcccctaacacgaactgccacccctgtttacaccacccagggctgaggccctgaggccactttttgtggagaggctaagacccgctcccctagatggcccctcgagctggtgatgcgaagaagtgcacaaatgcttccctaagagttgttctn

SEQ ID NO: 1712 - protein, 62 aa, Homo sapiens
MGTEWAWKECHVVSYRLCMAASGGSWVFQLLGFIACLWSPKRGSSSPNTNCHPCLHHPGLRP

SEQ ID NO: 1713 - DNA, 267 bp, Homo sapiens
ggcgccaagctcacccgccagctgctcgccttcgcccgcaagacgcggctggaaccgcgcgcgatcgacctcagccacctcgtcaccgaattcagcgaggtgatcgaaagttcggtatcgaaatacgtcgacctgcacctcagcctgcgccgcgggctgccgcacgtcgtcgtcgatcccgaccagctcgaaatggcgctgctcaacatcgtcaacaacgcccgcgacgccatgcccaatggcggcgaggtgacgatcgggacgcgt

SEQ ID NO: 1714 - protein, 89 aa, Homo sapiens
GAKLTRQLLAFARKTRLEPRAIDLSHLVTEFSEVIESSVSKYVDLHLSLRRGLPHVVVDPDQLEMALLNIVNNARDAMPNGGEVTIGTR

SEQ ID NO: 1715 - DNA, 396 bp, Homo sapiens
acgcgtgtacgtgcgcgtgtgatttcacatgccctcaaagatattcttactgaaggcgataaagttatcgttatgggacataagcgaccagatttagatgctataggtgcagctatcggagtttcgcgctttgcatcaatgaataatttagaggcatttatcgttcttaatgattctgatattgatccgacattacgtcgtgttatggatgagattgataagaaaccggaactaaaagaacgctttgtaacatcggatgaggcttgggatatgatgacttctaagacgactgtcgttgttgtagatacacataaacctgaaatggtcttagatgaaaatgtcttaaataaagcaaaccgcaaagtagtcattgatcatcatagacgtggcgaaact

SEQ ID NO: 1716 - protein, 132 aa, Homo sapiens
TRVRARVISHALKDILTEGDKVIVMGHKRPDLDAIGAAIGVSRFASMNNLEAFIVLNDSDIDPTLRRVMDEIDKKPELKERFVTSDEAWDMMTSKTTVVVVDTHKPEMVLDENVLNKANRKVVIDHHRRGET

SEQ ID NO: 1717 - DNA, 318 bp, Homo sapiens
gcgttagaactattaaatgactcaggcattgtcgtacagtttaatatgaaaccacaagtcattgaaagaattgccaagctaacagaagcagatattgccatttctgtggataagttggctacgaatattaagatgggtgaatgtgaaacttttgaagttaaaagctacatttatggaaacatcagtaaaacatatacatttcttcggggctgtaacccagaacttggtggaacaattttgttaagaggtgatagtcttgaaaacttgagaaaaatcaaacaagtctctgaatttatggtctacgcaattttttcatgg

SEQ ID NO: 1718 - protein, 106 aa, Homo sapiens
ALELLNDSGIVVQFNMKPQVIERIAKLTEADIAISVDKLATNIKMGECETFEVKSYIYGNISKTYTFLRGCNPELGGTILLRGDSLENLRKIKQVSEFMVYAIFSW

SEQ ID NO: 1719 - DNA, 545 bp, Homo sapiens
ggatccacaaatgactttttacccctgccaggggttgatggaagttgtttccaggtgtgacccatcttcattagcttatcctggcgagctgttaggaaaaagtgtcattttaacttgccgtattcctctgaagctccagaatacaagatctgagttcactctgttgaaaaactcctttgtttctacctaaaagcacaggatgttcatttctatcagatcagttcttttctgtataccagcctgaacatgtgtgtgtctttgtctaagcacctcttgcttcataagatacaccaccaaattgaaaagagttagtgacaactgttccttggctggccatcaaaaccagacaccaaagaaaagccagcaagtaattttgtaagactaggtcgggctgaccgacgtcatttttctttctcagttttgtgtaacttttctgttttaaaaaattgttttgcattaacacgctgccagaaatatgctgctaatgacatagtcatgatcttgatgatggtgataataactgtagccagcctcccttcacgcgt

SEQ ID NO: 1720 - protein, 64 aa, Homo sapiens
MQNNFLKQKSYTKLRKKNDVGQPDLVLQNYLLAFLWCLVLMASQGTVVTNSFQFGGVSYEARGA

SEQ ID NO: 1721 - DNA, 192 bp, Homo sapiens
gaaagagcatccaattacataagcattgtaaataatggatcgcatggttggcttccagccataaaaacggatccaatcagcggggatgtctaccaagaagaatatgagcaagataatcaattggcgttctctttaccaaaatttattcctttattaacagagagaatttacgccattaaccctgatacgcgt

SEQ ID NO: 1722 - protein, 64 aa, Homo sapiens
ERASNYISIVNNGSHGWLPAIKTDPISGDVYQEEYEQDNQLAFSLPKFIPLLTERIYAINPDTR

SEQ ID NO: 1723 - DNA, 268 bp, Homo sapiens
tgccggttggtgtccggcgccttgaaacaggcgttgttgatcagcgaaggcttggaagtcgaccccgagcgtatggcccgcaaccttgatttgacccagggcctggtgctggccgaagccgtcagcagtgtgcttgcccagcgcctggggcgcgagcccgcgcaccacctgctggaacaatgctgcaaacgtgccgtcgccgaacaccgccatttgcgcgcggtgctggcggatgagccgcaggtcaccgccgagctgtcggcggccg

SEQ ID NO: 1724 - protein, 89 aa, Homo sapiens
CRLVSGALKQALLISEGLEVDPERMARNLDLTQGLVLAEAVSSVLAQRLGREPAHHLLEQCCKRAVAEHRHLRAVLADEPQVTAELSAA

SEQ ID NO: 1725 - DNA, 347 bp, Homo sapiens
ccatgggcacaaacatttaaatgcacaaatatacatactacagacataggttttgtttttgttttttcaataaggggcacatcttggaagatggcaagcagaccacacagcccaccaattattatagaatccaggagacattacatagtaaagggtatagtaatattttatacaaactatgtttttcttccttaaagactgtatctactgatgaagtctactatctgtaaagctaattttttgtgagcagaaaatgttagagggccttttttcattgcttttacttaaaatcaagaagatagtttttcacacaaaattaaagtaacgccaggaaacaggttcaattg

SEQ ID NO: 1726 - protein, 69 aa, Homo sapiens
MHKYTYYRHRFCFCFFNKGHILEDGKQTTQPTNYYRIQETLHSKGYSNILYKLCFSSLKTVSTDEVYYL

SEQ ID NO: 1727 - DNA, 351 bp, Homo sapiens
tacaagcgcacccgtaatcaacatcaatgggagaaaaaattaaatgacaataatcctaaattaattactgcagttgccccacctgttaagctactgagaagcccatatattgcagctgtcgaaagaaaaacggaagaagagtatttacttattgatgaatcactattgcaattgaaggaagtttgggacatctttgcccagaatgagttagtgaatcagaaaaagtttcctctaaactatagtaaagaagatattgaaagacatgttgaggatttgcaaaaattacacaagcagctaatctctacaccatttgctgccactcaagggtggattcctcaagatatgtttgat

SEQ ID NO: 1728 - protein, 117 aa, Homo sapiens
YKRTRNQHQWEKKLNDNNPKLITAVAPPVKLLRSPYIAAVERKTEEEYLLIDESLLQLKEVWDIFAQNELVNQKKFPLNYSKEDIERHVEDLQKLHKQLISTPFAATQGWIPQDMFD

SEQ ID NO: 1729 - DNA, 249 bp, Homo sapiens
aaagcagcatctgatttacagatagcagcatctaccttcacatcttttggcaaaaagctcactaagaaggaggcccttccccctgacacctttattcagctcgctcttcagctcgcctactacagacttcatggacgccccgggtgctggtatgaacaagctatgccaagatacttttcccatggccgaacagagactgtgcgatcttgtacagtggaggccgtcaggtggtgccagtccatgcaggat

SEQ ID NO: 1730 - protein, 83 aa, Homo sapiens
KAASDLQIAASTFTSFGKKLTKKEALPPDTFIQLALQLAYYRLHGRPGCWYEQAMPRYFSHGRTETVRSCTVEAVRWCQSMQD

SEQ ID NO: 1731 - DNA, 265 bp, Homo sapiens
cctaggggttggcagcagaggctgccacagccccagcagcagtatctgggcttggggaagtggggctggggtcccagggcagggcacagcccagctggctgccgagtgatggcgctgcctttgagggaggtgaggggcaggggttctagtcttgccggctcccgctcagccttgaccgccaggaaatcagccaggtccaagtctatcatggccacccctccgcgaggcgtgggcgtgctctgacggcactgcggacaggggatcc

SEQ ID NO: 1732 - protein, 69 aa, Homo sapiens
MIDLDLADFLAVKAEREPARLEPLPLTSLKGSAITRQPAGLCPALGPQPHFPKPRYCCWGCGSLCCQPL

SEQ ID NO: 1733 - DNA, 207 bp, Homo sapiens
ctgagaatctcaggatccacaccctgcccacctccatctcgggcagctggaaaagtggtccttccaaatgggaaacctgtagcccaagctccattgcaggaagcaaggaagaaaacggatatcagccatgctgggcagaaagggaaggcagcctcaggaagaccagaaggaaccattgcttcccctctagggtctggggctccagat

SEQ ID NO: 1734 - protein, 69 aa, Homo sapiens
LRISGSTPCPPPSRAAGKVVLPNGKPVAQAPLQEARKKTDISHAGQKGKAASGRPEGTIASPLGSGAPD

SEQ ID NO: 1735 - DNA, 522 bp, Homo sapiens
cttccaaacgataatttggccatcgatgaagatgctatttcgagtcctgggccctcagggcaaattggtgaagtgttgccacaatcagtagtaaacagattatcaaacgaaagccaacccttattgaaccacgatgatcatgaccacagccatgaatcgaagaaaccaggtcatcgctctttgaatatgcatggtgtcttcttacatgtactaggtgatgctctgggtaatattggtgttattgcagctgctttgtttatttggaaaactgaatattcttggagatattactcggatccaatcgtttctttaatcatcaccattattattttctcttccgctctgcccttatcacgtagagcttcaagaattttactacaggctactccttctacaatttctgctgatcagattcaaagagagattttggcagtacctggcgtgatagcggtccatgacttccacgtctggaacttaactgaaactatatatattgcatctatccacgttaaaatagactgt

SEQ ID NO: 1736 - protein, 174 aa, Homo sapiens
LPNDNLAIDEDAISSPGPSGQIGEVLPQSVVNRLSNESQPLLNHDDHDHSHESKKPGHRSLNMHGVFLHVLGDALGNIGVIAAALFIWKTEYSWRYYSDPIVSLIITIIIFSSALPLSRRASRILLQATPSTISADQIQREILAVPGVIAVHDFHVWNLTETIYIASIHVKIDC

SEQ ID NO: 1737 - DNA, 382 bp, Homo sapiens
  misc_feature (1)..(1): Wherein n may be a, c, g or t
  misc_feature (2)..(2): Wherein n may be a, c, g or t
nnatgcagccgcgttaacaaaaacgctccagccgttgaactgcacggtaacgccaaaaaggctgccgaagaagctggtgttaccgatgtgaaggtatctatttctcacgatgacctccaagctgtcgcggtcgccgtttctactaagaaatagagagagcactacgtagtccctcttttaatatgtaacgtgtcgcttctatttatcagacataatagtaattactttgttatttttctatcgtttccttactttagcctctgatttcgatctggcctaatcattgtgtacgtctataatcatatggccctgagcgtacacaccgttcaattcttctatttggtcggcccacacaaattcgcgcgggggcatattgacgcgt

SEQ ID NO: 1738 - protein, 50 aa, Homo sapiens
  misc_feature (1)..(1): Wherein Xaa may be any naturally occuring amino acid
XCSRVNKNAPAVELHGNAKKAAEEAGVTDVKVSISHDDLQAVAVAVSTKK

SEQ ID NO: 1739 - DNA, 348 bp, Homo sapiens
  misc_feature (32)..(32): Wherein n may be a, c, g or t
tcccacacgctttttatcggcggtcttgctgnggcattgacagaagacgatgtctggaatgcatttgccgagtttggggaagtagcgggtgttcgtcttccgaaagagatcgagtctggccgtcccaagggctttgggtatgtggagtttacttcagaagaaaatgccgccaaggcactggaagccatgaatggtcaagctttgggcggccgtcccattcgcattgactttgctggcaagcgtgataacagcaactcctcgcgtggcgcacctcgtggtggtaattctggtcgtcctcgcgacagcggttggggaggacgtgccggtggtgcccgctccgcgtccgga

SEQ ID NO: 1740 - protein, 116 aa, Homo sapiens
  misc_feature (11)..(11): Wherein Xaa may be any naturally occuring amino acid
SHTLFIGGLAXALTEDDVWNAFAEFGEVAGVRLPKEIESGRPKGFGYVEFTSEENAAKALEAMNGQALGGRPIRIDFAGKRDNSNSSRGAPRGGNSGRPRDSGWGGRAGGARSASG

SEQ ID NO: 1741 - DNA, 292 bp, Homo sapiens
  misc_feature (1)..(1): Wherein n may be a, c, g or t
  misc_feature (2)..(2): Wherein n may be a, c, g or t
nngctagcgatcgaaaagccggtcgacgacgtcaccgtcgatgacattgcggagcgtgccggggtctctcggcgcaccgtcttcaaccatttcccatccaaatacgacgtctacttgccgtctctcgtttcttatccgcaagaggccttggatgcctttgccacggatgttgagactcctctcgccacgctcattcgtgatctgctggaggctcgctggcgcgcggcgaacgtcgacttcgatgatctttgcatcctcatgaaaattggacgggagagctcggaactccgga

SEQ ID NO: 1742 - protein, 97 aa, Homo sapiens
  misc_feature (1)..(1): Wherein Xaa may be any naturally occuring amino acid
XLAIEKPVDDVTVDDIAERAGVSRRTVFNHFPSKYDVYLPSLVSYPQEALDAFATDVETPLATLIRDLLEARWRAANVDFDDLCILMKIGRESSELR

SEQ ID NO: 1743 - DNA, 416 bp, Homo sapiens
  misc_feature (414)..(414): Wherein n may be a, c, g or t
gggcccatctgtctttttattctggagattttcttgaatctcatgcaaaataaataaggagcctattacaactattttcttatattgttacagtgccacctaagaatgacatagaatgaaaaactcttgcctcatagagagcaaatatgttctcatccttgtttttatgcagttataaatgtgactataaaataatatgcctaatcgtcacgtatgcttctgggtctgcctcattattctgcataacatttttccagtcacagttcttctgagcccctatgaaggctgtttgtgtaaccctcctggtggtcagatgccagtgagactcctgctccactgacggcttatgcataaacaaacagcctaatgccattgttataagtaagctacccaattgtgttatgcacatacctngt

SEQ ID NO: 1744 - protein, 74 aa, Homo sapiens [sequence omitted]

SEQ ID NO: 1745 - DNA, 311 bp, Homo sapiens
gggccctaaaacggccccactgctgggcttgctttccctggcctctgtgagttccatgctcattatatggactccccatagcaacgttgagagcttgcttatcatttccagaagtgaccatggcagattaggaatatatgtttattttgaagtgggtttttttctttttaaattttacacattgttggatgaacataacatcaagggctgctttcccaactgtcttaggaaaagagctctaatgttggagccagtagccctgcgtgttctcatcccagttttgattattactgactattatactgtaatga

SEQ ID NO: 1746 - protein, 85 aa, Homo sapiens [sequence omitted]

SEQ ID NO: 1747 - DNA, 298 bp, Homo sapiens
  misc_feature (298)..(298): Wherein n may be a, c, g or t
ggatccctaggtgaactcattcctagaagttctccagcgtgaggccaagattcctgcctgggccaccttgcccagagcagctcttccctgaccccaggttgacggtccctggctacggccaggagagcaggtctgccatccacagaacagtttgaaagctgaggcgccatctccactccgcacatcggctcttacttccagcgaagctctagtagagacccaggaggaccacacttgttctgaccccagcggggcctggaggcaggccgcctggggtgtcgaggaaacagtctgaagn

SEQ ID NO: 1748 - protein, 61 aa, Homo sapiens
MCGVEMAPQLSNCSVDGRPALLAVARDRQPGVREELLWARWPRQESWPHAGELLGMSSPRD

SEQ ID NO: 1749 - DNA, 368 bp, Homo sapiens
  misc_feature (1)..(1): Wherein n may be a, c, g or t
  misc_feature (368)..(368): Wherein n may be a, c, g or t
ngttcgaagacattcagggaacgtggattcttgttcctagctcggtctccaagtagcattgtcccccgagcaaccaaagatccattccctcagtgcatacaattgtgtgacagccctgcaccagtcactgtgatcactcaagacctctggcctcagtttccccatggagaacccccttcatggaggcattgctgtccagcagtttgcatgtgttctttcatttgacccatgtaattcatttatgaggttgggaagtgtagtgatcagtcccattttacagatgaggaaactgaggtctagggaatttagcaccttgtctgaggtcacatgctgttaagatctcgtctctaaaatgggaggcttggggn

SEQ ID NO: 1750 - protein, 57 aa, Homo sapiens
MENPLHGGIAVQQFACVLSFDPCNSFMRLGSVVISPILQMRKLRSREFSTLSEVTCC

SEQ ID NO: 1751 - DNA, 301 bp, Homo sapiens
  misc_feature (1)..(1): Wherein n may be a, c, g or t
nagatctggagccgcatccgccgtatcggccggtcgcgctacaacctctttcacgagaagctcggctacctcgaaggcgggtccgatacgctgctcaacgggatgcgtgattacatcgtagcgaacggcggcgaatttcgcctaggcacgccggcacagaaggtctccatcgaaaacggaaaagttaccggcatcgaagcaggcggtgagtttctaccctttgacaaggtcatcagcacgattccgctgccttacgtgccgcgtgtgatgcccgatctgccggcgagcattctcgacgcgt

SEQ ID NO: 1752 - protein, 100 aa, Homo sapiens
  misc_feature (1)..(1): Wherein Xaa may be any naturally occuring amino acid
XIWSRIRRIGRSRYNLFHEKLGYLEGGSDTLLNGMRDYIVANGGEFRLGTPAQKVSIENGKVTGIEAGGEFLPFDKVISTIPLPYVPRVMPDLPASILDA

SEQ ID NO: 1753 - DNA, 350 bp, Homo sapiens
agatctaagcagtagtcactgaagaacttggacatctgataattctttggtaggtgaagcaggagatgtgtgtctcaggctccctggggatgatgaatatagctccgggagagatgcggaggctcatgtaagtgtaccatctaaatccagtctggcatccacatcatactccgttttatgagaggcaagtcagtaaaattttgtttcctctgtgtatgtctgtctcataagagttcattaaacttcaaaggcagaagccatgcaattcacccattgcctcacccactggtgagctgtttcttacttggtcatcctccccttctaaaaggtaacgctctggctcccaattg

SEQ ID NO: 1754 - protein, 57 aa, Homo sapiens
MRGKSVKFCFLCVCLSHKSSLNFKGRSHAIHPLPHPLVSCFLLGHPPLLKGNALAPN

SEQ ID NO: 1755 - DNA, 566 bp, Homo sapiens
atcacatcctgtgaccttctccggatcttcacatatgaggagggcctagcccgttttgccaccacgccctatatggagcccagccataacaacctggacaatgcctgcatgcacctgaccaactatgctatcaacaaacacaatgagaattttgtccgggatggcgctgtgggcagtaagaggaagctgtcgacactcaacatctggctgcaagagcacagctacaaccctggagagctgtggggggacatcgaggacatcatcatcaaaaccatcatctcagcccattctgttctacgccacaactaccgaacctgttttccccagtatctgaatggaggtacatgtgcctgttttgaaatccttggttttgacatcttgctggaccacaagttgaagccctggctgctagaggtgaggattatctcgtaggctttgcaaaaccaaggtccagaggcctccttgaataggacacctgggacaggggtacactcaggtggtggaacacagaatgggagatgtgaaagccctggggtgggcaggaatgagcagaaggcataagatct

SEQ ID NO: 1756 - protein, 143 aa, Homo sapiens
ITSCDLLRIFTYEEGLARFATTPYMEPSHNNLDNACMHLTNYAINKHNENFVRDGAVGSKRKLSTLNIWLQEHSYNPGELWGDIEDIIIKTIISAHSVLRHNYRTCFPQYLNGGTCACFEILGFDILLDHKLKPWLLEVRIIS

SEQ ID NO: 1757 - DNA, 318 bp, Homo sapiens
gtgcacccaatgagtgtcatgcgcacgatggtttcaatgttaggcgtatacgatactgattctgagggggattcaaatctttctaattattcgaaagccatgaaactagtagcgaagatgccagctcttgtagctgcttattcacgtatgcgtaaagatgaagtaccgattgaaccacgtgaagatttgagcttagctggaaactttttatacatgctctctggtgaagaaccaagtgagttgcatgaaaaagcaatgaatcgagcgttggtattgcacgcagagcatgaaatgaatgcttctaccttctcagcacgc

SEQ ID NO: 1758 - protein, 106 aa, Homo sapiens
VHPMSVMRTMVSMLGVYDTDSEGDSNLSNYSKAMKLVAKMPALVAAYSRMRKDEVPIEPREDLSLAGNFLYMLSGEEPSELHEKAMNRALVLHAEHEMNASTFSAR

SEQ ID NO: 1759 - DNA, 409 bp, Homo sapiens
tccggaaaatccacaagaaggagtcacccggcaggatcgggttgagaatcgtgcgaagaaaaccggcgtaacggttgaagtcctcgttactagcgagcagcttcaagttgccaaacatgtgcatgagcaggaagaggattaagatcagcctggtgacggccatgagggccttcgccgcgacagttgatcgcaccgctctctgatgagtagtaagtgttgtagtcgccacggaccaaagactagccaattaccagcccttttgcgcccccacctcctgtgttttcgaaaacttccctcaacccttggttcactaggggttttgctcttgattatcgcaacattttcggttcgaattttgtcgattagagacgcttcaatggggaacaccgaagtcggaatccgtcagatc

SEQ ID NO: 1760 - protein, 69 aa, Homo sapiens
MSSKCCSRHGPKTSQLPALLRPHLLCFRKLPSTLGSLGVLLLIIATFSVRILSIRDASMGNTEVGIRQI

SEQ ID NO: 1761 - DNA, 390 bp, Homo sapiens
tcagtaactatagttaacctacaaaactaaaaacaccaaaaactttaaaagataaatatttttatatcttaaaaccacccttggatgtccatgtctaatagttgtgcacaggagtttattctagagttcctcttcctttgtttaatcacaagggtgtggatcaagtccagctttgtttggctcaacacaaagcagcactcaggtaaccaaggaaccatccctcctgatgtcatctcttccttaacaaccacttcaaaatcacatgaaacagtaggcctgcccttcctttatagaatcagatgctgaaggccactgggcttttagccacagctcagggaaggcagagaaataatttcaatcccagctgttaacttaccttgaagaactttc

SEQ ID NO: 1762 - protein, 73 aa, Homo sapiens [sequence omitted]

SEQ ID NO: 1763 - DNA, 462 bp, Homo sapiens
agatctttagaattttatggtttaaattaaacatttattgaaaccctgccctttgcaaagggcataacaggccagttcttgcaggctagttattaagtctccaagttattaagtcttccactgctgtggaagctgatatggctgtgtgtctctaatgcaagccacgatgcaaggagtgctcctggacttatgtgtactccatcagctcacaaacttcatccccacactcccacaccatcatcaccaaacacacagttttctccacaaaaaccattttaggttattattttggacttgcttttccctttaaagtttttcttaaaaccattctaaaataaacacctgtataaaatgctagggccaggagagccactatagtgagtcttccaccctgaaggaagtgctctagaaatggttagaaagaaaagcaaatagagttggttggtatgtgctaattccgga

SEQ ID NO: 1764 - protein, 51 aa, Homo sapiens
MQATMQGVLLDLCVLHQLTNFIPTLPHHHHQTHSFLHKNHFRLLFWTCFSL

SEQ ID NO: 1765 - DNA, 249 bp, Homo sapiens
gcacaaatggaaggtgactgctgcagcgcaatgaatcaacagccaatactgtttgtacgtgcctctgctgttagaaaggcaagaatgataaacggaaaattgcatatattaatggaggaaggtttcactgctcatgagcctaaagatattagcacatttaccgatgatggtaacaaatatatcaccgaaacggagtttcttaggaaacactctcccaaagctccggcaacaggaacaatatctccggag

SEQ ID NO: 1766 - protein, 83 aa, Homo sapiens
AQMEGDCCSAMNQQPILFVRASAVRKARMINGKLHILMEEGFTAHEPKDISTFTDDGNKYITETEFLRKHSPKAPATGTISPE

SEQ ID NO: 1767 - DNA, 220 bp, Homo sapiens
  misc_feature (55)..(55): Wherein n may be a, c, g or t
  misc_feature (56)..(56): Wherein n may be a, c, g or t
agatgggactacaggtgcacaccaccacacatggataataataaattagttttanntgacatgatctcgctgtgtcgcacaggctggtctcaaactcctgccctcaagcattcctcctacctaaaccttccaaagtgctggagttacaggggtgattgaccgtgtctcacccccttttcctccacaaagacagtcatttagctggcgaatagtacctagg

SEQ ID NO: 1768 - protein, 52 aa, Homo sapiens
  misc_feature (19)..(19): Wherein Xaa may be any naturally occuring amino acid
RWDYRCTPPHMDNNKLVLXDMISLCRTGWSQTPALKHSSYLNLPKCWSYRGD

SEQ ID NO: 1769 - DNA, 275 bp, Homo sapiens
gaattcgccgcagagggcgatgatttggagacacgcgcagtggagaccttcatcggggccactgtcgacaaccccgtctacggacgcatcctgatggtggccccgttcaccgagccgaccctcggcagcgccgggttcgcgggttcgcttgccttcgcctcacttgccgagaaggcgctgatcgatgtcgatgatccgggacgccgccgattcctgtcggtatcgctcgtcggcgccgcctcgggtgccatcatcgactatctgcgcggagatct

SEQ ID NO: 1770 - protein, 91 aa, Homo sapiens
EFAAEGDDLETRAVETFIGATVDNPVYGRILMVAPFTEPTLGSAGFAGSLAFASLAEKALIDVDDPGRRRFLSVSLVGAASGAIIDYLRGD

SEQ ID NO: 1771 - DNA, 176 bp, Homo sapiens
tccgaagagtttaaagatgcgggaatgcgaagccacgtatggggtaacgtcaagctggatacaaccggtttgatcgaccgtaaagtggttcgtttcatgaacgatgcctctatttatgcctttctttccatgcagcaggctatcgctgacgcgggcctgagcgatgaggtggatcc

SEQ ID NO: 1772 - protein, 58 aa, Homo sapiens
SEEFKDAGMRSHVWGNVKLDTTGLIDRKVVRFMNDASIYAFLSMQQAIADAGLSDEVD

SEQ ID NO: 1773 - DNA, 292 bp, Homo sapiens
tggccaagcagaagcagtattgcaggggaagggtggggagagactgtgctatgagctctgagcaggaggcaggacatggagagaagggtgggagacggacagagccagctgtgccagccgagggaccagagtgggcagtggggacggagcacagaccaccgcccacaagggtctctcctgtgacttctggcttcccgagggcagaggctgggatgggcatgtggcggctggcacccaggaagctccgccaggtctacgccaagccaacctggctcaacttttgcttcctgct

SEQ ID NO: 1774 - protein, 80 aa, Homo sapiens
MSSEQEAGHGEKGGRRTEPAVPAEGPEWAVGTEHRPPPTRVSPVTSGFPRAEAGMGMWRLAPRKLRQVYAKPTWLNFCFL

SEQ ID NO: 1775 - DNA, 311 bp, Homo sapiens
gtgcacggctgcgaggtggcgccggaaggttttgatgcccgattttctgcgctgcgtaggcactacgtgtaccggataaccaccagcccgcggggtgcgctgccgacgcgggcgcgcgatacggccgaacggttcaaaccggtagacatcgatgccatgcaggatgcggccaacgcgctggtaggcctgcacgattttgcggccttttgcaaggccaagccgaatgccaccaccattcgagaattacaggaatttagctggcaggatgtctcgacaccggaagaaccgcactcttgaagcccggtgaccgt

SEQ ID NO: 1776 - protein, 98 aa, Homo sapiens
VHGCEVAPEGFDARFSALRRHYVYRITTSPRGALPTRARDTAERFKPVDIDAMQDAANALVGLHDFAAFCKAKPNATTIRELQEFSWQDVSTPEEPHS

SEQ ID NO: 1777 - DNA, 185 bp, Homo sapiens
  misc_feature (185)..(185): Wherein n may be a, c, g or t
ccatggaaattagcaatctctataaattaggcctttttacccagagacccagttgttgggtatttacgaggaaaactcttttttcccaaaatttttcccaaaaccagtcaaaacatcagaacataaaatcagttaacatccagaattatcagtcatattccagatattatggttgagaattcccn

SEQ ID NO: 1778 - protein, 57 aa, Homo sapiens
MEISNLYKLGLFTQRPSCWVFTRKTLFSQNFSQNQSKHQNIKSVNIQNYQSYSRYYG

SEQ ID NO: 1779 - DNA, 423 bp, Homo sapiens
ggatcccttgatggtggggactgtctttactaaagctacatcaggcctactaagcaggagctggcctgttgtctaccacccctagtaagcagggtaggagcaacagattcaagatgagagaagtatgtgtttgtttttaacatgatgctagttagagaacagtcttatcagcaaattactctggccactcttggagctagatattttccaaattttctctgaaggtgagttttatatcaataagtatgaatagagaatttactttagggtcccatggttggtagcccacagcttcttctaagggcattggcctctcaggtgaacttgcagagacttggccaaatttgcttcctctttcccctggggcagttgcctcatatggggtcattacaagaccccttgggggtgctgctttgctgcttc

SEQ ID NO: 1780 - protein, 63 aa, Homo sapiens
MTPYEATAPGERGSKFGQVSASSPERPMPLEEAVGYQPWDPKVNSLFILIDIKLTFRENLENI

SEQ ID NO: 1781 - DNA, 389 bp, Homo sapiens
  misc_feature (311)..(311): Wherein n may be a, c, g or t
  misc_feature (389)..(389): Wherein n may be a, c, g or t
tctagagaagggggaggaaagtaccctgtgtccaggatctgcacccctcctccctccagtactcggctgagatcacagttcctcctgtcatgccctgggtccttatttccctcttcctgggaacttctaccaagaggagaaagggccgatacctgttatgtcccagttcctagagtgtgagtgaaccaggggaaatgaaagtgagtctccactacagaagccctggtcatcaggaactatcagagagaatccaagcaaggatgagccatcagaggacagagggcctgggacatatgaacctggatctggtntgtgggatctgtcctgggtccagatgatggggccttcggagagaggctggagtgtgctgccgacgtcgaatatcattn

SEQ ID NO: 1782 - protein, 86 aa, Homo sapiens
  misc_feature (26)..(26): Wherein Xaa may be any naturally occuring amino acid
MIFDVGSTLQPLSEGPIIWTQDRSHXPDPGSYVPGPLSSDGSSLLGFSLIVPDDQGFCSGDSLSFPLVHSHSRNWDITGIGPFSSW

SEQ ID NO: 1783 - DNA, 328 bp, Homo sapiens
  misc_feature (328)..(328): Wherein n may be a, c, g or t
gaattctagcagggaggatgagtcaaaaaccctatccttataaaaaatctcttacatttgacagagaactggatggctaatgaattaatatctggaagatctttttttttttttaccaagtgcttaagcatgagcaattatttctctgtgcttaaaatgatcctcataagaggacttttaaaaaaccagcaaaaacctcccttttgtgtgttgagtcttgaaacaaatgatttgaaatggacaataaagcctaaagaaagaccagtgcggaagacgtgccccttttttcgcagcttcttgggaggtggaaatgggaggatctctccan

SEQ ID NO: 1784 - protein, 85 aa, Homo sapiens
MANELISGRSFFFFTKCLSMSNYFSVLKMILIRGLLKNQQKPPFCVLSLETNDLKWTIKPKERPVRKTCPFFRSFLGGGNGRISP

SEQ ID NO: 1785 - DNA, 329 bp, Homo sapiens
tggccacaatcactcccatgagcggtctccacaagtggcatttctcaacagttttcaagataacaagttgatgtgatggttataaagactatgataggaaaaagcattatggaaagcagatgtgaaatacaggaatggactgtcactagtcataccgtaagtctctatggcagatggacttcaagtgacagctgctttctgtgctcaccctcctaccacccaacaattccatctctgccctgtgagacctgggttatccttctggagctgaggtaggagcaggggagaaaacatgctgatatgatggggatctgcattccaaaagatct

SEQ ID NO: 1786 - protein, 66 aa, Homo sapiens
MVIKTMIGKSIMESRCEIQEWTVTSHTVSLYGRWTSSDSCFLCSPSYHPTIPSLPCETWVILLELR

SEQ ID NO: 1787 - DNA, 366 bp, Homo sapiens
tggccaataaagactgaaataaatgatatttcctcccagaaaaaaaagtatacttctttccatcccaggctgataagagtttgagggcaaagtgaatgtaatctgcacttgagcaagatttgagatttttagcaactgggttatatttagtttactaatggtttcaattattttgggggacattagaaatttctagttcaatatgtcaactgctatttacatcttcattcaaagtaataactcttgaaaaaaataagcccttattcccctcgtcataccccaaatagggcatgattgaaagtagggattaggcctttccttccagcagtgctcagaatttgtgtacttgtgataatctgtagatct

SEQ ID NO: 1788 - protein, 61 aa, Homo sapiens [sequence omitted]

SEQ ID NO: 1789 - DNA, 240 bp, Homo sapiens
acgcgtgaaggggggggcaaggtgaggctgcattattagataaatgaggttgtactgtcaggggatgaagtgtacttgtagtagagatgacgtcctgctggatcagtcggcttttgctccatcagagaacacaggcccaccacaagaagaaggagagtgtccgactcagaggataaatgagggtgtcctgctggataaatgagggggcccgtccagtgaatggagtgctggtatcaaaag

SEQ ID NO: 1790 - protein, 52 aa, Homo sapiens [sequence omitted]

SEQ ID NO: 1791 - DNA, 327 bp, Homo sapiens
gcgtttgcgaccggccgtaacccgcagaatgcggcggtgtgttgcactgagggtattttgcagttgctggatgagcgcgagatgcgcggcgtgctcggccacgagctgatgcacgtgtacaaccgcgatatcctcacctcttcggtggcggcgggtatcgcctccatcatcggtacgattgcgcagattctttcgtttggcgcgatgttcggtggatccaaccgcgatggtgaacgttccaaccccctcgccatgttcgtggttgctatgctggctcccattgctactcaggtcatccagatggctattagccgcacccgtgaattc

SEQ ID NO: 1792 - protein, 109 aa, Homo sapiens
AFATGRNPQNAAVCCTEGILQLLDEREMRGVLGHELMHVYNRDILTSSVAAGIASIIGTIAQILSFGAMFGGSNRDGERSNPLAMFVVAMLAPIATQVIQMAISRTREF

SEQ ID NO: 1793 - DNA, 298 bp, Homo sapiens
  misc_feature (268)..(268): Wherein n may be a, c, g or t
  misc_feature (286)..(286): Wherein n may be a, c, g or t
  misc_feature (294)..(294): Wherein n may be a, c, g or t
  misc_feature (298)..(298): Wherein n may be a, c, g or t
ccggaccatctgagagcagcttgtctacttcgactcgagcatcgaaatgccagcttggaggaattgggcaaggtgcacgagcctccgttgacgaaggacgccattgctggtcggattcgtcgcctgttggctctagccgacaagacggcccgaagcaatggcgagctcaccacgttggagagccttcctgccgagatgcgtgatgatcgtggctgacggtcattacagcgcggttacagggtaaacgtaagtcgggctccattcccancgtggaaggtattcgcgncaccttantatn

SEQ ID NO: 1794 - protein, 71 aa, Homo sapiens
PDHLRAACLLRLEHRNASLEELGKVHEPPLTKDAIAGRIRRLLALADKTARSNGELTTLESLPAEMRDDRG

SEQ ID NO: 1795 - DNA, 320 bp, Homo sapiens
gaattccacgatgctaagttcatggtggacattgacctggatccaggctgtaccttgaataagaagatcagaaatgcacagttggcacagtataacttcatccttgttgttggtgaaaaagagaaagccagtggcactgtgaacatccgcacgagagacaacaaggtccacggagagcggactgtgggggaaacagtggagcggctgcagcagctcaagcagttgcgcagtaagcaggcagaggaggagttttaacaggcacatggcccgagctggctcagtgtagaggaagatgggtgcccatcacgtgaccttgtgcg

SEQ ID NO: 1796 - protein, 84 aa, Homo sapiens
EFHDAKFMVDIDLDPGCTLNKKIRNAQLAQYNFILVVGEKEKASGTVNIRTRDNKVHGERTVGETVERLQQLKQLRSKQAEEEF

SEQ ID NO: 1797 - DNA, 156 bp, Homo sapiens
acgcgtatgcagacgcactcgcgaccgacgttcgcggagccatcgactaggcgtcccaccgccctcagcgggttgtggccacatcaccgccaagccgcacgaactccacgcacggccctctctccaccgccaggtcgaacccctccccctgtcgac

SEQ ID NO: 1798 - protein, 50 aa, Homo sapiens
MQTHSRPTFAEPSTRRPTALSGLWPHHRQAARTPRTALSPPPGRTPPPVD

SEQ ID NO: 1799 - DNA, 208 bp, Homo sapiens
  misc_feature (1)..(1): Wherein n may be a, c, g or t
ngctgaagactgtaattcaagctaaaggaagagccgcaagaataatggccaatgcataaatttagatgtgaaaaacagacatatccattgatagtattattgggacagccactccatttaaaaatagggcatcctagtccttttccctttataatgctctcctcttgcttaactggctctgttctctatagttctgtaccatcctctg

SEQ ID NO: 1800 - protein, 52 aa, Homo sapiens [sequence omitted]

SEQ ID NO: 1801 - DNA, 453 bp, Homo sapiens
  misc_feature (1)..(1): Wherein n may be a, c, g or t
  misc_feature (2)..(2): Wherein n may be a, c, g or t
  misc_feature (409)..(409): Wherein n may be a, c, g or t
  misc_feature (430)..(430): Wherein n may be a, c, g or t
nnagatctgttcttagcctctctccttggcttgtagatggccatcttctccctcttgagaagaatatagagttccctctgttcgtatctgggtccaaatttcctcttcatataaggacactaaccatagtggattagggcccattcttatgaccttattttaattttatacctctttaaagaccctgtatccaaatatacaagtcacattctgaggtattgggaggtagaacttcaacaataaaaatctgggggaggggacacaattcaacccataatatatgctaacactattcaaaagaaagctggagtagctctattaattgcagtcaatgcatacttcagaacaaggaaaattatcagggatgaagaagaacactacctaataataaatggttcaattctccagnaagacaaaacaatccttatgnggtacacacctaacacagagcat

SEQ ID NO: 1802 - protein, 70 aa, Homo sapiens
  misc_feature (56)..(56): Wherein Xaa may be any naturally occuring amino acid
  misc_feature (63)..(63): Wherein Xaa may be any naturally occuring amino acid
KSGGGDTIQPIIYANTIQKKAGVALLIAVNAYFRTRKIIRDEEEHYLIINGSILQXDKTILMXYTPNTEH

SEQ ID NO: 1803 - DNA, 179 bp, Homo sapiens
aaatccatgaaagaggaaggaggtgagaaaacaacagtctttcctcatttggagtggatggcttggttctgcttgctgcaggtggtgagcaatggactggatatactgtccacccatgggaaatttctgggaaacagctgcaaaaccccaccttgtctacatctcactgtcatagatct

SEQ ID NO: 1804 - protein, 57 aa, Homo sapiens
MKEEGGEKTTVFPHLEWMAWFCLLQVVSNGLDILSTHGKFLGNSCKTPPCLHLTVID

SEQ ID NO: 1805 - DNA, 345 bp, Homo sapiens
  misc_feature (1)..(1): Wherein n may be a, c, g or t
naagaatttacaccaatttttcacaaagaatccagaaattacaagaaaagtaaacacttcccaattcattctgtgagacctgtattactttaatgtcaaagacattcaagacattctcaagacaaagacatcacaagaaatgaaaactgcagatcaatatctcttacaaatgtgaacacagaaatcctcaacaaaacactggcataccaaattcagcaacatatgagaattatacatcatgactaaatgggatttacctcatgactgcaagtttgctttaatattcaaaaaccaattagtgtaacataccctactaatagaatacaaaacaaaaaccacttgatc

SEQ ID NO: 1806 - protein, 50 aa, Homo sapiens
CQRHSRHSQDKDITRNENCRSISLTNVNTEILNKTLAYQIQQHMRIIHHD

SEQ ID NO: 1807 - DNA, 288 bp, Homo sapiens
atgaacaagcctgtcacggaacaggactcactgttccatatatgcgcaaacatccagaaaagactggaggtgttacctcaactcaaaccttttttacaattggcctaccaatcgagcgaggttttgagtgaaaggcaatctcttttgctatcccaaaagcagcatcaggaactgctcaagtccaatggcgctaaccgggacagtagcgacttggcaccaactttaaggtctagctctatctccacagctaccagtctcatgtcgatggaaggtatatcatacacgaat

SEQ ID NO: 1808 - protein, 96 aa, Homo sapiens
MNKPVTEQDSLFHICANIQKRLEVLPQLKPFLQLAYQSSEVLSERQSLLLSQKQHQELLKSNGANRDSSDLAPTLRSSSISTATSLMSMEGISYTN

SEQ ID NO: 1809 - DNA, 610 bp, Homo sapiens
  misc_feature (1)..(1): Wherein n may be a, c, g or t
  misc_feature (2)..(2): Wherein n may be a, c, g or t
nnacgcgtaaaccttatgctaacaagcctcttcgttcacctcccttgtaacggcagtgggaagggtaagcaaaataaatcacattgcgagaaatgtaaaaaaagaatggtctctagcgggatcgaaccgctgatccccgcgttattagcacggtgccttaaccaactgggccaagagaccattgttatctgtttttcaccctccctccacactatcaaaccaacgtcacaaatgtgtgccagaaccaccgctcattatctctgtgccacaaaaatcaacttacactgtcattcgaatttccggcaaactccgactgagaaatgttcgtactacttcctttctagggcacattaaaggaaaaactcattgaatgcacccttcacaaatcttaatatctctgacctttgcattgtattaaccaagcaaccctccctgtgcaagtagaagccctggatcctttgtggtcgtaaaatgaacaaataccaataagacgaaaacaaaaacaaaaacaaaacgacatagcaacaatgcggaattatttaaggctggcactctttccgcatgtttatcacaattatttccactttcacttaaaaccttgtttaagctt

SEQ ID NO: 1810 - protein, 112 aa, Homo sapiens
MLTSLFVHLPCNGSGKGKQNKSHCEKCKKRMVSSGIEPLIPALLARCLNQLGQETIVICFSPSLHTIKPTSQMCARTTAHYLCATKINLHCHSNFRQTPTEKCSYYFLSRAH

SEQ ID NO: 1811 - DNA, 306 bp, Homo sapiens
acgcgttgtcgtctctccgacaaaacaggtaacttcagttgtaaagtaataaaggtatttgcttccttcactttgccaggaaatcttgaaagtagattgaggtgttgaatgttttcaaactcataattcttagaggaaagttctgtaagaagttggtagtaagttctaaccaacatcaaacttctgctattctcgtgttaatacatgccctgtgcctctatctgtcattacttggatactggaatggccctcttcttttgttttgtcttcccaaatcccagccccttcttctatcccttcacgcgt

SEQ ID NO: 1812 - protein, 58 aa, Homo sapiens [sequence omitted]

SEQ ID NO: 1813 - DNA, 210 bp, Homo sapiens
acacacacacacacgcccacgcacacacacgtccccacccaatacacagacactcaacactcacacacacgtgcccacaggcgcgcacacacactcaacaaagaaagggaccagacagatggaccctgcacacagcacctgaagcaaagggctgcgggtcctcagtgggcctcacgacctctgccggtgacccaaggacgggacccggct

SEQ ID NO: 1814 - protein, 70 aa, Homo sapiens
THTHTPTHTHVPTQYTDTQHSHTRAHRRAHTLNKERDQTDGPCTQHLKQRAAGPQWASRPLPVTQGRDPA

SEQ ID NO: 1815 - DNA, 288 bp, Homo sapiens
  misc_feature (1)..(1): Wherein n may be a, c, g or t
  misc_feature (70)..(70): Wherein n may be a, c, g or t
  misc_feature (71)..(71): Wherein n may be a, c, g or t
nggatccctccagctgttagattgaaagtgaaaggatggaaaaatataatccatgcaagtagtaaccaannaagagcaggggtagctataccaatatcacacaaaacagactttaaattgaaaaagtttagaagaaacgaagaaggacattacatgttaattaaaagttcaatacaataagaatatatgacaattatagatatttatatacctaatgacacaccatcaaattacatgaagcaaaaaactgacagaaatgaagacagaacagacagttctacaatacta

SEQ ID NO: 1816 - protein, 59 aa, Homo sapiens
  misc_feature (1)..(1): Wherein Xaa may be any naturally occuring amino acid
  misc_feature (24)..(24): Wherein Xaa may be any naturally occuring amino acid
XIPPAVRLKVKGWKNIIHASSNQXRAGVAIPISHKTDFKLKKFRRNEEGHYMLIKSSIQ

SEQ ID NO: 1817 - DNA, 208 bp, Homo sapiens
  misc_feature (1)..(1): Wherein n may be a, c, g or t
  misc_feature (208)..(208): Wherein n may be a, c, g or t
nctgaccacatctcctggacacacgtgcacactctctgctccctgagaacacatgtgcacactccatgctccttccaattctgcagatctccccctggacacacgtacacactctctcagttgctggggtttgctccttcctctttgccctggacagatgttcccctgggacatgcgtgcccactccatgctcccccggggcacacgn

SEQ ID NO: 1818 - protein, 63 aa, Homo sapiens
  misc_feature (63)..(63): Wherein Xaa may be any naturally occuring amino acid
MEWARMSQGNICPGQRGRSKPQQLRECVRVSRGRSAELEGAWSVHMCSQGAESVHVCPGDVVX

SEQ ID NO: 1819 - DNA, 342 bp, Homo sapiens
gatcagactttgaaccaattccaagaactgctaagcatttcaaaggattctaagcacctagttgttttaattgcgaaggtgctttatgatgtaggtgaatctgacacaaaggaaattgctttacaggaactaacagaatatatagccacaagcggcgcagacttgttagtaacactaacgattgcagctatgtcaattctagacgataagcgtgaagatttaagcattattttagaagaattgaaagctttgccattatccaaacaaataatagataagcacaaagacgcaccatatctgatagaagaaattattaagagactttatcgtaacgataccggt

SEQ ID NO: 1820 - protein, 114 aa, Homo sapiens
DQTLNQFQELLSISKDSKHLVVLIAKVLYDVGESDTKEIALQELTEYIATSGADLLVTLTIAAMSILDDKREDLSIILEELKALPLSKQIIDKHKDAPYLIEEIIKRLYRNDTG

SEQ ID NO: 1821 - DNA, 219 bp, Homo sapiens
  misc_feature (219)..(219): Wherein n may be a, c, g or t
gcacaatcagacaacagtgttttcagtactaccaacattgaccattcatcgccgatcacccctcacatgtacacttttaatcagtttaaaaacgaaagtgcttgtgacagtgccataagcgtaacgagtctacctaatcaaacccaaaatggtaacatgccattatcaagcaattatcagaatatgatgctagaagaaaggaataaagagaatagaatn

SEQ ID NO: 1822 - protein, 73 aa, Homo sapiens
  misc_feature (73)..(73): Wherein Xaa may be any naturally occuring amino acid
AQSDNSVFSTTNIDHSSPITPHMYTFNQFKNESACDSAISVTSLPNQTQNGNMPLSSNYQNMMLEERNKENRX

SEQ ID NO: 1823 - DNA, 292 bp, Homo sapiens
tccggattacaggtcaaagtccatcatggagcgaagccaaggcaggaatccaaaggcggggactggagcagagactgtgaggagtgctccctgctggcttgctccagcctcatgttcaactcaccccaggctcgcctgtcagagatagcatcagccatggtgggctggttcctgctgtatcgattattatcaagaaaatgccgcacagaggaatttgatggaagcagttcctcaattgtgtgcatggcggggggtggggggacggggtagagggtgcgggggtctgatgctc

SEQ ID NO: 1824 - protein, 73 aa, Homo sapiens
MHTIEELLPSNSSVRHFLDNNRYSRNQPTMADAISDRRAWGELNMRLEQASREHSSQSLLQSPPLDSCLGFAP

SEQ ID NO: 1825 - DNA, 408 bp, Homo sapiens
  misc_feature (1)..(1): Wherein n may be a, c, g or t
  misc_feature (188)..(188): Wherein n may be a, c, g or t
  misc_feature (221)..(221): Wherein n may be a, c, g or t
  misc_feature (258)..(258): Wherein n may be a, c, g or t
  misc_feature (272)..(272): Wherein n may be a, c, g or t
  misc_feature (300)..(300): Wherein n may be a, c, g or t
  misc_feature (317)..(317): Wherein n may be a, c, g or t
  misc_feature (328)..(328): Wherein n may be a, c, g or t
  misc_feature (354)..(354): Wherein n may be a, c, g or t
  misc_feature (377)..(377): Wherein n may be a, c, g or t
ntgatcaccgatggggaatcccatgatgctgataaactcaatgccacggcaaaggccttgcgggacaaaggcattcttgtcctggctgtggggattgatggtgccaatcccgtggagctgttagccatggcaggatcaagcgacaagtacttcttcgtggagacttttggaggtctgaagggaatatnttcagatgtgacagccagtgtctgcaactcttncaaagtagattgtgaaattgacaaagtagatcttgtnttccttatggatgngttcactagcattcagccaaatgacttncagaaaatgaaggaatntctggcatctngtgttcaagaacttgatgtcagcctncacagagtgcgaataggagcggncccagttagcgatacctatcaccccggagtt

SEQ ID NO: 1826 - protein, 136 aa, Homo sapiens
  misc_feature (1)..(1): Wherein Xaa may be any naturally occuring amino acid
  misc_feature (63)..(63): Wherein Xaa may be any naturally occuring amino acid
  misc_feature (74)..(74): Wherein Xaa may be any naturally occuring amino acid
  misc_feature (91)..(91): Wherein Xaa may be any naturally occuring amino acid
  misc_feature (100)..(100): Wherein Xaa may be any naturally occuring amino acid
  misc_feature (106)..(106): Wherein Xaa may be any naturally occuring amino acid
  misc_feature (110)..(110): Wherein Xaa may be any naturally occuring amino acid
  misc_feature (126)..(126): Wherein Xaa may be any naturally occuring amino acid
XITDGESHDADKLNATAKALRDKGILVLAVGIDGANPVELLAMAGSSDKYFFVETFGGLKGIXSDVTASVCNSXKVDCEIDKVDLVFLMDXFTSIQPNDXQKMKEXLASXVQELDVSLHRVRIGAXPVSDTYHPGV

SEQ ID NO: 1827 - DNA, 427 bp, Homo sapiens
acgcgtctaggctcaacgggttaccccggcgcacctgggtttgcccgatcacagcggcacgcatccgcacccccggcgccgaggccacctgcgcaacactctcagacaagctcgcactcctggccgttctcgacaggagcgcatcatggaccagcccagcaatctgttcatgaccgaccacattcggatggtaccaattcttttcatcttgacttggctctgacaatatgacgccatttccattatatgagtagccagcggtctcaaagacggcgttgatccaacgttgcggattctggtcaccgttatgaaccagcggttcgggttcgtgggtgttgaagaggctggtggtgggggtgtaggtcactttgagggcatgggatgtgttccaggccttgatggtggcggcttgcctggtgcggaattc

SEQ ID NO: 1828 - protein, 64 aa, Homo sapiens
MEMASYCQSQVKMKRIGTIRMWSVMNRLLGWSMMRSCRERPGVRACLRVLRRWPRRRGCGCVPL

SEQ ID NO: 1829 - DNA, 282 bp, Homo sapiens
  misc_feature (1)..(1): Wherein n may be a, c, g or t
ngcccttccacatgccttgcaccagatgtcttctccaagctctcaacgttaactcctttgaggcctggcaatggcttcagtttcttctcgtattgttctgccttctccaagttagtgcgcgctgaagtcattactagcccagccaaagcttctatgcttccatggctcttcacaggttcctcatacaacaaacaagcctcttcatcacgtccatggctgagcttaaatgcagcagcctcccgtgttaatatatctaatttgttatcctcggtcatggaattc

SEQ ID NO: 1830 - protein, 91 aa, Homo sapiens
MTEDNKLDILTREAAAFKLSHGRDEEACLLYEEPVKSHGSIEALAGLVMTSARTNLEKAEQYEKKLKPLPGLKGVNVESLEKTSGARHVEG

SEQ ID NO: 1831 - DNA, 414 bp, Homo sapiens
  misc_feature (1)..(1): Wherein n may be a, c, g or t
  misc_feature (2)..(2): Wherein n may be a, c, g or t
nnacgcgtactgatatctcatgggtgtgggccagtagcaggagtagatgaggcgggccgtggttcctgcgcaggaccacttactgtggctgcgtgtattctccctatgcagccggtaccggatctggacggacttaccgattctaaaaagctcactcccgcgcggcgtgaacgattgttcccccttattcaaaaatatgctgtggcctggtctattgtgcactttagtgcagcagagattgatgatagtggtattcagcatgccaatattgaaggtatgcgacgggcagttgcccagctagcgatatctcctggctatgtattaactgatggtttttcagtaccaggtctaccaatgccgtcacttcctgtcattaaaggcgatgccaatgttttgtgtatagcggctgctagc

SEQ ID NO: 1832 - protein, 138 aa, Homo sapiens
  misc_feature (1)..(1): Wherein Xaa may be any naturally occuring amino acid
XRVLISHGCGPVAGVDEAGRGSCAGPLTVAACILPMQPVPDLDGLTDSKKLTPARRERLFPLIQKYAVAWSIVHFSAAEIDDSGIQHANIEGMRRAVAQLAISPGYVLTDGFSVPGLPMPSLPVIKGDANVLCIAAAS

SEQ ID NO: 1833 - DNA, 249 bp, Homo sapiens
  misc_feature (249)..(249): Wherein n may be a, c, g or t
ctaggtatttgggttgtctcttatccatcactctttttgcaagatatatatttgaagtatcttgggtggacactaaatgacaagaatgctggagttaggaggacttctgttcttgccttgcaaagtctttatgaagtggatgagaacataccttctcttggtctctttactgagaggttttacaccaggattatccagcttgctgatgatattgatgtttcagtagctgtgtcagctataggtttgatn

SEQ ID NO: 1834 - protein, 83 aa, Homo sapiens
  misc_feature (83)..(83): Wherein Xaa may be any naturally occuring amino acid
LGIWVVSYPSLFLQDIYLKYLGWTLNDKNAGVRRTSVLALQSLYEVDENIPSLGLFTERFYTRIIQLADDIDVSVAVSAIGLX

SEQ ID NO: 1835 - DNA, 498 bp, Homo sapiens
agatctgggagaaccatatgccaaatcaggaagcctgggagcagacaatgttcgtggctccagctggtgggcgggcagtcgatccacaggtacctgaggttgaaggtgaaggataaagaagggactcaggataggggactccatgttcagaactagggtatgtggagcctgggtcaaagctggaaatggggtacactcacagagctggtatggccccttcatcctgccagtagagatttcctttgaatgttatttgccccaacctgatttcaagcccctgtatcctgcttctctctatttcccaagtcacctgatttccacttgcaggttctaccctttttagagtctgggggaagaaaactaacattcgttaagcacctgacgtatgctaggctcattgctaggtgctttatgtgttatgccttttaatcctcaccctaagtgttctgtaaacacagaaggaacttgaagctcaaagaggttgaacaacttgctagc

SEQ ID NO: 1836 - protein, 74 aa, Homo sapiens [sequence omitted]

SEQ ID NO: 1837 - DNA, 446 bp, Homo sapiens
agatctttgggaccattggccgtaaaagggagggccacagtggactggcggtaggaagtaggaggaaccccagaggtgcagggctggatggagtcctgtgtgatagaagccagtgtgaggcaagaggggaaagtgtagttggggcataaagcagaagctcctgggaggagcagcctctggctaaatggtgacattggctgagttgaccttcaggaccttagactctccttctctcctcactcttcccaggatcctgtcaagatggaattttgggaaaacacacaatggcccaggtgttccatcctccctcagccaaagctgctccttgcagaggcctggcgagcccactgacatggaggcagaaggggcgtcagggcccagtgccgactcaagggtggtggtgggagaggggctgggaagaactgctttagaataaaagtcccctc

SEQ ID NO: 1838 - protein, 83 aa, Homo sapiens [sequence omitted]

SEQ ID NO: 1839 - DNA, 261 bp, Homo sapiens
  misc_feature (1)..(1): Wherein n may be a, c, g or t
ncctgccgtggtctttgccggtggtcatccttgttgccgccatcgcaacctgggggtacgcgcgggctttccgtaccaaggttgttgatccacaacgtgaggtcgaggcgaaccgagggctcatctcgctggcattgggtaaagcgatcgccctatctggcgctgcgcttgtcggcgcttgtatcgtgtacgtgctgaccttcgtgtggcatctcaacattccctacccgcgtcagcgcgccatcgtcggaggagtgacgg

SEQ ID NO: 1840 - protein, 73 aa, Homo sapiens
MLRCHTKVSTYTIQAPTSAAPDRAIALPNASEMSPRFASTSRCGSTTLVRKARAYPQVAMAATRMTTGKDHGR

SEQ ID NO: 1841 - DNA, 341 bp, Homo sapiens
gcgtggatggggatcctgaaaaacaatggcgtgctgaataacttcttgctgtggctcggcgttatcgatcagccgctgacgattttgcacaccaatctggcggtgtatatcggcattgtgtacgcttatctgccgtttatggtactgcccatttatacggcgctgacgcgcattgattactcgctggtggaggcctcactggatctcggtgcccgtccgctgaaaacgtttttcaatgtgattgtcccgctcaccaaaggcggcattatcgcggggtcgatgctggtgtttatcccggcggtcggtgagtttgttatcccggaactgctcggcggcggccg

SEQ ID NO: 1842 - protein, 113 aa, Homo sapiens
AWMGILKNNGVLNNFLLWLGVIDQPLTILHTNLAVYIGIVYAYLPFMVLPIYTALTRIDYSLVEASLDLGARPLKTFFNVIVPLTKGGIIAGSMLVFIPAVGEFVIPELLGGG

SEQ ID NO: 1843 - DNA, 165 bp, Homo sapiens
acgcgttcgagacgatgcgcggccaggccgcgccagtacagcaggcgcgtgcccggtgccaggatctcgacgagcacgtcgtcttcatagcgcaggcccgcttcgtcgtcggcgagatccatcgcgacgaagtatcgggcgagccccgtgggcgcgtcggggcgc

SEQ ID NO: 1844 - protein, 50 aa, Homo sapiens
MRGQAAPVQQARARCQDLDEHVVFIAQARFVVGEIHRDEVSGEPRGRVGA

SEQ ID NO: 1845 - DNA, 322 bp, Homo sapiens
  misc_feature (1)..(1): Wherein n may be a, c, g or t
ncatttgtgaaatggtttctcagatctcagtactattgacatttgggacagataattgttggggtgagctaggggctctcctatgcattgtaggatgtttaatagcatcctcagcctctatccacaagatgacagtagcatccccaccccaccccaacaatcctgacaaccagtgtcttcacacattgtaaactgttccctaagaagcaaaatcattcccgggttggaaaaccactgctctaagaaaacccaagggccacatcacactacaccaactaaaactagattattcatagctattcttactagtagaatagctagc

SEQ ID NO: 1846 - protein, 59 aa, Homo sapiens
MVSQISVLLTFGTDNCWGELGALLCIVGCLIASSASIHKMTVASPPHPNNPDNQCLHTL

SEQ ID NO: 1847 - DNA, 383 bp, Homo sapiens
  misc_feature (376)..(376): Wherein n may be a, c, g or t
  misc_feature (380)..(380): Wherein n may be a, c, g or t
  misc_feature (383)..(383): Wherein n may be a, c, g or t
agatctggtgagggcgccttcctggtttgcagaaggccaccttctttctgtgtcctctcaaggtgaagagggagctccaggctctttctcttcttataaggacattgatgccatcatggggcccccactctcataatggcatctaaacctaaggccgcacatctgaaaaccatcacatttgggggtaggacatcaacatatgaatttgaggcagacataaagatttgatctgtgatgatatatcatatacaacaggctggagataatagcctttgtagtcatttaaatttgtaaaaataatttgagctatcaattgtatacaagggtatataatagtctttgtagccatttaaatttataaaaataatttgagctntaanttn

SEQ ID NO: 1848 - protein, 58 aa, Homo sapiens [sequence omitted]

SEQ ID NO: 1849 - DNA, 354 bp, Homo sapiens
gccggcgtcgcttttggcctcctgacccgcactgaggaagacgtcctgggcgaccccgttgatcgctggcagcacaaagtggagccatggtcggccggtgtcatcgtcccctttttcgctctcatgagcgccggtgtccacgtcagcgggaaaaccttcctggccctgtggactcacccaatctcgctaggtatcgtctgcgggctcattcttggaaaggtcatcggcatcaccctcggatcctgtctcaccgcccgattcacctcagctgagctgggtcgcggtgttgtatggcgcgacatcatcgcggtagctatattggcgggcatcggatttaccgtctcgatgctcatg

SEQ ID NO: 1850 - protein, 118 aa, Homo sapiens
AGVAFGLLTRTEEDVLGDPVDRWQHKVEPWSAGVIVPFFALMSAGVHVSGKTFLALWTHPISLGIVCGLILGKVIGITLGSCLTARFTSAELGRGVVWRDIIAVAILAGIGFTVSMLM

SEQ ID NO: 1851 - DNA, 338 bp, Homo sapiens
ggatcctgtgggtacctcacttggccgcttgtttctgggggttgctgggagctcgactttggatcgcacttctgacaccatctgttaagggaaaacttgagacaaatttaacagagtttatttgagcaaagaatgatttaagagttgggcagcccctgaaccagaatagattcagagccactctggtgttgttgcatggtcagagaggatttatggatggaaaaaggaaagtgacttatggaaaatggaagtgaggtgcagaagcaggcagattggttgcaccttgacatatgccttatttgaatgtggtttgaacagtttgctacctatgaatgcat

SEQ ID NO: 1852 - protein, 50 aa, Homo sapiens
MSRCNQSACFCTSLPFSISHFPFSIHKSSLTMQQHQSGSESILVQGLPNS

SEQ ID NO: 1853 - DNA, 163 bp, Homo sapiens
  misc_feature (82)..(82): Wherein n may be a, c, g or t
  misc_feature (121)..(121): Wherein n may be a, c, g or t
  misc_feature (122)..(122): Wherein n may be a, c, g or t
gtacagaaagcccatctccacacatactgtagattttgccttcaacaagttcaacaaatcctacaatggctcagtggactgnagctcctggatggctggagggggactgaggacaaagacnntggtgtgtctcggactccttggaccatttcgtcacgctagc

SEQ ID NO: 1854 - protein, 53 aa, Homo sapiens
  misc_feature (28)..(28): Wherein Xaa may be any naturally occuring amino acid
  misc_feature (41)..(41): Wherein Xaa may be any naturally occuring amino acid
VQKAHLHTYCRFCLQQVQQILQWLSGLXLLDGWRGTEDKDXGVSRTPWTISSR

SEQ ID NO: 1855 - DNA, 391 bp, Homo sapiens
  misc_feature (1)..(1): Wherein n may be a, c, g or t
  misc_feature (2)..(2): Wherein n may be a, c, g or t
  misc_feature (350)..(350): Wherein n may be a, c, g or t
  misc_feature (356)..(356): Wherein n may be a, c, g or t
nntgatcaggaaaatgaacaaatcacacaacaccaggcgatgattaacatagaatcagtgcgtgaggtgattgaaaaggttcagctaagcagtcaattaagtggttttaaagtggtttttattcatcctgtggaagcgatgagtatccaagcagccaatgctcttttaaaagaattagaagaacctgtgtcacagacaatatttttattattaagtcatcgtaaagaaagcgtgttacctaccattgtgagtcgttgccgtagctttatgctgcttcctcctaaggaagaagcagtctgcgattatttgcaacataccatgggcatagaacgagatagcgcgcgcagaanactgtnttttagtagcggggcacccttttgcagtaaacatt

SEQ ID NO: 1856 - protein, 130 aa, Homo sapiens
  misc_feature (1)..(1): Wherein Xaa may be any naturally occuring amino acid
  misc_feature (117)..(117): Wherein Xaa may be any naturally occuring amino acid
  misc_feature (119)..(119): Wherein Xaa may be any naturally occuring amino acid
XDQENEQITQHQAMINIESVREVIEKVQLSSQLSGFKVVFIHPVEAMSIQAANALLKELEEPVSQTIFLLLSHRKESVLPTIVSRCRSFMLLPPKEEAVCDYLQHTMGIERDSARRXLXFSSGAPFCSKH

SEQ ID NO: 1857 - DNA, 163 bp, Homo sapiens
ctcagtccgtcatgcttgtactcccaacaattgaacagcgttgtcaatggcggttgccacgtccgagtccggtggatagaggaccgatcgccccaagacgagtccacgggcatggcgtgcggccagtgccgtggcccaacgacgcccggtctccccaggatcc

SEQ ID NO: 1858 - protein, 50 aa, Homo sapiens
MLVLPTIEQRCQWRLPRPSPVDRGPIAPRRVHGHGVRPVPWPNDARSPQD

SEQ ID NO: 1859 - DNA, 242 bp, Homo sapiens
agatctcagccaaagaggcaaagtcaatttatatactaaagaggatgggcagaagaagaggacgagcgggagggctaagccgggtggcctggaagctggaaggagatgctggggtggtggcatgtgagacatttctgagcagaggcagaatctgaaggagcaaggactcaaggaagaagacggtgaaaggctgatgtggattacaaattgtatcattgtccaagtttctcaaaagactcgag

SEQ ID NO: 1860 - protein, 72 aa, Homo sapiens
MIQFVIHISLSPSSSLSPCSFRFCLCSEMSHMPPPQHLLPASRPPGLALPLVLFFCPSSLVYKLTLPLWLRS

SEQ ID NO: 1861 - DNA, 282 bp, Homo sapiens
tcgaccaatttcttaagattactagtactattggagttcttcacttttgatttcaaggaaaaactgctagagcctacgagatggggtgaggtattcttaaaattaaatgagctcaatattgacagtaagtatcacgaatcagttattatctttttggtatttttgaaatgcgatgtcttaaaacttgacgaagaagttcaaccaccggctccctcagccctatctcaagccactcttcgttcatatcctgaagaatcattgtacgtcctattgattacgcgt

SEQ ID NO: 1862 - protein, 94 aa, Homo sapiens
STNFLRLLVLLEFFTFDFKEKLLEPTRWGEVFLKLNELNIDSKYHESVIIFLVFLKCDVLKLDEEVQPPAPSALSQATLRSYPEESLYVLLITR

SEQ ID NO: 1863 - DNA, 345 bp, Homo sapiens
accggtgatatccaggcgcgggtgcaaaccgatctgtcctttcgcgtgggcggcaagatcatccagcgcatggtcgacgtgggcgaccgcgtcaccgccaggcaagtcctggccaagctcgaccccaaggatttgcagaccaacgtcgattcggcccaggcccaggtcgtggccgaacaggcgcgggtcaagcagaccgccgccgcctttgtgcgccaggaaaaactcttgcccaaaggctataccagccgcagcgaatatgacgccgcccaggccgcgctgcgcagcagtcaaagtgccctggccgctgcccaggcgcagttggccaatgcccgcgagcaattg

SEQ ID NO: 1864 - protein, 115 aa, Homo sapiens
TGDIQARVQTDLSFRVGGKIIQRMVDVGDRVTARQVLAKLDPKDLQTNVDSAQAQVVAEQARVKQTAAAFVRQEKLLPKGYTSRSEYDAAQAALRSSQSALAAAQAQLANAREQL

SEQ ID NO: 1865 - DNA, 542 bp, Homo sapiens
cactcactcctccacagaatttggcctcagccagccccacgctcagcatgcccagccctgccaagagcccagggatcgcctcgctgacagaccccaaaacacgggccacgccaccccgtcctctaggtacctgtgcccccagtctcaagcatcactccgtgtctccctcacatgccttctgggcctctagccctcaaagagctaaagtatgtgagcactttctcagccctttaaacggattaagtcatgtcatcctcacaaggctgctgtgttttattacctctgtttcaggtgcaagtcatccccgggaggagtggtggggatgccgcctgaccctgggccacctggctgcagcatctgtgttgatgaccaccctcctgcctcaggctttgctcctgaatgttcttgctctctaggtctgtccgctcctggccctgctcttcttaactccgttcaagccccctgggtcacacgtccatgctcatcacttcaatgacgcggatgctggcgatccccaaatctcctaatccaagtgcagatct

SEQ ID NO: 1866 - protein, 122 aa, Homo sapiens [sequence omitted]

SEQ ID NO: 1867 - DNA, 381 bp, Homo sapiens
  misc_feature (88)..(88): Wherein n may be a, c, g or t
  misc_feature (361)..(361): Wherein n may be a, c, g or t
gagctctgcttggtgtcgctgcagtcgggcgacggtagccgcatccaggcgatggtgtcgctggcctcggtcggcgaggatgcgctgncagcgtggaaggagctcgtcgatctcggcgatcacgtcttcgtctcgggcgagatcatctccagccgccgcggtgaacggtcgatcatggtcgccgactgggcgatcgccgcgaaggcctgcctgccgctgccgaacctgcactccgagctgagcgaggagacccgcgtgcggtcgcgcttcctcgacctcatcgtgcgcgaccaggcccgccacaccgtgcgcgcccgctcgacagtgaatgccagcctgcgcagaccttctcggcgcacgnagttcatcgaggtcgagacc

SEQ ID NO: 1868 - protein, 127 aa, Homo sapiens
  misc_feature (30)..(30): Wherein Xaa may be any naturally occuring amino acid
  misc_feature (121)..(121): Wherein Xaa may be any naturally occuring amino acid
ELCLVSLQSGDGSRIQAMVSLASVGEDALXAWKELVDLGDHVFVSGEIISSRRGERSIMVADWAIAAKACLPLPNLHSELSEETRVRSRFLDLIVRDQARHTVRARSTVNASLRRPSRRTXFIEVET

SEQ ID NO: 1869 - DNA, 393 bp, Homo sapiens
accggtttgtgcctggcctcgtcagtgttgaggacctggaggaaacgcagatcttgggtggggagacaaggcggagagaacgaggtgcattggaacagtccaggcgaggggtgctggcctgcttgggggcaactcagaggcctggaggatagatgaggaggggggctgtgggccttgtaggtgttggctgtggccgtgcctggagtggagggacccttgaaagtttggcctcagctcgggacactgatgttcccgggttggcccttcatgagagttcggcctcagctcgggacactgatgttcccgggttggcccttcatgagagtttggcctcagctcgggacactgatgttcctgggttggcccttcacagctggtgggcggggggtgcac

SEQ ID NO: 1870 - protein, 80 aa, Homo sapiens [sequence omitted]

SEQ ID NO: 1871 - DNA, 375 bp, Homo sapiens
gtacccctcaatgatgacctcatcgtcaccacaggctatagcagtggcttggctacagtatatgtaaaaactgtggttcacaaaactagtgtcgctgaggaattttgcagcttttacttgaaaattgatacccaagaagttgaagcctccagctacctcagctacagtgactcgggacacaagcgcataatagcctgtgccagctacaagcccagcaaggaggagtcagcatctgggtcctcccatgcagtaatggatatactgctgccgaccggaatcggagcaaaccaagaagatttacgagctcttgtggaaggagtagatcaactcctaactgattaccagatcaaagacagtcatgttattctgcaattg

SEQ ID NO: 1872 - protein, 125 aa, Homo sapiens
VPLNDDLIVTTGYSSGLATVYVKTVVHKTSVAEEFCSFYLKIDTQEVEASSYLSYSDSGHKRIIACASYKPSKEESASGSSHAVMDILLPTGIGANQEDLRALVEGVDQLLTDYQIKDSHVILQL

SEQ ID NO: 1873 - DNA, 814 bp, Homo sapiens
cgacgaatgagaggaggagacacgtactgcttgctcatctcaggtcaactccttcatcgtcggggctttgatgacgacccggctcaccaggatgtcaatcgtgcgaatatccactccggacatcttcggtacctgctcggtcaatcgggctcgcagatcatcacactgagcttgaacgggggcggggtagccaatggcaacctccacctcaagatcagccgtacggccggtaaggaccgcactaaccttcgggcctcggtcgaagtcggcgcgcgagcctgatccgaagaaggacgaggtgggagccccgaaaccctcgctttgagccgccacgcgagcagcgactttctcgacgaccgctgttgtgaccgttagggttccacgactagccttctcacgattgtggaccgccagcgagggcaccgaacgtacgcgtgtggtgccggcggacatcaacggttccgttgacttggtttgccgaaaatgtcgtgcacgtcgagctgaccgtcaatgatccggccaatgatgagaccgagcagccccagcaccagcacgacaatcgcctgccacacaccaacacagactgcaatcacacccaacagcagtccaacgagtgctccgatgcgcgatgcattcatagcgtggcctttcaggaaagttcggtgttcttgcgctggccggcaacctgatcagactggtcgtcgtcgtgatcgtcctcaccctgaatgtagacatcggtgacctggacattcacttcaacgacctcaaggccggtgccgtactcaacggcgtcaataatggtttcgcgaagctt

SEQ ID NO: 1874 - protein, 137 aa, Homo sapiens
MSAGTTRVRSVPSLAVHNREKASRGTLTVTTAVVEKVAARVAAQSEGFGAPTSSFFGSGSRADFDRGPKVSAVLTGRTADLEVEVAIGYPAPVQAQCDDLRARLTEQVPKMSGVDIRTIDILVSRVVIKAPTMKELT

SEQ ID NO: 1875 - DNA, 407 bp, Homo sapiens
  misc_feature (1)..(1): Wherein n may be a, c, g or t
  misc_feature (2)..(2): Wherein n may be a, c, g or t
nntgacgcgcggatgttttcgcgggtcggtcgaggagttcttggccgcatccaaggccaagcacgatgacgacacgcaccatgaataccggctgctgatcgaagtggctacgtctcgcatcacacgcgcacgcgaacggctgagggagaaggcatgaaggagcgccccatcattttccgtgccgagatggtccgagcgatcctcgcaggtcgaaagacgcagacgcgtcgaatcgtgaagcctcgccatatggcgacggtggacgcagagcagttcccgattctcgccttgtgcccctacgggtctccaggggatcggctgtgggtgaaggagacttgccgcgccgaagccatcggcgatgaaggactgtgtggcgtgcgctacgtggcggatgggcaggtcatgcc

SEQ ID NO: 1876 - protein, 84 aa, Homo sapiens
MKERPIIFRAEMVRAILAGRKTQTRRIVKPRHMATVDAEQFPILALCPYGSPGDRLWVKETCRAEAIGDEGLCGVRYVADGQVM

SEQ ID NO: 1877 - DNA, 556 bp, Homo sapiens
accggtggcgacggtatcggtggcgcgtcgatccttgcctcggaatccttcgctgcagagggtgagtcgaagcgacccagcgtccaggtgggcgacccgttcatggagaagctgctcatcgagtgcacccttgacctcttcaacgccggggtagttgaggccttgcaggatttcggtgccgccggaatctcctgtgccacctccgagctggccagtgctggcgacggtggcatgcacgtcgagctcgaccgcgttccgctgcgcgacccgaacctcgcccctgaagagatcctcatgagcgagtcccaggagcggatggccgcggtggtgcgccccgatcagcttgaccgcttcatggagatctgcgcccattggggtgtcgctgccactgtcattggcgaggtcaccgacaccggtcgacttcacattgattggcagggcgagcggattgtcgacgtcgatccgcggacggttgctcacgacggaccggttctcgacatgccggccgcccgtccgtggtggattgatgagctcaacgagaacgacgctaacgcgt

SEQ ID NO: 1878 - protein, 185 aa, Homo sapiens
TGGDGIGGASILASESFAAEGESKRPSVQVGDPFMEKLLIECTLDLFNAGVVEALQDFGAAGISCATSELASAGDGGMHVELDRVPLRDPNLAPEEILMSESQERMAAVVRPDQLDRFMEICAHWGVAATVIGEVTDTGRLHIDWQGERIVDVDPRTVAHDGPVLDMPAARPWWIDELNENDANA

SEQ ID NO: 1879 - DNA, 207 bp, Homo sapiens
gacagaggtattgatgtggtcagaaaccaaataaaacatttggcccagaagaaactacatttgcctccaaggaaacataaaatcgttattcttgatgaggcggattccatgactgctggtgctcagcaagcgttgagaaggaccatggagctatattcgaactctacaaggtttgcatttgcttgtaatcaatcaaacaagatcatt

SEQ ID NO: 1880 - protein, 69 aa, Homo sapiens
DRGIDVVRNQIKHLAQKKLHLPPRKHKIVILDEADSMTAGAQQALRRTMELYSNSTRFAFACNQSNKII

SEQ ID NO: 1881 - DNA, 252 bp, Homo sapiens
gtgcacgaggaattccatcctcacgtctcattgctttattcggatattcatccggtaagtcaggcgtcattgcgagtagttcaacaaagaattgaagatgctctagacgtgcaactagttccaagagagaaacgtaagggttccggaaacgctgatgggtccaatgaagtgcaaatgagatgggattttgacgtatcttcatcgctatcttggaatatcccaggaacgtttaaagtggtcaactgtgtgggg

SEQ ID NO: 1882 - protein, 84 aa, Homo sapiens
VHEEFHPHVSLLYSDIHPVSQASLRVVQQRIEDALDVQLVPREKRKGSGNADGSNEVQMRWDFDVSSSLSWNIPGTFKVVNCVG

SEQ ID NO: 1883 - DNA, 371 bp, Homo sapiens
acgcgttgtactttgagggtctcatttcaatgaattggcagcagctatctggcatacgttcttctcatggtggtgacagaaactgagaaagcaattccaattcatgagcccatttcaggcctctacttccaattatctgcagactccccattgaccaaagcaagttacacatctgaaccccaaatcaaaaagtggggaaattgcggacccactatgaagcatggctaggttgtgcttaatactactgggaagggatgaattgagaccgataattcattccacagcagcacagaagagttcaagctaagacttacttccattgtaatgtaacacctggcagttgcaaagctgtgggagagaggaccctcagt

SEQ ID NO: 1884 - protein, 53 aa, Homo sapiens
MVVTETEKAIPIHEPISGLYFQLSADSPLTKASYTSEPQIKKWGNCGPTMKHG

SEQ ID NO: 1885 - DNA, 294 bp, Homo sapiens
  misc_feature (294)..(294): Wherein n may be a, c, g or t
atcagaacattccaaaagtttactaaagccaacggcatcatatcttggttgtctcacggaacgctgtacggctatctttacaatggaatggctttcccttgggataacgatttcgacttgcaaatgcccattaagcatttacaattgctcagtcaatacttcaaccaatctcttatattggaagacccaagacagggtaatggacgttatttcctagacgtcagcgactccttgacagtaagaattaacggtaacggtaaaaacaatatcgatgcaagattcattgacgtccan

SEQ ID NO: 1886 - protein, 98 aa, Homo sapiens
  misc_feature (98)..(98): Wherein Xaa may be any naturally occuring amino acid
IRTFQKFTKANGIISWLSHGTLYGYLYNGMAFPWDNDFDLQMPIKHLQLLSQYFNQSLILEDPRQGNGRYFLDVSDSLTVRINGNGKNNIDARFIDVX

SEQ ID NO: 1887 - DNA, 156 bp, Homo sapiens
  misc_feature (1)..(1): Wherein n may be a, c, g or t
  misc_feature (2)..(2): Wherein n may be a, c, g or t
nnccgcggtgctcccttcatgcgtgacctggcagctgtagcttctgtgacttcttttgtgctgacccaggcaccctcagtgtcagtggccccgggagaaacggccaggctttcctgtgagggaaataaccttggaagtcgaagtgttcactggtac

SEQ ID NO: 1888 - protein, 52 aa, Homo sapiens
  misc_feature (1)..(1): Wherein Xaa may be any naturally occuring amino acid
XRGAPFMRDLAAVASVTSFVLTQAPSVSVAPGETARLSCEGNNLGSRSVHWY

SEQ ID NO: 1889 - DNA, 255 bp, Homo sapiens
  misc_feature (40)..(40): Wherein n may be a, c, g or t
  misc_feature (41)..(41): Wherein n may be a, c, g or t
  misc_feature (255)..(255): Wherein n may be a, c, g or t
gtccctgtcaggtttcccccccccaggccgttgccagagnncagtttacaaccacccgaccctctcctgattagttttccccccccccccccttccccggctagtttccccccccccgcccctcccctgacgagagtgagcctccatttaaaaaaaaaaaaagagtatgtttaaagttgaagaattgaaggaaatttacagggttcaaataatattgagaggttaacatttcatctcctatggtactttttaacn

SEQ ID NO: 1890 - protein, 57 aa, Homo sapiens
  misc_feature (14)..(14): Wherein Xaa may be any naturally occuring amino acid
VPVRFPPPRPLPEXSLQPPDPLLISFPPPPPSPASFPPPAPPLTRVSLHLKKKKEYV

SEQ ID NO: 1891 - DNA, 333 bp, Homo sapiens
cacgtgatttccctcggtaggggcgtgcgtttgattgccaccctgcaggcgatttccgagcctgactctaagggtattcgtcacgtgatttgcaccctgaacgggcagtcacgcaccgtggaagttcgcgataactcggttgaatcaaatgtgaaggaagcagaaaaagcagatccttcaaataagggtcatatctcagctccatttgcaggaggcgtgaccgttaccgctaaggtcggcgataagatttctgctggtgaccaggtagcaaccatcgaagcgatgaagatggaagcctcaatcacctcgccgattggcggcaccgttgaacgc

SEQ ID NO: 1892 - protein, 111 aa, Homo sapiens
HVISLGRGVRLIATLQAISEPDSKGIRHVICTLNGQSRTVEVRDNSVESNVKEAEKADPSNKGHISAPFAGGVTVTAKVGDKISAGDQVATIEAMKMEASITSPIGGTVER

SEQ ID NO: 1893 - DNA, 463 bp, Homo sapiens
tgccaatacggaccaaatataattcactttgaaccgtcgctgtaccacacatattcttctctaccaatgagtatgaaattttggttaaatggtctagaagacgacgaaacgacgatgatgaacattgatgagaagtcagccgaaaatctggatatattattacatggtttcaaaggattttcgaacaagcgcgttaaaggatgaattaatcatcttcttcatgtactacttatgtccaatttgagtgtaaaatcacaggtacaaggcttatgcatattcgtatatatcttcataatgtttcataattgcttcagaaaattattcaaaacgtcttgtgatattcattaggtgaaatcgtagtttgcctgatacttgaaagaatctcacctggagaatgggtgttttcactaagattcgttaatttccactaatgattaattgttaactgtttaacgcgacgcgt

SEQ ID NO: 1894 - protein, 67 aa, Homo sapiens
CQYGPNIIHFEPSLYHTYSSLPMSMKFWLNGLEDDETTMMNIDEKSAENLDILLHGFKGFSNKRVKG

SEQ ID NO: 1895 - DNA, 612 bp, Homo sapiens
ggatccattctttcctggctgtggtagtacttaaggagttggacgtgttcaagtcgagaaagaggtgaaatacacgtagtttttagataacattctctgcttggtaagagaatgagtaataaggaaaaacctgttgatgagacttccgcaagtggtgtcaaggaggttagttctatagctgctagacatgacaatggttacgcgccttcgctaatcacgtcgacgtcgggcatggactcctttcaatcgcacgcgctactgaatgatccaaccctaatagaggattattcagatatcattaataataggcctacaagtggaagtaaacttactttaggaaacgaggattcggagagtatgggcggaagtgttgtggtgactccgacttgaaataagagttcgcccttcaattcgaaacttaatatactgagtaatgcggcagaaaagggccatgatgttctgcgaaatagagatgatgacaaagagttagaggaggagaacgtggaaaaacatatgcatagccacagtaaaagggatcagcgacattacaaagaaaattcttcggaattgcccgactcatatgattattcggattctgaatttgaggacaat

SEQ ID NO: 1896 - protein, 92 aa, Homo sapiens
MSNKEKPVDETSASGVKEVSSIAARHDNGYAPSLITSTSGMDSFQSHALLNDPTLIEDYSDIINNRPTSGSKLTLGNEDSESMGGSVVVTPT

SEQ ID NO: 1897 - DNA, 314 bp, Homo sapiens
tgatcaacaggtaagactatttctgcacccagagaggaagcaaatatctttgggagctccatgactgggaaaccagtttttctgccagctgatttatcatttgttgaaagggcttttctcagcttttgtgagtcagggagcgtacctttagtgctgaatgaagtagtttccaagagcaccttcaagatttggagaggcagcacttcttttccggaagggtcaaattaccctgaagagcaatcacagccacttttctgggcatatttatgagttgtctaatggcaacaaaacaactgggcctgcatcatagattt

SEQ ID NO: 1898 - protein, 69 aa, Homo sapiens
MTGKPVFLPADLSFVERAFLSFCESGSVPLVLNEVVSKSTFKIWRGSTSFPEGSNYPEEQSQPLFWAYL

SEQ ID NO: 1899 - DNA, 329 bp, Homo sapiens
ggcgtcctgctgatccatgggctcggcggcacgcaatacgatctcggttcgctgcacaaggcgatgcagcgcgcgggcgccgacccgcacatgatcacgctgccggggcacggcacgcgccccgaggatctggtcggcgtgcgcgcggaggcgtggctcgacgcggtgaccgaacagtatcgtgcgctggaacgcgagtacgacacgctgcatgtcgcggggatgtgcatgggcgcgctggtcgcgctgctgctgtgccaccgcgtgcagcatgcgcgcggccggctcgcattgctggccgcaccggtattcatcggcggctggtcgac

SEQ ID NO: 1900 - protein, 109 aa, Homo sapiens
GVLLIHGLGGTQYDLGSLHKAMQRAGADPHMITLPGHGTRPEDLVGVRAEAWLDAVTEQYRALEREYDTLHVAGMCMGALVALLLCHRVQHARGRLALLAAPVFIGGWS

SEQ ID NO: 1901 - DNA, 376 bp, Homo sapiens
tcatgatgagcctaagataaaaatggcattgatccatgctgctgctagaggtcactgacatggtgccatggggtcccatggtaggttgggggtccgggatgggggaagctgtcaaaacgctgatgaacacagtttatgacggactcagacgagacccagggaggaaagctgcaagctggcgctgggaggtcggccttggtgtctgctgttcattgccagggtccgaagttggctctgtgtttgttcaataggatggaaaaaaaaaaccaaaaaccgcgggacagcgctgaatggaggaaaactacattcagtcaatgggcatgaaaatgaattttagctgctttgtgcaaaaaccctaggtgtgcggacgaaagag

SEQ ID NO: 1902 - protein, 71 aa, Homo sapiens [sequence omitted]

SEQ ID NO: 1903 - DNA, 273 bp, Homo sapiens
ccggacgacttgatgttgaccgcttgtttagctgcctctagaaagaagaaaggtttggatgctattgataaggcttttttgaagtcattgattgagtatccaaaagctaaagacgccctgaccaagtacaaagttttggaattccatccgttcgaccctgtctcaaaaaaggttaccgctgttgtagaatccccagaaggtgaaagaattgtttgtgtcaagggagccccattgtttgtcttgaagactgttgaagaagatcatccaattccg

SEQ ID NO: 1904 - protein, 91 aa, Homo sapiens
PDDLMLTACLAASRKKKGLDAIDKAFLKSLIEYPKAKDALTKYKVLEFHPFDPVSKKVTAVVESPEGERIVCVKGAPLFVLKTVEEDHPIP

SEQ ID NO: 1905 - DNA, 210 bp, Homo sapiens
  misc_feature (1)..(1): Wherein n may be a, c, g or t
  misc_feature (210)..(210): Wherein n may be a, c, g or t
ngtgcagggtttccagtgctgcccagctccatgtcccgtctctgtgtattattctctgagaaagtgatacggctgtacacaggtaaatgtgtcagagaagcaacacataatcattgggaaattgcagaaaggaggaaagggtctcttcttggtatattttactctggtttgtatctgcacgtgattgttcttgcataattataaccacan

SEQ ID NO: 1906 - protein, 55 aa, Homo sapiens
MSRLCVLFSEKVIRLYTGKCVREATHNHWEIAERRKGSLLGIFYSGLYLHVIVLA

SEQ ID NO: 1907 - DNA, 249 bp, Homo sapiens
  misc_feature (1)..(1): Wherein n may be a, c, g or t
  misc_feature (2)..(2): Wherein n may be a, c, g or t
nngtcccctccagatccgtggggcactctgccgaacggcgacgcggtgcggcgctacacgctgcgtaacgcgcacgggatgcgcgtggtcgtcagcgacctggcgcgaccctttggtttggggttggcgcccgaccgcaccggacgcttcgccgatatcgtgctcgcgcacgacacgcccgccgaatacgtcgaatcgggcgcctacctcggcgcgacggtcggccgctgggcgacccggatcgccggc

SEQ ID NO: 1908 - protein, 83 aa, Homo sapiens
  misc_feature (1)..(1): Wherein Xaa may be any naturally occuring amino acid
XSPPDPWGTLPNGDAVRRYTLRNAHGMRVVVSDLARPFGLGLAPDRTGRFADIVLAHDTPAEYVESGAYLGATVGRWATRIAG

SEQ ID NO: 1909 - DNA, 375 bp, Homo sapiens
  misc_feature (1)..(1): Wherein n may be a, c, g or t
  misc_feature (2)..(2): Wherein n may be a, c, g or t
  misc_feature (287)..(287): Wherein n may be a, c, g or t
  misc_feature (357)..(357): Wherein n may be a, c, g or t
  misc_feature (360)..(360): Wherein n may be a, c, g or t
  misc_feature (375)..(375): Wherein n may be a, c, g or t
nnaccggtggctaagccggagcctaactctatccagttggcggatcttccgctgcgctccgaacttgtcggggcacaaccatacggggctccgcagcttgacgtcccggtacgcctgaacgtcaacgaaaatccgtatccgccatcggaggcggtgcgcaaggacatggccaaggctgttgccaaggctgccaagagtcttaaccgctaccccgaccgggaagccaccggccttcgcgaggatctggcccgatatatcggcttcggtattatcagctcccagatatngcctgctaatggctccaacgaggttataacccatattttgcaggcgtttggtggtccaggacgctctatnctnaccttcacaccgacn

SEQ ID NO: 1910 - protein, 125 aa, Homo sapiens
  misc_feature (1)..(1): Wherein Xaa may be any naturally occuring amino acid
  misc_feature (96)..(96): Wherein Xaa may be any naturally occuring amino acid
  misc_feature (119)..(119): Wherein Xaa may be any naturally occuring amino acid
XPVAKPEPNSIQLADLPLRSELVGAQPYGAPQLDVPVRLNVNENPYPPSEAVRKDMAKAVAKAAKSLNRYPDREATGLREDLARYIGFGIISSQIXPANGSNEVITHILQAFGGPGRSXLTFTPT

SEQ ID NO: 1911 - DNA, 277 bp, Homo sapiens
ctcccctgtctgggggcttattcctcttttcccctctaaagatagcagcagcgcagccaaccatagacccgcttcctgggggttttaggcctaggtccgccattatgcccccccgggggaccaaaagggggccccccattccccttctaaagtttttgatttttagagttttaaagtcttccagagctctaaagtgtcagatttcgggtccaaatcactaccagagattacctgttactgcacccgctttggggctgcctctcctggccttagatct

SEQ ID NO: 1912 - protein, 57 aa, Homo sapiens
MPPRGTKRGPPIPLLKFLIFRVLKSSRALKCQISGPNHYQRLPVTAPALGLPLLALD

SEQ ID NO: 1913 - DNA, 505 bp, Homo sapiens
tgatcatacatagctcactcctgtgttgctgaagggtcacctgtcatagaagagggaagaattgtgtggcctgtgcagattctgcattcagccttgtgtgttgtgttatggttaaccagggacgtgtggccccactaataactctgattcctggaaggaatggcatggcagcctccgttgtcatggttcctggaaggaatggcatggcagcctccgttgtcatggttcctggaaggaatggcatggcagcctccgttgtcatggttcctggaaggaatggcatggcagcctccgttgccatggcaaggtaaagccatggcagcttcctggttatcactcctggcatgtggtaggtgcttgtccagtgaaatcctagtcgttgctgcattggcaggtgccctggcgtgaggaagggcaggcagtcaccatgccctttgctctcctgggccctgcatctgcttatggatgaggctgcgtgtagctgacatgcgtgtctctcctgcag

SEQ ID NO: 1914 - protein, 114 aa, Homo sapiens [sequence omitted]

SEQ ID NO: 1915 - DNA, 252 bp, Homo sapiens
gcagacgctctggctgggttgtacgagacgaccgagcatcctttccttgcccatcttctcgagcaccgagacgccatcaagttgcgtcagaccgttgatgggttgctcaaggagatccgtgatgacggtcgagtccacaccacgtatatgcagacggttgccgtgactggaagattgtcgagcaaggacccaaaccttcaaaacattccgatgcgtaccgaagagggacgacgcatccgcgaagggtttgtt

SEQ ID NO: 1916 - protein, 84 aa, Homo sapiens
ADALAGLYETTEHPFLAHLLEHRDAIKLRQTVDGLLKEIRDDGRVHTTYMQTVAVTGRLSSKDPNLQNIPMRTEEGRRIREGFV

SEQ ID NO: 1917 - DNA, 347 bp, Homo sapiens
  misc_feature (1)..(1): Wherein n may be a, c, g or t
  misc_feature (2)..(2): Wherein n may be a, c, g or t
nnaccggtccagagcatccttgatgcgctcaccatcatcgccgatctctaccacaccggcaaacggcgcctgcccgacaaggtgccgctgcacttcgcgccggcgggctggcgtccgttcgtgatccgcgatggtgtggtcaatcgtgcggcctatgaactctgcgcgctttcccagcttcgcgatcggctgcgggccggcgatatctgggtggcgggcagccgacagtatcgcgacttcgacagctatctcattccgcacgccaccttcgcggcgctgcgcgggaaggggccgcttccgctagcaattgagaccgggttcgatcgtcatatcgaagatcaacgcgt

SEQ ID NO: 1918 - protein, 115 aa, Homo sapiens
  misc_feature (1)..(1): Wherein Xaa may be any naturally occuring amino acid
XPVQSILDALTIIADLYHTGKRRLPDKVPLHFAPAGWRPFVIRDGVVNRAAYELCALSQLRDRLRAGDIWVAGSRQYRDFDSYLIPHATFAALRGKGPLPLAIETGFDRHIEDQR

SEQ ID NO: 1919 - DNA, 432 bp, Homo sapiens
  misc_feature (1)..(1): Wherein n may be a, c, g or t
  misc_feature (2)..(2): Wherein n may be a, c, g or t
nnggatccgacggcgcaaagccttaatgaagggtaggcagttacctctttttctgtaggaattctcctgttttatatctactcccccctaggttcatcctactccctcatcttctgagctaatgtgcccgctttatttgcacttgcatggaatatgattatgaacacagtttttatcattgatgaccaccccgttatcaggttggcgattcgtatgttgttggaacacgagggttataaggtcgttggtgaaacggacaacggttgtgacgcgatccaaatggttcgcgaatgcctgccggacctgatcatcctggatatcagcatcccgaaactcgacggcctcgaagtgctctgccgattcaacgccatgaacacatccatgaaaaccctgattcttaccgcccagagtccgacgttgttcgccacgcgt

SEQ ID NO: 1920 - protein, 93 aa, Homo sapiens
MIMNTVFIIDDHPVIRLAIRMLLEHEGYKVVGETDNGCDAIQMVRECLPDLIILDISIPKLDGLEVLCRFNAMNTSMKTLILTAQSPTLFATR

SEQ ID NO: 1921 - DNA, 270 bp, Homo sapiens
ccatggggagctccagaccatgaattacagagttggtcctaccttgaggcgaggggctcagccctgtgtaccctgtgtcgcgtgggctacatgtgggttgctgaggcaggcctggcatttatcctcctgggcaaggtggctcctctttgacctacacatctactatatatggtgcttatttttgcaatttctaaagaccaatacttgtatcagatgaggtgatgtttgcgaaaacactttgatagttattaaatctattaagcaggaata

SEQ ID NO: 1922 - protein, 65 aa, Homo sapiens [sequence omitted]

SEQ ID NO: 1923 - DNA, 528 bp, Homo sapiens
ctgcagtttttatttatcatagactgtgagagaaatagcaaccggtttcatttttgttggtcctgctgctgtttcacagatttcaatgtggctttttacaatgcatttctggggaacaaaaggtcaatattactctaaatccaaacatacgtttctgtatataaagcaagtattttaatacattattattacttgagctaataacaaatagtcatctgtcaatgagctaaaaaggtacaaagttcacagtaattctcagatagcttagtaattacccagacagcttgttgttagaaaagctgttcaaatctaggattatgaaatatactgatggctattttactctcatggagtttcaaaaggatggtgggtccttttgtctataattacccccagttctcagtcattattaatgaaatttatattctaagccacaattgttactacttatacattttactagctttttcttgcatctcccacccaccagccccttgatgttgattgttaaacccctactaaggatcc

SEQ ID NO: 1924 - protein, 55 aa, Homo sapiens [sequence omitted]

SEQ ID NO: 1925 - DNA, 307 bp, Homo sapiens
  misc_feature (307)..(307): Wherein n may be a, c, g or t
acgcgtgaaggggagcggtgagaggaggccagctctggagtgtcctttcattttctctaaggagtctgggctttccacaggaggcaacatggggcttttcaacaggagtgacaagaatattaatgtctgaaacaaatcgctctggtaacagcatgggggctgtagtggagtggagagactgcaggcaggaagcagggggcaggttatcacaactgctcagtgagaaaaggagacaggacagcatgttggtcaaggtcatggctttgaatctggggactgggggtcagtcttggctctctctgacctn

SEQ ID NO: 1926 - protein, 86 aa, Homo sapiens [sequence omitted]

SEQ ID NO: 1927 - DNA, 300 bp, Homo sapiens
  misc_feature (1)..(1): Wherein n may be a, c, g or t
  misc_feature (2)..(2): Wherein n may be a, c, g or t
  misc_feature (253)..(253): Wherein n may be a, c, g or t
  misc_feature (254)..(254): Wherein n may be a, c, g or t
nnaacctctctccttggcttgcggatggtcctattctccctgtgtcctcatgtggttgtcccctgtgtgtgtctgtgtctttttttttttttttttttaaaaaaaaaccccgccttttccccccaggcgggaaggcaaggggggaatctttgctcactgaaacccccccctccggggtcaaaccaattctcttccctcaccccccgaaatagcggggattacagggccccccccccacccccaattaattttnnttttttttatgaaaaaggggttttccccagggggccaggggggagc

SEQ ID NO: 1928 - protein, 100 aa, Homo sapiens
  misc_feature (1)..(1): Wherein Xaa may be any naturally occuring amino acid
  misc_feature (85)..(85): Wherein Xaa may be any naturally occuring amino acid
XTSLLGLRMVLFSLCPHVVVPCVCLCLFFFFFLKKNPAFSPQAGRQGGNLCSLKPPPPGSNQFSSLTPRNSGDYRAPPPPPINFXFFYEKGVFPRGPGGS

SEQ ID NO: 1929 - DNA, 171 bp, Homo sapiens
ataagtgatgtactaggcgttgaggtcttccgtcaaaccatatcaggtaatatcttagttgggtcatattgttctttaagtaatcaaggtgggttagtgcatccacaaacaagtgtccaagatcaagaagaattgtcctccttattacaagttcctttggtggctggtacc

SEQ ID NO: 1930 - protein, 57 aa, Homo sapiens
ISDVLGVEVFRQTISGNILVGSYCSLSNQGGLVHPQTSVQDQEELSSLLQVPLVAGT

SEQ ID NO: 1931 - DNA, 316 bp, Homo sapiens
  misc_feature (46)..(46): Wherein n may be a, c, g or t
ctagtcaaaagctgtaaacaactcaagtgtccatcaacagatgaantgaataaaatgtggtctatccatacaataatagaatattattcagtcacaaagaggaatgaagtaatgctacataccacaacatggatgaaccttgaaaagattctattaagtgaaacaagccagacacaaaggaccacatatcctgtgattccatttacatggaaagtacagaaaaggaaaatatatagagacagaaagtgaattagtggtggcctgctgctggggaacatgggggaaatgaagagtgatgctaatgggcgcagggccc

SEQ ID NO: 1932 - protein, 82 aa, Homo sapiens
  misc_feature (16)..(16): Wherein Xaa may be any naturally occuring amino acid
LVKSCKQLKCPSTDEXNKMWSIHTIIEYYSVTKRNEVMLHTTTWMNLEKILLSETSQTQRTTYPVIPFTWKVQKRKIYRDRK

SEQ ID NO: 1933 - DNA, 216 bp, Homo sapiens
ggatccgggctgatgctgcaacgctggcccggtggccccaggtggccttacggcctcaaggacaagtgggtgccagagcccaggtctccctggaggtcccagttacagaggagtcgccgagaccaacggcagggccttcacccacaccccgtgcaggcatttgttcacaggtccccctgctagtcctgataaagggcgacgtatgtgcacacgcgt

SEQ ID NO: 1934 - protein, 56 aa, Homo sapiens
MLQRWPGGPRWPYGLKDKWVPEPRSPWRSQLQRSRRDQRQGLHPHPVQAFVHRSPC

SEQ ID NO: 1935 - DNA, 357 bp, Homo sapiens
  misc_feature (1)..(1): Wherein n may be a, c, g or t
  misc_feature (208)..(208): Wherein n may be a, c, g or t
  misc_feature (209)..(209): Wherein n may be a, c, g or t
nacgcgtgaagggagtggctctcaactcctggaggacaacctgccgtggccattccctggagtcccacagggccccctcgccacttcactcaggcgacttccctgcacccgccctccttttcatggttcccaggccctcccacacctccctgtgctccctactcattcccaggctccccggggccaccgctgccagccccagggcccnnagcccattccactagtcccaggctgagcgctgggaagttctttcagccccgcaccttggcccagggctgtggtgttcctggcttctctgctcctcccctatggtatccaggttggggctcaaggggccgccagcgtgctgcaaccggt

SEQ ID NO: 1936 - protein, 116 aa, Homo sapiens
  misc_feature (67)..(67): Wherein Xaa may be any naturally occuring amino acid
REWLSTPGGQPAVAIPWSPTGPPRHFTQATSLHPPSFSWFPGPPTPPCAPYSFPGSPGPPLPAPGPXAHSTSPRLSAGKFFQPRTLAQGCGVPGFSAPPLWYPGWGSRGRQRAATG

SEQ ID NO: 1937 - DNA, 438 bp, Homo sapiens
  misc_feature (1)..(1): Wherein n may be a, c, g or t
  misc_feature (2)..(2): Wherein n may be a, c, g or t
nntgatcatttctgggtgtactttattaaccctgatgtttcgtacaataaagaagtggcaggttttctagagtcgcaggtgcaacatttagacttgccagcagaaaactccagtaatgcattgcccttaacatcttggttgcgtttttcgaatcagcagaaaaagtatctgacgggtaaggcgcactttgtagagaaagctttgaaagacaatttgccacttaataccagccttatatggaatggagatggtgttaacgataatgcggcattaactatcttcaggcattttgataacgcgaccgtcgttaaaggtttgattggtcaaaaacctaaaacgtcttgggtaattgattatccattacttgagcgtatccactatttattggtagcgggatttgatgtctatggcaatgttgggcatcagctagatacgcgt

SEQ ID NO: 1938 - protein, 146 aa, Homo sapiens
  misc_feature (1)..(1): Wherein Xaa may be any naturally occuring amino acid
XDHFWVYFINPDVSYNKEVAGFLESQVQHLDLPAENSSNALPLTSWLRFSNQQKKYLTGKAHFVEKALKDNLPLNTSLIWNGDGVNDNAALTIFRHFDNATVVKGLIGQKPKTSWVIDYPLLERIHYLLVAGFDVYGNVGHQLDTR

SEQ ID NO: 1939 - DNA, 726 bp, Homo sapiens
gcctctctccgaccgcgttgttgtaaggatgtcgcgacggtgcgcaaaaatgaatatgtgaatttgccggtcatctgcctcgtcgggcccactgctagcggaaaatcagggctagcggtgcgagtgtgccgccgcttgtatgtcgatgagcaccccgccgaaattattaatactgactcgatggtggtgtatcgcgggatggacattggcactgccacccctacactgcgcgagcagcgcacggtagtgcatcacctggtgtcgattcttgatgtgactgtgccctcctcgctagtactgatgcagacgctggcccgtgatgccgtcgaggattgtctgtcgcgtggtgtcatccctgtcttggtgggagggtctgcgctgtacaccaaggccatcattgacgaaatgtccatcccgccaactgatccggaagtgagggctcggtggcaggagaagctagatgccgaggggccgcgagttctgcatgacgagcttgcccgtcgcgatcccaaggcggctgagtcaatcttgcccggcaacggcaggcgaatcgtttcgtgccctcgaagtttattgaccctgacagggtcctttactgccaccgatccccgacgggaccctccactggccaagacggtgcaaatgggcttagaactgtcgcgcaaagacatagaccagcgtattgccgatcgggttgaccagatgtgggcatacggtttcgtcgac

SEQ ID NO: 1940 - protein, 242 aa, Homo sapiens
ASLRPRCCKDVATVRKNEYVNLPVICLVGPTASGKSGLAVRVCRRLYVDEHPAEIINTDSMVVYRGMDIGTATPTLREQRTVVHHLVSILDVTVPSSLVLMQTLARDAVEDCLSRGVIPVLVGGSALYTKAIIDEMSIPPTDPEVRARWQEKLDAEGPRVLHDELARRDPKAAESILPGNGRRIVSCPRSLLTLTGSFTATDPRRDPPLAKTVQMGLELSRKDIDQRIADRVDQMWAYGFVD

SEQ ID NO: 1941 - DNA, 409 bp, Homo sapiens
actagtctccctgtccatacttctattggtttgttttcaatgcaagagccagagtgatccctgttacaaaacatgttagatcataccactcctctactcaaaatcctccaatggctacctatcctacttagagaaaaccaaagtcctcacacaatagcctacaatatcctacacaatatatggcttctggttacctttctgacctcaacctttaactacccttttccttgctcattgcactccagctacactggcatctttgctgttcttctaatacatcagagatagtatgcacttgccattccctttgtctggataattcttccctagatagccacatagcttatttccttgcatccttcagatctttatccaaatgctatcttattagtgagtccttccttgatca

SEQ ID NO: 1942 - protein, 71 aa, Homo sapiens [sequence omitted]

SEQ ID NO: 1943 - DNA, 358 bp, Homo sapiens
  misc_feature (1)..(1): Wherein n may be a, c, g or t
ntcagtaaaacaccttttattgccaatcctgtcaatttaaataatcagcgtcgaatgttaattatcacagggccgaacatgggtggtaaatccacttacatgcgccaagtggcgttaatggtattaatgacgcatatcggtagtttcatacctgcaaagagcgctacgattggcccaatagaccgtattttcacacgtattggagcatcagatgatttagcaagtgggcgctctaccttcatggtagagatgacagagacagctaatattttacataatgcaaccccaagctccttagtattaatggatgaaattggtcgcgggacaagtacttttgatggactttcattagcccggg

SEQ ID NO: 1944 - protein, 119 aa, Homo sapiens
  misc_feature (1)..(1): Wherein Xaa may be any naturally occuring amino acid
XSKTPFIANPVNLNNQRRMLIITGPNMGGKSTYMRQVALMVLMTHIGSFIPAKSATIGPIDRIFTRIGASDDLASGRSTFMVEMTETANILHNATPSSLVLMDEIGRGTSTFDGLSLAR

SEQ ID NO: 1945 - DNA, 451 bp, Homo sapiens
gggcctgggaggtgggtgtgggactccagccccggtggttctgcctctggtttggactgggccttgggtgattgatggtggcccggcaggagagagctgtctgggggcagaggccaaggtgggcatgtttgtgccagccccagactgagcatacacacctgacaggcacaaaaacttataatcaaaaggagaaaaccctgactcccagtgagtctgagggcaaagctgaaaacagaacccaagaagcttaattcctgacctcagttccaatcaaacagcacgaattgtggtggacctccagctgtgctcagatggggggacacaatattggcagtaccctcttccttgccctccaggctgagtgccagtgtgggagcgtgctcatgagagccctgcacaagcgggttttgagcacatgctacgctctagccccgtggaagcctggactagt

SEQ ID NO: 1946 - protein, 58 aa, Homo sapiens [sequence omitted]

SEQ ID NO: 1947 - DNA, 380 bp, Homo sapiens
  misc_feature (196)..(196): Wherein n may be a, c, g or t
  misc_feature (197)..(197): Wherein n may be a, c, g or t
  misc_feature (380)..(380): Wherein n may be a, c, g or t
gaattcctcaaactcaaaaatgaaggcctcatgatgtatggccagatgaccgcgggttcctggatctatattgcaacccagggtattttgcagggcacgtttgagacgttcgccgcggttgcaaagaagcgtttcaacggaaccctgaaaggcaccatcacgctgactgcgggttgcggcggaatgggtggagccnnaccgctcgccgtgacgctcaactgcggtgttgcactcgtggtcgatgtggaccgcagccgtcttgaacgccgccgttccaagcgctacttggatgagatcgcagatgacctggatgccgcggtagcgcgctcagcaggccgttgagctggcgaggcgtctcgattgggatcgaaggcaaccgn

SEQ ID NO: 1948 - protein, 113 aa, Homo sapiens
  misc_feature (66)..(66): Wherein Xaa may be any naturally occuring amino acid
EFLKLKNEGLMMYGQMTAGSWIYIATQGILQGTFETFAAVAKKRFNGTLKGTITLTAGCGGMGGAXPLAVTLNCGVALVVDVDRSRLERRRSKRYLDEIADDLDAAVARSAGR

SEQ ID NO: 1949 - DNA, 343 bp, Homo sapiens
  misc_feature (1)..(1): Wherein n may be a, c, g or t
  misc_feature (343)..(343): Wherein n may be a, c, g or t
ncgccgttcaacggcgacctggccgacatcgaccggctggagatcatccgtacctggcgcttcgaacgcggcgaccgactgtccagcaagtagcgccggcaaggctggctttctcgcgtccgaagcaggacactagcggccatgaaacagagcagcccaacctacctcaagcatcatttcctgatcgccatgccgcacatggccgaccccaatttcgcccagaccgtgacctacctggtcgaacacaacgagcagggcgccatgggcctggtgatcaaccgtcccagcggcctcaacctggcggaagtcctcgaacagctcaagccggacgccctgccgccgn

SEQ ID NO: 1950 - protein, 67 aa, Homo sapiens
MKQSSPTYLKHHFLIAMPHMADPNFAQTVTYLVEHNEQGAMGLVINRPSGLNLAEVLEQLKPDALPP

SEQ ID NO: 1951 - DNA, 371 bp, Homo sapiens
tgtacaaacccgcctatgagcaagtgcaaaccaacatggaaatgctcaaggccggacgcagcttcaaggaatacgccgagatggcctggaagattcccgagcattacaaaaacaaccgctacttcgccctggtgcacggggttggcatgaccggcgagtacccttgggtggtgcaccgcgaagacattgacgcgctgggttacgacggtgtgttcgaggccggcatgaccatctgtgtggaaagctacatcggccacgacgacggcggcgaaggcgtgaagctcgaagaacagatctacatccacgaacacagcatcgagttgctctccgattatccgttcgacccacgcctgttgccgcgctgaacgcgt

SEQ ID NO: 1952 - protein, 109 aa, Homo sapiens
MEMLKAGRSFKEYAEMAWKIPEHYKNNRYFALVHGVGMTGEYPWVVHREDIDALGYDGVFEAGMTICVESYIGHDDGGEGVKLEEQIYIHEHSIELLSDYPFDPRLLPR

SEQ ID NO: 1953 - DNA, 262 bp, Homo sapiens
  misc_feature (1)..(1): Wherein n may be a, c, g or t
  misc_feature (2)..(2): Wherein n may be a, c, g or t
nntccggaacggcacaatggagcctgaccgcttcgggaccctgcaggggaaggcacgtggtaccgagaggacggtcacatgagcagttcacacctgcatgccgagggcatgatcttcatccactcggcgccgacggcattgcgcgaccacatcgagtggatgggcaatgccgctgttgtcgcgcccatgtggcagtggaggctccaaccggtctgtccgggaagttggcgcgccgaaattgcgtggagtggtgacatgcagc

SEQ ID NO: 1954 - protein, 61 aa, Homo sapiens
MSSSHLHAEGMIFIHSAPTALRDHIEWMGNAAVVAPMWQWRLQPVCPGSWRAEIAWSGDMQ

SEQ ID NO: 1955 - DNA, 411 bp, Homo sapiens
  misc_feature (411)..(411): Wherein n may be a, c, g or t
ggatcccatggacgggagaggagaatgctggcagtgttgacaatgcaggggaggggtgctgtcttgcagggagcacagagagttagttccattttcccccatgttttgtttaagtgcatccaagcagagctatcacaccctggtcgagatgtaaagtggtttgagggcagatcctttaggggagagcaaagaaggaccattgaagaaaacaacagtaatgggaacaggaaaaaataattctttcctacgacgcccatgacataagcccttattggagcggagaagtaaactgagaggagtgcaaatcttaactgagccaaaagaagctatactggagaatgtgaagactgaattaaccaactgaaatgagcagaatccaatattgtgtaagatgcaatctacaggccctan

SEQ ID NO: 1956 - protein, 85 aa, Homo sapiens
MGVVGKNYFFLFPLLLFSSMVLLCSPLKDLPSNHFTSRPGCDSSAWMHLNKTWGKMELTLCAPCKTAPLPCIVNTASILLSRPWD

SEQ ID NO: 1957 - DNA, 384 bp, Homo sapiens
acgcgtcctcttacgctcagttttgacaatgcgtgctggcagccaaccgaagccgtaaaactcaacgaaatgctctcgcttaaaccgtgcgaaggaaccccaccgcaatggcgcttattccgcgaaggggattaccaaatgcgcattgatacgcgctccggaacgcctacgctgatgcttaccgtacaaagtgtaaccgacaaacctgttacggacgtcactcgacaatgtcctaaatgggacggcaagcccctcacccttgacgtaacgaatacattcccggaaggctccgtcgtacgagacttctacagcaagcaaaccgctatggtgcagcaaggtaaaatcacacttcagcctgccgctaacagcaatggcctgctgctg

SEQ ID NO: 1958 - protein, 128 aa, Homo sapiens
TRPLTLSFDNACWQPTEAVKLNEMLSLKPCEGTPPQWRLFREGDYQMRIDTRSGTPTLMLTVQSVTDKPVTDVTRQCPKWDGKPLTLDVTNTFPEGSVVRDFYSKQTAMVQQGKITLQPAANSNGLLL

SEQ ID NO: 1959 - DNA, 257 bp, Homo sapiens
gtcgacgaccatcatgtctggcagatgccgcaaggcggcgtcgatcctggcgaggacacctgggacgcggccaagcgcgagctttacgaggaaaccagcgtccgctcgatcgagaaactcggcgaagttccggactggctgatctacgacatcccgcgcaccgtggccgggcgggcctggaaaggccgctatcgcggccagcggcaaaaatggttcggcgggcgcttcaccggcaaggacagcgaaatcaatgtgaa

SEQ ID NO: 1960 - protein, 85 aa, Homo sapiens
VDDHHVWQMPQGGVDPGEDTWDAAKRELYEETSVRSIEKLGEVPDWLIYDIPRTVAGRAWKGRYRGQRQKWFGGRFTGKDSEINV

SEQ ID NO: 1961 - DNA, 314 bp, Homo sapiens
gaattcccatttcagctggtattctaaaatcggccctttaaaaagctttccagtgattgcctttgggttatttacaattctccgctccatcagaagttccactgctttcttctgcttcttccagtatggataacaatggtttgttcccaatctgctggtatttgagcgtttgtagagaaacatagtcaactaattttcttgtacacattttctatgtgtttttggttttcctatcctatttgttctgttttaggggaaagtcatatagatatttaggaaactattctaccactgctgtcatcttcccaggatcc

SEQ ID NO: 1962 - protein, 61 aa, Homo sapiens
MFLYKRSNTSRLGTNHCYPYWKKQKKAVELLMERRIVNNPKAITGKLFKGPILEYQLKWEF

SEQ ID NO: 1963 - DNA, 240 bp, Homo sapiens
  misc_feature (1)..(1): Wherein n may be a, c, g or t
nacgcgtcggcacacgaactcgccctggctcgccagcagcaactgactaaaccggccggctctctcggccaattggaagccttggcggtgcagctggccggcctgcaaggccaggtcaaaccgtcagtggactcgctgtggatcgccatttttgccggcgaccatggcgtggttgctgaaggcgtgtcggcctttccccaggaagtgaccgggcaaatgctgcataactttgtgaccggt

SEQ ID NO: 1964 - protein, 80 aa, Homo sapiens
  misc_feature (1)..(1): Wherein Xaa may be any naturally occuring amino acid
XASAHELALARQQQLTKPAGSLGQLEALAVQLAGLQGQVKPSVDSLWIAIFAGDHGVVAEGVSAFPQEVTGQMLHNFVTG

SEQ ID NO: 1965 - DNA, 362 bp, Homo sapiens
  misc_feature (32)..(32): Wherein n may be a, c, g or t
agatctgtgtcaaattatacctaagcagtatntctcttcactttaagtttgttccaattttgactctgatcatatgtgctttctttgcagcatatggacccagttgctgatgctatccttctcaaaacagtttattgggatccataaccccacagtcttctccatctctggaagttccttctgtctcctctatatggccttcttcctaaccatcccttcaatgttgatattactcagtgctccatgctaagccctttttctcctctccctcaacatacactctctggatatttttacttctgtggcctgaattactatctatactatcagagggttgtaacatgagcttttattttcctagg

SEQ ID NO: 1966 - protein, 58 aa, Homo sapiens
MCFLCSIWTQLLMLSFSKQFIGIHNPTVFSISGSSFCLLYMAFFLTIPSMLILLSAPC

SEQ ID NO: 1967 - DNA, 401 bp, Homo sapiens
  misc_feature (284)..(284): Wherein n may be a, c, g or t
agatctacagctcaaagcagacagaaaacactcatgcccttaatgaagctgacatctttatcctagaaaagcagctaactataatccccaaatatccaagaaaaatgttagacttagactttgaccatctggatttagttaaaacaaaaagctgagagagaacatggcaataacatttcatcagctaaaacaaaaactgctaggcaccatgggtagcagatttttaaactcgtggttcaacaatataggaattatgtatcacatcatatcatgtcgcattttanagttttatcagggctggccaatgttgttggaaatgttctaaatttgcactgtccaataaagtagccaccagccacatatgatactgacactgaaatgtggctggtacaatgaggaac

SEQ ID NO: 1968 - protein, 53 aa, Homo sapiens
  misc_feature (41)..(41): Wherein Xaa may be any naturally occuring amino acid
MAITFHQLKQKLLGTMGSRFLNSWFNNIGIMYHIISCRILXFYQGWPMLLEMF

SEQ ID NO: 1969 - DNA, 393 bp, Homo sapiens
gcacgcgctactagaactaaatatcagcaaaaggctcatgccggtttgatcattcttgccaaatccttcacatttcaaaattttgctttgagaacgacatctgctacaccagaaacatttgctttagagtccgatctattattggagaagcctcattttgagtccattgctgatgaacctctagacgagcaaatttatagtaaaagacaaaaggtagacctaaatgaaggttatgaagaagataaactattgccattggcactacgtcaagaaaatattccaaagttgttgctggatttgaaccctaacgatcaacctaccctatctgattacgacaacatccagttgctgttacgtctttacaccataaagaacacaactccggccaaggat

SEQ ID NO: 1970 - protein, 131 aa, Homo sapiens
ARATRTKYQQKAHAGLIILAKSFTFQNFALRTTSATPETFALESDLLLEKPHFESIADEPLDEQIYSKRQKVDLNEGYEEDKLLPLALRQENIPKLLLDLNPNDQPTLSDYDNIQLLLRLYTIKNTTPAKD

SEQ ID NO: 1971 - DNA, 431 bp, Homo sapiens
  misc_feature (1)..(1): Wherein n may be a, c, g or t
  misc_feature (370)..(370): Wherein n may be a, c, g or t
  misc_feature (409)..(409): Wherein n may be a, c, g or t
ncccggaaatgatgtgagcgcagctcatatttgggtcatgggaccaggtgtcatctttatttcctgccttctttctagatgagcacagtctacttagagaactggagaacacacgttcagagacaaccctgtacctgcagaatttgaggagggtggccacaggcagggcaggcgggtggggagggccccggacttacctcccgttccaggcacacgacacactctgaggcctgcacctccagctctgcagggggagcggatggcctcacagactcaggaggctcctggggggccgtaggggtgacgacctcacccattggtggtttcagctctgtggggaccagacagacagactgagccagggtcatcntcgctgacccctacccctgggggctcattgtggccctgncccatcccatggtgagtgagct

SEQ ID NO: 1972 - protein, 83 aa, Homo sapiens
MTLAQSVCLVPTELKPPMGEVVTPTAPQEPPESVRPSAPPAELEVQASECVVCLEREVSPGPSPPACPACGHPPQILQVQGCL

SEQ ID NO: 1973 - DNA, 453 bp, Homo sapiens
actagttctttcaatatattgctcatctcatttgaatgtattggtggccacttctctgaaggagtagagacagtggcattttccattatcaagataagtgtctagaaagcaagtcaggattgaggcattcttgtttgtatagaggcacccccatttcttcaagaggaaatgagaaatttcttcttcagggaatgtgttgaggacaggagtataactctgatctgaagaggaattggagatccttctgcgaacagacatgagaccataaaaagtgccatgttgtatggttagcttttcattgactttgataatttcttttttctctgccttgttttctctccacccccaaccccacaaattccaaaatggaatcatgtttctcacagtgtggtttgaaagctacctgtatcacaattaactggtgttgctggttaaattcagatacctgggccc

SEQ ID NO: 1974 - protein, 115 aa, Homo sapiens [sequence omitted]

SEQ ID NO: 1975 - DNA, 309 bp, Homo sapiens
gccaggagagggaccattaagggtcgcttagacttagcagcaagtaacatcaccggctttgtttcaactagaacaagtttcaaactttatcagatcggcaatttttcgacagaatatccttacacatctacgaccatgtttcaagatgacgaaggcaactttgaattcgctaatctccctttaaacgacggtgttaatgaaacgacatactatgtgatgtacccagcatctatggacttcaatctgaagccaaacagaattcttattgaattcaagaatttagagaatggcaccttacaattgaacgcg

SEQ ID NO: 1976 - protein, 103 aa, Homo sapiens
ARRGTIKGRLDLAASNITGFVSTRTSFKLYQIGNFSTEYPYTSTTMFQDDEGNFEFANLPLNDGVNETTYYVMYPASMDFNLKPNRILIEFKNLENGTLQLNA

SEQ ID NO: 1977 - DNA, 388 bp, Homo sapiens
atctacaacgtcgacaacgggcgacgcttcactacctatgcgatccgcgccgagaacgggtcgaagatgatctcggtgaacggcgcgcgggcacacaaggccaaggtcggcgaccgcgtgatcatctgcgcctacgcacactacagcgaagccgaactggccagccacaagccgcgcatgctgtacatggcgccgggcaaccagctcagccataccagcgaggcgattccgatacaggtcgcctgacctcgccccctctggataaagcccggtttcatccgggctttttcatgttcaaataagtgcgccatcgaattccaaccagaaggtcagccatgaagcaccacctcactccgctggatgccacgcaaatcgacagttggcgcgc

SEQ ID NO: 1978 - protein, 81 aa, Homo sapiens
IYNVDNGRRFTTYAIRAENGSKMISVNGARAHKAKVGDRVIICAYAHYSEAELASHKPRMLYMAPGNQLSHTSEAIPIQVA

SEQ ID NO: 1979 - DNA, 312 bp, Homo sapiens
acgcgttgaggctggggataccctgctcgcggtagaagtcgtcgcggccccgggccatgaggcggacctggtagtacatgtcgaaaacgttgttgttcacaggcgtggccgttaagagcgtgatcttcttgtccggtttgcccgagccgacgatccgcatcaggttctggtagcggcccgtgctcgtcttgcggaaagttggggcttttggcgaacaataatcacgtcggcatccaggtaggctttccagttgaagtcttcacggcccatcgactccatcgggacgatccgcgcggcgatgccgaactcctg

SEQ ID NO: 1980 - protein, 53 aa, Homo sapiens
MRIVGSGKPDKKITLLTATPVNNNVFDMYYQVRLMARGRDDFYREQGIPSLNA

SEQ ID NO: 1981 - DNA, 503 bp, Homo sapiens
  misc_feature (1)..(1): Wherein n may be a, c, g or t
nacgcgttcgatcaaacaatttctagttaatgcaattgtcctttttgtttctgtgatgcccatttttatttatttttatactgtagtctagacagaattactgctattctcttccaggatcaaaatgctttgaagggaaacgtctggctatttaatatatgcgaatacaccttatatacagacaatgaacaagagatataaattataccgggtgtggtattactatgctcaccaaacagtttgcataacctctactggatttgcattatgttttgtggtccagctaaaactgcaggactgggcgtaacaccaattacttcactatacggggacaaaaaagaacacctaggtaagttgttggttcctttagttttatatcaaatttagcaagtcatgacggcaaatttctttgtaagcttgtttaaaagatggatacaaaaggacgactttcctttcaatctttcgtttttgctttttattattccatagcaatatagtgatca

SEQ ID NO: 1982 - protein, 61 aa, Homo sapiens
IIPGVVLLCSPNSLHNLYWICIMFCGPAKTAGLGVTPITSLYGDKKEHLGKLLVPLVLYQI

SEQ ID NO: 1983 - DNA, 298 bp, Homo sapiens
caattgaccccgctgtgttctggcggctgccgctaggctgctgtctgcggcgtcggccatgccacgccacacgtccatgcgtgtgcgagcgttcgaaaggtcggcatcggctgtcgcttcgaccatgcgttggacgttggacagatcgaaccgcgcggcattggcttctgcgcttgcctgctcggcagctgccctgcgatatccgccgcccagaagtatggaggcaacaagacctgcgccgcgttccatgcccctgcgctcgctaaacagccggacgccgaaagtggggtcggcgatg

SEQ ID NO: 1984 - protein, 83 aa, Homo sapiens
MERGAGLVASILLGGGYRRAAAEQASAEANAARFDLSNVQRMVEATADADLSNARTRMDVWRGMADAADSSLAAAARTQRGQL

SEQ ID NO: 1985 - DNA, 699 bp, Homo sapiens
  misc_feature (1)..(1): Wherein n may be a, c, g or t
  misc_feature (2)..(2): Wherein n may be a, c, g or t
nntgatcattgtactgcgccaacaattcaagggtggtactaccaccatgagttgtggtcaaattatctgtcattgcgtgctgttagttgagtgtgagtttattctagaatatacacacagatactcctagcagccagtgtttcaacaaacgtgatgttgtatatgcctgatgtaatcacgagctcgaacaaaaggcaaaatggtagaaggcaaggacaaagaagaaaagagaaaaaacttccagatacaaagctaacacacaaaggtaaacggggattaaaatggatatatcgttgatgtatttaacaatcttgaaaaattccgtttaaaaaacataccaatacgcgcaataaaaacggttcttatctggtactttacctagtcagacgataattgttctttataaaacggccgcgttttttttccaacatcaccgccgccatataactttcgacattcttagagttgtggtataaagagcaatgcatatacgtatgtaatcctaattgaaatgctatctttgtaacataatgaatggttcagttgagcacatacttaccatcacctccctcgacaaatatgtcctgcacattctcgagtgtgatgagtgtctgctttatgaccatgtcggcaactgtgctgccgatatgtggcaaagctgtaacatcccatctgcgaagtaactcttgcttaacgcgt

SEQ ID NO: 1986 - protein, 55 aa, Homo sapiens
MVQLSTYLPSPPSTNMSCTFSSVMSVCFMTMSATVLPICGKAVTSHLRSNSCLTR

SEQ ID NO: 1987 - DNA, 447 bp, Homo sapiens
  misc_feature (1)..(1): Wherein n may be a, c, g or t
  misc_feature (2)..(2): Wherein n may be a, c, g or t
nntcttggaggatgcccttaaaccagtattttttcaaagcttggtaaataaataaataattccttgagaactttttttaggcccatgcttcagtaaaatagaaagcaaaaagagacaaaccttttttaaaaaaaaacccacatatatcaaaaacatttaaattattaagaaaacacagctgacattagcgatggaaaaggacatgggtttaacaaaactccactgggaagtcacgggctttagggaagaccttgtcatttccacaagaaatgaaaggcccttgtccttttaggaactgcctgcagctttcctttttttttttttctgaggcaggatcttgctctgtctcccagactggagtgcagtggtgagaaaacggctcactgcagccccaaactcctgggctcaagtgatcctctcatttcggcctcccaactagctggtact

SEQ ID NO: 1988 - protein, 58 aa, Homo sapiens
KALVLLGTACSFPFFFFLRQDLALSPRLECSGEKTAHCSPKLLGSSDPLISASQLAGT

SEQ ID NO: 1989 - DNA, 263 bp, Homo sapiens
  misc_feature (263)..(263): Wherein n may be a, c, g or t
agatctgatgataaatgtgcacagtcatcagttattaaagcacacagtcatcatagaaattaggccattctgcttgacaagagtagcaaaggcttcctatcttgccatgggtaagttccttggttggccgatctggctgaatttgtttattctctctggaaggatctaccggagtccctcttcccctccccttctggctctcccctccgatgttgcttggtaaagatgctcttcctagggctacacagcattcaaaaccaacn

SEQ ID NO: 1990 - protein, 71 aa, Homo sapiens [sequence omitted]

SEQ ID NO: 1991 - DNA, 315 bp, Homo sapiens
tctagacgttttgtgtttgttttatattttagcatatattctgcagaaggtttctgagtttcatgggtctgtggtttgatgtctgaaaatcacttaggaaaattgtcagacattgtttcctaaaatatttcttacacactattttctcttttccttctgagtttccagtgatgcacataaccaatgatattttttgtagcttttggatgcccatttctttttacttttcagtctttttctctgtgtttcagttgagtaattttattgacatattgtcaggtacactgatccacctcttagctgagttatgggccc

SEQ ID NO: 1992 - protein, 61 aa, Homo sapiens [sequence omitted]

SEQ ID NO: 1993 - DNA, 316 bp, Homo sapiens
ctgcagtcactcgggcagccccagggtccatcttctgacacaatgtctgtggctctctgcttgcattctagtctccctatggaccggggatgaccctcagatgaaatgccaaagaaactgttcttatacagtgtcatctccgtctttcaagggtctaattccctccagtttctgctttttgattgccctccagtggcttcaagttctttatacccttatgttttgcctatgtttataattattatctcatgcaagctactcttccaatacctggatttgggttttagctgagaaaaagaaatcagatccaaaattt

SEQ ID NO: 1994 - protein, 61 aa, Homo sapiens
MPKKLFLYSVISVFQGSNSLQFLLFDCPPVASSSLYPYVLPMFIIIISCKLLFQYLDLGFS

SEQ ID NO: 1995 - DNA, 258 bp, Homo sapiens
attctgcgtgtcagatcattggtgataaagccaaaggaggatgctcaagtgaggattaagtttgccaacttatgcagaaaatcgggtaggatggcgctagctaaaaaagtcttaaatacattgcttgaagaaacagatgacccagatcatcctaatactgctaaggcatcccctccagttgtttatgcacaactgaagtacttgtgggctacggggttgcaagatgaggctttgaagcaattaattaatttcacatct

SEQ ID NO: 1996 - protein, 86 aa, Homo sapiens
ILRVRSLVIKPKEDAQVRIKFANLCRKSGRMALAKKVLNTLLEETDDPDHPNTAKASPPVVYAQLKYLWATGLQDEALKQLINFTS

SEQ ID NO: 1997 - DNA, 345 bp, Homo sapiens
accggttcgggtggtatgcataaattaaatgttcctttacttgctcccatgtcccaatctaacacacatgagtcgtcgcacgccagtaaatctaaagatttcagacactcagactcgtacagggaaaatgagactaatcatacaaacgtaccaatatccagtacgggtggtaccaacaacaaaactgttccgcagataagtgaccaagagactgagaaaaggattatacaccgttcaccttcaatcgatgcttctccaccggaaaataattcatcgcacaatattggtcctatcaaaacgccaactactggggctgaacagaataccgaggaatctatcatcgct

SEQ ID NO: 1998 - protein, 115 aa, Homo sapiens
TGSGGMHKLNVPLLAPMSQSNTHESSHASKSKDFRHSDSYRENETNHTNVPISSTGGTNNKTVPQISDQETEKRIIHRSPSIDASPPENNSSHNIGPIKTPTTGAEQNTEESIIA

SEQ ID NO: 1999 - DNA, 289 bp, Homo sapiens
  misc_feature (1)..(1): Wherein n may be a, c, g or t
  misc_feature (2)..(2): Wherein n may be a, c, g or t
  misc_feature (3)..(3): Wherein n may be a, c, g or t
nnncaccttaactcctactacccaattctttttctcaaggaagctggctttaagccaaagaagaagatcgacttcgtcttagggaccaacgaagaaaccaactgggtcgggatcgactactacttgaagcacgaaccgactccagacatcgtcttctcaccagacgctgaatacccgatcatcaatggtgaacaagggatcttcaccctggaattcagcttcaagaacgatgatactaagggcgactatgttttagacaagttcaaggccgggattgccactaacgcgt

SEQ ID NO: 2000 - protein, 96 aa, Homo sapiens
  misc_feature (1)..(1): Wherein Xaa may be any naturally occuring amino acid
XHLNSYYPILFLKEAGFKPKKKIDFVLGTNEETNWVGIDYYLKHEPTPDIVFSPDAEYPIINGEQGIFTLEFSFKNDDTKGDYVLDKFKAGIATNA

SEQ ID NO: 2001 - DNA, 269 bp, Homo sapiens
ggatccaggtttgtggggttcctgctgggaagggctgtagggggattcctgttcctcgccaggaatgatggaacgcccagctggacgaaaggggctgtggacgatcgggagaaacattatccctcacgaggccagaagccggccgaatctgagccaaggaagggggtggcaggggcgccgcgtccccaccccaggtctcccagcaaaggccgctcctctggccagggtcaattaccggggtgtttcgggcaccaagttcccacactagt

SEQ ID NO: 2002 - protein, 67 aa, Homo sapiens
MMERPAGRKGLWTIGRNIIPHEARSRPNLSQGRGWQGRRVPTPGLPAKAAPLARVNYRGVSGTKFPH

SEQ ID NO: 2003 - DNA, 264 bp, Homo sapiens
gccttcgacatcgaagatctggcattgagccgactcgcgatactcgagatgtgtaccggggtcgcgcattggtaccggccccggtggggcgtctcgagttggaagatgtccagcgattcttcgtcagcaccacgtgcaaagcttctgtcggttccgtccgacgaactgcacggtgtggagttcattcacgacgtccgaaagctggacagcgagcccgagactcagtcctccgagatctggggaaccactgcacagagcgaattc

SEQ ID NO: 2004 - protein, 72 aa, Homo sapiens
MCTGVAHWYRPRWGVSSWKMSSDSSSAPRAKLLSVPSDELHGVEFIHDVRKLDSEPETQSSEIWGTTAQSEF

SEQ ID NO: 2005 - DNA, 328 bp, Homo sapiens
tgtacacgtgactggaaatacagaccataaatcagtcttgtctgattacacaatgagtctgactcaataaagcagttcttggcttctcacgtaagtaagtaaaagactagaaatactgaaacttcctttagtatactggtacagtaaaaccacaatactttgaaaggttcttcttgaggttaaagcaaactcattcatcctcttaaaaaaaaaagatatctctattactatcatctgttcttttcccccagcctacttctaaaacactagttctcaaacattatttttcatcagaatcaccagtatggcttgttaaagacagtggctg

SEQ ID NO: 2006 - protein, 56 aa, Homo sapiens
MIVIEISFFFKRMNEFALTSRRTFQSIVVLLYQYTKGSFSISSLLLTYVRSQELLY

SEQ ID NO: 2007 - DNA, 293 bp, Homo sapiens
  misc_feature (1)..(1): Wherein n may be a, c, g or t
  misc_feature (293)..(293): Wherein n may be a, c, g or t
nctgggatcacaggcgtgagccaccacgcccggccccatcaatgggttttcaacagaaccctccacagggtcccattcccattgtcttccagaggatagtcactggtgagaagattaggtggtatgaaggcatgacaaaggagaaagctgagaacactgagtgttctggaaattgtagcatagagtcctgactccttccaagcctgccacatctgaccccaactcacccttctagtgcctgccctcacatcaaccttctattgcaggtcctgagatgctggcaactcacttan

SEQ ID NO: 2008 - protein, 57 aa, Homo sapiens [sequence omitted]

SEQ ID NO: 2009 - DNA, 403 bp, Homo sapiens
  misc_feature (372)..(372): Wherein n may be a, c, g or t
  misc_feature (403)..(403): Wherein n may be a, c, g or t
gtgcacgaaaaaggccaacctattcttgtcggtacgcagaatgtggcagagtcagaagatctggctgatcagttgcgtgctgaaggactgcactgcaacgtattgaacgctaaaaacgatgctgcggaggcaaaagtcgtcgcggaagcaggcgcctatggagctattactgtttccacgcagatggctggtcgtggtactgatattcgcctgggtggctccgatgaagtcgaccgttccaaggttgttgatgccgggggattgtgtgtgattggcacttctcgctaccgcacagaacggcttgataaccagttgcgagggcgctctggtaggcagggtgatccgggcatgagcgtgttcttcatctctatngaggatgagcttattgctgctggtgctccgn

SEQ ID NO: 2010 - protein, 134 aa, Homo sapiens
  misc_feature (124)..(124): Wherein Xaa may be any naturally occuring amino acid
VHEKGQPILVGTQNVAESEDLADQLRAEGLHCNVLNAKNDAAEAKVVAEAGAYGAITVSTQMAGRGTDIRLGGSDEVDRSKVVDAGGLCVIGTSRYRTERLDNQLRGRSGRQGDPGMSVFFISXEDELIAAGAP

SEQ ID NO: 2011 - DNA, 342 bp, Homo sapiens
acgcgtgtacttatttctaatcaaattgatgaaatatgggaaaatacggacatctcatctcttgcactaaatttgctaagaagggcacctgtaaaggacgttaagctaattgcacgaagggatttcgttcattccaaattcaccaacaaagaattaagagaactatggaagttagaaaagtatggcatacgtggccgtattgatcctaaatttttccagaaagaaatgtttgacccatctaagtacgatcgtgcattcaatagacgagtagagatgtgtagtgagtatctcaagccatttaatgaacgttcgaagaaaaacctataaaaggctcctcctcca

SEQ ID NO: 2012 - protein, 108 aa, Homo sapiens
TRVLISNQIDEIWENTDISSLALNLLRRAPVKDVKLIARRDFVHSKFTNKELRELWKLEKYGIRGRIDPKFFQKEMFDPSKYDRAFNRRVEMCSEYLKPFNERSKKNL

SEQ ID NO: 2013 - DNA, 276 bp, Homo sapiens
tgatcagaggaggatccatccattgctggacaaagagtgccgggaagggcatttagagactctgccgtagcgctaccattgcctgggcaggctccagagccctctcccctttctgagccccgagctcccaatctgtaacttgaggaagttggacgaggcggaatttaagcccgtctgttcctgggacgcctcctgaggccctcccgtgtgctcgttatgcccaggtaactgccccatccggggctggggtccacttccatacctcctggggtttca

SEQ ID NO: 2014 - protein, 54 aa, Homo sapiens
MGQLPGHNEHTGGPQEASQEQTGLNSASSNFLKLQIGSSGLRKGRGLWSLPRQW

SEQ ID NO: 2015 - DNA, 157 bp, Homo sapiens
  misc_feature (1)..(1): Wherein n may be a, c, g or t
nggcgcatggacaacctgtcgtcggtgcattcctcgatcgcggcattcacgcatgtcgcaccgcgtgacgacgtcgccgtcatggcgtgcttcgaccacgaggaggtgggctcttcgactcgctcgggggcctgcggaccgttcctggaggacgcgt

SEQ ID NO: 2016 - protein, 52 aa, Homo sapiens
  misc_feature (1)..(1): Wherein Xaa may be any naturally occuring amino acid
XRMDNLSSVHSSIAAFTHVAPRDDVAVMACFDHEEVGSSTRSGACGPFLEDA

SEQ ID NO: 2017 - DNA, 393 bp, Homo sapiens
  misc_feature (1)..(1): Wherein n may be a, c, g or t
  misc_feature (2)..(2): Wherein n may be a, c, g or t
nngtgcacagaatctttcgtagaagggagcatttgacatcctgtcagccatatgcaatgagtatgccacaagttcatgatagtgttgactatagaatataaaaaaaaggtggggtcatctgtaatcgttgtttgtaattcttagaggcctgttcttggaattattatgcaaagattaccatcacaaaatctaacacaaatagagatacaggtcttgtaaagccattacctagctatgaaaaacttatcttttctcataaacagaagaaaggaaaatacaagtgactcgaatgtatacccaggaaaggctaagtcgcatgaacccagctggatagaaatggatgatcaaactaagaaggacggcttagatattgttcatgttgagttcagtccg

SEQ ID NO: 2018 - protein, 53 aa, Homo sapiens
MKNLSFLINRRKENTSDSNVYPGKAKSHEPSWIEMDDQTKKDGLDIVHVEFSP

SEQ ID NO: 2019 - DNA, 289 bp, Homo sapiens
aaatttttgtatctggcattggtgagtgaaactgggctattattttcctcttttataatgtagttgttaggttttagaatacaagttttgttaagttcttaaatgaattgccaagtaatcctgcgttctattccctaaaatgccctggagttttgagggaagctccccctacactcaatcactgtccttcactcaccatgtttttgtttttgttttttgtgggtttttttttttttttttttttggaaaaaaagttttgcttttttggccccgggcggggagccggggg

SEQ ID NO: 2020 - protein, 50 aa, Homo sapiens
MPWSFEGSSPYTQSLSFTHHVFVFVFCGFFFFFFFGKKVLLFWPRAGSRG

SEQ ID NO: 2021 - DNA, 475 bp, Homo sapiens
aagcgtgattacacctttgctgagggcgttaaccgagccgtcaaccaggtgctggtgcggtctattaacaccaccatcgtgggcgtgctacccgtcgccgcgttgctcttcgctggtgcctttgtgctggggtccgggccgctcgaagaccttggcctggccctgttcgtcggaatgatcgttggtgcctactcctcgatcttcattgcaaccccggtgtttacccaattgcgtgagcacgagccagccatgaaagagcacactgcgcgtgttctgcgtcgccgtgagcgggccgctcagaaggcaccacaggtaaccgctgagaccgttgccgcggaaggtccacgcgacgttacgactatcaccgggggcgatcgtcaccagccacgtcgttttacccgtgccgagaggaagaaatgacctaccgtaaggacctcattgctagcctgatccgggatgtcccggactttccgga

SEQ ID NO: 2022 - protein, 139 aa, Homo sapiens
KRDYTFAEGVNRAVNQVLVRSINTTIVGVLPVAALLFAGAFVLGSGPLEDLGLALFVGMIVGAYSSIFIATPVFTQLREHEPAMKEHTARVLRRRERAAQKAPQVTAETVAAEGPRDVTTITGGDRHQPRRFTRAERKK

SEQ ID NO: 2023 - DNA, 372 bp, Homo sapiens
  misc_feature (1)..(1): Wherein n may be a, c, g or t
ngctgtctcggtgcagcgcaccaaacactgtccgcgcagcaacgcatcattatgtaccgctttatcgaattcattggccgctggtccatgctggatatcttcgtgatcgccatcctggtagcggttgttaactttgggcgacttgccagtgtcgaggccaatcttggcgctgcagcattcgccagtgtggtgatcttgacgatgcttgccgcagtaacttttgatccccgactgatttgggacaacacggagtcggacgacgaccatgagtgatttgccaaaagctaaaacccgcccagcttccaattggtcggccatctgggtgttgccattggttgcgctgatcattggcggctggttggggtggcgcgc

SEQ ID NO: 2024 - protein, 90 aa, Homo sapiens
  misc_feature (1)..(1): Wherein Xaa may be any naturally occuring amino acid
XCLGAAHQTLSAQQRIIMYRFIEFIGRWSMLDIFVIAILVAVVNFGRLASVEANLGAAAFASVVILTMLAAVTFDPRLIWDNTESDDDHE

SEQ ID NO: 2025 - DNA, 319 bp, Homo sapiens
  misc_feature (319)..(319): Wherein n may be a, c, g or t
ccggcttcgtttgccgatccggttgaacgcgcgtcggcagaaaaagcgctggcctatatggggctgaaaccgggtattccgctgaccgaagtggctatcgacaaagtgtttatcggttcctgtaccaactcgcgcattgaagatttacgcgcggcagcggagatcgccaaagggcgaaaagtcgcgccaggcgtgcaggcactggtggttcccggctctggcccggtaaaagcccaggcgaaagcggaaggtctggataaaatgtctattgtagtcggttttgaatggcggttgcctggctgctcgccccctcgcccgn

SEQ ID NO: 2026 - protein, 106 aa, Homo sapiens
PASFADPVERASAEKALAYMGLKPGIPLTEVAIDKVFIGSCTNSRIEDLRAAAEIAKGRKVAPGVQALVVPGSGPVKAQAKAEGLDKMSIVVGFEWRLPGCSPPRP

SEQ ID NO: 2027 - DNA, 315 bp, Homo sapiens
  misc_feature (118)..(118): Wherein n may be a, c, g or t
aataagaagcgtttgatggaaatggggcgcatcgcttatgaagcccaaaaaatcgggctttttgaatacttgatttatcaaaattcttacatggacgccctcatcactctagcggaanctaagattgaatacattgatattagcgcgcttttagaagagactttaggggagagcttgaccagattaggagtattgcattgaagcgggcgttatggtggcttatgttaatgggcgttttttcaatgggcgtttctttaaaagccaaagagtatccagaaattgttttagaagaaaaaaacttgcaacccatggggt

SEQ ID NO: 2028 - protein, 66 aa, Homo sapiens
  misc_feature (40)..(40): Wherein Xaa may be any naturally occuring amino acid
NKKRLMEMGRIAYEAQKIGLFEYLIYQNSYMDALITLAEXKIEYIDISALLEETLGESLTRLGVLH

SEQ ID NO: 2029 - DNA, 240 bp, Homo sapiens
cagttagctgactacctctatgccatgggtcatcgggatatggacttcctgacggtgactacgactgatcccgctgtggggattaagcgccgggatgccattaagcaaggatttctcaaagttgggggataccagcttccgcgaatatacttgtggctttaacctcatggatggctaccaggtgacgcgtgatcaagtgctgctcaataagccgcgcctgattgtgggggcgaccgatat

SEQ ID NO: 2030 - protein, 54 aa, Homo sapiens
MRLKPQVYSRKLVSPNFEKSLLNGIPALNPHSGISRSHRQEVHIPMTHGIEVVS

SEQ ID NO: 2031 - DNA, 383 bp, Homo sapiens
gccggcagggcaccgcacactgtgccgctgtctccccacttcgttttcattctctttaaaaaccaaaactgaaaaaccctgcccgtaactacttgcacttatgtcccaaacacctctgacttctcatccgcattctcactgaggaacgtgatgccaaggaagggactttaaaaaatctcttaattaattattggttataatgaatgccgaggaggggacgtttccaaaaccctcgtctccacggtttgctttctgttgtgtgtgcgtccgttgtaaacacagctttcagaattttcgctgatgctcaagtgctctttccagcaacagcattcatacacgccaggccacttcccgcaagtcataattacaacataaagccaaat

SEQ ID NO: 2032 - protein, 60 aa, Homo sapiens [sequence omitted]

SEQ ID NO: 2033 - DNA, 297 bp, Homo sapiens
  misc_feature (1)..(1): Wherein n may be a, c, g or t
  misc_feature (2)..(2): Wherein n may be a, c, g or t
nnacgcgtaaactcatcaccttcatcattaataggatcaacacttactggctctgatctatgttcgtcgtgttttggctcttcaactgtcacggcaggagtaacgtcatcgacctgcgcgctatcttctggtaaagaaatagctgccgctgatctttgatgctctaacgcatccgccaattgactttcttggctcattgaagcggtcagtttatccaaaacaatatccatcagaatcgggatatcatcctgattgcgcagtgccgcactcaatgtatgctcatcaggttctaaagct

SEQ ID NO: 2034 - protein, 52 aa, Homo sapiens
  misc_feature (1)..(1): Wherein Xaa may be any naturally occuring amino acid
XRVNSSPSSLIGSTLTGSDLCSSCFGSSTVTAGVTSSTCALSSGKEIAAADL

SEQ ID NO: 2035 - DNA, 321 bp, Homo sapiens
  misc_feature (205)..(205): Wherein n may be a, c, g or t
gatcctgctgggagatactttgctggtaccatggctgaggaaacggccccagctgttctggagcggcaccaagggtccttgtactccctttttcctgatcacagtgtgaagaaatactttgaccaagtggatatctccaatggtttggattggtccctggaccataaaatcttctactacattgacagcctgtcctacactgtgnatgcctttgactatgacctgccaacaggacagatttccaaccgcagaactgtttacaagatggaaaaagatgaacaaatcccagatggaatgtgcattgatgttgaggggaagctt

SEQ ID NO: 2036 - protein, 107 aa, Homo sapiens
  misc_feature (69)..(69): Wherein Xaa may be any naturally occuring amino acid
DPAGRYFAGTMAEETAPAVLERHQGSLYSLFPDHSVKKYFDQVDISNGLDWSLDHKIFYYIDSLSYTVXAFDYDLPTGQISNRRTVYKMEKDEQIPDGMCIDVEGKL

SEQ ID NO: 2037 - DNA, 239 bp, Homo sapiens
tcatgaatcaaggtgttttgacacaggctgtaccccttcctgcagctcgtcccccgcggagtggccaggctacggcgggcgccggaagggggcgcactcctcgcctttcctcaatgtgtcgggcagccccgcctccccgctcggtttccgggagtcggcggcgatggcgtcatcaccgagtgccgggccgacagcagcccggaggttggctatgtgaccaggcaacatgctgagccggc

SEQ ID NO: 2038 - protein, 76 aa, Homo sapiens
MNQGVLTQAVPLPAARPPRSGQATAGAGRGRTPRLSSMCRAAPPPRSVSGSRRRWRHHRVPGRQQPGGWLCDQATC

SEQ ID NO: 2039 - DNA, 299 bp, Homo sapiens
gcctcggggaagtctctagtaggtcttattcgttcgttcaaagctgggcagaaggcgaaaatcagttatatccgtggttcccaggaggggacggttgacgtgacaatgggcacggcgaaggcttgattttggcagtaacacaaccaactctccgcagccgatgtgctgcggagagtttgaatttctacctgcgctctcacatgaggtcgaggaccgctcgggcagtggcgtcatcaacgacgaggtcagttgcaactctggcgcgcagggcagccagcagtccgacggccttggcgcgc

SEQ ID NO: 2040 - protein, 72 aa, Homo sapiens
MTPLPERSSTSCESAGRNSNSPQHIGCGELVVLLPKSSLRRAHCHVNRPLLGTTDITDFRLLPSFERTNKTY

SEQ ID NO: 2041 - DNA, 381 bp, Homo sapiens
  misc_feature (1)..(1): Wherein n may be a, c, g or t
  misc_feature (380)..(380): Wherein n may be a, c, g or t
nacgcgttgaacacaatcaagacacgcccgcataccgagcagcattcctcgaaaaggttcgagcttatgctcgcgggtagactaaatgcgcaagagtactgaggaggagtggagatggccgcgacccgtatgccagccaatgaacgcaagccactcatgctggaggctgccgtccgtgtgtttgcgcgggttggctacgccgcggccacgacggactcgatcgcgcgagaggcaggcgtcagccaggcgtatgtcgtgcgtttcttccggtcgaaggaaacacttttcgaggaggctgctacgtatgttgttgagcagctgtgtcgacgttttgcttaggcgcccatatcggcggatttctaccgattctaacgtctgana

SEQ ID NO: 2042 - protein, 74 aa, Homo sapiens
MAATRMPANERKPLMLEAAVRVFARVGYAAATTDSIAREAGVSQAYVVRFFRSKETLFEEAATYVVEQLCRRFA

SEQ ID NO: 2043 - DNA, 574 bp, Homo sapiens
acgcgtgaagggactgtaactcattgagtgactagatgtagacagtgagggggctggagagtagaacgaggagtgtggtgacaggtaaggcaggagatgtgggcacacgccagagcgtgggcggatttggaatcagcttgcagagtacaggaaggagtctactggtagtactcccggcaagagaaaatggcaagttagatttgtggtagcaacacagatagaaaacaatggttggctttatgagatattttagaagggcctgtaactcattgagtgactagatgtagacagtgagggaaagagagaaatcaaggatgactcaggctgtttaacttgattagctagctgaatggaaagggtgccctttaggaagatggagaaaacccgcagacgcacaagtcaggaggaagaacagagttctgcactggccttattcagtgtgacatctccctatcccagttgtgatcaccaaaaatgtctctcgacattccgtactctgcccttggaagcaaaaataccctcctttgaggaccactggtttaaaggcatctcatacggagagacgacaacgcgt

SEQ ID NO: 2044 - protein, 75 aa, Homo sapiens [sequence omitted]

SEQ ID NO: 2045 - DNA, 410 bp, Homo sapiens
  misc_feature (1)..(1): Wherein n may be a, c, g or t
ngccaagctggcagagctctggatcacatgagggcaccgaggcctacattgatacctctaggggttggatttggagtcactgaagcccctgtggaattagaagacctagatccatccctgagtactattccctactccccaaataccagcatacatgctgtccctgtgaaaagcttgtgggcatccataccagcatctctaccgcccctgcgccattgtggaggtaagagatgaaggggataaaggtccttgaggcagggagataagggcctagaaaaaagacagcttgactcaggaagggcacaggagaagaattaaggaggattctgctatttctcgccccagcttggttgggatactcatctgacacctgagagtgaggtccgccaggagctacagaagccgcaggt

SEQ ID NO: 2046 - protein, 68 aa, Homo sapiens
MRAPRPTLIPLGVGFGVTEAPVELEDLDPSLSTIPYSPNTSIHAVPVKSLWASIPASLPPLRHCGGKR

SEQ ID NO: 2047 - DNA, 310 bp, Homo sapiens
  misc_feature (1)..(1): Wherein n may be a, c, g or t
  misc_feature (2)..(2): Wherein n may be a, c, g or t
  misc_feature (3)..(3): Wherein n may be a, c, g or t
nnngatatggacatcagaccattggttttgggggctaataccttcggctggacggctgatgagcacgactcccataccatcctggacgcttttcttggtgccgggggatcgctggtcgataccgctgacggctattcccattgggccgacggcaataacgggggcgagtctgagcgaatcattggttcttgggcggacaaaggcgggcttcgtgacgacatcgtcatcgccacgaaagttgctacccatccagagttcaagggcttggcgccggagaacatctctgccgcagttgacgcctccctggcca

SEQ ID NO: 2048 - protein, 103 aa, Homo sapiens
  misc_feature (1)..(1): Wherein Xaa may be any naturally occuring amino acid
XDMDIRPLVLGANTFGWTADEHDSHTILDAFLGAGGSLVDTADGYSHWADGNNGGESERIIGSWADKGGLRDDIVIATKVATHPEFKGLAPENISAAVDASLA

SEQ ID NO: 2049 - DNA, 250 bp, Homo sapiens
tccggattcgtggattccgtattgtcctgtggctgaggaagtgccgaagaataggatggcggaagcgtttacggttttgagggacttgaagttgccggttacgggttatgcgatggatattggattggttgagtactcgcctgttcgtgaactgttttcgtttgtccttggtagctcgtcgggcccaatcttgaggtttgattgttacatgatatatgtttcttttgggttcatgttggtatttgttttt

SEQ ID NO: 2050 - protein, 65 aa, Homo sapiens
MAEAFTVLRDLKLPVTGYAMDIGLVEYSPVRELFSFVLGSSSGPILRFDCYMIYVSFGFMLVFVF

SEQ ID NO: 2051 - DNA, 314 bp, Homo sapiens
  misc_feature (302)..(302): Wherein n may be a, c, g or t
  misc_feature (304)..(304): Wherein n may be a, c, g or t
  misc_feature (305)..(305): Wherein n may be a, c, g or t
  misc_feature (306)..(306): Wherein n may be a, c, g or t
  misc_feature (307)..(307): Wherein n may be a, c, g or t
  misc_feature (308)..(308): Wherein n may be a, c, g or t
  misc_feature (310)..(310): Wherein n may be a, c, g or t
  misc_feature (311)..(311): Wherein n may be a, c, g or t
  misc_feature (313)..(313): Wherein n may be a, c, g or t
  misc_feature (314)..(314): Wherein n may be a, c, g or t
ctagaaatcgaatctgtcataaaagacagcattggcagtttgaaaacagacttagatctcaaacagtcgttacatgttagagaccttactatattagcttccggtcctaatcttcgtgccaccacaactttggaagtgccagtattacattcaggtcaagaaggtgggataagattttgggaaaacgctatttcgactttaaaagaggatttacgtatgaaggtgccaaacgtgggaaggtggacgtcgagtttgttgatgtaacctctgactctaaaggtgatttggagcactctcatgancnnnnncnncnn

SEQ ID NO: 2052 - protein, 87 aa, Homo sapiens
LEIESVIKDSIGSLKTDLDLKQSLHVRDLTILASGPNLRATTTLEVPVLHSGQEGGIRFWENAISTLKEDLRMKVPNVGRWTSSLLM

SEQ ID NO: 2053 - DNA, 905 bp, Homo sapiens
gtcgacgataaaggagtatttgcgcagcagcagtatgatgctctcgttgaggcgggtttcgcggctcctggaatcccagagcagtatggtggcgacggtgcggatgcgattgcgtccgcaataatcatggaagaggtcgctcgagtctgtgcgtcgtcgtccaccgtcatatcgtccaatgagcttggtaccgtccctctcctcaaatacggtagcgaggagcagaggaaacgttatctttctgaagttgcttcgggtaaggcacttttcggatatgcgctctccgaggctgatgctggatcagatccagctgcacttaagtgtcgagccgacgaagatggggacagtttcgtcctgaatggcgttaaggcttgggtcacggaggctggcgaggccaagtacctggtgatatttgcggttactgacccagacgatccgcgccacagaatcagcgcgttgatggtccatgcagatgacccgggcattagctacggggctccggagcacaaaatggggatacgcgggtcagttaccagggaagtggttttcaagaatacgcgtatccccaaggaacgagtaattggccgtcgagggcacggtctgagtgttgctctaggtacgcttgataactctcgtgtctcgattgctgctcaagcagtgggaattgcccaaggagctttagacattgccacggattacgtccagaagcgcaagcagtttggccagccactgtccaattttgagggaatccagttcatgctcgcagacatggcaatgcgtttggaggcggcgcgagcgctgacatactctgcagctgatcgtagtgggcgccagactgacgatgtgagttacttcggcgcggcggccaaatgtttcgcttccgacacagcgatggcagtgtgcac

SEQ ID NO: 2054 - protein, 301 aa, Homo sapiens
VDDKGVFAQQQYDALVEAGFAAPGIPEQYGGDGADAIASAIIMEEVARVCASSSTVISSNELGTVPLLKYGSEEQRKRYLSEVASGKALFGYALSEADAGSDPAALKCRADEDGDSFVLNGVKAWVTEAGEAKYLVIFAVTDPDDPRHRISALMVHADDPGISYGAPEHKMGIRGSVTREVVFKNTRIPKERVIGRRGHGLSVALGTLDNSRVSIAAQAVGIAQGALDIATDYVQKRKQFGQPLSNFEGIQFMLADMAMRLEAARALTYSAADRSGRQTDDVSYFGAAAKCFASDTAMAVC

SEQ ID NO: 2055 - DNA, 259 bp, Homo sapiens
  misc_feature (1)..(1): Wherein n may be a, c, g or t
naagccgggcatgctcaaagactgcagctccaaaaagaggctttagatgagcagctgtcccaggtccgagaggccgaccggcacccgggcagccccagacgggaacttcctcatgcaggtggtgcaggagacgctttcaggcccccttggggaaggccttgacagccagttggatgaaaaagatgcccggcgcttccagcttaaaatcgcggagttaagtgcgattatccgcaaactggaggaccgcaacgcattgcaa

SEQ ID NO: 2056 - protein, 53 aa, Homo sapiens
  misc_feature (1)..(1): Wherein Xaa may be any naturally occuring amino acid
XAGHAQRLQLQKEALDEQLSQVREADRHPGSPRRELPHAGGAGDAFRPPWGRP

SEQ ID NO: 2057 - DNA, 633 bp, Homo sapiens
  misc_feature (1)..(1): Wherein n may be a, c, g or t
  misc_feature (211)..(211): Wherein n may be a, c, g or t
  misc_feature (307)..(307): Wherein n may be a, c, g or t
  misc_feature (308)..(308): Wherein n may be a, c, g or t
  misc_feature (418)..(418): Wherein n may be a, c, g or t
  misc_feature (419)..(419): Wherein n may be a, c, g or t
nacgcgtgaagggtcaatccatcaggaaggtataacaattagaagcatatatgcacttaacaagagaaggaagaaaagacagttgaagggatacacaattgaaaaataataattggagacttccctctttcaatactagataaaaccaccaggaagaaaatcaacaagaatacagaagatttgaacaacactgtaagacagccagacctancagacaactatataacactccactcaacaaggcaatatgcattattaagtgcacatgaaacattttccaaaagagaccacatgctaggccataaanncaaccttcaataatttaaagagattaatcacacagaatgttctctgaaacaatggcatgcaattagaatacaaatcagtaacagaaggaattttaggaaattcacaaagnnatgggagggaaccacactcctaaataaccaatgggtcaaagaaatcagagagaaaattagaaaataccttgagattagtgagaattaaaactcaacataccaaaatttattggatacagctaaaaaaataatacccagaaagacatttgtagctataaatgcctatattaaaaaagaaagatctcaagtggataatctaatcttccaccttaag

SEQ ID NO: 2058 - protein, 72 aa, Homo sapiens
  misc_feature (37)..(37): Wherein Xaa may be any naturally occuring amino acid
  misc_feature (69)..(69): Wherein Xaa may be any naturally occuring amino acid
KIIIGDFPLSILDKTTRKKINKNTEDLNNTVRQPDLXDNYITLHSTRQYALLSAHETFSKRDHMLGHKXNLQ

SEQ ID NO: 2059 - DNA, 339 bp, Homo sapiens
tgtacagttctccatggtcattgtaactgagagtccatccacagggaagaaggccctgcaccctgctcatcctgctgtcccaggtgaaaccagagggaaggggggcttccatggaaggtggaactgttcccaagccttatgttgtcggaagagactgggaacagagcaactcagcggcacagtatctgtttcctggcttatcacctaccatctgctggtctgccattccttgagtgacactaacccatgacttgtgtgacggctgagggcagccatcggcaagcaaagaaaaaccatgacccactgaggacgacgcaggagcctgagggagggtgacca

SEQ ID NO: 2060 - protein, 78 aa, Homo sapiens
MVIVTESPSTGKKALHPAHPAVPGETRGKGGFHGRWNCSQALCCRKRLGTEQLSGTVSVSWLITYHLLVCHSLSDTNP

SEQ ID NO: 2061 - DNA, 225 bp, Homo sapiens
tccggagtggctgcagattaaactctcggcgatacacacgggaaatcgcatgtggcgataggctatatactatatttttgggtagaaatggacgacgcgcgatgcgtccgcgacgggtgcgggcgatcgtgcgttttctgcatccgcggggaaaacttcgcggatatggcgaatcggtataaaaccgcatgtcagctggtctttcagaggcggcagaaggtgcac

SEQ ID NO: 2062 - protein, 63 aa, Homo sapiens
MRFYTDSPYPRSFPRGCRKRTIARTRRGRIARRPFLPKNIVYSLSPHAISRVYRREFNLQPLR

SEQ ID NO: 2063 - DNA, 403 bp, Homo sapiens
gcgcgccctctggaaccctcccgtctcgcccccaaggctcgatcttctggatagcgctgaggttagcctcaatagctttagttgttctcgtcctaatgacccgattcaactcagcgatacgcgctgcatccacgccaaccagcatctcgtcgatatttccatgtccagctgtcagaagaccagcttcctctgccagcgtggttgggcggtgggacttggcaactcctgtttctctcagcttgaaaacaagagtcaaaaggtagcctggatgtttaaccccctctggggctaaaactgctgccgctgaggtgatgttctcaatcagtgactgacgatactcagcggtcacatcgacaaaattcttccctccgccgccccgctccggtcatacgagccaagatct

SEQ ID NO: 2064 - protein, 55 aa, Homo sapiens
MTRFNSAIRAASTPTSISSIFPCPAVRRPASSASVVGRWDLATPVSLSLKTRVKR

SEQ ID NO: 2065 - DNA, 312 bp, Homo sapiens
cggtatcaacttcactgcgaggtgaaaaatttgtccaccacattttgtgtaattcaaacactgggtccaccagagactatattcgagtggaataagacttcaaacccgaacccttgggaacccgagttattgaatcaattgattcaacgatacgaagagcctaactcaagcaaccgatgggactctccactctttgctattcttactcctcaggacaacataactgactacatcgacgatatttgtaaagaagtctttcaaacttccaaatcggctaaaaacagtggacacaatgatccgttgagtaagggc

SEQ ID NO: 2066 - protein, 104 aa, Homo sapiens
RYQLHCEVKNLSTTFCVIQTLGPPETIFEWNKTSNPNPWEPELLNQLIQRYEEPNSSNRWDSPLFAILTPQDNITDYIDDICKEVFQTSKSAKNSGHNDPLSKG

SEQ ID NO: 2067 - DNA, 387 bp, Homo sapiens
  misc_feature (1)..(1): Wherein n may be a, c, g or t
ntcatgaacggcgataacccgctggactcgtctgcggttcacccggaagcctacccgctggtgcagcgtattgccgccgagaccggccgtgatatccgttcgctgatcggtgacgccgcgttcctcaagcgcctggacccgaagaagtacaccgacgaaaccttcggtgtgccgaccatcaccgacatcctgcaagagctggaaaaacctggccgcgacccgcgtcccgagttcaagaccgccgagttccaggacggtgttgaagacctcaaggacctgcagccgggcatgatcctcgaaggcgtggtcaccaacgtgaccaactttggcgcctttgtggatatcggcgtgcatcaggacggtttggtgcacatctctgcactttcg

SEQ ID NO: 2068 - protein, 129 aa, Homo sapiens
  misc_feature (1)..(1): Wherein Xaa may be any naturally occuring amino acid
XMNGDNPLDSSAVHPEAYPLVQRIAAETGRDIRSLIGDAAFLKRLDPKKYTDETFGVPTITDILQELEKPGRDPRPEFKTAEFQDGVEDLKDLQPGMILEGVVTNVTNFGAFVDIGVHQDGLVHISALS

SEQ ID NO: 2069 - DNA, 291 bp, Homo sapiens
tctagaaagttggccaaactttttctttagagttgaagagagtgtcagaagcctgggagggataagaggtggagaatctgaaacccaccagaaaaggatagccgtctctacctactgcagatagaggttgtatctttgagtgaggaaggtgcccagaccacacatctttactgcctggaaatatccaggacatttctgcctagaccaagactaaatgtcaaagaggaaaaaaaaaatacaacaaaaaaacccaccccaaaacacaaaaaatgggtagggaaaagaggcaag

SEQ ID NO: 2070 - protein, 63 aa, Homo sapiens
MSWIFPGSKDVWSGHLPHSKIQPLSAVGRDGYPFLVGFRFSTSYPSQASDTLFNSKEKVWPTF

SEQ ID NO: 2071 - DNA, 196 bp, Homo sapiens
gaatatgggtgggggatggatctgggcatgctcacatcagcccctcccttgctcttctctctttggatcttgcttgcagtgagagggctttttcttcctgttttttggagggtgagatctgcgcggagctgttcaatgctgcctggactgggtattagtatgcttagctcaaggtgaagtataagccaactcatga

SEQ ID NO: 2072 - protein, 64 aa, Homo sapiens
MSWLILHLELSILIPSPGSIEQLRADLTLQKTGRKSPLTASKIQREKSKGGADVSMPRSIPHPY

SEQ ID NO: 2073 - DNA, 320 bp, Homo sapiens
  misc_feature (7)..(7): Wherein n may be a, c, g or t
  misc_feature (286)..(286): Wherein n may be a, c, g or t
  misc_feature (303)..(303): Wherein n may be a, c, g or t
  misc_feature (304)..(304): Wherein n may be a, c, g or t
  misc_feature (320)..(320): Wherein n may be a, c, g or t
caattgnaccatggagatgagaatgtgaaaatttacaccatagagctgacaacagtagttctcatccacttctctggccctctcacatatcaaggaagaatttctgggctttgcattgtcgtccaggctaacaatttctgtactagaaactacctccattttcttatgttgcttgggatagcagattcctgttctctaagaggagccataaatgctgcttcctccactaggcctgctctgatctcccttgctgctatatttacctgtgaaaattcactgttttgcnaaaatttctgggattcnntgtacactaactgtan

SEQ ID NO: 2074 - protein, 53 aa, Homo sapiens
MEVVSSTEIVSLDDNAKPRNSSLICERAREVDENYCCQLYGVNFHILISMVQL

SEQ ID NO: 2075 - DNA, 404 bp, Homo sapiens
ggatcctggtctatggctgaaggttttctgtctcacggcggatgaagtaacggatactagactttcatttctatagcaaacaattagaaaactggacaaaatatatgggacaattctttttagacattgtactacaggcagtacagggctttgattactaagagaagggataaaaatgaagaaaccatacattgactctggcttcttgtctgtagacacattccatgcctgccaaaaattccatggtcaaaagagcaagagcccaaacaaagcatgttgctcctgccgagttgagaatgagattggggttcgcgagttcaggattcaagaaggctgaggcagtcagaatttatgaggcagtataccagaaaagagaaagctacacagagagaaggaactctaga

SEQ ID NO: 2076 - protein, 64 aa, Homo sapiens
MYGFFIFIPSLSNQSPVLPVVQCLKRIVPYILSSFLIVCYRNESLVSVTSSAVRQKTFSHRPGS

SEQ ID NO: 2077 - DNA, 246 bp, Homo sapiens
gtgcactctgtggtagtcggccactctgcggagtttgagtgcttggccctgggtgaccctaagcctcaggtgacatggagcaaagtcgggggacacctacggcctggcatcgtgcaaagcggaagcatcatcaggattgcccacgtggagctggctgatgcaggacagtaccgctgtgtagctaccaacgctgcgggcaccacccagtcccacgtgctgctgctagtacaagccttgccccggatc

SEQ ID NO: 2078 - protein, 82 aa, Homo sapiens
VHSVVVGHSAEFECLALGDPKPQVTWSKVGGHLRPGIVQSGSIIRIAHVELADAGQYRCVATNAAGTTQSHVLLLVQALPRI

SEQ ID NO: 2079 - DNA, 243 bp, Homo sapiens
gccaccagcaagcgcatcgccaagatcgcctttaccggttccacgccagtgggctcgcacatcatgcatgcggccgccgagaacatcattccgtccaccgttgagctgggcggcaagtcgccgaacatcttcttcgccgacatcatgaaagccgaaccgcaattcatcgagaaagccgccggaagtttggtgctggcgttcttcaaccaaggcgaagtgtgcacctgcccttcccgcgcgctg

SEQ ID NO: 2080 - protein, 81 aa, Homo sapiens
ATSKRIAKIAFTGSTPVGSHIMHAAAENIIPSTVELGGKSPNIFFADIMKAEPQFIEKAAGSLVLAFFNQGEVCTCPSRAL

SEQ ID NO: 2081 - DNA, 259 bp, Homo sapiens
gtcgacgctgctggaaatctcttccacttgacttgaatgctgggggagatgttcattaacttcaaatgagggatcctgggttgtgatgcgggcagacgggcaggtattcactgtgcagccagtcgccaaagtctcttcattgcctttgtgagtgagatgtgtaggtccctgtgtttctgaggttgttttagatgattcaatgtctactgaggaacattcagaaactaatgatgaagtatcaagcatcaggtcagaattc

SEQ ID NO: 2082 - protein, 82 aa, Homo sapiens
MLDTSSLVSECSSVDIESSKTTSETQGPTHLTHKGNEETLATGCTVNTCPSARITTQDPSFEVNEHLPQHSSQVEEISSSVD

SEQ ID NO: 2083 - DNA, 448 bp, Homo sapiens
  misc_feature (324)..(324): Wherein n may be a, c, g or t
  misc_feature (367)..(367): Wherein n may be a, c, g or t
  misc_feature (439)..(439): Wherein n may be a, c, g or t
agatctctcacacttcccttgattatactgatgcctatgcataacatttcacatgaaaatcccagtctctgtcccatcgctcacagatattaatcagttgtactagttcaatcaggatttatgtatcagcacagcataaccctcttactctgtaagatttgtcatcaggcattaggaatttccaatgggggaaaatgttttcatagagtaagaaagacactaaatggaattttagtgtttgggagaacaactcgttatccaactaagctattaaacctatttggcttagccctcttaaagcataaccctgtgagtttgcctaanaggagaaagaaaaaggagaagtgacatggtgctggaaacaggncaaccgtctctcctcttttccgcactgtcctctctcctgcacccgatcttcccttgcaccttctgctgcacnaagctagct

SEQ ID NO: 2084 - protein, 75 aa, Homo sapiens
  misc_feature (68)..(68): Wherein Xaa may be any naturally occuring amino acid
MYQHSITLLLCKICHQALGISNGGKCFHRVRKTLNGILVFGRTTRYPTKLLNLFGLALLKHNPVSLPXRRKKKEK

SEQ ID NO: 2085 - DNA, 436 bp, Homo sapiens
ctcacctttgctggcttccaaagcgctgacttccatgagcaaatgcccttgatccatcgtgatcgtcgtgccgcttactttgccgacgacgaaggcgcacaaattttagtgtgttctgaaattggtagcgaaggtcgtaatttccagttcagtcatcatatcgtcatgtacgatttgcctgaacacccagatttacttgagcaacgcattggtcgcttagaccgtctagggcaacgtgatgacgtacaaattcacgtccctcatctgtctaacagcgttcaagaacgcctgttccattggtaccacgatgcgcttaacgccttctgccgtactactggttctggtgataaagtagaagaagcatttggtgacagcctgtactcctaccttcatggacaagatgacgacaccaacctactagaagaagccaacgcgt

SEQ ID NO: 2086 - protein, 145 aa, Homo sapiens
LTFAGFQSADFHEQMPLIHRDRRAAYFADDEGAQILVCSEIGSEGRNFQFSHHIVMYDLPEHPDLLEQRIGRLDRLGQRDDVQIHVPHLSNSVQERLFHWYHDALNAFCRTTGSGDKVEEAFGDSLYSYLHGQDDDTNLLEEANA

SEQ ID NO: 2087 - DNA, 195 bp, Homo sapiens
acgcgttcggcgtattcgttgttttgtttgagtttgaagaagcctttgttgttgaagtcgatcatgggcctgtcctgggtatgtagtgcggcaaatgcctgtgcgggtgtatgacgttttgctcgcggatctgtatctaacggcctgctattcaacgccctaccatggcgcccaaacctcataaatttgggagcg

SEQ ID NO: 2088 - protein, 60 aa, Homo sapiens
MRFGRHGRALNSRPLDTDPRAKRHTPAQAFAALHTQDRPMIDFNNKGFFKLKQNNEYAER

SEQ ID NO: 2089 - DNA, 396 bp, Homo sapiens
gcacggctccgctcgcggccgccgtgatggtacataccggcgcgaccgtgatcgattctttgccgcaaggcaatttacttccacgtcacggccgatgcgatgaagatgacgattcgtcaacggatgggactgatcccgtacgaggcgatcgtgggcgggacgatgatgatcgtggcgacgttgctgtacggattcattttgtagcataaataaggaggggttcgatgaacaggaaaaccctttctgttggcacccgattcgttcaaggaaagcatgacggcaaaagaagtctgtatcgcgatggaaaaaggactgagccgcgtctaccccgacgcccggtttatccatgtgccgatggcggacggaggcgaaggcacggtgcagtcgctggtcgac

SEQ ID NO: 2090 - protein, 56 aa, Homo sapiens
TGKPFLLAPDSFKESMTAKEVCIAMEKGLSRVYPDARFIHVPMADGGEGTVQSLVD

SEQ ID NO: 2091 - DNA, 235 bp, Homo sapiens
gaattctacaacaatctgtttacgcttaaatctcactcgcacttgcatgtaatacaatatggttttgtacacgatgattggagtaccatggtagtatatagctaaactcttacagccgttcaatagtggcaaaacaaacctaggaaagcagtataaaatctggctttgatgcatcccttattcagttacgattcacaccatgcacgtagaggtccatttggctcatccgtacccc

SEQ ID NO: 2092 - protein, 58 aa, Homo sapiens
MHQSQILYCFPRFVLPLLNGCKSLAIYYHGTPIIVYKTILYYMQVRVRFKRKQIVVEF

SEQ ID NO: 2093 - DNA, 251 bp, Homo sapiens
acgcgtgaattatatcaagaacatcatttcaaaaactttatttatacaccagtaggatttgtttgtgagcatttagaagtgctctatgacaatgactacgaatgtaaagtagtatgtgatgaaattggcgctaaatactatcgtcctgaaatgcctaatacaaacccgctatttataggagcaattgttgacgaaattaaagctcatttttaaaattaagttaaagcattaataaagtgatgacagaattc

SEQ ID NO: 2094 - protein, 70 aa, Homo sapiens
TRELYQEHHFKNFIYTPVGFVCEHLEVLYDNDYECKVVCDEIGAKYYRPEMPNTNPLFIGAIVDEIKAHF

SEQ ID NO: 2095 - DNA, 293 bp, Homo sapiens
atcatcggcctagctcccgccgcacacggagctacccgcacaggacgaatgttcaccggtgaccagtccggggactggctttaccgcgctttatatgacgccgacattgcctcacaggcacagagcattgacgctgcggatggtctcacccttcacgactgtcgcatcatcgccccggtacactgcgcaccaccagacaactggcctcgacccgacgagaagcgcacttgcgccatctggtttgatgatgagctagcgcgtttagccgccctgcgtgcactgatgtgcctagg

SEQ ID NO: 2096 - protein, 97 aa, Homo sapiens
IIGLAPAAHGATRTGRMFTGDQSGDWLYRALYDADIASQAQSIDAADGLTLHDCRIIAPVHCAPPDNWPRPDEKRTCAIWFDDELARLAALRALMCL

SEQ ID NO: 2097 - DNA, 381 bp, Homo sapiens
ggatcccgtgccaggcttgggggacaggctccccccagggctgactgtgcacaggtccttgccgagaagacagagctgcctgaggtggtgcctcctgcgagtgtggagatgtgataggaagggtaggggcggcgaagtgaggccagggtgtcgataaaactatcatactcgacgggaacttgagatcaacagagcagtgctgtccccttgcatgaaaatcaaagggccaaattcacatgcagggatggggctgacaaaatgagtcttgctagtgactgtgccaatagctaagctcctcactggcaggacttccagtggtcctgagggtggaatgaggtcctggctctggctaaccccagagaggggtgccccccccaccag

SEQ ID NO: 2098 - protein, 55 aa, Homo sapiens
MIVLSTPWPHFAAPTLPITSPHSQEAPPQAALSSRQGPVHSQPWGEPVPQAWHGI

SEQ ID NO: 2099 - DNA, 267 bp, Homo sapiens
  misc_feature (267)..(267): Wherein n may be a, c, g or t
tccggagctgttttcctaggagtggtaatagtgcttctctggccaaaggctaggactgcggaaaggatggttagcatcaggggtctactctgggcacagcaggagcgtgtcagtgtgagcttcaggaacagtgggacaagtgtcatgcatttacctgcttcagatgctgtccttcagtggagtgttcttacctactcagtctcattgcccaaatgcttgctaccaatgtggtggccaaggcctgtgtttggatgttgggagctgtan

SEQ ID NO: 2100 - protein, 67 aa, Homo sapiens
  misc_feature (67)..(67): Wherein Xaa may be any naturally occuring amino acid
MVSIRGLLWAQQERVSVSFRNSGTSVMHLPASDAVLQWSVLTYSVSLPKCLLPMWWPRPVFGCWELX

SEQ ID NO: 2101 - DNA, 288 bp, Homo sapiens
  misc_feature (1)..(1): Wherein n may be a, c, g or t
nacgcgtaaacgactcaagacgaaatgtcgtctcctattaatgattatttcattgattataaccctctttttccaatctttgctacaagaattgcgaaaggccttgctatttacagagtctcggatcacgctaggcttgcagtaattccaataagaaatataaacttggtggcgaattacgattgggatacaactactggtaaatttttgtccatcttttttaaggatgggacgatcagaatccatgacatttttaaagacggtcgattagtttcattcctaagaatt

SEQ ID NO: 2102 - protein, 88 aa, Homo sapiens
MSSPINDYFIDYNPLFPIFATRIAKGLAIYRVSDHARLAVIPIRNINLVANYDWDTTTGKFLSIFFKDGTIRIHDIFKDGRLVSFLRI

SEQ ID NO: 2103 - DNA, 409 bp, Homo sapiens
acgcgtcgacgatatgaccgcagcaagttgatagccctttcaatccccgtgtccaccatggtggcggaccgggcacacgatgttcgacaaaggccgccgtagcacacaactccgaaggcacccatagggcgccggaaaaccaaccgtctccctccggtaccagatcgagaccatcatggggcacgggataccaccagccattgatctgcaccgcgacagcgtgagccgtgggagctcgatgctgccagtggacgaggacgacatcaccttgctcggcgacgatccgagcaccttcgtgacggggccgccgacccagtactggatggtcgtcatcacgctggacgcggatctcctgacgtggcgcagcaggtttgggtcgcgggaaccactgttgatcgctgcatggata

SEQ ID NO: 2104 - protein, 97 aa, Homo sapiens
MTTIQYWVGGPVTKVLGSSPSKVMSSSSTGSIELPRLTLSRCRSMAGGIPCPMMVSIWYRRETVGFPAPYGCLRSCVLRRPLSNIVCPVRHHGGHGD

SEQ ID NO: 2105 - DNA, 344 bp, Homo sapiens
gaccaccagggcaatctgccgtcaacccagatcccggtcgtccagctcgacatgtgggaacacgcctattacctgcagtaccagaacgtcaaggccgactacgtcaccgcctggtggaacgtcgtcaactggaccgacgccgagcagcggttcgtcaaggcccgttcgatcaccggtttgttctgatccgtaggccctgaagatcccgtacatttttcatcgtcgctggctgcgtccccacacggacgcggccagtgacgtgcccaggttgcaccaacgtgtccggcgaatcggatcggactgcatgaacgtgcaccccgagctgagcgcttgaactcacgcgt

SEQ ID NO: 2106 - protein, 61 aa, Homo sapiens
DHQGNLPSTQIPVVQLDMWEHAYYLQYQNVKADYVTAWWNVVNWTDAEQRFVKARSITGLF

SEQ ID NO: 2107 - DNA, 333 bp, Homo sapiens
gggctgaatggacttgcgactacggtggagttcatgtcttatcgaggcaccgggcgcaggccccgcgacgagcaatctcgtcagtctgacctggactggctatacggggttgacgaaaacgacgccacccgtatcgatccagtgaacccgccgcgcggcacgtccgataggacgggtcgtccacggacagaccggcgcccccagccccgtcgtcgctccttctcccagcaatccccacaaccgcaaccctctcggcgtcctcctgctgagctgtatcgatccgatggccaacgacgcccaccgcgtcaaacccgacagcggcggcaggccgcg

SEQ ID NO: 2108 - protein, 100 aa, Homo sapiens
MSYRGTGRRPRDEQSRQSDLDWLYGVDENDATRIDPVNPPRGTSDRTGRPRTDRRPQPRRRSFSQQSPQPQPSRRPPAELYRSDGQRRPPRQTRQRRQAA

SEQ ID NO: 2109 - DNA, 338 bp, Homo sapiens
acgcgtgaaggggagggtgaggggcacaggtgatatcccttagggttctgagaaggggcctctggaggctgtgtggtgtggtgagaagagctccctgccgctcccagataagctgggcaaatttggacaagttgcttcccctgagcctgggcatcctcctttatgaaatgagctgaggtatgtgaggcctggcgtggaggagagggtgtcactattggtagcagttgttaactatggtatgagctggatggtctgggaccattcaggaggagttgtgtttagactgcaggtaaatggacaggagggagggtcttccagtggggatggcatggtccgga

SEQ ID NO: 2110 - protein, 51 aa, Homo sapiens [sequence omitted]

SEQ ID NO: 2111 - DNA, 213 bp, Homo sapiens
cagcaaaagcatttcgaccgcattgattcgatcgacattctcgacgtcaatgccggctcccacggcaaatatttcgccaccaatttcgacccggaaatcaacttccgcgaattcaccggacaggtgtggagctggcagaacagccagtggaccagcaacaccatgttcgaagtcaaacgcaccgacgacctgcctgtggtcgggtcgcagaat

SEQ ID NO: 2112 - protein, 71 aa, Homo sapiens
QQKHFDRIDSIDILDVNAGSHGKYFATNFDPEINFREFTGQVWSWQNSQWTSNTMFEVKRTDDLPVVGSQN

SEQ ID NO: 2113 - DNA, 479 bp, Homo sapiens
tgtacagttaacggtgaatgccaatcagaaagcccatcctttgacccagccctcctctccacctaaccagtgtgctaacgtgatggcaggcgatgaccaaatacggtttcagcaggttgttaaggagcaactcatgcatcagagactgccaacattgcctggtatctctcatgaaacacccttaccggagtcagcactaactctcaggaatgtaaatgtagtgtgttcaggtggaattacagtggtttctaccaaaagtgaagaggaagtctgttcatccagttttggaacatcagaattttccacagtggacagtgcacagaacaattttaatgattatgccatgaacttctttactaaccctacaaaaaacctagtgtctataactaaagattctgaactgcccacctgcagctgtcttggtgagtacttgtgtgcatgtgttcttatttcacctgcacaaattacctcaatcatga

SEQ ID NO: 2114 - protein, 132 aa, Homo sapiens
MAGDDQIRFQQVVKEQLMHQRLPTLPGISHETPLPESALTLRNVNVVCSGGITVVSTKSEEEVCSSSFGTSEFSTVDSAQNNFNDYAMNFFTNPTKNLVSITKDSELPTCSCLGEYLCACVLISPAQITSIM

SEQ ID NO: 2115 - DNA, 295 bp, Homo sapiens
ggtaccggccagttgcacgtggtccccgtgggccgtaccagcagcgtggtcatgcgcgccaactggccgcacccgagcttcgtcggcaactacttgcccaaccgccgcgaaatcgatgctcaaggcttcagtgcccattggcaaacctcgttctttgccaccaaccttgaggatgccatccgccagtgcgccaacgccgggcagtgtacggatttcagtgagcgcacgtttggcgtgagttttatagacccggtggaccagtacctgaaaagcgagcgggcaatcaaatacgcgt

SEQ ID NO: 2116 - protein, 98 aa, Homo sapiens
GTGQLHVVPVGRTSSVVMRANWPHPSFVGNYLPNRREIDAQGFSAHWQTSFFATNLEDAIRQCANAGQCTDFSERTFGVSFIDPVDQYLKSERAIKYA

SEQ ID NO: 2117 - DNA, 383 bp, Homo sapiens
  misc_feature (373)..(373): Wherein n may be a, c, g or t
  misc_feature (383)..(383): Wherein n may be a, c, g or t
ccatggaagactgggtgagtggtactcacatcactgtatagaagactcctattttacacatgcgtttgggcactactgacaccaccaacatttaatgggatcatctgggagttttgccccaatcacaaaatggctgtggccagtaccagggaacacacattagggacgtttcccaagtgctggttgaggatacacagtgacagcttggaaataacaaggtccactgtacatgccacactccgagagggtgtgcacatcttcacttcaggcaaattcaagggtcaggttgttgaggtcactgggcatgcgaatgggtcagcattgccactaaaaggagtgatgcacgaccacacccatccacccactcccgcangggaagctan

SEQ ID NO: 2118 - protein, 84 aa, Homo sapiens
  misc_feature (82)..(82): Wherein Xaa may be any naturally occuring amino acid
MAVASTREHTLGTFPKCWLRIHSDSLEITRSTVHATLREGVHIFTSGKFKGQVVEVTGHANGSALPLKGVMHDHTHPPTPAXEA

SEQ ID NO: 2119 - DNA, 279 bp, Homo sapiens
gtacctcctctaatgggatgggcagccgcaagtccgctttcacatccgggatcttggtgccttgctggtctattgtttgcttggcaattcccacactttaatacgttgagtcataacattagaaatgaatacaaaaatgccggatacgttatgactgcatggaaaaatccgctcctaaacgcccgtgtgtcgttgagatactctatcctaatgttccctttatgtttcggattgtcttattttaatatcacagattggtactaccaaatagattccgga

SEQ ID NO: 2120 - protein, 93 aa, Homo sapiens
VPPLMGWAAASPLSHPGSWCLAGLLFAWQFPHFNTLSHNIRNEYKNAGYVMTAWKNPLLNARVSLRYSILMFPLCFGLSYFNITDWYYQIDSG

SEQ ID NO: 2121 - DNA, 286 bp, Homo sapiens
  misc_feature (1)..(1): Wherein n may be a, c, g or t
  misc_feature (2)..(2): Wherein n may be a, c, g or t
nnggccgaccggacggtttcggtcagcgctcatacgctgagcaccacggccaacggcacggtgactattaccttcagagaagcggtggccggtttcagcttgtttgacatgacggcgtccaacggtaccctgagcaacctgaccaccagcgtctatatccattggaccgccaccttgacgcccaccgccggcaacagtaccagcggcaacgttatcaccctggacaacaccctgtataccgacgcggcgaccaacgttggcagcggcacgaccacgtccaacgcgt

SEQ ID NO: 2122 - protein, 95 aa, Homo sapiens
  misc_feature (1)..(1): Wherein Xaa may be any naturally occuring amino acid
XADRTVSVSAHTLSTTANGTVTITFREAVAGFSLFDMTASNGTLSNLTTSVYIHWTATLTPTAGNSTSGNVITLDNTLYTDAATNVGSGTTTSNA

SEQ ID NO: 2123 - DNA, 202 bp, Homo sapiens
  misc_feature (202)..(202): Wherein n may be a, c, g or t
acgcgtgaaggggaggctggaagtcaccaggcacccctcgtttccaggactgtgttaggggacatcagggcaggcagcaggagcaggccacggagcccctccagggtcccagggaactgtggacactcacctggggcttccggaggacaaacaccacttatgattgcagctgacatttactgagctgcttctcatggccctn

SEQ ID NO: 2124 - protein, 50 aa, Homo sapiens
MSAAIISGVCPPEAPGECPQFPGTLEGLRGLLLLPALMSPNTVLETRGAW

SEQ ID NO: 2125 - DNA, 282 bp, Homo sapiens
  misc_feature (1)..(1): Wherein n may be a, c, g or t
  misc_feature (2)..(2): Wherein n may be a, c, g or t
  misc_feature (3)..(3): Wherein n may be a, c, g or t
nnnggacaacctttattagaatcaccgatttttgaaaatgaagatagtgatgattgccatacaattacagaaaaagaggaggctgctgccataacaagtcacatatatggtgattccaacaacctagaattggaagaagttatcctgggctctgatacagaaatactgagtggaatttttattaataattgtattggtacgagcccgactttatctaatatcatcaaaaccctggcaatggaaattccattttccaaatgcgataattttaaattacagtcg

SEQ ID NO: 2126 - protein, 94 aa, Homo sapiens
  misc_feature (1)..(1): Wherein Xaa may be any naturally occuring amino acid
XGQPLLESPIFENEDSDDCHTITEKEEAAAITSHIYGDSNNLELEEVILGSDTEILSGIFINNCIGTSPTLSNIIKTLAMEIPFSKCDNFKLQS

SEQ ID NO: 2127 - DNA, 331 bp, Homo sapiens
  misc_feature (301)..(301): Wherein n may be a, c, g or t
  misc_feature (331)..(331): Wherein n may be a, c, g or t
actagtaacagtggcattagttaaatcattaatttcattgcaaatatatttttgtttacataaatatcaatgccattagcatgtggaactattacaaacttatgttcttccttcctacctctttcttcctccctccctccttcctacttttctccctccctccctccttcccacttttattcctcctcatggggtgagagctgagaagagagcgatcagtgcaagagaaaggggagacagggctcatcacctgcaccccactccccagatgttcatgctgctcggctcccccatgaactgngctcctcctcagatgtcaccctgcctggan

SEQ ID NO: 2128 - protein, 51 aa, Homo sapiens [sequence omitted]

SEQ ID NO: 2129 - DNA, 327 bp, Homo sapiens
  misc_feature (1)..(1): Wherein n may be a, c, g or t
  misc_feature (2)..(2): Wherein n may be a, c, g or t
  misc_feature (3)..(3): Wherein n may be a, c, g or t
nnncgggtccgcagcgcttttaccggatcgccaacgagggtccgaccctgctgatggtgatcatcgagatcatggtgatcgtcaaaccgctctgaacgaggagcatcacggatggccgaaggctacgactatgatctcgtggtgatcggcagcgggccgtccggtcggcgggcggccgtgcatgcggcgaagttcggcggctcggtgctgatggtggacaagggcgttcgcgtcggcggcgtctcggtccacaccggcacgatcccgtcgaagacgctgcgcgagaccgtgctcaatctcacgggttggcgcgagcgcggcttctac

SEQ ID NO: 2130 - protein, 72 aa, Homo sapiens
MAEGYDYDLVVIGSGPSGRRAAVHAAKFGGSVLMVDKGVRVGGVSVHTGTIPSKTLRETVLNLTGWRERGFY

SEQ ID NO: 2131 - DNA, 619 bp, Homo sapiens
  misc_feature (1)..(1): Wherein n may be a, c, g or t
  misc_feature (2)..(2): Wherein n may be a, c, g or t
nnctgcagacgcttaacctcatgttgtaagaaagcactcaagggacccacgagggaagtgagtgtagagcacatggaagcttgtgcttcctattttcctgtaaatctaagactgctctaaaacaaaaactgattttaaagtaaatgggggtgaggtgaggggcagcagcccccaggttctctggaggcatcaagtcccggggggctgcacggtggcggcccgatgaccccagagcctcctggccacatgtcaacgccctgtctctggatgcacatcaccatctgcttgccggatcctccctcctgttggccacgcctgcccactccgccccgatccacgtgtgtgctgggcatcggtccattttggtctggagagggaccgggttgccccggcacactgggggtcaccatgggctgggacctgccccgatccagacagccacagtgggtttttgggcactggggggggggtgttccaggaagtcccagggggcaccaagatgcgccaggaccaagcagctacccctgttccttccccagcctcagcaccaggtcctcatccccgcctgctcagacccaggctcggcagctaccaaccctccacgtccctccactggcca

SEQ ID NO: 2132 - protein, 155 aa, Homo sapiens [sequence omitted]

SEQ ID NO: 2133 - DNA, 340 bp, Homo sapiens
agcttcaaaacgagaatgactgacgcagagctaagcattgagaaaaccaagaaaacctgggaggcgacccctgagcacatcagggagtcctacggacagcagttttttgatgacttttgcaacaccaccagacgagaactgaagaagtgcagcacgaacctgagcctggtcacagactgcatggagcacgctctgacctctaagtatcctcgcacccggtactcagctggctgggatgccagacttttcttcatccctctgtcttatttgcctacatcactggtagactgcctactggccatatctaggcgcaagccagctcaggcagtctgaaggatcc

SEQ ID NO: 2134 - protein, 110 aa, Homo sapiens
SFKTRMTDAELSIEKTKKTWEATPEHIRESYGQQFFDDFCNTTRRELKKCSTNLSLVTDCMEHALTSKYPRTRYSAGWDARLFFIPLSYLPTSLVDCLLAISRRKPAQAV

SEQ ID NO: 2135 - DNA, 249 bp, Homo sapiens
  misc_feature (1)..(1): Wherein n may be a, c, g or t
ncggccgaaggtccgtgggaggggatgtcgcggtggtcttttgaacccaccctcccgatttcgacttacctcacggctctcgtcgccggtgaataccatgtcgatcacgggacaatccatacggcgtcgggagaaattgatgccgacattctgtgccgtcagtcgatcacggaatacctcgacgccgaccgcattcggaccactacccagcgcgggttctatgtggagccacacttcatgaagccctaa

SEQ ID NO: 2136 - protein, 82 aa, Homo sapiens
  misc_feature (1)..(1): Wherein Xaa may be any naturally occuring amino acid
XAEGPWEGMSRWSFEPTLPISTYLTALVAGEYHVDHGTIHTASGEIDADILCRQSITEYLDADRIRTTTQRGFYVEPHFMKP

SEQ ID NO: 2137 - DNA, 220 bp, Homo sapiens
cctaggggaagagggtgcataggcgtgcgactatgtcattgccgttgggacgcgttttacttcaccgtgttggtgcacgtcaaggcgctcagtcgggaccgcatcgtcggggaggggccaactaccgatgtgctctcgcatccgcgtggggaatgtacccgcgctgtggcgggtgccgttaccatcccagacccggcgatacagcgagctcgccgggccc

SEQ ID NO: 2138 - protein, 62 aa, Homo sapiens
MSLPLGRVLLHRVGARQGAQSGPHRRGGANYRCALASAWGMYPRCGGCRYHPRPGDTASSPG

SEQ ID NO: 2139 - DNA, 165 bp, Homo sapiens
cggccgcggagccccctggcctgcgacgactgttcccttcgctcggccaaatcctccttcagcctcctggcgcccatccgcagcaaggacgtccgcagcaggagttacctggagggcagcctcctgaccagcggggccctgttggggggcggatgagcctggccc

SEQ ID NO: 2140 - protein, 51 aa, Homo sapiens
RPRSPLACDDCSLRSAKSSFSLLAPIRSKDVRSRSYLEGSLLTSGALLGGG

SEQ ID NO: 2141 - DNA, 336 bp, Homo sapiens
  misc_feature (1)..(1): Wherein n may be a, c, g or t
  misc_feature (2)..(2): Wherein n may be a, c, g or t
  misc_feature (3)..(3): Wherein n may be a, c, g or t
nnngtgaccattatgggtggtgcccgtacccgtgaagtggaaggcgttgattttgttggccgggtcagcgatgccgaaaaggctgaaatcctcggccgcgccgatgtgtatgtcgcccccaataccggcggtgagagctttggcattgtcttggtggaagccatggcggcaggcgcagccgttgttgcttcagacttggaggccttccgcgcagtgtgcaacgccgattccgatgatgttgccggcgcgctatatcgcaatgaggatagtaatgaccttgctcgtgtactcaacgaggtgctcgaggatcctgagtatcgtgcccgcttagtgcac

SEQ ID NO: 2142 - protein, 112 aa, Homo sapiens
  misc_feature (1)..(1): Wherein Xaa may be any naturally occuring amino acid
XVTIMGGARTREVEGVDFVGRVSDAEKAEILGRADVYVAPNTGGESFGIVLVEAMAAGAAVVASDLEAFRAVCNADSDDVAGALYRNEDSNDLARVLNEVLEDPEYRARLVH

SEQ ID NO: 2143 - DNA, 301 bp, Homo sapiens
  misc_feature (129)..(129): Wherein n may be a, c, g or t
acgcgtgcaggaagtatgcttaccctcatgactcctggcttgcgcagagcctgccataccacacagcttggccgggccctgtggaaagccatctctattctcacactgctggggaaggtgcatgactcnagacccgacacacaggcctgagagtctggcgatcttgtgctctgatcccagcttcatgtgtgactcactctggatcaggcgcttcacttcctgtgcacctctgtctgtaaaatagagagcccagctctagtccttctccctcctgagaagcaatgcagagatttagtcccct

SEQ ID NO: 2144 - protein, 62 aa, Homo sapiens
  misc_feature (20)..(20): Wherein Xaa may be any naturally occuring amino acid
MKLGSEHKIARLSGLCVGSXVMHLPQQCENRDGFPQGPAKLCGMAGSAQARSHEGKHTSCTR

SEQ ID NO: 2145 - DNA, 376 bp, Homo sapiens
cctatcaaggcaaagtagagggggagagtaggccaagcaccaaaacagcatctataaaggcacatagtgcatttggggatctgcaaatgagttggtatggctggaacactgaacataagatggcaaagatgatcctttccacagttgcttgcatgtttgctattttacaggcacgatgcaaggatctgcatggatggaacacacattccctagagtactagggaaaaattggtccattacactttacaaaaccttttcacattcattctgcagaaagtctatcttcagaagggctgtagcaggtctgcctctatttgttgacccctttacccatccctaccccatccccgttccctcctcaccagacccaagatct

SEQ ID NO: 2146 - protein, 67 aa, Homo sapiens [sequence omitted]

SEQ ID NO: 2147 - DNA, 327 bp, Homo sapiens
gcgcgccatgctttttgtgccttctgtgaacagtctccgcgttacctgagctcctattagtttgtaaatggctgcttttttggggggtgggtgggccatcgagtcttcttcctgttcccaaccaatatagatagtatctgattccattgcctaatggctttttgacattgttttccttcttttcattactttgagtcatatttgagagatgtgaaacaacctaaaaaacaatggtagccaaacctagtgagaaattagtatcctaacaaaggaaggcagataatgttaatcttgttttcccctgcagctcataagctaaagcttaag

SEQ ID NO: 2148 - protein, 66 aa, Homo sapiens [sequence omitted]

SEQ ID NO: 2149 - DNA, 267 bp, Homo sapiens
  misc_feature (1)..(1): Wherein n may be a, c, g or t
ngaggcgatgcgcggcacgatcacggctgccaaccgcagcgaccggagcggcgcggtcctcagcatccgtcttcccgttccggctcacacccacgcattggacaccgccgcatgagtgctgccccgatcaaggttttggtgatcgacgacgagcctccgatccgcaaattgctgcggatggggctgtcgacgcagggctatgagatcctggaggcgtcgaacggcaagatcgcgccggagaagcacctcgaggagtgtgcgtgatca

SEQ ID NO: 2150 - protein, 87 aa, Homo sapiens
  misc_feature (1)..(1): Wherein Xaa may be any naturally occuring amino acid
XGDARHDHGCQPQRPERRGPQHPSSRSGSHPRIGHRRMSAAPIKVLVIDDEPPIRKLLRMGLSTQGYEILEASNGKIAPEKHLEECA

SEQ ID NO: 2151 - DNA, 221 bp, Homo sapiens
  misc_feature (153)..(153): Wherein n may be a, c, g or t
gtcgaccgcttctgtctgggacacactggaacagcggttgggaagctgctaacccttggaggactggggatctggtggttcgtcgatctaattttgctcatcactggggggctgatgcctagtgacggcagcaactggtgtactgtctactanacgtggctgctgccctctgccggcaactggtgtactgtctactaagcacggctgctgtcctctgccgg

SEQ ID NO: 2152 - protein, 65 aa, Homo sapiens
  misc_feature (51)..(51): Wherein Xaa may be any naturally occuring amino acid
VDRFCLGHTGTAVGKLLTLGGLGIWWFVDLILLITGGLMPSDGSNWCTVYXTWLLPSAGNWCTVY

SEQ ID NO: 2153 - DNA, 696 bp, Homo sapiens
  misc_feature (1)..(1): Wherein n may be a, c, g or t
nacgcgttgccgcgcgataactctggtgagggtcttgctggggccctgctggcccttgttggctccgcccagctgtgcgaccgttcctggatcaccgaccagtatgaccggttcgtgcgtggcaatactgtgctcgctcagccgaatgatgccggcatgattcgtattgacgacaacctcggcatcgcgctgtccttggacgctaacggacgccagaccacccttaacccgtatcttggcgcccagctggctctttgcgaggcttaccggaatgtggctgtctctggcgcaactccggtggctgtcactgattgcctcaattatggctccccgtacgatcccgatgtcatgtggcaattcgacgagaccatccttggtctggttgacggctgccgcgagcttggcgtgccggttacgggcggtaacgtttccctgcacaaccgcactggagatgagtcgattcggcctactccgctcgttggtgtgctcggcgttattgatgacgtgcatcgtcgcatcccgtcggccttcgcacacgacggcgacgctgtcttgctgctaggaacgacgaagtgcgagttcggcggatcggtctatgaggacgtcatccacgctggccacctaggcggtatgcccccgatgcccgacctgaatgccgagaaggccctggccgcggtgatggtggaagcgtcgaag

SEQ ID NO: 2154 - protein, 232 aa, Homo sapiens
  misc_feature (1)..(1): Wherein Xaa may be any naturally occuring amino acid
XALPRDNSGEGLAGALLALVGSAQLCDRSWITDQYDRFVRGNTVLAQPNDAGMIRIDDNLGIALSLDANGRQTTLNPYLGAQLALCEAYRNVAVSGATPVAVTDCLNYGSPYDPDVMWQFDETILGLVDGCRELGVPVTGGNVSLHNRTGDESIRPTPLVGVLGVIDDVHRRIPSAFAHDGDAVLLLGTTKCEFGGSVYEDVIHAGHLGGMPPMPDLNAEKALAAVMVEASK

SEQ ID NO: 2155 - DNA, 327 bp, Homo sapiens
  misc_feature (327)..(327): Wherein n may be a, c, g or t
gaattcttcgggcgcgtcctcagtctcagccgtctcttccgagtcaccatccccttccccgctgtatggaacaactctggatcctgacttgggaccagccaccttcttgtaacctttgtcaccagtcttctgaaacagcacccgccgcgcttcaagcctctccctaacattgccttctttcagaagcttttcctcagccaccattttaattggcgttgcgtctggagccgtagtaacaacaaccctgtcctcagatttcttgaactggtctgtgctgcggcgtgaaggaggcagatttttcttagccacgatggaaggagggctgcn

SEQ ID NO: 2156 - protein, 68 aa, Homo sapiens
MVAEEKLLKEGNVRERLEARRVLFQKTGDKGYKKVAGPKSGSRVVPYSGEGDGDSEETAETEDAPEEF

SEQ ID NO: 2157 - DNA, 297 bp, Homo sapiens
aaatttgtggaaatggttgccccatactgtgatggtattggtattaactgtggttgtcctataaaggaacaaatccgagagggcataggttacgctctgatatacaattcagatttgttatgcagtatggtccatgctgtgaaagataagtatggcgacaaactaagaattgaaacgaaaataagaatacatgaggcattggacgagacggtggagttatgtagaaagctatgtgatgctggggtagattggattacgattcatggccgaacacgtagaactaggtcatcgcagccg

SEQ ID NO: 2158 - protein, 99 aa, Homo sapiens
KFVEMVAPYCDGIGINCGCPIKEQIREGIGYALIYNSDLLCSMVHAVKDKYGDKLRIETKIRIHEALDETVELCRKLCDAGVDWITIHGRTRRTRSSQP

SEQ ID NO: 2159 - DNA, 222 bp, Homo sapiens
tccggagtgcatgaccctgcacatgcttctttagaataaattcctggcaggtgaatctgtgggcaaagggcacaggcattttgattttgaaagacattgccgcattgcactctgggaaccgtgtaccaatttattgctcctccagccagggtcaagaatgggtagctttgctttacatgtgagtcacagaaacatggcgtcatctctgggtgcttctaactt

SEQ ID NO: 2160 - protein, 67 aa, Homo sapiens
MTPCFCDSHVKQSYPFLTLAGGAINWYTVPRVQCGNVFQNQNACALCPQIHLPGIYSKEACAGSCTP

SEQ ID NO: 2161 - DNA, 343 bp, Homo sapiens
acgcgtaacgtgccgcggcttatcgcgcagatgacggtgtgggatgcgcaggcgttgatccagcggcatcgcgcagccattgaacaatggctggcgacgcaaagtgaagactggttgttgaacgccatcagcattcgcgagcgcaaaagctattggctggcagggccgttgctcagccagcaaaagttgagcctgctgctctcgctcgattggcaaggagcgctggcggcgctggggctcgccatgcagcgcaaggagctggtgacgctggccttggctgccatggacgaagggctcagcgtaccaggcaaggctgtttgttgttgaagacccagccccggat

SEQ ID NO: 2162 - protein, 98 aa, Homo sapiens
MTVWDAQALIQRHRAAIEQWLATQSEDWLLNAISIRERKSYWLAGPLLSQQKLSLLLSLDWQGALAALGLAMQRKELVTLALAAMDEGLSVPGKAVCC

SEQ ID NO: 2163 - DNA, 235 bp, Homo sapiens
atgacccaatctttcaaaaacaagaattacgcaagtgcatcttatttcgctggcgaggtattggccgcctcagctagcggccaaagagctgaccaagcacgcaagatcaaggccaagtctgatctgatatccaaagatgctatagaaatcgattttgatccctacgcagaattcgatatctgttgtgcatcatttactcctatctacaaaggtgagcctagcgtttcggaagctt

SEQ ID NO: 2164 - protein, 78 aa, Homo sapiens
MTQSFKNKNYASASYFAGEVLAASASGQRADQARKIKAKSDLISKDAIEIDFDPYAEFDICCASFTPIYKGEPSVSEA

SEQ ID NO: 2165 - DNA, 255 bp, Homo sapiens
ccgcggtgagcccgctgaacgcgggggggggaccctcgcgggacgggggctccgccacacctgcggagagaaggagcctcagggaatagcccacggagccttctccagaaatgccacctccccacttcccccagcgaggggcagacagccacttacttggggtggggcacacgcacccatctatcatctaatcctggaaactgcagccgcccccaccaccctcacttctactcccaatgtatttcctacccatgg

SEQ ID NO: 2166 - protein, 62 aa, Homo sapiens [sequence omitted]

SEQ ID NO: 2167 - DNA, 494 bp, Homo sapiens
tggccaggatggggtcatgtccttgcctccctcccttaagtttgtggacacgggggtcctgtgatttgacagtttgccacttgggaaagtcttgaggagatgggggcaccaggttgatggctgtcagccacatatgtttatgcgtctgacaaatacctgaaaatctgtatgagtcaggtctttgagataatgaggttcatagagccaggcctattctcatactatagtggagagaaataatgaaaataaactaacaagtaaagagtgttttcagatagtcccaagtctgacaggaaaaagagcaggcaaagaaggcagtgatgtgggtgtggtcgtctctgagagagtgatgtttacgcagaactgaaggagagagtctcgcaagatgagaggccacaggcattagaggcagaagggacaggcaggcactgagggccagtggcagggtcagcctagggacatggaaccaccaccatgaggccatcgtgtccgga

SEQ ID NO: 2168 - protein, 77 aa, Homo sapiens
MASWWWFHVPRLTLPLALSACLSLLPLMPVASHLARLSPSVLRKHHSLRDDHTHITAFFACSFSCQTWDYLKTLFTC

SEQ ID NO: 2169 - DNA, 391 bp, Homo sapiens
tacaatgtatcatcaaccagaaatacaatgagaaccacctgccagtctcccaaatactatctgcagccactcatttaactctcctggctagctccacgtgggccgtctgaactctcttagaagaatcatctctctgctcaggcaccgggagcaaggggcatctgtcgctctgcagaacggaggggaccaggcctgatgaacaccatcctgggcccagaaacctgggagggtaaagagaactgccaggggtgaagtccaaggatgggaaaaaggcctccggggcagagtcctgaaatgtcagaagtacaccaaagaggaaacagcatcacgttattgctgaggcagggcctcattctgttgccaaggctgcagtgcagtggtgacaccatgg

SEQ ID NO: 2170 - protein, 83 aa, Homo sapiens [sequence omitted]

SEQ ID NO: 2171 - DNA, 171 bp, Homo sapiens
attcctgggccaaaacctctgccttttttaggcactgtgctgaattactacaagggcttagggagatttgacatggagtgctataaaaagtatggaaaaatatgggggttgtttgatggtcaaacgcctgtgtttgccatcatggacacagagatgattaagaatgtacta

SEQ ID NO: 2172 - protein, 57 aa, Homo sapiens
IPGPKPLPFLGTVLNYYKGLGRFDMECYKKYGKIWGLFDGQTPVFAIMDTEMIKNVL

SEQ ID NO: 2173 - DNA, 501 bp, Homo sapiens
  misc_feature (325)..(325): Wherein n may be a, c, g or t
attcttatcaggctctctgtgagagagactgactttaaagccgtatacatgcaatatgtttggttgctacttttagatgatggccgcttaactgacattatcgttgatgaagttattaatcatgcgttagaaagagactccgaaaaccgcgattggaagaaaacaatatcgttactgactgtcctacccactactgaggttgctaataatattattcaaaaaatattggcaaaaattagatcatttttaccgtcattgaagttagaagctatgacccaaagttggtctgaactaacaatattagttaagataagcatccacgttntttttgaaacttctttgctggtacagatgtacttaccagagatcctgtttatcgtatccttattaattgatgttggtccaagggaactcagatcatcactacaccagctattaatgaatgtatgccattccttggctattaactcagctttaccacaagatcatagaaataatcta

SEQ ID NO: 2174 - protein, 167 aa, Homo sapiens
  misc_feature (109)..(109): Wherein Xaa may be any naturally occuring amino acid
ILIRLSVRETDFKAVYMQYVWLLLLDDGRLTDIIVDEVINHALERDSENRDWKKTISLLTVLPTTEVANNIIQKILAKIRSFLPSLKLEAMTQSWSELTILVKISIHVXFETSLLVQMYLPEILFIVSLLIDVGPRELRSSLHQLLMNVCHSLAINSALPQDHRNNL

SEQ ID NO: 2175 - DNA, 357 bp, Homo sapiens
actagtttctcttttgctctaacttggctgttaggtcttgttgcatctgtgatcttgaaaatggggttctataccaacaatccaacttgggtcattttagatgaacgtaatggtgggtataataagacagctctcgtgcttactgttttattcggcatgctgtcgccttatgttaattcaattaatttcgaagggaaaaggaatgctcaagcaaaatctgcttcgttgattggcaaattatttttggctgttggttttggctcgttgttattcggaattcatcagttattgacggattcttctactactatttattgggcatgggaaggttacaatgaatcacacggtcccttgcca

SEQ ID NO: 2176 - protein, 119 aa, Homo sapiens
TSFSFALTWLLGLVASVILKMGFYTNNPTWVILDERNGGYNKTALVLTVLFGMLSPYVNSINFEGKRNAQAKSASLIGKLFLAVGFGSLLFGIHQLLTDSSTTIYWAWEGYNESHGPLP

SEQ ID NO: 2177 - DNA, 307 bp, Homo sapiens
  misc_feature (277)..(277): Wherein n may be a, c, g or t
gtgcacgatcatgagcttgacggcttcactagagcacagctccttacgactgacgagaacgtgctcggcgggatcgttctcagactcaaaggcagggacaatctcgtcgtacccctcctcgacgaggaacactgaagaatccccaagctccgcacagaacaccacccccggacactcggcagtgagttggtcgacgtaggacttcacggtacgagccgacatcgtctcggtgaagagagtctcgccagtggacatgtccgtaccgacagcaccgttngacaccagggcataccggtgaaagaccggt

SEQ ID NO: 2178 - protein, 85 aa, Homo sapiens
MSTGETLFTETMSARTVKSYVDQLTAECPGVVFCAELGDSSVFLVEEGYDEIVPAFESENDPAEHVLVSRKELCSSEAVKLMIVH

SEQ ID NO: 2179 - DNA, 412 bp, Homo sapiens
tgtacaaaacgaagctcatactatcccaaagcagagtagggactaatgactggggatccgttactggccgttgggggagctctgaggtaagggtattcaaccttcccactgcagaggtgtggccacagggtagagagaagaggggaccacctggctttggtcacaaaactcagggcctggcactaagccaggacagacagacagaagcctcaaaaaccaccctcccaggaagctagggactgcctgaccagtcccactgtgatgtggccggttcaaacctatactcaggggctattgggaagggaaggaggcagagcaggagggaggaacgacactggtgagcggtcactgggggtgcttggacctgtggaaagggtgggcaggatgtgggccagccgcaacggagcagcta

SEQ ID NO: 2180 - protein, 50 aa, Homo sapiens
MWPVQTYTQGLLGREGGRAGGRNDTGERSLGVLGPVERVGRMWASRNGAA

SEQ ID NO: 2181 - DNA, 231 bp, Homo sapiens
acgcgtgaggtgcaggccgcggcgatggaacgctcgatgcgctgggcgaagcgcagccgcgatgcgttcgccagcggcggcgagcatgccgagaacaatgcgatcttcggcattcagcagggcgcgctcgacgagtccttgcgcaaggcgagcgccgacgcgctgatcgacatcggcttcgatggctatgcggtcggtggcctggcggttggcgagggacaggaggcgatg

SEQ ID NO: 2182 - protein, 77 aa, Homo sapiens
TREVQAAAMERSMRWAKRSRDAFASGGEHAENNAIFGIQQGALDESLRKASADALIDIGFDGYAVGGLAVGEGQEAM

SEQ ID NO: 2183 - DNA, 325 bp, Homo sapiens
attaccggctggggcgctggcgaagagtcgtggggtatcgaaccgatcgtgctcaacggcaacccggcagagcctgaaatctggaagcgcctggacgatctgctggcaacgactcgcttcaccaccgaggacggccgcgtgttgcgtgttgccgcctgctgtatcgactctggcggtcaccatgtccagcaggtttatgagtacgccacgcctcgcgctgcccggaacatttgggcggtcaagggtcaatttggcgctcgcccggtgtggccgaagcggcaaacgaagtcgaaaaagtaccgtggtcacacggtgcggatgatca

SEQ ID NO: 2184 - protein, 108 aa, Homo sapiens
ITGWGAGEESWGIEPIVLNGNPAEPEIWKRLDDLLATTRFTTEDGRVLRVAACCIDSGGHHVQQVYEYATPRAARNIWAVKGQFGARPVWPKRQTKSKKYRGHTVRMI

SEQ ID NO: 2185 - DNA, 408 bp, Homo sapiens
  misc_feature (1)..(1): Wherein n may be a, c, g or t
nacgcgttacgttgctggaggtcaatgcgtcatgccgatacatcatcagatccgcactgtggcgaccatccttgccaccattaccattgccgccctagtgctcacgggctgtaatacggcggtgcgccaaacggtgaagacgaggtttcccgcaagctcatcaccgtgtggggtgctgagccacaaaacccactcctgccagccgacaccaatgaaaccggcggcacgaaagtcatcaccgccttgttcgccggcctggtgtattacgacgccgacggcaaaacccataatgatgtggccaaatccattgacttcgatggcgaccgcacctacacggtgacgctgcggaaaaccagattcgccgacggtactgaggtgaaggcccataattttgtgaaagctgccgca

SEQ ID NO: 2186 - protein, 98 aa, Homo sapiens
YGGAPNGEDEVSRKLITVWGAEPQNPLLPADTNETGGTKVITALFAGLVYYDADGKTHNDVAKSIDFDGDRTYTVTLRKTRFADGTEVKAHNFVKAAA

SEQ ID NO: 2187 - DNA, 297 bp, Homo sapiens
  misc_feature (1)..(1): Wherein n may be a, c, g or t
ngaggcctaaaagggcagaccttcgatgccgatttggggttgtggacagtgggttcaacatctcagattccacggttacagcctcttgatgctccctatgttattcctctgaatggtcgaggacaggtggagacagaggaaacccttcaagtaaaaggccatccccggacatttgcgattggcgattcagcagctctaagggatccatcaggcaaactcctcccggccactgcacaggttgccttccaacaagcagattttgctggatggaatctctgggcggcaataaatgaccgg

SEQ ID NO: 2188 - protein, 99 aa, Homo sapiens
  misc_feature (1)..(1): Wherein Xaa may be any naturally occuring amino acid
XGLKGQTFDADLGLWTVGSTSQIPRLQPLDAPYVIPLNGRGQVETEETLQVKGHPRTFAIGDSAALRDPSGKLLPATAQVAFQQADFAGWNLWAAINDR

SEQ ID NO: 2189 - DNA, 369 bp, Homo sapiens
gaattcggggggctccgggaatgaagtttccatttcgcaagccttctgaagcaaatccgccaatccctggggcccgcggtgcgtgccggccagcggccagtcctggcccggaatgatccactcgatatcttcggcagacaacgccagcagaccgggcctatcgccgcggcccatggctgcaaaaaaactcttcacagtctggacattcccttgtgtgctcatcgaaatctctccatgtcctttacctgggatcgtgtccgatctcatcggacgcgttgaggacctgctggtgaggacggggtgtcggtgattcagccgatatcgactttgcatggcgatgtcccagctgccggagccgttactggccac

SEQ ID NO: 2190 - protein, 111 aa, Homo sapiens
MQSRYRLNHRHPVLTSRSSTRPMRSDTIPGKGHGEISMSTQGNVQTVKSFFAAMGRGDRPGLLALSAEDIEWIIPGQDWPLAGTHRGPQGLADLLQKACEMETSFPEPPEF

SEQ ID NO: 2191 - DNA, 385 bp, Homo sapiens
ggatccgattaacacagtttttttgtttaatccggtgtgaagaagatttataaatgtcgtgatattttttaatgtggagattgtacgatgacgggtaggagtcaagacaagctaaagaatgcagccttaataattgcgcctttcacaatcaaaattatgcattgacccgatacaagaatcaccgtgtggatcaagccattcttaccaagcttacttttgccgtcgccaaagctgtttgtagtcattctctgaacttttttccttggcattcggctcgacgcagagaatttcggatcgatataatcccgaaatagtccgtttctcggataattgtgccgaaatgcatcatattacaacgtactatcttgaattgctagcattctcg

SEQ ID NO: 2192 - protein, 55 aa, Homo sapiens
MPRKKVQRMTTNSFGDGKSKLGKNGLIHTVILVSGQCIILIVKGAIIKAAFFSLS

SEQ ID NO: 2193 - DNA, 288 bp, Homo sapiens
agtactatattaacctcttgcctccccttcatttattttttcccacttcttgaaaagttccgaagctgaaatgatcaatattcatacccatatgccatttgggagtccttgtgcaaagatgagtatttttttttttattccaagcttctttacctttcctgagatcgatgccaccttgtcagcttctctgcctcccgttccttcttcctgtcccatcagaaaaggcccactctctctctatccaacatctgtgcacaggttgcaccagagcagaatttatcctgatag

SEQ ID NO: 2194 - protein, 72 aa, Homo sapiens
MINIHTHMPFGSPCAKMSIFFFIPSFFTFPEIDATLSASLPPVPSSCPIRKGPLSLYPTSVHRLHQSRIYPD

SEQ ID NO: 2195 - DNA, 255 bp, Homo sapiens
acgcgttgcacttatcaagatgcatttatcgagcatttaaaggttgatcccttaacggcttcaatcacagagcttaaagtagcggcagctcatttaaagttaggtgatgtacttgaaaatgaaacggataaagacactattttgcaattattattttgcatcgcgattgaatcgaaaatagggcaggaccaaccttgctttgtttatgattttcctgcttcacaagcggcgttagcgagaataaatacacaagat

SEQ ID NO: 2196 - protein, 85 aa, Homo sapiens
TRCTYQDAFIEHLKVDPLTASITELKVAAAHLKLGDVLENETDKDTILQLLFCIAIESKIGQDQPCFVYDFPASQAALARINTQD

SEQ ID NO: 2197 - DNA, 316 bp, Homo sapiens
  misc_feature (1)..(1): Wherein n may be a, c, g or t
  misc_feature (316)..(316): Wherein n may be a, c, g or t
nggtccttctggtataaaggtgaaaatatgctgttcccaccccagttcctggagctggatactcctggagttctagatcctgtcctttcttaccttctcaaggttttactcctctggctatctcctattcatcctaaattaccaatcctaccctcttctctagggctagtctcttcagttcacaaacacgattgacattcccttaagcctaaaagtccttttttgattccttcatccctcttcagctactgcccatttctctgcatcgcttcacagtttaacatctcaaaatagctgtttacatacttgttccatn

SEQ ID NO: 2198 - protein, 55 aa, Homo sapiens
MLFPPQFLELDTPGVLDPVLSYLLKVLLLWLSPIHPKLPILPSSLGLVSSVHKHD

SEQ ID NO: 2199 - DNA, 382 bp, Homo sapiens
ctcgagtaccaggggtcatgccctgtctccaccccgggtactcctggacatgtcctgtcctgcatccttgggaactcttaaacattccctatatccaccctcgggtacccctaaacacaccatgtccacgctgggatctctggacataccctgtctcatcctcaggtacctctgtgtacctctgttttgggaacccctgatcctgtcctgtccctataccctacctaccttatccccactacaggaacttctgaccatgtcctgtcacccttcggggatttctgtactccctgtagaactgccaagacaccctatggccttcctcactatctcatcttcctcccaggccccaggaccaactcacctcgtcctccgtccccac

SEQ ID NO: 2200 - protein, 111 aa, Homo sapiens
MSCPASLGTLKHSLYPPSGTPKHTMSTLGSLDIPCLILRYLCVPLFWEPLILSCPYTLPTLSPLQELLTMSCHPSGISVLPVELPRHPMAFLTISSSSQAPGPTHLVLRPH

SEQ ID NO: 2201 - DNA, 389 bp, Homo sapiens
  misc_feature (1)..(1): Wherein n may be a, c, g or t
  misc_feature (2)..(2): Wherein n may be a, c, g or t
nnttcgcccttatctctgtcgactatccatgaagccgcgtcgacgatcccttccaggacgaagtatgtccccccgaaacaaccgcactacaaccaggacaagactcccgagtttgtcatcaagatcctccagtttttggttcccctggcaatcctgggcttggctgttgccgttaggatgtacaccaagtcggagtctgcttagctttgttgcccacttgcccttgcccccctcgcgattgtacgagtcgaacttgtcgaataagctagcaagagttttgtgaggttttattacatgtgtaacttgtcacgaaattcatcgaatgttctgagctgctgtgggttctgtggtttaaagtgtgatcggaatgcatcttactggactaatta

SEQ ID NO: 2202 - protein, 67 aa, Homo sapiens
  misc_feature (1)..(1): Wherein Xaa may be any naturally occuring amino acid
XSPLSLSTIHEAASTIPSRTKYVPPKQPHYNQDKTPEFVIKILQFLVPLAILGLAVAVRMYTKSESA

SEQ ID NO: 2203 - DNA, 416 bp, Homo sapiens
  misc_feature (267)..(267): Wherein n may be a, c, g or t
  misc_feature (314)..(314): Wherein n may be a, c, g or t
  misc_feature (328)..(328): Wherein n may be a, c, g or t
  misc_feature (416)..(416): Wherein n may be a, c, g or t
ctcgagaagtgggttatgactggcaagatttgattaaatgatatttgcattttccctgtttacaatcgtagagcattgcactggaaggggcctcagggaagcatggttcgtttcttttccttatacctccttagcttacaggtgaggaaagtgaggcctggagagatgcagggggcaggcttgatgtggaactctggacttgcatgtcacattctcttatacatcagctcaccctgccaaatccaggtgcctggacgggcttgtatnaacttttgtggtggagccaccattattccctactattatttttgttngcagattgtatcantaatccacccagaggcaatacatcaaaatcaggactgtttaaacattgttttttacccatcataaaatgttcttatcctgggcacatn

SEQ ID NO: 2204 - protein, 96 aa, Homo sapiens
  misc_feature (55)..(55): Wherein Xaa may be any naturally occuring amino acid
  misc_feature (71)..(71): Wherein Xaa may be any naturally occuring amino acid
  misc_feature (76)..(76): Wherein Xaa may be any naturally occuring amino acid
MVRFFSLYLLSLQVRKVRPGEMQGAGLMWNSGLACHILLYISSPCQIQVPGRACXNFCGGATIIPYYYFCXQIVSXIHPEAIHQNQDCLNIVFYPS

SEQ ID NO: 2205 - DNA, 399 bp, Homo sapiens
cagctgccgttcctccgccgcctgctgcggctcctcgccgcgtcgggcgtgttcaccgtcgacaagcagagcacggaggaggagcgggaccgcatcacccccgggtcctacctcctgggggacggcatccctcacgaggaccacatgaaccacaccgctcaggtgctcacctgcacctcgacgcgctacatcgaggcggggatagggctggcggagtggttcaagagggacgtggtcacgtcaccgttcgaggagctgcacggggcgactctgttccacgagagcatggggagcctcgacgcagatttccacgacatggcgagcgaggccttggacgcccacgacaacttcggcatcgagatagctatgcgggagttcagggacttgttcgaggggatc

SEQ ID NO: 2206 - protein, 133 aa, Homo sapiens
QLPFLRRLLRLLAASGVFTVDKQSTEEERDRITPGSYLLGDGIPHEDHMNHTAQVLTCTSTRYIEAGIGLAEWFKRDVVTSPFEELHGATLFHESMGSLDADFHDMASEALDAHDNFGIEIAMREFRDLFEGI

SEQ ID NO: 2207 - DNA, 349 bp, Homo sapiens
  misc_feature (1)..(1): Wherein n may be a, c, g or t
ntcggacgctgatgaaggccgatttgatttcctgatcgcccgataagtgatcggccgatcgatgatgcccactcgactccggcggatgcggcgatagattgatggcccgaccagatcgatgaggccatcatgtcgcgcccgccgcttccgcctttcacccgagagaccttcgcgcagaaggcccgcatggccgaggttgcctggaattcgcgcgacccggtgcgcgtgtcgctcgcctataccgaggacagccgctggcgcaatcgctccgaggtcttgcagggccgcgaggccatcgtggcgttcctcacccgcaaatgggagaaggagcgcgagtaccgcctgatca

SEQ ID NO: 2208 - protein, 73 aa, Homo sapiens
MSRPPLPPFTRETFAQKARMAEVAWNSRDPVRVSLAYTEDSRWRNRSEVLQGREAIVAFLTRKWEKEREYRLI

SEQ ID NO: 2209 - DNA, 340 bp, Homo sapiens
  misc_feature (335)..(335): Wherein n may be a, c, g or t
ggatccaaacagcaagagactacaaggagatgcaaacacaagagttggaggaggttgagctggagtgggtctatcatcttaggaaactgtacagtcaggcagctctgttggatgcctgaaaactcagccttggttcacatgggagagctttatttgaatgccagccacacagagaggattgatggccagcaaagatgggctgagagacgccatgaccagtaagataagagacacttggtttgtccattttctcctctgcgtacctgatggtgaggggttagaactagaagattcatggaaatgaggaaaagggaagcaatctctccccatccagnttccg

SEQ ID NO: 2210 - protein, 68 aa, Homo sapiens [sequence omitted]

SEQ ID NO: 2211 - DNA, 268 bp, Homo sapiens
  misc_feature (1)..(1): Wherein n may be a, c, g or t
nacgcgttaacccccgacaccgccgaggagaaggacgacgaggtcgagatcgaccttggggacctcagcgaggaggactctgctgaggagcccgagatcgaccttgatcttggtgacgacgagcctgccgaggcctcagatgatgacatcgcccgtaacctcggcatcggtcaggctgctgacgatgagcaagacgccgacgagaatgagtcttctgaagctgataatgctgataatcaggatgtcgttgacgctgccttgaagagtg

SEQ ID NO: 2212 - protein, 89 aa, Homo sapiens
  misc_feature (1)..(1): Wherein Xaa may be any naturally occuring amino acid
XALTPDTAEEKDDEVEIDLGDLSEEDSAEEPEIDLDLGDDEPAEASDDDIARNLGIGQAADDEQDADENESSEADNADNQDVVDAALKS

SEQ ID NO: 2213 - DNA, 390 bp, Homo sapiens
  misc_feature (349)..(349): Wherein n may be a, c, g or t
agatctgtattaagatcattttccatttctcttgggccttttaaattgtgttcttaggtgagaacaatgaattacctgacagaaaaaggtttcacctgcactgccaaacttccattgcatgataaaaggatcttacgcagtttttatgtagcccgtaatggctgctggcaggcaactgtgacaggcaaggaccagacagcacctttatttcacagatcacacaaaacagcttgtgcaccagggaaaggggtgcaatgaaaggtaactcccactcacttcatttagaggagacatggcttacatttacctttccaactttgaacaaaattgcaggattgcgataaaccanactttcaaaaaggaaaaatggtttggaagattacttgaact

SEQ ID NO: 2214 - protein, 63 aa, Homo sapiens [sequence omitted]

SEQ ID NO: 2215 - DNA, 299 bp, Homo sapiens
  misc_feature (1)..(1): Wherein n may be a, c, g or t
  misc_feature (2)..(2): Wherein n may be a, c, g or t
nntccggaggattgggcgtgggcacacgagcaacgcaaaccggtagaccccgacatcacagtcgaccaggtcgcagcgattctcctcgttcaccaggcggccggctggttgccgcgagccctcaacgcattgcggcgtagtggagagcgcgcggcagtgcagattgccgtcgacctcggctctacggatggttcttccgacttgctcatggctgctgtggacgaaggattgttggacgagtgcgtgacggctagcgcggacaccacccccggtgagggcattaacctagcgatcgatcg

SEQ ID NO: 2216 - protein, 99 aa, Homo sapiens
  misc_feature (1)..(1): Wherein Xaa may be any naturally occuring amino acid
XPEDWAWAHEQRKPVDPDITVDQVAAILLVHQAAGWLPRALNALRRSGERAAVQIAVDLGSTDGSSDLLMAAVDEGLLDECVTASADTTPGEGINLAID

SEQ ID NO: 2217 - DNA, 339 bp, Homo sapiens
gtgcacgtttatatcctggccctcaataactcagaatgtgaccttatttggaaacagagttactgcagatgtatcaagatgaggtcatactgaagtactgtgggccactaatcctataggactgacgtccttataaacaggaaatttgggtacagatagacatacagacaggaagagtgccatgtgaagactggattcatgctgccacaagccaaggagctacaagaagccaggagaaagacctggaacagatctcttcctagtatcttctgagtgagcatggccctgctgacatcgggatctcaagcttctagcctccagaacccttgagacaaattt

SEQ ID NO: 2218 - protein, 55 aa, Homo sapiens
MLTQKILGRDLFQVFLLASCSSLACGSMNPVFTWHSSCLYVYLYPNFLFIRTSVL

SEQ ID NO: 2219 - DNA, 250 bp, Homo sapiens
  misc_feature (1)..(1): Wherein n may be a, c, g or t
  misc_feature (2)..(2): Wherein n may be a, c, g or t
  misc_feature (241)..(241): Wherein n may be a, c, g or t
nnacgcgtacgtcgaagagaactcggcgtacagctcgtgaatacagatggactcaccgcggggccactttcgaccacggccaaggcatcggtcctcgccgaggcgctgccgtggctcaagcagctgcacggcaagatcgtcgtggtcaagtacggcggcaacgccatgaccgacgacacgctcaaggcagccttcgccgccgacatggcgttcctgcggaactgcgggatccagccggtgngtcgtgcac

SEQ ID NO: 2220 - protein, 83 aa, Homo sapiens
  misc_feature (1)..(1): Wherein Xaa may be any naturally occuring amino acid
  misc_feature (81)..(81): Wherein Xaa may be any naturally occuring amino acid
XRVRRRELGVQLVNTDGLTAGPLSTTAKASVLAEALPWLKQLHGKIVVVKYGGNAMTDDTLKAAFAADMAFLRNCGIQPVXRA

SEQ ID NO: 2221 - DNA, 359 bp, Homo sapiens
acgcgttgtcgtctctccgggcatcttcatcattggatatggtgatggtggccatgttattctttccaattctagctccactccagtggtttccaagaggaaggccgaggtagaccctgaactgttcctctggctcaaacatggagtcatcgtggatatagaccgtacagttcttcactttgtcccctttgagaaatgtaatccgggaagagtctgcattttgtctctcctcaaagtcctccatgacctgagcggaatggctctgagtatagcacctcactgatgactcatagctcaggtctccgctccgagtgatagggacatgcaggacaccctccttctccttcaatttttttttt

SEQ ID NO: 2222 - protein, 81 aa, Homo sapiens
MEDFEERQNADSSRITFLKGDKVKNCTVYIHDDSMFEPEEQFRVYLGLPLGNHWSGARIGKNNMATITISNDEDARRDDNA

SEQ ID NO: 2223 - DNA, 198 bp, Homo sapiens
gcaattgccttagcgaaggaatccagattccacaaaaagaccaaacacatcaagagacgcttcaactccatccatgatctagtcaaggagggagacatggatatttgcaaaatacatacgaatctgaatgtggcagacccgttgactaagcctcttacatgagcaaagcatgatcagcactaagactccatggagctc

SEQ ID NO: 2224 - protein, 53 aa, Homo sapiens
AIALAKESRFHKKTKHIKRRFNSIHDLVKEGDMDICKIHTNLNVADPLTKPLT

SEQ ID NO: 2225 - DNA, 189 bp, Homo sapiens
  misc_feature (189)..(189): Wherein n may be a, c, g or t
ccatggcatgatgggagacgcagaggtgcacatatccagcatgcccttcagcagtcagtggggtgtcctagatggaagcaaacaccaggattctctggagaccagaacaggccagtgcagccattcagcctttccttcaggccaggctgggtcaggccccagtccctaaggccgggcctgcatcctaan

SEQ ID NO: 2226 - protein, 53 aa, Homo sapiens
MMGDAEVHISSMPFSSQWGVLDGSKHQDSLETRTGQCSHSAFPSGQAGSGPSP

SEQ ID NO: 2227 - DNA, 301 bp, Homo sapiens
agatctggagctgaagacaagcagaggagaaatttaacaggtgctcagggaagcatattggttgaggcaaatggttgctgcggcatggcccaccatctgtatataggaaacataatgaagttgtcccacgtatgttgctgtgatcatatgaggccatttatatttgtcttttttttttttaatgaaagatgttccgaatgtaaacttaaaatcaagggaagctcaggatatggcttaaaggtgacttcctttcctgtgctgtttattacaagaccaaatttatataaatttaagtcacata

SEQ ID NO: 2228 - protein, 72 aa, Homo sapiens
MAHHLYIGNIMKLSHVCCCDHMRPFIFVFFFFNERCSECKLKIKGSSGYGLKVTSFPVLFITRPNLYKFKSH

SEQ ID NO: 2229 - DNA, 354 bp, Homo sapiens
acgcgttgtcctaaggctctagggctacaatgaactgaaaaccttaactcaccctctagctttctgaatctcgtgattctagcctcttgagctgattaacttctccaagtcaatagcttctgccgggccaagttcctcatttacttgttggttgaggagaaggagtggagggctggggggtgtcctgggaaagaagccagtgtggcaggtaacattgttactagggaagcagctatttttctcatgggacttgaaatgtttcagtcttttaacaacctggaaggccatacaggtgtgtactagccgcatggtaacaagcccctttgaaaacaatgtttttaacctccagtaggt

SEQ ID NO: 2230 - protein, 76 aa, Homo sapiens
MRLVHTCMAFQVVKRLKHFKSHEKNSCFPSNNVTCHTGFFPRTPPSPPLLLLNQQVNEELGPAEAIDLEKLISSRG

SEQ ID NO: 2231 - DNA, 257 bp, Homo sapiens
cgcgtcagcgatcatccactggttcagcagctttgccgaggattcgggaaaccgctggtctcgaccagtgccaacctcagcgggcaagagccttgccgtagcgccgaggaagtgcagaagcagtttggcgtcgctttcccggtgttagccggcagcgttggtggtcgccttaatccttcagaaatcagagatgccctgaccggcgaacagatccgtcaaggcttgaggtaatgtgaatggagaagtttgcggtattc

SEQ ID NO: 2232 - protein, 76 aa, Homo sapiens
RVSDHPLVQQLCRGFGKPLVSTSANLSGQEPCRSAEEVQKQFGVAFPVLAGSVGGRLNPSEIRDALTGEQIRQGLR

SEQ ID NO: 2233 - DNA, 502 bp, Homo sapiens
tctagatagacgtactggcaaagttacaactgaattctgcattcgctcagtgctcagctcacaaggaaacacaaagcaacagaccacactaagtctagcattcctaagctcatcatcagatctagacactaacatatgcagaaggggtgttccccgatcaagaaatgtattcccatggagcagctgggagatgcacccacagtggggggctctcaggatgtcagtctccacacagctgcagacctcaccccgagagcctctctgcccctccagtcatcctagcaacatgaatttccccactgtccagacatggcttaccagttccatgttcaagaggaaccctctgtcagttctgccatatcattagctacactttagccatgtgcactcctttaggacataacgttcagatgaggaatgaactctgcacaatgaacacgagtattttcccgagatgcacatagggcccctgggtacagacagctgtcttctggatgtagta

SEQ ID NO: 2234 - protein, 58 aa, Homo sapiens
MHPQWGALRMSVSTQLQTSPREPLCPSSHPSNMNFPTVQTWLTSSMFKRNPLSVLPYH

SEQ ID NO: 2235 - DNA, 333 bp, Homo sapiens
  misc_feature (1)..(1): Wherein n may be a, c, g or t
ntccggaatgcggcgcacttcgggagtcgactggcacaaagttaccgaggttcttcaccttggaatatcacatgacccctgcacgcggctggagaaatgggaatctggtaccgctagcctggagcagtgagcaggattattgcgggacgtgccggcgggaaacgtctgactaccccgccgggacgactgacccgtccgacgaccgaccgggtacgcgaggctgtgttctccgctttggcagcatggaacgggaccgctgacgaggttcccgaggaccaattggccggtcagacattctgcgatttgttcgctggttcaagtgccgtggcctta

SEQ ID NO: 2236 - protein, 69 aa, Homo sapiens
VSRIIAGRAGGKRLTTPPGRLTRPTTDRVREAVFSALAAWNGTADEVPEDQLAGQTFCDLFAGSSAVAL

SEQ ID NO: 2237 - DNA, 396 bp, Homo sapiens
  misc_feature (112)..(112): Wherein n may be a, c, g or t
ccggtgttggcctgggagcgctttcagatgcgcgatgtattggtgatcgaccatccgctgtgccaggcggtgttcagccgccagggtgcgcaattgctgcactttcaaccancaggccacaaaccctggctgtggtgcgcagccaagtggccacaagtcggcgccatccgaggtggcgtgccggtgtgctggccctggtatgggccatccgaccgaaaacgcctgccgtcccatggctgggcgcggctgatcgactggaaactgctccacagcagcaccgacgatgacggtgtgcgcctgcactggcaattgcagctgtgccactggcaggtcgacctgcacgcgcacctgggcgaaacccttgagttgcgcttgggcaccgaacaccaagacgaa

SEQ ID NO: 2238 - protein, 132 aa, Homo sapiens
  misc_feature (38)..(38): Wherein Xaa may be any naturally occuring amino acid
PVLAWERFQMRDVLVIDHPLCQAVFSRQGAQLLHFQPXGHKPWLWCAAKWPQVGAIRGGVPVCWPWYGPSDRKRLPSHGWARLIDWKLLHSSTDDDGVRLHWQLQLCHWQVDLHAHLGETLELRLGTEHQDE

SEQ ID NO: 2239 - DNA, 186 bp, Homo sapiens
ctcaggcagggatcggggccaggacaggcaggtgcggggcaggcgggtgctgggtggtgagtaagggttgtgcctgttgccgtaggggtaatgggaaggcaatgaagtgttaaaggccagagtagggcaggtggtgcagtgaggggagcggattcgcatttggaaccacatggacagtgtgtggca

SEQ ID NO: 2240 - protein, 57 aa, Homo sapiens
MWFQMRIRSPHCTTCPTLAFNTSLPSHYPYGNRHNPYSPPSTRLPRTCLSWPRSLPE

SEQ ID NO: 2241 - DNA, 496 bp, Homo sapiens
ttcatgttggattattttacctgttagaattcatgccattttatgctctggtactttggaaatgtgaattaggttttaaagttacattagaaacaatcctctaccaaacatgtaaaaaggacactcgatctggttttgcagaacaaaacagtttgactgaaaagttctgccaacaacagtcaatatatgctataaactgattagctgcccaaaagaagtatttggttcttctttacttataagcgatgtagtataactggtcaggttacagattcttttgcccttatctatagcagaagcactgagtaacaataatgtgaaaggtgaagaaataccttttagagtctcatagttattgagtgcggagggagaaccaatgcctttactccggctggcacccaatagtcacacacaatttcagctagcatgaaattccattacaccgaaggtcattcattgcattggtacctcacctgaggatagtatctggggatcc

SEQ ID NO: 2242 - protein, 55 aa, Homo sapiens [sequence omitted]

SEQ ID NO: 2243 - DNA, 280 bp, Homo sapiens
agatctccctacacacacttttaaaaactatatataatatgtatcattaaatttggtttgaatatagtgatactctatttttcacctcttggaagctgtattgagaaagcacagacttgtggaatgaattttttatctccttctgtgagtggtgggatggagactgcagagcctggatgagtgactgagtgagcagttgcagccctgacccacgcatgtggtttggtatcatttgctcttttgctttactgacaccacctatttttgatttctttcatga

SEQ ID NO: 2244 - protein, 61 aa, Homo sapiens
MIPNHMRGSGLQLLTQSLIQALQSPSHHSQKEIKNSFHKSVLSQYSFQEVKNRVSLYSNQI

SEQ ID NO: 2245 - DNA, 420 bp, Homo sapiens
  misc_feature (1)..(1): Wherein n may be a, c, g or t
  misc_feature (203)..(203): Wherein n may be a, c, g or t
  misc_feature (226)..(226): Wherein n may be a, c, g or t
  misc_feature (263)..(263): Wherein n may be a, c, g or t
  misc_feature (335)..(335): Wherein n may be a, c, g or t
  misc_feature (336)..(336): Wherein n may be a, c, g or t
  misc_feature (356)..(356): Wherein n may be a, c, g or t
  misc_feature (357)..(357): Wherein n may be a, c, g or t
ntctagctgcttccaggaagcaagaatgtaatggaaagcctaagcaattatctaagcccacaagccaggattatctgtgactttataagttcatgggaatgtcttttctcatactaggacactgatggtaatctcagttctctcaaggagggcagataggtggctcttttccgttggacattccctgagaatgatggcatttnttagtcctgaggaaaccagtatntatctcattctagcgagcgttctgtgtaccagcttcnaagctagttcttcatgaagatatccacccttaggtgtggagacctccagatactccatgactcataattgannaaatcacaagggtgggctannatgtatgggtgactttgttcccatgacattctttttcatttgttgttatctcagtatctgaat

SEQ ID NO: 2246 - protein, 70 aa, Homo sapiens
  misc_feature (20)..(20): Wherein Xaa may be any naturally occuring amino acid
  misc_feature (32)..(32): Wherein Xaa may be any naturally occuring amino acid
  misc_feature (40)..(40): Wherein Xaa may be any naturally occuring amino acid
MEYLEVSTPKGGYLHEELAXKLVHRTLARMRXILVSSGLXNAIILRECPTEKSHLSALLERTEITISVLV

SEQ ID NO: 2247 - DNA, 267 bp, Homo sapiens
aagcttctgctctaccattgagctacacccgcacaaaaggtgaagcgcgagtatacgcatgccgcccgtcataggcaagcctgtggcccaccccgcaaaagcgccacccccgcgtgcggggcaggcggggtggcggagcggtagcgggtactggcttacaggttatgtaccaggatgcccaggatcagcaccggggccaggtagcggcagaagccgcgcatcacgcccagccatgccggcgttttaccgtggcggctcagctcggcg

SEQ ID NO: 2248 - protein, 69 aa, Homo sapiens
MPPVIGKPVAHPAKAPPPRAGQAGWRSGSGYWLTGYVPGCPGSAPGPGSGRSRASRPAMPAFYRGGSAR

SEQ ID NO: 2249 - DNA, 359 bp, Homo sapiens
  misc_feature (294)..(294): Wherein n may be a, c, g or t
  misc_feature (359)..(359): Wherein n may be a, c, g or t
gtgcacttgcatctcacttgatctttgcattaatccagcaagagagataggccatatgttgtcatctctattagacagatgaggaaatagagatatttattactaaaaatttgagtaagaaagcaaacactgagccagaattggaactgaggtctgactcccacttctaactcttgagagtatggctcagaaatgggcatctctagtcacaaaatgtggctgagctgtttgggcaactagcagagctggacaccttgtgattcagaggggctttcccatggaatgcaggggccnacagcagcattttggatggtacaaggttggtaggaggaagagaagaaatgattggctcccagagn

SEQ ID NO: 2250 - protein, 56 aa, Homo sapiens
MPISEPYSQELEVGVRPQFQFWLSVCFLTQIFSNKYLYFLICLIEMTTYGLSLLLD

SEQ ID NO: 2251 - DNA, 254 bp, Homo sapiens
  misc_feature (254)..(254): Wherein n may be a, c, g or t
gaattcatatgtggcccaaaactcttctcattagtgatctaggtagttatcaccatttgactaaagatgacataagcaatggaacatttttgtcttccccaggcttgcagttattaccctttgactcacacaattatttattgttagtttttacttatttttaattgaaaaataaaattgtgtatatttatgatgtacaacatgatttttgtttgttttagagacaggggtttcaccctgtcgctcaggctatn

SEQ ID NO: 2252 - protein, 51 aa, Homo sapiens [sequence omitted]

SEQ ID NO: 2253 - DNA, 351 bp, Homo sapiens
ctctattttttcatattgcggtatttgaatccagatcaagctgacatgtatcctactcacagtgacatactaaacctaaaatttttggagaatgtagcaataaagctaggactgaatgaagaacccttccaatacactcgatacgtcagcgaatcggacgattatccaagattattcaatttaagaaggaaattatggcttggcgtgcaatttttgaagtttggaatattgattccagaaggagattctgacattctaagtttggaatatttaagatcctttatgaaaactgacgaatctctaccagaactatttgagagaaattacgcttctactaataatctagactta

SEQ ID NO: 2254 - protein, 117 aa, Homo sapiens
LYFFILRYLNPDQADMYPTHSDILNLKFLENVAIKLGLNEEPFQYTRYVSESDDYPRLFNLRRKLWLGVQFLKFGILIPEGDSDILSLEYLRSFMKTDESLPELFERNYASTNNLDL

SEQ ID NO: 2255 - DNA, 402 bp, Homo sapiens
  misc_feature (1)..(1): Wherein n may be a, c, g or t
ngtgcacgcctctcgtttattggcaagaatgagcaaggaaaccgcatgcagatggcggagctgcagggtcatccatactttgtcggcatgcaagcccatccggagctggcgtcgcgcccgctgaatccatcgccgccattccttggtctcgttgccgcggctgctggcattcttgacgagcaaatgaagcaccagatgcatggctacaagccgccccaccctagctcagcgatggtattggagtcgcagtcagatcagctggcagaacaggccactgttgcagaagctggccagtcaggcacaagccaacaaaccaagtaggcgggcagaaaagcccaggtgaagggcccagaaggcctctttatgtagcaagcaacgaaccctagtcccaacgttacgcgt

SEQ ID NO: 2256 - protein, 106 aa, Homo sapiens
  misc_feature (1)..(1): Wherein Xaa may be any naturally occuring amino acid
XARLSFIGKNEQGNRMQMAELQGHPYFVGMQAHPELASRPLNPSPPFLGLVAAAAGILDEQMKHQMHGYKPPHPSSAMVLESQSDQLAEQATVAEAGQSGTSQQTK

SEQ ID NO: 2257 - DNA, 357 bp, Homo sapiens
  misc_feature (1)..(1): Wherein n may be a, c, g or t
nccgcagggtaattccaatgctgatgctgtgcgcacgctgctcaccagtgctgagtagccaggatgcttgatacccgcgcggcattgcgccgcagaatacacccgataaaaggatagattgagattatgacgaattcttcccagcctggatcgcagccggattccccaacttatgccgatgctggcgtcagcgtagaagcaggtgagcaggctgttgagctgattaagccgcacgccaagcgcgccacccgcccagaggtccgcggtgacctcggcggttttgccggcctgtttgctctgggtaagtcccgcgagccgctgctggcatccggttccgatggtgtgggcacgaagcta

SEQ ID NO: 2258 - protein, 77 aa, Homo sapiens
MTNSSQPGSQPDSPTYADAGVSVEAGEQAVELIKPHAKRATRPEVRGDLGGFAGLFALGKSREPLLASGSDGVGTKL

SEQ ID NO: 2259 - DNA, 465 bp, Homo sapiens
ccatggccaactctacattattttgccagttcatgtgtgcacaagtggattttgccttcccttccctgccagcacacatgtacacatgcaccctgtgatgcatagctgccaatgggaatgcatttcaccctttcctttcttgccttagaacattgcaggcagagccttggagacacagagcactccaaccctacacctgtgccaacactgctaccagagtgaaattaagcaaagagaacaatggaccctcccccaccctgagcagccactgctgcctgcaggaacgtgtggggtgcacagagacctgcgaccaccagtaacccaccgccatgctggcaccaccaccaatgtgaccatgtgcatagtagacagcaggagcctcctgctcacttccccaccaattatgctgcctctgccactgctgtgaatgcccgcacagaggcaggcaccctggcacctgctagc

SEQ ID NO: 2260 - protein, 50 aa, Homo sapiens [sequence omitted]

SEQ ID NO: 2261 - DNA, 409 bp, Homo sapiens
tctagatagagccttgttattcaacatgatctgcatcagtatcatttaggagcttgttagaaatacaaaatcttgagccccactccagacctattaaatcagaatctgcatttaaactagatcccagatgtatcttaagtacatctttagagtttgaggggcactggactagagtgtttatgttgagaatcttgagacgttgtctgggttcagcaggaaatggttccatgattgatgggtgatgtatgtcctaagtgtggaagagggatatggtggctcatgatccaggaatgagacagccatgctgacatggccattctcagttacttagttctctgacaggatatttttaaatatctatttttattgctgagtaatatgcatagcaggtgtccctctgtttctctaa

SEQ ID NO: 2262 - protein, 70 aa, Homo sapiens [sequence omitted]

SEQ ID NO: 2263 - DNA, 357 bp, Homo sapiens
gggcccagagcgcctccaagtcagccagaaatctcactgcctgacagcgcagtgggcaccagctgataagtattgggtaaagccagtgcccctgttgttgattcgaggtgaacaaatgaatcagagctgagatgagttgacaatgacagtggagcagaggccttgtatgtgccctgtcacctgccattccacaactggaccacagaaaagtgctgaggatgctggccagcagaccctgcagcagtcattggtggttctgtctttccctaacccttatgtgctggaggacagaggagccacctcttctcactggttgatactctgttcctaagacctcaggttacccagtgtagcctg

SEQ ID NO: 2264 - protein, 62 aa, Homo sapiens [sequence omitted]

SEQ ID NO: 2265 - DNA, 462 bp, Homo sapiens
ggatcctcagcagctctgaaatatacacctgaaatttcacggactcttgaaaaaaattgcagcgttaatgagatgtacgtatctgaaaacaatgaatctgtgagggaagatgataaacctgatctacaccctgacgtaacatttggtagaaataagattgaaggtgaaaaagaaggaaatgattcgagttatagccgggcgtattataccctccaaaatacagaatatcaaattcctagtagattttcgttcttccgctctgaatctgatgaaactgtgcatgctagtgatatcccttctttgatatccgagggacagacgttttatgagttattcaagggaggcgatccaacgtggtggttggattgcagttgtccaactgatgatgaaatgcgttgcatagcaaaaacatttggaatccatcctttgaccgcggaagatatcaggatgcaagaaacgcgt

SEQ ID NO: 2266 - protein, 154 aa, Homo sapiens
GSSAALKYTPEISRTLEKNCSVNEMYVSENNESVREDDKPDLHPDVTFGRNKIEGEKEGNDSSYSRAYYTLQNTEYQIPSRFSFFRSESDETVHASDIPSLISEGQTFYELFKGGDPTWWLDCSCPTDDEMRCIAKTFGIHPLTAEDIRMQETR

SEQ ID NO: 2267 - DNA, 429 bp, Homo sapiens
  misc_feature (1)..(1): Wherein n may be a, c, g or t
  misc_feature (2)..(2): Wherein n may be a, c, g or t
  misc_feature (58)..(58): Wherein n may be a, c, g or t
  misc_feature (76)..(76): Wherein n may be a, c, g or t
nngtgcaccgcgttcctggcctccagcgtggtcagccagttcgaaggcacgtcgaaanaactggtcgcgctggcgncgttgatgccgatcgtggccggcatgggcggcaatgccggcacccaggtgctggcactgatggtgcgcggcctggcgctggggcagatcggctcgtccaacgtgatgaccttgctcaagaaggaactgaccgtggcgctgatcaacggcatggtgctgggcatcgggctgggcgtgattgtgctggtgtggttccgccaaccaatgctgtcgctggtgatcggcactgcattgaccttgaacatgctcaccgccgcgtttggtggcgtgctggtgccggtgacgctgaagcggctgggcttcgaccccgcgctggagtcgtgcgtgatcctgaccacgctgaccgatgtgatg

SEQ ID NO: 2268 - protein, 143 aa, Homo sapiens
  misc_feature (1)..(1): Wherein Xaa may be any naturally occuring amino acid
  misc_feature (20)..(20): Wherein Xaa may be any naturally occuring amino acid
  misc_feature (26)..(26): Wherein Xaa may be any naturally occuring amino acid
XCTAFLASSVVSQFEGTSKXLVALAXLMPIVAGMGGNAGTQVLALMVRGLALGQIGSSNVMTLLKKELTVALINGMVLGIGLGVIVLVWFRQPMLSLVIGTALTLNMLTAAFGGVLVPVTLKRLGFDPALESCVILTTLTDVM

SEQ ID NO: 2269 - DNA, 274 bp, Homo sapiens
acgcgtgggctggtccaccaacgttcgggtcggcaataatctgacgtcaatcgacgacatgctgcgcgtgacgatgcccgaagcggcgatccaggcaacgccgatgaacggcatcgtgctgctgaccggcaccgtggcgacgccgggcgacatcgaggaagccaaccggctggtcaccgccttcgtaggcgaagaacgcaggtcctatcgcgcctaaagaccgcgacgccgatgcaggtcaatctgcagggcaagatggtcgaggtcagccgcg

SEQ ID NO: 2270 - protein, 52 aa, Homo sapiens
MLRVTMPEAAIQATPMNGIVLLTGTVATPGDIEEANRLVTAFVGEERRSYRA

SEQ ID NO: 2271 - DNA, 291 bp, Homo sapiens
gctttagattacgacattcataactactttcctcagcactctgaacgcctgaccgctgaaaaaatagatacgtcagcatgtcaatgtgaaattgaccaaaagtatcttccatacgagacagaagatgatactttattccccagcgtgcttccccttgctgtagggagccagtgtaataatatttgcaaccgcaagtgtatcgggaccaaaccatgttcaaataaggagatcaaatgcgacttaataacaagccacctgttgaatcagaaatctctagcttcggtgcttccg

SEQ ID NO: 2272 - protein, 97 aa, Homo sapiens
ALDYDIHNYFPQHSERLTAEKIDTSACQCEIDQKYLPYETEDDTLFPSVLPLAVGSQCNNICNRKCIGTKPCSNKEIKCDLITSHLLNQKSLASVLP

SEQ ID NO: 2273 - DNA, 296 bp, Homo sapiens
  misc_feature (296)..(296): Wherein n may be a, c, g or t
agatctcattttatatgattagaagaattgaaagaaaaaccgctgtagctggtaaaataattattacaatttacttcataatgcacaatcaacacttacccctcaaaattgaagaaaaccagctgttacatataaatcatatcctatttttaattcacaaagggaaggtgccatataaacctaaggtgactcatttggtacatgtgaaatcagtatgattttctctttttaaagaaaatatgggttccccagacaggcctaattcctggatgggctagaagcataagccactgtan

SEQ ID NO: 2274 - protein, 67 aa, Homo sapiens [sequence omitted]

SEQ ID NO: 2275 - DNA, 296 bp, Homo sapiens
acgcgtctttctctccttacacattctcagtgtgctagctagtttctgaatccccaggactgggtgggtaattggggagttagggataagggaattggaaaggttgctttccactccctgagcctggccagtgtttgacatgttggacattgtggggggctcttcagagacccgcatcattggtgagctctctcctgtaattgtctggacatataaagatgcattgtttttttggagacagaatctcactggagtgcaggggcacaatctcagctcacggcaacctccacctctca

SEQ ID NO: 2276 - protein, 60 aa, Homo sapiens [sequence omitted]

SEQ ID NO: 2277 - DNA, 268 bp, Homo sapiens
  misc_feature (1)..(1): Wherein n may be a, c, g or t
ncccgggcaggggaaggggagaggcggcgagctcagcaaccggaaccgagggaagattttggctccgcgggctcgccctccgctccctctgccagcggcgccagacgccgagtggggccagggacaggggaggaggacccaggaccctgtgcccgcgcccctggagccgctggagttcggacttctgcaactgttggcactttgggggcttggcttagcgctctgctgtttacccgtctctcctcgctgcctcggaaccaaagctccc

SEQ ID NO: 2278 - protein, 89 aa, Homo sapiens
  misc_feature (1)..(1): Wherein Xaa may be any naturally occuring amino acid
XRAGEGERRRAQQPEPREDFGSAGSPSAPSASGARRRVGPGTGEEDPGPCARAPGAAGVRTSATVGTLGAWLSALLFTRLSSLPRNQSS

SEQ ID NO: 2279 - DNA, 351 bp, Homo sapiens
tccggaactcaccccgacgccgtcattatggacgtcatgatgccgcgtctagatggcttggaagccacccggatgctgcgcagcaatggcaacgacgtcccgatcctcgtcctcaccgcccgcgatgctgtcgacgatcgcgttgacggcctcgacgctggcgccgatgactacatggtcaagcccttcgccctcgacgaactcctcgctcgcctacgcgccctcactcgtcgttcccgtcccgagccagagcaaaacgaggcccctgaacaactctccttcgctgacctcacccttgatccaggcacccgcgagatcacccgcgggaaccgtcgcatcagtttgacgcgt

SEQ ID NO: 2280 - protein, 117 aa, Homo sapiens
SGTHPDAVIMDVMMPRLDGLEATRMLRSNGNDVPILVLTARDAVDDRVDGLDAGADDYMVKPFALDELLARLRALTRRSRPEPEQNEAPEQLSFADLTLDPGTREITRGNRRISLTR

SEQ ID NO: 2281 - DNA, 371 bp, Homo sapiens
  misc_feature (291)..(291): Wherein n may be a, c, g or t
  misc_feature (358)..(358): Wherein n may be a, c, g or t
  misc_feature (371)..(371): Wherein n may be a, c, g or t
ggatccttatgagcttggtatctgtttgttgttttcaaaaatatttatacttgcattgtgatatactgggaagtatcagacagttgggtctatattctcagcattgcctcattgtatatgtcaccatgcataagttacttatgctctctgtgctaatacttcttcatctctaattggggaaaataatctgtaagatattgtctataaagtgccttcctagcctagtggtagtttccctttttaaaaaaaaatcagttttttgtgtcagtttatatttgttggttgtagaanaatagaaagatccaatttaaagtggttaaacattatggaaaatgtatcgattcacgggaaaagaatntctagaactaggn

SEQ ID NO: 2282 - protein, 54 aa, Homo sapiens
MSLVSVCCFQKYLYLHCDILGSIRQLGLYSQHCLIVYVTMHKLLMLSVLILLHL

SEQ ID NO: 2283 - DNA, 280 bp, Homo sapiens
actagtgagaagaggaagaggttgggggaacttagtaaaagatggacgtggtgtcacgatgattggtgtcctctgggtggagatgggaatggttgtccagagtaggtaggttcctagtttagacttcttgtccatatagaagtgtaaacaggataagcatgttaccatggaagcaaccttagcaacaatcagcaattacgatggtaggctggcgtcaggaaaaagagagggctccctggataacgatgaggctaggcctctctctttctagcaaagatct

SEQ ID NO: 2284 - protein, 56 aa, Homo sapiens
MVTCLSCLHFYMDKKSKLGTYLLWTTIPISTQRTPIIVTPRPSFTKFPQPLPLLTS

SEQ ID NO: 2285 - DNA, 271 bp, Homo sapiens
acgcgtctgggaagccccggtgtgccgatgtatggctataacgtgcagttgcttaatgaagtcaccggcgaaccgtgtggcgtcaacgagaaagggatgctggtggtagaagggccgctgccgccggggtgtattcagaccatctggggcgacgacggccgctttgtgaagacttactggtcgctgttttcccgcccggtgtacgccacctttgactggggcatccgtgacgctgacggttatcactttattcttcggcgcactgaccatg

SEQ ID NO: 2286 - protein, 90 aa, Homo sapiens
TRLGSPGVPMYGYNVQLLNEVTGEPCGVNEKGMLVVEGPLPPGCIQTIWGDDGRFVKTYWSLFSRPVYATFDWGIRDADGYHFILRRTDH

SEQ ID NO: 2287 - DNA, 282 bp, Homo sapiens
gcgtttgagaaagaactagctaaagctggtctagataatgtggatgctgaaagcaaagaaggcactccaagtgctaattccagcattcaacaagaagttggcctaccttattcagagttattatctagatttttcaatattctaagaactaacaatccagaacttgctggtgatagaagtggtccaaagttcagaattcctcctcctgtttgtttgcgtgatggtaagaagactattttctcgaatatccaagatatcgccgaaaaattgcatagatctccg

SEQ ID NO: 2288 - protein, 94 aa, Homo sapiens
AFEKELAKAGLDNVDAESKEGTPSANSSIQQEVGLPYSELLSRFFNILRTNNPELAGDRSGPKFRIPPPVCLRDGKKTIFSNIQDIAEKLHRSP

SEQ ID NO: 2289 - DNA, 309 bp, Homo sapiens
  misc_feature (136)..(136): Wherein n may be a, c, g or t
  misc_feature (270)..(270): Wherein n may be a, c, g or t
  misc_feature (309)..(309): Wherein n may be a, c, g or t
ggatcctcagctcagagcaccttaaacacaggaaatggggttccttggagttgggagagagggagttcccggaagggatggatgcagggcagttggagaaatcacagatgtctgttgcagttttttaggccagacngtggactgttccagctctacacagataggtgtttggaaaaggaagccatgttgatgtattccatgggtaaagttctcaaaataggctacagtgacaagggctattcagtggtgagaagattcaggctgatctcnaaaccatgagttagttggacacttcgtggaaataactan

SEQ ID NO: 2290 - protein, 65 aa, Homo sapiens
  misc_feature (19)..(19): Wherein Xaa may be any naturally occuring amino acid
MQGSWRNHRCLLQFFRPDXGLFQLYTDRCLEKEAMLMYSMGKVLKIGYSDKGYSVVRRFRLISKP

SEQ ID NO: 2291 - DNA, 340 bp, Homo sapiens
aagctttttgtcttctgccaggagccagaagtcttggaagtaaaaaaaaaaaaaaagttaacctgcaacatcacttgcaaacagttctggtccaactggaacattggccatttcaggccttctggtgtttttaaatttctgggcccagaacaaagtggtgtcattgggaatgcctctgcccactggaggctttgctttccaagaattgttaacttcattataatggtatttctggaagggttttttaaaatggaaattcctattataaaaatctcttatggttaactgcccctttcccacagaaattttctcatatttaaaggggccgctaaccactttt

SEQ ID NO: 2292 - protein, 72 aa, Homo sapiens
MKLTILGKQSLQWAEAFPMTPLCSGPRNLKTPEGLKWPMFQLDQNCLQVMLQVNFFFFFTSKTSGSWQKTKS

SEQ ID NO: 2293 - DNA, 372 bp, Homo sapiens
acgcgtgactccgcagaaaattatagattcctaacaaacactgagagtgtgtcctgtgctgtaaggtccagggatgggccacaagttcaaggttgtgtgaagaacaacggaaacccacctctgaggccctgggcacctggcgcctgtcgtgttgggcatgaataaagcttcgcagctcagtcctgcaatctccatgagcctagacttgtccatcttaaaatgtagacggttaggacacctgctgaaggggccgccaggcttaactgtgccaacacggcatgcaggtggagaacaaagaatgcgattgaaaacctcctaacgataacgagagctgttccctttctgagccctcaccccatgcccagcgtgcac

SEQ ID NO: 2294 - protein, 60 aa, Homo sapiens
MDKSRLMEIAGLSCEALFMPNTTGARCPGPQRWVSVVLHTTLNLWPIPGPYSTGHTLSVC

SEQ ID NO: 2295 - DNA, 270 bp, Homo sapiens
agccagaccggttgggactggttcttgctgcacctggaccgtggcgagcagttgatgctgtttcgcgtgcggcaaaaggacggcgcgggttacctgactggcacctggatcgaccagcagggccacacccagaccctgcacaatgccgatatccagctcacaccactggccaccaccgacatagacgggcgcagtattcccacgcgctggtcgctgaaaattcccgccaaacaactggatatcacccccctggccgttaacccgaacgcg

SEQ ID NO: 2296 - protein, 90 aa, Homo sapiens
SQTGWDWFLLHLDRGEQLMLFRVRQKDGAGYLTGTWIDQQGHTQTLHNADIQLTPLATTDIDGRSIPTRWSLKIPAKQLDITPLAVNPNA

SEQ ID NO: 2297 - DNA, 190 bp, Homo sapiens
tgatcagtccccaagccggaaaagcgggccagccttgggccgaggaaccaaaaacagagacggtattgacagaaggccaggcagcaccgctgtgggcgataaagggtcaggaaaacgcttggagtttgcgaagccgggctcacggctctcatcaccagcgctgccatccacccagggtgtggtcaagctt

SEQ ID NO: 2298 - protein, 55 aa, Homo sapiens
MAALVMRAVSPASQTPSVFLTLYRPQRCCLAFCQYRLCFWFLGPRLARFSGLGTD

SEQ ID NO: 2299 - DNA, 355 bp, Homo sapiens
acgcgtatggtcggtagtccctttcagggaccagtgcagagggtgaatcaacggccccttcacagaaaccgcgcaggaatttttctggtgtttgttatttttttttccttgtacttatctcacttttctttttctaactattttttttgcaatttttttgtgtacactttccacaacatataggatggtttagtcatctctcgaagtatataaaccgttgctggatcgtggttgttcttcatcgacttctctctgctagactctcttttttaaaattttttcatagaataaaaaaccaaggataacaaacatcttctttcgttcgcttcaaaataactacaaattaaaaatgcat

SEQ ID NO: 2300 - protein, 58 aa, Homo sapiens
MVGSPFQGPVQRVNQRPLHRNRAGIFLVFVIFFSLYLSHFSFSNYFFCNFFVYTFHNI

SEQ ID NO: 2301 - DNA, 345 bp, Homo sapiens
  misc_feature (345)..(345): Wherein n may be a, c, g or t
acgcgttcaacaccaaccatgcagtcgtcggttatcacaccgccaaatcctggcgcctgccggagcatgtgaccgacgccatcgccaaccaccacaacgccctggcgattttcagcgatgagtcatcgcgcacttccgcacctgaaaaacctgctggcgatcctgaaaatggccgagcacatttgctcgtcttaccgggtgctgggcagccaggctgaggaccatgagtggaatgctatcggccacctggtgctggattacgtgggcctgtcggactacgactttgaaagcatgaagttgtcgatccgcgagttgggcgcgcactgacccttttttccagaggtn

SEQ ID NO: 2302 - protein, 69 aa, Homo sapiens
MSHRALPHLKNLLAILKMAEHICSSYRVLGSQAEDHEWNAIGHLVLDYVGLSDYDFESMKLSIRELGAH

SEQ ID NO: 2303 - DNA, 403 bp, Homo sapiens
  misc_feature (1)..(1): Wherein n may be a, c, g or t
naagcttgttccctgtgggagaaagttgatgtatgttgatttctaatgagcagcccagtcatgctcaggaaatttgatagtggagtgaaggtgatccagaccaaaacacatagtgatgaagaggtatttgcaagaatctcatcacttgcacagaagccagatgctcttcagaaagggattagcccaagtgatgctgcattcacactgggaattgctccagctttagcaaaggagcatcttctaaatgcagaaaacagaggcctgttgtgcagagatgttagtccagatggattccgcttttttagcaatttatttaatgacattgatccccaaaatatccactcgtaagaaaatcacagccctgccctcctgcaagtttcttttcagatattaccctggatcc

SEQ ID NO: 2304 - protein, 100 aa, Homo sapiens
MSSPVMLRKFDSGVKVIQTKTHSDEEVFARISSLAQKPDALQKGISPSDAAFTLGIAPALAKEHLLNAENRGLLCRDVSPDGFRFFSNLFNDIDPQNIHS

SEQ ID NO: 2305 - DNA, 385 bp, Homo sapiens
  misc_feature (40)..(40): Wherein n may be a, c, g or t
  misc_feature (41)..(41): Wherein n may be a, c, g or t
  misc_feature (109)..(109): Wherein n may be a, c, g or t
  misc_feature (385)..(385): Wherein n may be a, c, g or t
atgagaggtatacagattaaaaacacaataaaatatcacnntgcctctattggaatggctaaaataaaaaatactgataacaccaaatggcaagaatacagagaactgngatcactcattcactgctggcaaaaatgtaaaatggtagagcaactctagaaaaaatttggcagtttcttataaaaataaacatgccaactaccatatgacctagcaattatacccctaggtatttatcccagtgaaatgaaaacttgcacataaaaaactgtacatgaagagggtggcagctttatccattatagtcaaaagctggaaacaacttggaaacaactcagatatccttcagtgggtgaatggttaaacaaactgcagtacatccctn

SEQ ID NO: 2306 - protein, 52 aa, Homo sapiens
  misc_feature (14)..(14): Wherein Xaa may be any naturally occuring amino acid
  misc_feature (37)..(37): Wherein Xaa may be any naturally occuring amino acid
MRGIQIKNTIKYHXASIGMAKIKNTDNTKWQEYRELXSLIHCWQKCKMVEQL

SEQ ID NO: 2307 - DNA, 201 bp, Homo sapiens
  misc_feature (1)..(1): Wherein n may be a, c, g or t
ngcgagttccactctaaacacctctggaagagacactgcgagggtcaggccatggcagacagaaggccaggttggacccgtttgaatgatggcttgcccaagaccagcagacatttcttggccttccgaaggaccttcaagggtaaaagagagcagacatgcttcatgccacctctgagccaaactctcgccaagggatcc

SEQ ID NO: 2308 - protein, 50 aa, Homo sapiens
MADRRPGWTRLNDGLPKTSRHFLAFRRTFKGKREQTCFMPPLSQTLAKGS

SEQ ID NO: 2309 - DNA, 312 bp, Homo sapiens
caattgggttttagtggaatagctgaaatacctcaaatggtggagctgcagatgcttccccaggggccatccatccagggaaaccaggctccagaagtgctgtcaccatgggtagctcgggccctgggagactgagccgcagtccccatgccgaagggagcccagagggaagcatgaagagaaaatattgtcctgagccacaatgaatgggcatattggaaaaatgtaagttacgggctccaagttcaggcagatgactagaggcggtagggttggttatctagaggctggagtgtgcttcggagagagctg

SEQ ID NO: 2310 - protein, 67 aa, Homo sapiens
MPIHCGSGQYFLFMLPSGLPSAWGLRLSLPGPELPMVTALLEPGFPGWMAPGEASAAPPFEVFQLFH

SEQ ID NO: 2311 - DNA, 347 bp, Homo sapiens
agatcttggaccatctgtgaaggcggtgatgcgaaaaggcttgccaagactgctgttaacgaacacgatcgctccgacgagcgggttgcgggaacgccaccaatgcggtggagcgtgaatggggcgcggcttcccgccatccagtagctcggacccagtcgcataaggtctgtgaggccgggaacctcaaccagttcgcccccaggtagggtaatttcgcgggcaccgccgctccagtcgcgggctttgatggccgcaaaaacccgtcgcgttcgaccttacgaaggtcgtcgaccatcattgcgtccacgacccgctgcgccaaggtctctccgcttgtgacgtcg

SEQ ID NO: 2312 - protein, 81 aa, Homo sapiens
MMVDDLRKVERDGFLRPSKPATGAAVPAKLPYLGANWLRFPASQTLCDWVRATGWREAAPHSRSTALVAFPQPARRSDRVR

SEQ ID NO: 2313 - DNA, 387 bp, Homo sapiens
cacttcgagcactcgtggggggatggggtggcagtgcttaggtttttcaatgaagtgttcagagacagcactcagacccctgccatcactccccagagccagcctgccgccaccaactcctctgcgtctgtggagacgctcagcttcaacctcagcggtgctctcaaggctggcatcactgctgccaaggagaagttcgacaccacggtgaaaaccctcagcattgactccattcagttccagagaggtggcaaggagttcctgaagaagaagcagctgagccccgatgcggtggcccagctggccttccagatggccttcctgagacagtatggccagacggtggctacctatgagtcctgcagcactgcagtcttcaagcacggc

SEQ ID NO: 2314 - protein, 129 aa, Homo sapiens
HFEHSWGDGVAVLRFFNEVFRDSTQTPAITPQSQPAATNSSASVETLSFNLSGALKAGITAAKEKFDTTVKTLSIDSIQFQRGGKEFLKKKQLSPDAVAQLAFQMAFLRQYGQTVATYESCSTAVFKHG

SEQ ID NO: 2315 - DNA, 202 bp, Homo sapiens
actagtccagcacaagggaggggagaacctacaacgttgtggttttatgaacgcagaagtgctccatccactacaaaccaatggcattacagagcatagcaaaagagagggtttaggggatgcagggcaaggcgacgtttgtgtgatctctccccccttccaggctcaggcttcaacgtggaccgccggccggctacccggg

SEQ ID NO: 2316 - protein, 52 aa, Homo sapiens
MNAEVLHPLQTNGITEHSKREGLGDAGQGDVCVISPPFQAQASTWTAGRLPG

SEQ ID NO: 2317 - DNA, 396 bp, Homo sapiens
  misc_feature (396)..(396): Wherein n may be a, c, g or t
accggtctcattgcctttgcccgcgccgcttccctgggcagctataccgccgcggcccgcgacttgtctgtctcaccgtcagccatcagcaaaagcgtgcaacgccttgaacagcacttcgcactcaagctgttcagccggaccacccgctcactcaccctgactccggaaggacgggatttgtacgagcgggccttgcgtattttgcgcgaggtggaagagatcgatcaggccgccgtggcctctcgggccgagccttccggcacgctaaaggtcaccgcgccgccgcctatcggcctgaacatcctggcgccagccattcccaggtttcgcgagcgttatccaaagctcgccatcgacctgcgcctgggcgacccgtattcggacatcattgan

SEQ ID NO: 2318 - protein, 132 aa, Homo sapiens
  misc_feature (132)..(132): Wherein Xaa may be any naturally occuring amino acid
TGLIAFARAASLGSYTAAARDLSVSPSAISKSVQRLEQHFALKLFSRTTRSLTLTPEGRDLYERALRILREVEEIDQAAVASRAEPSGTLKVTAPPPIGLNILAPAIPRFRERYPKLAIDLRLGDPYSDIIX

SEQ ID NO: 2319 - DNA, 341 bp, Homo sapiens
  misc_feature (341)..(341): Wherein n may be a, c, g or t
tctagagaacatagagttgacgaaaccagactgatgtttagagtgatagtggcgtggacttcaaaatgatataacaataataccaccactaccacctacaacaatgtcttgacatccaataaaaggggtagaaaaagtaattgtgatagataaaacacatggatagatagatagatcgatagatagacagacagatggctagatgaaaataaaaagacatgtggattctcttcttcttcaaaggtttgccagtaagcatggagatgaatgtggaattactgaaaggtctcatactaagaatttggttatatttctctgcctttctcgtagtttactgggcn

SEQ ID NO: 2320 - protein, 67 aa, Homo sapiens [sequence omitted]

SEQ ID NO: 2321 - DNA, 279 bp, Homo sapiens
  misc_feature (279)..(279): Wherein n may be a, c, g or t
ctcgaggctaggtcccgtcaacttccaggtaatgcaacactggactggcagttgataaagtttaatgcagttcctaaactagtctcagtgcaaccaatcatgattcccggaatgccgttagagcatttacagttggtttacaaatttgatacgaagcaaagactaattaaagtcaatcagcaaactaagaagactgagacgttagaccgtgacgttgtagactatattgcctttttgtgtgatgctacaactaatgatatgattttaatggggatcgcn

SEQ ID NO: 2322 - protein, 93 aa, Homo sapiens
LEARSRQLPGNATLDWQLIKFNAVPKLVSVQPIMIPGMPLEHLQLVYKFDTKQRLIKVNQQTKKTETLDRDVVDYIAFLCDATTNDMILMGIA

SEQ ID NO: 2323 - DNA, 350 bp, Homo sapiens
ccaccctccatttcttctcatcctgtctccccgccccaccccttcttcatattcttttactttatatcttaactgcctgatctttgttcatcagaaggaggttgtagaggggtgtattccttgattgtctctaactagcaggctgttgactgggaagactgtttgctgaggccaaagtttccatggaaggtggatcaagttgtccgggatttggtaggctgtctttaagatgaaaatgtattgttccttattcctcatgtgttccttatttccattacaaccacattggacatgtgtttgtaatggaaataacgaagtctactctatttgtaattatattgaccaagatc

SEQ ID NO: 2324 - protein, 55 aa, Homo sapiens
MRNKEQYIFILKTAYQIPDNLIHLPWKLWPQQTVFPVNSLLVRDNQGIHPSTTSF

SEQ ID NO: 2325 - DNA, 217 bp, Homo sapiens
  misc_feature (52)..(52): Wherein n may be a, c, g or t
atcacccgactctttcccccggacaagcgtggtgctgctatgggactgtggngggccactgccggtgtcgcgagtttcgtcggtcctgtgctcggcggcatcctcgttgacaccctgagctgggaatgggtcttcttcgtcaacgtaccggttgccgtcatcggactgtggctggctatccgtaatgtgcctgcccttgaaacccacggccacgcgt

SEQ ID NO: 2326 - protein, 72 aa, Homo sapiens
  misc_feature (18)..(18): Wherein Xaa may be any naturally occuring amino acid
ITRLFPPDKRGAAMGLWXATAGVASFVGPVLGGILVDTLSWEWVFFVNVPVAVIGLWLAIRNVPALETHGHA

SEQ ID NO: 2327 - DNA, 302 bp, Homo sapiens
gcagaccagcgctcttcaggaggctgtggcagggccaacacgcaggagctgcagtcgctgctgcagaacatgaccaactgcgagttcaacgtgaactcgttcgggcccgagggccagacggcgctgcaccagtcggtcatcgacggcaacctggagctcgtgaagctgctggtcaagttcggcgccgacatccgcctggccaaccgcgacggctggagcgcgctgcacatcgccgcgttcggtggccaccaggacatcgtgctctatctcatcaccaaggcgaagtacgcggccagcggccg

SEQ ID NO: 2328 - protein, 100 aa, Homo sapiens
ADQRSSGGCGRANTQELQSLLQNMTNCEFNVNSFGPEGQTALHQSVIDGNLELVKLLVKFGADIRLANRDGWSALHIAAFGGHQDIVLYLITKAKYAASG

SEQ ID NO: 2329 - DNA, 351 bp, Homo sapiens
cgcgttctctacttcgagagctatgtcgttatcgatccaggcatgaccacccttgagaaaggtcagctgctgaacgacgagcagtacttcgaagcgctggaagagttcggcgacgatttcgatgcccgcatgggtgccgaagctgtccgtgaactgctgcacgctatcgacctggaacacgagattggccgtctgcgtgaacaaattccgcaaaccaactccgaaaccaagatcaagaagctgtccaagcgtctgaagttgatggaagccttccagggttccggcaacttgccagagtggatggtgctgaccgttctgccggttctgccgccagatctgcgtccgctggta

SEQ ID NO: 2330 - protein, 117 aa, Homo sapiens
RVLYFESYVVIDPGMTTLEKGQLLNDEQYFEALEEFGDDFDARMGAEAVRELLHAIDLEHEIGRLREQIPQTNSETKIKKLSKRLKLMEAFQGSGNLPEWMVLTVLPVLPPDLRPLV

SEQ ID NO: 2331 - DNA, 163 bp, Homo sapiens
tacatgcactacccgcggttcccgttcgctggagggtactaccagccgccggcctacccgccacctccggggtacccgtacgcctaccagccggcctacccgccgccgttctacgcgccgtcgcaccacctgcaccagcagcagcccatggcgccgcagatct

SEQ ID NO: 2332 - protein, 54 aa, Homo sapiens
YMHYPRFPFAGGYYQPPAYPPPPGYPYAYQPAYPPPFYAPSHHLHQQQPMAPQI

SEQ ID NO: 2333 - DNA, 396 bp, Homo sapiens
  misc_feature (396)..(396): Wherein n may be a, c, g or t
gctagcttattcatatttgagaataatttgacacaatccaaaaaaagaaagaaagaaagaaaaccccagctgagatgctgattggaatggggtgaaatgatacattactttggaaagaactgacatctttatcacacagagagaaactggcagcacatatctccctttattgaagtctccttttatgtcattcagtaaatttttgtgattttcctcataaggattctgtaacatttcctgttatgctattcctgtgtgttttatacatttttactcctaagtaaactacaccaagcaaagaaagtctgagattgtatgcctgaatttcaacatcacatcatgaaatatgtgcctgtctctctttagggtctgacagagagggccccacatttccgn

SEQ ID NO: 2334 - protein, 75 aa, Homo sapiens
MLQNPYEENHKNLLNDIKGDFNKGRYVLPVSLCVIKMSVLSKVMYHFTPFQSASQLGFSFFLSFFGLCQIILKYE

SEQ ID NO: 2335 - DNA, 501 bp, Homo sapiens
  misc_feature (205)..(205): Wherein n may be a, c, g or t
  misc_feature (206)..(206): Wherein n may be a, c, g or t
  misc_feature (229)..(229): Wherein n may be a, c, g or t
  misc_feature (375)..(375): Wherein n may be a, c, g or t
  misc_feature (481)..(481): Wherein n may be a, c, g or t
  misc_feature (482)..(482): Wherein n may be a, c, g or t
tgatcaccagacacctaaggaaggcctccaccactgaaaagaccaaaacccaaaaacgcagcttaagaggaaacagactttgcagacagaaaacacaagcaccattatcttcagagatacacgggaacaccataaaaagaacaaaaaaaacccctgaaaattaaatatttgacaactaaaggaaaaaagatacacacaggtaaannactcttaccagaaagtgtttttnttcttgaaaaagagaaaagaataggaaagaagagacttttaaaaggccaaactagtcagaggtgcaacatttaaaaaataaataaatacatatttctaggaaaagaggaaagagaaaccagagagaagaaacacaaacaaagaatntaagaaaatttcccaaagctaaaggaaatgattttcaagattttaagggcccacgaaccacctaacagtacagagatttttttaaaaacacacataattatgaatnntcagataactagagtcaaa

SEQ ID NO: 2336 - protein, 56 aa, Homo sapiens
  misc_feature (32)..(32): Wherein Xaa may be any naturally occuring amino acid
MCVFKKISVLLGGSWALKILKIISFSFGKFSXILCLCFFSLVSLSSFPRNMYLFIF

SEQ ID NO: 2337 - DNA, 261 bp, Homo sapiens
gaattccatgagaagacaagggctctgtaccagactgaggccttcacagctgatttccagcagtctcgtgaggccaaaaacctcatcaatgactatgtgagcaatcagacccaggggatgatcaagaaactgatctcagaactggatgatgggacattgatggtgctggtgaattacatctactttaaaggcaaatggaagatatcctttgacccccaggacacatttgagtctgagttctacttggatgagaagagatct

SEQ ID NO: 2338 - protein, 87 aa, Homo sapiens
EFHEKTRALYQTEAFTADFQQSREAKNLINDYVSNQTQGMIKKLISELDDGTLMVLVNYIYFKGKWKISFDPQDTFESEFYLDEKRS

SEQ ID NO: 2339 - DNA, 276 bp, Homo sapiens
attccattaacgaagcctgtgttggatgaagatgaagatgaagatgaaggtgaggacgagcaaaatgattataatgcggctaccgtggagctcgatgaaaatgagataccagaaggtggggcaaggatacagcgtgataagaatggtgatgttgtaagagttgtttacggtaagaaaaagaactttgatgctgatgaggatgttaacgaaataaaagctagggatactaccgaggagaccgaagtggttaagaaattagaagaacttgcgtctaga

SEQ ID NO: 2340 - protein, 92 aa, Homo sapiens
IPLTKPVLDEDEDEDEGEDEQNDYNAATVELDENEIPEGGARIQRDKNGDVVRVVYGKKKNFDADEDVNEIKARDTTEETEVVKKLEELASR

SEQ ID NO: 2341 - DNA, 249 bp, Homo sapiens
gatcacgagcgcatcaaagcagccgcgggccactttgtccccgacggtagcctgcccacgttggagactggtacccgtcaccgcacggcagatcggctctcccaacaaaccggtgcgccggtggtagtcgtctcggcgtcgatggcagtgatgtcgctcttccttagcggccggcggtacctgatcgagaggcctgaacagttgctcgctcgggccaatcaggcccttgccaccctggcaagctaccga

SEQ ID NO: 2342 - protein, 83 aa, Homo sapiens
DHERIKAAAGHFVPDGSLPTLETGTRHRTADRLSQQTGAPVVVVSASMAVMSLFLSGRRYLIERPEQLLARANQALATLASYR

SEQ ID NO: 2343 - DNA, 429 bp, Homo sapiens
cagctggcagtttccagaaagcatcagtgaggagttgagtgcatttgtggctaaaataaggggatctgtgaactttctgtaaattgagggctgaatcagaggcatctgagccctgacataggcccttggttgccaatgcacttgcccctggctgctggctactctgctgggaggtggttgcttgcattagacataaaatagcaagcgacgtgttgtttactttgagaaaatatttctcccatttgtctttcggccttatgggttctctaatccgtaattaaccccaaaattggggatattttcccagatactcatttttagagctgtctcaaagtcctttctagatggagaagagatataaattagactcacagagaggaaattaaataattctgctttttggaattggattaatgaaaacattgatca

SEQ ID NO: 2344 - protein, 62 aa, Homo sapiens
MQATTSQQSSQQPGASALATKGLCQGSDASDSALNLQKVHRSPYFSHKCTQLLTDAFWKLPA

SEQ ID NO: 2345 - DNA, 402 bp, Homo sapiens
aaatctaaaggtttaactgaagaacaagcgcgtgcacaattagaagacactgttgtattaggtccgatgatgttagaagcgggcgaagtagatggtttagtctcaggtgccgttcacaccactgcaaatacgattcgtccaccaatgcaaatcatcaaaacagcaccaggtagctcaattatctcgtctgtattcttcatgctattaccagaccaagtattagtatatggagactgtgcagtaaacccagagccaaccgctgaacaacttgctgaaatcgcaattcgatcggctgaatctgcaaaagcatttggtttaaatccgaaagtagcaatgctttcttactcaactggtacttctggttcaggtcaatctgtagagaaagtaaaagaagctacgcgt

SEQ ID NO: 2346 - protein, 134 aa, Homo sapiens
KSKGLTEEQARAQLEDTVVLGPMMLEAGEVDGLVSGAVHTTANTIRPPMQIIKTAPGSSIISSVFFMLLPDQVLVYGDCAVNPEPTAEQLAEIAIRSAESAKAFGLNPKVAMLSYSTGTSGSGQSVEKVKEATR

SEQ ID NO: 2347 - DNA, 294 bp, Homo sapiens
gtcgacaaggtctctgggacccatgcgcgattggccatgttatgtataccatgcattctggatcaacgcttcagcttccgagtgtggagctcccgtttggagaagaagccacaatggatccaaccttcctgccttggagacggcacaggagagaaaggcgcagaccatgtgtctacggccctcccatcaagccgtgcctgataagggaggatgccagtcaatagatatatagtcctgaagagcaccgtggcccatttgcaagatgtgctgtgacatgatttcactgtcatgcat

SEQ ID NO: 2348 - protein, 75 aa, Homo sapiens
MTVKSCHSTSCKWATVLFRTIYLLTGILPYQARLDGRAVDTWSAPFSPVPSPRQEGWIHCGFFSKRELHTRKLKR

SEQ ID NO: 2349 - DNA, 178 bp, Homo sapiens
cagctggacccttacctcaacgtcgatccgggaacgatgaacccgttccagcatggcgaggtgttcgtcaccgaggacggcgcggagactgacctcgacatcggccactacgagcgtttccttaatgagaacttgtcagggcaggccaatgtgaccactggcaaggtgtactccgcgg

SEQ ID NO: 2350 - protein, 59 aa, Homo sapiens
QLDPYLNVDPGTMNPFQHGEVFVTEDGAETDLDIGHYERFLNENLSGQANVTTGKVYSA

SEQ ID NO: 2351 - DNA, 334 bp, Homo sapiens
  misc_feature (1)..(1): Wherein n may be a, c, g or t
ngccgtacatgccaagtctccctgagaccctgctccatgagggctggctccctccccgacctggtcttttggttcaaagtcagtcctggagttatgtctgccaattgaccccaacctccagaaaactcagaaacagcctgtcctctcaggcctgcaaaccaggagcagccaggtccagccctgacttatgcaagtaactaccatagaaggcctgctgtgcagcctatgcctctcaacctggatcaagggcaatgtggagaaaccacattattgcttgactgtagtgcagtattccaacaatcattttaaatgtgcactcgtgtaaccatgatca

SEQ ID NO: 2352 - protein, 62 aa, Homo sapiens [sequence omitted]

SEQ ID NO: 2353 - DNA, 252 bp, Homo sapiens
  misc_feature (1)..(1): Wherein n may be a, c, g or t
nactgttggagtacatcttgtactacctcctctactacctcctctactacctctatcttttctgttacgtctagttcctcatccattacattgtcctcatctgagcataccacagtcgatagccgtacttcttcaccctcttccaccttggtgccagtgtcctcgagtagcagcacactatcaactccaaaagtgacctcaatgacccctagtacgtcatcaacgataccaatagttacctcagtggaacta

SEQ ID NO: 2354 - protein, 84 aa, Homo sapiens
  misc_feature (1)..(1): Wherein Xaa may be any naturally occuring amino acid
XCWSTSCTTSSTTSSTTSIFSVTSSSSSITLSSSEHTTVDSRTSSPSSTLVPVSSSSSTLSTPKVTSMTPSTSSTIPIVTSVEL

SEQ ID NO: 2355 - DNA, 333 bp, Homo sapiens
tccggaacccccgacaaaatgactggcttgaacgttgggtccatccgatgtgactccatttattaaggcggcacaagacaaaatgacaaaattctggctctatattttaccgtttttatcgttgcttggcactcttaagccccagggacgggaaaagccaccctaccttcactgatggatgagcgagacgctaggcctctctcacaaaaaaccaagtgcatccattgctcataggatgctctcctatctcctgagttcccacatgaaggcaacgaaaacgctctcctcccaccccctcaggaagaatagaacgcactctcaggagaaccggga

SEQ ID NO: 2356 - protein, 51 aa, Homo sapiens
MSETLGLSHKKPSASIAHRMLSYLLSSHMKATKTLSSHPLRKNRTHSQENR

SEQ ID NO: 2357 - DNA, 270 bp, Homo sapiens
ggcgccgcaccctctgcaccagcacctccgtctcctgggggctgaagttgggcttgcgtgtcttggtgcgggagtgggggcccggccgcaggggtgtggagacccggcccggcacccagcagcagggctgccgcggccggctcggggctgcagctctgctggcagatggctttgctgctgctggacccaacagcttctccttgctctgacaccatggaggccaagtccttgatgatctgattcacattcaacaagttgctctccatctgc

SEQ ID NO: 2358 - protein, 88 aa, Homo sapiens
MESNLLNVNQIIKDLASMVSEQGEAVGSSSSKAICQQSCSPEPAAAALLLGAGPGLHTPAAGPPLPHQDTQAQLQPPGDGGAGAEGAA

SEQ ID NO: 2359 - DNA, 192 bp, Homo sapiens
ctagcctgtgaagacttaaagaaagagcagaacaaaaaggctggtgaagaaaaggccaggatgatatacgaggattacatttctatactgtcaccgaaagaggtcagcctggattctcgagttagagaggtgatcaacaggagtctgctggaccccagcccacacatgtatgaagacgcccagcttcagatc

SEQ ID NO: 2360 - protein, 64 aa, Homo sapiens
LACEDLKKEQNKKAGEEKARMIYEDYISILSPKEVSLDSRVREVINRSLLDPSPHMYEDAQLQI

SEQ ID NO: 2361 - DNA, 314 bp, Homo sapiens
  misc_feature (314)..(314): Wherein n may be a, c, g or t
tgatcaaccaaccaactaatcagatccgtccatgagaaggctaatggtggaagaaaaaagatggggaggaacaaagatgaagaaaccacaatagggccaagcactagagaaaggctggtaactacataaaaccagctcctattacttaggacaatgatatttagcatggggtcacaccaatgcctatgaggacttttcagtacagaaatttctgggctgaaattgtgattaagaaagcactataaatcagtctgatgagaatttccatcagataatcactgatgatgttacctgggatgtgtctcttccctgcn

SEQ ID NO: 2362 - protein, 55 aa, Homo sapiens
MLNIIVLSNRSWFYVVTSLSLVLGPIVVSSSLFLPIFFLPPLAFSWTDLISWLVD

SEQ ID NO: 2363 - DNA, 398 bp, Homo sapiens
  misc_feature (379)..(379): Wherein n may be a, c, g or t
atcatggacttatgcaaagccctcgtccacatgcacgacaagagcattgtccaccgggacctcaagccggaaaaccttttggttcagcgaaatgaggacaaatctactaccttgaaattggctgattttggacttgcaaagcatgtggtgagacctatatttactgtgtgtgggaccccaacttacgtagctcccgaaattctttctgagaaaggttatggactggaggtggacatgtgggctgctggcgtgatcctctatatcctgctgtgtggctttcccccattccgcatcccttagagggaccaggacgagctctttaacatcatccagctgggccactttgagttcctccccccttactgggacaatatctctnatgctgctaagatctggtg

SEQ ID NO: 2364 - protein, 99 aa, Homo sapiens
IMDLCKALVHMHDKSIVHRDLKPENLLVQRNEDKSTTLKLADFGLAKHVVRPIFTVCGTPTYVAPEILSEKGYGLEVDMWAAGVILYILLCGFPPFRIP

SEQ ID NO: 2365 - DNA, 343 bp, Homo sapiens
acgcgtgaagggggagggtcatggcctcctgggcttcaaggaggagctggggctggggtgggggcgtggtgcattcatccccggccgcagctgatctggagccatctgtagcgaaatgcttgctgagcaaattacgagggtcaacaggagcagggcagacgcttctcccacctgctggccagtgttccctcggctaccgtgcactcagccccacagtgacccctgagtggataccggccctgcctgccctgggctctcaatgggggctcggggcctcacagggccagcacgagccacttgccagggtctccaacagaccctgagcctggcagtccctgggccc

SEQ ID NO: 2366 - protein, 100 aa, Homo sapiens [sequence omitted]

SEQ ID NO: 2367 - DNA, 498 bp, Homo sapiens
ggccactataagaactcatctcagatttccacagttagtgaacaaaaatcggaatcttactattctgcggcaacgagtatgcctccagaggaagagacttacttgacaaggccattgcccagcacacccaatgaggatagcagagttacatcgaatttgaaacgtgacgacacattgaaggctattcatgatagggcaaatcatacctctacttcgacaaacaaacaagatgatgacatgtacgaggacatcattgaggaaacgcccaagaaaactaaactcaagaaggatacgaaaaaaaagctcaataaaaaaaaatctgtgaaggaattgcgatcctttgatatcgacacactaaatcaactgttgagtgtgacaaagggaaccttaatcgggtctgaatttgcgcaactggggatgaaaattgaggagaaacgtgccctggagagactagtagactctttgtccaggttaacagcagacatggttcttgatccg

SEQ ID NO: 2368 - protein, 166 aa, Homo sapiens
GHYKNSSQISTVSEQKSESYYSAATSMPPEEETYLTRPLPSTPNEDSRVTSNLKRDDTLKAIHDRANHTSTSTNKQDDDMYEDIIEETPKKTKLKKDTKKKLNKKKSVKELRSFDIDTLNQLLSVTKGTLIGSEFAQLGMKIEEKRALERLVDSLSRLTADMVLDP

SEQ ID NO: 2369 - DNA, 274 bp, Homo sapiens
  misc_feature (259)..(259): Wherein n may be a, c, g or t
  misc_feature (260)..(260): Wherein n may be a, c, g or t
tgtacacttttccattttaggacatcattttcaatgcctatataatatagagtgtaaagtacagtgtataatattatacactataatataaactatgtattatgtgtgtgtatatatattgaaaccatttatctgttgaacatttaaattgcttccagtgttctgctcttataatgtgtggtgaatatctttgtgttttaacctgtttcctgttcaggattattttcataggatacagtcttagaggtgaaattactgnngcatagtgacacta

SEQ ID NO: 2370 - protein, 51 aa, Homo sapiens [sequence omitted]

SEQ ID NO: 2371 - DNA, 201 bp, Homo sapiens
tgtacatctttgatgtttttgcaagtggctgatttagacaattccatgttatcagctacctctacagggcccctattattagaccattcctccagaggggttagctggctgtcatttgctactagacggtcactttcaccatttcctggaaagaaaacactctcctcagtaggagtacatatcactgttggtgtttctaga

SEQ ID NO: 2372 - protein, 63 aa, Homo sapiens [sequence omitted]

SEQ ID NO: 2373 - DNA, 318 bp, Homo sapiens
  misc_feature (1)..(1): Wherein n may be a, c, g or t
  misc_feature (2)..(2): Wherein n may be a, c, g or t
nnacgcgtgctcgaagcggtgctggacgtcgtcgtcgagctgcttgaagagggcggggtccaggcgatcaccatcgccgaggtcgccgcgcgctctggagtcaacgcctcctcgatctaccgtcgctggcacggcgttgatgctctcatcctcgacgccgcccaggacctgagcctgggtgccatcgatgtggccgaccccgggttccttcaaggaagacttgtgccccccgccggtatctgtggccgcattcctaggcacggatctcggggtcgccatggctcgagccctcatccacgtgcccccggaggttctaga

SEQ ID NO: 2374 - protein, 106 aa, Homo sapiens
  misc_feature (1)..(1): Wherein Xaa may be any naturally occuring amino acid
XRVLEAVLDVVVELLEEGGVQAITIAEVAARSGVNASSIYRRWHGVDALILDAAQDLSLGAIDVADPGFLQGRLVPPAGICGRIPRHGSRGRHGSSPHPRAPGGSR

SEQ ID NO: 2375 - DNA, 282 bp, Homo sapiens
tccggaccttgggtgtgagcccctaagaatatttctcaggggattttgacaggatcacactctgtagctcaagcaggcttgtaattctctacaaagacaagcctgcctctgatctctcaatcctgctgtagcaatcttctgagtgctgagaataccaaacttgggccaccatgcccagctcctagagagcaattctatggtcaagacatgatcaagatgcctgtgacaccatggcagagtcatgccaaggttttggggtttgaaaccctggatgtgagtctt

SEQ ID NO: 2376 - protein, 62 aa, Homo sapiens
MTLPWCHRHLDHVLTIELLSRSWAWWPKFGILSTQKIATAGLRDQRQACLCRELQACLSYRV

SEQ ID NO: 2377 - DNA, 309 bp, Homo sapiens
  misc_feature (265)..(265): Wherein n may be a, c, g or t
tctggaaatgactcttgcggcgtggatacagacgccagatacaacgacactgatctgtgctggggccccctgcgccgggtggatgtctaccgaatctatctggccatcttcaccgtccttcttggcccgttcaccttctttgatgtccagaagactaagtacctgcagatcttgacctctatgatgagatggatcgcctttgccatcatgattgtgctggccctggtgcgcatcgggaaaggacaaggagaggggcacccgcccntagccaacttcttgggggtccagaacctgtttggggtgtgtgtc

SEQ ID NO: 2378 - protein, 103 aa, Homo sapiens
  misc_feature (89)..(89): Wherein Xaa may be any naturally occuring amino acid
SGNDSCGVDTDARYNDTDLCWGPLRRVDVYRIYLAIFTVLLGPFTFFDVQKTKYLQILTSMMRWIAFAIMIVLALVRIGKGQGEGHPPXANFLGVQNLFGVCV

SEQ ID NO: 2379 - DNA, 207 bp, Homo sapiens
gctgggacttttggtagactccgatacacactgttggaggcagtgccagggcccgagggtcgtgaggcattctcactgaacagctcaacaggggaattgcgggcacgggtaccttttgactatgagcatacaggaagcttccgtctactagtgggcgctgctgatgctgggaatctctcggcttctgtcaccgtgtcggtgctgatc

SEQ ID NO: 2380 - protein, 69 aa, Homo sapiens
AGTFGRLRYTLLEAVPGPEGREAFSLNSSTGELRARVPFDYEHTGSFRLLVGAADAGNLSASVTVSVLI

SEQ ID NO: 2381 - DNA, 231 bp, Homo sapiens
ctagtggtctttaacacctgcgcggtgcgcgacaacgcggaccagcgcctgtacggatcgctcgggcagctgaagaacgtcaaggccgaccacccgggcatgcagatcgccgtcggcggttgtcttgcgcagaaagaccgcgacaccgtcatttcaaaggccccctgggtggacgctgtttttggcacccacaacatctccgcgctgccagcgctgctggaccgcgcacgc

SEQ ID NO: 2382 - protein, 77 aa, Homo sapiens
LVVFNTCAVRDNADQRLYGSLGQLKNVKADHPGMQIAVGGCLAQKDRDTVISKAPWVDAVFGTHNISALPALLDRAR

SEQ ID NO: 2383 - DNA, 223 bp, Homo sapiens
cctaggcttgaatcttggttctgggaccatcagtgactgttctctaacctcactgagcttcttccttaaatggacagtgatgacaataagtaccacttaatatgactgtagggaggattaacaagtaaaggtaagaaaggcacttagtccagcgcctggccagtagtgaatactcagataaggtccccagacgtgtctcttgacttagggacatggagggccc

SEQ ID NO: 2384 - protein, 54 aa, Homo sapiens
MSLSQETRLGTLSEYSLLARRWTKCLSYLYLLILPTVILSGTYCHHCPFKEEAQ

SEQ ID NO: 2385 - DNA, 269 bp, Homo sapiens
cttaagcatgaagtcgcaaggccacgaagcagaggccaggaagccagcaggacaaaaaagccagtgtgcaaacaaggctgagaagttacagagggaatctacaaacccaccctctgccgggcactgggccaggggctctatatatatcttctgtttgctccttccaagaaccctttcagcagaaactatcattcctattttgtagataagaagactgaggttcaggaaggatacacagtttgcccacagtctggaggaggatgtggcag

SEQ ID NO: 2386 - protein, 65 aa, Homo sapiens [sequence omitted]

SEQ ID NO: 2387 - DNA, 339 bp, Homo sapiens
actagtgttatatgtgttcagcagactatttctgcctagtgattgcagtccctgagcatgagggtctcacagtagatgtctgcaggactgtaagtttggttgtctgactccctggccaccctgtgtgggctgtgactgtctctcagagctatacccgccctttctctgctggcagcccgacagagctggctcaaccatcggaggtcgcaggccaccatcccgtggcccacctggcagccttccaggtgaaggtgagacaaacaaggcatgacctgggggccgcccggctccccatcacaaacgccacaaacaccacaaacacaacccaccctggcgcgc

SEQ ID NO: 2388 - protein, 77 aa, Homo sapiens [sequence omitted]

SEQ ID NO: 2389 - DNA, 382 bp, Homo sapiens
agatcttaatgtatcttctaaaatgacaataaaagagaagagtgaatttctttttctgtcaatcagtgatttgtgtgaaattcttgcctatataatgatgttgggcaatgcttgcaaaaaagtgtatttagaatcaattcacgttgaaataaactctggcaagggcacattcaggacacgagttcgtttttcctgggtcccatgtctatggcctcattataaggaaattttttaatttttttgtttaatacacacaaagatatacatacagacatacagcaactttcagaaacctgtatattatatggctccaagtatttaaaaaaatcaagaattatttgggctgcttgctcaagatatttcataattaggaagagatacg

SEQ ID NO: 2390 - protein, 70 aa, Homo sapiens
MTIKEKSEFLFLSISDLCEILAYIMMLGNACKKVYLESIHVEINSGKGTFRTRVRFSWVPCLWPHYKEIF

SEQ ID NO: 2391 - DNA, 177 bp, Homo sapiens
tcgagagtgttggcagaaaaggacgtggacgggttcgggcccaccaacattggcgaattgaataagaagaacggacacccattctttttgccctgcacgcccaaggggatcattgagctgcttcacaaggccaacgtcacgattgaaggttcccggtccgttgtgatcggaagatct

SEQ ID NO: 2392 - protein, 59 aa, Homo sapiens
SRVLAEKDVDGFGPTNIGELNKKNGHPFFLPCTPKGIIELLHKANVTIEGSRSVVIGRS

SEQ ID NO: 2393 - DNA, 345 bp, Homo sapiens
tcatgatctaccgagacggtctgcttctggcagtccctctacagcgaactttggattgttctgattcgccactctcaagtcaagtcatggatgctctttcttcacccaccgggcatcaaaaagcaccgaatgaggtcgttgcgatacgcttgtggtacgtttcgtcggcacagcaaatgaagttaaggaagcagtatgcgctggatgattgttgcagccacggtgagtctggcaatcggttcggccagcggtcaggccgcccagatctacaaatgggtcgatgcgcagggggtcacgcatttcgacgcccaaccgcctgcggggcagccgggtcggagagaggct

SEQ ID NO: 2394 - protein, 114 aa, Homo sapiens
MIYRDGLLLAVPLQRTLDCSDSPLSSQVMDALSSPTGHQKAPNEVVAIRLWYVSSAQQMKLRKQYALDDCCSHGESGNRFGQRSGRPDLQMGRCAGGHAFRRPTACGAAGSERG

SEQ ID NO: 2395 - DNA, 404 bp, Homo sapiens
  misc_feature (315)..(315): Wherein n may be a, c, g or t
agatctggaatcctcttttcaataatcatggcaaatggtcacctttggggtagagagcagagttccacaagcaaaattacccataggacagataactgtctttccttggccaaatagctggtcattttgatgtccccccaacttgggaaaaactttaaatccctttttgggatctccaaggtgaccaactcctacccagcagccaccagtggctttcattgttgaagatggcttattggcaccaagaaggcttgagagaatatgcagaaaattctatagaagaacatagtgtacttctgtaaagaagaacatggngaaccttcaaataaagaagggacaaagcaatcatagggcgttggaagtaggccataagggagactatctaaaccaactgatttctctgg

SEQ ID NO: 2396 - protein, 66 aa, Homo sapiens [sequence omitted]

SEQ ID NO: 2397 - DNA, 317 bp, Homo sapiens
  misc_feature (1)..(1): Wherein n may be a, c, g or t
  misc_feature (2)..(2): Wherein n may be a, c, g or t
nnggatccctatgatgccgacttacatgcggcagtgtggacaataaccgatgctgcgttcgcgcagcgtcgcaaaacacttcgtgctgccctcaaacccctgacaggtagtggagaggcggcggagcaccttctgaaagcagccggcattgatccaacattgcgaggggagaggctgaccgcggccgattacgtgcggctagcacaatgcggggcatcgctactgtaggaagctgctgcagagagttgcgacagagaatcatggcagagcgggtgtacctatcgtgttctggaacctccgctttatgcaggacgcgt

SEQ ID NO: 2398 - protein, 75 aa, Homo sapiens
  misc_feature (1)..(1): Wherein Xaa may be any naturally occuring amino acid
XDPYDADLHAAVWTITDAAFAQRRKTLRAALKPLTGSGEAAEHLLKAAGIDPTLRGERLTAADYVRLAQCGASLL

SEQ ID NO: 2399 - DNA, 442 bp, Homo sapiens
  misc_feature (427)..(427): Wherein n may be a, c, g or t
  misc_feature (440)..(440): Wherein n may be a, c, g or t
agatctcagggccaccatagaagaaatccaagcatgctgaggaagccacgccacacaggagggcgcctgtgtgcatgccagctgacagtcccaattgccaagttattgcagcccccaccacaccgggcctgattccagcctgctacctcccttcccctgctgaggtcccacaagctcaacgaacacgggcaaagaaagccagccctgctgccggcacctgcattcctgatccctggaatccttgcacattgcccaacggctgtgataggaaaccaccgtgtgtgtgtgtgttttggggggaggtgtcatttgtaacacagcaggcagcactgaaacagacaatagacagcttccaccccactacacgcctgcgacaacacagcccggctgcacaggctctcgtatgcgaacatcatgcttgcagtancccgggtcttgcncg

SEQ ID NO: 2400 - protein, 122 aa, Homo sapiens
  misc_feature (118)..(118): Wherein Xaa may be any naturally occuring amino acid
MPADSPNCQVIAAPTTPGLIPACYLPSPAEVPQAQRTRAKKASPAAGTCIPDPWNPCTLPNGCDRKPPCVCVFWGEVSFVTQQAALKQTIDSFHPTTRLRQHSPAAQALVCEHHACSXPGLA

SEQ ID NO: 2401 - DNA, 273 bp, Homo sapiens
ggaggactgccttttgaccctcacttcaatatcaacaaagcagtctctaatatcatttgctctgtcacctttggggagcgctttgagtaccatgacagtcagtttcaggagatgctgaggctactggatgaggccatgtgtttggagtcatcaatgatgtgccagctctacaatatctttccaaggatacttcagtatcttcctggatcacaccaaacacttttcagcacctggagaaaactgaagttgtttatttctgatattattaagaat

SEQ ID NO: 2402 - protein, 91 aa, Homo sapiens
GGLPFDPHFNINKAVSNIICSVTFGERFEYHDSQFQEMLRLLDEAMCLESSMMCQLYNIFPRILQYLPGSHQTLFSTWRKLKLFISDIIKN

SEQ ID NO: 2403 - DNA, 225 bp, Homo sapiens
atcatcaccgaatacaacctgctcaaggtcgtggacctgggcaatgcacggagcctcagccaggagaaggtgctgccctcagacaagttcaaggactacctagagaccatggctccagagctcctggagggccagggggctgttccacagacagacatctgggccatcggtgtgacagccttcatcatgctgagcgccgagtacccggtgagcagcgagggtgca

SEQ ID NO: 2404 - protein, 75 aa, Homo sapiens
IITEYNLLKVVDLGNARSLSQEKVLPSDKFKDYLETMAPELLEGQGAVPQTDIWAIGVTAFIMLSAEYPVSSEGA

SEQ ID NO: 2405 - DNA, 312 bp, Homo sapiens
gtcgacatataactactaaatttattttagagactcacatctagttggctgatgggagagagagagaggaaatggtaaaggcacactttctcttaagttttctaggcagaaattttttgcctagtacagccagtcccctcctggctatatataacatgtacaacatcactgtgtgatttctcatgttgcaccctctatccccataagatgtggatctttttgaagtcagggacctcaattccatcctctacttccacgtagcacagaaaagtataatgtttgtattataaacttaattatttctgttgatca

SEQ ID NO: 2406 - protein, 67 aa, Homo sapiens
MELRSLTSKRSTSYGDRGCNMRNHTVMLYMLYIARRGLAVLGKKFLPRKLKRKCAFTISSLSLPSAN

SEQ ID NO: 2407 - DNA, 207 bp, Homo sapiens
tccggaaccgagggagaagccgaaaggagggagagttgctggggcttcccggtgtggttctttagggaggagatgttgggtctagggcacccccagtgtgtggcgaaaatggctttccaggaaccgatagagctttgcgcactttgaccctccttcctttctccttttccccccaccccgaagtctccgggtgtcatgcctcaattg

SEQ ID NO: 2408 - protein, 65 aa, Homo sapiens
MTPGDFGVGGKGERKEGQSAQSSIGSWKAIFATHWGCPRPNISSLKNHTGKPQQLSLLSASPSVP

SEQ ID NO: 2409 - DNA, 255 bp, Homo sapiens
ccggtactgaccactctgggtctgaacggttatcaactgacggttgagggtaccgggactacggatagcttcaacgttctgggtaacaccaccttggccggtggtaacggtgtgaatacctatgaattgaagtccaggactacgcaggccggtgtcaccattaccgactttgacagtaccaaagacaagattgttgacgctgcttctgccttgacaatttctgatgatgccagcggaacttcggaaactaactac

SEQ ID NO: 2410 - protein, 85 aa, Homo sapiens
PVLTTLGLNGYQLTVEGTGTTDSFNVLGNTTLAGGNGVNTYELKSRTTQAGVTITDFDSTKDKIVDAASALTISDDASGTSETNY

SEQ ID NO: 2411 - DNA, 303 bp, Homo sapiens
tcatgacctcggcagcgctggccgccgccgagcagatcgcggcaagccgcgcagccgcctgatgggagatcggccatgaccaataacaccaagaagatctacgtctcagacgtgacgctgcgcgacggtatgcacgcgatccgtcatcagtattcgctggagcatgccgttgccattgcccgcgcgctggacgatgcgggtgtcgacagcattgaagtggcgcacggcgacgggctgtccggctcgagcttcaactacggcttcggcgcgcataccgacctggagtggattgccgccgttgcc

SEQ ID NO: 2412 - protein, 76 aa, Homo sapiens
MTNNTKKIYVSDVTLRDGMHAIRHQYSLEHAVAIARALDDAGVDSIEVAHGDGLSGSSFNYGFGAHTDLEWIAAVA

SEQ ID NO: 2413 - DNA, 354 bp, Homo sapiens
  misc_feature (95)..(95): Wherein n may be a, c, g or t
  misc_feature (225)..(225): Wherein n may be a, c, g or t
agatctgggatgcatgccttcactcatctatccaacaaatatttgggggcgcatgtcctggaaacttgaacacaaagacaaaagagccctaggcnctgcgggaagcacacccaggcatggagacctgaggggccatgggtggcatgtgtgagccaagccctggaaaggtggagtggggaccctctgctgtcggtgtggggaggcatctttcccaggtcattccanggcattccagggagtgagagcagcagatgaaaaagcaaagacacatatccatgatagtggacttggtgaactggacggtttttgctggtgtggagacatcaaagctcaacttgctgggaaggagaattc

SEQ ID NO: 2414 - protein, 68 aa, Homo sapiens
  misc_feature (46)..(46): Wherein Xaa may be any naturally occuring amino acid
MPWNDLGKMPPHTDSRGSPLHLSRAWLTHATHGPSGLHAWVCFPQXLGLFCLCVQVSRTCAPKYLLDR

SEQ ID NO: 2415 - DNA, 419 bp, Homo sapiens
  misc_feature (343)..(343): Wherein n may be a, c, g or t
gatccagattttgtctttaaccgacctgaatatcgcaaagctactatcctcatcacgggagataactttggagctggttcttcgagggagcacgctgcttgggcgctagcagactatggttttaaggtcgtaattgcaggatcttttggagatattcattacaataatgaactcaataatggcatgttgccaattgttcaaccaagggaagttagagaaaaactcgcccagctccaaccaactgaccaagtgacggttgacttggaacaacaaagaatcatttcatcagtcggagaatcacctttcgagattgatagcgaatggaaacacgagctcttaaatnggttggatgatatcggtattactttgcggtatgaagatttgattgctgcttatgagaaacaacgtcagcctactgg

SEQ ID NO: 2416 - protein, 139 aa, Homo sapiens
  misc_feature (115)..(115): Wherein Xaa may be any naturally occuring amino acid
DPDFVFNRPEYRKATILITGDNFGAGSSREHAAWALADYGFKVVIAGSFGDIHYNNELNNGMLPIVQPREVREKLAQLQPTDQVTVDLEQQRIISSVGESPFEIDSEWKHELLNXLDDIGITLRYEDLIAAYEKQRQPT

SEQ ID NO: 2417 - DNA, 436 bp, Homo sapiens
tcatgacagcacgatgattaatctttccagaagccagaggggctcaggatttgttggacaaagtccttactctaaacactggctaatggggcagaaaactgtagtgcatgtgtgaggctgtttggagagaaaagtcagaatcccagaccccatgctgtggtggatccgatctgaacactgacaggcaaagggaccaggctgccaggccacctcctcccaggccagggtccctgggaccaggagggggcgagagctcccttggtcacaaacacaccaagctgccatgccgacgcctaccaccccaggcagctaggaagagaggagcttggtgatctttacagaaggtcctgcagcagtcggcactgctgagagctgagtggaggcaaggccagcaagctgtgctgcccctgtgagcggaccctgccctcagagatct

SEQ ID NO: 2418 - protein, 74 aa, Homo sapiens [sequence omitted]

SEQ ID NO: 2419 - DNA, 381 bp, Homo sapiens
  misc_feature (336)..(336): Wherein n may be a, c, g or t
agatctgggcttttgcagattcacacaggaaaaacacagtatttgtaaaaaaaagtcacacgcacacaatccccaacactacgagcactgtgagttacatttgcttattaatttaaaaatattttcaaggatagttttaaagggaagagatttgaataaaaataataagtactttatttctgaatttaggcagtatttggaaactaaaagaaacattaagaaaggtatgataactcactgttttaaaaaatgcaaacaccttataagtatcacaagcctgtatttttttaaattggtggttgcttcttttctccattggaagataccgagcagacnattcacagttcatgtgagtttacttatcagtccaaaagaaatact

SEQ ID NO: 2420 - protein, 70 aa, Homo sapiens
  misc_feature (5)..(5): Wherein Xaa may be any naturally occuring amino acid
MNCEXSARYLPMEKRSNHQFKKIQACDTYKVFAFFKTVSYHTFLNVSFSFQILPKFRNKVLIIFIQISSL

SEQ ID NO: 2421 - DNA, 455 bp, Homo sapiens
  misc_feature (1)..(1): Wherein n may be a, c, g or t
  misc_feature (2)..(2): Wherein n may be a, c, g or t
  misc_feature (3)..(3): Wherein n may be a, c, g or t
  misc_feature (4)..(4): Wherein n may be a, c, g or t
  misc_feature (5)..(5): Wherein n may be a, c, g or t
  misc_feature (6)..(6): Wherein n may be a, c, g or t
  misc_feature (7)..(7): Wherein n may be a, c, g or t
  misc_feature (8)..(8): Wherein n may be a, c, g or t
  misc_feature (9)..(9): Wherein n may be a, c, g or t
  misc_feature (11)..(11): Wherein n may be a, c, g or t
  misc_feature (13)..(13): Wherein n may be a, c, g or t
  misc_feature (14)..(14): Wherein n may be a, c, g or t
nnnnnnnnngngnncggtgaatatgaaagcgccggtataaaatttccattttacattagcgatttttactcaagcacccttgcgtcagtcatcaaacaatcgtcattgaaacttacaagaaaaattagttacgccatacagttatgttcagcgctttcgcatttggcctctcgatcaattattcattgtgatgtcaagccagataacatttgtgtggatggattgaattgcgtccttgctgattttgggctagctgtaaacgtcaatggcgatgcaggagtattagaacttccgtccctccatcgctatagaacccctgatattgtcgaggctaaaaaaaatcaaaccctgccaacatcaaaatcagatgtatttcagttgggcttggtactcgcggagctattcacagggagaaatccatgcgtcgtatcagactctgggtcagatgaggtacc

SEQ ID NO: 2422 - protein, 151 aa, Homo sapiens
  misc_feature (1)..(1): Wherein Xaa may be any naturally occuring amino acid
  misc_feature (2)..(2): Wherein Xaa may be any naturally occuring amino acid
  misc_feature (3)..(3): Wherein Xaa may be any naturally occuring amino acid
  misc_feature (4)..(4): Wherein Xaa may be any naturally occuring amino acid
  misc_feature (5)..(5): Wherein Xaa may be any naturally occuring amino acid
XXXXXGEYESAGIKFPFYISDFYSSTLASVIKQSSLKLTRKISYAIQLCSALSHLASRSIIHCDVKPDNICVDGLNCVLADFGLAVNVNGDAGVLELPSLHRYRTPDIVEAKKNQTLPTSKSDVFQLGLVLAELFTGRNPCVVSDSGSDEV

SEQ ID NO: 2423 - DNA, 350 bp, Homo sapiens
  misc_feature (1)..(1): Wherein n may be a, c, g or t
  misc_feature (2)..(2): Wherein n may be a, c, g or t
  misc_feature (139)..(139): Wherein n may be a, c, g or t
  misc_feature (140)..(140): Wherein n may be a, c, g or t
  misc_feature (294)..(294): Wherein n may be a, c, g or t
nntccggagcgtacgtgtttcgagcgtgatcgggatcgtatcgtccactccacatcgttccgacggctggctggcaaaacccaggtcgtcggccaccccactgatcaccagcgcactcgcctcacccatgccttgaaanngggttcagtcgcacggccgatcgcggcggggatcggggcgaatatcaccctggccgacgctatggctctaggccacgactgcggtcacgggccgggagggcacgcctccgagcaggcctttgacgcctttatcccggaaggatttgaccacggnccatggggagctgacgtcagcttggccagcctgaatttatgtgctgaaactctcga

SEQ ID NO: 2424 - protein, 116 aa, Homo sapiens
  misc_feature (1)..(1): Wherein Xaa may be any naturally occuring amino acid
  misc_feature (47)..(47): Wherein Xaa may be any naturally occuring amino acid
XPERTCFERDRDRIVHSTSFRRLAGKTQVVGHPTDHQRTRLTHALKXGSVARPIAAGIGANITLADAMALGHDCGHGPGGHASEQAFDAFIPEGFDHGPWGADVSLASLNLCAETL

SEQ ID NO: 2425 - DNA, 228 bp, Homo sapiens
aagcacactccagcctctaataataaagacactgaaaaaagcgataaagaatatcatagaattgtttcgctcattcctagtaacacagaaattttatatcgcttaggaatcggagaagatatagtaggtgtatccactgtggatgattatcctaaagatgtaaaaaaaggtaaaaaacaattcgatgcgatgaatttaaataaagaagaattaataaaagctaaaccg

SEQ ID NO: 2426 - protein, 76 aa, Homo sapiens
KHTPASNNKDTEKSDKEYHRIVSLIPSNTEILYRLGIGEDIVGVSTVDDYPKDVKKGKKQFDAMNLNKEELIKAKP

SEQ ID NO: 2427 - DNA, 271 bp, Homo sapiens
agatctcactttatccccaggctggagtatagtactgtgatcttagcccactatagcctcaaattcctaggctcaagcaatcctcctgccttaatctcccaaacagccggggctacaggtgtgtgctgccatgcccggctaattatattttttattttttgtactgatgtttattttttctggctgtgttgcccaggctggtattgaactctcaggacaagcgatcctcctactcagccttctaagagctgggatacaggtgtgaccacac

SEQ ID NO: 2428 - protein, 68 aa, Homo sapiens [sequence omitted]

SEQ ID NO: 2429 - DNA, 351 bp, Homo sapiens
agctcacatctttacggccagcctgcgagcggccaggatggaaacgctttcatcccggaagactttaaatattccacggtggttatctcgtgcgaacccatcattcgccagcggtttatgcacaaggtttactctctgctgtcatgccagttactggccagtttgtcgttctgctactgggctagcgtttccacttctttgcagaactttatcatgtcgcatatcgccctcttctacatctgcatggtggtatcgctagtatcgtgcatttggctggcagtaagtcctcgtcccgaagactacgaggccagtgttcccgaaccgttgctcacgggcagcagcgaagagccg

SEQ ID NO: 2430 - protein, 117 aa, Homo sapiens
SSHLYGQPASGQDGNAFIPEDFKYSTVVISCEPIIRQRFMHKVYSLLSCQLLASLSFCYWASVSTSLQNFIMSHIALFYICMVVSLVSCIWLAVSPRPEDYEASVPEPLLTGSSEEP

SEQ ID NO: 2431 - DNA, 356 bp, Homo sapiens
  misc_feature (345)..(345): Wherein n may be a, c, g or t
actagtcagtactattaaaaatttaagcagcacaaatccaactcaagcagtcaagcaaaaaattaaaagacagtggatatgttagattaagtaaatgggagtccaagatggactgatctcaggcatgcgtggatctagaaccctgatgatgatgtcaagggtcttcttctgctgtgtgggctggctctgtttccacctgccatggcttcattctcaagcaggcttctgttgtgtgcttatagcctcagggcaacgtcatcacggctcactgtctgaaaggaagatagactccttctcaccagttatatggtaaatttcagaggtgactctgtgttcctccttatntcagtttttcc

SEQ ID NO: 2432 - protein, 72 aa, Homo sapiens
MGVQDGLISGMRGSRTLMMMSRVFFCCVGWLCFHLPWLHSQAGFCCVLIASGQRHHGSLSERKIDSFSPVIW

SEQ ID NO: 2433 - DNA, 336 bp, Homo sapiens
ctgaaagaagaattggacttcatagaagaagaaatggaaggcgaaatcactgaacaaaaccttaccactctttatgatttttctaatttcttagaagaccatgtcaatgtgttttatgagaatgttttaaatatagatgatgtcaaaacagaacacctttattcaggtctcatagacagtctcaatgttaatcttcactttgtcaagtcatttctcaataatcaggatttagatttccgcttttttaaagaaataaacgatgggcaagatccccaaaaaacattatcaagattaattcctcttcaaagtgggaaaaatgatgcaagctcgtttaaa

SEQ ID NO: 2434 - protein, 112 aa, Homo sapiens
LKEELDFIEEEMEGEITEQNLTTLYDFSNFLEDHVNVFYENVLNIDDVKTEHLYSGLIDSLNVNLHFVKSFLNNQDLDFRFFKEINDGQDPQKTLSRLIPLQSGKNDASSFK

SEQ ID NO: 2435 - DNA, 453 bp, Homo sapiens
aaatttgctccatcctttctattttggatatttctttattcacataaaaactgacttcagaggcatgaaattgctcaaattcctgccttctttgctgcccttaaagctgttctttttggaactgtttacttttttaattgaaatttttgctgagatgatgacagatccacatgtagttgtatcctttaaccagttttcctcattggaacatcttgcaaaactataggcttgcagtattacaaccaggatgttaacattaatataacccactgttcttcaaatttgcctagttttacttattcttattggtgtgtgtgtgcatgcaattatttggccctgggcaatcctatcccatgaatattttggtgtcttcactaccacagttaaaatactgaccattcctttaattttttttggctttaaaaacctgcggcttgattttccaacttcgtt

SEQ ID NO: 2436 - protein, 53 aa, Homo sapiens [sequence omitted]

SEQ ID NO: 2437 - DNA, 326 bp, Homo sapiens
  misc_feature (132)..(132): Wherein n may be a, c, g or t
  misc_feature (242)..(242): Wherein n may be a, c, g or t
atgattggagtcatcattggctctcgcaagattgggatcaacccagacaacgtggccacacccattgctgccagcctgggcgacctcatcaccttggcgctgctctcaggcatcagctggggactctacctngaactgagtgagccaccaagagtgtggcttcttggagtcctgggtggggttgggagagatggtagtagtttgcaaatgtgcaagagtttcttctgtgttcttaaactatntggtttgaacacaggttgtaataattcctgatcttagagatttgaagctaagtactgatctcaaatcaagccagccttcagggg

SEQ ID NO: 2438 - protein, 90 aa, Homo sapiens
  misc_feature (81)..(81): Wherein Xaa may be any naturally occuring amino acid
MIGVIIGSRKIGINPDNVATPIAASLGDLITLALLSGISWGLYLELSEPPRVWLLGVLGGVGRDGSSLQMCKSFFCVLKLXGLNTGCNNS

SEQ ID NO: 2439 - DNA, 185 bp, Homo sapiens
gccggcgagggtcttaatgcgcgaggcgcggcgcgcctccctggtttctcgcagggtgtcatccggttggccgtcctccgcagacctgctgcggctgcggctgggctttttgagggtggaggccttaatgctgtttttcgccagccggttgatgaggtggcgccacgcccagggcgcattgaagc

SEQ ID NO: 2440 - protein, 59 aa, Homo sapiens
MRPGRGATSSTGWRKTALRPPPSKSPAAAAAGLRRTANRMTPCEKPGRRAAPRALRPSP

SEQ ID NO: 2441 - DNA, 219 bp, Homo sapiens
gcaagggtaaaagatatggaaattttttctactttgctgtggcatttgcatgacaaggttaaatcttcaaatttggcaaatgggctaatggatacaatgcctaataagcccgaaacatggtgttgtataggtaatttgctatcattgcaaaaggatcatgatgccgcaataaaagccttcgaaaaagctactcagttagacccaaattttgcatacgcg

SEQ ID NO: 2442 - protein, 73 aa, Homo sapiens
ARVKDMEIFSTLLWHLHDKVKSSNLANGLMDTMPNKPETWCCIGNLLSLQKDHDAAIKAFEKATQLDPNFAYA

SEQ ID NO: 2443 - DNA, 414 bp, Homo sapiens
agatctgtgaggctcccactgggctcaccttgcccactttgtagataaatgccgagcgaatgacgtcttcattcgggggcacgacggtcgggctaggaacgtagaacccgtagaaccagcggccttattgagggcgccaaccaggtggactagagatgcgtcacgggactggccacgatgccaggtgatctggaccgaattctcgacctcttcgagcgaaacaacgtctgcgcccaaaccattaatggccgtcacaattttcgcctgctgatcagcgaaagccttcggggcatatgcgccacgaaccaagcaagaattagccgaaacaggtgtgctgtcatggtcgacatacgccttacagtccggctcgtcctgacctacatcggtgaaatagctcaacatgttaaagctagc

SEQ ID NO: 2444 - protein, 125 aa, Homo sapiens
MLSYFTDVGQDEPDCKAYVDHDSTPVSANSCLVRGAYAPKAFADQQAKIVTAINGLGADVVSLEEVENSVQITWHRGQSRDASLVHLVGALNKAAGSTGSTFLARPSCPRMKTSFARHLSTKWAR

SEQ ID NO: 2445 - DNA, 309 bp, Homo sapiens
  misc_feature (1)..(1): Wherein n may be a, c, g or t
  misc_feature (2)..(2): Wherein n may be a, c, g or t
nnaccggtaactgtatctgcggtaagtgcgtctaacggtctggtggggaatggtgggagaaaccgtgaggctattctcttcgcgaagatctactctcagtcgctaaacttagagagtattgtttcttctgttcgtcgtgttgtgtgtcgtgttgcgcgtcgcacttcgttagtaaaggttaatcccgtcaatacagcatctgccccagttcgctccgatcaaacggaggctgagttagccctgcgtttcgaacgtgatgcgttacctcttttggaccagttatatggcgcagctatgcgaatgacgcgt

SEQ ID NO: 2446 - protein, 103 aa, Homo sapiens
  misc_feature (1)..(1): Wherein Xaa may be any naturally occuring amino acid
XPVTVSAVSASNGLVGNGGRNREAILFAKIYSQSLNLESIVSSVRRVVCRVARRTSLVKVNPVNTASAPVRSDQTEAELALRFERDALPLLDQLYGAAMRMTR

SEQ ID NO: 2447 - DNA, 204 bp, Homo sapiens
ctaggttatttgagatacgtcaaacaaatcgagggaccctttctaataatagtaccgaagtcaacactagataattggagacgagagtttcttaaatggactccaaacgtcaatgtccttgtgttacatggtgataaagacacaagagctgatatagtacggaatataatattagaagctagatttgatgtattgattacatct

SEQ ID NO: 2448 - protein, 68 aa, Homo sapiens
LGYLRYVKQIEGPFLIIVPKSTLDNWRREFLKWTPNVNVLVLHGDKDTRADIVRNIILEARFDVLITS

SEQ ID NO: 2449 - DNA, 270 bp, Homo sapiens
  misc_feature (1)..(1): Wherein n may be a, c, g or t
ngacgatcttcaccccagacttcgttggaatatacaacagacattcccgccgtgtttactgacccgtctgtcatggaacgatactattataccttggatcgtcagcaaagcaatactgatacgtcatggctgacaccaccccaattacctcctcagttggagaatgttatcttgaataaatactatgccacgcaagaccagttcaacgagaacaactcaggcgctctgcccattccgaaccatgtggtgcttaaccacttggttactagt

SEQ ID NO: 2450 - protein, 90 aa, Homo sapiens
  misc_feature (1)..(1): Wherein Xaa may be any naturally occuring amino acid
XRSSPQTSLEYTTDIPAVFTDPSVMERYYYTLDRQQSNTDTSWLTPPQLPPQLENVILNKYYATQDQFNENNSGALPIPNHVVLNHLVTS

SEQ ID NO: 2451 - DNA, 269 bp, Homo sapiens
gtgcacgccaagagcagggcggcggttggatgggatgggccgtctccgtcgacgatctcgccccttatgagaagcgtcttgaacgtcagtcggtgcccggtaagcgtactttcccagacggtcgtcacctcgaatggcgtcaaatcgggattaagggcctgatggcagacccgcagttacccttcttcatcaaatggacttctccggccgaactgttgccttccagcctgagtggcaacgtcaccttggcctccgtcgaaatgtccgga

SEQ ID NO: 2452 - protein, 80 aa, Homo sapiens
MGWAVSVDDLAPYEKRLERQSVPGKRTFPDGRHLEWRQIGIKGLMADPQLPFFIKWTSPAELLPSSLSGNVTLASVEMSG

SEQ ID NO: 2453 - DNA, 276 bp, Homo sapiens
  misc_feature (1)..(1): Wherein n may be a, c, g or t
  misc_feature (2)..(2): Wherein n may be a, c, g or t
nnagggcgatcgatattcgtgcggttaaaagaaggtggctaccggctgcgagagaacatcctcttccatctctacgtgagcacctccccctgtggagacgcaagactccactctccctacgagatcaccacagacctgcacagcagcaaacacctcgtcaggaagttccgcgggcacctgcgcaccaagatcgagtccggggaagggacggtccccgtgcgtggccccagcgcagtgcagacctgggacggcgtcctgctgggggagcagctgatc

SEQ ID NO: 2454 - protein, 92 aa, Homo sapiens
  misc_feature (1)..(1): Wherein Xaa may be any naturally occuring amino acid
XGRSIFVRLKEGGYRLRENILFHLYVSTSPCGDARLHSPYEITTDLHSSKHLVRKFRGHLRTKIESGEGTVPVRGPSAVQTWDGVLLGEQLI

SEQ ID NO: 2455 - DNA, 171 bp, Homo sapiens
gcttgtgctgcagcggttgtggacagaatacaaggcaacctagatacgcattgtcgtatcgaattacctggtggggagttacgttttttctggcaagcaggacaaagtgtacgcatgagtggtccagcagattttgtttttgatggacggattcaaatataaaagaagctt

SEQ ID NO: 2456 - protein, 53 aa, Homo sapiens
ACAAAVVDRIQGNLDTHCRIELPGGELRFFWQAGQSVRMSGPADFVFDGRIQI

SEQ ID NO: 2457 - DNA, 263 bp, Homo sapiens
  misc_feature (1)..(1): Wherein n may be a, c, g or t
nccccctacaccctcgtcgacgccgactgggccacaacatggatgatcgacgaaacctacgaagcccactaccacggcaccagccggggaaaaaaacctttttacggggaaagggccccgaactggctccgtaactcacccaaccggcatctttaacaccgaccaggcccaccggatgtggaccggctgcactcggccaactacgggcttcaccatcggacaccaccaacacatccaaaaccatcctcacgctcacccgcaca

SEQ ID NO: 2458 - protein, 81 aa, Homo sapiens
MVLDVLVVSDGEARSWPSAAGPHPVGLVGVKDAGWVSYGASSGPFPRKKVFFPGWCRGSGLRRFRRSSMLWPSRRRRGCRG

SEQ ID NO: 2459 - DNA, 553 bp, Homo sapiens
  misc_feature (158)..(158): Wherein n may be a, c, g or t
  misc_feature (336)..(336): Wherein n may be a, c, g or t
ggatccagcctccccattctgctccctgagggggcacctgggtctcctggtgactctgtgggcatgaaaggtgctgagctcacagtgcgggggctcccatctggcctcccactgcacgggccgtgagagcagcacccaggcctccgacgtgtccctanggtggctccggggcctggctctgaaaaggatggcccgcttctgtccagacgctgccctggtcacgctcacagcagcccgggtgactcagggtgacacgctcccccgccctccaccgcaagcagggcttagctggtctagggaaagaaggtgtcttttctgcccaatttgtaatccctntactactgaggtgtgtccaagtcccagccagagcgactccttcctgcaccaccccctccctgccaggagccccagcaagcacaaagctgggggttcacggtgtgggggctgccagtggcagcaggtggctggcgtgggattccaagctctgccaccaaagagactccggccgccccaggatgcggcctcggagcatcgtgccagcctccagggatcc

SEQ ID NO: 2460 - protein, 122 aa, Homo sapiens
  misc_feature (50)..(50): Wherein Xaa may be any naturally occuring amino acid
MARFCPDAALVTLTAARVTQGDTLPRPPPQAGLSWSRERRCLFCPICNPXTTEVCPSPSQSDSFLHHPLPARSPSKHKAGGSRCGGCQWQQVAGVGFQALPPKRLRPPQDAASEHRASLQGS

SEQ ID NO: 2461 - DNA, 404 bp, Homo sapiens
acgcgttgtcttctctccggttagctacatatgtatacatgtgccatgctggtgtgctgcacagaatcagccatttctgtgagaagccctggtccccttcactggagaatggtattaaaaaccaaaatctgggcactaagtgtacataaactaatttttaataacaccaagtgagcatatatattatggtacttaagagtccaaactcccctaattcttaactgagatcttactatgagctcatcttgggggatccaaatgatgttcttcaattctagatatagcaatatcctaaaaacctctagatacttcatccctttaaatttaactgtgtactgaagttggacaccaaagaatctctgaacacttcagaaaaaagtttttaaacagaatctcgcaatccc

SEQ ID NO: 2462 - protein, 71 aa, Homo sapiens
MKYLEVFRILLYLELKNIIWIPQDELIVRSQLRIRGVWTLKYHNIYAHLVLLKISLCTLSAQILVFNTILQ

SEQ ID NO: 2463 - DNA, 213 bp, Homo sapiens
  misc_feature (1)..(1): Wherein n may be a, c, g or t
  misc_feature (2)..(2): Wherein n may be a, c, g or t
  misc_feature (127)..(127): Wherein n may be a, c, g or t
nnaccggtggttgtgtgcatatgtgactgcgtggttgtgtgtctgtgtgcatgtgtctgggtgtgcttgtctgtgtgtctgcatctatgtgcatgggtgtgtctgtgtggatatgtgagcgtctgcntgtgcttgtgtgtctgtgtctctgtgtgtttctgagtctgtgtgtgcacatctctgtgtgtatgtccttgcatgcgtgtctgtaca

SEQ ID NO: 2464 - protein, 53 aa, Homo sapiens
  misc_feature (1)..(1): Wherein Xaa may be any naturally occuring amino acid
  misc_feature (43)..(43): Wherein Xaa may be any naturally occuring amino acid
XPVVVCICDCVVVCLCACVWVCLSVCLHLCAWVCLCGYVSVCXCLCVCVSVCF

SEQ ID NO: 2465 - DNA, 381 bp, Homo sapiens
ggatccaaatagagccgcgagaacgacggcatgccgtcggcagacgattcgaactcgtcccccatagcgcagcaggcagaaacggcgcgccttggcatcgggcacgacatgcgcgcgttgcgccacgtggtcgaaaatggaggggcgcccgcaacgccctcgttggccaacaccgccatggtcttgtcgacgcacattgcgcgtgtatcggattcgctgcctctcgcacagagtgtggacgatgtacagggtcctgatctgacgcagtacaagcagcaagctaagctcattttccgaaaactgacgccgtcgtctgagacgcgatgcagcatcgatagtggccccatgtcgctgcactacctggtggcacccccccccggc

SEQ ID NO: 2466 - protein, 68 aa, Homo sapiens
MVLSTHIARVSDSLPLAQSVDDVQGPDLTQYKQQAKLIFRKLTPSSETRCSIDSGPMSLHYLVAPPPG

SEQ ID NO: 2467 - DNA, 347 bp, Homo sapiens
gtgcacagggaaactctccatgtagtgggtgatcgtcctctggggacgggcatcccgccgccagcagaccggagtggaaggcgaagcacccatacgtctcgacgatctgcctggccgacaccggcatatcgaacatgttgtccattcgtagagattgaccgtcgaacacggcatcccacaaaatctgacccataaaggggagagcctcgatgtacccacgggaattcgtgatccgcaaagccgcaatcccagtggagtaccgccacgcaggtacgatccattcacccgttcggagaacgtcacgtcgcctttcgtcaaacagttctgggtacaggatgatctcgagg

SEQ ID NO: 2468 - protein, 93 aa, Homo sapiens
MDRTCVAVLHWDCGFADHEFPWVHRGSPLYGSDFVGCRVRRSISTNGQHVRYAGVGQADRRDVWVLRLPLRSAGGGMPVPRGRSPTTWRVSLC

SEQ ID NO: 2469 - DNA, 330 bp, Homo sapiens
  misc_feature (263)..(263): Wherein n may be a, c, g or t
tccggagcggaaggtgatctccagcaagctgtcctgggagcccactgcaggggagacaagaggtagcagaggggcagcgttaggcaaggttgttgatttgggatgcccgccttctgcccgcccgtgccctgccaaagcccttcccagaccagcttagcagcacctctccgggctttgggtctcttaacacttcacccttcctcccgcccccacatagctccagacacacctcgctggaggggaggagctttgggacgtggtanaggcggggacataacaaccatatgatggttctggtagccactgaaggctatgaatagggttagtggt

SEQ ID NO: 2470 - protein, 61 aa, Homo sapiens
  misc_feature (54)..(54): Wherein Xaa may be any naturally occuring amino acid
MPAFCPPVPCQSPSQTSLAAPLRALGLLTLHPSSRPHIAPDTPRWRGGALGRGXGGDITTI

SEQ ID NO: 2471 - DNA, 313 bp, Homo sapiens
tcatgaatgagtagacatccacattcttcaaacagtgacctgggtcaggctgtgcccgccactctcgtatttgtcatctcatgtaatcctcaaagcacccggagagaaaggcactatcgcccctgggatatcacaggaactggttctttgctcagagctaggcactcccgcggcgtcaccagcttagcccagggggaaaatcttccggcctttcaaattcagaaacacattcgctccacaggtgtaagctcgctaacagttaaaatcatcagctagctgcccttgcattgtttgtcgctcccccttcacgcgt

SEQ ID NO: 2472 - protein, 89 aa, Homo sapiens
MSRHPHSSNSDLGQAVPATLVFVISCNPQSTRRERHYRPWDITGTGSLLRARHSRGVTSLAQGENLPAFQIQKHIRSTGVSSLTVKIIS

SEQ ID NO: 2473 - DNA, 198 bp, Homo sapiens
ggtaccagtaacgaaaccccagaagaaacctatcaaagggccatgaaagatcctgaagtggctgcgatcatgcaagatcctgttatgcaaagtattttgcagcaggcccaacagaatcccgctgctttacaagaacacatgaaaaatccagaagtattcaaaaagattcagacgttgatcgctgctggtatcatccgg

SEQ ID NO: 2474 - protein, 66 aa, Homo sapiens
GTSNETPEETYQRAMKDPEVAAIMQDPVMQSILQQAQQNPAALQEHMKNPEVFKKIQTLIAAGIIR

SEQ ID NO: 2475 - DNA, 266 bp, Homo sapiens
  misc_feature (1)..(1): Wherein n may be a, c, g or t
  misc_feature (2)..(2): Wherein n may be a, c, g or t
  misc_feature (3)..(3): Wherein n may be a, c, g or t
nnnatcctgtccaccatcacattcgccagcgtggcgctggccggcatcctgctggtgctgtatgcctggcgcctgccgccgttcagcagcgccatcgaaagcactgaaaatgccctggtgcgcggccaggtcacgatcatcgggccgcaactgagcggctacatcgtcgatgtgccggtgcatgacttccagttcgtcaaggccggcgacttgctggtgcagcttgacgatcgcatctacacgcagaggctggagtgtgctcgcga

SEQ ID NO: 2476 - protein, 88 aa, Homo sapiens
  misc_feature (1)..(1): Wherein Xaa may be any naturally occuring amino acid
XILSTITFASVALAGILLVLYAWRLPPFSSAIESTENALVRGQVTIIGPQLSGYIVDVPVHDFQFVKAGDLLVQLDDRIYTQRLECAR

SEQ ID NO: 2477 - DNA, 255 bp, Homo sapiens
tgtacacagtatgattctggaaaaatggcaccactgccttctttctcaccctgtttgctggtgtgcaacacgcaaccactccacgtcccaaaccctctcttaggtgtttatttctatggtggaaagcgattttgacgggccagctttcgagatcttccttgtaatctactattgcctgaatgggcatctttagccctttaaactgcctttggtgaaacataggtaaagttacgtgttgccaagcaacggaagctt

SEQ ID NO: 2478 - protein, 73 aa, Homo sapiens [sequence omitted]

SEQ ID NO: 2479 - DNA, 426 bp, Homo sapiens
cctaggaatgctatgaacgtgttcgtttcctaagcccatggtgcgttagacaagtatgcagttagcatctgtagatgctttgggtcttgggtattggctgaccccgacaaacacgtgacgttctgatgacacagcgcgctacgggccctgcataagctcaggctggacgtctcagatcagccggtattgcggaatcgtgggaatgccgaagccccgatggttaacgatgccgagacctgccgcctaccgaacgacaatgatgtcgtgggggagactagaacgcctcggcaatgggcgttggcccgtcacagaaccgaatgaacttgcccgctgtggcgtcgtcgtcaaggcatgctagagcggcctgtgcgaccgtttcacgcgagaccgtggtgccagcgtattcctcgccctcggtgaggatcc

SEQ ID NO: 2480 - protein, 51 aa, Homo sapiens
MPKPRWLTMPRPAAYRTTMMSWGRLERLGNGRWPVTEPNELARCGVVVKAC

SEQ ID NO: 2481 - DNA, 462 bp, Homo sapiens
  misc_feature (1)..(1): Wherein n may be a, c, g or t
  misc_feature (3)..(3): Wherein n may be a, c, g or t
  misc_feature (4)..(4): Wherein n may be a, c, g or t
  misc_feature (38)..(38): Wherein n may be a, c, g or t
  misc_feature (41)..(41): Wherein n may be a, c, g or t
  misc_feature (43)..(43): Wherein n may be a, c, g or t
  misc_feature (62)..(62): Wherein n may be a, c, g or t
  misc_feature (80)..(80): Wherein n may be a, c, g or t
ngnngggggcccgacaaaggccacacggaaggagaggnaananggccccacctgggggctgngcccgggccctggcgctnctcctcaggcgaggcacatggggcgccagcctcaggccccagggcacacaggggagcagcagaccggctgagtcctccctcctggagggaggagggcctgggcctgggggttgccctgggatccctctgggtcgtggaaattgtgggtctgagcgcatcttgtgagagctctgaaccagctccaaacctcaccagggaagcaggctttgtggctggtgtcctttctctctacttgggtgctaaaaaatgaactcaagttcccaggggcggggaggagaagcaaacaggcctgggctgcccactcgggccgcacggcagcttcacctcaccaagggagccgcctgctttgtaggtgttgagcagggcagcgcatccctcatgg

SEQ ID NO: 2482 - protein, 79 aa, Homo sapiens
  misc_feature (53)..(53): Wherein Xaa may be any naturally occuring amino acid
  misc_feature (66)..(66): Wherein Xaa may be any naturally occuring amino acid
  misc_feature (67)..(67): Wherein Xaa may be any naturally occuring amino acid
  misc_feature (79)..(79): Wherein Xaa may be any naturally occuring amino acid
MRSDPQFPRPRGIPGQPPGPGPPPSRREDSAGLLLPCVPWGLRLAPHVPRLRXSARARAQPPGGAXXPLLPCGLCRAPX

SEQ ID NO: 2483 - DNA, 353 bp, Homo sapiens
aaaaaaggaaacatcaaatttaatttaaagaaaaacaacctgaaagtaactgcaagagcaatgggcaaaccaactcctgaaaagagcaagacggtcacactgactggagggctggagaaagggacaggtcatttagctggagagcttgtgagttgcttgcaaatgaacttcttcgagggtagagtgatcctggggtcatttctgactatcaggattcgtgtgagcgtctctctctgggagtgtcctgtacatctcaagaggcaaagtctccactttcctacacaggatccatcttttgtctcagccaactctcaatggagggacgacgtagatcagcaacagaccaccaatac

SEQ ID NO: 2484 - protein, 97 aa, Homo sapiens
MGKPTPEKSKTVTLTGGLEKGTGHLAGELVSCLQMNFFEGRVILGSFLTIRIRVSVSLWECPVHLKRQSLHFPTQDPSFVSANSQWRDDVDQQQTTN

SEQ ID NO: 2485 - DNA, 309 bp, Homo sapiens
tcatgacgccacctccttgctagctgcagcttgtacagcattggctttctgccgggcacgacgcccacccggacgtccaccagagacgaaggtggtggctttcatcttcttgcgtttgtgtttgtcgccgacgaggtcagctccgaggatcttgatgaacgcgaatgcgatgatgaacacgtagaggaacaggatgatcgcgtacgcagcagcagcgccgtacccgagggtaaaagcctcattttggaccagcatggacagggtctcaactgacttcatacgcggccccacgagaataaacggcagatc

SEQ ID NO: 2486 - protein, 92 aa, Homo sapiens
MKSVETLSMLVQNEAFTLGYGAAAAYAIILFLYVFIIAFAFIKILGADLVGDKHKRKKMKATTFVSGGRPGGRRARQKANAVQAAASKEVAS

SEQ ID NO: 2487 - DNA, 378 bp, Homo sapiens
gcgatgttgacagcttggaagagagcgccgacatccgcaccttctggttcttcttcctcctcttctcctcctcgttcctcttctcctccttgttggcttgcttgctccactgccttggcagcccgtctatgtgctgcggttgcgatatgactcggcctgttttgaatggtcacatgcttggagcaacagggaagtagccctgaagtggcacagtcggatgtgtggcgtcagcgcagtatcgtcatgggtgacaaaggggcaatctgcgaattgacatcggtagatcaaaggaggagtgatcggacccagaggcaaatcaaaaaccacttggagaactggacaaattggttgattggacaggaacagctggtctccgga

SEQ ID NO: 2488 - protein, 71 aa, Homo sapiens
MVTCLEQQGSSPEVAQSDVWRQRSIVMGDKGAICELTSVDQRRSDRTQRQIKNHLENWTNWLIGQEQLVSG

SEQ ID NO: 2489 - DNA, 189 bp, Homo sapiens
  misc_feature (1)..(1): Wherein n may be a, c, g or t
ncagcgcccgtgccgttctcccgtcccagtacaagggatacgtgcccaccgatgccacgatggtcacccaggcggcagccggtacccgcgtcggcgccggttccctactcgcattggggaaggcaccgcgcctggcagccggcactctcgcagtcctgtcggtgcccaccatttacgcctgcaacgcgt

SEQ ID NO: 2490 - protein, 57 aa, Homo sapiens
MVGTDRTARVPAARRGAFPNASREPAPTRVPAAAWVTIVASVGTYPLYWDGRTARAL

SEQ ID NO: 2491 - DNA, 302 bp, Homo sapiens
acgcgtgaagggagagagtaagaaagtacaggaacagtcccaggaaagttgagtaatttagggactaaatacacagatgggccaggttttgtggtgagagataaggctgtaaaggtgtaggggaattgtattgtaaagagcctccaattccacatcctggagattgattctaaccactgtggaggctgcccaagagcccttgggcaggaaacagatgtgataggagtttgtgtttttggaatacaggtggcatgagagtgtgacagtgtagtaccacactctcacaccacctgtgggcggag

SEQ ID NO: 2492 - protein, 51 aa, Homo sapiens [sequence omitted]

SEQ ID NO: 2493 - DNA, 364 bp, Homo sapiens
ggcgccgcctctgctgcgggccgggggagccagacgaggtgctgccgggtaggaaaaaatccagggctcattcataccccaggtcacgattccggggtcgcccccagcacttctccgccgggtgcatcaacctgaaaaagccccttcttcctggaaaccctccttctccagcgtttcaacggggaaactgatcagctgacaccagccccagtcctgcgaggggccggcgacctttgacctttctccaaggggttggtcacctggattataaaagacttcggagacagccatccagtgtttgttgatctgtatcccttgatgttctgtcttccattagataagggctgttaattcttggtttgaa

SEQ ID NO: 2494 - protein, 54 aa, Homo sapiens
MAVSEVFYNPGDQPLGERSKVAGPSQDWGWCQLISFPVETLEKEGFQEEGAFSG

SEQ ID NO: 2495 - DNA, 386 bp, Homo sapiens
agatcttctctcaaacaaatgagatattttcaaagacaaggcctcactgtgtcacccagattgcctggacttcactgcatcgtctggacaggctccaagctcaagctcccctggccgcagcctcgaaagtccccatatttgccaccatgcccagcctcaacatccctttcagtccactgagatgcgttcctcaatgtatgctgagtgcccacccaggcacgatggtgcccgcctataatcttagaatctgagagatgaggaagaaggtcatgtttcaggctagcctgggctacgtggtgacactgtgcctcaatgaaaacaacgaaacagctcaggttgtgcagaagaattaaggccgtgtctttatgcatgacaaaggaacgcgt

SEQ ID NO: 2496 - protein, 99 aa, Homo sapiens
MHKDTALILLHNLSCFVVFIEAQCHHVAQASLKHDLLPHLSDSKIIGGHHRAWVGTQHTLRNASQWTERDVEAGHGGKYGDFRGCGQGSLSLEPVQTMQ

SEQ ID NO: 2497 - DNA, 207 bp, Homo sapiens
gatccagatactcccaagtctgtgaggttccgagtgaaggagactgtatgtggcaaggcagagcggcagctacctgagcaatgtgccttcaaggaacagggggtggtgaagcagtgtatgggggcagtcaccctgaacccggccgctgattcttttgacatcagctgtaacgagcctggtgcacagccctttcggttcaagaaaatt

SEQ ID NO: 2498 - protein, 69 aa, Homo sapiens
DPDTPKSVRFRVKETVCGKAERQLPEQCAFKEQGVVKQCMGAVTLNPAADSFDISCNEPGAQPFRFKKI

SEQ ID NO: 2499 - DNA, 236 bp, Homo sapiens
  misc_feature (233)..(233): Wherein n may be a, c, g or t
  misc_feature (236)..(236): Wherein n may be a, c, g or t
ccggaaaagatcgcaatagttggtgctggaatcggtggtacttcctcggcctattatcttcggaagaaatttgggaaggacgtgaagattgatgtgtttgaaaaagaagaaatcgggggccgtttggctactttgaaggtgcaagggcatgactacaaagcagggggttcagtcattcaccctctaaatttgcacatgaagcgatttgtcaaagagctgggtctctccaatgnccn

SEQ ID NO: 2500 - protein, 78 aa, Homo sapiens
  misc_feature (78)..(78): Wherein Xaa may be any naturally occuring amino acid
PEKIAIVGAGIGGTSSAYYLRKKFGKDVKIDVFEKEEIGGRLATLKVQGHDYKAGGSVIHPLNLHMKRFVKELGLSNX

SEQ ID NO: 2501 - DNA, 389 bp, Homo sapiens
  misc_feature (1)..(1): Wherein n may be a, c, g or t
ncggcttagcctctctccgaccgcgttataactacgatgtgggaagatgagaatactatctgctaccaagtagaggcgaacggtatatcagtcgtgcgtagggctgacaacaacatgattaacggcaccaagttgttgaatgtcacgaagatgacaagggggagaagggatggaatattaagatccgagaaggttagggaagtcgtgaagattggctccatgcacctcaagggtgtttggattcctttcgaaagggcttatatcctggctcaacgtgaacagattctagatcatctgtacccgctcttcgtcaaagatatagaatccattggtgatgccagaaagcccagcaacaaggcatctttgacccccaaatctagccccccccc

SEQ ID NO: 2502 - protein, 126 aa, Homo sapiens
PLSDRVITTMWEDENTICYQVEANGISVVRRADNNMINGTKLLNVTKMTRGRRDGILRSEKVREVVKIGSMHLKGVWIPFERAYILAQREQILDHLYPLFVKDIESIGDARKPSNKASLTPKSSPP

SEQ ID NO: 2503 - DNA, 273 bp, Homo sapiens
  misc_feature (91)..(91): Wherein n may be a, c, g or t
  misc_feature (269)..(269): Wherein n may be a, c, g or t
tcgcgagcacactccagcctctgggcttagctcactgctcatcttcctccactgcctctgcccatgttaggggggtctagtgggccacagncagggccacgtgaggagaagaaaaaggggtgaagcccaggaggctctctagtgggatagcccggccgatacgccaggcttggccatgcgaggtgagctgtcgcaggatgggctcggttacggccaggtgtgcaagcgggcattcgggtgggcgtgagggtgaacacacaggtgggaantggg

SEQ ID NO: 2504 - protein, 64 aa, Homo sapiens
  misc_feature (48)..(48): Wherein Xaa may be any naturally occuring amino acid
MPACTPGRNRAHPATAHLAWPSLAYRPGYPTREPPGLHPFFFSSRGPXCGPLDPPNMGRGSGGR

SEQ ID NO: 2505 - DNA, 377 bp, Homo sapiens
ggatccattgctttcccaaaggcccgctggtgagcaacctcagcttccctctgccaccagctcagcgccttcagaggttctggacgcctccgggccctaatcctgctgacgtgtgtggccccacgagtcacacgatgatgcttgttatttgctttcagaatgaaaaagcacgatggtttactgaatgctgattacatgctagactgtgctcatgctttgcccactgtcatgcaggaagcaactcgacaaatggctgtggctcttgcctgaaggaagcgcttttggttggggaaaaccatctttaggagccgcatccaagcttcatccaagcttcgggtccttaactcttgggggaaaatcaagaagtgaagagtatt

SEQ ID NO: 2506 - protein, 55 aa, Homo sapiens
MLCPLSCRKQLDKWLWLLPEGSAFGWGKPSLGAASKLHPSFGSLTLGGKSRSEEY

SEQ ID NO: 2507 - DNA, 429 bp, Homo sapiens
  misc_feature (272)..(272): Wherein n may be a, c, g or t
  misc_feature (352)..(352): Wherein n may be a, c, g or t
tcgcgagtcgacctaccgtggggagctggcacagtctgtggctggcacactgaatctggatgtggcttaagggaggaaagctggtagctcaggaaaggaaaggaatgcagtaagtaaaatttcctgccatggaagagactttgtgaagttacggttagtttgagaacgtcggtatgagttggtaacacaccgacactcccgtccctgaagaaggccaagttccttcccacacatcactgcaccaacctaaccgcccggagtcggaattgtgnccgtgggcacctcgacgggttttcaagggggaaccaaagtttcactgcagacgggcaggcagagctgggtccagcagganacaagggcctgagggtatcgtgctgttatcggacgcgatgctgctttccaagatggctgggcggggatctctgatca

SEQ ID NO: 2508 - protein, 55 aa, Homo sapiens
MCGKELGLLQGRECRCVTNSYRRSQTNRNFTKSLPWQEILLTAFLSFPELPAFLP

SEQ ID NO: 2509 - DNA, 261 bp, Homo sapiens
  misc_feature (1)..(1): Wherein n may be a, c, g or t
ncagctgctctggaatcctatcaccgactcgccgatcaatatgatgcggtaataatagaaggcgctggcagcccagctgagatcaacttacgcgccagagacatcgccaatatgggctttgccgaatcggttgattgcccagttatcatcattgccgacatcgacaaaggcggcgtctttgcgcacctagtcggcacactggatttactcagccagagtgagcaagatcgagttattggctttgttatcaatcgatttcgt

SEQ ID NO: 2510 - protein, 87 aa, Homo sapiens
  misc_feature (1)..(1): Wherein Xaa may be any naturally occuring amino acid
XAALESYHRLADQYDAVIIEGAGSPAEINLRARDIANMGFAESVDCPVIIIADIDKGGVFAHLVGTLDLLSQSEQDRVIGFVINRFR

SEQ ID NO: 2511 - DNA, 405 bp, Homo sapiens
  misc_feature (1)..(1): Wherein n may be a, c, g or t
  misc_feature (2)..(2): Wherein n may be a, c, g or t
nntgatcatccacgccatcgccaattgtccaagggccaaatccttcgcccatatcagagtttagatctattgatctcattagattttccttaccgttgtcattgtttaattaatatataattgaaacttcatgtttaaaaagatctattttttgatagggtagtatctgaaaaacagatggcaggaaggatttatatggcactcactctcaagcagctcagatattttgtggcaacagcagaaatggggcaggtgtctcaagcggccatctatcttaatatttcccagtccgctgtcacgacagcaatcagagatttagagggtttgttgggtgtagaactttttgtgagaagctcacagggtgtgagtttgacggaaagagggcggcattttttgaatcacgcg

SEQ ID NO: 2512 - protein, 68 aa, Homo sapiens
LTLKQLRYFVATAEMGQVSQAAIYLNISQSAVTTAIRDLEGLLGVELFVRSSQGVSLTERGRHFLNHA

SEQ ID NO: 2513 - DNA, 235 bp, Homo sapiens
gaattcgaagctgacatgcatgatgaccacgcctgtgaatagctactacattccagcctggacaacatagtgagagccagtcttttttaaaaaaagtgaaaaaaaaaaaaaaagccccgggggttgggtacctcacccctataaaattagccggggccagggggccatccatgaaaccccggctactgggggggctgagccccggaaatcgctgaaccctgggaggggggcccct

SEQ ID NO: 2514 - protein, 57 aa, Homo sapiens [sequence omitted]

SEQ ID NO: 2515 - DNA, 216 bp, Homo sapiens
atctattccctgctgtctcagatcgtagaccttcagcacaaactggaagaaaatgtgatcgagaaggaagaaatgagacttcacctgcaggcgtccaaagatgcccagcgacagctgacgatggagcttcccgagttacaggacagaaacatggagtgcctgggaatgttacatgagtctcacgaagaaattaaagagcttcgaaacaaagccggc

SEQ ID NO: 2516 - protein, 72 aa, Homo sapiens
IYSLLSQIVDLQHKLEENVIEKEEMRLHLQASKDAQRQLTMELPELQDRNMECLGMLHESHEEIKELRNKAG

SEQ ID NO: 2517 - DNA, 260 bp, Homo sapiens
ggatcctttctgggaaaactgtggtctgttgaaaggtgtagagcagactctgagacagaacacttggagtcctcgtcagagaagaggcatgaattactgaaagcagcttcactgcaggaactgtatcatctgctgtgcttgaatatggtgccatgtggaacaatcgccgtgttgtacagatgggctgcagcgattcactcttgagcatgacagacttggaggaaacggcagtgcaaacggtggttctcttaaaggtgcac

SEQ ID NO: 2518 - protein, 69 aa, Homo sapiens
MLKSESLQPICTTRRLFHMAPYSSTADDTVPAVKLLSVIHASSLTRTPSVLSQSLLYTFQQTTVFPERI

SEQ ID NO: 2519 - DNA, 309 bp, Homo sapiens
ctagcaaactttgaagatattgatatttggtgcattctcggttgtagccaaagcggtatcatcgttgatcaattcaacgagttttacaagcccattattacaccttatgaattaaacttggccttgagcgaagaggtcacatggaccgggaaatgggttgtggacttcagagacgccattgatgaaatcgagcagaatttgggcggacaagataccatctctgccagcacaacttccaatgaaccggagtttgatgtagttaggggaagatatactagcacatcaagaccactgcgagcgctaacgcac

SEQ ID NO: 2520 - protein, 103 aa, Homo sapiens
LANFEDIDIWCILGCSQSGIIVDQFNEFYKPIITPYELNLALSEEVTWTGKWVVDFRDAIDEIEQNLGGQDTISASTTSNEPEFDVVRGRYTSTSRPLRALTH

SEQ ID NO: 2521 - DNA, 387 bp, Homo sapiens
gtcgacgaattttatccagtcaataagtgctcatttgctaaattaacacgctccgaattgctggaagctgtctctaaacaagccttcttgcgtttccgtcatcaattaccatccaattggatcgaagcttacatggaaaatcctttcaccctcattagaagtgtttcttacaaatttggtattcaattgctcaataaagaatacttctttactagagaacaattggaaagttataagcaaagtcttgacaagaaaattaggaacaagtttgtcgaaccaccaactaccttcagtttaagcgatttgaccattattccacgtgttaagttctcagaatatacttcttcagttagtgaggaattttgggctcaaggtgcttctatgatc

SEQ ID NO: 2522 - protein, 129 aa, Homo sapiens
VDEFYPVNKCSFAKLTRSELLEAVSKQAFLRFRHQLPSNWIEAYMENPFTLIRSVSYKFGIQLLNKEYFFTREQLESYKQSLDKKIRNKFVEPPTTFSLSDLTIIPRVKFSEYTSSVSEEFWAQGASMI

SEQ ID NO: 2523 - DNA, 276 bp, Homo sapiens
  misc_feature (103)..(103): Wherein n may be a, c, g or t
  misc_feature (181)..(181): Wherein n may be a, c, g or t
  misc_feature (195)..(195): Wherein n may be a, c, g or t
  misc_feature (240)..(240): Wherein n may be a, c, g or t
  misc_feature (268)..(268): Wherein n may be a, c, g or t
  misc_feature (271)..(271): Wherein n may be a, c, g or t
  misc_feature (273)..(273): Wherein n may be a, c, g or t
ggatcccagaatgttcctagcatctagtttccctggaacagagtcatcctgtgaaaaaggatgaatccaatccagatcagaccctcttgtgaggtgataattntccatccagatttccctgggacctttccatttgcattcttgttttgccctgaaaggcagctggtgagctatttctttntcctcattggactnttcatgtccaattacctagatgattattgctcctgtaagactgantatttagaaagaatttgaaataacactnggntntga

SEQ ID NO: 2524 - protein, 65 aa, Homo sapiens
  misc_feature (15)..(15): Wherein Xaa may be any naturally occuring amino acid
  misc_feature (41)..(41): Wherein Xaa may be any naturally occuring amino acid
  misc_feature (60)..(60): Wherein Xaa may be any naturally occuring amino acid
MNPIQIRPSCEVIIXHPDFPGTFPFAFLFCPERQLVSYFFXLIGLFMSNYLDDYCSCKTXYLERI

SEQ ID NO: 2525 - DNA, 336 bp, Homo sapiens
acgcgtgaagggcgaaggaagatcccctggtagctctggaagagaagaggaagagtgagaaatatacccagaaatatcccaatgggaaatatacccagagacctctccctaacaatggcctatgctccatggggaaagaatctttcagaactttatcccaattgggggaaggatattcttcccactgaagctccctccagtcttcctgtctcatgtaaagaggaaagacatagtcaacaagggtcaaggctttaagaaaatatattgggattggagcagtcgggataggagtggaggcaagagagggaaaaaggtctttaccactggagaaaaact

SEQ ID NO: 2526 - protein, 71 aa, Homo sapiens [sequence omitted]

SEQ ID NO: 2527 - DNA, 364 bp, Homo sapiens
ctagaagatccctccggtcaacaacctatctggggtcgtcatgttgacgagaatgatacattatactccttggtttcaagaagatctattgacactttgaaggataaagcttttagggaccaagttgctagatccgattggctgctattgaagaagctgaaggtcgttttcggctcgaatgagcatggcatacgctgacttgtcaacccaatcacattctacaaaatttaatgaattaaataggtaattgtatataaaaatgtgaacctttgtgtattagtttcaattctatcttacttttcattgccattttacttctttcaccttgctgtctttcaaccttggaaatttttatagtacgcgt

SEQ ID NO: 2528 - protein, 65 aa, Homo sapiens
LEDPSGQQPIWGRHVDENDTLYSLVSRRSIDTLKDKAFRDQVARSDWLLLKKLKVVFGSNEHGIR

SEQ ID NO: 2529 - DNA, 348 bp, Homo sapiens
atcatacctgggggagagtcgactgcaatgtcccttattgcagaaagaacaggattttacgacgatctctacgcattcgtacacaacccaagcaaggtaacctggggtacttgtgcaggtatgatttatatttcacaacaattatctaacgaagcaaaactggtcaagacgctgaatttactaaaggttaaagtaaaaagaaatgcatttgggagacaagctcagtcttctacccggatttgcgacttttcaaactttattcctcactgcaatgattttcctgctacttttataagagccccagtaatagaagaggtgctggatcctgaacatgtgcaggtcctgtac

SEQ ID NO: 2530 - protein, 116 aa, Homo sapiens
IIPGGESTAMSLIAERTGFYDDLYAFVHNPSKVTWGTCAGMIYISQQLSNEAKLVKTLNLLKVKVKRNAFGRQAQSSTRICDFSNFIPHCNDFPATFIRAPVIEEVLDPEHVQVLY

SEQ ID NO: 2531 - DNA, 278 bp, Homo sapiens
tgatcacctctgatgcccttcacccctccctgggcctcagtttcctcatctgtggagtgggagaatgggcctggcccgtgggtctctgggatgttggccagcgctcactctgagcctccgcccgctctgggctgctccatgctcgtgttggtcccgggccatggatggcgtaagtggtgctttgggcccctgggcaactgggggagccagctcctctggtcatttccccacccccgacccctgtagagtgcggcggaaagaacttccacttcgtgcac

SEQ ID NO: 2532 - protein, 77 aa, Homo sapiens [sequence omitted]

SEQ ID NO: 2533 - DNA, 503 bp, Homo sapiens
gggtagaggaaggaggagtagaagcttacctgttgggaaactattgcagtcaactagtcaggaaaagctgatcgcttcaattacaacactgacaacgtaggtggagaagaggaggtggatggaaggtcaattttgaagaatttgtgtcttgagccaggaatggtcagttcactgatagtgtgtccttgccaagaataacacagatatttctacacagataatattgtgtctgtgtcgaaatacttggactggatgctagggctcatatacaaggatcaagccagagaggcaagcctgggcattccctttgtttcctggagagtcagcaaggtgttggggaagagcttacacctaccatgacagccctggattccaggccctgctctaccacacagcagctgctcacccttgggaaagtcatttctctttctgagctctgatttgctcatctagaaaataggcacaacccatacctcagaaggatgcttgtgagcttggtataa

SEQ ID NO: 2534 - protein, 57 aa, Homo sapiens
MSKSELRKRNDFPKGEQLLCGRAGPGIQGCHGRCKLFPNTLLTLQETKGMPRLASLA

SEQ ID NO: 2535 - DNA, 311 bp, Homo sapiens
acgcgtcccaagggctgagaacagtgccaagcacattgtaggagctatgtaactgtttgataaaaaacagaaacagctcttagctctctgttctttccattttatcacatatttcaaagttaaatgcctgcaagagcccagcaggagctgtggaaggtgaacaggactgggtggggcagggtaaacggagacccctcatgatcccccagcagcaacgaggacttcacctcaccagatctggccttccaagagaagcacgaaatccagatttttatgtaaaaatctcgaaacattaaatgattataactagt

SEQ ID NO: 2536 - protein, 57 aa, Homo sapiens [sequence omitted]

SEQ ID NO: 2537 - DNA, 307 bp, Homo sapiens
  misc_feature (49)..(49): Wherein n may be a, c, g or t
atcctgctaatattgtattttttttgtagagagaggtttgccattgtcnccaggctggtctcaaactcccgagctcaagccatcttgcctccatggcttcccaaggttctgggactacaggcaggagccactgcgtccagcctggttttggactcttggtcttgggtttggccaaaactttggtggttcagatggactcttgtagattttaaggagaattgaagttttgtggcttaagctgaactgctgttctcaatgcccgtgctggtccgaatgcccatgctggtccctatagcccttcacgcgt

SEQ ID NO: 2538 - protein, 73 aa, Homo sapiens
  misc_feature (17)..(17): Wherein Xaa may be any naturally occuring amino acid
ILLILYFFCRERFAIVXRLVSNSRAQAILPPWLPKVLGLQAGATASSLVLDSWSWVWPKLWWFRWTLVDFKEN

SEQ ID NO: 2539 - DNA, 350 bp, Homo sapiens
actagtaacctggcctccaaatgcaaaaatacactgtgtttactactgatggcatatcttatcagaacccctcccactcctcaaacagctgcatacatacgttctctcatttaactcacacagcaactctgttgaggcagctattttaatcttccctccttatatactgacactgacttcaaagatggtcttgccaaaggtcttaaaaatggggcagaaagttgaacctagggatgtcagaccccaaattgtgtgggcatccttcccttgccacgggcagcttcattgccagggtgtccttccccatgtcctgctcttcttcccgcagggaccacccccctctctgccca

SEQ ID NO: 2540 - protein, 55 aa, Homo sapiens [sequence omitted]

SEQ ID NO: 2541 - DNA, 204 bp, Homo sapiens
tccggagcaatgaaggctcccggcctgggagcaggctccagcctgctgcggaaggatggacagctgcacagttggccacctcagggacgtggcacacaggggacccaccgctgccactgccactcccacaacccctcctgccaccaccgcccgtgcctcccagccactgccatcactagtaacttctgtgaagacaatgtgcac

SEQ ID NO: 2542 - protein, 65 aa, Homo sapiens
MKAPGLGAGSSLLRKDGQLHSWPPQGRGTQGTHRCHCHSHNPSCHHRPCLPATAITSNFCEDNVH

SEQ ID NO: 2543 - DNA, 252 bp, Homo sapiens
tccggaaaggtgattcgtactttgaaagggcatacagatgccataacgtcattaaaatttgattccgcgtgcctggtcacaggttcatacgacagaacagttagaatctgggacttaagaactgggttgttgaataagtttcatgcgtacagtgcgccagttctttcgttagatctcttccaagagaacgctgcagtcgttgtcgcagacgaaccaagtgtccagatatacgatagcgaaaaggatgaaagc

SEQ ID NO: 2544 - protein, 84 aa, Homo sapiens
SGKVIRTLKGHTDAITSLKFDSACLVTGSYDRTVRIWDLRTGLLNKFHAYSAPVLSLDLFQENAAVVVADEPSVQIYDSEKDES

SEQ ID NO: 2545 - DNA, 293 bp, Homo sapiens
aagcttccaagacgcaaggctcttcgaacgccatttctgaaaatgctcatgcataagtcggcggacgagcagctctttgcagaagattttgcggtggggcaggcattctctggagcgcctcgcgagatcaacgacaagatgttcgctgatttcgcgattctaacaggagacgcccatccgattcactatgacgatgagtacgccgcgaaatcccggtacgggaggcgcctaacgcacggcttactgtatgtttcgctgacggcgctcggtgcaacaacgatgtctcgacgcgt

SEQ ID NO: 2546 - protein, 97 aa, Homo sapiens
KLPRRKALRTPFLKMLMHKSADEQLFAEDFAVGQAFSGAPREINDKMFADFAILTGDAHPIHYDDEYAAKSRYGRRLTHGLLYVSLTALGATTMSRR

SEQ ID NO: 2547 - DNA, 391 bp, Homo sapiens
acgcgtagtggtgacttctagaagactgtaacagcttcttggacactttaggggtaaacggggtgcagctgtttacctgaatgtgttcttaataagtgactagtaccactctaattcacctagccgtaggtctgtcacgggctactgaccacgcaggccacatcccacactgccctgccaatacaggttaactacagggagccatcccccagtctcggggtgaattgggaaagggccggttaaatgaggagacgggccactccttggtgaaagtctgtagctttctctcccagtacatcttcttcttgttgaggacctccatcttgatccggtgttcctcctcggccatctcacattcccgttctatctgctggattttggccacgtgcac

SEQ ID NO: 2548 - protein, 53 aa, Homo sapiens
MAEEEHRIKMEVLNKKKMYWERKLQTFTKEWPVSSFNRPFPNSPRDWGMAPCS

SEQ ID NO: 2549 - DNA, 413 bp, Homo sapiens
ctcacctaaaagtgtcatcatggatccatgtccttgggacttcctgccctgccatccttgacaattgaccatcatggtccttgtcactggatggattcaacgatccaggcatgaggaagggaaagggggaagagcacaagaccaaccatgtctttctctttttaaaatgtgtttccaaaatctccacccagttgcttccactaatgagactctctggaaaatatagatttcagttttgctatcctaaacaaaaccccttagtgaaaatatcaggagggaaccatcagcatttgagatgcttcacaaacactgcctacagccaaaagagcaatttatgggcttctggttaagatgaacttgttctttcttgaggtcctctcactctgtctgtggaaccattctcctcctggtca

SEQ ID NO: 2550 - protein, 79 aa, Homo sapiens [sequence omitted]

SEQ ID NO: 2551 - DNA, 225 bp, Homo sapiens
tgtacatgcacacatcacagcttcttcaacccggagcacccagggaggtgtcaaagctgcaggcccagatggctgcagagggccaggagtcccctgggaatctaaggccaactcccttcccaaaccttcccaggatgacatcccttctatccacacagacacctgttcttacatagaaaactcttgggtcctaaaatccatgtgacctaaaatcatatatctaga

SEQ ID NO: 2552 - protein, 56 aa, Homo sapiens
MHTSQLLQPGAPREVSKLQAQMAAEGQESPGNLRPTPFPNLPRMTSLLSTQTPVLT

SEQ ID NO: 2553 - DNA, 283 bp, Homo sapiens
caattgcaacaactgaacaaaccgctggcactgccccagcgcaaacccaacctctggcgccctgccctggcggtggccgccgccttggtgtgcgccgtgctggcgacctcgctcggcgcaccgcgcgagctgtatcacagccaggtggccacccaggccaagggcatgcgcacgttgaatctgccggatggcagtaccttgtatgtgaatgccaacacccatatccgcgtggacttcaacgcccatcaacgggtgctgcacctggacaacggccagctgtaca

SEQ ID NO: 2554 - protein, 82 aa, Homo sapiens
MGVEVHADMGVGIHIQGTAIRQIQRAHALGLGGHLAVIQLARCAERGRQHGAHQGGGHRQGRAPEVGFALGQCQRFVQLLQL

SEQ ID NO: 2555 - DNA, 207 bp, Homo sapiens
tccggaagaacatatcgacgatgtcatgcgccttttaacgggtgcctccgcggatgccgataccggcaccttatccaccgagcccatcgtctggtcccggcagcggttggaagaagcgcatcaacgcctgcgctcgcggcgcggacatacgctgctcgtggcgctcatcgatgatgctgggggcatcgtagcgctcacggagctagc

SEQ ID NO: 2556 - protein, 60 aa, Homo sapiens
MRLLTGASADADTGTLSTEPIVWSRQRLEEAHQRLRSRRGHTLLVALIDDAGGIVALTEL

SEQ ID NO: 2557 - DNA, 352 bp, Homo sapiens
acagtatagatctggactccatcctttgcaatgtgtggggttctaggaagaggccagccagccgtggaagtgtcctgggctctgtcccggagacgacgaacttggctccccacgagggcggcctattccccacagtgtcccccgggggccacacctgcacccaccttgctgaagataattcgctttctcatccgtgaaagaataaagtcggactaactcatctccacactcacttccaactctaacaacctgtgttaggaaatcaaaggtaaggactctgaccacaaacccaagaagcaaaacccgagactcacggaacgacgccaccattgcagttcccagcttgactagt

SEQ ID NO: 2558 - protein, 95 aa, Homo sapiens [sequence omitted]

SEQ ID NO: 2559 - DNA, 391 bp, Homo sapiens
ccgatgataatttacacactttctcaatatttctatcaactattcactatgctattgtgtggcatatggattcgttacaaattagctgcggccctatttttaactatagcatttctatgggcgtctcataatggggctacctactatatcgaccactacgggaagaatttcgaaaaagaagttgatagattacgtcttgaagttgagaatttacaacaaaagttacagcctgattctgatgcagtcatatctgatgcctccgtgaatgataaggattacttgaatgtcaaccgtgacgaagattttgacgactcttcaagtgtatcctcaaagatgattaagatgttcacttatttatctgttactttagagctttatttacgggcctttg

SEQ ID NO: 2560 - protein, 130 aa, Homo sapiens
PMIIYTLSQYFYQLFTMLLCGIWIRYKLAAALFLTIAFLWASHNGATYYIDHYGKNFEKEVDRLRLEVENLQQKLQPDSDAVISDASVNDKDYLNVNRDEDFDDSSSVSSKMIKMFTYLSVTLELYLRAF

SEQ ID NO: 2561 - DNA, 445 bp, Homo sapiens
ggatccacagcaagtgcaaatgttctctgtcccaatagacagcatcactgtccacctgactgttccaggtctccttcgcttactaaccacaaacttgtttcagcaagttccagcttctactgcaaacatgtatcgaggcttcacccacttttctttttttcctcaatcatcccccaggaaaagctaccaccatctctgacttggataactcaccagccttctttttggtctccttgcttccattcttgctatctgcagtctcttctccatgtggcagctggggtgatgtctataaaaatctgcagtggagtctaattatgcttaggctgaaacttaaccttctttctttggtgtaggaggccctgcattgtgcccgccaacctgtcctttcctccttctccctactgcactccagctactccagcctgctttctgctcccaaagt

SEQ ID NO: 2562 - protein, 59 aa, Homo sapiens [sequence omitted]

SEQ ID NO: 2563 - DNA, 359 bp, Homo sapiens
gtcgacttaatatctcccacaccagaactcgacttgaacaggctggatcttgtgaatacaaacacagttgagggcaaagagatttttgagggcgaagtcatcttcagaaaattcttggaggaatttcaacttaaaggtaagagattacttttcattacagacaagactagggaagggctgataaagagttctgatccatacaaacaaaaagtagatgttatacagaaagaacttgttgaggtaaatgacatactaagagcccaagctgtttttatcgaattggaagctcttgaatatctagcaatggcccatcagaaagaaatccttcactccgtgtctaactgattttcatatgtaca

SEQ ID NO: 2564 - protein, 114 aa, Homo sapiens
VDLISPTPELDLNRLDLVNTNTVEGKEIFEGEVIFRKFLEEFQLKGKRLLFITDKTREGLIKSSDPYKQKVDVIQKELVEVNDILRAQAVFIELEALEYLAMAHQKEILHSVSN

SEQ ID NO: 2565 - DNA, 282 bp, Homo sapiens
gcgcgccagggactgcctgtattcattttgatattgtatttgttacctttcctgtggtgctgataattttgatattttaagtgttatgttaaaatataatttatcccactgctgagcttttggtgctgtcttaaattatgtgcctggggtgagtgtctcacctgccccaccctattcctggactccctccctgggagtggccccctcttttgagctgggtctgactcaaacacccccatcagcaagcccaacccctgtcactttgggaaaccaaaatgccag

SEQ ID NO: 2566 - protein, 51 aa, Homo sapiens [sequence omitted]

SEQ ID NO: 2567 - DNA, 217 bp, Homo sapiens
  misc_feature (10)..(10): Wherein n may be a, c, g or t
tgatcatgtntgcctattttctttggctactaggaagattagaagaaaatgtgccgcccacgtataataattggatttcttaatcatatcttggcttcatataattttcttaccctatttttcagaggctctggtttcttgagtgattattcttcattctgttatattaaaaaaattccttcaaggggccacaacatcttactgagggatgggctca

SEQ ID NO: 2568 - protein, 56 aa, Homo sapiens [sequence omitted]

SEQ ID NO: 2569 - DNA, 362 bp, Homo sapiens
ccatggtgcggccgtctggtaacgataggcaaatccttgccatgccaccaattcttccttcaacagtagttggcgaatccttcgatggtcaagtcctgtgagcttgctcatctgacggatcgtctctgtctcaagcacctcgcctgtttccaggttcaaggcctggatagtgcgagtgtcgtactggtcgatcacttccaccgagtggtctgggtagccccttgccattcgctttatgatctcaaccatagatgcatttggcatgttccagagcttgtactccttaacgatctctctggcgtcgtagaaaaccttcacgctatcgtcaggatgggtcactgtggtgatgtaccgtccagaac

SEQ ID NO: 2570 - protein, 92 aa, Homo sapiens
MVKSCELAHLTDRLCLKHLACFQVQGLDSASVVLVDHFHRVVWVAPCHSLYDLNHRCIWHVPELVLLNDLSGVVENLHAIVRMGHCGDVPSR

SEQ ID NO: 2571 - DNA, 492 bp, Homo sapiens
atggcacactgtcagaacctgacggatcagctctccacgtacagtaagggcttcctcaactcctctgagctttctgaacttgcagctgggcccgacggggaagggtctctcaaggaccagttgaccttagcgattgggacactgggagaaaacatgagtcttaagcgagctgcctgggtgaaggtgccctctgggttctatgtcggctcttatgtgcacggagagatgcagagcccctccctccagaacctggtgctggggaagtacggggccctggtcatctgccagactcctgagcagatcacaaacctggaggaggttggccgccgcttgggacaacatgtggtgggcatggcccctctctcagtgggctccctggatgatgagcctggaggggagacagagacccggatgctgccccagccatatctcctggatctttccatcacactggggcagtatgtgcagccccagggcgtgaccgtagtcgac

SEQ ID NO: 2572 - protein, 164 aa, Homo sapiens
MAHCQNLTDQLSTYSKGFLNSSELSELAAGPDGEGSLKDQLTLAIGTLGENMSLKRAAWVKVPSGFYVGSYVHGEMQSPSLQNLVLGKYGALVICQTPEQITNLEEVGRRLGQHVVGMAPLSVGSLDDEPGGETETRMLPQPYLLDLSITLGQYVQPQGVTVVD

SEQ ID NO: 2573 - DNA, 449 bp, Homo sapiens
gctagctggttgatcagtgatcagctgttggccgataacctgtcaaggatacgaataggccgtgtaacgaccggagacctggcgattgatgagatcgtggcagagaaagagatccggatagccggtgcacgactaagcactgttgctgctgcaaccgccattccggtgacagcaggtaacccggcccagccggctacccactggaactaaaggtgacccatgaacgatgctgacatcctggcgttagtccaggctgttgaggaaaacttggcgatcttggaacgactgatcgcggagggtaggcctacctccgctcagtcccaggacgctgagcgcttcaacaacaagacactggcagactggatggcccaagtcacccagttggtggcagaccacgttaatacccgtaccgcacacaccgtaacggcagcccaattgggcggttacac

SEQ ID NO: 2574 - protein, 76 aa, Homo sapiens
MNDADILALVQAVEENLAILERLIAEGRPTSAQSQDAERFNNKTLADWMAQVTQLVADHVNTRTAHTVTAAQLGGY

SEQ ID NO: 2575 - DNA, 359 bp, Homo sapiens
aaatttgtactactagatgatctaaaaggtcaattctacaaaaatcctctacttgttattagtttctctgtttcactattctctatggcaggtattcctccacttatgggattctttgcaaaacaaatggttctttactcagtatcttacaactactcatatgttgctattctagctattgtaatgagtgtaattagtgctagttattatctaaaaattgtacaacttatgttcttccagaaagattctgtacctacaactctatcttcagaaggtgaaacatctgaaacaggaacacctcttattacatcaatgcataggtctgttattgctatccttactcttatgaattcacttta

SEQ ID NO: 2576 - protein, 119 aa, Homo sapiens
KFVLLDDLKGQFYKNPLLVISFSVSLFSMAGIPPLMGFFAKQMVLYSVSYNYSYVAILAIVMSVISASYYLKIVQLMFFQKDSVPTTLSSEGETSETGTPLITSMHRSVIAILTLMNSL

SEQ ID NO: 2577 - DNA, 307 bp, Homo sapiens
  misc_feature (1)..(1): Wherein n may be a, c, g or t
  misc_feature (29)..(29): Wherein n may be a, c, g or t
  misc_feature (34)..(34): Wherein n may be a, c, g or t
ntacacccatcaattatccataatatatntctcnaccccgagcgctacatcggtttcgcgtttggctcgggcctggagcgtctgacgatgctgcgctacggcgtgcaggatctgcgtctgttctatgagaacgatctgcgcttcctgcccaattcatgtaatcgatgctgatagccctggctggcgcgcaaagccgctgccgccgggctttcggaagtgaagacttaactgcgagcgaactgatccatgcaattctctgaatcgtggctgcgtaccctggtcgacccggatttgtcgacggacgcgt

SEQ ID NO: 2578 - protein, 56 aa, Homo sapiens
  misc_feature (1)..(1): Wherein Xaa may be any naturally occuring amino acid
  misc_feature (10)..(10): Wherein Xaa may be any naturally occuring amino acid
  misc_feature (12)..(12): Wherein Xaa may be any naturally occuring amino acid
XHPSIIHNIXLXPERYIGFAFGSGLERLTMLRYGVQDLRLFYENDLRFLPNSCNRC

SEQ ID NO: 2579 - DNA, 382 bp, Homo sapiens
  misc_feature (1)..(1): Wherein n may be a, c, g or t
nctaaaatcccatttcgggaaaacagaaataacccaaagaaaagcctatgcacaaagatgttaatttcaatcttattcatcagagaaaaatggcaaagaattaaatcaatggcacagccatgggatggcatattacatgagctactttttttttttttttggaaattgattttcgctctttttgcctagggtggattggaagggggcaatctcagcccaccgaaacccccaccccccgggttcaaggaaattttctcctgccccaaccccccaatttgttgggattacgggcttgcgcccccacgcccagcttttttttttttttttattaaaaatgggttttccccccttttttcaagcggttctcaaaccccttaccccg

SEQ ID NO: 2580 - protein, 62 aa, Homo sapiens
  misc_feature (1)..(1): Wherein Xaa may be any naturally occuring amino acid
XKIPFRENRNNPKKSLCTKMLISILFIREKWQRIKSMAQPWDGILHELLFFFFWKLIFALFA

SEQ ID NO: 2581 - DNA, 333 bp, Homo sapiens
agatcttgagaaaataaatcaaggaagcccatggtctagggtagtgctggtgaggagataacagactcttgagatggcactagggccatggcggagacagacctggacactagtgggacccagcaaagacccacagcagcctggggaggcggcttccagagtgctgcgactttggaacatgaatactcctgagggttcacaaacgagcctggggggtattccaggaccagctggtaggggggcaaaggttgggtcatgaactatggggaatacaagaattgcaagaggttgaacatgcctgggggtgcagagacagaggctgaagtgcaggga

SEQ ID NO: 2582 - protein, 73 aa, Homo sapiens
MTQPLPPYQLVLEYPPGSFVNPQEYSCSKVAALWKPPPQAAVGLCWVPLVSRSVSAMALVPSQESVISSPALP

SEQ ID NO: 2583 - DNA, 467 bp, Homo sapiens
actagttggcaaaggttaaaaaatgcacatgtattctgatttacaacttattgcctttgtaaaagaaaaagattcgtcgtaaactactttaggcatgcaagaaaataccataaacaaacaacccagtgtaagaaatattttcatcacctttttttttaccaatgccatgtaaataattgtggtagactaacattagataatatgctgtggattatcagacatgccatggtttggtatattgagatatacagcacatattatgagaatgatgaaatatgatggggaagcacatttcattatgtaagtggctaggcgaatggagaagatgattgagaatccctttaggtacttgtgtacctttagaaaaatcattatctaagtttttatgtttcatttttttcatctatacagtggtatttcatattatttgggtagttgtgaggatgaaatgagatatgacacatgga

SEQ ID NO: 2584 - protein, 62 aa, Homo sapiens [sequence omitted]

SEQ ID NO: 2585 - DNA, 262 bp, Homo sapiens
agatcttgcctgcaaaagagttgttctgtggagctttagtgcccctttctggtgaacattagcaaagcatcctgaacaataatcttctccacattcaaggcataccagtagagcagctttgttctcacactgtccacaaactttcccatttatcttgggtttttcacattctgaagaatttgccattttataattaactgttggtttcactggctcttgaatctgttccttcagcaattttaatttcacttttccagcagaa

SEQ ID NO: 2586 - protein, 62 aa, Homo sapiens
MANSSECEKPKINGKVCGQCENKAALLVCLECGEDYCSGCFANVHQKGALKLHRTTLLQARS

SEQ ID NO: 2587 - DNA, 341 bp, Homo sapiens
  misc_feature (334)..(334): Wherein n may be a, c, g or t
  misc_feature (335)..(335): Wherein n may be a, c, g or t
  misc_feature (338)..(338): Wherein n may be a, c, g or t
  misc_feature (339)..(339): Wherein n may be a, c, g or t
  misc_feature (340)..(340): Wherein n may be a, c, g or t
  misc_feature (341)..(341): Wherein n may be a, c, g or t
agatcttttctaatagatgaaattaacaatatagattttcatcccagcattgtttttgctcttataaaagttgataagttttacttttattttcatcaaattcaaaatatttttaaaatttttcttgagaccttctcttcgatctctgggttacttagcagtgtgttatttaatatgctaatacatattttttccacctgtcttaatttattagtttccaatataattccattttggtttgagaatatatcttatgtttcctatccttttaaatatattatggcatgctttatggatcagatgaggtttattttattgaatgtttcatgtgccnnccnnnn

SEQ ID NO: 2588 - protein, 55 aa, Homo sapiens
  misc_feature (54)..(54): Wherein Xaa may be any naturally occuring amino acid
  misc_feature (55)..(55): Wherein Xaa may be any naturally occuring amino acid
MLIHIFSTCLNLLVSNIIPFWFENISYVSYPFKYIMACFMDQMRFILLNVSCAXX

SEQ ID NO: 2589 - DNA, 367 bp, Homo sapiens
  misc_feature (1)..(1): Wherein n may be a, c, g or t
nctctactttttgtgcaatgtgaaaggacaaagagacaggaaaaagaaaaaattatggtgcggcctaaacatcggatgtggtgcatcttttagtgccgagtagtcagagattaaaatgccttgttggcgcaatcggtagcgcgtatgacttttaatcataaggttaggggttcgagccccctacagggcttatctctttttttctctaacaaaaaaaaaattcgtgtttctattttgcatattttcctatattttcctatatttttttctcggctcttatacagcaaaactaggttcatataaaaaagatacggttatatgcattatttagatcggaaaaagtctctgtctaatgcggtcacctagg

SEQ ID NO: 2590 - protein, 62 aa, Homo sapiens
NALLAQSVARMTFNHKVRGSSPLQGLSLFFSNKKKIRVSILHIFLYFPIFFSRLLYSKTRFI

SEQ ID NO: 2591 - DNA, 359 bp, Homo sapiens
  misc_feature (112)..(112): Wherein n may be a, c, g or t
  misc_feature (113)..(113): Wherein n may be a, c, g or t
agatctaacataagtcatctcaaacttttatataaaatagtaaaagacttaacactacttaacccattttatgaagccataatcatcctgataccaagacttcatgaagacnnaacaaaaaaagacaattgtagtcaagtctctttactgaacataaattaaaaaaaaaatctgcagaaaatacttgcaaactgaattcaggaaagcataatttgatttataatcatattgcagaaaaaacactttgccagatttttaaagcatgtcaccagactctgaggtccacttactgctccttggtaccaggaaaagggcccgtacagattacggctgggtttcatggaaagaaaaatatgggt

SEQ ID NO: 2592 - protein, 53 aa, Homo sapiens
  misc_feature (38)..(38): Wherein Xaa may be any naturally occuring amino acid
RSNISHLKLLYKIVKDLTLLNPFYEAIIILIPRLHEDXTKKDNCSQVSLLNIN

SEQ ID NO: 2593 - DNA, 267 bp, Homo sapiens
aagcttggtaacaaaagtggaagggagccggttgaacccattgtgttgcgcaatcgccctcgtcctcaccgtcaccatcacagccgtcatggttcccaaaaaataagcgtaaaaacccttaaagattctcagccgcagcagcagataccattacaaccacaattggaaggcgcaatagagatagaaaagaaagaggaaagcgattccgagagcttgccccaactacagccggccgttagtgtaagtagtaccaaaagtaactctaga

SEQ ID NO: 2594 - protein, 89 aa, Homo sapiens
KLGNKSGREPVEPIVLRNRPRPHRHHHSRHGSQKISVKTLKDSQPQQQIPLQPQLEGAIEIEKKEESDSESLPQLQPAVSVSSTKSNSR

SEQ ID NO: 2595 - DNA, 312 bp, Homo sapiens
  misc_feature (127)..(127): Wherein n may be a, c, g or t
  misc_feature (128)..(128): Wherein n may be a, c, g or t
accggtgagccgttcgacaagtattacggaagcggcgataaccgtggcggcaacggcgccgaccagggccgtggcttcaatgtcgggcgttggtacgatttttacggcgccaacttgcaacgcgccnntaacggaactgacgggttcgaccaaaagcgctgggtcacccacaccctcgaccgtctgcaagcctggggtttcaacaccgtaggcaactggagcgacgcagccttggccaccgccgaccgcgtgccgtacaccttgccgctgtcgattgtcggggactacgccagcatcaacaccggcaccgat

SEQ ID NO: 2596 - protein, 104 aa, Homo sapiens
  misc_feature (43)..(43): Wherein Xaa may be any naturally occuring amino acid
TGEPFDKYYGSGDNRGGNGADQGRGFNVGRWYDFYGANLQRAXNGTDGFDQKRWVTHTLDRLQAWGFNTVGNWSDAALATADRVPYTLPLSIVGDYASINTGTD

SEQ ID NO: 2597 - DNA, 325 bp, Homo sapiens
actagtttttcagattcaaatcgaaggaaatgctctgttctccagtggaatccagatatgtccacccagttgattgttgcatcagatgatgacagttctccctcactgggagtttgggatgtgaggaagaccatttcaccagtaagagaatttgttggccattcaaaaggtgtaattgctatgtcgtggtgtccttatgatagttcattcttgcttacatgttcaaaagacaacagaacaatttgctgggatactgttagtggagagattattagtgagctacctgcaggtgctaattggaactttgaccttcactggtaccggt

SEQ ID NO: 2598 - protein, 108 aa, Homo sapiens
TSFSDSNRRKCSVLQWNPDMSTQLIVASDDDSSPSLGVWDVRKTISPVREFVGHSKGVIAMSWCPYDSSFLLTCSKDNRTICWDTVSGEIISELPAGANWNFDLHWYR

SEQ ID NO: 2599 - DNA, 219 bp, Homo sapiens
aattccccaaaacctacgaaaacattccctggttcccagcctgtgtcctttcagcattctgatgtggaagagaagctgcttgcgcatgattactacgtttgtgagaaagcagatggtctgcgggtgttgatgtttatagtgataaatcctgtgacgggtgagcaaggatgctttatgattaataaggaaaataactattatctggttaatggatttagg

SEQ ID NO: 2600 - protein, 73 aa, Homo sapiens
NSPKPTKTFPGSQPVSFQHSDVEEKLLAHDYYVCEKADGLRVLMFIVINPVTGEQGCFMINKENNYYLVNGFR

SEQ ID NO: 2601 - DNA, 377 bp, Homo sapiens
tcatgagttccagaccaccatctttaaaatcttcaggtgctttgacctcttcctgccctactaaggttgaagatctctcctttgaggtccaaggagccattcattgtcaccataattcttggaaagagctgaaaaaagaacccaggaatacaactccccaggagcctccacagtcccttccccatgcagagggtgtaacttgggccaagaaatcgtgatgtgagtaggtcacacagtgttgagggccaaaaccctcgactccgttgggagttaaaggggaggaagtggacatttcctttgaacctaataataaacaagtaagttttgtattctcatttttcacagtgcaagaaaattttgtttagaaattctagttg

SEQ ID NO: 2602 - protein, 71 aa, Homo sapiens [sequence omitted]

SEQ ID NO: 2603 - DNA, 322 bp, Homo sapiens
acgcgttttgtctgtgaagtcacagatttgaaaaatgagaacgaaaaacataaccacctatgagattgagtccctacattttaccatttacgctactaagttacccaatatcgtaacacgaaataacaagttaaggggaggaatgaaaaggttatcaaagcggcaggagacaggaggaataacgcaggacgagacccaaagataatatttctataacgaagtcgttcgaacccatcagatttctgctttgattacatacacaagctttgtttctttctacaggtgattgtatgtgggcttatggtatgcctgcaggacgcgt

SEQ ID NO: 2604 - protein, 56 aa, Homo sapiens
MRTKNITTYEIESLHFTIYATKLPNIVTRNNKLRGGMKRLSKRQETGGITQDETQR

SEQ ID NO: 2605 - DNA, 321 bp, Homo sapiens
aagctttgcatgggtttattcgacccccctggctgttcacagccgatgtccttaatgctgccatccatttgcggggtgggaagcctggattcagccccggcttgcagccaggttgctgcagcgctggggtttgtgcctcagtttccccctccggatgccccttcccagtgaatggtggacagctggcagcacgcctttataacagagagacgcctgtggattctgcaaaaaggcactcggaggcagctgaggacagccctgctaattgcagagagcagagcagcctctcgtttgcctattacggtcccagcaccgacgcgt

SEQ ID NO: 2606 - protein, 53 aa, Homo sapiens
MGLFDPPGCSQPMSLMLPSICGVGSLDSAPACSQVAAALGFVPQFPPPDAPSQ

SEQ ID NO: 2607 - DNA, 214 bp, Homo sapiens
  misc_feature (1)..(1): Wherein n may be a, c, g or t
  misc_feature (214)..(214): Wherein n may be a, c, g or t
ntgccgcgcccgtgcgcgcagcatgcgcaggccatgtcgatccggcatgcccaggtgggcgctgccggggccggcgccgttgtcgcgcacgggcagcatgacctgggcgccatcgtcgtcgagtaccacgttcagctgcgtggggccggcgtgcgcggcgggattgcgcaaaccttcctcgacgcagcgcagcagggcgacgttctggtcacgn

SEQ ID NO: 2608 - protein, 64 aa, Homo sapiens
MRRPCRSGMPRWALPGPAPLSRTGSMTWAPSSSSTTFSCVGPACAAGLRKPSSTQRSRATFWSR

SEQ ID NO: 2609 - DNA, 387 bp, Homo sapiens
cctaggtccagagggaaagcagcctgtgggaacagtggccccaccaagactgactgtctcaccccaccccgggtgggctcctgtctgccagccgtccacctgtctgctagaaagccctccctgggcagggccacccagcaatgggtacagcctccctgggctctgaatgccttgtgtggggagggtgggggtgtctggagcggaagcctcagaccattcaaagcaaagcctggcttcaccatctaatcagggggcgaggaggtagtaacagagacagacatcacagcaaaaagatctgggttcaaacgcttcacaaccccagctccactggctgtcccccagtgtcagccaggcctgagtctgactatcttcagggatgagggaaag

SEQ ID NO: 2610 - protein, 80 aa, Homo sapiens
MVKPGFALNGLRLPLQTPPPSPHKAFRAQGGCTHCWVALPREGFLADRWTAGRQEPTRGGVRQSVLVGPLFPQAAFPLDL

SEQ ID NO: 2611 - DNA, 285 bp, Homo sapiens
  misc_feature (1)..(1): Wherein n may be a, c, g or t
  misc_feature (2)..(2): Wherein n may be a, c, g or t
  misc_feature (3)..(3): Wherein n may be a, c, g or t
  misc_feature (157)..(157): Wherein n may be a, c, g or t
  misc_feature (158)..(158): Wherein n may be a, c, g or t
nnntcatggcccactgtagccttggctctggcaatcctcctgcctcagcctcccagccagctgagtagctgggaccacaggtgtatgccaccactccaggctaattttaaaaaaatgtttagagatggagtctccctgtgttgtccagcctggtctnncactcgtggcctcaagcaatcctcttgccttggcctcctaaggcattgggattacaggcatgaaccaccacacctggccctataacttttagtaatgatagaaatgttatgtgatctgcactgtaca

SEQ ID NO: 2612 - protein, 80 aa, Homo sapiens
  misc_feature (1)..(1): Wherein Xaa may be any naturally occuring amino acid
  misc_feature (53)..(53): Wherein Xaa may be any naturally occuring amino acid
XSWPTVALALAILLPQPPSQLSSWDHRCMPPLQANFKKMFRDGVSLCCPAWSXTRGLKQSSCLGLLRHWDYRHEPPHLAL

SEQ ID NO: 2613 - DNA, 450 bp, Homo sapiens
atccatgcagccgcgtgagtaacatatctatccataggacaaataaataaacaccggggacgatttttgcacacagcttcgatcagtggagaaaggagggaaaaaggccaagactgagtgcttatgccaaaaaatcgtggtgtcttggatgccatcactcgcagtgtgatagatggtagtgatcaggagtcgagctcatctttcaactcggacaaggaatatgcggctgtgacgaagggcctcagcagctcaagagtacaaaagaagtcatctttaaggcggatgaaaagcaaagtcgaggagcttcaatccttagtgaagcattaccgagaaaatgaagccgctttagtgtctagcgccaagttattgtccggcgagatcataggctatgaaattaagatggctagtttacatggaaaaatgaaaagtatcctggatgagaacaacgcg

SEQ ID NO: 2614 - protein, 109 aa, Homo sapiens
MPKNRGVLDAITRSVIDGSDQESSSSFNSDKEYAAVTKGLSSSRVQKKSSLRRMKSKVEELQSLVKHYRENEAALVSSAKLLSGEIIGYEIKMASLHGKMKSILDENNA

SEQ ID NO: 2615 - DNA, 404 bp, Homo sapiens
gggccctcctgggccaaagtgcgcaacctccagactgagacgtagatggtcggtgcaaagtgcatgtgcggtctgttagcaggttgacgatcttcgcgcagaccaactcccttctttgcgcctggccccagcacaggtgcccacgcaattactcttagaatcgcggaaactggccctaagctgcgagcgttatgagaagaaaggacaaccaccgtgcgttaggggcttctgcgctataacacagcaggcagcttatgctattgggagtgttcagggacctgagtgaaccattcgcgaatctcttaataaagctcgtagcgctcagagccccccgtgtctcccacaggaatatcgactgcggaaacgaggacgcgcagctgggagctctggaggagcttgagact

SEQ ID NO: 2616 - protein, 50 aa, Homo sapiens [sequence omitted]

SEQ ID NO: 2617 - DNA, 312 bp, Homo sapiens
cgacatagagctcaaactgaaaagcatgtcgtcctgtgtgtcagctcactgaagattgatttacttatggattttttaaatgaattctatgctcatcctaggctccaggattattatgtgatgattttgtgtcctactgaaatggatgtacaggttcgaagggtactgcagattccaatgtggtcccaacgagttatctaccttcaaggttcagcccttaaagatcaagacctattgagagcaaagatggatgacgctgaggcctgtgttattctcagtagccgttgtgaagtggataagacatcatctgat

SEQ ID NO: 2618 - protein, 104 aa, Homo sapiens
RHRAQTEKHVVLCVSSLKIDLLMDFLNEFYAHPRLQDYYVMILCPTEMDVQVRRVLQIPMWSQRVIYLQGSALKDQDLLRAKMDDAEACVILSSRCEVDKTSSD

SEQ ID NO: 2619 - DNA, 215 bp, Homo sapiens
  misc_feature (1)..(1): Wherein n may be a, c, g or t
  misc_feature (215)..(215): Wherein n may be a, c, g or t
nggaagatggcaagccatgaggctgacgatgtggaaggggaacatgtcacacaggacctgtggaccacgggaaagactaaggctgttactccatatacaaccaactttctgttcattcagcaagtattgattgagagcccactacgtgccaggcactgtcttagatgcaaggtaatgaaccagacaagacagaaaaggcgccagccttgtggagn

SEQ ID NO: 2620 - protein, 69 aa, Homo sapiens
MASHEADDVEGEHVTQDLWTTGKTKAVTPYTTNFLFIQQVLIESPLRARHCLRCKVMNQTRQKRRQPCG

SEQ ID NO: 2621 - DNA, 261 bp, Homo sapiens
acgcgtctcttaggaataggatcatccaggaaaactggaaccatgtggccacgggaccccttccactcttcctgtatatgtgccctctggccatggatcggctgctctaaagccctgtttgtccagcccctcaaggagagaggggggtctcctggtcaggaacacaggataatacaatctcagccttgttttcattctctctcagtctccctgctgcaaaactcccctccaatccacccttcattctgatgccagagatct

SEQ ID NO: 2622 - protein, 68 aa, Homo sapiens
MWPRDPFHSSCICALWPWIGCSKALFVQPLKERGGSPGQEHRIIQSQPCFHSLSVSLLQNSPPIHPSF

SEQ ID NO: 2623 - DNA, 285 bp, Homo sapiens
  misc_feature (285)..(285): Wherein n may be a, c, g or t
ttcacattctattgtgcacatgatcaattttgtttaagctgttcccttcgctgccatttggcctgcttttctttatccgtccattcccactgccatttcctcattcgggttgttctctgtgtgtcctccacccccagcctcattataggggccacctcatgtaccacaaccagcatgaaatctttcctggccacccaagctcatatggatccttcttccctctcatttatttaacagctaatttctgatcttgatagatgcaaccttgccagatgctgggacagn

SEQ ID NO: 2624 - protein, 50 aa, Homo sapiens [sequence omitted]

SEQ ID NO: 2625 - DNA, 372 bp, Homo sapiens
  misc_feature (98)..(98): Wherein n may be a, c, g or t
gccaattcttgtattcccaccagacacggagcctcaccatgtcggacagaccggtcccgaactcccgacctcatgatgcgcccgcctcggcctccaantgtgcagggataccgggcgcgaaccaccacgtccgtccaatataggaatttaatacaagaatacaactgacagaagagccattcatccatatggtatactcataaatttcatattatatattagaacctgaaaatcatgttgctatggtgttgctcccaggagacatttcagcagcagtaaccaggaagagctaagaagctgacagacccgcatatagatatgattagaaaatcatctgtggcgctataaagattcagtctgagcacctctaga

SEQ ID NO: 2626 - protein, 55 aa, Homo sapiens
  misc_feature (33)..(33): Wherein Xaa may be any naturally occuring amino acid
ANSCIPTRHGASPCRTDRSRTPDLMMRPPRPPXVQGYRARTTTSVQYRNLIQEYN

SEQ ID NO: 2627 - DNA, 302 bp, Homo sapiens
acgcgttttggaaacaacgcagctcccgtaagagtgcatgacacgctccagagtccggtgaagtgtatccacgcgcgcgggagggccaaatgcggaaatgtcggccaatcccccccttattcggacgaatgctcttgccaggtggcccctagactttgcaacgtggtgaagtccctggcgttgcgcagggccgttccatttgccgcgcggcctgccccggaaggtcagattcccggccggcccccggatccgcagacaatgccctgtccactgacgctgcatgacggcaactcatcaatacc

SEQ ID NO: 2628 - protein, 94 aa, Homo sapiens
MQRQWTGHCLRIRGPAGNLTFRGRPRGKWNGPAQRQGLHHVAKSRGHLARAFVRIRGGLADISAFGPPARVDTLHRTLERVMHSYGSCVVSKTR

SEQ ID NO: 2629 - DNA, 596 bp, Homo sapiens
agatctcgactaatcacattaaaacgtgacgtgcataacatgcgcgtggaaaaagtgcagcaaagactactgcactgtcagggctgcacggctagcaacattatggagcctgtatctagttggatcgatacatgtcgatcatacaaatacttgagcgtcggttaagtcaagtatatgcggacagccgagacgaagtgtctcgtcactacaggtccctctaccagctgacgcaatagagccaagcattcaactctcaggtggccagctccacagtgacctgacacgtctgattagccacgattctaggataaaacccactaaagagcggactctggaaacgactcttgtaaactatctctacagggcagcaacaaagccatcacctttcggtcgtttcgtggaagtaggggccttcgacccgtctcaaccaaattccgaacctcgacgctgcagtgaatccagcgtgacgacaaaccggattcttaccagctggctcactgcagtaacagcgcgttctttcgccgcaccagaaatgcttgctatcctcaacagcaccctgcgcgttaaacgcgatataatccagttcattggaattc

SEQ ID NO: 2630 - protein, 54 aa, Homo sapiens
MNWIISRLTRRVLLRIASISGAAKERAVTAVSQLVRIRFVVTLDSLQRRGSEFG

SEQ ID NO: 2631 - DNA, 355 bp, Homo sapiens
  misc_feature (1)..(1): Wherein n may be a, c, g or t
  misc_feature (2)..(2): Wherein n may be a, c, g or t
nnggtaccgaaacccgtgtcgctaccgcataaaatcaaaggaactagtatgcataacgtaacaacaaatggtgcctccattcccgcccttggccttggcactttccgtatgcccggcgaagatgtgcttcgcatcgtcccttacgcgctcaaggctggttttcgccatgtcgataccgcgcagatttatggcaatgaagtcgaggtcggtgaagcaattgcgacttccggcgttcagcgtggcgacatctttctgaccacaaaagtctgggtagataattataagcatgatgctttcatcgcatctgtcgatgaaagccttaccaagcttaagaccgactatgtcgatctgctgc

SEQ ID NO: 2632 - protein, 118 aa, Homo sapiens
  misc_feature (1)..(1): Wherein Xaa may be any naturally occuring amino acid
XVPKPVSLPHKIKGTSMHNVTTNGASIPALGLGTFRMPGEDVLRIVPYALKAGFRHVDTAQIYGNEVEVGEAIATSGVQRGDIFLTTKVWVDNYKHDAFIASVDESLTKLKTDYVDLL

SEQ ID NO: 2633 - DNA, 462 bp, Homo sapiens
acgcgttcagttgcctctggtacctgcctacgtcggcaggaattcctggatagtctaggaaaccctatgacgttgagacagaataagacaggaatcgcgcaaagtagaagtgggcgagagagtgttgggtccgaatgtggcaagagagggagcgatagagtgtgagagggagcagaaaccatgtggttgatatcccaaagaaagtcgtgcgggctaaggagtctgtaaatggcgaggaatatcctttttgatatgactttctttgggatatcaaccacatggtttctgctccctctcacactctatcgctccctctcttgccacattcggaccccaacactctctcgccccacttctgctttgcgcgattcctgtcttattctgtctcaacgtcatagggtttcctagactatccaggaattcctgccgacgtaggcaggtaccagaggcaactgaacgcgt

SEQ ID NO: 2634 - protein, 71 aa, Homo sapiens [sequence omitted]

SEQ ID NO: 2635 - DNA, 564 bp, Homo sapiens
acgcgtgtttgagtgagcatgtgagatttgggaatttaagacgcaccaatgctaaaaccaagtaagacacgttattttatgcactgctaagaagctgaaccacagactatgttacacattgattatagacttatgtgactccagagatgtgaaatctgaaaggtaaacatcttagacttgatgacatatgctgtgtactaggaacagagcaatttaaaggagtccctgtggacccggtgaggccaccgcgtgtgcctggcccgctcccagaggccagggagccagggtctggcaaaccaaggctgccggctgcccgggttcccaggaagggagagaatgcagggtagaagccaagcctcatggatggcagacagatggcaagctgataatggccgcttacaagtgtgctgaggagggagccttcctcccactcttccccctccgaggggaaagcacccaggaagaacacagcaggtctacaggaagcagatccacagggacagaccccacctgagggaaaacctgctgtgtgcagtgggcccgcaggaagcacccctgtgcctg

SEQ ID NO: 2636 - protein, 76 aa, Homo sapiens
MRLGFYPAFSPFLGTRAAGSLGLPDPGSLASGSGPGTRGGLTGSTGTPLNCSVPSTQHMSSSLRCLPFRFHISGVT

SEQ ID NO: 2637 - DNA, 334 bp, Homo sapiens
aaatttacactttaccttgtggtagtaagtggtcaaaacatgagagtaacataactagattaatgttttagaatgataatgttgttagcaacttggaggattgactggaaaaaaaatagaccaaatatagtgataatggttggtaggctatcaccactttccgattgggagatgatgaatattcagctgagtcaagaacaggaagagaaagaaaatggtttcaaatgagaatcagaagaatgtaaccaaagaataacaaggatgatttagtatgggaagtgtacagaagaggaagtcttgaaggtttccaatggctcttacatggataactagt

SEQ ID NO: 2638 - protein, 51 aa, Homo sapiens [sequence omitted]

SEQ ID NO: 2639 - DNA, 248 bp, Homo sapiens
ccgcgtacgctttaccataacgtcccagatatcctacttcaccctggccactttgtcgggaagcctgctgactggcggccagattccagccccaaccgccgtcggcaggtggcatcttgctggcgttgagctgatagccggtttcatcgttggcgcgttgtagcgtgctgctggcgctcagattgttatcaggggtaatcggtaccatcagatagagactgcgatcgcgggtatcgtcaatgttctgg

SEQ ID NO: 2640 - protein, 69 aa, Homo sapiens
MVPITPDNNLSASSTLQRANDETGYQLNASKMPPADGGWGWNLAASQQASRQSGQGEVGYLGRYGKAYA

SEQ ID NO: 2641 - DNA, 249 bp, Homo sapiens
accggtcggcgacttccccgaaggcaccacgtttgagatcaaccaaacgcccccggccggctggcaggtgaagatcgaccgccacaccggcgaaatcaacctgaccccgccgcagcgcaccagggccggcaccaccgtgaccatgccggtaaccgctcgcttccccgacgggtcgcgcacgtaccttgagaccaacttcaccttcatcaaacccggaggggaacaggcatccgggaccatggtgcgcta

SEQ ID NO: 2642 - protein, 80 aa, Homo sapiens
MVPDACSPPGLMKVKLVSRYVRDPSGKRAVTGMVTVVPALVRCGGVRLISPVWRSIFTCQPAGGVWLISNVVPSGKSPTG

SEQ ID NO: 2643 - DNA, 499 bp, Homo sapiens
cgcgtcgcggtactcgacgtcgattttcatcacggtaacggcacccagaacattttttacccgcgcaatgacgtgatgttcatatcgctgcacggcgagccggccgtgtcctatccctactattcggggttcagcgatgaagtcggcgcaggtgttggcgaagggttcaacctcaactacccgctgccgaaaaacaccgcctgggatacctaccgcgacgccctgctgcatgcctgcaggaaactccagcaattctcgccgcaggtattggtgatctcactgggggtcgacaccttcaaggacgacccgatcagtcacttcctgctggaaggcgaggatttcatcgggatcggcgagctgatagcgagtgtgggttgccccaccctgtttgtgatggaaggcggctatatggtcgatgaaatcggaatcaacgcggtgaacgtactgcatggcttcgagagcaagcgcgcttgagcatccgcccgaagacggcgtgata

SEQ ID NO: 2644 - protein, 157 aa, Homo sapiens
RVAVLDVDFHHGNGTQNIFYPRNDVMFISLHGEPAVSYPYYSGFSDEVGAGVGEGFNLNYPLPKNTAWDTYRDALLHACRKLQQFSPQVLVISLGVDTFKDDPISHFLLEGEDFIGIGELIASVGCPTLFVMEGGYMVDEIGINAVNVLHGFESKRA

SEQ ID NO: 2645 - DNA, 451 bp, Homo sapiens
agatcttcccacttaatagtaaaactccagagtctttcagatcccccttactttgctctctttttatttatttatttttctttctctatgacctgctttacaaaacattccattcctgacataaaataccctactggatgtttatctcattctttccttcgtttaaatgccaggtttttttcttctcatattctaaattttgtcgagaactcagttcaaatcctagctctacatttcacagattttttcaagtgccacctctgagcctcaactttccatctcagaaaagtagaaagtgattctcatatagcctgatatggtattttaagtatttaccacactcatacttagacatggcatgctaaaacataattattattatttcaagttttgttgtaagccacatataaaagtcgagaatggtatttccattttgtcaggattctccgga

SEQ ID NO: 2646 - protein, 58 aa, Homo sapiens [sequence omitted]

SEQ ID NO: 2647 - DNA, 201 bp, Homo sapiens
gtgcactattttgcttcttttcaaagtagctgccaaagagctgaacctttaggatccactgaattaataaacattggtgatatactgcaagcaacaaggagttctccccatcgagtggcagtagttcttccccctctcgagggtgcccctttcggtagtttgcgattttcttccagaagagcaccgattgccccatccgga

SEQ ID NO: 2648 - protein, 67 aa, Homo sapiens
VHYFASFQSSCQRAEPLGSTELINIGDILQATRSSPHRVAVVLPPLEGAPFGSLRFSSRRAPIAPSG

SEQ ID NO: 2649 - DNA, 319 bp, Homo sapiens
  misc_feature (1)..(1): Wherein n may be a, c, g or t
ngcgcgccaggcctgggccgcagcctcgggagcgggtgtggcgggcgctgcgtccgctcaggccgagggtctcccggcgcgagtctaccccgtcccgcctcttccccttaccacgtagcccccccacacgtagagggaagtttccgcccaccacagcgcactggccgctgcgttcctccgccacacagaacacctgagagtccgccattcgcgccgtcgttggcccgccgcttgccgcgccacaacccctgcccgcccggcggcctcgcctccagccccgactgctccacgcacgaacggaacgcggcgagggtcgaga

SEQ ID NO: 2650 - protein, 106 aa, Homo sapiens
  misc_feature (1)..(1): Wherein Xaa may be any naturally occuring amino acid
XAPGLGRSLGSGCGGRCVRSGRGSPGASLPRPASSPYHVAPPHVEGSFRPPQRTGRCVPPPHRTPESPPFAPSLARRLPRHNPCPPGGLASSPDCSTHERNAARVE

SEQ ID NO: 2651 - DNA, 267 bp, Homo sapiens
cagcccaacgacgaccttttcaatcacaagcgcaccgccaggttgatgcgccagatgggcctgttcggctacaccaaaaaacgccgggtgaagaccaccgtgtctgcgaaacgggctccgaagttgcccgacctgctgaaacgccggttcaccgcggagaaaccgaacaccatctacgtcggcgatatcacgtacctgccgatcgcggacgggtcgaatatgtacctggccaccgtcatcgactgctattcgcggcagttgaccggt

SEQ ID NO: 2652 - protein, 89 aa, Homo sapiens
QPNDDLFNHKRTARLMRQMGLFGYTKKRRVKTTVSAKRAPKLPDLLKRRFTAEKPNTIYVGDITYLPIADGSNMYLATVIDCYSRQLTG

SEQ ID NO: 2653 - DNA, 328 bp, Homo sapiens
gctagccagtactgtattgtatgtcttagggagaagccacagaacagaaaggaagaatgcttagctattgacaattattagagcagcattttaacatatacaatcacttccaaaggaagatttgaggtaatttcaaagatgagtgaagtagaaactttaaaaagaaacaaaagaacatcagaaataagataaatagggtatgaaaaaataagattagctctgaaagatgagggttgctcactaatacactatccatggtggctcacacacctttcattactaatgataagggctgcgaaattcatcttcatgtatcacgcccggatcc

SEQ ID NO: 2654 - protein, 50 aa, Homo sapiens [sequence omitted]

SEQ ID NO: 2655 - DNA, 317 bp, Homo sapiens
  misc_feature (29)..(29): Wherein n may be a, c, g or t
  misc_feature (47)..(47): Wherein n may be a, c, g or t
  misc_feature (277)..(277): Wherein n may be a, c, g or t
  misc_feature (278)..(278): Wherein n may be a, c, g or t
  misc_feature (300)..(300): Wherein n may be a, c, g or t
agtactttaaaagataaaaaaaagaaagnaaaagatttaaatagaanttttggctaatgagtataacagtcactcacaagtggtatacataaaacataccagtgcataaaatatactacagcagtgctgtccaacagaactttctgcagtgacgaagatgttctctagagtactgtccaatacagtagccactggtcacctgtggctattaagcattcaaatataagtacaactaaagctactgaaatgtagttagtagaactgaggaactgatgtnntaattttacttcagctgtattnaagttaaaaagcggcat

SEQ ID NO: 2656 - protein, 50 aa, Homo sapiens
  misc_feature (6)..(6): Wherein Xaa may be any naturally occuring amino acid
  misc_feature (14)..(14): Wherein Xaa may be any naturally occuring amino acid
MPLFNXNTAEVKLXHQFLSSTNYISVALVVLIFECLIATGDQWLLYWTVL

SEQ ID NO: 2657 - DNA, 212 bp, Homo sapiens
atctctattctcaagtccatgcgccacaccaacattgtcgacctgcgcgactgcatctacaccgaccagcacatccacctcatcatggaatactgcccaggcggtgacctgtccatgtacattcacaagcacggccaagtcgcaccatgggacggcgatgcccagaccaacccactggccgccgcgcagcgcgccaagttcccacacccaaa

SEQ ID NO: 2658 - protein, 70 aa, Homo sapiens
ISILKSMRHTNIVDLRDCIYTDQHIHLIMEYCPGGDLSMYIHKHGQVAPWDGDAQTNPLAAAQRAKFPHP

SEQ ID NO: 2659 - DNA, 452 bp, Homo sapiens
ggatccgtcgagcagatcaagccatcaccggacctgaaattctcagcacgtcggcaatgggagtggcgtcatgacgatcgaccatgcagtaagccgatatgcacaggacgctccggtagtcccgctcgatgatgggaaggaccttgccggtgtgctttcccgcatctccccatcgccacacgtatcgccggcagctgtgtctcctcgtcccaacccacgacgattcgaggcgaaggacattgattggcgtaccgtcgtttcattccgtcggaaggcatctgaacgtatctcgtcggaacgggcgtcccatcgggaacgtaccggcgtcgacctgagcggcgatgatgtgcgaatgcttggccggtcgatcgtgcggcaggctgtcgagtcccacgcggagaaattgacggctgaggggcaagccctgtggagcgcgcagactaaagacgcgt

SEQ ID NO: 2660 - protein, 127 aa, Homo sapiens
MTIDHAVSRYAQDAPVVPLDDGKDLAGVLSRISPSPHVSPAAVSPRPNPRRFEAKDIDWRTVVSFRRKASERISSERASHRERTGVDLSGDDVRMLGRSIVRQAVESHAEKLTAEGQALWSAQTKDA

SEQ ID NO: 2661 - DNA, 330 bp, Homo sapiens
  misc_feature (330)..(330): Wherein n may be a, c, g or t
gtgcactaggcatcctggcaagagcagcccaccaggccatgaaagaattagccaacctgatcaagatagtaatggagagacacaggatattgcacatgagagtactcccttgggtcgatcagatggccagcctaagccgagatggcgaactggagcatctcgaagctgcgctcctgcttgccttccccacgttcctggtggagagggtggcctccagctcttgttcacagctgctgctgtgcagaagacgcctcagctgattccacccgccagagccgccactgctgggagtgctttccctttgcttcattttcagcccaagcatgaatn

SEQ ID NO: 2662 - protein, 73 aa, Homo sapiens
MKELANLIKIVMERHRILHMRVLPWVDQMASLSRDGELEHLEAALLLAFPTFLVERVASSSCSQLLLCRRRLS

SEQ ID NO: 2663 - DNA, 412 bp, Homo sapiens
caattggccaactggtcatcccttgatatgcatgttctggttacatacgataagttcccctcgctcaacgttgagccggttcaagagttgcgggtagtcacgaaaggtatcaggcagtcgacgtgttgtgctttctttgatggaactgattttgcatttgaaaatttgaatggttggaaaaaaggttcggccattaaagtgcccgaagacttgatcatccagcgtcatggacgatgatatggttatggctcagcttgttaccaacttataccaacaactcagatggtgtattgcttgagaaagctttttcgcgactggtggtggggcagcggtatgaattcaaagtgtccgttcagcgagccaatagctcttatgcggttccagagttgtccctgagtgctggcgagttcac

SEQ ID NO: 2664 - protein, 70 aa, Homo sapiens
MTLDDQVFGHFNGRTFFPTIQIFKCKISSIKESTTRRLPDTFRDYPQLLNRLNVERGELIVCNQNMHIKG

SEQ ID NO: 2665 - DNA, 279 bp, Homo sapiens
atctttacgtttttaaactcaagtgaaatcaaaaaaattgtggaaacgcatatcaaatcacccagtctacgttatggccaaactttattggctaaagaagtcacagatatgttatatggagttggctccggatcggattcagaagcgctttctaatattatttttggacgttatgacggaactttatctgctgcgaagttagttgatctatataaaaaagccagaattttgcagtatgctgatagagagattgacttaataaagttaatttgtaaacta

SEQ ID NO: 2666 - protein, 93 aa, Homo sapiens
IFTFLNSSEIKKIVETHIKSPSLRYGQTLLAKEVTDMLYGVGSGSDSEALSNIIFGRYDGTLSAAKLVDLYKKARILQYADREIDLIKLICKL

SEQ ID NO: 2667 - DNA, 304 bp, Homo sapiens
tacaacgctgcctattttgcgggcatggaagacaccgcccacaccccgcactcgtactacatttcccgctacccagccggccgcgaggctgccgtgtacgagggcgccatcgacctgcagttcaccaataccttcaataccccggtccgcattgagaccgactttggtggcggcaagatcaccgtgcgcctgaagggcaccaagaccgtcgacgtcgagtctgtgaacaacggccgctgggctaagaccgacccacaacctatgtccgtgcccggcagcgactgctcgccttcttctggcgcgc

SEQ ID NO: 2668 - protein, 101 aa, Homo sapiens
YNAAYFAGMEDTAHTPHSYYISRYPAGREAAVYEGAIDLQFTNTFNTPVRIETDFGGGKITVRLKGTKTVDVESVNNGRWAKTDPQPMSVPGSDCSPSSGA

SEQ ID NO: 2669 - DNA, 310 bp, Homo sapiens
  misc_feature (310)..(310): Wherein n may be a, c, g or t
gaattctaccctcaagacacctatgtacagggcgcttacccgcaagataccgagcagcagttctacccacaagatacatactcccagtatgtctacccgcaggacacctattctcaaggtgacgggcaacagttctatccacagagcgactatccacaggatgactatccgcaaggtgtctacccacaaagcgacgagcaactctaccacccgtcgcagaattattcacagcagggtgaagagaccagttcaggtgatggcgaacaacaggggaagaagtcgaaaaaaggccgcattattggattttccn

SEQ ID NO: 2670 - protein, 103 aa, Homo sapiens
EFYPQDTYVQGAYPQDTEQQFYPQDTYSQYVYPQDTYSQGDGQQFYPQSDYPQDDYPQGVYPQSDEQLYHPSQNYSQQGEETSSGDGEQQGKKSKKGRIIGFS

SEQ ID NO: 2671 - DNA, 395 bp, Homo sapiens
  misc_feature (1)..(1): Wherein n may be a, c, g or t
  misc_feature (2)..(2): Wherein n may be a, c, g or t
nnaagctttccgatctcgaggacactatgttctctgcggacaagtacggtggcaagaaccaggaaaaggccgtcgaagaatggatctcacgtaacaacgactgagttgacaagttcaagactggccaactcgccgagaagtaagtcagacatcgatacgggccgcccgtgcggcagcccgttgccgaccacggtattcagtctccgggctgtcgctgccctttacggattgggtgagggaagcacgctcggtcggattcgggttcaactggattcgcaccatagactgcccaacgtgtctgttcccgaggaatcgtcgactgtagtcatcggaaacttcgatggtgtgcatcgaggccaccaggccctggttcaagaggctaagaggctggatcc

SEQ ID NO: 2672 - protein, 131 aa, Homo sapiens
  misc_feature (1)..(1): Wherein Xaa may be any naturally occuring amino acid
XSFPISRTLCSLRTSTVARTRKRPSKNGSHVTTTELTSSRLANSPRSKSDIDTGRPCGSPLPTTVFSLRAVAALYGLGEGSTLGRIRVQLDSHHRLPNVSVPEESSTVVIGNFDGVHRGHQALVQEAKRLD

SEQ ID NO: 2673 - DNA, 369 bp, Homo sapiens
  misc_feature (1)..(1): Wherein n may be a, c, g or t
ngtcgaccaggtcaccgccgaatctgatcgtgaggaggcccaatgatgacggttccagcctatgttccaccgagtgagtgggtaactgatcgttccacgtttgtctcagattccattcgcaatggcggcgacggtatcgtcgtcgctcgatgcgccaacgggatcgcgttgttagcgcgtcagtgcggagccgaccttcctaagggcatgcgatcggtctctgaaatccacgatcgtctagccttcgcagccgtcggtctgtttcacgaggcagacgaactccgagtggccggtatccgctttgccgacctgcgcgcctacgcctacggccgcctcgacgtcaccggacgcagcctggccagtatgtat

SEQ ID NO: 2674 - protein, 109 aa, Homo sapiens
MMTVPAYVPPSEWVTDRSTFVSDSIRNGGDGIVVARCANGIALLARQCGADLPKGMRSVSEIHDRLAFAAVGLFHEADELRVAGIRFADLRAYAYGRLDVTGRSLASMY

SEQ ID NO: 2675 - DNA, 347 bp, Homo sapiens
  misc_feature (341)..(341): Wherein n may be a, c, g or t
catctttcccctcattaatctggtaccacgcctcatggtgtgtggtttcatccaagtctaaaacaggaggcagcctggtgtgggtgggtggcattaactaagagagataaaggggatggcagaatatggaaggtttgcatcccaatatagctcctaagaaagtatgttctgtaaaaagatatgggtctggcagagttgagaaccacctcagcacagtttgaattgcttgtgtaatatctttctctttcactagcacatgagctccatgaggacagagacagtatctccttcattcaagctgaatgtagaccatctagcatagcgtatcacacacaattgtntgatca

SEQ ID NO: 2676 - protein, 81 aa, Homo sapiens
MKEILSLSSWSSCASERERYYTSNSNCAEVVLNSARPISFYRTYFLRSYIGMQTFHILPSPLSLLVNATHPHQAASCFRLG

SEQ ID NO: 2677 - DNA, 318 bp, Homo sapiens
aggtcccggcaggtggcatgcacgggtgggctgtgcatgactcggggccttgctgggtggccacacgagtgactggaggcattttcaaaagatgccccatgggtctcccagccccaggctcttctctagcatgaccaaggctgctcccatggaggggtctctgtcccctcttctggaatctgagggcctcgtgactgtcggaaaggatgccaggtggctccgcgtctcggcttccacctctctctcaagtgctggcctcgggaagcccacccatgtcacatgtggggcttgtcgagaggcccagcccgagatcccggc

SEQ ID NO: 2678 - protein, 75 aa, Homo sapiens [sequence omitted]

SEQ ID NO: 2679 - DNA, 287 bp, Homo sapiens
  misc_feature (1)..(1): Wherein n may be a, c, g or t
  misc_feature (2)..(2): Wherein n may be a, c, g or t
nntccggagatccgagaggaagttgttgatgacacactcgagtttcttatccttgcaagtgatgggctgtgggatgtggtctctaacgaggaagctgttgcgatgactagatccattaaggacccagaagaggctgcaaagatgctcttgcaagaggcgtacaagagggagagcagtgacaacataacttgcgtcgtcgtgcacttcttgcatgggcaaggtagcagcggatacgcttaaagcgtagcagtaaaattattttacgcagtggtgtgctctgatgtaca

SEQ ID NO: 2680 - protein, 79 aa, Homo sapiens
  misc_feature (1)..(1): Wherein Xaa may be any naturally occuring amino acid
XPEIREEVVDDTLEFLILASDGLWDVVSNEEAVAMTRSIKDPEEAAKMLLQEAYKRESSDNITCVVVHFLHGQGSSGYA

SEQ ID NO: 2681 - DNA, 350 bp, Homo sapiens
tcactggcttaaatgttcatcacctccaacaagccctggactccacccccccaccaatggttcgtggatccgcatcacgggcacctacctgcccagttcccccaacggcgacactcgcttcaaggtggaacgcatcgaccagatcccggtaccggagaacccgtacatatgagcgagctaccaccccagatcaatgcctggctcgcgatcttcatcggtatctggctacaggccgtaccctttctgctgctgggaacgatcatctcatcgaccctgacggccttcctcaaaccgcagactctggcccgcttcctgccacgtcaaactgcctctcgccgtaacggtcgcga

SEQ ID NO: 2682 - protein, 112 aa, Homo sapiens
MFITSNKPWTPPPHQWFVDPHHGHLPAQFPQRRHSLQGGTHRPDPGTGEPVHMSELPPQINAWLAIFIGIWLQAVPFLLLGTIISSTLTAFLKPQTLARFLPRQTASRRNGR

SEQ ID NO: 2683 - DNA, 418 bp, Homo sapiens
  misc_feature (351)..(351): Wherein n may be a, c, g or t
cctaggagtccacatttttcaaacaagttccccaggttaccctatgcttaggcaaggtggaaactgtgaggtggagggtctggaggagacatcccaagaacgggcttctcagcacatttctcgcactgacttggttgagtgaccaaagaggaaggggaagacctcagtcttcttttctcacagtttcctaaaaatgctgtcattttatgagcccaattctggtctagaaacttggccaaaattcctgctataggccaaaataatttaaataatcaactttgtgagctctttcgaggcagacatatccaggatacaacgtcttgtttgcttctgttcactccttcataggtntctgttgagttcttcctactctgagaagaagtctttctgctgccactgctgtgtctccttggtcttc

SEQ ID NO: 2684 - protein, 51 aa, Homo sapiens
MTAFLGNCEKRRLRSSPSSLVTQPSQCEKCAEKPVLGMSPPDPPPHSFHLA

SEQ ID NO: 2685 - DNA, 370 bp, Homo sapiens
  misc_feature (362)..(362): Wherein n may be a, c, g or t
  misc_feature (368)..(368): Wherein n may be a, c, g or t
  misc_feature (369)..(369): Wherein n may be a, c, g or t
  misc_feature (370)..(370): Wherein n may be a, c, g or t
ctgcaggcctgatcccagagtgtggaatctattgtcctcttccatcccagccagacctcagcccaacctgacagatcctccattaaagatgcacatttacacacagctgatttacatagaacacaaggaaaccgctccattttcagaaaaaagagactcctggtcactggtcacttgaaacagtgtggatccaggatgagggagcctcctgcccttcctgtgattttttaggcaactgtgaaagggccatcagaccaagagtaggtggctgggggaggaaagcaggttgaacaaaaggaagaaatgaggtgttgggcaggcacatgctatttagtttctgtatttgcttttagagcaatccncccccnnn

SEQ ID NO: 2686 - protein, 53 aa, Homo sapiens
MCLPNTSFLPFVQPAFLPQPPTLGLMALSQLPKKSQEGQEAPSSWIHTVSSDQ

SEQ ID NO: 2687 - DNA, 324 bp, Homo sapiens
acgcgtgcagagttcaggaaagccaaagagaagctcacaatttgccgacgagacacccgcaagctcctaacggctgccatcgaggagggcgctgatggtgattggcaggcgatcgaggaggtctacgtcggactgatcggcaacctcccgaggacgccaacactcgttgaggtgaggaaagtacttgaaagcatggaaatgctgaaggaagaaatcctcaatcgcttggaaacaaacggaaaagcagaaaataatagcaccaatgatgctcaaaatgagcgccacatacagaatttcaaactccaactccactacggtatttga

SEQ ID NO: 2688 - protein, 107 aa, Homo sapiens
TRAEFRKAKEKLTICRRDTRKLLTAAIEEGADGDWQAIEEVYVGLIGNLPRTPTLVEVRKVLESMEMLKEEILNRLETNGKAENNSTNDAQNERHIQNFKLQLHYGI

SEQ ID NO: 2689 - DNA, 325 bp, Homo sapiens
  misc_feature (1)..(1): Wherein n may be a, c, g or t
ngacggcctggcatcgtgttctttgaaggccgcacctggtttgtggtgggggcgctggccggcgaagaggtggaagcgcgggtgttaggcgcccacggcaaagtggtcgaggcccgcaccgagcgcgtatttaccgccagcgaactgcgccgcccggcaccctgtgtacacgccggccgttgcggcggttgcagcctgccacccctggcccatgaggaccagctcgccctgaaacagcgcatgcttgccgagcaattatcccgcgtggccggtgtcgaaccccaggagtgggccgcgcctttgagcgggccggaattcggctatc

SEQ ID NO: 2690 - protein, 108 aa, Homo sapiens
  misc_feature (1)..(1): Wherein Xaa may be any naturally occuring amino acid
XRPGIVFFEGRTWFVVGALAGEEVEARVLGAHGKVVEARTERVFTASELRRPAPCVHAGRCGGCSLPPLAHEDQLALKQRMLAEQLSRVAGVEPQEWAAPLSGPEFGY

SEQ ID NO: 2691 - DNA, 551 bp, Homo sapiens
gcgcgccagggagttctagaaggaaaggcagacaagtaaatctgggattagagtttagtgtcgtaagtactatgatgagctgtagagaagtaaggctgaggaaaggatgagcgtgagggcatgaaagaaaaggagatcggagagatgtgggctctatcttgaaggggaaatttgtcatttgttccctttttggcaaatcttttgcctgtaataaacttcctaattgtgcactcccaatgactctctatgtgctggttcctattagttccttcattccttttcactgtggtgtctgtcacctcttctctgtcaaccgtctagatacagatagatagtctttaccagtggttgtagtttatagcatggcacgattgctgcaataatctgcttgcagctgttattgagggttagtagcagagagatgacttcatcagtatgtttgtgtatggctttttagaaacaagcatttgtcagacattacagcttttctacctggtacctgctttattattgtctttgtcaggggaggcgggagaaatggtgacagatct

SEQ ID NO: 2692 - protein, 59 aa, Homo sapiens [sequence omitted]

SEQ ID NO: 2693 - DNA, 333 bp, Homo sapiens
gcgttgacaaggggaggttataacgcatatctggaatcactttctcgttgtgacagtgaaaaggcagaagaacaaaaaggaaaagttatatcaaagttattagagaaaaaagatgtccgagctttgaggtacataggtttagggcctctggggtttgtaaacaactcattaagaaaagattgttggtatgaattattggcgtcccagttgcttattgatgatgcaacagagtacattacaccagtggaaaaacataaagatgaaggtcaggtgatattggatgcagaaaggtcttttggtggaattgtcgacaaaaacttgaaactgcaattg

SEQ ID NO: 2694 - protein, 111 aa, Homo sapiens
ALTRGGYNAYLESLSRCDSEKAEEQKGKVISKLLEKKDVRALRYIGLGPLGFVNNSLRKDCWYELLASQLLIDDATEYITPVEKHKDEGQVILDAERSFGGIVDKNLKLQL

SEQ ID NO: 2695 - DNA, 477 bp, Homo sapiens
acgcgtggggcgacgtcgtaagcctcgtcgtggttgtaaaagccttcgaggacgtagcggcggttgccgtcctcgccggtgagcttgaacaatacggcgcgatattgctggtcgacacgaccggtccgcaccctgctgtcgcggcacttctttaccggttcgatgtgcaagccgggcgccgtgtcatcagtggtgagtttctcgaggaaggtaaacgccttgggcttgtagggatccgtcgagcttgagcgcctgtttcgacatgatgatcgtggattcacccatggtgtccttccccttcgggtcgtgttggctaacgcccttggtaatttcgtgtgctgtcggcggcaccagtgtccatccgtcctcggccagcaagtcttcgtggtcgggctctggtgcaaagattactgctatgcgcgactcaggccatgccaagtcaaccatgatgccctccgaaccgatctcctcgccggc

SEQ ID NO: 2696 - protein, 86 aa, Homo sapiens
MVDLAWPESRIAVIFAPEPDHEDLLAEDGWTLVPPTAHEITKGVSQHDPKGKDTMGESTIIMSKQALKLDGSLQAQGVYLPRETHH

SEQ ID NO: 2697 - DNA, 245 bp, Homo sapiens
  misc_feature (105)..(105): Wherein n may be a, c, g or t
  misc_feature (245)..(245): Wherein n may be a, c, g or t
gtgcacagatctcgttactgtttaggaaaagcatggagtatttagacgttggcaagcatccgtggtaattccagaccagccaccagaagaatgagagcagagcgngttgctcccaactgtggcagggacattggtgaggaaagagtcatctgagaggaggcaaggaaggagatgaaaagaaacatacagcagctgggtggaatggaaaacatggagtaacacgctagatttccatccaaatgcgn

SEQ ID NO: 2698 - protein, 56 aa, Homo sapiens [sequence omitted]

SEQ ID NO: 2699 - DNA, 424 bp, Homo sapiens
  misc_feature (1)..(1): Wherein n may be a, c, g or t
ngtgcactctgctgcacaatcggcggtttaatggccaccgaagtagtgaaactgctactaggtgagggaaataatctactgggacgagttctctactacaacgccatggagatgcgcatacacgaggtaactctgcattccgacaccaccacccagtcaccgcacactagcgaaacacgatagtaaccccatcccgcatatccaaagacatataggtaatgacacgtaggataaggacgtgactatgctgcagccctccccgaatgttctcaacgcgtttggactacgtgacccacacttgagccctgccccacgcggctggggaagaggtattcttgccgattccatagtgctcacccccgtcgttgacagggcccgtgcaacatggtccgcgcgaatacgggacaccttggatccctccgga

SEQ ID NO: 2700 - protein, 60 aa, Homo sapiens
  misc_feature (1)..(1): Wherein Xaa may be any naturally occuring amino acid
XALCCTIGGLMATEVVKLLLGEGNNLLGRVLYYNAMEMRIHEVTLHSDTTTQSPHTSETR

SEQ ID NO: 2701 - DNA, 421 bp, Homo sapiens
tacgttttcttggtagcagaggccatgatcgatgctgccgtcgcgctgggtgtgccgcgcgaccaggctagccaacttaccgtagcgacgttagccggttcggctgagttgttggcaggaggcgagcaccctgcggtcctgcgatccgaggtgacgagcccgggtggtaccactgcggctgccgtagccgcattggaggccggaggtgtgcgctccgctttcgccgatgcgatgacggcatgtcgggaccgcgccgctggcctgtcctgatgggttggcgcggcaattttggatcccatggtcgacacagcgtaaagtacccctttgtccgccttgtcggtgggccaagaacttcgcacctacctgggtgcaccaagctttcagtttcaacgaaagaggttgaccgtgggatccgtgatca

SEQ ID NO: 2702 - protein, 89 aa, Homo sapiens
YVFLVAEAMIDAAVALGVPRDQASQLTVATLAGSAELLAGGEHPAVLRSEVTSPGGTTAAAVAALEAGGVRSAFADAMTACRDRAAGLS

SEQ ID NO: 2703 - DNA, 249 bp, Homo sapiens
  misc_feature (1)..(1): Wherein n may be a, c, g or t
nagcgcggcaagccgcctcgcagcagccacattccaggagagccgcccatgatgccagtccgccgcgacgtgcatcctcacctgcccgctgatcgcatcagcaactggcacgagcgaggcacgcacgtcacccacttcctgaacgcgctgtcgatcttcttcccgaccggcgagcgcttgttcatggacagcgtgcgcaactgccgccatctggtgaccgaccccgagctcaagcaggccgtggccggc

SEQ ID NO: 2704 - protein, 83 aa, Homo sapiens
  misc_feature (1)..(1): Wherein Xaa may be any naturally occuring amino acid
XRGKPPRSSHIPGEPPMMPVRRDVHPHLPADRISNWHERGTHVTHFLNALSIFFPTGERLFMDSVRNCRHLVTDPELKQAVAG

SEQ ID NO: 2705 - DNA, 288 bp, Homo sapiens
  misc_feature (1)..(1): Wherein n may be a, c, g or t
ntcatgatcgggttcgcgcacacgggcgatgtcggcgacggtatcgctgccgaaccaatctggcacgacccgctggtgattgcggtgccagctcgtcactcattgctcacctacaaggaggtgccacttcaagaacttcaaggccatccacttgtcctgtgcgacccgcaggtatgcgagggctattgccgcgaactcaagcggctgctcaacacgttggagcacaagctgaatgttgtcgaggaagtgtcctcgctggacatgatgctcacgttggtcggtgccggc

SEQ ID NO: 2706 - protein, 96 aa, Homo sapiens
  misc_feature (1)..(1): Wherein Xaa may be any naturally occuring amino acid
XMIGFAHTGDVGDGIAAEPIWHDPLVIAVPARHSLLTYKEVPLQELQGHPLVLCDPQVCEGYCRELKRLLNTLEHKLNVVEEVSSLDMMLTLVGAG

SEQ ID NO: 2707 - DNA, 320 bp, Homo sapiens
cgcgtggttcgtcctgttaaaaatatacgtcagttatctaaagcagatatgaaaaataataatgctacacctaaattagatgtagatccacaaccctatgaagtatttgtagatggtgaaaaaatcactagtgaagctgctactgaattaccattaactcaaagatacttcttattctaggaggcatacaaatgattatcgaaaaaaattcaaggcaacatttgcgaatttatctcctgcagagaaacaaaaacacattgaaaagtttacttagagaactctgatttagtaaaaagaattcaacgtgtcaaaactgatca

SEQ ID NO: 2708 - protein, 59 aa, Homo sapiens
RVVRPVKNIRQLSKADMKNNNATPKLDVDPQPYEVFVDGEKITSEAATELPLTQRYFLF

SEQ ID NO: 2709 - DNA, 397 bp, Homo sapiens
gcgcgcccgcactcccgcctgcggtgggcgcgagtgcgcgcggggctgggagtgggggtgtgggcgcggcggtgacttacacatctcgaccaccgcgggcctaaaacctcccagggcccggaggcgggcggtctagacacggccctcgctctctgccctaccagcccccggagcgggagtgatttatgcgagggtttgacgtggcagcccaattaaaagtttgcaagtgtgttgagctggcacagaggagggatcccccgctcccgctccatcgccatcctccctggggtgcagtggctgctgcggaactgagaacactgacaagacgctgcgagcggacaggcattttgttaatccttttttcttcttttagcagagaggggaacttgattttcct

SEQ ID NO: 2710 - protein, 70 aa, Homo sapiens [sequence omitted]

SEQ ID NO: 2711 - DNA, 402 bp, Homo sapiens
  misc_feature (1)..(1): Wherein n may be a, c, g or t
  misc_feature (2)..(2): Wherein n may be a, c, g or t
nntgatcaagcagatatgccagttcctacagaggttgacagctaccatagcctattccctctagaaccactgccacctcccaaccggatacagaaatcaagtaattttggatatattacatcttgctacaaagctgtaaacagcaaagatgatctgccatattgccttcggaggatacatggttttcgtcttgttaacacaaagtgcatggtgttggtcgacatgtggaagaaaattcaacactcaaatatcgtaactttgcgtgaagtatttaccactaaagcatttgctgagccctctcttgtgtttgcatatgatttccatgctggaggagaaactatgatgagcagacactttaatgaccctaatgctgatgcctacttcaccaagagaaaggggggt

SEQ ID NO: 2712 - protein, 134 aa, Homo sapiens
  misc_feature (1)..(1): Wherein Xaa may be any naturally occuring amino acid
XDQADMPVPTEVDSYHSLFPLEPLPPPNRIQKSSNFGYITSCYKAVNSKDDLPYCLRRIHGFRLVNTKCMVLVDMWKKIQHSNIVTLREVFTTKAFAEPSLVFAYDFHAGGETMMSRHFNDPNADAYFTKRKGG

SEQ ID NO: 2713 - DNA, 421 bp, Homo sapiens
gtggctctattagttggtttacccgcaaatattgaagataaaggcaaaattatttgctcgtgttatcaaatcggtagtaaacaaatcgagaaagccatagcatcaggagatacatcgatagaatctcttactactcgccttaaatgtggcagtaattgtggttcttgtattccagaattaaagtattttttaccgaaaaagagggggttatctgcatgagtcaggcatttacgcaattcgttaaaatactaggtcgtggcaaaaaaggagcacgtagtttaacggagcaagaagcggaacaagcaatgtggctgatgctaacaggcagtgttgcgccagagcaagctggtgctttttggatgctgattcgaatacgtgaagaaacaattgatgagacggttggttttacctacgtacgcgt

SEQ ID NO: 2714 - protein, 72 aa, Homo sapiens
VALLVGLPANIEDKGKIICSCYQIGSKQIEKAIASGDTSIESLTTRLKCGSNCGSCIPELKYFLPKKRGLSA

SEQ ID NO: 2715 - DNA, 218 bp, Homo sapiens
  misc_feature (1)..(1): Wherein n may be a, c, g or t
  misc_feature (2)..(2): Wherein n may be a, c, g or t
nnggcgccgcaaccggcacccatgccgcccggtcttgcgaccgagggctaccgcggcgaaatccacaaggagccttacggccccacgctggtcatcggcccgttcaatgcgccggtactgctattgctggacccggccatcgctgcgctggcggcgggcaacccgggggggctcaagccggccaatacgacgcccaccggggcggcgctgtttcagac

SEQ ID NO: 2716 - protein, 72 aa, Homo sapiens
  misc_feature (1)..(1): Wherein Xaa may be any naturally occuring amino acid
XAPQPAPMPPGLATEGYRGEIHKEPYGPTLVIGPFNAPVLLLLDPAIAALAAGNPGGLKPANTTPTGAALFQ

SEQ ID NO: 2717 - DNA, 201 bp, Homo sapiens
atcttcgtctcggacgccggcgtcgtggccgtggcgttcgggctgtacaagctggcggcggcgttcggggtctggtgggtggtgcgcgtgtacgccgtgccgctgctgatcgtgaacgcgtggctggtgctcatcacctacctgcagcacacccacccgtcgctcccccactacgactcgagcgagtgggactggctgcgc

SEQ ID NO: 2718 - protein, 67 aa, Homo sapiens
IFVSDAGVVAVAFGLYKLAAAFGVWWVVRVYAVPLLIVNAWLVLITYLQHTHPSLPHYDSSEWDWLR

SEQ ID NO: 2719 - DNA, 353 bp, Homo sapiens
tccaggacccaggctcaactgcagggaggatgacgagactggactctccggtccatatatggttgaccccagcacccagcctctggccacagatgctggtggagcaggttctgaggtgcatgtgcagcctccctccaggatcagctgaccctccactcgtgagcactggcaggcagtaacactgcctgccactgtgtgagcgaacctactggaggtgaagtgactgtggggcactgaggatcagagaggagctcgccgccccatattctgagttgatttaccctgtccatggtatgcgctctacctttcctctctgagcaataaccgaccgcgcctgctctctgcatgtgcac

SEQ ID NO: 2720 - protein, 68 aa, Homo sapiens
MQRAGAVGYCSERKGRAHTMDRVNQLRIWGGELLSDPQCPTVTSPPVGSLTQWQAVLLPASAHEWRVS

SEQ ID NO: 2721 - DNA, 282 bp, Homo sapiens
  misc_feature (100)..(100): Wherein n may be a, c, g or t
  misc_feature (101)..(101): Wherein n may be a, c, g or t
ctagttacccaccgaaatgatgcgcttatacgatcaagcaatgtaaacagtacaaacaagaaaacattgaaagatgcagatcctaaggttcttattgacnncttcggctctcctgaggtcgacccagtggatacaattccagtatcgccactagaattagttccattttatgaccagtctatagatactaaaaggagttctagttggctaatcaataagaagggctattataagcatttcaacgaattaagcttaactgatagatgtaaattttatttccgg

SEQ ID NO: 2722 - protein, 94 aa, Homo sapiens
  misc_feature (34)..(34): Wherein Xaa may be any naturally occuring amino acid
LVTHRNDALIRSSNVNSTNKKTLKDADPKVLIDXFGSPEVDPVDTIPVSPLELVPFYDQSIDTKRSSSWLINKKGYYKHFNELSLTDRCKFYFR

SEQ ID NO: 2723 - DNA, 351 bp, Homo sapiens
  misc_feature (1)..(1): Wherein n may be a, c, g or t
  misc_feature (2)..(2): Wherein n may be a, c, g or t
  misc_feature (337)..(337): Wherein n may be a, c, g or t
nntcttgtatccatgacgaacgacgccaacctacacgaacctctcaaacggtactttggcttcgagacgtttcgcaacaatcaggaagcgattattcgcagcctgatggcggggcatgacgtctttgtgctgatgcctactggtggaggaaaatcaatatgctaccaacttccagcattactcatggatggtgtggctatcgttgtgtctccactcatcgcactgatgaaaaatcaagtggatgcagtgagacaaacaagagcagataattgtgtggcgcactatatctatgcggcactgacgaaacaagagattgtcgagataatgaaacatgtgnaccacgggcagact

SEQ ID NO: 2724 - protein, 117 aa, Homo sapiens
  misc_feature (1)..(1): Wherein Xaa may be any naturally occuring amino acid
  misc_feature (113)..(113): Wherein Xaa may be any naturally occuring amino acid
XLVSMTNDANLHEPLKRYFGFETFRNNQEAIIRSLMAGHDVFVLMPTGGGKSICYQLPALLMDGVAIVVSPLIALMKNQVDAVRQTRADNCVAHYIYAALTKQEIVEIMKHVXHGQT

SEQ ID NO: 2725 - DNA, 326 bp, Homo sapiens
tcgacccctttctctgccgatggttcgctagctggtgttcgtactgacgactggaaacgagcaacacatgtcccactttgccacaggagacgtggcctgactaacatatacctcctcgcacaatgcagcattatattcacctcagatccgtatctatctatttttcttctgaaaacgatagctgctgtcttttctgtacgtgtataatgtgcattgtatgtagtaagctatttctcaagcaaatgtagattggagccaagacgaacatttaaagccgtatagaactactttgtttcttcttcagatgatcgctgcatggatattcg

SEQ ID NO: 2726 - protein, 68 aa, Homo sapiens
STPFSADGSLAGVRTDDWKRATHVPLCHRRRGLTNIYLLAQCSIIFTSDPYLSIFLLKTIAAVFSVRV

SEQ ID NO: 2727 - DNA, 258 bp, Homo sapiens
gcgttatttatcttaggcgaaacattatataatttcggtttaacacctcaaggtttagaagtgtttagaacgttatatcataaatatcctgatgaaagtgaattacttatttactttattgaaggattaatgtctgagaatcaaactgatgaagcattagaatatttagctgaagttgaaacatcaactgaaaagttaatgctagaagctgatgtatatcaacaaattaatatgttggaagttgccattgataagctt

SEQ ID NO: 2728 - protein, 86 aa, Homo sapiens
ALFILGETLYNFGLTPQGLEVFRTLYHKYPDESELLIYFIEGLMSENQTDEALEYLAEVETSTEKLMLEADVYQQINMLEVAIDKL

SEQ ID NO: 2729 - DNA, 361 bp, Homo sapiens
tggccactaccatccttacatttatttccagacctggaactttctgccctacccctccccagtcctcctcacagctggaagcctgctccagcaaggaagacaccctataagcctcgcaggatgcttttttaaaaagctctttgtgggggaagtcagcgctggagcacttttctagtgtgcatggggacttgggtcctgttcccagaagttccagaagtccagggcctgtgagatggctcagcagctgagggtttcccccaggacccgagtaaaggtgggaaggaagaactaacccacacaactgtcctgaccttcattgtgtgccacggttcactgcacacacagacccagcaagaacacg

SEQ ID NO: 2730 - protein, 54 aa, Homo sapiens
MKVRTVVWVSSSFPPLLGSWGKPSAAEPSHRPWTSGTSGNRTQVPMHTRKVLQR

SEQ ID NO: 2731 - DNA, 272 bp, Homo sapiens
  misc_feature (1)..(1): Wherein n may be a, c, g or t
nccatggcgagcgacgacgaggaggcgtgcgactacttctacgacgacgacgatgacgccgaggaagacgccgccggactggaggaggactcttcgcttccaacgccggagggccgcgcggactactgggctatcacacaagataccggtttcgctgcacagaaacaagacctgtctacggtgatgaacttgctcaatataaatcagcatcaagcacgagccctcctcatccaccaccgatggagtatggatggcatctatgattctctaga

SEQ ID NO: 2732 - protein, 90 aa, Homo sapiens
  misc_feature (1)..(1): Wherein Xaa may be any naturally occuring amino acid
XMASDDEEACDYFYDDDDDAEEDAAGLEEDSSLPTPEGRADYWAITQDTGFAAQKQDLSTVMNLLNINQHQARALLIHHRWSMDGIYDSL

SEQ ID NO: 2733 - DNA, 304 bp, Homo sapiens
gctagcttgaagcctcatgcttgcctcctcggaagggcagccgattgccgaggccgccgcgcgttcccgccccgaacgttcggggctttggggatgctatgagttggtagccgcgtcgttgccattgttgttgcaaaaggtttgcagcgcggtgggttccgggttggcggggctgcaacgcgcgaaacccagacctgcccaaaaaacgtgtgggcataacgggacagccggccatcccgggcaataacggcacctcttgacgacccggggaagggttgcccacgcagcttcctgggtccccccc

SEQ ID NO: 2734 - protein, 77 aa, Homo sapiens
MAGCPVMPTRFLGRSGFRALQPRQPGTHRAANLLQQQWQRRGYQLIASPKPRTFGAGTRGGLGNRLPFRGGKHEASS

SEQ ID NO: 2735 - DNA, 387 bp, Homo sapiens
gtcttggcattgggtatcccagcagacatatacttgattgatgagccatctgcctacttagattccgaacaacgtattatctgttctaaagttatcagaagattcatcttacataataagaaaactgcgtttattgtcgagcacgatttcatcatggctacttatcttgctgataaggtcattgtttttgaaggtattccttccaagaatgctcacgcaagagcccctgaatctttgttgactggttgtaacagatttttgaagaatttgaatgtcaccttcagaagggatccaaactccttcagaccaagaattaataagctagattcccaaatggataaagaacaaaaatcatcaggaaactactttttcttggataacaccggt

SEQ ID NO: 2736 - protein, 129 aa, Homo sapiens
VLALGIPADIYLIDEPSAYLDSEQRIICSKVIRRFILHNKKTAFIVEHDFIMATYLADKVIVFEGIPSKNAHARAPESLLTGCNRFLKNLNVTFRRDPNSFRPRINKLDSQMDKEQKSSGNYFFLDNTG

SEQ ID NO: 2737 - DNA, 221 bp, Homo sapiens
acgcgtgcacgtgaacacctcactgtggtgggcacaagggagtctgtggagagggcgattgaccgggctaatgatcgacgttctgggattcagcgccggtgggaagaaagtcgcacttcctgatgagaccggagtctcaaggtcgatgggctatcacctcagtggggccgataagtcaaacccgctctctggctccggaagtcggtgtcctaaccacgcgt

SEQ ID NO: 2738 - protein, 50 aa, Homo sapiens
MIDVLGFSAGGKKVALPDETGVSRSMGYHLSGADKSNPLSGSGSRCPNHA

SEQ ID NO: 2739 - DNA, 378 bp, Homo sapiens
  misc_feature (350)..(350): Wherein n may be a, c, g or t
tgatcacaggactgctgcaatccagggaactgagggagctgtgagcatctgagaagaaaggttagctcttgttttaagttgtagagacaacttaaaacaagttgtgacacaattagtgatcccataatcttttatcatctggtacaacatttaatatagtagcattctacttactgtggaaactccttgtttcacaaatgatgttctgcagcttcaatatgtaatggatggaccatcaaagttcaaaatataataaggaattgaattcccaaacaacatcctttaacattctggtgaaagcccagccagtgtctctggttgaaagtgccttcagtggatatagctatatntcaactgtccctgtgatcatgaggtacc

SEQ ID NO: 2740 - protein, 50 aa, Homo sapiens
  misc_feature (41)..(41): Wherein Xaa may be any naturally occuring amino acid
MDHQSSKYNKELNSQTTSFNILVKAQPVSLVESAFSGYSYXSTVPVIMRY

SEQ ID NO: 2741 - DNA, 329 bp, Homo sapiens
gccggcgctccagcagccccatcccctccaatcgcttgattaatcggccccccagcaacctttgatttcttgctgaagcgactttggtcgaaaccagcgtgcctaacataccggcgtccgtgatctcaccacctaggttctggatgacggcaagagcgtttcgatccacctcggtgagggttgcgggggccttgaacaggccacgttcgatcttgatctgagtgagaggagtcattctgaaggcactttgctacggacacccccgactttatcgaagaaagttactgattcaactcgaaatgctggtctgcttttcccagagctggagt

SEQ ID NO: 2742 - protein, 78 aa, Homo sapiens
MTPLTQIKIERGLFKAPATLTEVDRNALAVIQNLGGEITDAGMLGTLVSTKVASARNQRLLGGRLIKRLEGMGLLERR

SEQ ID NO: 2743 - DNA, 612 bp, Homo sapiens
acgcgtactgcagctgccaaatccttagtaaaatctaaagtggctagaaatgttatggctgcttctttcgtcaagagacatgcttctacaagtttgttcaaacaagctaacaaggtcgaatccttaggttcaatatatttatccggcaagaaaatttcagttgcggcgaatccgttctccataactagcaatcgttttaaatctacctctattgaagttcctccgatggcagagtccctgactgaaggctctttaaaggaatatactaaaaacgttggtgattttattaaggaggacgagctgttggccactattgagaccgataaaattgatattgaggtcaattcgccagtatcaggtactgttacgaagctaaatttcaaaccagaggacactgtcactgttggtgaggagttagctcaggtcgagcctggtgaagcacctgctgagggttctggagaatctaagccagagcctaccgaacaagcggagccatcgcaaggtgtcgccgcaagggaaaactcaagtgaggaaacggcttcaaagaaagaagctgctccaaagaaagaagccgctccaaagaaagaagttacagaaccaaaaaaggctgat

SEQ ID NO: 2744 - protein, 204 aa, Homo sapiens
TRTAAAKSLVKSKVARNVMAASFVKRHASTSLFKQANKVESLGSIYLSGKKISVAANPFSITSNRFKSTSIEVPPMAESLTEGSLKEYTKNVGDFIKEDELLATIETDKIDIEVNSPVSGTVTKLNFKPEDTVTVGEELAQVEPGEAPAEGSGESKPEPTEQAEPSQGVAARENSSEETASKKEAAPKKEAAPKKEVTEPKKAD

SEQ ID NO: 2745 - DNA, 402 bp, Homo sapiens
gaattcccagaaaacagttcttgttctcgcttctagtccaattttccccagaaaaagtcacatttctgacaagacttgtttctgaaaagccactacgctgtcaactgccgatttgtcctgggcccccagacaccttcctctgttgtgtatgcctccgaaatacatttcccaggctctctcccaccggctttcagcaggttcagccaatttggaggcactggtgcaaggttggaggagaagaagaaggaagaactcgagtatgtgtttttcttcctgcttcttgcagcattttctgctaatggatttgtctcctatgtggttccaactccttgagagctccccttaccgtcttctcatatcctccagcaacatcatccaggagaggtacgactatggttctaa

SEQ ID NO: 2746 - protein, 84 aa, Homo sapiens [sequence omitted]

SEQ ID NO: 2747 - DNA, 266 bp, Homo sapiens
  misc_feature (1)..(1): Wherein n may be a, c, g or t
  misc_feature (2)..(2): Wherein n may be a, c, g or t
  misc_feature (3)..(3): Wherein n may be a, c, g or t
nnnccgcgttgcatcgtaccagtttccggccccgaatttgaacgctatggcggaaacacgtcatgtatcgaagtgcgttgcggtgaacatagaatgatctttgacgggggctccggcctgcgtcaggcgggtgatgccctgtcggtgcaaggcgtcgaccagatcgatattattttcacccacagccactatgatcacattatcggcctgccgtattttgcccccctctacaatccgatgatgaatgtacggctctggtccggccg

SEQ ID NO: 2748 - protein, 88 aa, Homo sapiens
  misc_feature (1)..(1): Wherein Xaa may be any naturally occuring amino acid
XPRCIVPVSGPEFERYGGNTSCIEVRCGEHRMIFDGGSGLRQAGDALSVQGVDQIDIIFTHSHYDHIIGLPYFAPLYNPMMNVRLWSG

SEQ ID NO: 2749 - DNA, 218 bp, Homo sapiens
  misc_feature (1)..(1): Wherein n may be a, c, g or t
ncattgcagtagacttctgccttgacatccaagccttttaataaatcctctgaaatctaggcagaagcacagttctcatacgtccgctaggcactgtcccagtgggagctctttgtgtggttcccaaccccacatttcccctgggcactgccctagtaaaggttctccatgaggcctctgcctgtgcaggagacttcggccttgacatccaagccttt

SEQ ID NO: 2750 - protein, 56 aa, Homo sapiens
MSRPKSPAQAEASWRTFTRAVPRGNVGLGTTQRAPTGTVPSGRMRTVLLPRFQRIY

SEQ ID NO: 2751 - DNA, 287 bp, Homo sapiens
  misc_feature (1)..(1): Wherein n may be a, c, g or t
  misc_feature (2)..(2): Wherein n may be a, c, g or t
  misc_feature (287)..(287): Wherein n may be a, c, g or t
nnagatcttgtagtggtgcgacgtatatcggtaagcgatctgcccgacgatccacctgagacatacctcgtagcagacacagcgggcggaacgaccgtcgttcgcactttatccaacgtctcgggacggcgatggctgttagcatccaaccctacccactcaccaatcaatctcgatgatgcttctctgctgggtcaggctgtgtccttgctgagacgactctaaagcggcccaataaaccacttagccgcagggctctctcccctatccttggtggcatcggtcan

SEQ ID NO: 2752 - protein, 74 aa, Homo sapiens
  misc_feature (1)..(1): Wherein Xaa may be any naturally occuring amino acid
XDLVVVRRISVSDLPDDPPETYLVADTAGGTTVVRTLSNVSGRRWLLASNPTHSPINLDDASLLGQAVSLLRRL

SEQ ID NO: 2753 - DNA, 240 bp, Homo sapiens
  misc_feature (1)..(1): Wherein n may be a, c, g or t
naatgacagcagatttgcattttagaaatatcactttgatcacaaaaagacaggtcatggggtagtgtgtggtatctttgggggaagggaggagagtcaggggctgttgtcagtaatccagatgagggctgacagtaagaagatgttctggagttaccgtgtgccttagttggcactactccttctgacaatgccattcgtttgggattaatttttattagggttgtatttattagatct

SEQ ID NO: 2754 - protein, 65 aa, Homo sapiens
MALSEGVVPTKAHGNSRTSSYCQPSSGLLTTAPDSPPFPQRYHTLPHDLSFCDQSDISKMQICCH

SEQ ID NO: 2755 - DNA, 318 bp, Homo sapiens
attgccagcatcgtcaacaaggtcgatgtgaacaccctggaagaaggcccggccagcgccttgcagttgaacgagatcggcaaggtcaagatcgccctggacgcgccgattgccctggacggttacgacagcaaccgcaccaccggctcgttcatcatcattgatcgtctgaccaatggcaccgtcggcgccggcatgatcgtcgcccagccgctggcccatggcagcgccacccatcacggcaagctggcccatgtggccaccgaggaacgtgcccagcgtttcggccagcaaccggcgacggtgctgttcaccggt

SEQ ID NO: 2756 - protein, 106 aa, Homo sapiens
IASIVNKVDVNTLEEGPASALQLNEIGKVKIALDAPIALDGYDSNRTTGSFIIIDRLTNGTVGAGMIVAQPLAHGSATHHGKLAHVATEERAQRFGQQPATVLFTG

SEQ ID NO: 2757 - DNA, 171 bp, Homo sapiens
ctagtgtctgctggcattacagaaattgacaccttgtatacgaatgatttggataacggtccattcatctctgatacgcttcgtattgatcctactcataaccaactagaagcattggtagaaatctaccggatgatgcgtcctggcgagccaccaactaaagaatcagct

SEQ ID NO: 2758 - protein, 57 aa, Homo sapiens
LVSAGITEIDTLYTNDLDNGPFISDTLRIDPTHNQLEALVEIYRMMRPGEPPTKESA

SEQ ID NO: 2759 - DNA, 315 bp, Homo sapiens
ccggacgatccaaagtgttttacaaggatatttaaagggaacaagatggtcaacgaagcatcagataaagattcgaaagtgagaagttacccatcttcattgggtgttggacactctgctttgtttcctttgatatacataagacaaaaaaccaactccttgcggtttttgaatgatccaaagcaattaccaacaccactggtcgatgatatgaacgcaaaattcaaaggcatcattaaagtttatgaaaatttcattcacttgtaccattcatatcagacggtggattgcaataacatgaatcagcaaaagctt

SEQ ID NO: 2760 - protein, 105 aa, Homo sapiens
PDDPKCFTRIFKGNKMVNEASDKDSKVRSYPSSLGVGHSALFPLIYIRQKTNSLRFLNDPKQLPTPLVDDMNAKFKGIIKVYENFIHLYHSYQTVDCNNMNQQKL

SEQ ID NO: 2761 - DNA, 366 bp, Homo sapiens
  misc_feature (1)..(1): Wherein n may be a, c, g or t
  misc_feature (2)..(2): Wherein n may be a, c, g or t
nnggattccaggtgtgagccaccccacctggcagccattgccattactttaaaacctttcccaacttgtgcccaggtatcaatggcaatgccctgatgtcctcagtaaatttgttaaagtatcttttttttcttttttttttttgggagggggtcttccccgggccccccggggggggggggggggggggaaaaaccccctggtggcagcccccccccctgggttttcccccttcgccggtcttcacccccaaaattggggggaaaaaaggcccgcgcaccaccccccgggccaattttttggttttggggtttttttttttttgggaggaggggttcccccactgcgccgggggggggctccccc

SEQ ID NO: 2762 - protein, 83 aa, Homo sapiens
SIFFFFFFFGRGSSPGPPGGGGGGEKPPGGSPPPWVFPLRRSSPPKLGGKKARAPPPGPIFWFWGFFFFGRRGSPTAPGGGSP

SEQ ID NO: 2763 - DNA, 249 bp, Homo sapiens
  misc_feature (1)..(1): Wherein n may be a, c, g or t
ncctgccctcatcttccccaaccctcaatgtttccctcaagtgacccaaccacccggcatccagccccaacctgcaagaacctccccgctgctctcccaagagactgcccagctgcttacactttcccatgctcgccacactctcatgcctcctgggccctgcctgtgctgttcctgctacctggatcgccctttatctctcacccacccagtcaactcctgcacatccctcaaaagcccttcacgcgt

SEQ ID NO: 2764 - protein, 74 aa, Homo sapiens [sequence omitted]

SEQ ID NO: 2765 - DNA, 563 bp, Homo sapiens
tgatcatcgaatacgaagcgctgaatgagggttaatttcatagtaaatctttcatggacagaaatatttgaaatatatttcctcaaagagtacactagatccattcatattttaggcttcctatggaaaccgttttttcaaggataaaccccgccatatgttctttgcgaagtcttttgcagttaaaactaattacaactctgttatttactgacacctgcgttaaaattttatcacaatatgtcatccgctgagagagatgtactatttataattacttaagagcgactacttcatttaccattagcgagcagaagaacagcttacttgtcgatgttcttctctggctaaatgaaatgtcaattattgagattgagatgggtatgtatgatcggattttgatatcagccgatgagacgaagattcaatagcttcaaccgtccctgcggggggtacttaccttttgtaaccagtaccctgtgcaaattctcggcgtgtactacctcttttgggaccacaaccctttgtacgcactttcgtcagatgcaaatttttacacgcgt

SEQ ID NO: 2766 - protein, 50 aa, Homo sapiens
MRRRFNSFNRPCGGYLPFVTSTLCKFSACTTSFGTTTLCTHFRQMQIFTR

SEQ ID NO: 2767 - DNA, 300 bp, Homo sapiens
cgatcgcaggctttatcaggaagccaatcagtagcactgcgaagaaggaccaaaactcctctcccccagccacaaagaccctgacaaaagatctttggccggaagggagagttgggccctgtgtcttgtgaaaggaggctctcatgctgtcatggtgcaagtcatttcttcccagagtgacctggcacatccagattgggcagcttagagaccacagacagtttctcagtggattcacagaggcctctctcctcaagggtggtagaaaactattatcaacgcaggttttcagcagaattc

SEQ ID NO: 2768 - protein, 63 aa, Homo sapiens [sequence omitted]

SEQ ID NO: 2769 - DNA, 313 bp, Homo sapiens
  misc_feature (313)..(313): Wherein n may be a, c, g or t
acgcgtgcatgagttttacttccatttctaatgtatctaccatgaataccctggcaggcgagttctgtaaggacaggaccactgcttgctcattactgtaccccaacccccggccctacaccacacaaaaaaacactcaaaatatgcctgctgaatgaacaaatgctttaagaaatcattctttaaaacccacattaatcatactgccatataaaacagtaagggagcttatttttcaatcttattctggagacacatatgtaatgattaaacttaaatgaaaacgaaaatattctaacctgaagttttaaan

SEQ ID NO: 2770 - protein, 52 aa, Homo sapiens
MWVLKNDFLKHLFIQQAYFECFFVWCRAGGWGTVMSKQWSCPYRTRLPGYSW

SEQ ID NO: 2771 - DNA, 207 bp, Homo sapiens
  misc_feature (1)..(1): Wherein n may be a, c, g or t
  misc_feature (178)..(178): Wherein n may be a, c, g or t
  misc_feature (179)..(179): Wherein n may be a, c, g or t
  misc_feature (190)..(190): Wherein n may be a, c, g or t
ncgcttttcggaccctatgtttggggaagatatgatttactctttatgctaccatctttcccgtttggaggaatggagaatccctgcctgacctttgtcaccccgtgcctgctagcaggggaccgctccttagccgacgtcatcatccacgagatcccccacagttggtgttcaaccnntgtcaccaatnccaactggggggaattc

SEQ ID NO: 2772 - protein, 69 aa, Homo sapiens
  misc_feature (1)..(1): Wherein Xaa may be any naturally occuring amino acid
  misc_feature (60)..(60): Wherein Xaa may be any naturally occuring amino acid
  misc_feature (64)..(64): Wherein Xaa may be any naturally occuring amino acid
XLFGPYVWGRYDLLFMLPSFPFGGMENPCLTFVTPCLLAGDRSLADVIIHEIPHSWCSTXVTNXNWGEF

SEQ ID NO: 2773 - DNA, 339 bp, Homo sapiens
  misc_feature (1)..(1): Wherein n may be a, c, g or t
  misc_feature (2)..(2): Wherein n may be a, c, g or t
nngtggaaaggaaacctcattgccaccatgaacttctccggcaagtaccaagtgcagagccaagagaactttgagcccttcatgaaggcgatgggtctgcctgaggacctcatccagaaagggaaggacatcaagggggtgtcagaaatcgtgcatgaagggaagaaagtcaaactcaccatcacctatgggtccaaggtgatccacaatgagttcaccttgggggaggagtgcgaactggagaccatgactggggaaaaggtcaaggcagtggttaagatggagggtgacaataaaatggtgacaactttcaaaggcataaagtccgtgactgaattc

SEQ ID NO: 2774 - protein, 104 aa, Homo sapiens
MNFSGKYQVQSQENFEPFMKAMGLPEDLIQKGKDIKGVSEIVHEGKKVKLTITYGSKVIHNEFTLGEECELETMTGEKVKAVVKMEGDNKMVTTFKGIKSVTEF

SEQ ID NO: 2775 - DNA, 483 bp, Homo sapiens
cgcgtggccctgaaggatgcagacagccactctgacaacgaccacgattcccccgacaatgttccctctgatgtacatttacgaatgctgtgcttagtcaaacacgcttcactgatagtaggacacaagggcgccactatatctagaataaaatccgaaacctctgctagaataaacatatcaaataatatcagaggtgttcctgaaagaattgtttacgtgaggggtacttgcgatgatgtagccaaggcatacggcatgatagtaagagcgctgcttgaagaacatggtaacgaagataacggggaagacattgagatttctatcaacctattgatccctcatcatcttatgggatgtataattggcaaacgtgggtctcggttaagagaaattgaggatttgagtgcagcaaaattattcgcgtccccgaatcaattgctgctttctaacgatagaattttaaccattaacggggttccg

SEQ ID NO: 2776 - protein, 161 aa, Homo sapiens
RVALKDADSHSDNDHDSPDNVPSDVHLRMLCLVKHASLIVGHKGATISRIKSETSARINISNNIRGVPERIVYVRGTCDDVAKAYGMIVRALLEEHGNEDNGEDIEISINLLIPHHLMGCIIGKRGSRLREIEDLSAAKLFASPNQLLLSNDRILTINGVP

SEQ ID NO: 2777 - DNA, 300 bp, Homo sapiens
aagcgcttctttacgcttgccagcgggattgagcacatcgagtcacgttcgctcgccggagtcagcctgatcaaagtgtattttcagcctggcactgatgcagactccgccgtcaccagcatctccaaccttgccatggccaatttgcggcgattgccgcccggcacgctgccgcctgtggtgctgaaattcgatgcgtccagcctgcctgtctgtctgatcacgctgaaaggcgaggggctggatgagacgcgcctgcgggacgccgcgcagttcgccgtgcgcaaccaggtggctagc

SEQ ID NO: 2778 - protein, 100 aa, Homo sapiens
KRFFTLASGIEHIESRSLAGVSLIKVYFQPGTDADSAVTSISNLAMANLRRLPPGTLPPVVLKFDASSLPVCLITLKGEGLDETRLRDAAQFAVRNQVAS

SEQ ID NO: 2779 - DNA, 174 bp, Homo sapiens
  misc_feature (174)..(174): Wherein n may be a, c, g or t
gaattctctgatggggcttctgagagttgagtcagggcctctatggctaccacttgctccaatgttaatctcctatctttcattaacgataagagacttggttgaacgggagatccatcttttggttctttacttggtatattctcaggagtttttggttgatcaccttcattn

SEQ ID NO: 2780 - protein, 54 aa, Homo sapiens
MGLLRVESGPLWLPLAPMLISYLSLTIRDLVEREIHLLVLYLVYSQEFLVDHLH

SEQ ID NO: 2781 - DNA, 295 bp, Homo sapiens
  misc_feature (284)..(284): Wherein n may be a, c, g or t
  misc_feature (287)..(287): Wherein n may be a, c, g or t
  misc_feature (288)..(288): Wherein n may be a, c, g or t
  misc_feature (290)..(290): Wherein n may be a, c, g or t
  misc_feature (292)..(292): Wherein n may be a, c, g or t
  misc_feature (295)..(295): Wherein n may be a, c, g or t
tcatgagctcccaagcaaaaagccgggcagagctatctttttccacttaacttctgtttcactgtttgagagtttcatacatgtatataatgtgttttgatcaaattcaccccgttccctctccaacaatccttcctgtatccctccgccattccaatccctctgccattccgtttcctccagacagtccttcctgtatccctctgccattcccttttccctcccgtcttcaccggcttctgtcttttttaacccattgaagccacttggtgctctctgtacgnccnncncnccn

SEQ ID NO: 2782 - protein, 69 aa, Homo sapiens
MAEGYRKDCLEETEWQRDWNGGGIQEGLLERERGEFDQNTLYTCMKLSNSETEVKWKKIALPGFLLGSS

SEQ ID NO: 2783 - DNA, 267 bp, Homo sapiens
tctacactgagagatacgatcatttcaggactgcctcaaaatattaattctgtagaaagaaagttatcaaggaagagtaacaggagtaggaagaatacggtgacttttgaagatcgtcttcagaaattgccacccttaagcacccaaatttcgaaccagtacgccaaggtagcaccagctgagaacaatatcgccttacactttcataacttacctacaccagtatcaaacactcaaacgcctgttacgtttcagtctgaatccgga

SEQ ID NO: 2784 - protein, 89 aa, Homo sapiens
STLRDTIISGLPQNINSVERKLSRKSNRSRKNTVTFEDRLQKLPPLSTQISNQYAKVAPAENNIALHFHNLPTPVSNTQTPVTFQSESG

SEQ ID NO: 2785 - DNA, 369 bp, Homo sapiens
gctagcagaacacgtacccgttgaaaccacggaacagcgcgcccgttttgttttggagcgcggcttcgcggacccgaacctcaccgaaaccacactgcagacggcgaccgcgcttctgttgggcggcctgaccaaagaggcattcaatctggtgcacttcaccgaaccgttcatctcgcgaacagatgacgcggttgagagcttgtaccgtttcttccgcttcgccaccgaactcggtcatggcgacatctctttggaacgctactcgtcgccccgctggcagatggagcagggaatctcggcctcaccccggtgcgccgaccttgccgacggattcgcccgggcacagcacgcccaggcgcaacgcgt

SEQ ID NO: 2786 - protein, 79 aa, Homo sapiens
MTEFGGEAEETVQALNRVICSRDERFGEVHQIECLFGQAAQQKRGRRLQCGFGEVRVREAALQNKTGALFRGFNGYVFC

SEQ ID NO: 2787 - DNA, 446 bp, Homo sapiens
  misc_feature (420)..(420): Wherein n may be a, c, g or t
agatcttcttgtgacttaataaacataccttaatatatgcttatcctgattaacataaattccatatatatatatatatgaatgacaggcttctaaaagagtacaccatactatatcaatgcaatatactcttactatgcctctcaaagtgtcataatggccctcaaattgagtgctattcatgagtcatttatgaattattagaaattgaatcacaaatcaggtcctctgtttcaagggctacttactaagcaccactatttgccaagtctgttgctgatcaacagatgttgggattcttagctgaaatgccatgagcctgatatttgaagaatacacagccaggcacatggtacagtttccgcctctctgtgtagggataagggggcctgagtgctcatgccaatttcttaggaagcncatgactctagcacttcttagtggct

SEQ ID NO: 2788 - protein, 60 aa, Homo sapiens
  misc_feature (2)..(2): Wherein Xaa may be any naturally occuring amino acid
MXFLRNWHEHSGPLIPTQRGGNCTMCLAVYSSNIRLMAFQLRIPTSVDQQQTWQIVVLSK

SEQ ID NO: 2789 - DNA, 344 bp, Homo sapiens
  misc_feature (332)..(332): Wherein n may be a, c, g or t
  misc_feature (333)..(333): Wherein n may be a, c, g or t
  misc_feature (334)..(334): Wherein n may be a, c, g or t
  misc_feature (335)..(335): Wherein n may be a, c, g or t
  misc_feature (338)..(338): Wherein n may be a, c, g or t
  misc_feature (339)..(339): Wherein n may be a, c, g or t
tgatcattgatataagatggcaacgctatgatacgatctcgtggagcatctggaaaccgaagaaaataactatcgggacatactgtatttccagcgtgatgtgctcgataaacacgttcaacaagatcgatgagaaacgactctctgccttttaaaaatgtttcgacaagctcggcgtctataattagcatttcaccatatttcgtcatttaaataccttccgtttcttttacttcgtgcacaacaggacgaattgcataattgaatgctgattccccaaagttttccataacccaatcgtcgttatatactccatccagatacctttcccnnnnccnnccccc

SEQ ID NO: 2790 - protein, 69 aa, Homo sapiens
MTKYGEMLIIDAELVETFLKGRESFLIDLVERVYRAHHAGNTVCPDSYFLRFPDAPRDRIIALPSYIND

SEQ ID NO: 2791 - DNA, 364 bp, Homo sapiens
tgtacacacaggtgcagaaattataagcgaacaaccagcccacactgaacagcgccacaaacacaccaatctcgatgcgccccgcatgcaaggcccaggcggtggtaaccgtggagatgatcaggctgcacgccgcgaacagcagtcggccattggccacgcgctgatggatcttgtcggcaatccagccgcccagcgtcaggcccaccaagccggtcaagccgacgattaccccggtggcaaccgcagcgtcctgcaacggcatcaggaagtagcgttgcaacatcggcaccaggaacgagttgcacgcataggtggggaagttgaaacacagcccggccaacaccagccagaggaacgtctg

SEQ ID NO: 2792 - protein, 95 aa, Homo sapiens
MLQRYFLMPLQDAAVATGVIVGLTGLVGLTLGGWIADKIHQRVANGRLLFAACSLIISTVTTAWALHAGRIEIGVFVALFSVGWLFAYNFCTCVY

SEQ ID NO: 2793 - DNA, 306 bp, Homo sapiens
gatcctgaaactaaaaaactgatgacggcgaccataagtgccgacggcggaggcccttctgaaattgaccctaagttggttgtaaataaaatcgattggtctttcagtaacatcctgaacacacatgtccatttgtcagaaaccaaactagctgatctgatttccaagtatgatattgttcgcgcttctattccattgggcagaaggtcagctcaaagattaggagtcaagcccaattcgatggttcaagtagctttacaaatagctcactatgctttgtatggaagaatggtgtttggattagaa

SEQ ID NO: 2794 - protein, 102 aa, Homo sapiens
DPETKKLMTATISADGGGPSEIDPKLVVNKIDWSFSNILNTHVHLSETKLADLISKYDIVRASIPLGRRSAQRLGVKPNSMVQVALQIAHYALYGRMVFGLE

SEQ ID NO: 2795 - DNA, 560 bp, Homo sapiens
acgcgtgaccaaaattcaatatcaactgaagccatctcagtatccaaacctgagaccacggaagacctcaacttaataatgcatgatatatggtatattacatgtttgaggcacaaaatcatgatggacaccacgttatatgagctggtgatgaaagccgctatagaatttcaaaatgaggacttagcaaagaaagtatggaatgataggggtaaatttaggacgactgtaccgtttctgaaaatggaccaaagaataagaatagcaaaggatcagaaatttgcccatctaatggttgaattcttcacaaagcaaggaaagtattcggacgcaatagctatcatattgtcttcaaaaaatcgcttcaattggacttattccatggttaggaatttgcataaagcattagaagaaatcgaggatagaaatagcgttgaaatcttactggatgtagtaaacaaaaagtcacacgcaaaggccctgaagtgggaggaacaagaacttaacatgtagtcattagactaaaagtgattatatatcaagaaacgacatatacgcgt

SEQ ID NO: 2796 - protein, 170 aa, Homo sapiens
TRDQNSISTEAISVSKPETTEDLNLIMHDIWYITCLRHKIMMDTTLYELVMKAAIEFQNEDLAKKVWNDRGKFRTTVPFLKMDQRIRIAKDQKFAHLMVEFFTKQGKYSDAIAIILSSKNRFNWTYSMVRNLHKALEEIEDRNSVEILLDVVNKKSHAKALKWEEQELNM

SEQ ID NO: 2797 - DNA, 433 bp, Homo sapiens
ggatccatgttcctctcctttgcttaaactgactagacatttctgatgcctgcaaacaaaagagctttaatctatcacttcttacttgtgggacctggtgaaagtcatttaacctcactgagcctctgttttctctcctgtaagatgggagatacacacatccccaccttgcaaggttggttgcctcctgtattggtaacatgatgtgttagggttagatcaccatttaagtccctctcagccctgaagttcggagatcgtagaagtaatccttgagggataggggaagaggctggctggaccacagaggccaggagaccaagaagcccaaggacctaattccaccagcatcagtaacttgcagggcataataaatatctcaacaccagaactgaggctccttgcagaaatctccaaggcttcccctatgcct

SEQ ID NO: 2798 - protein, 67 aa, Homo sapiens
MLPIQEATNLARWGCVYLPSYRRENRGSVRLNDFHQVPQVRSDRLKLFCLQASEMSSQFKQRRGTWI

SEQ ID NO: 2799 - DNA, 365 bp, Homo sapiens
accaggccaagcagggcaggagagcttccggaggaacccccaggggtgacgtggcttttgttgtctgataaaacaaagtagccctgtctggaagattctaactggctagacaggggttttcactccggctttgtggggtggcggagaatcacttcttgaccagtaaaggcaggatggtaaaggcccctgaggaatggtcattttgaagccttgggcatctgtccaccctcgaggtcccaggttgagtttgtgtctgtggaggggcggcccagcgttatttaagaagtctttgctctgggcccggagaagaccctcagagtatcctgagaagcctgccttggaggtttcagggaggactaccggga

SEQ ID NO: 2800 - protein, 57 aa, Homo sapiens
MVILKPWASVHPRGPRLSLCLWRGGPALFKKSLLWARRRPSEYPEKPALEVSGRTTG

SEQ ID NO: 2801 - DNA, 267 bp, Homo sapiens
gaattcataaaagaaatccacgaagtgtttgaagaagataaaggttctataactgaagagaatctcttaaatcgctttgcagcattaatcactaaaatcgttgttcctagtttaggagttctatgtgcctgtgggataattgcaggaattaactcgattttactttcaacgggtattattactcaaggagacggagcaaatatacttttatccaatcttgggaatacttgtttaacattctttccagttatcctaggatacactagt

SEQ ID NO: 2802 - protein, 89 aa, Homo sapiens
EFIKEIHEVFEEDKGSITEENLLNRFAALITKIVVPSLGVLCACGIIAGINSILLSTGIITQGDGANILLSNLGNTCLTFFPVILGYTS

SEQ ID NO: 2803 - DNA, 491 bp, Homo sapiens
  misc_feature (1)..(1): Wherein n may be a, c, g or t
nacgcgttcccggtcgaccgaggcaaaggcaaaagtaagcagggtgcccgtagtccccgttcccaccgcggtatggctgggtcactgctgacagatggcgtccccctgctgatctttccggagggcacccggtctcgcaccggcgcaatgggcaccttcaaacctggggctgccgcattggctatttcacgtggggttccggttatcccgattgctttagtaggagcatgggcggctatgccgtccgagcaagccaggttaccaaaaggacgtccattggtccacgtggctattggacaccctatggaccctgttcccggcgagatcgcccaccaattctccgaacggattcgtcgccaggtcattgagttgcacgaccaaaccgcccgcgcctacggcatgccaacccttgacgaatacggacgccaccgcgcgctaagccaggcctccgagagcggcgacaccgcatccaccaaccactcgacgtgcac

SEQ ID NO: 2804 - protein, 163 aa, Homo sapiens
  misc_feature (1)..(1): Wherein Xaa may be any naturally occuring amino acid
XAFPVDRGKGKSKQGARSPRSHRGMAGSLLTDGVPLLIFPEGTRSRTGAMGTFKPGAAALAISRGVPVIPIALVGAWAAMPSEQARLPKGRPLVHVAIGHPMDPVPGEIAHQFSERIRRQVIELHDQTARAYGMPTLDEYGRHRALSQASESGDTASTNHSTC

SEQ ID NO: 2805 - DNA, 171 bp, Homo sapiens
ggccgcggcctgcggtccgggtccgcacctgtcctaccgggtggagacgctgctagcttgacaggagcttggagctctgctggtgggtctagggtggagttgggagcaccttttgtcatggagggcaccttttgtcatggaggttggaatgcgggctccagggctgtgcac

SEQ ID NO: 2806 - protein, 57 aa, Homo sapiens
GRGLRSGSAPVLPGGDAASLTGAWSSAGGSRVELGAPFVMEGTFCHGGWNAGSRAVH

SEQ ID NO: 2807 - DNA, 395 bp, Homo sapiens
gtgcacattgcccaggctgttataatgattatttttgaatatcattatatttttaacaggtcattttccttgagggtcagggatctcttcttttttccatatcctcaatattcagctcagtgtctagcatagcatggggctcaatgaatgtctgataaatgaatgaccttcagagaaaataaccaaagttaaattctacaaattgttcagctgagctctacattcatcccaaatgtctgatttctagaccccatgcccaaccatggtgcatccagtttaaaacatagtacatatttgtacatttaggttttaatatactgagtttctctgctgttgtcaacttcttcatcaagctccaggcccctggggacacagaccacatcaccaagctctct

SEQ ID NO: 2808 - protein, 52 aa, Homo sapiens
MWSVSPGAWSLMKKLTTAEKLSILKPKCTNMYYVLNWMHHGWAWGLEIRHLG

SEQ ID NO: 2809 - DNA, 373 bp, Homo sapiens
  misc_feature (373)..(373): Wherein n may be a, c, g or t
ggtacccatgtacggctgtcatcagaagtacgggcagagtcttgtgggacagagcccttcaccttcacggtctgtgacactccaggtcgtcagtgtcagaagagtgtgtgtgactccccaaaacaggaagggcctttgagatgaagacgattaagaagaagcaggtccaggagtgctctccggattcctctttttgcctaaagcagggcatagatttacaaagacaaagggcattctgtcccctcttgcatggagaacaaaggctaagccctgaagacagtgtcaggccctcacacccgcagatgccccgacaagctgtgctcccagcctctgccagtcctgtgcctggccccaaactgcccacataaggacn

SEQ ID NO: 2810 - protein, 75 aa, Homo sapiens [sequence omitted]

SEQ ID NO: 2811 - DNA, 315 bp, Homo sapiens
ccccttgggccccccggggggccccctttttttcttaaaaacccaaaaaaaaaaaaaaaaaaaaaattagcccggcatggtggcccccgtttgtggtccccggttctcgggagggttaggcaggaaaattgcttgggcctgggagacggagggtgcaatgaacccaaattggccccttcccttccggccttgggggccaaacccagactctgtttaaaaaaaaaaaaaaaacctggttgttttctatattctgtaaataaggaaactgaggtgcagggagataataaatgagttgcccaaattacatagctgcag

SEQ ID NO: 2812 - protein, 96 aa, Homo sapiens
PLGPPGGPPFFLKNPKKKKKKKLARHGGPRLWSPVLGRVRQENCLGLGDGGCNEPKLAPSLPALGAKPRLCLKKKKKPGCFLYSVNKETEVQGDNK

SEQ ID NO: 2813 - DNA, 281 bp, Homo sapiens
  misc_feature (281)..(281): Wherein n may be a, c, g or t
tggccactcgccatgctgctgactaatgagatacttgcaggtggctactagggatttcttagcatacccagcctttctgatataagtgccaaagcaccatgcttttctcttcttgtatagaagatgataagtgggggtaaaaagactagattgtgaacaataggtagccattaggaagaaaactacctgctgataatgaaatggcagactgatagatggagcctgggacttttatgaaattgtgaaattactgtatgagttgtgtctgcttgccctagatn

SEQ ID NO: 2814 - protein, 57 aa, Homo sapiens
MATYCSQSSLFTPTYHLLYKKRKAWCFGTYIRKAGYAKKSLVATCKYLISQQHGEWP

SEQ ID NO: 2815 - DNA, 306 bp, Homo sapiens
tctagaatcaatgaattggtttatgttcatgtcccttaaaatatacggtgtgcaagactagaactatgcaatttgactacaaagtagttggggactattacccatctaactttgttattcctgtgccgctaatgtcacctacaattgcattaatctttgtagctgtcacattttcctcttgtattagacatctaaagagcacagctaaaaaaaattaaactcggtcaaactaatctgtctcactccctacaattggtgtttcaaggccaaaccccattaagttaagaaactgactgactgagatct

SEQ ID NO: 2816 - protein, 50 aa, Homo sapiens [sequence omitted]

SEQ ID NO: 2817 - DNA, 408 bp, Homo sapiens
  misc_feature (1)..(1): Wherein n may be a, c, g or t
  misc_feature (2)..(2): Wherein n may be a, c, g or t
nnctctccgacaatttttttccgcagtaatatttcggtttcaccttcgaggacttttgtatcatatattggaagatcccagagcacgtcgatactcaaaaatgctcccaacttagaggacaatgtcacaaatcttcagaaaattataccgaaacggttcttttctcaaacatcaattttgaaatcaaggtggaagcctatattcaatgaagaaactactaatcgatacgtacgtttgaacaggtttcagcagtaccagcagcagagaagcggcggcaatcctctgggctctatgactattttggggctctctttaatggcaggaatatattttggctccccttatttgttcgagcacgttccaccctttacgtattttaagacgcatccaaagaatctggtatacgcg

SEQ ID NO: 2818 - protein, 136 aa, Homo sapiens
  misc_feature (1)..(1): Wherein Xaa may be any naturally occuring amino acid
XSPTIFFRSNISVSPSRTFVSYIGRSQSTSILKNAPNLEDNVTNLQKIIPKRFFSQTSILKSRWKPIFNEETTNRYVRLNRFQQYQQQRSGGNPLGSMTILGLSLMAGIYFGSPYLFEHVPPFTYFKTHPKNLVYA

SEQ ID NO: 2819 - DNA, 378 bp, Homo sapiens
  misc_feature (1)..(1): Wherein n may be a, c, g or t
nccagaagcctgtccagtccacccctacagccagccccacgtccactccccactcacactggaagggcaagagagccagaccctcactttaatttccagtcaaggagggtgggaaaggggcaggcagttctggccagtgagacaatgtagaaaaaactccctctggaggaggtgtctgaaagagattcatcctgcctaaggagatgaaagaggctgttccaggtgccacctccagcctcagatacacacacttcatgtccttgcctttggctgcggtcctgtgtacatgtgatgtctggagctgtggcagccacctcatgcccatgagtgaaaggccaggagtacttcagaattcctggcctggcagcctccatgggc

SEQ ID NO: 2820 - protein, 96 aa, Homo sapiens [sequence omitted]

SEQ ID NO: 2821 - DNA, 387 bp, Homo sapiens
atcatgaacttcatgacttcctgtcctggaaaatcagttgtgagtggtgtaacagggtttgcactgggtggtgttttaggcctgttcatggcgtcaatggcatatgatacacctcttcatacacctacacctgcaaatacagcagcaactgcaactgcgggaaatataggtgtgggtggaatatcaagaacagttcagcaaatatctgatttacctttccggcagcaaatgaaacttcaatttaccgatatgggtaaaaaatcctactctagtgctaagaattttggctacattggtatgatatatgctggggtggagtgtgtcatagagtcacttagagctaaaaatgatatttacaacggagtaaccgcagggttttttaccggt

SEQ ID NO: 2822 - protein, 129 aa, Homo sapiens
IMNFMTSCPGKSVVSGVTGFALGGVLGLFMASMAYDTPLHTPTPANTAATATAGNIGVGGISRTVQQISDLPFRQQMKLQFTDMGKKSYSSAKNFGYIGMIYAGVECVIESLRAKNDIYNGVTAGFFTG

SEQ ID NO: 2823 - DNA, 325 bp, Homo sapiens
  misc_feature (1)..(1): Wherein n may be a, c, g or t
  misc_feature (315)..(315): Wherein n may be a, c, g or t
  misc_feature (316)..(316): Wherein n may be a, c, g or t
ncaagggcaaccagtggccattactggggagggaaggggacgaatgagggtggacaagacaaggggcatttccccttgccaccacgttagaaatacgaaggacctctcgggaagaagggttccccttgccaccacgttagaaataggaaggaccttccgggtagaagggttccccttgccaccacgttccaaatacgatcgaccttccgggaacaacgggaaaggggcccagctgggccaacccccacagcctcaggcaggaggcctgggtgagcactgcttctcaggcctgggagggagaggggtctggtgtgnnggtcctgct

SEQ ID NO: 2824 - protein, 94 aa, Homo sapiens
  misc_feature (91)..(91): Wherein Xaa may be any naturally occuring amino acid
MRVDKTRGISPCHHVRNTKDLSGRRVPLATTLEIGRTFRVEGFPLPPRSKYDRPSGNNGKGAQLGQPPQPQAGGLGEHCFSGLGGRGVWCXGPA

SEQ ID NO: 2825 - DNA, 542 bp, Homo sapiens
acgcgtgaagggtatgtgttgatttttctaactaaagctgtgaactgtggaaggtgttactctttcttttttctcagcttctgagcccccttcctcctttgtggaaatccccactgtaagctgaggcctgatgcttgctttcccagcctcctctgcagctagagcatgagtgtgggacctgagctctgccctatggatgctgcactcagaagccagtggtgcagagaagcagggcctgtcgaggagctgttagggccctgggcagggtggcacgacaggaacaggaacaaaggcagtgttgccagcagagatgcccaatgtcatgagaccacaggggaggaggcacgccatgaggtccagtagtcatggttaaacttaagaggattattccgaagggaagtggggttccaatcctgactcttttctatcttcccagacttcattattcccaacagtttgctaagcttgggtctgtggcctaactgatgattttgtgggctactcaaatatctttccacaaaaatctttttaccacaaaattt

SEQ ID NO: 2826 - protein, 65 aa, Homo sapiens [sequence omitted]

SEQ ID NO: 2827 - DNA, 398 bp, Homo sapiens
agatctgagatttgacaactgggtaggatacttgagcaatggaaactagaatcaatgttttgtccagagattagtaagaaaagtctccctagcacagaaggttcacacaaagagaaaaggctgaatttgaaggcgactaacacagatgctcagaaggacataaatgccagtcaagcacctgaatacatgcaaccctctccagagtatcactatctgaaggtcagtggtttcccaagttgttaaaattatttttgatggcagaatcatccttatccccacaaataaatcttattctttgagcccaaggctggaggtctgggttcttttctctagaggaaaactttattttgtttaagatattcaggttctgccttaaaaaaattcccataatccctaat

SEQ ID NO: 2828 - protein, 62 aa, Homo sapiens [sequence omitted]

SEQ ID NO: 2829 - DNA, 256 bp, Homo sapiens
tgtacatatatttacttccagcctccatctgtttcctgtaaagtttccattccattatgagatgtcagttataagaatcatcctcgctcatcatcgtggtggcatcatttccaccatgatcacctttcaccctctctctgtgcaccagctgtctcaccttacggtggttccccaaaaacaccatgcgtccttcagtcacagacacttttcacatgctgctgttatcctggctaatgccttcatagccttgagatct

SEQ ID NO: 2830 - protein, 65 aa, Homo sapiens
MSVIRIILAHHRGGIISTMITFHPLSVHQLSHLTVVPQKHHASFSHRHFSHAAVILANAFIALRS

SEQ ID NO: 2831 - DNA, 417 bp, Homo sapiens
agatctaattacgccaaattggtagtcattgaaatagtacctcccagattttccaagacagtattgactctgcatgatttcattgtttttcccaaagatggctcattaaatgtatggctaaaagcaactaaatgttagtcttctgtaaagcctcacaaataaatacatgcgcaactcaggagaaagaccttttccacaccatcggtcttgacttcgctttagggtccctgtacttgtggggaaagttagtatggtcagcatttgaagaaaagcaagcctctgcaaagtcctttcacacacatctctcatataatcctcccaacaactcagaccaatacctaagttttcttatttatttttacatataatcaaatcatactgcagaaaggttacctttctttatgtcacacagctagc

SEQ ID NO: 2832 - protein, 78 aa, Homo sapiens
MLVFCKASQINTCATQEKDLFHTIGLDFALGSLYLWGKLVWSAFEEKQASAKSFHTHLSYNPPNNSDQYLSFLIYFYI

SEQ ID NO: 2833 - DNA, 381 bp, Homo sapiens
  misc_feature (38)..(38): Wherein n may be a, c, g or t
  misc_feature (290)..(290): Wherein n may be a, c, g or t
  misc_feature (304)..(304): Wherein n may be a, c, g or t
  misc_feature (318)..(318): Wherein n may be a, c, g or t
  misc_feature (342)..(342): Wherein n may be a, c, g or t
  misc_feature (352)..(352): Wherein n may be a, c, g or t
ggatcctctcaactgctggcaactgtcagcacttgttntgctgctctttcctgcagggaaggtttaacttcactctgctttaccaagaactctgataggctcccacagacattgtactttgttttggaaaatctctgaagctggtttcaacttccttatgacctacgttatttatttacacatatgaccctgtgggtcacagcaaattttccttctatatatgtaacatatgtatgtgtgtatcttaataaatattatcacattgaaatacacacatattcattcatatntatggagcacttangtgtcacatgcatntcttcagttaattcttaccacagngcttcgacanaacagaaggttagaggggatgtgtaactt

SEQ ID NO: 2834 - protein, 64 aa, Homo sapiens
  misc_feature (36)..(36): Wherein Xaa may be any naturally occuring amino acid
  misc_feature (41)..(41): Wherein Xaa may be any naturally occuring amino acid
  misc_feature (45)..(45): Wherein Xaa may be any naturally occuring amino acid
  misc_feature (53)..(53): Wherein Xaa may be any naturally occuring amino acid
  misc_feature (57)..(57): Wherein Xaa may be any naturally occuring amino acid
MTLWVTANFPSIYVTYVCVYLNKYYHIEIHTYSFIXMEHLXVTCXSSVNSYHXASTXQKVRGDV

SEQ ID NO: 2835 - DNA, 322 bp, Homo sapiens
  misc_feature (301)..(301): Wherein n may be a, c, g or t
  misc_feature (312)..(312): Wherein n may be a, c, g or t
  misc_feature (319)..(319): Wherein n may be a, c, g or t
ccggtttctgttgtcctcaccgtggtgttgatctcgatgatcccgatcggtttcatgctgtggggatttgctcgcgacatggttgtatcgcggtccatgaccggcgtcatcatcgtcagcttggcgttcattctgctcgtcggtctggctgttgcttctgtatgcggttacatggctggtctcatcggtgcatccaatagcccgatttccggcgttggcatcctggtcgtcctggtggctgctcttctcatcaaactcacctatggtgctgttggtggtggtgagacggtcaagctggtgncctacaccctntttaccncat

SEQ ID NO: 2836 - protein, 107 aa, Homo sapiens
  misc_feature (101)..(101): Wherein Xaa may be any naturally occuring amino acid
  misc_feature (107)..(107): Wherein Xaa may be any naturally occuring amino acid
PVSVVLTVVLISMIPIGFMLWGFARDMVVSRSMTGVIIVSLAFILLVGLAVASVCGYMAGLIGASNSPISGVGILVVLVAALLIKLTYGAVGGGETVKLVXYTLFTX

SEQ ID NO: 2837 - DNA, 391 bp, Homo sapiens
gtgcaccattgcaaattatagccaggtgtttctactttaaaagttattttagatttttatcttaaatgtggtatgcaaatatcaggagggatttgttattacgactatgatcataacagagatattggtgtggactaatttatgtaactgtgatgcatgctattcagtgacctcacagatatttttgctcattggaaacctaactgctcccaaccagcgctaacactctgtgtctctcttcacccactggcagtgagtggaacaatttccacagttcaaaaaaatgacataggttttaggaagctcacgttattcaagaaagcataataaatatttgccattttaaacaatgcttttacctaattttttttgtgttttttaggtgtagaaa

SEQ ID NO: 2838 - protein, 56 aa, Homo sapiens [sequence omitted]

SEQ ID NO: 2839 - DNA, 375 bp, Homo sapiens
  misc_feature (1)..(1): Wherein n may be a, c, g or t
  misc_feature (2)..(2): Wherein n may be a, c, g or t
nnctcaccgaaaccggccaaaccggaccatttagattctataaataagcctatgttcgagctcaaatctactaaagcgcttgaaccctctaacgaattgccaaggcacgaagacctcgaggaagatgttccagaagttcatgtcagagtcaagactagtgtttccacgctacataatgtctgtggcagagccttttccctgcctctgtgaattctgcattgtatactatatactgcggcaacaaataactatccatacgtcctgagtaccacaagtcagcgtcatcgatcgagcggggtgtcggcgccgcaccgtaaaactacatgtataaaaaaagaaccctttttttggaactcttcaatggtaaatggatcc

SEQ ID NO: 2840 - protein, 69 aa, Homo sapiens
  misc_feature (1)..(1): Wherein Xaa may be any naturally occuring amino acid
XSPKPAKPDHLDSINKPMFELKSTKALEPSNELPRHEDLEEDVPEVHVRVKTSVSTLHNVCGRAFSLPL

SEQ ID NO: 2841 - DNA, 252 bp, Homo sapiens
atctcccgaaaagtctttagtgctcatttcggccaactctccattatctttcttgggttgagtggcatgtacttccacggtgcccgtttttccaattatgaagcatggctaagcgatcctactcacattggacccagtgctcaggtagtttggccaatagtaggacaagaaattttgaatggtgatgtaggcgggggtttccgaggaatccaaataacctctggtttttttcagatttggcgagcatccgga

SEQ ID NO: 2842 - protein, 84 aa, Homo sapiens
ISRKVFSAHFGQLSIIFLGLSGMYFHGARFSNYEAWLSDPTHIGPSAQVVWPIVGQEILNGDVGGGFRGIQITSGFFQIWRASG

SEQ ID NO: 2843 - DNA, 302 bp, Homo sapiens
aagctttagacctaacaggaaacaatacgacaattggtttggcgatgaattcaacagtggccaacgggaatatcaatttggatgtcaaagtaaaatgctttgataattatgaaggattgaaattggtcgtgtatcttttggaagacaagttatactataaccaacgcaattactacagtgatttgtacggtggtgtgaatccgatacccaattttgaacacaatcatgtattgcgcgcatcgctaaccgatattaccggtgaagccattacgggaacagtaaatggagcaaccgttacgcgt

SEQ ID NO: 2844 - protein, 86 aa, Homo sapiens
MNSTVANGNINLDVKVKCFDNYEGLKLVVYLLEDKLYYNQRNYYSDLYGGVNPIPNFEHNHVLRASLTDITGEAITGTVNGATVTR

SEQ ID NO: 2845 - DNA, 324 bp, Homo sapiens
  misc_feature (1)..(1): Wherein n may be a, c, g or t
  misc_feature (2)..(2): Wherein n may be a, c, g or t
nntgccgggtttgtgaagaggagcaacccaatgagtaaagttatggcaccagaggttgaagcgaatccgttgaggcctgaacagattagtctgcgtgaggcgttctggttctggttgaagctcggtttcattagcttcggcgggcctgcgggccagatctcgatcatgcatcaggaggtggtggaaccggcgcgctggatttcagaacgcagatttctacatgccctcaattactgcatgttgttgccagggcccgaggctcagcaattggcgacttacattggttggctgatgcatcgaacgtggggaggcgtgatcgccggc

SEQ ID NO: 2846 - protein, 108 aa, Homo sapiens
  misc_feature (1)..(1): Wherein Xaa may be any naturally occuring amino acid
XAGFVKRSNPMSKVMAPEVEANPLRPEQISLREAFWFWLKLGFISFGGPAGQISIMHQEVVEPARWISERRFLHALNYCMLLPGPEAQQLATYIGWLMHRTWGGVIAG

SEQ ID NO: 2847 - DNA, 369 bp, Homo sapiens
  misc_feature (70)..(70): Wherein n may be a, c, g or t
  misc_feature (369)..(369): Wherein n may be a, c, g or t
caagaaggagaccctggctccaagcagcctcggaagaaaagagggcgttacagacagtacaacagtgagnatacggaggaagcaatctcagtggttatgagtggaaaaatgagtgtttccaaagctcagagtatttatgggattccccacagtacactggagtacaaagtaaaggagaggctgggcactttgaaaaaccctccaaagaaaaagatgaaattaatgaggtcggaggggccagatgtttctgtaaagattgaattagatccccagggagaggcagcacaaagtgcaaatgaatcaaaaaacgagtaggaatactgtagagtgccaattactgtacaaactggtggatgacaatcgagcagn

SEQ ID NO: 2848 - protein, 104 aa, Homo sapiens
  misc_feature (24)..(24): Wherein Xaa may be any naturally occuring amino acid
QEGDPGSKQPRKKRGRYRQYNSEXTEEAISVVMSGKMSVSKAQSIYGIPHSTLEYKVKERLGTLKNPPKKKMKLMRSEGPDVSVKIELDPQGEAAQSANESKNE

SEQ ID NO: 2849 - DNA, 378 bp, Homo sapiens
  misc_feature (361)..(361): Wherein n may be a, c, g or t
atcaccacttttgagatgattttgtcagattgtcctgagcttcgtgaaattgaatggcgttgtgttatcattgatgaagcccatcgactgaaaaaccgtaattgcaagctgcttgatagtctcaagcacatggacctggaacacaaggtgctactcacaggaacaccattgccaaatactgtagaagaactgtttagcttgcttcatttcttggaaccgtcaccatttccctcagaatcagagtttctcaaggactttggggatctcaagacagaggaacaggttcaaaagctacaggccattctttagccaatgatgcttacaagactcatagaggatgttgaaaaaaacttggcacccnaacaggagacacttatt

SEQ ID NO: 2850 - protein, 102 aa, Homo sapiens
ITTFEMILSDCPELREIEWRCVIIDEAHRLKNRNCKLLDSLKHMDLEHKVLLTGTPLPNTVEELFSLLHFLEPSPFPSESEFLKDFGDLKTEEQVQKLQAIL

SEQ ID NO: 2851 - DNA, 479 bp, Homo sapiens
acgcgtgaagggaaactgtcctcacagatgagtgtgagggttcaaaaagatactgcctgccaagcactggccacaaatgcctggcagaacaactgctcataagtgtgtagttgttgttattattactaaccaagtgaggaaaattatccctagcaggtccagatgaccgtgtgcatgaatcacagggagaccctaaaggatttcctcctgtaaagctctttccccacctatttgctactgcctgaaattgctttagcaggaaacagaatctctcatgccacaagtgagcataaagtttaaaatgtaaatgctctaggaaaaggcaactcatctcttaaattctctccaaggttcaaatcctttccaaagaggaggcttttgtataagtcagaaggcccagtccctgaaggtcatggaaaaggtcatgacacacggagggggtgtcaaagggagactgggaaactgaagatgaagctagc

SEQ ID NO: 2852 - protein, 110 aa, Homo sapiens [sequence omitted]

SEQ ID NO: 2853 - DNA, 302 bp, Homo sapiens
ggatcctgagtcacgaccgaccgcgaacgaggggttcagctggccatgcccgttggggtcacctcccaggactgggccacgcaacttggcttagacaccgcggcaccctggcgcaccggagcactcgacgtcacccgccaagccactgccagtgggccacttcgtcaacgcccgctgctacacctcggaaaccgaacgacgcagcgtgctggactctggctccaccacgacaaccaataccgcccgaacccttctgggcaacgacgccgaacgcctctcgacgctgcaccgattggacgcgt

SEQ ID NO: 2854 - protein, 85 aa, Homo sapiens
MPVGVTSQDWATQLGLDTAAPWRTGALDVTRQATASGPLRQRPLLHLGNRTTQRAGLWLHHDNQYRPNPSGQRRRTPLDAAPIGR

SEQ ID NO: 2855 - DNA, 286 bp, Homo sapiens
cgcgcgtgaaagaggttctcgacgttgacgtcatgaagcgttccggattgtcgacggattactctctgtgcatcgtcgggcggcgcgttgttgtgctgaacaaacagttctgggctcgtacgacttggtctctggcccatgagctagggcatctcgttcaagggcacctggatcgtgatggagacatcgcgggcgaggcggacgaaaaacaagcgaacgctttcgctgcggaattgctgctgcccgagaaatggatgaagaacttcaattggcccgcattgacccg

SEQ ID NO: 2856 - protein, 84 aa, Homo sapiens
MKRSGLSTDYSLCIVGRRVVVLNKQFWARTTWSLAHELGHLVQGHLDRDGDIAGEADEKQANAFAAELLLPEKWMKNFNWPALT

SEQ ID NO: 2857 - DNA, 276 bp, Homo sapiens
ctcgagggtggtgggtataatacccacttcattctggccctggtgtggaggaagggactgagctgcatgggttgccaatgccaggactgacccaccccactggagtttgcacagaccctgagtgtgagcctccacccaacgatcagagaacccagaaaaggcctggcatccaacggcccagcaactgcccatccatgtgcacagcagaccatgctgcagcctcttactcccaggccatgctcctcgccctcgtcatcctcctcgcccttcacgcgt

SEQ ID NO: 2858 - protein, 70 aa, Homo sapiens [sequence omitted]

SEQ ID NO: 2859 - DNA, 652 bp, Homo sapiens
  misc_feature (107)..(107): Wherein n may be a, c, g or t
  misc_feature (215)..(215): Wherein n may be a, c, g or t
  misc_feature (230)..(230): Wherein n may be a, c, g or t
cgatcttgacacagtattaaaaaaagtgttctaagcttcagaaattgataagcaggctgtcccaaacagggaagacagcagcgttaggacaaccggcggctcactgngactcacactacgtgtttatcactccctcgtaacacttaaccctaattgtttgccatgcctgaatggacactctgacttcctctcacagtgtttaaggaacaacatanatttgaaattagctntcagaaaatgaacaaaatctgtgacttacacacccacccctcccttttttagaatgccaaaaggttctgttttaagtgctctggtttacagtctatgggtaacaatgacatcctccaggaggtttccggctttcccctttttggtgttaacagctgtgcctacagcaaagtggattcttccagaagcggtagtgacctcaatgacctctgccctggtcttgaagtctaacaccagctcttgtcatagcactgctgggaagttctgtctgctaaggaagccagcttttaaaaatggaggaggatgggcttctgcctcctgtgtcaggtcttagaagtctttaagccttgtttttccatgatgttccacagtttgcggagattggactgtaaaatcacatcgtctggcttgagctgcagggcct

SEQ ID NO: 2860 - protein, 92 aa, Homo sapiens
MPKGSVLSALVYSLWVTMTSSRRFPAFPFLVLTAVPTAKWILPEAVVTSMTSALVLKSNTSSCHSTAGKFCLLRKPAFKNGGGWASASCVRS

SEQ ID NO: 2861 - DNA, 455 bp, Homo sapiens
atcaactttgaggaaagagtgcggaatggcagagggggtgcccagtttgcctccccagaaagcctatgggtatcctgacccagcccagcacatgtgggagtctctgcatgctctatttcgggtttctccttctaactgtgtttgggtgcaattgtgtatacgtgcagatgggtgcacacactccaatttcatcagtggctctcggtacccagaggtttccattgttataattataccaggcatattgtagatagcacatagcagctaataatttttgaatgtcattgctgggaaatcaggaagtgctgacttttggatagtttcagctctgcactgatgagagtttcactttagtatcaaatatataaagcacctatggcatgctacacacagttctacgcactttgagaaattaacgaatggaatccttacaggtatctgatcacatggggctg

SEQ ID NO: 2862 - protein, 74 aa, Homo sapiens
MAEGVPSLPPQKAYGYPDPAQHMWESLHALFRVSPSNCVWVQLCIRADGCTHSNFISGSRYPEVSIVIIIPGIL

SEQ ID NO: 2863 - DNA, 311 bp, Homo sapiens
tttaaagtgtttgacgtccgcccaggctctgaccccatgaagccagacgccacaatggtggtgaagagtcatcggttgacagtcacaaggggctcccgaaaagattacaggaaggatgccagtgtcgacaccaaggtcgtctgctggtttgtccataacaatggggaagggttcatcgacggtgtccacaccgactatattgtccccagcttgttctgagtacacatgccagctgctgctgcagtagaaggcctggaacaggacacagaatggggctcgtgggaaggactgggacaataaagtgggtaaac

SEQ ID NO: 2864 - protein, 72 aa, Homo sapiens
FKVFDVRPGSDPMKPDATMVVKSHRLTVTRGSRKDYRKDASVDTKVVCWFVHNNGEGFIDGVHTDYIVPSLF

SEQ ID NO: 2865 - DNA, 392 bp, Homo sapiens
  misc_feature (1)..(1): Wherein n may be a, c, g or t
  misc_feature (2)..(2): Wherein n may be a, c, g or t
nnacgcgtttctggtacatctggtttacaattgtttgattataaatttggtcaaacaggtgttcatggtacagaacaagatcattatgatggaaacttaggacaaaaatatgtcaaagaacttattcgtccaaaattcatgcaagatgaaatccctgtacacatgaaaattatctatgatgaagatagtcataaaattttaggcgcacaacttatgtctaaagataatattactgaatcaatcaacaccatgtccattgccatttcagctggttatactttagaacaactcgcagtacaagacttcttcttccaacctgactacgacagaccttggaattacttaaacgtacttgctcagcaagcattaaatgacacatttggtagtgatca

SEQ ID NO: 2866 - protein, 130 aa, Homo sapiens
  misc_feature (1)..(1): Wherein Xaa may be any naturally occuring amino acid
XRVSGTSGLQLFDYKFGQTGVHGTEQDHYDGNLGQKYVKELIRPKFMQDEIPVHMKIIYDEDSHKILGAQLMSKDNITESINTMSIAISAGYTLEQLAVQDFFFQPDYDRPWNYLNVLAQQALNDTFGSD

SEQ ID NO: 2867 - DNA, 313 bp, Homo sapiens
agatctgtgtttgaaagtcacaaaaatatagaaagcacagagtgtgtcacagggcctcatttagaaagccaggattatgtgtgaggtcgaacagggagggaggcgaacacgccggctggacattgaatgaaaccggttctagtctctgcccatagcccttcctccctgttcggctccagggacgatgggctggcatttgttacacatggtacaagactccattttcaagccagccagctgagcttcttccctttcagttctgcatttactcctccggcctaaagttggggcaactgaacaacggattgcttga

SEQ ID NO: 2868 - protein, 51 aa, Homo sapiens
MKPVLVSAHSPSSLFGSRDDGLAFVTHGTRLHFQASQLSFFPFSSAFTPPA

SEQ ID NO: 2869 - DNA, 195 bp, Homo sapiens
  misc_feature (195)..(195): Wherein n may be a, c, g or t
atccccgtcatcacccgcaaggcctatggcggagcctatgacgtgatggcatccaagcacttgcgcggcgatctgaactacgcctggccgaccgccgaaatcgcggtgatgggtgccaagggcgcggtcgagatcatcttccgcgggctttccgctgaagagcaggcggtgaagaccaaggaaccccaagaccgn

SEQ ID NO: 2870 - protein, 65 aa, Homo sapiens
IPVITRKAYGGAYDVMASKHLRGDLNYAWPTAEIAVMGAKGAVEIIFRGLSAEEQAVKTKEPQDR

SEQ ID NO: 2871 - DNA, 357 bp, Homo sapiens
acgcgtcggcgagatcgtgccgcttccgctggggatcgagatcggctcccccacgtcgtcgcgcactccagctgatgcgctcgaggccgctcagcgcgatcttcagacgtgcagcacacagaggatcgaagacctcagtgccggccccttcaccgacgctgacctcaccaccgttgatgtcggctacgtcttgactcgtcatcacacagccctcactccatccttcgagcaccttcccggagtggcagcactgatcgaagtatgccgcgacgtgagcccagcacttctgggagagggagacgcaaggctgtccacgcccatccgcgggatggagtcttggcaatctgcagccatcca

SEQ ID NO: 2872 - protein, 67 aa, Homo sapiens
MTSQDVADINGGEVSVGEGAGTEVFDPLCAARLKIALSGLERISWSARRRGGADLDPQRKRHDLADA

SEQ ID NO: 2873 - DNA, 520 bp, Homo sapiens
tgtacaccgagtgcagggaggggaaccttggaaaccagcctctgctagaggggagtggctcaaagggcactgaagcacttggccagtggcgggcaggggaaggaacatccccttcccctctgggctcccatcccagtcagacatatcccctcatgggtgatgtgggggcagcaagagaggagcagaggcttccgttggatcctagtagaggacagcggggggccttggcaaaggagctgtccctcagtcgtctgtaatacccttggctctcagttcctcttgcaccctagtcaggtaggttgggtccggatacccaaacctggggagggggcaaagagaaatgaggatcagagttagtcgtttggacttgatcgtccttacccaccctcattttgagtggctcagttggggccaaattcagacccctcccacttcccatgaggagggacctccaaaaccaagataacccagccagaatatgctttttgggtggggaggggaggtgttaagctgaacgcgt

SEQ ID NO: 2874 - protein, 65 aa, Homo sapiens
MWGQQERSRGFRWILVEDSGGPWQRSCPSVVCNTLGSQFLLHPSQVGWVRIPKPGEGAKRNEDQS

SEQ ID NO: 2875 - DNA, 236 bp, Homo sapiens
ggcaactcagcgtaaaaaacgtctttcacgtaccgagaagaacaatgcgcttctcgcacaggctgccaccgttaaggtaccttccgttgccgacgttgttgtagtgggcggaggagcttccggccttacggctgccatcagcgcggcgggaggcactgcaagatgcgggacatcccggcaccgtcgttgtttttgaacgagcgctggaatgtggacgaaccatccttgcaaccggc

SEQ ID NO: 2876 - protein, 65 aa, Homo sapiens
MVRPHSSARSKTTTVPGCPASCSASRRADGSRKAGSSSAHYNNVGNGRYLNGGSLCEKRIVLLGT

SEQ ID NO: 2877 - DNA, 448 bp, Homo sapiens
  misc_feature (426)..(426): Wherein n may be a, c, g or t
aaattttactcactactactcactggtgtctctgctcactcagcgaggcctacccatgccctacaacaggacagcagcgaggcaaagcaaaacctgccagagggtgtggggagacttcttgcaacaggattccccatcttgagctgccatgagatgtgtaagggagacatggctacaggtccttcccctccaagtttccctaggatggggagtaagaccacgactcaaaatcagctaagctgttcagcaacagggatgatttctcgtgcacacggaccatctataacaggggttaggtatcactgctaacagtaactgccaacacttcctgagtaccagtagcagacaccaggaagatgcttcctgtgcattacctcatttaagcctcacgaccccactgaccagggggagacactgaagacaganggtaaataacctatccggatcc

SEQ ID NO: 2878 - protein, 51 aa, Homo sapiens
MCKGDMATGPSPPSFPRMGSKTTTQNQLSCSATGMISRAHGPSITGVRYHC

SEQ ID NO: 2879 - DNA, 379 bp, Homo sapiens
  misc_feature (31)..(31): Wherein n may be a, c, g or t
acattactgggtaagacggcaatcgtcatancaaaagttttggcaagtcagtacgatgcatccttggatcaagaaggtgagtctggaaccggtgcttctaatggcgatgtttaccattataatgaaggggacttggctgcctccttcaagggatgtagatcaagaggtacgtgtgctagtgaaataggtcacatgtaccagaaaatcaagaaatcttagatgtgtgtaatcttgcaatttagtttcaaacaagatccttgtatttatataaacaaagatataatttttaaaaaaaaattagaaaaagcaaatataattcaggtcccacttggaataatggcgctgtattgatgcattttccttatgtttagtgacgcgt

SEQ ID NO: 2880 - protein, 72 aa, Homo sapiens
  misc_feature (11)..(11): Wherein Xaa may be any naturally occuring amino acid
TLLGKTAIVIXKVLASQYDASLDQEGESGTGASNGDVYHYNEGDLAASFKGCRSRGTCASEIGHMYQKIKKS

SEQ ID NO: 2881 - DNA, 285 bp, Homo sapiens
  misc_feature (1)..(1): Wherein n may be a, c, g or t
ntggtgtcctgtggacatgaatttattagaggggactggcaccagagtgggcacaagctgcaggctgggaggaaggggcaggggtgggagcacagccaatggtgtgtcagtcagtgggccagcaggcgtgctgttcttcaccctgcagagcttcagtgcccagggcgtgccggaggctttgggaagatgcggagggagtaggtgcctggttccagttgcatctggggaggcaagacgatgagaaagtccccaccccaggcgtttttgacccttgagagataatta

SEQ ID NO: 2882 - protein, 74 aa, Homo sapiens
MNLLEGTGTRVGTSCRLGGRGRGGSTANGVSVSGPAGVLFFTLQSFSAQGVPEALGRCGGSRCLVPVASGEARR

SEQ ID NO: 2883 - DNA, 360 bp, Homo sapiens
gcgttctggttttatttctaccccttcaattggggtccttatattatgggctccggaccatggggaaatcatgtaggggactgggaacattctttagtacgattctataaaggagaaccacaatatctatggatgagtgcgcatgggggtggtagtgcctataagttcgaagccattgagaaaatcaaaagattgcgtcgtgttgacggtaaattgacaaacgaggctattaagaagcctttaatatttagtgcaagaggcacacatgcacattatgcatcagtcggtcaacatgcgcacgatgttccgtttttctttatgccattgagtgactttactgatagagggccattatgggat

SEQ ID NO: 2884 - protein, 120 aa, Homo sapiens
AFWFYFYPFNWGPYIMGSGPWGNHVGDWEHSLVRFYKGEPQYLWMSAHGGGSAYKFEAIEKIKRLRRVDGKLTNEAIKKPLIFSARGTHAHYASVGQHAHDVPFFFMPLSDFTDRGPLWD

SEQ ID NO: 2885 - DNA, 507 bp, Homo sapiens
ctctccgaccgcgtcaaccccggcaatatccgcaagttcgacgaccagatcgaatcgatttgtaaggctgccaccgagcacggtacgagcatccgaatcggcgtgaatgctgggtctctcgacaaacgtctgcttgacaaatacggagccccgaccgccgaggctatggtggagtcggcactgtgggaggccagcctctttgagcaatacggattccgggatttcaaaatctcggtgaagcaccacgacccggtcgtcatgatccgtgcctatgaacagctcgccgccaaatgcgattatccccttcatttgggcgttactgaggctggtccggccttccaaggcaccatcaagtcggcggtggccttcgggcatctccttgccgagggtatcggcgataccatacgcgtctccttgtcggctgatccggtcgaggaagtcaaggtgggtatcaagatcctggagtcgctcaacctacgtcctcgaggtctagagatcgtctcctgc

SEQ ID NO: 2886 - protein, 169 aa, Homo sapiens
LSDRVNPGNIRKFDDQIESICKAATEHGTSIRIGVNAGSLDKRLLDKYGAPTAEAMVESALWEASLFEQYGFRDFKISVKHHDPVVMIRAYEQLAAKCDYPLHLGVTEAGPAFQGTIKSAVAFGHLLAEGIGDTIRVSLSADPVEEVKVGIKILESLNLRPRGLEIVSC

SEQ ID NO: 2887 - DNA, 226 bp, Homo sapiens
cggccgccgcctgtccgacccggagaaccctgcgtcatgaccccgacacccccctggacccgcgccgactggccgatcgccgcagcactgatccagtatcccaacatcctgcccgacagcagttccagtcaggatcagtcacccgacgcctggggccgggtactcgacgacgtcgccgatgccggcttcaccgaggtcgatccgaccgattcctggcttcgcatcg

SEQ ID NO: 2888 - protein, 63 aa, Homo sapiens
MTPTPPWTRADWPIAAALIQYPNILPDSSSSQDQSPDAWGRVLDDVADAGFTEVDPTDSWLRI

SEQ ID NO: 2889 - DNA, 282 bp, Homo sapiens
  misc_feature (1)..(1): Wherein n may be a, c, g or t
  misc_feature (2)..(2): Wherein n may be a, c, g or t
  misc_feature (4)..(4): Wherein n may be a, c, g or t
  misc_feature (282)..(282): Wherein n may be a, c, g or t
nnanaaggcaatatcagcccggtagctgagcttttcaatgaagatctcgatgaggctgacaacgctgaagtcgttcgcaagctgcttgatacgctgaaatccgcgctcatggaagaacggcagatggaactggcattacgcgccagcgaggtgctgcttcagttcaatccggaagatccgtatgagatccgcgatcgtgggcttatctacgcacagctggattgcgatcacgttgcgttgacggatttgaactacttcgttgagcagtgcccggaagacccn

SEQ ID NO: 2890 - protein, 94 aa, Homo sapiens
  misc_feature (1)..(1): Wherein Xaa may be any naturally occuring amino acid
  misc_feature (2)..(2): Wherein Xaa may be any naturally occuring amino acid
XXGNISPVAELFNEDLDEADNAEVVRKLLDTLKSALMEERQMELALRASEVLLQFNPEDPYEIRDRGLIYAQLDCDHVALTDLNYFVEQCPEDP

SEQ ID NO: 2891 - DNA, 311 bp, Homo sapiens
acgcgtagtcctgctgcgcctgaccgacaagggccgcgccctgcagcgacaggccgagagcattcccgcctgcatcctggagagtaccggcctcgacttgccacagctggtcgccctcaaggatgagctgctggccctgcgcggcacccggcaggcaccggactgagaggcttatacctacctgtctggtttttatcgccaaatcttccaacgatttatattgcgcgcaaaatagcgtgacgataaatttcatttcacgcacttacttagcgcgcaagaaattaacgcacaacctagacaggggaccctca

SEQ ID NO: 2892 - protein, 84 aa, Homo sapiens
MKFIVTLFCAQYKSLEDLAIKTRQVGISLSVRCLPGAAQGQQLILEGDQLWQVEAGTLQDAGGNALGLSLQGAALVGQAQQDYA

SEQ ID NO: 2893 - DNA, 183 bp, Homo sapiens
  misc_feature (160)..(160): Wherein n may be a, c, g or t
caggaaatagaaggggaagggacatttcccaacatattttataaggccagtattgccttgataccaaaaccagaaaaggatagtacaaagcaagaaaataacatactgatctgtctcataaacttaagagtaaaaatccttaacaaagtattatgcaatntaattcagcaacgtataaaattt

SEQ ID NO: 2894 - protein, 61 aa, Homo sapiens
  misc_feature (54)..(54): Wherein Xaa may be any naturally occuring amino acid
QEIEGEGTFPNIFYKASIALIPKPEKDSTKQENNILICLINLRVKILNKVLCNXIQQRIKF

SEQ ID NO: 2895 - DNA, 347 bp, Homo sapiens
gggtcagttttcttggaccaatggaccccagagagcgtgggcgattatgcgagcgggacgaaccatgtccttccgacctatggttacgcaaggatgtacagcggtgtatcgctgaactctttcctcaaatacatcactgtccaatccctaacagaggaagggctgagaaagctggggccgtacgtcgcgaagatggccgaagtggaggggctagaggcgcacaagagagccgttacccttaggctgcaagaggttgaggccaatgtaactgtctagccgctgtccatggtctattgcaacgttcagactcgatgtggggtgctggagttcttccctaggaacctagg

SEQ ID NO: 2896 - protein, 91 aa, Homo sapiens
GSVFLDQWTPESVGDYASGTNHVLPTYGYARMYSGVSLNSFLKYITVQSLTEEGLRKLGPYVAKMAEVEGLEAHKRAVTLRLQEVEANVTV

SEQ ID NO: 2897 - DNA, 297 bp, Homo sapiens
ccggaagaatatccgcaggaaaatctaaattttttgaagttaacggatataaaattatatcaagttgggatgagcggtaataaggagccatttgttaatataccgtcccatctactgacaaaggcactagaaattgtgttgaatcctgcgaatcgaccgatactgatacattgtaatagaggcaaacatagaacggggtgtttgattggttgtataagaaaactacaaaattggtcgctaacgatgatttttgatgagtacagacgtttcgcatttccgaaggccagggcgcttgat

SEQ ID NO: 2898 - protein, 99 aa, Homo sapiens
PEEYPQENLNFLKLTDIKLYQVGMSGNKEPFVNIPSHLLTKALEIVLNPANRPILIHCNRGKHRTGCLIGCIRKLQNWSLTMIFDEYRRFAFPKARALD

SEQ ID NO: 2899 - DNA, 273 bp, Homo sapiens
  misc_feature (1)..(1): Wherein n may be a, c, g or t
  misc_feature (2)..(2): Wherein n may be a, c, g or t
  misc_feature (273)..(273): Wherein n may be a, c, g or t
nnagatctgacaggaaaagaagtggctgttattggtggaggtaacgtatcaatggatgcggtccgtacagcaaaacgtctgggtgcaaagaaggtaagtattgtctatagacgaagagtagcagacatgacggcacttcctggagaaatcgaaggagcagttgcggaaggcatagaattacagacgctgaaagcaccggcatctatagatgtagacgagaatcatcatgtaaaaggtatctatgtgacacctcagatggtaagctcgatcagn

SEQ ID NO: 2900 - protein, 91 aa, Homo sapiens
  misc_feature (1)..(1): Wherein Xaa may be any naturally occuring amino acid
  misc_feature (91)..(91): Wherein Xaa may be any naturally occuring amino acid
XDLTGKEVAVIGGGNVSMDAVRTAKRLGAKKVSIVYRRRVADMTALPGEIEGAVAEGIELQTLKAPASIDVDENHHVKGIYVTPQMVSSIX

SEQ ID NO: 2901 - DNA, 368 bp, Homo sapiens
gccggctcagacctgagtcatcactctggtgtttggagtccactcctcccaatctcaagcactgcgggacatggctggtggctcaagggccccttcctttccttaaccaggagcctgtatgccgtgagctatgatgtgggcctggcttgctgagcctggagccggtgtgtctttcacattaccatgtggcaatctggaaaagtccatgtgtcttaagctctccgtgttgtacaagctgaaaggaggaagaaaacaggaggacgcccatggtacccaaagccaacttatcttgggtctccgtgaaaaccttatgactttacaactacatctacggattccctctgccttactcttgtgcacgttttatt

SEQ ID NO: 2902 - protein, 79 aa, Homo sapiens [sequence omitted]

SEQ ID NO: 2903 - DNA, 351 bp, Homo sapiens
atgatggagagagcagaaaacaaagggaaacggtttgttccgttatatgtgagaaggttaatggcgcttctcttgtttggaacgattcatgcctttttgatatgggacggggatattttaacagaatatgccttgctcggttttgtcctgctcttgtttcgaaaagcaaagccgaaaacactgctgatatgggcggtctctttgtatcttctgttttccattccgttcatgttgataagttttgatcaatcaaacggacaggaatgggtacaagcggtaacacagcaggcaacacaagcgattcatgtttatggaagcggcagcctgaaggacattgcagaacagcggatc

SEQ ID NO: 2904 - protein, 117 aa, Homo sapiens
MMERAENKGKRFVPLYVRRLMALLLFGTIHAFLIWDGDILTEYALLGFVLLLFRKAKPKTLLIWAVSLYLLFSIPFMLISFDQSNGQEWVQAVTQQATQAIHVYGSGSLKDIAEQRI

SEQ ID NO: 2905 - DNA, 207 bp, Homo sapiens
gaaaccggtaaagtcaacaaggcttatgaccttgacggaactgaatatgatattcctggtttgatgatgaaatggaaatcagacggtagaccatggaccgtgatagcggaacataactatggtgaaggttccgcaagagagcatgctgctttgtcaccaagatttttaggcggagagattcttttagttaagtcttttgcaagaatt

SEQ ID NO: 2906 - protein, 69 aa, Homo sapiens
ETGKVNKAYDLDGTEYDIPGLMMKWKSDGRPWTVIAEHNYGEGSAREHAALSPRFLGGEILLVKSFARI

SEQ ID NO: 2907 - DNA, 285 bp, Homo sapiens
gtcctgataagagttaattgtaaaggtgagttatttggaaacacttttctagctttaaatgtcatctagcatttttggatgagaaatgtaattttttaattaaaaataaaataaaattcacgtatgttgaagtattataaaagattggtttcttccttagcagaatgtaggctctggcagaaatatagtttcaggtgtgggtgtaggagggaaccaaacttggatgaaacaggattttatcttcctggggtgggctgccagttaaatttctgcaaatgctactct

SEQ ID NO: 2908 - protein, 54 aa, Homo sapiens
MLKYYKRLVSSLAECRLWQKYSFRCGCRREPNLDETGFYLPGVGCQLNFCKCYS

SEQ ID NO: 2909 - DNA, 317 bp, Homo sapiens
gaattccagaggaatttatttatgcctgggttttgctgcctagatcatttacttacaactgagtgtggaagagaccttttctatgtaaccccctctaacaaaaccattttggatttaaaggaaccccccttactcgggggaagcattgagcagatgccagtcaagtatctccacatcttttctgttggcttctctatcattagcagagttgtacttggaaaatagtattgcgcatatatattgaggtctgttaaactcaagcccttctgtctgtgtgcttgtttattgcaggcttacagtgctgctgtccagtccca

SEQ ID NO: 2910 - protein, 67 aa, Homo sapiens [sequence omitted]

SEQ ID NO: 2911 - DNA, 257 bp, Homo sapiens
ggtaccacgccgagcagtcggcgttaatgtcctgcgactcaccactctccaccccttcctaagcacggactcaaactggccgaaacaagtgtacgagcgaggtggtgtcgtcaacctcggcgtggcgcactcacacatcggcccccctgccgtatactgaagccagtttctagtcgtgggggtttgcatgaactgctcgttcaaccgtcgtcaacgatcatggcttgccgcaatggtttccggtatgaccgtgatca

SEQ ID NO: 2912 - protein, 63 aa, Homo sapiens
MQTPTTRNWLQYTAGGPMCECATPRLTTPPRSYTCFGQFESVLRKGWRVVSRRTLTPTARRGT

SEQ ID NO: 2913 - DNA, 300 bp, Homo sapiens
  misc_feature (1)..(1): Wherein n may be a, c, g or t
nacgcgttgctgggtggacttggatctgacttgacggtgtggatgtcgcacggtgatcaactgtccaagatgcctgacaacttcgaagtcatcgcccacacagccacggcgccctacgctgccatcgcgcacaaggaaaagccgttctatggcatccagttccatgttgaagtgacgcacaccacctgcgggaaagctattttcgaaaactttgtcgaccggatctgtggatgcaagcgcaactggaccatggagacgtttattgacaaggaaatcgctcgtattcgggaatgggcgggc

SEQ ID NO: 2914 - protein, 100 aa, Homo sapiens
  misc_feature (1)..(1): Wherein Xaa may be any naturally occuring amino acid
XALLGGLGSDLTVWMSHGDQLSKMPDNFEVIAHTATAPYAAIAHKEKPFYGIQFHVEVTHTTCGKAIFENFVDRICGCKRNWTMETFIDKEIARIREWAG

SEQ ID NO: 2915 - DNA, 327 bp, Homo sapiens
tctagatgatatagaactttacactagttttgtataaacatgtatcaaacattcaaaattctacttaaaactagaaaaatcagaaaatttgcttgtttaattaagaaaaaagaaactatccatatattcttatttatgctacattacttacaaatttatgagcaattatattggaaacataaatttattgaagttgacgttttacagtcagttccatgaaaagggaacttgtaaaatctcaattataagccaatacaaacactaccatcatgtctttattgacaaaaatatacccaaatgtcataatttttagaaaatgttaaatag

SEQ ID NO: 2916 - protein, 59 aa, Homo sapiens; identical to SEQ ID NO: 64

SEQ ID NO: 2917 - DNA, 503 bp, Homo sapiens
acgcgtgtgcacacacacacacacacacaaacacacagagtagccaaagcacattttgtggaagaaatattatcacattgcattgcaggagacgagctgtgttaaatcctcaaatacttctcatttattaaacaagtaactatttctctccctgctgggctccagataggctatcaaaagatttcacgatcaatacctagatacatagttactgctctaattattttaatgagtgaatttaaatcttgcataggttctttttattcaaaatgtgatccacaggccctcaccatcagcatcatctggaagtttgtaagagatatatagtctcagccctaaccccagaccaaatgaatcagaatctgcattttaacaagagtctctttgattcaagtgcacataaaagtttggcacatagtgggcaagatcaattacttcaaacttatttgccccaactcacaatgagaaagaaattttacattgcaacccagtgtgcgtgtaca

SEQ ID NO: 2918 - protein, 51 aa, Homo sapiens
MNQNLHFNKSLFDSSAHKSLAHSGQDQLLQTYLPQLTMRKKFYIATQCACT

SEQ ID NO: 2919 - DNA, 213 bp, Homo sapiens
  misc_feature (196)..(196): Wherein n may be a, c, g or t
gtgcacttgctctgtgtactagctgtgtgtgcatgcagctgtgtgtgcgcttgctgtgtgtgtgctagctgtgtgtgcatacttgctgtgtgtgtgtgcttgtgcgcttgcgtgtgtgtgtgcagttgctgtgtgctagctgtgtgtacgcttgtgtgtgcgctgtgtgtgtgcgcgcaagcaccctgtgtgtgtngctgtgtgtgcacgcgt

SEQ ID NO: 2920 - protein, 71 aa, Homo sapiens
  misc_feature (66)..(66): Wherein Xaa may be any naturally occuring amino acid
VHLLCVLAVCACSCVCACCVCASCVCILAVCVCLCACVCVCSCCVLAVCTLVCALCVCAQAPCVCXCVCTR

SEQ ID NO: 2921 - DNA, 201 bp, Homo sapiens
  misc_feature (201)..(201): Wherein n may be a, c, g or t
gtcgacgacggtgggctggggttcgggttcaagtggaatatgggctggatgaacgactcgctgcgatatctggagctcaacccattccaccgccagtaccgccatggcgagatgacctttgccatggtctaccaatactcagagaacttcatcttgccgattagccacgacgaggtcgtgcatggcaagggatccatgatn

SEQ ID NO: 2922 - protein, 67 aa, Homo sapiens
  misc_feature (67)..(67): Wherein Xaa may be any naturally occuring amino acid
VDDGGLGFGFKWNMGWMNDSLRYLELNPFHRQYRHGEMTFAMVYQYSENFILPISHDEVVHGKGSMX

SEQ ID NO: 2923 - DNA, 370 bp, Homo sapiens
atcgttctgttccggccttggcgtttcttccaacagatacccaaaatgacagagtccatttgccaactcacagctagaggcaaagaaatcattacccactcggaaaaggggcccataatcgcatctggtgattattctctatttcatacgatgctttccctgaggcctcagtcttctactgaaaatattttaattgtaattataaagtcatgaccatccacatgtatagctggtgtgcttcaattagaagtcactgcaaccaaaaaacaaagcactttcagttcctcacactcattgtgtttaatgtttccattggttgaatctcatgaatggctcactgaattgaagaaatgcccccgagtaggaattc

SEQ ID NO: 2924 - protein, 55 aa, Homo sapiens [sequence omitted]

SEQ ID NO: 2925 - DNA, 222 bp, Homo sapiens
  misc_feature (1)..(1): Wherein n may be a, c, g or t
ngtccccccccagccaaaggtgttttggtgaaaaaaattcaaaataaagaaggtaataacaaggttgctgttgttggcgatggcattaacgacgctcccgctttagcactgagtgatctaggtattgccatttcaacaggtacggagattgctattgaagcagctgatattgttatactgtgcggtaatgatctgaatactaatagtgtgagaggactggcc

SEQ ID NO: 2926 - protein, 74 aa, Homo sapiens
  misc_feature (1)..(1): Wherein Xaa may be any naturally occuring amino acid
XPPPAKGVLVKKIQNKEGNNKVAVVGDGINDAPALALSDLGIAISTGTEIAIEAADIVILCGNDLNTNSVRGLA

SEQ ID NO: 2927 - DNA, 397 bp, Homo sapiens
  misc_feature (1)..(1): Wherein n may be a, c, g or t
  misc_feature (2)..(2): Wherein n may be a, c, g or t
  misc_feature (244)..(244): Wherein n may be a, c, g or t
  misc_feature (358)..(358): Wherein n may be a, c, g or t
nngcgcgccagggaaactaggagccagagtcaacctaggaaaactgcatttagaacaggaggtctaaccactgtgctctacacgcgggtggttttcacttcgtgaagttttggggaatgggggtagtgcttgggttataatcatgcggttgggatcaggccctttagggatattccggctccagacccgccgctcagcttctctggctcccgggcatgggaatctggactcgggagcggaggtncccgcggtccagcaggagtcgctattgcccttagcagccagctccgttaccccgggtcaccaccgcgccgcgaggggccctagaagtggaaaaaagagccctagtgcagtggcnctcccggagcgcccagctcaccaggtacttcggagagag

SEQ ID NO: 2928 - protein, 66 aa, Homo sapiens
  misc_feature (40)..(40): Wherein Xaa may be any naturally occuring amino acid
CLGYNHAVGIRPFRDIPAPDPPLSFSGSRAWESGLGSGGXRGPAGVAIALSSQLRYPGSPPRREGP

SEQ ID NO: 2929 - DNA, 199 bp, Homo sapiens
aagctttctcttgtgtcccatgagctgtgcctgcttcagaagttggcatttctagatttaaggaataattttttaagttctttgcctgaagagatgtcatcactgacaaaactacaaacaatcaatctttcctttaacaggttcaaagtgtttcctgcagttctgtatcacatctccacactggaaacaattctgatca

SEQ ID NO: 2930 - protein, 66 aa, Homo sapiens
KLSLVSHELCLLQKLAFLDLRNNFLSSLPEEMSSLTKLQTINLSFNRFKVFPAVLYHISTLETILI

SEQ ID NO: 2931 - DNA, 302 bp, Homo sapiens
gggcccagagcaggtgagggaagggcagtggatatgtcgggaggatggagagggcaggtggtgaataactggcactcgggttatcttttcttgaggttaggattgctctccagttttataggtgaggaagctgagctcaagtggttttcctgtggcccacctgggtgtcatagcagagtgagccctggaacccaggcctgcctcgtcctgacttctgtgatctcgggcgatcacatagatcgcagtgttcgctcttgcatcatgtgtgtttgacaacttttctgggtgcccctggccctagg

SEQ ID NO: 2932 - protein, 79 aa, Homo sapiens [sequence omitted]

SEQ ID NO: 2933 - DNA, 259 bp, Homo sapiens
  misc_feature (178)..(178): Wherein n may be a, c, g or t
ctttcagacgcaactgtaaccgttgctcacaaggctggctccgaaggtcgtctcttcggttctgttaaggcagagaccattgcagacgctattgaagctgctggactaggttctgttgacaagcgtgcgatccaccttggcaacgctatcaagtccaccggtactcacaacgtttcgntgcgcttgcacgaggacgttgtagcaaacgttgaccttgacgttgtagctgcataagtttttgcttatgagcaccacgcgt

SEQ ID NO: 2934 - protein, 77 aa, Homo sapiens
  misc_feature (60)..(60): Wherein Xaa may be any naturally occuring amino acid
LSDATVTVAHKAGSEGRLFGSVKAETIADAIEAAGLGSVDKRAIHLGNAIKSTGTHNVSXRLHEDVVANVDLDVVAA

SEQ ID NO: 2935 - DNA, 392 bp, Homo sapiens
  misc_feature (320)..(320): Wherein n may be a, c, g or t
  misc_feature (362)..(362): Wherein n may be a, c, g or t
  misc_feature (380)..(380): Wherein n may be a, c, g or t
  misc_feature (386)..(386): Wherein n may be a, c, g or t
agatctgtgtatcttagagactgacacttccaccaccaacgtcaaggtgccccaagctctcctgcaaggacgtccacaaataattcagacacttggaaaaaacacctactaggcagccaagcccaggattttctcctcttggctaatgttggtgaacatcaccagggaggtggggagagcctgatatatggtaaatgcactcatccacctgcgatgacaggttaatgacctgcttccatgcaactggagtcctgcctgataccacctgcccctcccagaggaattgttactatttgctttatattgttgctttgccatanatctgagaaactgtatacacccattaagagaatatggcattnaaatcatccccatcagtnatgganatagct

SEQ ID NO: 2936 - protein, 88 aa, Homo sapiens
  misc_feature (5)..(5): Wherein Xaa may be any naturally occuring amino acid
  misc_feature (19)..(19): Wherein Xaa may be any naturally occuring amino acid
MGMIXMPYSLNGCIQFLRXMAKQQYKANSNNSSGRGRWYQAGLQLHGSRSLTCHRRWMSAFTIYQALPTSLVMFTNISQEEKILGLAA

SEQ ID NO: 2937 - DNA, 351 bp, Homo sapiens
tgatcatcagctggattccagtccaggctgccgagaagtccaggaaattcatgcgaccaaacgcgtttcacagcccactggacgcaggagccacttccgagatcaaaacagcggtggaggtctgcgagtttgccctgaacctgaccaatgggagtgcgcccgaggagacggtgcccaccggcacccggcagcagcttatcgccacctgggtcaaggccaagcagctgctgcagcagcagattgggccacggctgggcaccgaggagcaggtgggcgcccctgcccacatctgggctctgactgaggccctgtggacatagagatctgagacagccgggggtggtggggccc

SEQ ID NO: 2938 - protein, 89 aa, Homo sapiens
MRPNAFHSPLDAGATSEIKTAVEVCEFALNLTNGSAPEETVPTGTRQQLIATWVKAKQLLQQQIGPRLGTEEQVGAPAHIWALTEALWT

SEQ ID NO: 2939 - DNA, 299 bp, Homo sapiens
aagcttccaacgagtggcgaacgctcgtccggtgtcagaaaccactggaaatgcacttgcagcgaaggaaacgggctgagctcgaggacttccggtgctcgtcccaagaaaacgcgagcgggaatgccccggactcagttttctcgtcctggggtaaaaagcggtcccccgacggttcttccctttgctccgtattggtcataagtctttcgatcttcgggtctcgtgctccgaggacttcaacccacactcctggcatgctccctgacacgttttccggaggtataggtcgggaagcg

SEQ ID NO: 2940 - protein, 83 aa, Homo sapiens
MHLQRRKRAELEDFRCSSQENASGNAPDSVFSSWGKKRSPDGSSLCSVLVISLSIFGSRAPRTSTHTPGMLPDTFSGGIGREA

SEQ ID NO: 2941 - DNA, 553 bp, Homo sapiens
tccggaatcaggaaaggtcaccgcgttgttctgccccagctctacctggatgacggccgcggtgtggtccttgttgaccattccggtaacgtacttgttccacggtgatgtcgccccggtgacgagggggaggtctttgagctcgtccacccccttttcgatccgggagcggatgagcttcgacgagatgttggtgccgtcagggacggtgacgacgacgttggcgctgagcgcagaggcctgcgggaaggccacctggagtttgtcgtaggccacctgggaaggcgccccggggatggtgaagaaatcgttgtagtccccgtgaggaggggcaactccccacaccaagcagagccagcaggaccagccacagtgctacaacggtcttggcccgccggaaaccccacaccccgagatcgtggagcaaggaggacatcatcacccctcggttggaatcacccgaacaccactcgatacacttatgtatccgaggtagcatcgtatccgatacatccaccccatgagtggttgcacgtccactgcctcgggatcc

SEQ ID NO: 2942 - protein, 99 aa, Homo sapiens
MLPRIHKCIEWCSGDSNRGVMMSSLLHDLGVWGFRRAKTVVALWLVLLALLGVGSCPSSRGLQRFLHHPRGAFPGGLRQTPGGLPAGLCAQRQRRRHRP

SEQ ID NO: 2943 - DNA, 490 bp, Homo sapiens
  misc_feature (190)..(190): Wherein n may be a, c, g or t
  misc_feature (223)..(223): Wherein n may be a, c, g or t
  misc_feature (301)..(301): Wherein n may be a, c, g or t
  misc_feature (400)..(400): Wherein n may be a, c, g or t
  misc_feature (401)..(401): Wherein n may be a, c, g or t
cctaggcatctcgccttctcgtgtcacgttcttgacgtatgcggtcgggtacttgtgacccggcgcgctttgacgaaggtggcgtggccaggggtgtggaccaacacctgttgtgggcatccacgtgtaggggagacgattattgacgccgccgtgcgtcgtactcaccaggaactcggactcgaccttnatccgcgtcggatgcgcgtcgtgctaccagatntctcctatcgcgccaccgactccgggggcatcgtggaggacgagttctgtccggttgtttgttgccgatttgtccctncagaggagctcgtcgaacttacccagagcctacgaggttaagaggtggctggtttgttgcagacattatgcttgcccggtcatccgcctactattcctnngcgttacaatctgagttggcgtcggagagtggttctagcgatcagcactgcgcgtatatgatcagcgacagctggtatattatatttct

SEQ ID NO: 2944 - protein, 113 aa, Homo sapiens
  misc_feature (64)..(64): Wherein Xaa may be any naturally occuring amino acid
  misc_feature (75)..(75): Wherein Xaa may be any naturally occuring amino acid
  misc_feature (101)..(101): Wherein Xaa may be any naturally occuring amino acid
PRHLAFSCHVLDVCGRVLVTRRALTKVAWPGVWTNTCCGHPRVGETIIDAAVRRTHQELGLDLXPRRMRVVLPDXSYRATDSGGIVEDEFCPVVCCRFVPXEELVELTQSLRG

SEQ ID NO: 2945 - DNA, 294 bp, Homo sapiens
acgcgtgccttgcggagcccgacgcccaccacgtgctggccgtatgtggcgcgtgtcctgcccgtcttgctctggacccttgcctcatgccgtgatacgcgcctttcccaactcgtgtcattgtggtccgcctacccgagtgtgcctgcccccttggttgtcgggacgcagctgcgtgcatggtcgccgaatgcgaccgtatcgcccatgctccaaatgcgctggcctcgggctttgggggacgcaccagatggctcattcagcggggatgccccgggtgcccatgccttgcac

SEQ ID NO: 2946 - protein, 86 aa, Homo sapiens
MSHLVRPPKPEASAFGAWAIRSHSATMHAAASRQPRGQAHSGRRTTMTRVGKGAYHGMRQGSRARRAGHAPHTASTWWASGSARHA

SEQ ID NO: 2947 - DNA, 327 bp, Homo sapiens
  misc_feature (1)..(1): Wherein n may be a, c, g or t
nttttttttttttttttttttttttggaaagaaaacatttaaaatgcggctggtgtggcgactcattttgtggagaagctttcagacacggaacaacttaataaaaaggttaagattattcctttggaagtcgtgcttcgcaactacacggctggttccttttcaaaacgttttggtgtggatgagggaatcgccttggagactccgattgttgaattttactacaaaaatgatgatttggatgatccattcatcaatgatgagcatgtgaaattcctaaagattgcggatgaccagcaaattgcctacttgaaggaagaaacgcgt

SEQ ID NO: 2948 - protein, 95 aa, Homo sapiens
NAAGVATHFVEKLSDTEQLNKKVKIIPLEVVLRNYTAGSFSKRFGVDEGIALETPIVEFYYKNDDLDDPFINDEHVKFLKIADDQQIAYLKEETR

SEQ ID NO: 2949 - DNA, 449 bp, Homo sapiens
  misc_feature (398)..(398): Wherein n may be a, c, g or t
ggatccaagactccagaaatgggctggatttcgaagatccgtgtctttggctttaattcagcgcgtagtttctgtcttaagtacttcggcatgtgtttctccagcttgtcaacaggcttttggctctggacgaaccattcacaagggacttggagatgattggaaagctgaatagtttccaccaggcactgtccacactgaattgtggcaaagtccacttttccacgagagagagtcatggttggaatggtcaccttggcttggagacagatgtgaactgttggccctccaaccaccttgatgggcagaatgacttctttgcttccaacaggaagattggccccctgtgggtcaaatctcacttcaaatatttccgtttcacaatgaagtagattctntacacgatctagctcagtactgaatcctgtctcatgttcggagagaggctg

SEQ ID NO: 2950 - protein, 79 aa, Homo sapiens
MTLSRGKVDFATIQCGQCLVETIQLSNHLQVPCEWFVQSQKPVDKLEKHMPKYLRQKLRAELKPKTRIFEIQPISGVLD

SEQ ID NO: 2951 - DNA, 291 bp, Homo sapiens
  misc_feature (1)..(1): Wherein n may be a, c, g or t
  misc_feature (2)..(2): Wherein n may be a, c, g or t
nnaccggtgagtctcatcgaaacgctggctggcaagattgctgacaccgttcttgcgatcagtccgcgtgtccattctgtccaggtaaccgttcacaagccacatgcccccgtgggggttgccctcgacgacgtggccgtcacgtaccgaaaggatgccgagaaaaccgtattcagcctgggttccaatatgggagacccttttgcccatctgcgagacgccgtccgcctgatcgccgaaactcccggtattcacgacgtcgtcgtttcgcccgtctatgtcaccgctccg

SEQ ID NO: 2952 - protein, 97 aa, Homo sapiens
  misc_feature (1)..(1): Wherein Xaa may be any naturally occuring amino acid
XPVSLIETLAGKIADTVLAISPRVHSVQVTVHKPHAPVGVALDDVAVTYRKDAEKTVFSLGSNMGDPFAHLRDAVRLIAETPGIHDVVVSPVYVTAP

SEQ ID NO: 2953 - DNA, 275 bp, Homo sapiens
gctagcaacatggactgcgtgtggattccataccatggttacacacaaaacccaacccctgagtctgccttgtgaccccttcttaatattcccagaaatattctctttcgaggtgatagagtttgcatatttgtcctctcaaaatctcatgttgaaatttgatctcagaattagaggtggggccaatgagaggtgtttgagtcatggggcacatcccttagaaatggcttggtgccgagatcatgagttcttgtcttattggttccctcagatct

SEQ ID NO: 2954 - protein, 80 aa, Homo sapiens [sequence omitted]

SEQ ID NO: 2955 - DNA, 243 bp, Homo sapiens
aattggtcctgtccatctactccctcaactcccccaccctcaacaccaacaacaccaacatcctcccagacaaccacaccctccacaccatctaccacatcttcgaagtctacaccctctacgccccaatccacatcatccaagtcaacgcccagcacaccacccaaaaccacccttcctgggtgcctcgattttgatcctcccagacaggtcaatgagacctggtggctgtgtaactgtaca

SEQ ID NO: 2956 - protein, 81 aa, Homo sapiens
NWSCPSTPSTPPPSTPTTPTSSQTTTPSTPSTTSSKSTPSTPQSTSSKSTPSTPPKTTLPGCLDFDPPRQVNETWWLCNCT

SEQ ID NO: 2957 - DNA, 231 bp, Homo sapiens
acgcgtgaagggagtgtgggatgaagggtgccaaggagacagggcagggcagggaccctcaagaaaagcggggaggcggggggaagggatggtacaagcagccatggcacctcagtgtgtccctcaggcacctggacacacaggtgggcaaagatgctgacactgggggccagaaacgccgatacccccattcttccatttttactcaggctcaagtgggcccaaagaggg

SEQ ID NO: 2958 - protein, 70 aa, Homo sapiens [sequence omitted]

SEQ ID NO: 2959 - DNA, 379 bp, Homo sapiens
gaattcttttgactgcctagaagatacattgaagaaaggtatcttaataaggtacaggtaacagcgttacgacctacgctagacaatcaggcagtgctctgcagatgttatttcatttagcaaaaaacacttgatggcgagcattagtaacggttgtaatgtccgcaggagttggttgtaagcctttacaatatcttagctcagccaccatctttctattaaaggcattaatattcatatcagttaaataatcatctactggcatccagcaggcttcggcaacctcttgtgtatcggtaatcactatagtttcatcaagaggtgttaaacgacacactatatacaaattggatttatcaaactgaacaggataacgcgt

SEQ ID NO: 2960 - protein, 50 aa, Homo sapiens
MPVDDYLTDMNINAFNRKMVAELRYCKGLQPTPADITTVTNARHQVFFAK

SEQ ID NO: 2961 - DNA, 288 bp, Homo sapiens
ggatcctgaggcaccccaaaccaaaagcatcattaaactaaacctttaggttaagattatttttgcaaggcgaatttcaacttcaaacccacatgagcatcggattgtgatgaggatttctcaggaaagattctttttgtgtactccaatcaaaaccaaggatgagctaggcagtgtcattctaaagagcaggttattttccttaaattatccacaggggatgattcacactttggggatctcagctttatgttgcagtgtccaaacttataactcacaatgcctagg

SEQ ID NO: 2962 - protein, 59 aa, Homo sapiens
MRISQERFFLCTPIKTKDELGSVILKSRLFSLNYPQGMIHTLGISALCCSVQTYNSQCL

SEQ ID NO: 2963 - DNA, 197 bp, Homo sapiens
ctgaatgactatctggacatcatgggcccacattacgaggacgactgtgtggcagatgctgccgtggagagatacacgctgtacatggtggaacagcaggagtatgtgacatgggagccccagtccaaggaccaggttcgctggaagtgcaaccagcccagtgccaaggagggcgcggagaagctgtctgagaattc

SEQ ID NO: 2964 - protein, 65 aa, Homo sapiens
LNDYLDIMGPHYEDDCVADAAVERYTLYMVEQQEYVTWEPQSKDQVRWKCNQPSAKEGAEKLSEN

SEQ ID NO: 2965 - DNA, 318 bp, Homo sapiens
  misc_feature (38)..(38): Wherein n may be a, c, g or t
gcgcgcgcgaaagtgggtgaccgctacgtactggaaanaatgcaggagaaaggctggcgtatcggtgcagagaattccggtcatgtgatcctgctggataaaactactaccggtgacggcatcgttgctggcttgcaggtgctggcggcgatggcacgtaaccatatgagcctgcacgacctttgcagcggcatgaaaatgttcccgcagattctggttaacgtacgttacaccgcaggtagcggcgatccacttgagcatgagtcagttaaagccgtgaccgcagaggttgaagctgcgctgggcaaccgtgaacgc

SEQ ID NO: 2966 - protein, 106 aa, Homo sapiens
  misc_feature (13)..(13): Wherein Xaa may be any naturally occuring amino acid
ARAKVGDRYVLEXMQEKGWRIGAENSGHVILLDKTTTGDGIVAGLQVLAAMARNHMSLHDLCSGMKMFPQILVNVRYTAGSGDPLEHESVKAVTAEVEAALGNRER

SEQ ID NO: 2967 - DNA, 299 bp, Homo sapiens
  misc_feature (1)..(1): Wherein n may be a, c, g or t
  misc_feature (299)..(299): Wherein n may be a, c, g or t
ncacataatgaaaaccaggactggatgagtggtattcctctctgtaagggccgcatgaatgtcatactggggggaactgaccttaatgcacttgtcccaaaaataagatgtggctggcaaaagataatgtccccattcccacaaatgggtcacagaacagccaaacaagggaatgggtgctgtgtgcacctgagtcttatggctttctctgtggttggtttggagggtgacccagatacagggtgggcaatgtcatgcctggaaagctggcagaccgttagatcccaaacattaggcan

SEQ ID NO: 2968 - protein, 91 aa, Homo sapiens [sequence omitted]

SEQ ID NO: 2969 - DNA, 305 bp, Homo sapiens
agcaagggcggcggcttcttcctgacccccgtgggccgcgtgcagacgcccacgctgtcgatcgtggtggagcgcgaagagaagatcaaacgcttcgtgccgcgcgattactgggaagtgcgcgccgaattcatcgccgccgctggcctgtacgaaggccgctggttcgaccccaagttcaagaaggacgagttcgatcccgagcgacgcgattcgcgcctgtggagcgaagccgaggccaagagcatcgtcgccgcatgccgcgacaagacgggcaccgttaccgaagaatcgccaccgtcgac

SEQ ID NO: 2970 - protein, 101 aa, Homo sapiens
SKGGGFFLTPVGRVQTPTLSIVVEREEKIKRFVPRDYWEVRAEFIAAAGLYEGRWFDPKFKKDEFDPERRDSRLWSEAEAKSIVAACRDKTGTVTEESPPS

SEQ ID NO: 2971 - DNA, 280 bp, Homo sapiens
  misc_feature (1)..(1): Wherein n may be a, c, g or t
  misc_feature (2)..(2): Wherein n may be a, c, g or t
nnaccggtgattgccggtgcggccaacaatcaattggccaaggcttcccatgccgatgaattgtggcgtcggggttgcttgcacgcaccggattacgcaatcaatgcgggcggcattattgacgtgtcttacgagtacaacggtggcacgcctgagcaggttcgccagcacgttgaaggcattggcgagacgttgcgtcagatctttctaagggttaaagcgcaggacatgaacaccacgcgcattgccgacagcctcgcccaggagcgtctgaacgcgt

SEQ ID NO: 2972 - protein, 93 aa, Homo sapiens
  misc_feature (1)..(1): Wherein Xaa may be any naturally occuring amino acid
XPVIAGAANNQLAKASHADELWRRGCLHAPDYAINAGGIIDVSYEYNGGTPEQVRQHVEGIGETLRQIFLRVKAQDMNTTRIADSLAQERLNA

SEQ ID NO: 2973 - DNA, 341 bp, Homo sapiens
cctaggggtccagagttaatgagagcagtttttctaggagttaacactgtgatggtggaggatggaggagaaaaaaaatagcagaatgatctctacacaagttatatacaagatgcactagctagagagagaaagaaaaaagccatgtgcctagtgggggcagcactaggcacacagggttctttccacgggagatgggatgcttgaactgtgtcttgaaggatacataggcattttctgggtggagaattgtgagtggtcaaaggctcctccagccagaaatccccatgtatagggcagagctgagaaagtgcatggccctttcagtgaactgcccatgg

SEQ ID NO: 2974 - protein, 57 aa, Homo sapiens [sequence omitted]

SEQ ID NO: 2975 - DNA, 206 bp, Homo sapiens
gtgcacttagtaatatgtcctgagacagtctgcctgttctggaagctatgaatggctatagtggtattaagacctggacaataaacccatcaatagggttacatgtgaatctggtggactggtgtggcagtgatgtccattgtcatggcaggtatgactggaattctgcaactgttgtctgcagctcatccatgccccctagatct

SEQ ID NO: 2976 - protein, 53 aa, Homo sapiens
MNGYSGIKTWTINPSIGLHVNLVDWCGSDVHCHGRYDWNSATVVCSSSMPPRS

SEQ ID NO: 2977 - DNA, 331 bp, Homo sapiens
  misc_feature (1)..(1): Wherein n may be a, c, g or t
ncttcagtcttcattcaatgcacagaatattcctagttactcacagatggaatttatggactgatagttgttcctgctgaaaccaactgaaaagggctctggacaatttcagaatcaaaaactaagaatttatgatctgttgcatgactggaggaagcatctatcctaggtttgtgggtaggagcaccatggacacctggaaaggctaatggacacagctgactgtgaagaggcccaggcgaggcctggttgtacatagagccatttctggaccttctcctgaaggtctagcggctcctggatggccctcgttcttgagctcttctcatga

SEQ ID NO: 2978 - protein, 67 aa, Homo sapiens
MYNQASPGPLHSQLCPLAFPGVHGAPTHKPRIDASSSHATDHKFLVFDSEIVQSPFQLVSAGTTISP

SEQ ID NO: 2979 - DNA, 281 bp, Homo sapiens
  misc_feature (277)..(277): Wherein n may be a, c, g or t
  misc_feature (279)..(279): Wherein n may be a, c, g or t
  misc_feature (280)..(280): Wherein n may be a, c, g or t
aagtacttaagtcaggaggaggctcgggccgtggaccaagagctttttaacgagtatcagttcagcgtggatcaactcatggagctggccgggttgagctgtgccacggctattgccaaggcttatccccccacgtctatgtccaagagtcccccgactgtcttggtcatctggggccccggaaataacgggagggatgggctggtctgtgagcgacacctcaaactttttggttaccaaccaactatctattaccccaaaagacctaacaagcccncnnc

SEQ ID NO: 2980 - protein, 93 aa, Homo sapiens
  misc_feature (93)..(93): Wherein Xaa may be any naturally occuring amino acid
KYLSQEEARAVDQELFNEYQFSVDQLMELAGLSCATAIAKAYPPTSMSKSPPTVLVIWGPGNNGRDGLVCERHLKLFGYQPTIYYPKRPNKPX

SEQ ID NO: 2981 - DNA, 291 bp, Homo sapiens
  misc_feature (78)..(78): Wherein n may be a, c, g or t
agatcttcagagggaaggcattgagagcagatggagggaagacacaggggctgggctaaaggagaagaaagctggganacctgcattgggctaccacacaccacgacttgttccctgaccccaatgactcctgcaaaaggggtgagttgagcagtcaagaaggaacctgctatcgccatgggcctctggaatcccagcaggaggagaccccttagccacaatggacatctgaattggcagggaaagctgcttagagaagagagaagcattaaggaaagaactccagctagc

SEQ ID NO: 2982 - protein, 89 aa, Homo sapiens
MLLSSLSSFPCQFRCPLWLRGLLLLGFQRPMAIAGSFLTAQLTPFAGVIGVREQVVVCGSPMQVSQLSSPLAQPLCLPSICSQCLPSED

SEQ ID NO: 2983 - DNA, 450 bp, Homo sapiens
gcatggaaaaaggcaaaggcagtatggtggttttctgttctaaccactgaggttatgtagtgtcactttcttcacattccactggactcctgacaagtctgtcattaaggacagttccagattcgagtggaagggaattagatcccagtcatcttcaaaacctccacacagccttccacactcaaaaccacgaaatagattggactcaaccctccacattgccctaattagttcctgttgagtccccctttgaaatggctcctggtttccttcctctgccctttgccaccaccctactttagtctcacatactttctcatctgaactttcgcaatgctctccctgcctctgggcactctgacctttccctctcttcagaattattttcctaggtcccattatcaccaccctgctgaaatagtcaaagaatctcctctccagacagaattc

SEQ ID NO: 2984 - protein, 119 aa, Homo sapiens [sequence omitted]

SEQ ID NO: 2985 - DNA, 398 bp, Homo sapiens
  misc_feature (1)..(1): Wherein n may be a, c, g or t
  misc_feature (2)..(2): Wherein n may be a, c, g or t
nnaccggtgctctcccatgttgtggaggacgcccttacccggcgcactcccacccttgaccttcaggtggcagcttcggcccgcccggcggtggcagccgtactgggccggtctctcgacggttccggacgtctgccagtattactcgtgacgagcacgttccgagaggccgaggaataagttgctaccttgaagacgtggctcggcgccgacgctgtctgttactacccatcgtgggagaccttgcctcatgagcgtctgagcccgcgtacggacaccgtcggtcgacgcatggaggtgctgcgtcggctgtgtggtaccgagggtgaggtaccacaggtggtggtcgcccccgtgcgctccttgctgcagcctcaggttgccggtctgggacgcgt

SEQ ID NO: 2986 - protein, 59 aa, Homo sapiens
  misc_feature (1)..(1): Wherein Xaa may be any naturally occuring amino acid
XPVLSHVVEDALTRRTPTLDLQVAASARPAVAAVLGRSLDGSGRLPVLLVTSTFREAEE

SEQ ID NO: 2987 - DNA, 378 bp, Homo sapiens
  misc_feature (37)..(37): Wherein n may be a, c, g or t
  misc_feature (52)..(52): Wherein n may be a, c, g or t
  misc_feature (61)..(61): Wherein n may be a, c, g or t
  misc_feature (378)..(378): Wherein n may be a, c, g or t
ggtgcacctcagtgctacagtttatctccctcctganaaatgataaggtganatataagtntgggaagaaaacaacagcagccttagttgtctcccccgcaactcctgtcactccagggagaaggtttgatgggagaacccatacctcgagtccttacttggctgtcctccctgaaagactctggcatggccaacttctacatcccagaatcaccactacgctgtaggggttgtccccttttcatgagcctggaagacaattttcctcttctcagtcaacctatactagtttgccagataaagatcttaggacaacaatgaatttgaattaggggaaacatgcatcaaatagaatacagtataggagctaacagtcgn

SEQ ID NO: 2988 - protein, 63 aa, Homo sapiens
MGEPIPRVLTWLSSLKDSGMANFYIPESPLRCRGCPLFMSLEDNFPLLSQPILVCQIKILGQQ

SEQ ID NO: 2989 - DNA, 363 bp, Homo sapiens
gatcttgctgttcgttctcttgatgccttattagactatcaagattatcctgttgtggcagcaaaacgtagctcacttgcacgccgttcactcggtattggggtcattaactatgcgtattaccttgcgaaaaatggtgttcgctattctgatggttcagccaacgatttaacacaccgtacttttgaagccattcaatattatttattgaaagcctctatgaacttagcaaaagagcaaggtgcgtgtgaatacttcaatgaaaccacttatgccaaaagcattttaccgattgatacctataagaaagatttagattccttaacacaagagcctctacattatgattgggaaagtttacgt

SEQ ID NO: 2990 - protein, 121 aa, Homo sapiens
DLAVRSLDALLDYQDYPVVAAKRSSLARRSLGIGVINYAYYLAKNGVRYSDGSANDLTHRTFEAIQYYLLKASMNLAKEQGACEYFNETTYAKSILPIDTYKKDLDSLTQEPLHYDWESLR

SEQ ID NO: 2991 - DNA, 303 bp, Homo sapiens
gatcatggcatcgcattgatgcaggccactcgtggcgaactcgaccgtatgacaggtgggtccaaccatcagggagtggccctgcgcctacccgaatacgagtacgcgaccgtggacgaccttatcgcagctggcccagacctaccaggtgggctcatagtagccctcgacaaggtcaccgatccgcgcaatctgggggcgatcatccgctcggctgccgcctttggtgctcagggggtgctcatcccgtcgcgtcgctcggcctcgatgacggcagcggcgtggaagacctcagctggggca

SEQ ID NO: 2992 - protein, 101 aa, Homo sapiens
DHGIALMQATRGELDRMTGGSNHQGVALRLPEYEYATVDDLIAAGPDLPGGLIVALDKVTDPRNLGAIIRSAAAFGAQGVLIPSRRSASMTAAAWKTSAGA

SEQ ID NO: 2993 - DNA, 246 bp, Homo sapiens
  misc_feature (246)..(246): Wherein n may be a, c, g or t
gctagccatgtccggtcggggttgtgcgctgcgaggggcgccgtttcggctgcgatgaatgctattcggagtgtggtgtcttcggtggcgtctactgttggcgggttcttcgggtcgatggcttctagggttcgtggtgccgcctcgtccgggtttaatggtgcccggagtgcggcatcttctgctatgcatgctatggggtccgctgtgtctagcggggtgcatggtgtgctgggttttttccgn

SEQ ID NO: 2994 - protein, 75 aa, Homo sapiens
MHPARHSGPHSMHSRRCRTPGTIKPGRGGTTNPRSHRPEEPANSRRHRRHHTPNSIHRSRNGAPRSAQPRPDMAS

SEQ ID NO: 2995 - DNA, 637 bp, Homo sapiens
gtgtggacccaggtgcgctgagcccaccccacgctcaggaagcagcctgggtgcggggtcccacgagggaggggcctgttccttcctgttctttctccccacctggagaccccccttccagcctgacatgagggcccagtttctcaccctggcagagaggatgcctgctgcctgggctccagccgggcccactgcgcatggttttgggattggtcccaagaagagctctccctgcccccacccatgttgggggtggggagtggtggcagctttgggctctagggctggggacaccccgaccccaactcatgccttcctagtggctgcattgctcggccttcaggcctgcctgcctgtgatcttggcgccagcctggctgccccccctccaaccttcccatgcctcggtttccccatggtgtgggtgaggacctcgtctctcagccgtccttttgtgccctgtggcagctgtgctgtggctgatgaaagccaggaccctgccttgtcccatcccggaggtgcagctcccctgggccccacacaggcttgggaggagcccttcgtggggctgcgccaccctccccgaaccctctgtccccctgtggccgcaggcccgtcccagggcctcactgacccac

SEQ ID NO: 2996 - protein, 99 aa, Homo sapiens
MRAQFLTLAERMPAAWAPAGPTAHGFGIGPKKSSPCPHPCWGWGVVAALGSRAGDTPTPTHAFLVAALLGLQACLPVILAPAWLPPLQPSHASVSPWCG

SEQ ID NO: 2997 - DNA, 275 bp, Homo sapiens
gtgcacagcaggctcctgaggtcgctgtggccccccaggccctgggaggccagctgcagcaccctgctttgtgtgttggagaccgtggggagaggcctgggaagagaagaggacggtcctggggtctcggtgcagcagtgggtgggggtgtcttccagccctcatggcgtgggctccagaacctcccgcctctactctccagggctccccttcccagagccgggtcctactgatgacgtagatcccagctcaaggccatcctctctgggagatct

SEQ ID NO: 2998 - protein, 55 aa, Homo sapiens [sequence omitted]

SEQ ID NO: 2999 - DNA, 576 bp, Homo sapiens
tccggaggacacatcaacccagctgtgactttcgggctgttcttagccaggaagctgtccctgactagggccttcttctacattatcatgcaatgcctgggtgccatctgtggagctggagtggtgaagggcttccagcagggactttacatgggcaacggtggtggcgccaatgttgtcgcacctggctacaccaagggtgatggcctaggcgccgagatcgtcggcaccttcatcctcgtctacaccgtcttctccgccaccgacgccaagaggaacgccagggactcccatgtgccgatcctcgcccctcttccaatcgggtttgccgtgttcctcgtccacctggccaccatccctatcaccggcaccggcatcaacccggctaggagccttggcgccgccatcatctacaaccgggatcatgcgtggagcgaccactggatcttctgggtcggccccttcatcggcgctgcgctggctgccatctaccaccaggtgatcatcagggccatcccgttcaagagcaggtcttaagctgccgcgggcgtgctgagacatgcatgccagtccgga

SEQ ID NO: 3000 - protein, 178 aa, Homo sapiens
SGGHINPAVTFGLFLARKLSLTRAFFYIIMQCLGAICGAGVVKGFQQGLYMGNGGGANVVAPGYTKGDGLGAEIVGTFILVYTVFSATDAKRNARDSHVPILAPLPIGFAVFLVHLATIPITGTGINPARSLGAAIIYNRDHAWSDHWIFWVGPFIGAALAAIYHQVIIRAIPFKSRS

SEQ ID NO: 3001 - DNA, 501 bp, Homo sapiens
cgcgtaaggccaccagaagatttttatgcacagattccgttgcttcgagagctaatttcggcgctttcatggggttttatggaggtggatgaatatgaggcggatgatattatcggtaccttggcgcgccaagcggatgaagcgggggattatatgacttatattgtgtcttcggacctcgatatgctgcaaatcgtagatgaaaacaccaagatgtatcgaattctgcggggattttcggatctcgaggagatggatactccagcgattgaagaaaaatatggaatcttgaagtcgcaatttttggacctgaaggcgctgaagggggataattcggataatattccaggcgtaccagggattggtgagaaaaccgcagtgaaactcttgaatgagtatggtagcttggaggggatttataatcatatcaaggaaatttcgggggcgacacagaagaaattgattgctggacgcgaatcagctgagatgtctcttaagctt

SEQ ID NO: 3002 - protein, 167 aa, Homo sapiens
RVRPPEDFYAQIPLLRELISALSWGFMEVDEYEADDIIGTLARQADEAGDYMTYIVSSDLDMLQIVDENTKMYRILRGFSDLEEMDTPAIEEKYGILKSQFLDLKALKGDNSDNIPGVPGIGEKTAVKLLNEYGSLEGIYNHIKEISGATQKKLIAGRESAEMSLKL

SEQ ID NO: 3003 - DNA, 326 bp, Homo sapiens
cgcgttgcacggtttgccgcccgcttccatgattttaagtttagtatcgctccagaaacacttaatcttatgcaagagattagtcaatcgggagagttggcgagcttaagctctgaacgtatttggaaagagctagaaaaatctttgttaacacctaacacctatgtcttttttgatgttcttcaacaagccaaagcgctaaatattttattcccacactttgtttggaacccaaatccgcatattaaagcacaactaaagcaagctggattaaccgctgtacaacgctgggcgctactatgtcagcacactccaatgacagatct

SEQ ID NO: 3004 - protein, 108 aa, Homo sapiens
RVARFAARFHDFKFSIAPETLNLMQEISQSGELASLSSERIWKELEKSLLTPNTYVFFDVLQQAKALNILFPHFVWNPNPHIKAQLKQAGLTAVQRWALLCQHTPMTD

SEQ ID NO: 3005 - DNA, 253 bp, Homo sapiens
taattagtgaatgcttacaaaggagggagtgttagtcttcagagttttctgccacctcagccaacccaaatggcagattctacgggctttcccaactttctataatgctaccttcacagagctagaaatgagctttccatgtccatgtagactgtttttatttgtctcattcagggatctttccttgttccaggttaaatcaaagccaaagtaagtttccatggagcaataaaaggcttttttgtttggatcc

SEQ ID NO: 3006 - protein, 67 aa, Homo sapiens [sequence omitted]

SEQ ID NO: 3007 - DNA, 237 bp, Homo sapiens
acgcgtgttccaacccgggcttcccctggcgatggacccaagaccggacccaggctgaggttgaccgctggctcgaggaactcgaacggcagctcctcgacaagccatggtcttatactcagtgtccaccaagcgcggggtagctcttctgcgacagggcgcaaggcaagctcgtcgcgtaccacattgcattgagaaagtgaattgctggtgggtgtgggccgggctcatgtccaa

SEQ ID NO: 3008 - protein, 77 aa, Homo sapiens
MSPAHTHQQFTFSMQCGTRRACLAPCRRRATPRLVDTEYKTMACRGAAVRVPRASGQPQPGSGLGSIARGSPGWNTR

SEQ ID NO: 3009 - DNA, 365 bp, Homo sapiens
tctagatagattcttgacagaggtcaagacaattctcttgacctcttttttgtacatgtgaaggtttgttgtattggtgaactcttgtcccaggggtttgttgtacagatgattttatcacccaggtatgaagcccaatacccaatcgttattttctctgctcctctccctcctccctctccctcctcccacttcctcccactctccacgctcaagtagaccccagtgtcttttgtttccttcgagttcatggggtctcatcatttagctcccgcttataacagagaacatgtggtaatgtggttgtctgttcctgctttagtttgctaaagatgacatcttccagctccatccatgtgcccaca

SEQ ID NO: 3010 - protein, 75 aa, Homo sapiens [sequence omitted]

SEQ ID NO: 3011 - DNA, 321 bp, Homo sapiens
gtggatgtgggcgcgcaggctgtgcgcgcggaggtccaggccacccatgcacgccttagcgccttgctcaatcacgaacacgcttccctggccctggcccaacggtgcagtggggtggcggcgcctatgccactgttcagcgcgatgctcaacctccgccccagcgccgccaccgatatggccgccgtgattgaggttgccgaaggctcaggtgctgggcgccgaagagcgcaccaactacccgctgacgtcaacgtggatgacctgggtgaagacgttgcgttgacggtaatggtcgacgccgccatcggtgcgcaacgc

SEQ ID NO: 3012 - protein, 107 aa, Homo sapiens
VDVGAQAVRAEVQATHARLSALLNHEHASLALAQRCSGVAAPMPLFSAMLNLRPSAATDMAAVIEVAEGSGAGRRRAHQLPADVNVDDLGEDVALTVMVDAAIGAQR

SEQ ID NO: 3013 - DNA, 377 bp, Homo sapiens
  misc_feature (138)..(138): Wherein n may be a, c, g or t
  misc_feature (377)..(377): Wherein n may be a, c, g or t
ccggaagatttcggcctgcgtctggctggtttcgtcgatgccggtacgctttacggcaacaaggtcgccaacagtgcaggtgtaaaggatgacaactccatccgcgcatccgctggtatcggtgtgatgtgggcatcngccttcggtccgatccgtgttgactatgctgtaccgatcgccaaggaagactacgacgaggaacagcgtttccggtttggcatgtccaacactttctgatatcggcagtccagaactgcaactttgaacgttctggagtttccggctaatggaatacaacgccttttttccgccccacgatggattgcgcttgaaagatatcgcagaccgttttgggacgaaactgtatgatgagacgn

SEQ ID NO: 3014 - protein, 78 aa, Homo sapiens
PEDFGLRLAGFVDAGTLYGNKVANSAGVKDDNSIRASAGIGVMWASAFGPIRVDYAVPIAKEDYDEEQRFRFGMSNTF

SEQ ID NO: 3015 - DNA, 258 bp, Homo sapiens
  misc_feature (1)..(1): Wherein n may be a, c, g or t
ntcgcgatcgcgcagttcgttcctggctacgctgaatggatcttcgccgctgcggtgatcgcgggcgtgctgccgttcgctcgcaaagccttcgcgctggctgtgtcaggctcgccgttctctatcgaaacgatgatggtcgtcgcctcgctgggcgcgctcgtgataggcgaggccgaggaagctgctgccgtggtgttcctgttcgcgatcggcgagctgctggaaagcgtggccgccggccgcgcgcgcgccggc

SEQ ID NO: 3016 - protein, 86 aa, Homo sapiens
  misc_feature (1)..(1): Wherein Xaa may be any naturally occuring amino acid
XAIAQFVPGYAEWIFAAAVIAGVLPFARKAFALAVSGSPFSIETMMVVASLGALVIGEAEEAAAVVFLFAIGELLESVAAGRARAG

SEQ ID NO: 3017 - DNA, 350 bp, Homo sapiens
  misc_feature (344)..(344): Wherein n may be a, c, g or t
tgatcaatgtcgaagtaaaaagtaagcctagtgacaacccgcagcaaaacagtctccctcttgagaaatctagcatgtgcccgagtgccaacccaccaacaatgacctctgcaagggtcccttacaacctcaggtcccacaagtgacagggacattcctgggggtggcgtgaggggagggactcagttaatcccttgtagacagcagcaggttcccctaggacagcatccccctaatgggcggtagttcctcacctctgccagccaaccagccagtctctccctagcgtggagggtgggaatggtatggagtgaaacctacctactccaatgccgtcatctganagcccc

SEQ ID NO: 3018 - protein, 51 aa, Homo sapiens
MSLSLVGPEVVRDPCRGHCWWVGTRAHARFLKRETVLLRVVTRLTFYFDID

SEQ ID NO: 3019 - DNA, 301 bp, Homo sapiens
tgggatgcagggtctttcttctccaaggatttcattcctggagggagaaaagggccccagctgtctgccatcaaaccgggttgccgggctggagctcctcccaggcccgtgtgaggaagagcaaaggccggcaggggctcgatgggaccagtcgctcgctcaggcccaggaaaaccacacagctgggggctgtcaggattggaccagggtcaggccggccaggcgatggcgggaaaagcaggcccactctgcagacctcaatgtctcaggtgcactgcagggcaaccccgcctaccccggg

SEQ ID NO: 3020 - protein, 99 aa, Homo sapiens [sequence omitted]

SEQ ID NO: 3021 - DNA, 391 bp, Homo sapiens
  misc_feature (382)..(382): Wherein n may be a, c, g or t
aagcttaggtaggcattttattattttggtgacttgtttcttggcaccacataggtaacagcaagatgagaattaaacagggctttgagggattgaacgggccaagacatacccaggctgccttgaacatgtgtgaggcctggaacaagagatccaacagaagcccacattccttatgctgggaggcatctcctcacacctgccactccagccaggtaacctctgcccaccaggtgtctccagcactgccaacgtctgctggcattaccttttacatcctgcagaggaacatgaggctggggagtccagttcagatgaagaatctgtggcctctctggaactctacactaaatttggtggcacgagggtgatatccctggtnccagtctat

SEQ ID NO: 3022 - protein, 101 aa, Homo sapiens [sequence omitted]

SEQ ID NO: 3023 - DNA, 280 bp, Homo sapiens
  misc_feature (1)..(1): Wherein n may be a, c, g or t
  misc_feature (279)..(279): Wherein n may be a, c, g or t
  misc_feature (280)..(280): Wherein n may be a, c, g or t
ntatcgatgcaggccggatcggggcccgcaggatcggaggcccgttgctgttcgggcgcctgtggcagcggcttggcatcgatgctgtattggaagaggtgctggaagggcgccagttcggctttgccgtggagcgcgccgtatttgtcgctaccctgccccgcctgttcgcctcaggctcggaccgagcctgcctggactggatggagagctacgccatcgacggcagcgaggatcttgccctccatcacttctatcgcgccatggcctggctcggcnn

SEQ ID NO: 3024 - protein, 91 aa, Homo sapiens
MQAGSGPAGSEARCCSGACGSGLASMLYWKRCWKGASSALPWSAPYLSLPCPACSPQARTEPAWTGWRATPSTAARILPSITSIAPWPGSA

SEQ ID NO: 3025 - DNA, 270 bp, Homo sapiens
  misc_feature (1)..(1): Wherein n may be a, c, g or t
ntgatcattcacagcatataccaagtgtacgtttttgaatcttttatactaactttttcttctttaattttgtttcaggttcaccaagaaccatatgttttcaacgcaagaccagatggtgtccacgttatcaacgttggtaagacctgggaaaaattggttttggctgccagaatcatcgctgccattccaaacccagaagacgttgttgccatctcttccagaactttcggtcaaagggctgttttgaagttcgctgcccacaccggt

SEQ ID NO: 3026 - protein, 90 aa, Homo sapiens
  misc_feature (1)..(1): Wherein Xaa may be any naturally occuring amino acid
XIIHSIYQVYVFESFILTFSSLILFQVHQEPYVFNARPDGVHVINVGKTWEKLVLAARIIAAIPNPEDVVAISSRTFGQRAVLKFAAHTG

SEQ ID NO: 3027 - DNA, 337 bp, Homo sapiens
gtgcacacaccagacgggaagggtatgcaacgccaccggccacatccaccgactctgggaacatggtcaagcgagacacgaccaaagtgaaacacgtgagggcacaaccgggcgcctcacacatccacaaggaccacgcgaaccactgagaaaagtgcgcgcggggcagcgctcgggccggagagccgcacccctgccttccacacaccaccggcagacggatggggtggagagacgaggggcccgctggcagaacgagaagaacggccgccattcgccatgaatgtccgtccctcgcctggcgcggcttaggccctggcccgaagagaactccgga

SEQ ID NO: 3028 - protein, 91 aa, Homo sapiens
MAAVLLVLPAGPSSLHPIRLPVVCGRQGCGSPARALPRAHFSQWFAWSLWMCEAPGCALTCFTLVVSRLTMFPESVDVAGGVAYPSRLVCA

SEQ ID NO: 3029 - DNA, 278 bp, Homo sapiens
gtgtcgatagcgccgcgcctaggtgcttgcctcgtagcgagccgctgtgctcgacgccccgagtccgccgctgcctcccatgtccacgtgctgggcgccgggaacacaatcaaaacggttccacccatgctgcggctcggatgcgtgaacgtctctgtgagtcctgcgcacgatctagccgaagggcctagtttatccgtgactgctgcaagccaacactgaaactgccacccgaccatgctaagaatcccgacgacaatgaaggcattcaaacgcgt

SEQ ID NO: 3030 - protein, 79 aa, Homo sapiens
MVGWQFQCWLAAVTDKLGPSARSCAGLTETFTHPSRSMGGTVLIVFPAPSTWTWEAAADSGRRAQRLATRQAPRRGAID

SEQ ID NO: 3031 - DNA, 510 bp, Homo sapiens
  misc_feature (1)..(1): Wherein n may be a, c, g or t
  misc_feature (2)..(2): Wherein n may be a, c, g or t
nncgtacgcaagatgatgcagcagctgtagcccgagggctgtggcgaagtctgcagaccttatcccggtgcgatgtggccagggaggccccgcacttgctgattcaaatcaaagcgtgtttgcctgagctgttattatctgccgtatctattcagtacggattgatccatgtcctctcgcgaaatccgcatcgccacccgtaaaagcgccctggccttgtggcaggccgaatacgtcaaagcacgccttgagctggcccacccgggcctcaaagtgaccctcgtgcccatggtcagtcgcggcgacaagctgctggactcgccactgtcgaagatcggcggcaagggcttgttcgtcaaagagctggaaaccgcgctgctggaaaacgaagccgacatcgccgtgcactcgatgaaagacgtgccgatggactttcctgaaggcctcggcctgtattgcatctgcgagcgtgaagacccgcgcgatgccttcgtttccaacacctacgcg

SEQ ID NO: 3032 - protein, 114 aa, Homo sapiens
MSSREIRIATRKSALALWQAEYVKARLELAHPGLKVTLVPMVSRGDKLLDSPLSKIGGKGLFVKELETALLENEADIAVHSMKDVPMDFPEGLGLYCICEREDPRDAFVSNTYA

SEQ ID NO: 3033 - DNA, 300 bp, Homo sapiens
  misc_feature (300)..(300): Wherein n may be a, c, g or t
gtggtggatgtcaaggtgcacctgaccttcggctcttcccccgacgtcgactcttcggaacaggccttccgcatggcggcgatcttcggcttcaaagaagcctgccgccaggccgaccccgcgatcctcgagccaatcatgtcggtagaggtggaaacgcccgaagactacgccggtagcgtgatgggcgacctgtcgtcacgacgaggtatggtacagggaatggaggatatcccgggcggaggcggtaaagaaattcacgccaaggtaccgctgtccgagatgttcggctattcgacn

SEQ ID NO: 3034 - protein, 100 aa, Homo sapiens
VVDVKVHLTFGSSPDVDSSEQAFRMAAIFGFKEACRQADPAILEPIMSVEVETPEDYAGSVMGDLSSRRGMVQGMEDIPGGGGKEIHAKVPLSEMFGYST

SEQ ID NO: 3035 - DNA, 415 bp, Homo sapiens
  misc_feature (370)..(370): Wherein n may be a, c, g or t
caattgttcaagcacaaattactgaaaatatcaaccactccacattacagtgccacttttgtcataagtattcatggacctgtttttggtctctcttcttctgttctgttgttctattttttattctttcacatatttcctttggccttcatttcttccctctatttttgagactcttataaaatatgagatcttcttaccatatcctctgagtcttatcctttccttctgttcagtattttccatactgctctttcgtgctgctgcttatatagcttcttctgaactgtatcttccagttcactaatgcccacttcagctttgtctaatgttatgtttggaacactgaaataatttatttcctgatctnaatttctatttagttcttttgtaaatctggctttgtcatttttaa

SEQ ID NO: 3036 - protein, 77 aa, Homo sapiens [sequence omitted]

SEQ ID NO: 3037 - DNA, 268 bp, Homo sapiens
  misc_feature (260)..(260): Wherein n may be a, c, g or t
  misc_feature (261)..(261): Wherein n may be a, c, g or t
  misc_feature (265)..(265): Wherein n may be a, c, g or t
  misc_feature (266)..(266): Wherein n may be a, c, g or t
gaattcgtgcaattttcaaaaaaagtataatctaggagacaggaagaatatataacagtataaataacaggaggtggtagcattaattggcaccactgtgatacagtcagtaatcgcttctggattttggaggtgggtgctatcattatggggtgtgtggggaagtctcatttagtcactaggatttgaactgggcttggttggtgggaaggctgaccttgatatagggcagtgcttgctaactgggtgaggcacctgcnncccnncc

SEQ ID NO: 3038 - protein, 51 aa, Homo sapiens
MRLPHTPHNDSTHLQNPEAITDCITVVPINATTSCYLYCYIFFLSPRLYFF

SEQ ID NO: 3039 - DNA, 319 bp, Homo sapiens
actagtggccagttccagatgtagataccattatgattccagccaatgagggttatactagcggaagatggagtagagagctctcaaattttcacacaaggcggctacatcttctgcccatgtgtatgtccagaacggctgaccactactgtaaactgtaaggtgggcaaaaccaaggaaaacgtgagtaagagtcgcagccgagaaaagcctgtggagacatgactactcaatgtcacatgatgtcctgatgagactctgactggtatggagcataagccaacggctttggttcagtcctccactgctcatcagatct

SEQ ID NO: 3040 - protein, 59 aa, Homo sapiens [sequence omitted]

SEQ ID NO: 3041 - DNA, 390 bp, Homo sapiens
tccggaacacccactattcgccgagctatctgaagcatttgcccgttaattaatgatgtaggatcacttcttatgtgtggaattgttggatatataggtctagctaacggtgaccgcgactacttcgctctggatgtagttctggaaggtctacgtcgattggaataccgcggctatgactccgctggtgtgacgatgtacgccgatggggaaatcggttggcggaagaaggcgggcaaggttgctgccttggacgatgagattgcagcgcgtccgctgaaggattccgttttgggaatcgggcacacccgttgggccacccacggtggtccgaccgatctcaatgcacacccgcacgtcgttgacggtggcaagctggccgtggtgcac

SEQ ID NO: 3042 - protein, 106 aa, Homo sapiens
MCGIVGYIGLANGDRDYFALDVVLEGLRRLEYRGYDSAGVTMYADGEIGWRKKAGKVAALDDEIAARPLKDSVLGIGHTRWATHGGPTDLNAHPHVVDGGKLAVVH

SEQ ID NO: 3043 - DNA, 339 bp, Homo sapiens
  misc_feature (1)..(1): Wherein n may be a, c, g or t
  misc_feature (2)..(2): Wherein n may be a, c, g or t
  misc_feature (160)..(160): Wherein n may be a, c, g or t
  misc_feature (161)..(161): Wherein n may be a, c, g or t
  misc_feature (208)..(208): Wherein n may be a, c, g or t
nngaattctacagaatctatttaacaaaaaggaaaaggtgaataaataaattttaagatcacaggatatgagagcagtttgctagaatcaactgtatttctatatattagaaacaaacagttggaaaaaagaaattttataatgccatttacaatagcanntaaaaaaatcaaatgtgtaagagttaatttaacaaaaaagtataagnacctccacattcaaaatcatcaaatatcactgaaatttataaataaacaagccttaaataaatggagagatgcatgctcatggatggtaacgctcaacactttcaggattttgatcctcctcaaattgatc

SEQ ID NO: 3044 - protein, 98 aa, Homo sapiens
  misc_feature (39)..(39): Wherein Xaa may be any naturally occuring amino acid
  misc_feature (55)..(55): Wherein Xaa may be any naturally occuring amino acid
INFKITGYESSLLESTVFLYIRNKQLEKRNFIMPFTIAXKKIKCVRVNLTKKYKXLHIQNHQISLKFINKQALNKWRDACSWMVTLNTFRILILLKLI

SEQ ID NO: 3045 - DNA, 468 bp, Homo sapiens
atcaccaaggtttcgggacccgaggtcggttacgtcacaactccgatcgtgctggtgcagtgcgccctcgtcctgctgagccagcgtgccaacctgcccaagggcggggtatacacgcctggcaccgtctttggccctactgatctccagcagcgcctccaggataacgggctgtctttcgaggttaacaccactagagccatgcattgaagttcactggctccactcagtgcatcctgtggaaaaacttggcagaaggatgcaacttgagcaataagaagcgccaattagcaacttaaagggcttgtttggaagtaaggatacccgccggagaggaagctgaaacccccttgctattcaattttgaatataaggggattttagctccttaaatcccgtcgggtataattgcttccaaaagccataactgtgtgtgtcgtaccaacagtcctatggagtcttactagt

SEQ ID NO: 3046 - protein, 69 aa, Homo sapiens
ITKVSGPEVGYVTTPIVLVQCALVLLSQRANLPKGGVYTPGTVFGPTDLQQRLQDNGLSFEVNTTRAMH

SEQ ID NO: 3047 - DNA, 387 bp, Homo sapiens
tgtacagcagcaataaatgcctgcttcatgttcttcactttcattgtatcaactccatgacactgaatatattcttttttgttttgtagggtggatctatgacatcacgcaaaaatatgatttttccttctacatatgtggtttgctttacatgataggaatactctttttacttattcagccgtgcattcgaattatagaacaatccagaagaaaatacatggatggtgcacatgtttagtatcatgtaatgttccgtgtaggtttcattgtaatactcatgcctacctcgcatggttgctgtgaggcacctatgacaggacgtgggaaagcattttgtacggtaactggcactgtcatttgtaaatgccattgtcacagcctcat

SEQ ID NO: 3048 - protein, 74 aa, Homo sapiens
MPASCSSLSLYQLHDTEYILFCFVGWIYDITQKYDFSFYICGLLYMIGILFLLIQPCIRIIEQSRRKYMDGAHV

SEQ ID NO: 3049 - DNA, 342 bp, Homo sapiens
  misc_feature (1)..(1): Wherein n may be a, c, g or t
  misc_feature (2)..(2): Wherein n may be a, c, g or t
nncgtacgcgccgcggcctcgcacgcacgagacgggccagtgccagcgtcaccacggcccataggacataccaccacataaagacgtgtcacgtcgaaatcaggccgttttgggccctccaccatgtcggaggctgccatgtacgcccaggatccgtcggcgtaccaagcgctcctgcacaaagcgccatggcgccaagacccccgatactttcagcgcgtatgcatcagtgtcatggcgctgttaaaaatggtgctacatgcccagtctggtggtgatttggaggtcatgggcctgatgcaaggccatgtccgtggtgatacgatctatgtgctggacgcg

SEQ ID NO: 3050 - protein, 87 aa, Homo sapiens
RRVTSKSGRFGPSTMSEAAMYAQDPSAYQALLHKAPWRQDPRYFQRVCISVMALLKMVLHAQSGGDLEVMGLMQGHVRGDTIYVLDA

SEQ ID NO: 3051 - DNA, 349 bp, Homo sapiens
  misc_feature (1)..(1): Wherein n may be a, c, g or t
nacgcgtcatgctaaattttgccctttatggcaacattttcgtcagaacaagcggaagagaagctactatccaagtttcatacgccggttaaaagaaaacatgatgatacgagatcatctgatgtgaacacaacgcaaactggttcaagcgccacgcccattacacctgtacccttactgcccagtgcacaagagcccagttatctttgccagtggtgcgctccccagacacgaaagcacaagacatgggagggtgatgctattcttatattgcatggaaataaaactacttgttcgctacgatccgcacatgatggcagcatgctagtgacgaatgctgccttccgga

SEQ ID NO: 3052 - protein, 107 aa, Homo sapiens
MATFSSEQAEEKLLSKFHTPVKRKHDDTRSSDVNTTQTGSSATPITPVPLLPSAQEPSYLCQWCAPQTRKHKTWEGDAILILHGNKTTCSLRSAHDGSMLVTNAAFR

SEQ ID NO: 3053 - DNA, 262 bp, Homo sapiens
aacgacgcaccgggcatcacgtgcgccctgatccccgccagccacgacggcgtggtgatcggccggcgccaccatcccttgaatgccgtgttccagaacggcccgacgtcgggcaacggggtcttcatccccatggagtgggtcatcggcggccaggcgcaggcgggcaagggttggcgcatgttgatggaatgcctggcggccgggcgcgccatctcgctgccctcgtccagcgtgggcatgggcaagatggccgtgcgcg

SEQ ID NO: 3054 - protein, 87 aa, Homo sapiens
NDAPGITCALIPASHDGVVIGRRHHPLNAVFQNGPTSGNGVFIPMEWVIGGQAQAGKGWRMLMECLAAGRAISLPSSSVGMGKMAVR

SEQ ID NO: 3055 - DNA, 320 bp, Homo sapiens
  misc_feature (47)..(47): Wherein n may be a, c, g or t
ggcacaacccccttgacgccgatcttggcgcgcatcgaccgcgtaanaaagaaacctgagttaatgacgttgttgggccagcactaccgcgaatccctcggcgccttgttctaccttgccgaggagtcggatcccgccgatcccactcattacgtaccgtggatgggtcaggctggactaggcctgcccgacgaggcctattaccgtgacgacgacaagtctgaggtccgcgaggcgtatgtgagccacgtcacccggatgctcaccctggccgggctggacaacgccgccgaccaggctcagcccgtcatggatctaga

SEQ ID NO: 3056 - protein, 106 aa, Homo sapiens
  misc_feature (16)..(16): Wherein Xaa may be any naturally occuring amino acid
GTTPLTPILARIDRVXKKPELMTLLGQHYRESLGALFYLAEESDPADPTHYVPWMGQAGLGLPDEAYYRDDDKSEVREAYVSHVTRMLTLAGLDNAADQAQPVMDL

SEQ ID NO: 3057 - DNA, 380 bp, Homo sapiens
cttagagacagtcagtatttggtgacctggttctgtaagttaggagcgggtctggccagagttcgggaactgtcagcctgtaagtggtaatagccgtgcgagaatgggtgcttgtcacctggggcctaggactacacagacctgaagaagaacagtctaaggggccgatgaaggagggtgccagggatggagaagggaaccaggagagtgcgctctctttgtcagccaagagaagaaaggttttctcaagaaaaagtggttatcagtgtcacattcagagaaatgaagaaagggaagggctgaggagtgtgtgctgggtttgacgacaagaagttgtcagatcaccaaaggctgtctcattggaggagcaggctggatcc

SEQ ID NO: 3058 - protein, 51 aa, Homo sapiens [sequence omitted]

SEQ ID NO: 3059 - DNA, 199 bp, Homo sapiens
  misc_feature (1)..(1): Wherein n may be a, c, g or t
  misc_feature (2)..(2): Wherein n may be a, c, g or t
nnaccggtgaagccctcggagaccctgtccctctcatgcagtttttttctgtactccgtcaccaattataattactactggggctggatccgccagccccccgggaaggcaatggagtgggtgggtagtgccacttatgctggggccacctcttacagtccgtccctcaagagtcgagtcaccatttccatcgacgcgt

SEQ ID NO: 3060 - protein, 66 aa, Homo sapiens
  misc_feature (1)..(1): Wherein Xaa may be any naturally occuring amino acid
XPVKPSETLSLSCSFFLYSVTNYNYYWGWIRQPPGKAMEWVGSATYAGATSYSPSLKSRVTISIDA

SEQ ID NO: 3061 - DNA, 309 bp, Homo sapiens
gtcgacgggacatctttcctgaaggccttcggatcactatcatcgagtgccatgcagtttgtcaacgtgggctacttcctcatcgccgctggtgctgtactctttattcttggtttcctgggctgctatggtgctcactccgagaacaagtgtgtgctcatgatgttcttttccattctcctcatcatcttcattgcggagattgcaggggccgtggttgctttggtgtacaccacaatggctgaacaattcctgacatttctggtggtgcctgctatcgaaaaggactatggttaccagactgaattc

SEQ ID NO: 3062 - protein, 103 aa, Homo sapiens
VDGTSFLKAFGSLSSSAMQFVNVGYFLIAAGAVLFILGFLGCYGAHSENKCVLMMFFSILLIIFIAEIAGAVVALVYTTMAEQFLTFLVVPAIEKDYGYQTEF

SEQ ID NO: 3063 - DNA, 197 bp, Homo sapiens
cccatccctgccaccgccggtgacgaaggcaagctgttcggttcgatcggcacccacgacatcgctgatgccctgaccgcctccggcgttgaagtggcaaaaagcgaagttcgtctgccgaacggcaccatccgcaacgtgggtgaattcgacgtggccgtgcacctgcacgccgaagtcgaagcaaccgtacgcgt

SEQ ID NO: 3064 - protein, 65 aa, Homo sapiens
PIPATAGDEGKLFGSIGTHDIADALTASGVEVAKSEVRLPNGTIRNVGEFDVAVHLHAEVEATVR

SEQ ID NO: 3065 - DNA, 407 bp, Homo sapiens
cccgggaaccagaggcgccccaggagggaggctgaaggtgaagcgacacctggataccaaacatcctcatggcgacctttctggatgatcagccacaaagcggaggtgagaaatgggagctggagcaggcagggccaggctcccagagccaaccccgaggctaggggagcagggctatggagtggcacagtggccccggccacagaagggcaggcataggtgtttcctgcacagcctcactccatgtcttgggaggggtatcagagagggtagagactggaaaaggactgtgaggaaattcacaagctcattgtgactgggagagccccgcgggacaacacccagcatgtcagggatgcactggagccgtggccccagaaatctggaaacgaaccctcgattccgga

SEQ ID NO: 3066 - protein, 67 aa, Homo sapiens [sequence omitted]

SEQ ID NO: 3067 - DNA, 400 bp, Homo sapiens
aagcttctggcttctcatagacctgagattctagataggacatcaattatataaagcaaagaaatgaataaaactactttcaatagtgataaatactgtaacataaatacaatcaaatgatatggttgagagtgaattgggaactgggctgttgttaagggctcttgggcagacggcaggtaagagttggatgacaagagggagccagccatgcaaagatctagggtcaaagtattcaggcagaagataacaaatgcaaagtccctgagatggacacaagtttagaatgtttgaggaatggaaagaactcaagtgtgactacgatgaaaggattagtgttctcaggctctcatactttgatgtgtactattgggtcttcttggaaatgtctccagtatta

SEQ ID NO: 3068 - protein, 65 aa, Homo sapiens [sequence omitted]

SEQ ID NO: 3069 - DNA, 474 bp, Homo sapiens
  misc_feature (1)..(1): Wherein n may be a, c, g or t
  misc_feature (2)..(2): Wherein n may be a, c, g or t
  misc_feature (448)..(448): Wherein n may be a, c, g or t
nnaccgacagcgagggctcaaccaggacggcaaggaagtgatgagcttcgagcgcaccatgctcgtctatcgccggggtctctcacccgaagaagccgcgaactactgaccccgacagggtcgtcgcacgtcggcgacccccttacccgacaatcacaggatcagaccatcatggacgccgccgcgctctatcccttcaagctcgtctccgctgcggaagcggtcgccgccatcccgtcgcacagccgcctgtcgatgggcatggcaatggccgagccgcccgccctcctgcacgcgctcgccgatcgcgccgagcagggcggtatcgaggacctgcgggtctactacttcgaggcgacctcgatcgccggcaagacgatcctgcgctacgacctcaacgaccgcatccgtccctactgcatgttcatgaccgccagcgagcgcgcgnagatcaagcgcgggctggaggacggc

SEQ ID NO: 3070 - protein, 101 aa, Homo sapiens
  misc_feature (93)..(93): Wherein Xaa may be any naturally occuring amino acid
MDAAALYPFKLVSAAEAVAAIPSHSRLSMGMAMAEPPALLHALADRAEQGGIEDLRVYYFEATSIAGKTILRYDLNDRIRPYCMFMTASERAXIKRGLEDG

SEQ ID NO: 3071 - DNA, 333 bp, Homo sapiens
gtcgacgacctggccgaaaaaggttggtcgcagcagaacggcttcctgccccaggctctgaccctggaactggcggctgagtgccgtaaacgtgcggctgagggtgaactggcgcccgcagcggtggggcgcggcccggcccaggagattcgcgaagggattcgcggtgaccatatccagtggctggaagagggtgatgccgccgtctgcgagacgtacatgggcgtgatggacagtctgcgccaggcgatgaatcgtggtctggtcctgggcctgggagatttcgaaagtcactttgcgatgtatccaccgggggcgttttaccttaaacat

SEQ ID NO: 3072 - protein, 111 aa, Homo sapiens
MFKVKRPRWIHRKVTFEISQAQDQTTIHRLAQTVHHAHVRLADGGITLFQPLDMVTANPFANLLGRAAPHRCGRQFTLSRTFTALSRQFQGQSLGQEAVLLRPTFFGQVVD

SEQ ID NO: 3073 - DNA, 312 bp, Homo sapiens
agatcttgtattgagcttgagaagaaaggatatgcagagagttatgagcagggacaggagatgcagaaaaatttgatttcagtggcttctgaggtggagaaacttcgagctgaggttgctaacgcggagaaaaaggcacgggccattgtgtctgcaggcaatcaaggttataatggaagctatgggaaccccaaggccaattatgctgcaaacccttataactctggatatgacattaatcaagcaactgctgccactgattctggttctcagtatggaactggtgcaacgcatggttcttggggtgcctat

SEQ ID NO: 3074 - protein, 84 aa, Homo sapiens
MQKNLISVASEVEKLRAEVANAEKKARAIVSAGNQGYNGSYGNPKANYAANPYNSGYDINQATAATDSGSQYGTGATHGSWGAY

SEQ ID NO: 3075 - DNA, 302 bp, Homo sapiens
tcatgacatcatcaatacaaaaggaggagactcagctgtggctctcttcacagatgtccagtgaagcaagattctgttgagtcgcagctgaagcgggttgatgacaccagagtggatgctgatgacatcgtggagaaaattctacagaatcaggactttagccttgaattccaggcaaaaggtttgcgaaaaaacggatgggcatacaggcgctgtggcccaccactgtagggccatgtggttgggctactgctgcagacgggtgaacgcaattccatgttcacaaaagcaatggtagtttt

SEQ ID NO: 3076 - protein, 65 aa, Homo sapiens
MTPEWMLMTSWRKFYRIRTLALNSRQKVCEKTDGHTGAVAHHCRAMWLGYCCRRVNAIPCSQKQW

SEQ ID NO: 3077 - DNA, 333 bp, Homo sapiens
tccggaaggagcgcgccacgccggaggtgacgcgctcagaaatttggggcaccgcgtgcgcgttgaggtaggtccaaccatcagatagcccggtgtataaaccgcgcacactgaatacgtcgtagtgtgccgaagctcctactggcattacggtccccttctgtatcgcactaggcatcgccacacagtggcggtcggttccctactgtatacgcgtttggcccaagtttcccaaatctgaattttcgctggatatcgctgttttcgcaggccggcggcgtgtagttcccgtttgcccagcccgcgcgctagggtgttgagcgtgcaagataa

SEQ ID NO: 3078 - protein, 59 aa, Homo sapiens
MPSAIQKGTVMPVGASAHYDVFSVRGLYTGLSDGWTYLNAHAVPQISERVTSGVARSFR

SEQ ID NO: 3079 - DNA, 338 bp, Homo sapiens
aagcttatgggaagggcacttggtcaggatccattaaatgtcctcagccaccaaagggatagcctgggtctgggagggagccttccacgggcctgtgatttggagtaaagtgggaggtacttgttttggggccatccagaacacctttatcctaattttttccctcatatggaatatgttttgttttcaacacatgataaagtgaaattaaactaggtccctgaaacaaaactgatctcagctatgatctacctctggaagtgattatctttggcacactgaattttccaaagttggccacaataatatctcccatcccacagatcttatctttgagt

SEQ ID NO: 3080 - protein, 55 aa, Homo sapiens [sequence omitted]

SEQ ID NO: 3081 - DNA, 280 bp, Homo sapiens
ctcgagcaagttcgccgatctggacctggacctggcagcctggccaaccccgggccaagccgcgccacgcgagcaagacgctgtccagggcgtgccggccacgcaacgctgatcgctcccacgggcggcgccctgccgtccgacgcgacaaaccttaccaggtggcgtcctgccacctgacgtgacacaccttgcgcacgcaggcatgctgcggcgcacggtgcattcgtccaggagaacccgcaatgacttccgtctcttatcctgccgcacaacgcgt

SEQ ID NO: 3082 - protein, 69 aa, Homo sapiens
MPACARCVTSGGRTPPGKVCRVGRQGAARGSDQRCVAGTPWTASCSRGAAWPGVGQAARSRSRSANLLE

SEQ ID NO: 3083 - DNA, 339 bp, Homo sapiens
atgaagtctatttatagaacttctgtattggttaatgacagtaacttgatgacgcgcacgaaggaagcaatcgaattatccaaagccttgaaaaagttaaaaaaaaaggtattacaagacatttcacaaatggatgacgaaatgagagagactggaaaaccaatttttgcacgcggatcttcttctcctactctaagtaggcagcactctgatgtcgcgacaccgttaaaacagcaagaaaatacaagaccagctttaaaatttgcatcaagttccccgatctcggagggattcaggaaatcgtccatcaaattctcacaggcgccttccactcagatc

SEQ ID NO: 3084 - protein, 113 aa, Homo sapiens
MKSIYRTSVLVNDSNLMTRTKEAIELSKALKKLKKKVLQDISQMDDEMRETGKPIFARGSSSPTLSRQHSDVATPLKQQENTRPALKFASSSPISEGFRKSSIKFSQAPSTQI

SEQ ID NO: 3085 - DNA, 235 bp, Homo sapiens
gtagaaattctacagcgcccagagcactgtgaggagggattcgccttttcctccccgtggctgctggaggctgtgcggacttgccctgagccttctccgccactctcttgtctcatgtccatgactcttgaacgccagtctgtgggcgctgagattttcgtggtacatcgacggtttgtagacatcttttcccaagggaagacgagggcaagggttagtggaggaagggccgcgg

SEQ ID NO: 3086 - protein, 61 aa, Homo sapiens [sequence omitted]

SEQ ID NO: 3087 - DNA, 170 bp, Homo sapiens
gtcgactttgtcatcatgacgtcggtggtgacacatctcgccgctgacgaagtcaaagtctatctgcgggaaattgcccgtgtgctggcgccgggcggcaaactgttcatgaccgcctttgtcgtcgatgacattgccgcgcctgaccgccatggcaaacgcgacccgcg

SEQ ID NO: 3088 - protein, 56 aa, Homo sapiens
VDFVIMTSVVTHLAADEVKVYLREIARVLAPGGKLFMTAFVVDDIAAPDRHGKRDP

SEQ ID NO: 3089 - DNA, 297 bp, Homo sapiens
  misc_feature (1)..(1): Wherein n may be a, c, g or t
nacgcgtccgacgggcgatcacctggccgtatctccccactgtagcggtagttttcgcgaaaggggagagctttggagtttgtgcagccccttgattgggaggaggcgctggaggtcaaggcggcccacccggaggcccggcctatcttcggcggcacggacgtcatggtggagttgaacttcggccgggcgcggccggaggtgatgatggacctcacccgggtaccggagctgcaggattggggcgaggaggacgggcggctcagggtcggcgctggggtcacctacacgaggatc

SEQ ID NO: 3090 - protein, 75 aa, Homo sapiens
LEFVQPLDWEEALEVKAAHPEARPIFGGTDVMVELNFGRARPEVMMDLTRVPELQDWGEEDGRLRVGAGVTYTRI

SEQ ID NO: 3091 - DNA, 204 bp, Homo sapiens
  misc_feature (204)..(204): Wherein n may be a, c, g or t
catgaaggtaagtatatggttattggttgtaaagatggctctttgcatctttgtaaagtcataaactcaccagttaagagatccgaaatgggacgctcagaaaagtcagtcagtgcctctagagcaaactcactaaagattcaaagacatttggcgagcattagttctcataacggctccatatcaagtaatgatttgaagccn

SEQ ID NO: 3092 - protein, 68 aa, Homo sapiens
HEGKYMVIGCKDGSLHLCKVINSPVKRSEMGRSEKSVSASRANSLKIQRHLASISSHNGSISSNDLKP

SEQ ID NO: 3093 - DNA, 540 bp, Homo sapiens
gtcgacgttaccaactacgtcatgttggagtctggtcagccgcttcatgcctatgatgccgacaacgtcagcgggacgattgtggtccgtaaggcccacgagggtgagcatctattgaccctcgacgacaccgatcgcaccctcgatcctgacgatctagtcatcgccgacgactcgggagccattggcctggctggcgtcatgggtggtgcggccaccgaagtgactgctgagacgacgtcaatcatcctcgagggcgctcacttcgacccgatgacgggcgctcgtgcttaccgacgccacaagctcggttcggaggcctcccgccgctttgagcggggcgttgatccgatttgcgcccataccgcagccgttcgcgcagcggaattgctcgcccagtacggcggtgccaccgtcggtgagcccaccgtcgttggtgaggtccccgagatgccacgtcaaacgatcaacgctgatttacctaaccggattctcggcacgaaggtgccaactgaagaggtcatcgagatcttgacgcgt

SEQ ID NO: 3094 - protein, 180 aa, Homo sapiens
VDVTNYVMLESGQPLHAYDADNVSGTIVVRKAHEGEHLLTLDDTDRTLDPDDLVIADDSGAIGLAGVMGGAATEVTAETTSIILEGAHFDPMTGARAYRRHKLGSEASRRFERGVDPICAHTAAVRAAELLAQYGGATVGEPTVVGEVPEMPRQTINADLPNRILGTKVPTEEVIEILTR

SEQ ID NO: 3095 - DNA, 342 bp, Homo sapiens
  misc_feature (340)..(340): Wherein n may be a, c, g or t
  misc_feature (341)..(341): Wherein n may be a, c, g or t
  misc_feature (342)..(342): Wherein n may be a, c, g or t
gccggcagccggggcccagctcatgggcgcctgggaagccctgtggggctgggcagggaccctggggagggtggtggaccccaccccagcagacaggggtccaagagggggttctcgaggaggggacagagtgggctccaggacagctgcccccagcgttcacactcagcacctggagcctgccgtggacaggggcttcagagcccagacccaagatccagcctgggggccccagtgccgcccattcctgccgtgggcctggagacccttacattctctgtgctcagttgattgacagagggacagacaggaagaagtgcagcggccacagacccccccnnn

SEQ ID NO: 3096 - protein, 90 aa, Homo sapiens [sequence omitted]

SEQ ID NO: 3097 - DNA, 200 bp, Homo sapiens
aagcttatgtgtaccaaaatcctttacagccaaatgacctaagtatgaatggagcacataaggagacagcatcatcccagattctttggtttggtgtggtctatggacacctgtgctgccctcccagaaaaggaacaaaccccggccccccaggggaaattgggaaacttatttacaggcagaaactacggtaatttacg

SEQ ID NO: 3098 - protein, 50 aa, Homo sapiens
MEHIRRQHHPRFFGLVWSMDTCAALPEKEQTPAPQGKLGNLFTGRNYGNL

SEQ ID NO: 3099 - DNA, 319 bp, Homo sapiens
tgatcaggtttagacaccttgcaaagtattaacttacacgtatttttcagtatgcacaagtaggctgtggggtacatgttgttattaatgtcatttcacagatgaggaaacttaggcatagagggttaaataacttgcctgaggtcagacagccaagattggaacccagtaaatgtgccttcagtgcccatgcgcttgaccactatctcccatttctgtgtctttatctgcaaaacaaggacaaaagtagctacctcaatattgtgaagatgaaactacattggatatcaatatatgaagttgggacacactgggtacc

SEQ ID NO: 3100 - protein, 72 aa, Homo sapiens
MRKLRHRGLNNLPEVRQPRLEPSKCAFSAHALDHYLPFLCLYLQNKDKSSYLNIVKMKLHWISIYEVGTHWV

SEQ ID NO: 3101 - DNA, 234 bp, Homo sapiens
gcacgttatcgtgatatgcactcaggtatgagcgggccttacaaagaaattcgccgtgtattacaaggctttacacacccattctgggcgtatgatgtgggtatcaaaggcaaaccgcacaccttgggtaatgtctcaacttatatgggtagacaaataggtttagatgactatattggctggctaacagaaaactttgatccatcaatttcgtggaaagatttagagtggatc

SEQ ID NO: 3102 - protein, 78 aa, Homo sapiens
ARYRDMHSGMSGPYKEIRRVLQGFTHPFWAYDVGIKGKPHTLGNVSTYMGRQIGLDDYIGWLTENFDPSISWKDLEWI

SEQ ID NO: 3103 - DNA, 726 bp, Homo sapiens
  misc_feature (1)..(1): Wherein n may be a, c, g or t
  misc_feature (2)..(2): Wherein n may be a, c, g or t
nntggaacattcattcaattaatgatgaaaccaccaaagctaaaaccccttacatttcagactggatacaattgggagagcctatcaaagaagagttaaaaaaccacccacaattcagcaaccatttcgccaagcgttcatggcttacagagcgtttgaacgtgctcttgcaactcaacaacctcttaagctatgatttcattcaagaaagagtgataaataacgaattaaaaatttttggttggcactacatcatagaaacaggcaggatttataattataattttgaaagccatttttttgagccgattgaagaaaccattaaacaaaggaaaagtcatgaaaacttctaaaacaaaaacccccaaatccgttttaatcgctggcccatgcgtcattgagagcttagaaaatctaagaagtatcgctattaaattgcaacccctagccaacaacgagcgattggatttttattttaaagcgagttttgataaggcgaaccgcacgagtttagagagttaaagagggcctggtttagaaaaaggcctagaaatgttacaaattatcaaagaggaatttggttataaaattttaaccgatgtgcatgagagctatcaagcaagcacagcgaccaaagtagcggatattttacaaatcccggcgtttttgtgccgcaaaacggacctgattgtaaaagtgagccaaactaacgctattataaatata

SEQ ID NO: 3104 - protein, 60 aa, Homo sapiens
MKTSKTKTPKSVLIAGPCVIESLENLRSIAIKLQPLANNERLDFYFKASFDKANRTSLES

SEQ ID NO: 3105 - DNA, 386 bp, Homo sapiens
acgcgtgcactatgtagggaagatctgtgtttaatgttggcaggcaccatccaattgtcaagggcccagagaaaacaaatgtagaaggcaaactggtctctctctgagaaatgagacagactttttcctgactccatggacatcagaaatttgactgcatgaaagtgcattataacaacgttgactttgtgtgtaagcactgtgcgtatacataacaatgttgggatttcctcaatagatgaagagatgtttggacatcggcatttgtgaaaaataaaatttcttgagatctctgctctatgggtggctgcatacgaccccctttgcaggtctgttccatggtgggcacattctcattcgttgcctgattacatcacgtgattact

SEQ ID NO: 3106 - protein, 56 aa, Homo sapiens [sequence omitted]

SEQ ID NO: 3107 - DNA, 312 bp, Homo sapiens
  misc_feature (1)..(1): Wherein n may be a, c, g or t
  misc_feature (2)..(2): Wherein n may be a, c, g or t
nnctaattttgcgggtgaaaatacttaatcaggattaattgcattcataggatattgaagttattgtttcttatcaaagataaacaaataacaaataaatgttacatagtgtaacatttaaaaaattattaattttgcaccaattaaaatcattatatgaatttgaaagctagatccgattctgttcaaaataaagtaaaaattgtaaaaactgctttgaatctattcatggagaaaggaatagatattccattgactgaaattgccaaagaatctgatgtttccagaatgactttttatcgtcattttccg

SEQ ID NO: 3108 - protein, 52 aa, Homo sapiens
MNLKARSDSVQNKVKIVKTALNLFMEKGIDIPLTEIAKESDVSRMTFYRHFP

SEQ ID NO: 3109 - DNA, 414 bp, Homo sapiens
gaattcaggcctgtggtcagagacttgagtctcctgggggagaagacggataaagaaagtgatggaccaaagctgccagagctaacagagcagggactctggagccagatggggttaaaatcctcctgagctgtgtgacttagggcaagtgtcttaacctctctgtatctctgtttcctcatctgtaccatggggatgaccttaatcaaccttgcagggattttgcaggagaagttgatgaatgagtcaatatacaaggaatgctttgcctagtctgatagtttcctaacaacaatgccatctattctttgagatccagggaaatctctcctttgtaaactgcttccacgagttcctgccagaataactgttcctttctctgcgtgaggtctgtctgtggtgtgctgaagatct

SEQ ID NO: 3110 - protein, 63 aa, Homo sapiens [sequence omitted]

SEQ ID NO: 3111 - DNA, 392 bp, Homo sapiens
agatctgttcacctgcctttaaatgcacccagggtagggcttccaaacgttggaacgaggcgggtggttgaggaaaaggaggaggaagatgaggaagaagaggaggaggaggaggaggaagagggagagaaggagagtttagttgatgaacatttggattacttacatttccaagcaagtatgaataaagcttcttgtacattcatgtacaagtctatgcatgaatataggttttcatttctgttggatattgctagggttgcaaaactaaaacaccacttactaggtgggttaaacaacagaaactgatttctggcagttctggaggctggaaatccatgctcaaggtgtcagcaggtttgattcacctgaggcccctttccctggctagc

SEQ ID NO: 3112 - protein, 102 aa, Homo sapiens
RSVHLPLNAPRVGLPNVGTRRVVEEKEEEDEEEEEEEEEEEGEKESLVDEHLDYLHFQASMNKASCTFMYKSMHEYRFSFLLDIARVAKLKHHLLGGLNNRN

SEQ ID NO: 3113 - DNA, 295 bp, Homo sapiens
  misc_feature (161)..(161): Wherein n may be a, c, g or t
tgtacaggcagcccattctctgaaaaacagtggcaacagccagcagcccctgtaacacaggacacaagagtggagcagtgaaggaagctccccacgagcactgtcctgaatacagtctccagcctctcgtgtcccagtgccagtctactctgagcaagctntccttttgcatgtattgaagaacaatgtctctgggtgcttaattactctcatcagcaccacctctcagttcaggggtaatgtcccaaactcctcttccctgggtggtcaaggcattatctgtcccttacctagg

SEQ ID NO: 3114 - protein, 57 aa, Homo sapiens
  misc_feature (4)..(4): Wherein Xaa may be any naturally occuring amino acid
MQKXSLLRVDWHWDTRGWRLYSGQCSWGASFTAPLLCPVLQGLLAVATVFQRMGCLY

SEQ ID NO: 3115 - DNA, 404 bp, Homo sapiens
aagctttccctaatccatgtgtctagattgccttctccaaagtaaaaaccctgcttttccaccacataatatttttactcattttctctattctataatacacacaaaatgcctccagaaattagagcactatgcagctatagacccactcagtaaacttgcatatttctttgcagtggcttttacccttagaatttagccctctaggtgtgcacagccagagtattgtgttcaaatgaaattaattatattctctgtgtggttatgctatcaattggatagagagtcagaaacacttgttttagtgtgtattatattttactatttcctgttttaatcttttaaaattttaatttacatagttttctttacacagtttatctctgaatcgtgtgtcatgtaca

SEQ ID NO: 3116 - protein, 60 aa, Homo sapiens
MCLDCLLQSKNPAFPPHNIFTHFLYSIIHTKCLQKLEHYAAIDPLSKLAYFFAVAFTLRI

SEQ ID NO: 3117 - DNA, 382 bp, Homo sapiens
aagcttctgttgtgtctcttgctcctccccactccaggcaaccaccatccttccccctgcccccaatatatattggtttttgcctactctagcatttcatataaatggaatcacacaatatatacttactgtgtctggcttcctctagtcagcataacattttgggattcatttatgtcgttgtgtcttatcagtcgtggattcctttttattgctgagacggctagctttaaaattatgcctgattgctgcaagtagaaagaaccagaagccctcctcatggaacttgggattgttgcttctttttcctttccagcctagtgttagcaatgcacaaaggctctttgtagaggattagagttgagggggctagagggcgatt

SEQ ID NO: 3118 - protein, 51 aa, Homo sapiens
MRRASGSFYLQQSGIILKLAVSAIKRNPRLIRHNDINESQNVMLTRGSQTQ

SEQ ID NO: 3119 - DNA, 273 bp, Homo sapiens
acgcgtgaagggtggggctcccagctcagaaagttctctgcatgggagagagcacccagcccttctcctacctcccccaggacaggaggggcctctgtgggctcagcccagcttgcaccaagccctgtacccttggcgtgggtgttcttagggggggagtgtgtgtgctgggcaggatgccaccactacagccactgagccctggcccttgcgtgggggctggggagtgagctgtgtgctcctgagatggctcacgcctggcacagacaagag

SEQ ID NO: 3120 - protein, 62 aa, Homo sapiens [sequence omitted]

SEQ ID NO: 3121 - DNA, 318 bp, Homo sapiens
  misc_feature (1)..(1): Wherein n may be a, c, g or t
  misc_feature (2)..(2): Wherein n may be a, c, g or t
nnacgcgtccgcatcaaactcttcctcccaaacatgaattggctgtttttggtctcgctggttttcttctgcggcgtgtcaacccatcctgccctggcaatgtccagcaacagactactaaagctggctaataaatctcccaagaaaattatacctctgaaggactcaagttttgaaaacatcttggcaccacctcacgaaaatgcctatatagttgctctgtttactgccacagcgcccgaaattggctgttctctgtgtctcgagctagaatccgaatacgacaccatagtggcctcctggtttgatgatcatccg

SEQ ID NO: 3122 - protein, 95 aa, Homo sapiens
MNWLFLVSLVFFCGVSTHPALAMSSNRLLKLANKSPKKIIPLKDSSFENILAPPHENAYIVALFTATAPEIGCSLCLELESEYDTIVASWFDDHP

SEQ ID NO: 3123 - DNA, 269 bp, Homo sapiens
gaattctcacaggacttgctcgacgcggacaagacgtacgagacggttgtgcgtttgggcatcaagacgagtaacgcagacgctgaaggcgaggtgctgagcgagcggccggtatcggtcacgcccgagcaactgcaggcagccgttgcgcgctttgtcggcgagatcgaccaggtgccgccaatgcattccgccctgaagaaagacggcaagccgctgtatgagtacgcgcgtgctgggcaaaccgtggagcgcgctgcacgacgcgt

SEQ ID NO: 3124 - protein, 89 aa, Homo sapiens
EFSQDLLDADKTYETVVRLGIKTSNADAEGEVLSERPVSVTPEQLQAAVARFVGEIDQVPPMHSALKKDGKPLYEYARAGQTVERAARR

SEQ ID NO: 3125 - DNA, 264 bp, Homo sapiens
agatctaccataatgcttctcaaagtttgcagaatcacatttacactacatcagtctccacacccacctccccacctccccaccccccaaagcacatgcatgcatgtgcacacccatatagacacacttttggcttttagagtctcacaaaagcttaagaggatcactgaatgctcacatgctaccagattgttgcttattttctaggctctgtaaccacagtaatagataaactgattaaaactacccccccccccccccccc

SEQ ID NO: 3126 - protein, 64 aa, Homo sapiens
MLLKVCRITFTLHQSPHPPPHLPTPQSTCMHVHTHIDTLLAFRVSQKLKRITECSHATRLLLIF

SEQ ID NO: 3127 - DNA, 250 bp, Homo sapiens
gtgcacaccacaagatcttgaaagagttctcctgtggctagagttgtaaatgccccactgaaatatttttacagatggagaattcttttgaaataaatagaaaaatttcccaggatgaaaattttcttttaaagcttttggaatgcctccatttatttcagacttgttggactgttgagaatcccttgacagctgtgggttctggaaagtatctccttgactgcctgtcctagacccccttttccccggg

SEQ ID NO: 3128 - protein, 52 aa, Homo sapiens
MENSFEINRKISQDENFLLKLLECLHLFQTCWTVENPLTAVGSGKYLLDCLS

SEQ ID NO: 3129 - DNA, 252 bp, Homo sapiens
gcgatcatgcgcctgctcgacgaaatcgaagacctcgccgatggcgacctcaccgtgaccgcgtcggtgaccgaagacttcaccggcaccatcgccgactcgatcaactattccgtcgaccaattgtgcgatctggtcgccaccatcaacctcaccgcgggccaggttgccgctgcggtgcgggaaacccaggccaccgccatgcatctggcccaggcctcggagcaacaggcgcagcagatttccgaagct

SEQ ID NO: 3130 - protein, 84 aa, Homo sapiens
AIMRLLDEIEDLADGDLTVTASVTEDFTGTIADSINYSVDQLCDLVATINLTAGQVAAAVRETQATAMHLAQASEQQAQQISEA

SEQ ID NO: 3131 - DNA, 275 bp, Homo sapiens
acgcgtaccgacatgtcgaggtccgccagcgcggccgtcagccggttcgcgagcgcgtagccggcctgattgaggagcatcgacaggtcgacgggcggcggcgtgcgctggacggccatgcctccagcctatccgagatcgtctgctgcagaacgatcttgtcacggatgagaccgacccgctcgggccgtctttcgttcagcttttcgctgcaaacctccatgtccggcgttatcgacggcaaccgaccgatggccggggggaggtcgaactcg

SEQ ID NO: 3132 - protein, 61 aa, Homo sapiens
MEVCSEKLNERRPERVGLIRDKIVLQQTISDRLEAWPSSARRRPSTCRCSSIRPATRSRTG

SEQ ID NO: 3133 - DNA, 253 bp, Homo sapiens
gcgtcgagcctcaagccggaagtggtcgcgggcctggacatcctgatcgtgcgtgagctgaccggcggtatctacttcggctcgccacgtggcgtgcgtgagttggaaaatggggagcgcccagccgaccaaaccctgccgtcaagccaaagcaaaattccccgtatcgcccgtgttggtttcgacatggcgcgcgtgcgtggcaagaaggtctgctcggtcgacaaagccaacgtactggcctccagcccac

SEQ ID NO: 3134 - protein, 84 aa, Homo sapiens
ASSLKPEVVAGLDILIVRELTGGIYFGSPRGVRELENGERPADQTLPSSQSKIPRIARVGFDMARVRGKKVCSVDKANVLASSP

SEQ ID NO: 3135 - DNA, 324 bp, Homo sapiens
gcgtccacaattttgcaatgttacttgtatttgctttttgatacttatcgactttgtgagcaggatattgcgttatatgacagagaaagagcagagggctcggtaacacctttggcattcatcgtagctagaaaaatttcacttttcctctctgacgatttcgcgatgaccatgatttttgtcagtataacatattttatgtttggattggaagcagatgcaaggaagtttttttatcagtttgctgttgtatttttatgtcagctatcatgttccggtttatctatgttatcggtggcggtatcgagagatttttctaaagct

SEQ ID NO: 3136 - protein, 108 aa, Homo sapiens
ASTILQCYLYLLFDTYRLCEQDIALYDRERAEGSVTPLAFIVARKISLFLSDDFAMTMIFVSITYFMFGLEADARKFFYQFAVVFLCQLSCSGLSMLSVAVSRDFSKA

SEQ ID NO: 3137 - DNA, 345 bp, Homo sapiens
  misc_feature (1)..(1): Wherein n may be a, c, g or t
  misc_feature (2)..(2): Wherein n may be a, c, g or t
nncgatcgccaggactgcttattagaaatgcagaagattgagctccaaccagtaacaatatattaagacctttctaatacagtcaagaataacaaacactaaacagactgctataattgagggagaaacagtgaataagaatcaccaatggtcagcctgactcttactcgatggattggctagagacctgcaaccattatcttttcctcacgggctgctgacttctcaaccagaaagcctcttaaagagaataaatataggccaggaacaatcactcacatctgtaatcctagcacttcgggaagccaagatgggagtatcacttgcactcaggagtttggtacc

SEQ ID NO: 3138 - protein, 54 aa, Homo sapiens
RPATIIFSSRAADFSTRKPLKENKYRPGTITHICNPSTSGSQDGSITCTQEFGT

SEQ ID NO: 3139 - DNA, 384 bp, Homo sapiens
  misc_feature (129)..(129): Wherein n may be a, c, g or t
ggcacgatgtgccaggctgccctagctcttaaaaagcatggcgccaagcgggttattgccgctgccactcacccgatcctgtcggacccggccgctgaacggatcaataactcgcccatcgaagaactnatcgtcaccaacactctcaagattcgcgacgatatcgacattcctgccatgacgcttctgtccatcgccccgcttattgctaaggcgatccaggaggttttcgaggacgggtctgtgacgagtctgttccgctgacgttgtttgggggtacagcgttgtgccccttcgcgccggtccgaatgaccctctcggttgataccgtttatctgtcaaggtcgatcttggccgggagcgtgcccttgctgtcgggtgcac

SEQ ID NO: 3140 - protein, 87 aa, Homo sapiens
GTMCQAALALKKHGAKRVIAAATHPILSDPAAERINNSPIEELIVTNTLKIRDDIDIPAMTLLSIAPLIAKAIQEVFEDGSVTSLFR

SEQ ID NO: 3141 - DNA, 377 bp, Homo sapiens
ccatggattaagtgttggttcatagagattgccaataatcagaaagaaccttaaatgtgcatttaagacagtgtcccttcccttcttttcaatgaaggtccctgcctatataaatcatctggcacgctggtgggaaatcctttgctcttccaacgtgttattagtgctgggcagagatggggcacactcaggggccaaagaggacaaaaagtccatgcaaaacttgagtcttttaatggcttaagataatcaggagtcagttctgaatcttacaaagtgctctgcttaataagtaccttacttagcagagcactttgcaaacatattacttattagcagagctctttgtagaccttccacatctggctgtcagatct

SEQ ID NO: 3142 - protein, 50 aa, Homo sapiens [sequence omitted]

SEQ ID NO: 3143 - DNA, 1166 bp, Homo sapiens
  misc_feature (1149)..(1149): Wherein n may be a, c, g or t
gaagatgacaaatggcgtcagtggtactgactgcaaggtgttaacaattcatgctcttaacgaccttcgtcagaacgttctcattgacggataaaaaaaattttacatttggatatcaggggtatactgtatatataaacaggggatatgcatacagttaatgtgtgtccgtggtcgtgataggagggaagatgcaggactatcttttggagtcgttgaagctccagcgcattgatttttttattaagcttgtagcggctagtgagtgcagtgacgaagagaagcggctggctattcagtgggtatcagagttgactgacgaactcatggcgaaaatccgcagccatgaatactgccggtcaatggacgtcaccagttagggggaatctgatgcgcattgaaataatgatcgataaagagcagaagattagtcaggccaccctggacgcccttgaaaccgagctttaccgtaatttgcgccctctgtacccaaaaacagcaattcgaattcgcaagggcagcgccaatggcgttgagctgagcgggttaaaactggatgaagacaaaaagcgagttatggagattatgcagcaagtctgggaggacgatagctggttgcattaatctcttggatatgatgttaaccatatgtatgattacaccaaagtggcgccaatatggtgagcatcatgacgaagaaatctaaacaaattgacggagggcgtttcagcctccgtttacctagcgaagtgctagagtctatcgataaagagtgtgccaaaaggattggctgcgtttcacgaaatacatggatcgctgaggctattgccgaaaagcttagtagatgcaatggcgaacattcacctacaccagaagacattaaggctgcttgatgaaaaccttttatgaattttttgcaggctcaggtatggctagagctggtttaggcgatagctggacgtgcgtgtttgctaatgattttgaccataaaaaaggtgtcgtttatcaacagaattgggggaaggggacctttttgttggtgatgtgaaaactgttacccaggaacagctctcaaaaaatgccaatttagtgtgggcgtcattcccttgccaggacctttcacttgcaggggccgggctgcatggatantcaaaatcaataaaacc

SEQ ID NO: 3144 - protein, 102 aa, Homo sapiens
LTNSWRKSAAMNTAGQWTSPVRGNLMRIEIMIDKEQKISQATLDALETELYRNLRPLYPKTAIRIRKGSANGVELSGLKLDEDKKRVMEIMQQVWEDDSWLH

SEQ ID NO: 3145 - DNA, 288 bp, Homo sapiens
gtgcaccaatgttaacttctcccttattcacttcttccccaaacacaaaacaaacaaaagtcttcattttcagctcccttaatccatataacataaaatgtaggccttgtgactcctgtgactaccattgttcatctttcttgctctcccatcatcagatacttaccttagtcctggaaataatgcattctgcatttcctgcttctactttttcccaagggaagaaattaaacattggctttctgtgtctccctgtcttattggcaggctctttttcccagtaaaagg

SEQ ID NO: 3146 - protein, 91 aa, Homo sapiens [sequence omitted]

SEQ ID NO: 3147 - DNA, 273 bp, Homo sapiens
  misc_feature (1)..(1): Wherein n may be a, c, g or t
nctatcagacaatagtaaagctgagtccaagggtcagggaggggactcgaaatacaccaccaaattatggttccaagaataaaaaaccaggagagaagcaaagggcagatggcacaagtgatcctggaaacaacctgaacagccatttttgtctgctttattttggcatccttagtaggggcagccatgttaaaaaaaaaaaaaaaggaggatggagggacccaaagttgggggaaaattttttctagtttttggccccttgggaatctcaca

SEQ ID NO: 3148 - protein, 62 aa, Homo sapiens [sequence omitted]

SEQ ID NO: 3149 - DNA, 401 bp, Homo sapiens
cgcgttgattttgatcgatccaaaacagtaacttctgattggacttattggaatacggacaccaccacagcctttgcaaccttgaaacaaaatctattcaatgatttgaatttgcatgtgaattatgcatatcgtgaagtaaaacaagatactgcattgctctatttgtgggggagtttcgataaaactacaaataccagtaaaggtacattaatgacttggtctgatgccactaagacgaaagaaaataatattgatacttatctttctgctcctttttctattggtggtttagagcaagaaattgtggcgggttttatgtataaccaagcacaaaaagacacatggtattcaggtaatcctcaaattgcatcagatgcggtacttgattttgatcatcc

SEQ ID NO: 3150 - protein, 133 aa, Homo sapiens
RVDFDRSKTVTSDWTYWNTDTTTAFATLKQNLFNDLNLHVNYAYREVKQDTALLYLWGSFDKTTNTSKGTLMTWSDATKTKENNIDTYLSAPFSIGGLEQEIVAGFMYNQAQKDTWYSGNPQIASDAVLDFDH

SEQ ID NO: 3151 - DNA, 691 bp, Homo sapiens
tgatcaagccgatgtacatcgcaaaatggatcgccgacattgaagcggctatggaaatcaagaagggtgagttgatcgtggtccaagggactgcggcactgctccgcgtgatggacatggccatcaacaatgaggtcgatttcaagatcctgttgatcagtaacgccacctaccgcatttatctagctgcctacgaggcggctaatggcaacaagcgcctgcacggatacccgttgaaccccatcgaattcatgcaggctttgggcgttggtattttggcggtcgacgaagtccaccaagaccatcatttcaactatcggctccagctcttctcgcacgtcccgaactttgacaccctgtctggaaccatcgatccggataacccgttcaaggcggagatgacggacaagcaattcccacgcaagttgcgctacgtggaggataagccgccaccctacatcgatgccattgcgttggaataccacctgcgcaacgtggagaaagtcaaatggacccccagggggcgtccgacctattcacacatcgcgttcgagaagagcctcatgcgcaatgcgcgcatgttgcgtaactacaaggagatggttgcccagatcgttcagaacagctacatcccgctgtataaaccaggatacaagatgctgctttacttcgccactaaggcgatgtgcac

SEQ ID NO: 3152 - protein, 226 aa, Homo sapiens
MYIAKWIADIEAAMEIKKGELIVVQGTAALLRVMDMAINNEVDFKILLISNATYRIYLAAYEAANGNKRLHGYPLNPIEFMQALGVGILAVDEVHQDHHFNYRLQLFSHVPNFDTLSGTIDPDNPFKAEMTDKQFPRKLRYVEDKPPPYIDAIALEYHLRNVEKVKWTPRGRPTYSHIAFEKSLMRNARMLRNYKEMVAQIVQNSYIPLYKPGYKMLLYFATKAMC

SEQ ID NO: 3153 - DNA, 285 bp, Homo sapiens
gaattcgggctaactccttcctttctttatactagccaccaggtagaccctgttagaacatcattgacatttccagaatgtaaagaaaacatggaaacctggagatgtttcagcagattgataccccaatggctaacatattgaacatatatagaagaaatagttaaaggaaatgtgcctatataaactagagaaaactcaagtatgggttgactcattcactaagaacatcctggctgggcatggtggcccacccccacccccccaccaccctccgacaacatc

SEQ ID NO: 3154 - protein, 63 aa, Homo sapiens [sequence omitted]

SEQ ID NO: 3155 - DNA, 417 bp, Homo sapiens
aaattttcttctccttaatgtccctaaagcacttcgtttgttgctcacttttgcatcattctgccatgtcgtacattggaattatatacaaataacacgcaacaaatatactttgggttagacactattctcagctttggagatctagggtctcacaacctgatgatgaagataaataagaaaataaattattactacacagtgtgtgaggtgatgtactgaagtacccacaggaagtatagagggagtcaccaacgaatgtgtacatgtcctgctaaactgcaggcttcctgaggaaaatggccacgtactcccctgacacatggccctggatttctcacgaggttatgggttcagaaaacagtgtttaattatgtgttttggattgagggcaaccaggccagtaagtaatccgga

SEQ ID NO: 3156 - protein, 59 aa, Homo sapiens
MCQGSTWPFSSGSLQFSRTCTHSLVTPSILPVGTSVHHLTHCVVIIYFLIYLHHQVVRP

SEQ ID NO: 3157 - DNA, 345 bp, Homo sapiens
atgcatcccccataaattatgctaatgccgtggctgctcttttcccacagacataaatacacacatacattaaatgacaaagagatacattctaaatgatgtctgtatatttatcgtcagtacgttacagtttcattcattatgttgtgtgtgtgcctcctccccacagctgaactatacatgtctgattcaagtaccgcataatatactatcactgtgccctagagccacctagtactgagagggggaaagatttaccaattaggtgattaagaaaacatagctgaatatatttatcaccaaactctgaaaatcagtatgatagtatttttaatcttgcggtta

SEQ ID NO: 3158 - protein, 53 aa, Homo sapiens
MTKRYILNDVCIFIVSTLQFHSLCCVCASSPQLNYTCLIQVPHNILSLCPRAT

SEQ ID NO: 3159 - DNA, 292 bp, Homo sapiens
  misc_feature (280)..(280): Wherein n may be a, c, g or t
  misc_feature (283)..(283): Wherein n may be a, c, g or t
  misc_feature (291)..(291): Wherein n may be a, c, g or t
  misc_feature (292)..(292): Wherein n may be a, c, g or t
agatcttgaggactggagttgctgtgggtccctgtatctgaaatgcccaccttccacttttcatctttctccactggacccttcctcagcctgtgaatatggatgataccccctttgctaacccgatcgccaggttcgccggccttgggtgctggcttgatttcctgcccatctctgcttgtctgactttgtcctctcccagtagtgtttctcctgtaaactgcctgtgacttctcgttcctctttccctgtggtcttggcagttctctaggctgcatcnccncccccccnn

SEQ ID NO: 3160 - protein, 92 aa, Homo sapiens [sequence omitted]

SEQ ID NO: 3161 - DNA, 226 bp, Homo sapiens
  misc_feature (14)..(14): Wherein n may be a, c, g or t
ggatcctcattgtntcggtgtctgacagcgatgtcacctgccgcaccatgtctttgtcactggggatctctggctgacacggtctggagaaggggttgaaccagttcagggagaagtccccaccaaaggtctcctttactgactgccagctccccatgtgctccctgggctggttctttcgtttgaggcgctcgatgcccgtctcatctgtgcagatggagtgcac

SEQ ID NO: 3162 - protein, 52 aa, Homo sapiens
  misc_feature (48)..(48): Wherein Xaa may be any naturally occuring amino acid
MGSWQSVKETFGGDFSLNWFNPFSRPCQPEIPSDKDMVRQVTSLSDTXTMRI

SEQ ID NO: 3163 - DNA, 165 bp, Homo sapiens
gtgcactcgcgagtagctcgttctgatgctcagatcctcaccaggcttggggccaacgttgtctttactggaccgcgtgagtggatggaccacacgtcgccccttggcacgatggcgactctcgacgaggtcattgctgatgtcgacgtcgcgatgatgctacgc

SEQ ID NO: 3164 - protein, 55 aa, Homo sapiens
VHSRVARSDAQILTRLGANVVFTGPREWMDHTSPLGTMATLDEVIADVDVAMMLR

SEQ ID NO: 3165 - DNA, 657 bp, Homo sapiens
acgcgttaatattatcttttgggaaatttcattaaatgtaataataatcgttaacagtagctgcgaaatgaacaaatgcgtaatatcggttagtcacatgcataagaattcaacatataactatctatgggtggagaaattattactttgcaagcaggtcaatgcgggaaccacgttggtaagtttctctggtctcaattggcgaaagaacacgctataggcaccgatgggctatctcagcttcctgattccagtacggaaagagatgatgacacaaagcctttcttccgcgaaaacagtaggaataagtttacgccaagggctattatgatggattccgagcctagtgtcatcgccgacgtggagaacacatttcgtgggttttttgacccgagaaatacctgggtagcttctgatggcgctagcgctggtaattcttgggccaatgggtatgatataggaactcgtaaccaggatgatattcttaacaagatcgacaaggagattgattctaccgacaatttcgaaggtttccagttgctgcactcagtagccggagggaccggttcagggctcggatccaacctcttagaagcgctgtgtgatcgatatcctaaaaaaatactcacgacatattctgtgttccctgcaagatct

SEQ ID NO: 3166 - protein, 177 aa, Homo sapiens
MGGEIITLQAGQCGNHVGKFLWSQLAKEHAIGTDGLSQLPDSSTERDDDTKPFFRENSRNKFTPRAIMMDSEPSVIADVENTFRGFFDPRNTWVASDGASAGNSWANGYDIGTRNQDDILNKIDKEIDSTDNFEGFQLLHSVAGGTGSGLGSNLLEALCDRYPKKILTTYSVFPARS

SEQ ID NO: 3167 - DNA, 345 bp, Homo sapiens
ctggccaactgggtgccggacctgttcatgaagcgcgtcgaagccgaccaggaatggtcgctgttcgatccgcgcgtggtgccggagttcaccgacctgttcggcgaagccttcgaagccgcctacctgcaggccgaagcgcagggcaaggccaaccgcacgatctctgcccgcaagctgtacgcccgcatgatgcgtacgctggccgagaccggcaacggctggatgaccttcaaggacaagtgcaaccgcgccagcaaccagaccctgcgtccgggcaacgtgatccacctgtccaacctgtgcaccgaaatcctggaagtcacttccaacgatgaaaccgcg

SEQ ID NO: 3168 - protein, 115 aa, Homo sapiens
LANWVPDLFMKRVEADQEWSLFDPRVVPEFTDLFGEAFEAAYLQAEAQGKANRTISARKLYARMMRTLAETGNGWMTFKDKCNRASNQTLRPGNVIHLSNLCTEILEVTSNDETA

SEQ ID NO: 3169 - DNA, 325 bp, Homo sapiens
  misc_feature (1)..(1): Wherein n may be a, c, g or t
  misc_feature (325)..(325): Wherein n may be a, c, g or t
natgcagagtctttgctcaggaaagagcaatgctgctgaaccacaaaatgtattttgtctcaatccattttctgtaactttccacttactccccttctgtaattttctatttcctcctcactctgccccatttgcttcccccatagttccctagttctttttgttccctcttttactttcccacagatcttttctgttttctctctgttctccctttaaaaacctagttacttttgtctcagtgggagttgagctcagtttgtactagaatctctccatcactgcagtactcaaaataaaacctgtctttctgtctaaaaaaaan

SEQ ID NO: 3170 - protein, 50 aa, Homo sapiens
MQSLCSGKSNAAEPQNVFCLNPFSVTFHLLPFCNFLFPPHSAPFASPIVP

SEQ ID NO: 3171 - DNA, 551 bp, Homo sapiens
  misc_feature (1)..(1): Wherein n may be a, c, g or t
ntcatgacttttatatggttcaaaaatctgcccccaatttgttcgaggatatttagtgcaacttagttgggtcttggaacgaggtctgcttactaattttatgttgacggttgaaagcggattttaaaacgtatgaatttagaagagagccaatcaaataggggtacgcttaatattaaaaaaatattagtaattgtttgtatgacgaataaaatttgtaagcacctgatccaatccttattattgagcaagagacgtcttgtttctgtactctttgataactatcaaggcgacatgaaactaaggtcatctccatctgccattcctctagttccgtcaacgaaaattcttcaagctatggaggcccggaacgacattgttgacagtctgatcatcaatagtcacgcaacggaaagtgatcgccggactttaggagaccatgaggttagacaatgtgaggataccaacttcggcttcaaaatttgatacaggttaattttgaaggcaacatttaggttcggccttatttaaaaaaaccttcaggtacgcgt

SEQ ID NO: 3172 - protein, 117 aa, Homo sapiens
MNLEESQSNRGTLNIKKILVIVCMTNKICKHLIQSLLLSKRRLVSVLFDNYQGDMKLRSSPSAIPLVPSTKILQAMEARNDIVDSLIINSHATESDRRTLGDHEVRQCEDTNFGFKI

SEQ ID NO: 3173 - DNA, 385 bp, Homo sapiens
  misc_feature (1)..(1): Wherein n may be a, c, g or t
  misc_feature (356)..(356): Wherein n may be a, c, g or t
  misc_feature (360)..(360): Wherein n may be a, c, g or t
  misc_feature (361)..(361): Wherein n may be a, c, g or t
ngcgcgccagctgcgatttactgactactttttcctgccaaatcagcgtcattagcgcctttttgttgtactgccgcacccgctgattattcagcccaacgatcgtcacttcacttaactccgttaactgtattacgtgaccactgcgtgttaccgccacgaatttgttgtccagaatgacagcataccttatttcactgttatttttttactggagagacgcacatgtatggcgatgtgaaggtctggcgcgagagcatttccctaccgacatggaccacaggtcaggaagatcccaacccaatgtttctggaaaaacgcgtttatcaggggtcatccggcgcgggttatccctngggnngtatcgatacgctgacgggggagg

SEQ ID NO: 3174 - protein, 53 aa, Homo sapiens
  misc_feature (44)..(44): Wherein Xaa may be any naturally occuring amino acid
  misc_feature (46)..(46): Wherein Xaa may be any naturally occuring amino acid
MYGDVKVWRESISLPTWTTGQEDPNPMFLEKRVYQGSSGAGYPXGXIDTLTGE

SEQ ID NO: 3175 - DNA, 226 bp, Homo sapiens
tcatgaagctgaacctgtgcctccttcccatctgccctgaggcatgacagcctgggatgctaaaatgtgtagtcggaaaggcattaaaccacaggctgctgaaccttactaactggcatgtccctcggactttgtgagcctccctggctttattacccctcacctccatggtctccctcatctatgcactaaatgacaccaaaccgagggaaagaaagccactagt

SEQ ID NO: 3176 - protein, 60 aa, Homo sapiens
MRETMEVRGNKAREAHKVRGTCQLVRFSSLWFNAFPTTHFSIPGCHASGQMGRRHRFSFM

SEQ ID NO: 3177 - DNA, 417 bp, Homo sapiens
tccggaagggtgacgaccacgatcttggtggagttcagattcaacgtgtaacgagggacggttgtggagggtgaggtcgcggatacacaactgggtgggcatttgcccgatgaggtgagaagcgccacggagcatcacacggccgtcgtcgttggtggtggccagtccggcctagccacggcatactacctgcggcgctacgaaatggacttcttgatcttggacaatcaagaggaatccggcggagcgtggttgcacgcgtggccttcactgacgcttttctccgccgcggcgttttccaacctgcccggctggcctatgccgcagtacccggggtacccgccggcaagccatgtcatcgactacctcgaacactacgaacgacggtacgacctcccggttaggcgcccagtgcac

SEQ ID NO: 3178 - protein, 122 aa, Homo sapiens
RGTVVEGEVADTQLGGHLPDEVRSATEHHTAVVVGGGQSGLATAYYLRRYEMDFLILDNQEESGGAWLHAWPSLTLFSAAAFSNLPGWPMPQYPGYPPASHVIDYLEHYERRYDLPVRRPVH

SEQ ID NO: 3179 - DNA, 300 bp, Homo sapiens
  misc_feature (69)..(69): Wherein n may be a, c, g or t
gtgatgtcgagccggatcgacgcccggctcagcctggcgatgttcaaccgcctgctgtcgctgccgctngagttcttcgagcgcagccaggccggcatcaccatcggtcgcgtgctggcgatctacaaggtccgtgacttcctgaccgggcggctgacggcgaccttcctcgacatgttcatgctggtcgtgatcctgccgttcctgttcgtcctggccccggcgctggcctggatggtgctggcggccgccggcgccatcgcactcgtcatcgttctgttcctgccggcggtcgggcgc

SEQ ID NO: 3180 - protein, 100 aa, Homo sapiens
VMSSRIDARLSLAMFNRLLSLPLEFFERSQAGITIGRVLAIYKVRDFLTGRLTATFLDMFMLVVILPFLFVLAPALAWMVLAAAGAIALVIVLFLPAVGR

SEQ ID NO: 3181 - DNA, 327 bp, Homo sapiens
ccggattccatcatcttattatttgaggataccaagaaagaccgtatagccgaatactctctgaaattgatggatatcgatgctgatttcttaaagattgaagaattacagtacgactccaccctgtcattgccatcttccgaattctctaaaattgttcgtgacttgtcccaattgagtgattctattaatatcatgatcaccaaagaaacaataaagtttgtagctgacggtgatatcggatcaggttcagtcataataaaaccattcgtggatatggaacatcctgaaacaagcatcaaacttgaaatggatcaacctgtcgac

SEQ ID NO: 3182 - protein, 109 aa, Homo sapiens
PDSIILLFEDTKKDRIAEYSLKLMDIDADFLKIEELQYDSTLSLPSSEFSKIVRDLSQLSDSINIMITKETIKFVADGDIGSGSVIIKPFVDMEHPETSIKLEMDQPVD

SEQ ID NO: 3183 - DNA, 232 bp, Homo sapiens
gtcgacgtccaccagttgccgcagtggattcgccagcgcctgtcccaggccggcctgtccgccagccccgaagccctggagctgatcgccgcgcgcgtggaaggcaacctgctcgccgccgcacaggaaatcgaaaagctcaagctgctcgccgagggcaaccagatcgacgccgccaccgtacaggccgcggtcgccgacagcgcacgcttcgatgtcttcggcctgatca

SEQ ID NO: 3184 - protein, 77 aa, Homo sapiens
VDVHQLPQWIRQRLSQAGLSASPEALELIAARVEGNLLAAAQEIEKLKLLAEGNQIDAATVQAAVADSARFDVFGLI

SEQ ID NO: 3185 - DNA, 318 bp, Homo sapiens
gaattcgaacataatttcattggtgaagaatcgttaccattggataaacaagtaattttctcatatgtagtcgaacagcccgatggaaaaattacagacttcttctcattttactcattgccattcacaatcctaaataacacaaaatataaggacctaggcatcgggtacttgtattattatgccaccgatgcagatttccaattcaaagacaggtttgatccaaaagctactaaggctttgaaaacaagattgtgtgaattgatttatgacgcttgtattttggccaaaaacgctaatatggatgtttttaacgcg

SEQ ID NO: 3186 - protein, 106 aa, Homo sapiens
EFEHNFIGEESLPLDKQVIFSYVVEQPDGKITDFFSFYSLPFTILNNTKYKDLGIGYLYYYATDADFQFKDRFDPKATKALKTRLCELIYDACILAKNANMDVFNA

SEQ ID NO: 3187 - DNA, 332 bp, Homo sapiens
  misc_feature (332)..(332): Wherein n may be a, c, g or t
acgcgtccagatggtaacgacttcagccagcctgaagggaagccacatcctttcctaagttggcagttcctgtcagaggcgtggacaagaaagtggcttcgtttctttccagcttgataaagccgacataaataggagcacttcatttctgaattacacaccattactcttatcacatactaaactgtttgacttcagttaatggttgggacataatgaaatgtaaagtgcttgttacaaggaaaattgccaggtccagatgctgagcagcgaagggtgggggaggaggcatcgggtttcgttctgggcctggtgctttccagaaagccagn

SEQ ID NO: 3188 - protein, 54 aa, Homo sapiens
MVCNSEMKCSYLCRLYQAGKKRSHFLVHASDRNCQLRKGCGFPSGWLKSLPSGR

SEQ ID NO: 3189 - DNA, 324 bp, Homo sapiens
gccggcgtcatgcaaacgatcaaggtggcgcaatttcgcctctgccatagtcgaaaaatgtttgtggtggcctacccgcgagagacccaggagatggtgctcgatgcgcataaccgcgcctttgcgttctttggcggcgtaccgcagcgggttatctacgacaaccttaaaaccgcagtggatgcgatcttggtcggcaaggatcgaatcttcaaccggcgcttcctggcgttggctaatcattacctgtttgaacctgtagcctgtacgcctgctgctggctgggagaagggccaagttgagaatcaagttcgcaacatacgc

SEQ ID NO: 3190 - protein, 108 aa, Homo sapiens
AGVMQTIKVAQFRLCHSRKMFVVAYPRETQEMVLDAHNRAFAFFGGVPQRVIYDNLKTAVDAILVGKDRIFNRRFLALANHYLFEPVACTPAAGWEKGQVENQVRNIR

SEQ ID NO: 3191 - DNA, 276 bp, Homo sapiens
catgatcgaagagacatttttggcaatgagattcgagacgggctggtgaaactgagtcagcggatcctgggaccatgcaccatagtccagggtgctctgaagagcatccttcagcgaacccctcaggagttctatcacgacacgttaagcttcctcaagtccaatgcggacctctgctatggggcactggctgccatccctggactccagccggtccgcccctctggagccatgtaccttatggtgggaattgagatggagcatttcccggaattc

SEQ ID NO: 3192 - protein, 92 aa, Homo sapiens
HDRRDIFGNEIRDGLVKLSQRILGPCTIVQGALKSILQRTPQEFYHDTLSFLKSNADLCYGALAAIPGLQPVRPSGAMYLMVGIEMEHFPEF

SEQ ID NO: 3193 - DNA, 321 bp, Homo sapiens
  misc_feature (1)..(1): Wherein n may be a, c, g or t
  misc_feature (8)..(8): Wherein n may be a, c, g or t
nagatctntgcaataaggagctgattgcactggaggaagaaagaggtaaaggcgttgaggcagtggaagaagttacacccacggcacctagaaagttcacagcaaagaaactggcagaggcatttgctgctatcagcagtggcctacacgttagaagaaatggacgtcaattacgagagattcgccacagttgacaggcagatacaggatgctcttgcttgctacagagaaatatgtagtgaaaagaagaaacaagctgtacggtcaaaacttggtatcttcctgaagaacaacactatgcttgctaaaccatcaactagt

SEQ ID NO: 3194 - protein, 99 aa, Homo sapiens
LHWRKKEVKALRQWKKLHPRHLESSQQRNWQRHLLLSAVAYTLEEMDVNYERFATVDRQIQDALACYREICSEKKKQAVRSKLGIFLKNNTMLAKPSTS

SEQ ID NO: 3195 - DNA, 430 bp, Homo sapiens
atattacctgccgggcggccaaagtcttcttcttcgctcgcatcgtcgctggaagccgccgttgccgcccataataaatatcaatacacgctcgatttctgtttaccaatactcacgtggctgctcttctttaggggtattccaacgttagtgtcatactacatcaacttcatccgctacgacctgaacatcgagttggacccgatgactttcaatctcacgaaattcttgatttctttggcaatcttcaaaacttgtaataataaaaacatagatttccattcttttcgatgtgttaaccaactatggacacaactctgtacagtgaaccgttcccttggtatggtacctctagtattctccatggttagttgtctcctcactctatacgtattatagtatattttcttacatacgtatacacacgcgt

SEQ ID NO: 3196 - protein, 132 aa, Homo sapiens
ILPAGRPKSSSSLASSLEAAVAAHNKYQYTLDFCLPILTWLLFFRGIPTLVSYYINFIRYDLNIELDPMTFNLTKFLISLAIFKTCNNKNIDFHSFRCVNQLWTQLCTVNRSLGMVPLVFSMVSCLLTLYVL

SEQ ID NO: 3197 - DNA, 204 bp, Homo sapiens
gcgttcctggcccgggaaatgggcgtggaactggtggagggggccgacctgttcgtgcgtgacgacaaggtcttcatgcgtaccaccgccggcccgaaacaggtggatgtgatttatcgccgcctcgacgacgccttcctcgatccgctggccttcaaccccgattcgatgctcggtgtgcccggcctgctgtcgtctctccgg

SEQ ID NO: 3198 - protein, 68 aa, Homo sapiens
AFLAREMGVELVEGADLFVRDDKVFMRTTAGPKQVDVIYRRLDDAFLDPLAFNPDSMLGVPGLLSSLR

SEQ ID NO: 3199 - DNA, 403 bp, Homo sapiens
gtgcacacctataataccagcactcggaaggcagaggcatttagattttggtgaattcaagggtcctcagacagagcaatatctggagcattagacgaataaaaagttaacttaaacacacacacagtaacgagtgtaaataaaaggagagcggggaaagagaccttgtgagccaccggagaatctagattttttttaaattttttatgcgggatgagaagctacagaagagctttttgcttaaagaaagaccgcaagtgctatttaaaaaaaaaaaaatcccagcagccaatataaaaaagatgtgctggttagccacgggcgttaaccgaccctgggactggaatactgaactaggaaaggtgattttctaagaggtacatgacgctgaaaagtcgaatcc

SEQ ID NO: 3200 - protein, 55 aa, Homo sapiens
MRDEKLQKSFLLKERPQVLFKKKKIPAANIKKMCWLATGVNRPWDWNTELGKVIF

SEQ ID NO: 3201 - DNA, 324 bp, Homo sapiens
gctagccagctgtggagcaccttaatgccttctagaacagatgccaaaatatccccaggaagggtcaaaatatggtaccacttagcccagttatccacacacaacctcttcaataactagcaaaatctaaaccatttccactctactagaggagatggcccctttgggcagaaatggctacaaagaatagtgctctcatgggttgatgcttgtcccacccttccaccacagccccaccctccagggagccatccaacaccagaaggggacatctcctgtgaaggcagcctgaggccattgggagtatgaaactcagtaacgcgt

SEQ ID NO: 3202 - protein, 51 aa, Homo sapiens
MSPSGVGWLPGGWGCGGRVGQASTHESTILCSHFCPKGPSPLVEWKWFRFC

SEQ ID NO: 3203 - DNA, 444 bp, Homo sapiens
  misc_feature (1)..(1): Wherein n may be a, c, g or t
ntggccatgaccttcgagaaatgcatcattgaagccgtgagctcagcctgccagtctcagaccagtatccttcaggggttctcttactctgatttgcggaaatttggcatcgtcttgtctgctgtgatcactaagtcctggcctaggaccgcggacaacttcgatgacattttaaagcatctgctcacgttggcagatgtcaagcacgtcttcagattgtgtggaaccgacgagaaaatactagcaaatgtcacagaggatgccaagaggctgatagctgttgccgactctgtgttgacgaaagttgttggtgacctcctaagtgacacgattttagttggacaactggagctgattataaagcacaagaatcagtttcttgacatctggcaactgagggaaaaaagtctttcaccccaggatgaaaaatgtgctgtggaggaa

SEQ ID NO: 3204 - protein, 148 aa, Homo sapiens
  misc_feature (1)..(1): Wherein Xaa may be any naturally occuring amino acid
XAMTFEKCIIEAVSSACQSQTSILQGFSYSDLRKFGIVLSAVITKSWPRTADNFDDILKHLLTLADVKHVFRLCGTDEKILANVTEDAKRLIAVADSVLTKVVGDLLSDTILVGQLELIIKHKNQFLDIWQLREKSLSPQDEKCAVEE

SEQ ID NO: 3205 - DNA, 441 bp, Homo sapiens
cgatcttggaaaaaatgggatgagagaaaggtcaagtaaaaattacaatgataattaaattatatttgcacttaaaaacaaactagaaagaataattttcataaataggtctgaattgtcattggcaaaaatctgtttcgttaagattcaaattcaacaaaataatttttaaaatgtcagtggaccaaaacgtctgaggaaatactttttgcgcttgtgatgtagttctgacatttagcacaaagcgagacaagaaacgagactgatttccacagtgcatgggaggaattttcttgaggaacacacatagaagtacatgtgaatgcaattaacctcagtttttaaatatcctattatattgtgttagatagagccttgctcttcacaacttgaagtgtttgtaggcaattaaaattccaaggaataaaatcataccttaat

SEQ ID NO: 3206 - protein, 53 aa, Homo sapiens
MHCGNQSRFLSRFVLNVRTTSQAQKVFPQTFWSTDILKIILLNLNLNETDFCQ

SEQ ID NO: 3207 - DNA, 258 bp, Homo sapiens
attcccattactaacaagaccttatcccaattgaagcgctttgagagaagtccaggaaggcccagttcttctcagggcgagataaaacgtaaaaagtctaggctatatgccgcagacggaagaccacattctccgctaagagcaaggtctgctaccccaacgctacaggaccaaaaactgttcaatggcgtggattccacttcccttttgaatgaaaggctacagcattatacgctggattatgttactgacagggcc

SEQ ID NO: 3208 - protein, 86 aa, Homo sapiens
IPITNKTLSQLKRFERSPGRPSSSQGEIKRKKSRLYAADGRPHSPLRARSATPTLQDQKLFNGVDSTSLLNERLQHYTLDYVTDRA

SEQ ID NO: 3209 - DNA, 400 bp, Homo sapiens
  misc_feature (299)..(299): Wherein n may be a, c, g or t
tcatgaagatagagagtagcagaatggttccagaagactgggaagggtagtggagagtggctagggggcaatggttaactggtgaaaaatataattagaataaatcagaaatatttttaaattgttgagtttattgctaggcaaagggtaaaatacagtacaaaaaaaaggttagctgttaggtaggtaaagtgttcgagaattaaaagatatttcaaggttcctttaacaaaaacagtagaaacaatatacatattatctgtgatataaaagaaggtgttgaatctgtttggatgccncagtaccatttctatagaaatctaatttctaagatagaaacaatagcatgaggcaaattatttgtagatttactatctgcccttcagaagacgtctggcca

SEQ ID NO: 3210 - protein, 63 aa, Homo sapiens
  misc_feature (4)..(4): Wherein Xaa may be any naturally occuring amino acid
MVLXHPNRFNTFFYITDNMYIVSTVFVKGTLKYLLILEHFTYLTANLFFVLYFTLCLAINSTI

SEQ ID NO: 3211 - DNA, 301 bp, Homo sapiens
  misc_feature (1)..(1): Wherein n may be a, c, g or t
  misc_feature (2)..(2): Wherein n may be a, c, g or t
nnacgcgttggcttaatggcggttgcagccaatgcgattttaaacattatctttatcggtatttttaaattgattgattggcaagctgagcatatggccttagccattgcttcttcaggctcagctttggtcaatgcagggatgttatatttttatttacataagaaaaatattttccgttttggtgcgcactggaaaaaattatttgttcaatttaccatagccaatattgtgatgattggcgcgctatggtttgctttaacttggtatgatggcacagcctcacaatggcttcgaattc

SEQ ID NO: 3212 - protein, 100 aa, Homo sapiens
  misc_feature (1)..(1): Wherein Xaa may be any naturally occuring amino acid
XRVGLMAVAANAILNIIFIGIFKLIDWQAEHMALAIASSGSALVNAGMLYFYLHKKNIFRFGAHWKKLFVQFTIANIVMIGALWFALTWYDGTASQWLRI

SEQ ID NO: 3213 - DNA, 426 bp, Homo sapiens
tctagacagtatggaaagatgtccttccactctatacagtagcctgagactcctcatttcccccactggctccccatccatgttctcttccagcctcctgcctaacgccatcttccacagtgagtttggggacccgtgagtattctgcatcaccaagccgccaggtgccagcacaaactcattcaagccgggccttttttgttcttggagtcaggattgatttctcagaaacctttaaaagtttgtaagactaaattatcaatctttgatttctttattagagagaaagccaggaagatcaaaatcattggaaatccctaaatctcagtttaaccagtagcttccttggcaggactacagaacccatttaaagatccccaatttaaagcaatgatgacatagcttgattttttccctctgaaaata

SEQ ID NO: 3214 - protein, 50 aa, Homo sapiens [sequence omitted]

SEQ ID NO: 3215 - DNA, 278 bp, Homo sapiens
gggcccctgtcttgcagctccctgagtaaagttttgcgcctggcactcctctggcatagtaacctctgacaaacccttgggtaatagaggagtagcaaaacccatgggtaatggaggagtagcaggaatattatgattagctaacaaattcacaaagtacatagaaatttttttctcgaataaccactatagctgaggaatatagattagtgacaaaattgtgcactcaaccaactctattaaaagtattttattattcccgtgaaaaaactcctagg

SEQ ID NO: 3216 - protein, 54 aa, Homo sapiens
MYFVNLLANHNIPATPPLPMGFATPLLPKGLSEVTMPEECQAQNFTQGAARQGP

SEQ ID NO: 3217 - DNA, 326 bp, Homo sapiens
  misc_feature (326)..(326): Wherein n may be a, c, g or t
cccggggtgttctgacatgcagaggtctgggaaagaaggagcaaaggaattggaggagtgacccctgaggtaggcacaggcagcgagtgtggtctgtcctacaagcaagttgcttgtagagtctggggaaaagcttaggccaacttccatgttcaaagcagagcgaactaaaactgacggggcgtccagcccttcgaggagggatcttgcagtgtttcaagtgccacatcccttgaatcttgccctaagccttccccagaaggaaccgggatcttttaccaaggtgactctgtactggtgaaatggaaatagcccaggccttctan

SEQ ID NO: 3218 - protein, 76 aa, Homo sapiens
MWHLKHCKIPPRRAGRPVSFSSLCFEHGSWPKLFPRLYKQLACRTDHTRCLCLPQGSLLQFLCSFFPRPLHVRTPR

SEQ ID NO: 3219 - DNA, 681 bp, Homo sapiens
  misc_feature (1)..(1): Wherein n may be a, c, g or t
  misc_feature (2)..(2): Wherein n may be a, c, g or t
  misc_feature (442)..(442): Wherein n may be a, c, g or t
nntgatcacatcgggggcaccctggaaactttcttgaagcttgctctccagcccgacgcccaccttgaccaagtaggaggctgggtctacggcgcaggcccagtagctgcggccctgggtcacagccacgtcgcccaggaccacatccacactcaggtggcagccggtcagcagccggtcagcagccagcagcaggggcagccctggaacactccgtactgctcgctggtccttgctgatagccagccgctctcggcttgcgccccagcggctatcgaggaagaagtgcaggactggaaggagggagagggttgagatggagcaagaacttcagggacaaacactggcactgggggctgtgagactgcagaacagggaacgcgttgcaagggggttcagtcaccaggaacaggcagggggttcaggagaacaggacatgggnaaactggaatggggggcatgaggaaaaaagaagggggcattccaaatgggcgtgggaccccagagagtttttgtgatggcagtgggcacagaagtcagtgctccggacctggctgactcatggggctccctcgaaccccttacttgtggccagccccatggacagttcccactattctgttccacctggggacattcccatcaccatcaatctgtgccttccagcgccatacctctatg

SEQ ID NO: 3220 - protein, 80 aa, Homo sapiens
  misc_feature (43)..(43): Wherein Xaa may be any naturally occuring amino acid
DGARTSGTNTGTGGCETAEQGTRCKGVQSPGTGRGFRRTGHGXTGMGGMRKKEGGIPNGRGTPESFCDGSGHRSQCSGPG

SEQ ID NO: 3221 - DNA, 356 bp, Homo sapiens
acgcgtcacgggctgaaggccacctttatgtcgaagccgagtaacgacccgcacgacgcggcgagcggcttccacctccaccaatcgctggtcactgccgactcgacgccggtcttcgctgatggcgtgggtgccaccccgttggccaaggcgtacatgggcggccagctccgtcacgcgaacgcgctgacgcttttcgcggcgagcacgatcacctcctacaagcggttcctgccgggcacgtgggccccgatccgcgccgcgtggggctacgacaaccgcttcgcgatggtccgcttccagggtctcagcgcgtcgggtcgcgtggagaatcgtctcggcgcatccgacgccaa

SEQ ID NO: 3222 - protein, 118 aa, Homo sapiens
TRHGLKATFMSKPSNDPHDAASGFHLHQSLVTADSTPVFADGVGATPLAKAYMGGQLRHANALTLFAASTITSYKRFLPGTWAPIRAAWGYDNRFAMVRFQGLSASGRVENRLGASDA

SEQ ID NO: 3223 - DNA, 291 bp, Homo sapiens
  misc_feature (1)..(1): Wherein n may be a, c, g or t
  misc_feature (2)..(2): Wherein n may be a, c, g or t
nncccagcccagccgccgccactgttgaggagctcacatcgcctcgacacaacacggtctctggtttcaacgtataataactgggctgcgagcactatatggatgatggcttcacgaggcaccagtgccgtgctttcaagggctgctcggatgaggcaaaaactgcagtctgccttggaggccagtgccctagatattgaagacgtttcttaccaacatgccgggcatgcagccgtcaaggacaatgcgaacgagacgcacttcaacatcaaggttgtttcaccaaaattt

SEQ ID NO: 3224 - protein, 97 aa, Homo sapiens
  misc_feature (1)..(1): Wherein Xaa may be any naturally occuring amino acid
XPAQPPPLLRSSHRLDTTRSLVSTYNNWAASTIWMMASRGTSAVLSRAARMRQKLQSALEASALDIEDVSYQHAGHAAVKDNANETHFNIKVVSPKF

SEQ ID NO: 3225 - DNA, 394 bp, Homo sapiens
  misc_feature (1)..(1): Wherein n may be a, c, g or t
  misc_feature (2)..(2): Wherein n may be a, c, g or t
  misc_feature (3)..(3): Wherein n may be a, c, g or t
  misc_feature (40)..(40): Wherein n may be a, c, g or t
  misc_feature (41)..(41): Wherein n may be a, c, g or t
nnngccgccgccctcggccgcagcgcgcttcttttgcgcnncgacgtcagccagaaggcggacgtcgacgccatgctgaaggaaacgctggcccagttcggccacatcgatatcctcgtcaacaatgcgggcgtcacgcatgcggccgatttcctcgacgtgtgcgaagacgatttcgaccgggtcatgcgcattaacctgaaatcgatgttcctgtgcggccaggccgcggcgcgcgagatggtcaagcgcaacagcggctgcatcatcaacatgtccagcgtgaatgcggaactggccattccgaaccaggtgccgtacgtggtgtcgaaaggcgccatcaaccagctgaccaaggtcatggccttgaacctggcgccgcacggtgcgcgct

SEQ ID NO: 3226 - protein, 131 aa, Homo sapiens
  misc_feature (1)..(1): Wherein Xaa may be any naturally occuring amino acid
  misc_feature (14)..(14): Wherein Xaa may be any naturally occuring amino acid
XAAALGRSALLLRXDVSQKADVDAMLKETLAQFGHIDILVNNAGVTHAADFLDVCEDDFDRVMRINLKSMFLCGQAAAREMVKRNSGCIINMSSVNAELAIPNQVPYVVSKGAINQLTKVMALNLAPHGAR

SEQ ID NO: 3227 - DNA, 432 bp, Homo sapiens
attttggatgcaaaacggagcatgaacattgggatatttcttaagcaatttaagaagtctcctcggtccattgtagaagatattcatcaaggaaaaagtagcattatggatcagagaccttgcgagattttttttaagtttttgccagagtcagaagaggtaaagaagttaaaagcgtttagtggcgacgtgtcgaagctgtctctggcagattcctttctgtatggcttaattcaggtgccaaactattcacttcggattgaagccatggtgctaaagaaggaatttctaccttcttgctcttctctatatacagatataacagttttaagaactgctataaaagaactgatgtcatgtgaagagctacattcaatattacacttggtgctccaggctgggaatatcatgaatgcaggagggtatgccggc

SEQ ID NO: 3228 - protein, 144 aa, Homo sapiens
ILDAKRSMNIGIFLKQFKKSPRSIVEDIHQGKSSIMDQRPCEIFFKFLPESEEVKKLKAFSGDVSKLSLADSFLYGLIQVPNYSLRIEAMVLKKEFLPSCSSLYTDITVLRTAIKELMSCEELHSILHLVLQAGNIMNAGGYAG

SEQ ID NO: 3229 - DNA, 248 bp, Homo sapiens
  misc_feature (1)..(1): Wherein n may be a, c, g or t
  misc_feature (2)..(2): Wherein n may be a, c, g or t
  misc_feature (3)..(3): Wherein n may be a, c, g or t
nnngcctggctcgcagctgttcaggctcttggctaccaggttgcaccgcatatcgtcgactgcgccgaccttggcgttccccagcatcgtattcgcctgtttctggtgctgacccgcagcagggcgccactgatgctccaaatacaacggcatgagcatgtgccagccaccagcttccttgatttcaattctggaaaatggtcgctcatagataagccaggacgcgccacggcaactcttgcacgcgt

SEQ ID NO: 3230 - protein, 82 aa, Homo sapiens
  misc_feature (1)..(1): Wherein Xaa may be any naturally occuring amino acid
XAWLAAVQALGYQVAPHIVDCADLGVPQHRIRLFLVLTRSRAPLMLQIQRHEHVPATSFLDFNSGKWSLIDKPGRATATLAR

SEQ ID NO: 3231 - DNA, 609 bp, Homo sapiens
tcgtcaacggaaacttcggccttcgggcctacccataatccttgggaccttgaacgggtaccgggtggttccggtggtggttcagcagctagcttggcttcctttcaggccccgttggctttgggcactgataccgggggctcgatccgccaacctggagcggtgaccggcaccgtcgggatcaagccgacctacggttcgacctcccgatacggcgttatcgctatggcttcatctttggatactcctgggccctgcgcccgtaccgtccttgacgccgcgttgctccatcaggccattgccggtcacgacgctatggaccagaccacgattaatcagcccaccccggcggtcgttgaggctgcgcggcaggcagacgtttccggggtgcgcattggcgttgtcacggagttgagcgggcagggttacgaccctcaggtcgaggcccggttccacgaggctgtcgagatgctaatagaggcgggggctgaggtcgttgaggtctcttgcccgaactttgacctcgccttacctgcttattaccttattcagcctgccgaggtgtctagcaacctggctcgttacgacgccatgcgttacggcttacgc

SEQ ID NO: 3232 - protein, 203 aa, Homo sapiens
SSTETSAFGPTHNPWDLERVPGGSGGGSAASLASFQAPLALGTDTGGSIRQPGAVTGTVGIKPTYGSTSRYGVIAMASSLDTPGPCARTVLDAALLHQAIAGHDAMDQTTINQPTPAVVEAARQADVSGVRIGVVTELSGQGYDPQVEARFHEAVEMLIEAGAEVVEVSCPNFDLALPAYYLIQPAEVSSNLARYDAMRYGLR

SEQ ID NO: 3233 - DNA, 300 bp, Homo sapiens
  misc_feature (1)..(1): Wherein n may be a, c, g or t
nacgcgtgggtgcgcatcccggtcaccgcggtcgtcgaggtgctgcgcgccatcccggtgctcgtcttcatgctgctgctctactacgggctccccgtgctcgggctgcggctgccgagttacggagcggtggtgatcgcgttgatcgcctacaacggctccgtgctctccgaggtgatccgcgcgggtgtcgaggcgctgccgcgcggtcagaacgaggcgggatacgccatcgggctgcgcaaggctggggtgctccgcctgatcctgctgccccaggcgctgcgcgcgatgctgccg

SEQ ID NO: 3234 - protein, 100 aa, Homo sapiens
  misc_feature (1)..(1): Wherein Xaa may be any naturally occuring amino acid
XAWVRIPVTAVVEVLRAIPVLVFMLLLYYGLPVLGLRLPSYGAVVIALIAYNGSVLSEVIRAGVEALPRGQNEAGYAIGLRKAGVLRLILLPQALRAMLP

SEQ ID NO: 3235 - DNA, 271 bp, Homo sapiens
acgcgttgtggataggtaaaacaacaacatcctctttcgcacgcgagcgtgctggttttgggtacagttatcactaccaccaccgatgccgatggcctttttatgctgcgaaatctgcctgtgggaaaggtgattgtggaagtgcgctcggctggttatagggctttcaaacacgaagtgacaacgcaaaaaaatattacccatgagctgaatgtgatgctcaaacccgacgaaattgcgctcgacgaggttgttgtgtcggccaatcgtt

SEQ ID NO: 3236 - protein, 68 aa, Homo sapiens
MGNIFLRCHFVFESPITSRAHFHNHLSHRQISQHKKAIGIGGGSDNCTQNQHARVRKRMLLFYLSTTR

SEQ ID NO: 3237 - DNA, 340 bp, Homo sapiens
gctagcagttgcccgctgggggatcggggttaaagcacacaccgtcattgactcccgcggtgttccggtacgtatcgtcgcggtccccttcatctcagatggcgtccactacgctctcgtcacaggccaggacctcaccgggaccagggccaccctagggtcgctatggatcgtcctcgtcggcaccggattcgtgggcatcgtgctcaccgccatcgctggatatgtggcaggcaactctgcgaccagccctttgcgcgacctctcgcgagctgttcatcacggtcccaccaccgaagatctgacgcccatccaggtccctctcatgattagctttggg

SEQ ID NO: 3238 - protein, 55 aa, Homo sapiens
MDRPRRHRIRGHRAHRHRWICGRQLCDQPFARPLASCSSRSHHRRSDAHPGPSHD

SEQ ID NO: 3239 - DNA, 286 bp, Homo sapiens
aagcttcttgaagagatcatgttcttccaatgtccctatatttatgtgctatatttcatccctccaggccccctgacacactaagaacccacaccccactactgccgtttctgcccgaggaatgcaagagatgttctgcatatagtttcttcattggtgactgtcaatcaaagccagtgttcctcagcttacatttcatgcccagccctaggctggacactggataagacacagaataatataagcataagatgccatctaaattctcccttcagggatgtgtaca

SEQ ID NO: 3240 - protein, 65 aa, Homo sapiens
MSLYLCAIFHPSRPPDTLRTHTPLLPFLPEECKRCSAYSFFIGDCQSKPVFLSLHFMPSPRLDTG

SEQ ID NO: 3241 - DNA, 472 bp, Homo sapiens
  misc_feature (252)..(252): Wherein n may be a, c, g or t
  misc_feature (320)..(320): Wherein n may be a, c, g or t
aaatttaaaaataggcaaacttgtaaacagaacatgaagggcctcagatgctgggatgcggggtacgtgctagttttttctgtgggtaactaaggatttcctgttgttgttaagctgggaatgacagagaaacgacaggtgttctcactgcctcgttcaatgtaacatccatcagacaggtatgtgtttcttctctgggcctcggtccttctctctgtagagggggctggtctgaggcaccctctgtctctnaacttctgcataattgtgttaatcacttattttcactttcagtgtacgtttactgttacagagctcanaatgatgaccaagaaagttaaagttttcagccttcaagataaaaaattggtatatttaatagtactttgtcttatcaggttctgaaccttttcataagaaaataatgtcaagtttcttatatatttttaactgacgcatgaattcgagtcgg

SEQ ID NO: 3242 - protein, 57 aa, Homo sapiens
  misc_feature (4)..(4): Wherein Xaa may be any naturally occuring amino acid
MQKXRDRGCLRPAPSTERRTEAQRRNTYLSDGCYIERGSENTCRFSVIPSLTTTGNP

SEQ ID NO: 3243 - DNA, 262 bp, Homo sapiens
gaattccacaatgaagaagtttcctgatccttttgtgttctcctcctcctgaaacaaatctggagaggctgaatgtctcacagtagttctttaatacccatctaactgcaatggaaaccaacaaaagttcaaatgtaacagcattaccagctgaaagcagtgatacagcattaccttttacaaagcacttcgatttggaaggtgttctcatacacttcattttgtttgctctacccaagtctgaggatggaaggacaagctt

SEQ ID NO: 3244 - protein, 73 aa, Homo sapiens [sequence omitted]

SEQ ID NO: 3245 - DNA, 373 bp, Homo sapiens
cttaaggctaagcttagccgcgtcgttccgttcgtgcttgaacagtcaagctttccgcctgacgttaagtttgtcctcaaaagtccggcacggggccgttcgctgcccgctgtcggccgataccgtttgatgatacccctacgtcgtcttcgagacttcacttgagacgggctggggaaaatcatgaagatcggcggggttctatttgcagcggtaatcctggcagggtctgcctctgcggcaagcgctcagaccatgagctatgcgcaggccggcgcgctcctggcacgcagctgtggcgcggacatcaacaagttctgctccaacgtgaatctgggcgagggcaaggctgctgcctgcatgacgggaagat

SEQ ID NO: 3246 - protein, 63 aa, Homo sapiens
MKIGGVLFAAVILAGSASAASAQTMSYAQAGALLARSCGADINKFCSNVNLGEGKAAACMTGR

SEQ ID NO: 3247 - DNA, 389 bp, Homo sapiens
accggtgccggagccgatctccacgatggtcttggcgccggtgcggccgaaccactcatcgacatcgataagctcatcgcttaagacgcggcccagctcgggccagcattgctcaaaaagctggtgctggttgtccgtgagcgtgccgcgggggaaagggacctttgcccaggcgcgggtagtccaggtcattatcaaagaccgcattgaagtccgtttgcggcgggcgacccggcggcatttctccggcagggggtgttttgagaattatccgtgctatacatcgcgccctatttttccctgtccaggcatggcaagcaatatgccgcgccgggtattttccccgccgtatggggagggggataaccggagcttgacggggtggtgtc

SEQ ID NO: 3248 - protein, 121 aa, Homo sapiens
MVLAPVRPNHSSTSISSSLKTRPSSGQHCSKSWCWLSVSVPRGKGTFAQARVVQVIIKDRIEVRLRRATRRHFSGRGCFENYPCYTSRPIFPCPGMASNMPRRVFSPPYGEGDNRSLTGWC

SEQ ID NO: 3249 - DNA, 328 bp, Homo sapiens
tgatcaaggctggtgtctcagaggagatattgtttgggctgagattccatgtttgggaaggagccagctatggcagaaaaaacagtgaatgccaagaccgggagccaggaacaagtctggcctgttagaggaaatgaaggaaggcttgtgtggctggcaatagggaggagtccttttggggaagaggctgaagggatgcagaggccagtgcagtcagtcatgtagggtcataagactgagtttgcactggttgagccatgaaaaacacacctttgaccactccccccttatcatcctaatttgcacaactgcttgttttgtgttgagt

SEQ ID NO: 3250 - protein, 67 aa, Homo sapiens [sequence omitted]

SEQ ID NO: 3251 - DNA, 526 bp, Homo sapiens
  misc_feature (1)..(1): Wherein n may be a, c, g or t
ngtgcaggccatacacacacatgcatgcacacacacacttacgtgcctgtacatacacacacacctacccacacatgtgcacacatgggcatgtacccttatatatgcagcccccatatacccacccacgtacacacatggacatgtacccttatagatgcagctcatatatgcatgtgcacacacattcactcacacccacccacccacacacacacatgtgcacgcaccctcatatgtgcccctcctcccacacccagattcaaagtatgcccaagggcccccatggggtaggatcataagagatgtggaagtgtcactgctgctccccactcctgcccagaaggcacctcgaatggcagaacaggctttcttctgggcactggggtggtgatccaaggttggtgccctggggaggcagcctccccatacccaacaaagaaaccagcgttgggggatggttaagagctgggtaaaaacctgctctgccatggtgcccacctcatccctgctcctgctccccact

SEQ ID NO: 3252 - protein, 97 aa, Homo sapiens
  misc_feature (1)..(1): Wherein Xaa may be any naturally occuring amino acid
XAGHTHTCMHTHTYVPVHTHTPTHTCAHMGMYPYICSPHIPTHVHTWTCTLIDAAHICMCTHIHSHPPTHTHTCARTLICAPPPTPRFKVCPRAPMG

SEQ ID NO: 3253 - DNA, 175 bp, Homo sapiens
  misc_feature (175)..(175): Wherein n may be a, c, g or t
acgcgtgcatgtgtgtgggtgtgtgtatgtttggggtgtgtgtgtggagtgtgtgtatgtgtatgtttgggtgtgtgcgtgagagtgtgtgtatgtgtatggatgtgtgtatgggtgtgtgtgtgggtgtgtgtatatgtatgtttgggtgtgtgtggggcgtgtgtatagtgtn

SEQ ID NO: 3254 - protein, 56 aa, Homo sapiens
TRACVWVCVCLGCVCGVCVCVCLGVCVRVCVCVWMCVWVCVWVCVYVCLGVCGACV

SEQ ID NO: 3255 - DNA, 522 bp, Homo sapiens
  misc_feature (1)..(1): Wherein n may be a, c, g or t
  misc_feature (2)..(2): Wherein n may be a, c, g or t
nntcatgaaggcagcagaagagaggtacattgatttgaaagtgtgaggaaacagaataatagtgcctaaagcctaacccaagcaagtaagcagttcttccacgtcttatctattcagaggctgaaacaattgagtgaaaatttaaagggtaggtgtgggacattggtatgacatatgacgtctaggaaaaggtctccgcacgatttcatatttaaagaggaactgggccatggctcttactctactgtgtttaaagctctagataaaaaaagcccgaataaaatttatgccattaaagtttgttcgaagaaacacataatcaaagaagctaaggtaaaatatgtcaccattgaaaagaataccatgaatttgttggcacaaaagcatcacgcgggtataatcaaactatactatacttttcacgatgaggaaaatctttattttgttttggattttgccccaggtggagaactactttccttattgcacaaaatgggtactttcaatgatatatggacgcgt

SEQ ID NO: 3256 - protein, 116 aa, Homo sapiens
MTSRKRSPHDFIFKEELGHGSYSTVFKALDKKSPNKIYAIKVCSKKHIIKEAKVKYVTIEKNTMNLLAQKHHAGIIKLYYTFHDEENLYFVLDFAPGGELLSLLHKMGTFNDIWTR

SEQ ID NO: 3257 - DNA, 312 bp, Homo sapiens
gatcactgtaatactcatagtccgtttgaccctaaagttgcaccggttaaacaaagcaacttatgtttagaaattgcacttcctactaagccgctaaaccgtattgacgatccagaaggcgaaatcgccctttgtactttgtcagcatttaacttaggggcattagaaaacctagatgagctagaagagctatctgaattgatcgttcgcgcactagacgcattacttgactaccaaaactacccaattccagcagcacaacgtgccaccgaattgcgccgtactttaggtgtgggcgtcattaactacgcg

SEQ ID NO: 3258 - protein, 104 aa, Homo sapiens
DHCNTHSPFDPKVAPVKQSNLCLEIALPTKPLNRIDDPEGEIALCTLSAFNLGALENLDELEELSELIVRALDALLDYQNYPIPAAQRATELRRTLGVGVINYA

SEQ ID NO: 3259 - DNA, 180 bp, Homo sapiens
  misc_feature (1)..(1): Wherein n may be a, c, g or t
  misc_feature (2)..(2): Wherein n may be a, c, g or t
  misc_feature (3)..(3): Wherein n may be a, c, g or t
nnngccaaatacccaggattagaattgcagaagatgttggaccgagaaacagagagcacacacaacctggtgctgacagctgtagacgggggggacccgccccgaagtggcacagctcagcttcgaatccgagtgatggacgccaatgataaccctccagtgttcagccaagaagtgtac

SEQ ID NO: 3260 - protein, 60 aa, Homo sapiens
  misc_feature (1)..(1): Wherein Xaa may be any naturally occuring amino acid
XAKYPGLELQKMLDRETESTHNLVLTAVDGGDPPRSGTAQLRIRVMDANDNPPVFSQEVY

SEQ ID NO: 3261 - DNA, 265 bp, Homo sapiens
tgatcagctccatggctatgagcctcatgtataggttaggagaaagattcactccacccggaggaagtgggttttttggcatgcagcggctagtggtcccaagaatggtccattgtgcgcagcagcaatgtgctcagaggactgagaatgaacgtgccagccaatcaattgattgttttgtatacttaatgacagccaatcaatttgtctaatcgtcccttgtacttgccattgtaattgtccaggtaagtcagtttccatggag

SEQ ID NO: 3262 - protein, 70 aa, Homo sapiens [sequence omitted]

SEQ ID NO: 3263 - DNA, 429 bp, Homo sapiens
  misc_feature (1)..(1): Wherein n may be a, c, g or t
  misc_feature (2)..(2): Wherein n may be a, c, g or t
nngggagtcgtcaccttcgacactgaccttccgatagcggcacacgccgacgagattgctgacctcatcaagcaccaccaagtcgtggtggtggcaggcgagaccggttcgggaaagacgacccagctgcccaagatctgcctggccttgggacgtcgtcagattgcccatacccagccccgacggatcgccgcgcgcagcgtcgcagaacgagttgccgaggaaatgggggtcgagctgggggaacaggtcggctatcaagtgcgcttcacccggcgcgcttcctccgataccgcactgactgtcatgactgacggagtactgcttgctgagatttcccacgatcgcgacttgtgcgcccatgacaccatcattattgacgaggctcacgagcgcagcctcaatatcgacttcttgctgggttacctg

SEQ ID NO: 3264 - protein, 143 aa, Homo sapiens
  misc_feature (1)..(1): Wherein Xaa may be any naturally occuring amino acid
XGVVTFDTDLPIAAHADEIADLIKHHQVVVVAGETGSGKTTQLPKICLALGRRQIAHTQPRRIAARSVAERVAEEMGVELGEQVGYQVRFTRRASSDTALTVMTDGVLLAEISHDRDLCAHDTIIIDEAHERSLNIDFLLGYL

SEQ ID NO: 3265 - DNA, 219 bp, Homo sapiens
  misc_feature (1)..(1): Wherein n may be a, c, g or t
nacgcgtatctcgagaatacagatgctaagattcgcggagaagctttagttaaggataataaagtggaactgaaggtagtcggtcaggccgctcacggctctaaaccgcaaagtggtgtgaatgctgcgacctacttagcagatttcttaacatctgtagatttagcgggtggtgcgaagacattcgttcatgtagcgaagacgtacttgcatgaggat

SEQ ID NO: 3266 - protein, 73 aa, Homo sapiens
  misc_feature (1)..(1): Wherein Xaa may be any naturally occuring amino acid
XAYLENTDAKIRGEALVKDNKVELKVVGQAAHGSKPQSGVNAATYLADFLTSVDLAGGAKTFVHVAKTYLHED

SEQ ID NO: 3267 - DNA, 369 bp, Homo sapiens
acgcgtgaagggcactctctgtacttgtgtacctgtgtactcgtttgttcccctccccacagactggcagcctcatgcaggcgggggactatgtctgtcttggtcatgctctgccccaggcctgccccaagcagatcctccagatgaggctgttaaatgaatgaagtgataactgtgtggcggagacgcatgcaagggcagtcatgcccctgccccggagctctggtgcaaccctcaccgcctgtggccactgctccgggacaaccccaagtatgaacagcttggaatgggaagggctctcaactgcattgggaggttgctgccaaggttttaaattagattgggactttggaaaccaattctgcgtgg

SEQ ID NO: 3268 - protein, 55 aa, Homo sapiens [sequence omitted]

SEQ ID NO: 3269 - DNA, 486 bp, Homo sapiens
tgatcacaatcttccagcccctttctctccacaattccctttaaaaccctagcccaaaacccctcagggaggcagatttgaggttcttcctgtctcttcatttggctgcccaatggattatgaaactctttctctgctgtaactcctgctgtttcagtgtattggtctgttactgcacactgagcaaatgagactggtggtcttgtaacatctccattgctcagcagtcaccattatgtaccctcaccacagcctgagccctcctaaccccagtcatggctagggggacagtagtcttttcagagtgtggagagaggttctgtaggacttcctagcagtcctggtaaagacttgtttccacaggccttgcacacattgttctctgggtctcatagctgacacatcctgctgagtcactcccactagctttggtttctggcccatccccctctttctttgcttttatctcagaggaagcactccgga

SEQ ID NO: 3270 - protein, 54 aa, Homo sapiens
MGQKPKLVGVTQQDVSAMRPREQCVQGLWKQVFTRTARKSYRTSLHTLKRLLSP

SEQ ID NO: 3271 - DNA, 237 bp, Homo sapiens
ccgttgaaggcgcgcggcttccgctacagctacgacatgctgggcgaagcggcgaccacggccgcggatgccgaccgctattatcgcgactacgaaaacgccgtgcgggcgatcggcgaggcgtcggccggccgcggtattttcgatgggcctggcatctcgatcaagctgtcggcgctccacccccgctatgtgcgtgcgcaggcggcgcgggtgatgggcgagctgctgccacgc

SEQ ID NO: 3272 - protein, 79 aa, Homo sapiens
PLKARGFRYSYDMLGEAATTAADADRYYRDYENAVRAIGEASAGRGIFDGPGISIKLSALHPRYVRAQAARVMGELLPR

SEQ ID NO: 3273 - DNA, 251 bp, Homo sapiens
  misc_feature (251)..(251): Wherein n may be a, c, g or t
ggtaccgcccgccggacggacgaatcccctgctgcgggccaggggaggtccccgagcggctcctcgccaaggaaagcaaggaatcttcaaagtcccttgccaacgatttggatcctggtgctgacaatgttgcctaagcctggggtctattactttccctgggaggtcagtgacggccatgtccccgaaggaagcacactgcgaacatttggcaggttgtatctctataacatggcacgctccctcatgtn

SEQ ID NO: 3274 - protein, 60 aa, Homo sapiens
MAVTDLPGKVIDPRLRQHCQHQDPNRWQGTLKIPCFPWRGAARGPPLARSRGFVRPAGGT

SEQ ID NO: 3275 - DNA, 192 bp, Homo sapiens
ctagaaggtcgctgtgctatggatctgggtctgaactaccatgggaatgtgagtgtcacccataccggcatcgagtgtcagctgtggcgaagccgctacccacacaggcctgacatcaactccaccacccatcctggggctgacctgaaggagaacttccgccgaaatccagacagcagtacctcagggccc

SEQ ID NO: 3276 - protein, 64 aa, Homo sapiens
LEGRCAMDLGLNYHGNVSVTHTGIECQLWRSRYPHRPDINSTTHPGADLKENFRRNPDSSTSGP

SEQ ID NO: 3277 - DNA, 549 bp, Homo sapiens
ctctctccgaccgcgttgacggtccagccggtccgcacgccgtcatcggaatcggcatcaacgtttcgatggggcgtgacgaattgcccctgccgacggcgacctctctggctctgtgtgggttgaaccacgacaagaatgagttgctggccagccttctcatccaccttgacgagctattaacagtgtggttggagaccggaacggtgcgggatcagtatgtggcccgctgtgacaccattggtactccggtccgtctgaccttcgacccagaaatcgtgggtggtggtgagggggccattgagggcatcggtgtcgacgttgacgttgatggcgctatcgtggtggaaacttctgacgggcgtcgcagtttcaacgctgctgacgttcatcatttgcgaaccaggtgagttccgctacggcgtcctgagcgttcccaccatctagactgctgactatgacgacccacattttggcccttggtggtggcggtttctcgatgtcgaaccgcggtgagcctaccgctctcgaccgtcacatccctgacct

SEQ ID NO: 3278 - protein, 113 aa, Homo sapiens
MGRDELPLPTATSLALCGLNHDKNELLASLLIHLDELLTVWLETGTVRDQYVARCDTIGTPVRLTFDPEIVGGGEGAIEGIGVDVDVDGAIVVETSDGRRSFNAADVHHLRTR

SEQ ID NO: 3279 - DNA, 447 bp, Homo sapiens
  misc_feature (220)..(220): Wherein n may be a, c, g or t
  misc_feature (268)..(268): Wherein n may be a, c, g or t
  misc_feature (269)..(269): Wherein n may be a, c, g or t
acgcgtcgcgtggacgaccaggcggaggagctcatgaccctgcgcgggctcatgcgcctgcgtacgggcgagcggccgccggtgcccgtctccgaggtggagcccgtcgagtcgatcgtgcgccgcttctccaccggcgcgatgtcctacggctccatctcgcaagaagcgcacgagaccctcgcgaacgccatgaaccgcctcggcgcccgctcgaatncgggcgagggcggcgaggacccccggaaggcgcctgctggacccgganngcgccgctcgaagatcaagcagatcgcctcgggccggttcggcgtcaccagcctgtacctggccaccgcgaccgacctgcagatcaagatggcccagggcgccaaacccggcgagggcggccagctgatggggaccaaggtgtacccgtgggtcgcccgcacgcggcactcgaccccg

SEQ ID NO: 3280 - protein, 149 aa, Homo sapiens
  misc_feature (74)..(74): Wherein Xaa may be any naturally occuring amino acid
  misc_feature (90)..(90): Wherein Xaa may be any naturally occuring amino acid
TRRVDDQAEELMTLRGLMRLRTGERPPVPVSEVEPVESIVRRFSTGAMSYGSISQEAHETLANAMNRLGARSNXGEGGEDPRKAPAGPGXRRSKIKQIASGRFGVTSLYLATATDLQIKMAQGAKPGEGGQLMGTKVYPWVARTRHSTP

SEQ ID NO: 3281 - DNA, 276 bp, Homo sapiens
aaattttaaaaaggattgaaactaatgattaaaataaaaaatattgaagatattcttcaaagcagtgaagtattatataacgaacctttaagaaattatagttttacaaaaacaggtggtaatgctgagattttagtgaaaataaataatgaaaaagatttacaaaatgtaatagcatacagtaatgaaaataatattgaattgactatactaggtaatggttcaaatgtattaatttcagataatggaatccaaggaatagtagcataaactagt

SEQ ID NO: 3282 - protein, 81 aa, Homo sapiens
MIKIKNIEDILQSSEVLYNEPLRNYSFTKTGGNAEILVKINNEKDLQNVIAYSNENNIELTILGNGSNVLISDNGIQGIVA

SEQ ID NO: 3283 - DNA, 284 bp, Homo sapiens
agatctgtactttgtgtctctgtgtcatggctgccctcaggagaggaaacatttcaaaagggtgggggtcatgtcaaatgctactgagaagtcaaaataaaatgagaactgaaaagtactttggatttagcatcacgcaggtcctggtgatccaccattttcagctaacaggatgtccaaaggcctctgcacaaagggcttggaatggttcacaacagattgtcaatcacttcccacccaaggacttcccagtcactgtcactccagagagcacaagttctaga

SEQ ID NO: 3284 - protein, 86 aa, Homo sapiens
MAALRRGNISKGWGSCQMLLRSQNKMRTEKYFGFSITQVLVIHHFQLTGCPKASAQRAWNGSQQIVNHFPPKDFPVTVTPESTSSR

SEQ ID NO: 3285 - DNA, 273 bp, Homo sapiens
cggttcctaggtttgtcgatctcggcgatcctgtcggacatgccgccgatggcccgcaaggaggcctataaggccgacgtcacctatggcacgaacaacgagtttggcttcgactacctgcgtgacaatatggccagttcgctcagcgagtgcgtgcagcgcggtcaccattacgcgattgttgacgaggttgactccattctcgttgacgaagctcgtaccccgctgatcatctctggacctgccgaggagaacaagcagtggtacccggaa

SEQ ID NO: 3286 - protein, 91 aa, Homo sapiens
RFLGLSISAILSDMPPMARKEAYKADVTYGTNNEFGFDYLRDNMASSLSECVQRGHHYAIVDEVDSILVDEARTPLIISGPAEENKQWYPE

SEQ ID NO: 3287 - DNA, 507 bp, Homo sapiens
tgtacacgtctgtatgattgggtaggatagacttcgcacagaatctcctggccaaggggggctgagccctggtggggctcacttagccaggaggacggagggccgttttccaatttgttttcttagaggaaataactttttataatccaaccctgtcaaagggggcgcttttcctaattcattaaaagtcttgcactaagttggtagtataaatattaataaagaccaagaggagtccttggatagctgtagtagaacattggtctagaaatacgtaggcgcaattttaagtccttcctgtgtcactaaccatgaatgtggtcttagcgtctcttagtctcatttcctcatttgcaaaattagttggattacctcacaatgttgctgtgagcattaaatgtggtaatatatttaaaagtgctttgcaagctcataaagcaccattcagtcttcatttagtgaacatacattgagcacttactatgtgccaggtactttgttaagctt

SEQ ID NO: 3288 - protein, 53 aa, Homo sapiens [sequence omitted]

SEQ ID NO: 3289 - DNA, 358 bp, Homo sapiens
  misc_feature (350)..(350): Wherein n may be a, c, g or t
gtgcactcttccccatcttagattatggcaggtccatttaatattgtctatgactctttgtctcttatctttcatccaacttttcagaaagtcttgccttttccttcaaaatatacccagaatccaaccacttatttctacacttattgcaaccaccccaacatttctaccactaggattattgtaatagctcacaaactggtttccgtatctctatacttaaacttatctattgcaagataaataatactctcagatattgaagtccttgacttatggttagggtttgaagacggcaggaggcagacaagaagagaaatataatttattttccttaactccttgaccanaagtgcac

SEQ ID NO: 3290 - protein, 72 aa, Homo sapiens
MAGPFNIVYDSLSLIFHPTFQKVLPFPSKYTQNPTTYFYTYCNHPNISTTRIIVIAHKLVSVSLYLNLSIAR

SEQ ID NO: 3291 - DNA, 350 bp, Homo sapiens
acgcgttgtcttctctccgataggaaaaaagatgtaagtaacaatgttgaacaataaataagaaggcaaaaactaacatgatatttcctttttaatttcagagattcctaaccaatgaaagcattaagtgttctgtacattgtttgtaatacaacaaatgagatgtatcacactggaaattctctgaagacaaggaaaggaaaagctccagagtgcaagcctcaggtgatcagaaacaagaaatggagaagtccagatcccacacatacctcaggcctgatgcattcaccggcaaaacagaaatcaacatgtgacacgcttgccaaaatcacatcatctgccgttctaga

SEQ ID NO: 3292 - protein, 78 aa, Homo sapiens
MKALSVLYIVCNTTNEMYHTGNSLKTRKGKAPECKPQVIRNKKWRSPDPTHTSGLMHSPAKQKSTCDTLAKITSSAVL

SEQ ID NO: 3293 - DNA, 279 bp, Homo sapiens
actagtcaagctcaccatgcagctcaacatcatcaacaacaacctactaaacaggcaacggtaagcccaaacacaagaagaagaaagtcgtcaagtgttactttaagtccaactatttctcataacaacaacaatggtaaggttcctgtccaacctcggaaaaggaaatctattactaccattgaccccaacaactacgataaaaataaacctttcaagtgtaaagactgtgcataggaattaagacgcagtgagcacttgaaaaggcatataagatct

SEQ ID NO: 3294 - protein, 78 aa, Homo sapiens
TSQAHHAAQHHQQQPTKQATVSPNTRRRKSSSVTLSPTISHNNNNGKVPVQPRKRKSITTIDPNNYDKNKPFKCKDCA

SEQ ID NO: 3295 - DNA, 264 bp, Homo sapiens
actagtaaatactgacatcggaacgctgacatgcacagggaatctcgtggggttgggtggtggggagtcacagctgtcctcctaactttcacaaagtcttggagtctcaggagatggtaagtgaacgtttcaaattcgaatgcagggtgaaagagttgcataagccatacttctcactctttggctggcttgttgcattccaatagcagaaagaatgctcagaggggccttggtcagcattactgctcagacttctctagatct

SEQ ID NO: 3296 - protein, 53 aa, Homo sapiens
MQLFHPAFEFETFTYHLLRLQDFVKVRRTAVTPHHPTPRDSLCMSAFRCQYLL

SEQ ID NO: 3297 - DNA, 222 bp, Homo sapiens
  misc_feature (222)..(222): Wherein n may be a, c, g or t
cgacaggactgggatggagagctgtacgaaaacggctcgttctactttgctaagagacacttgatagagatgggctacttacagggtgggaaaatggcatattatgaaatgcgagctgagcacagtgtggacatagacgcggacatcgattggccgatcgcagagcaaagagttctgagatttggctattttgggaaagagaagctgaaggagataaagcgn

SEQ ID NO: 3298 - protein, 74 aa, Homo sapiens
RQDWDGELYENGSFYFAKRHLIEMGYLQGGKMAYYEMRAEHSVDIDADIDWPIAEQRVLRFGYFGKEKLKEIKR

SEQ ID NO: 3299 - DNA, 345 bp, Homo sapiens
  misc_feature (1)..(1): Wherein n may be a, c, g or t
ncggccgacggcatatagagcgggcctttcaggccacaagcaaccagggtgagcgacagaagagcggcagacaggcaccggacgagttgaatgatcataatggttcgctgcgaaaaaaattttggccctctataatcgcactcacattgttaaaagcaacaggataaaccgatgaaggatcacgagtatcacgccctggtagacacctttttccagtatgtggaagacaccatcgatgccaattacccggatatcgattgcgagcgggctggcggcgtactgaacctggcgttcgagaacaagaccaaggtcatcctcaacaagcaagaacccctgcaccagatc

SEQ ID NO: 3300 - protein, 58 aa, Homo sapiens
MKDHEYHALVDTFFQYVEDTIDANYPDIDCERAGGVLNLAFENKTKVILNKQEPLHQI

SEQ ID NO: 3301 - DNA, 458 bp, Homo sapiens
  misc_feature (1)..(1): Wherein n may be a, c, g or t
  misc_feature (145)..(145): Wherein n may be a, c, g or t
  misc_feature (208)..(208): Wherein n may be a, c, g or t
nacgcgtgacaggccgccagatgtgtcttttgaagacttcgtaacaaccgttaactaaacagattcagattaacagaaagacagactctggagtggatgtctttagcaacatgctgtctaaagaagacccacttgatacaacggnttagtgaaaagttgaaaataaagggacgaaaaaagatttactacgaaaacagtgaccaaaagnacagaggaggtcctatgtgggtactagaaaagctggattttaagtaaaaaataggagggtgaaaaaaggaatgcttgaaggtgtaataaacaagaagagatatgtaacttacaaatgcagtctcaaaacataagaagccatgctgagggctacgggtgcagaggtatccctgactgtggggacttcggcgaaccctcttgggaagtggctgttagggaaagaatgagccgtatcacgggtggtttgtaca

SEQ ID NO: 3302 - protein, 52 aa, Homo sapiens
  misc_feature (17)..(17): Wherein Xaa may be any naturally occuring amino acid
  misc_feature (38)..(38): Wherein Xaa may be any naturally occuring amino acid
MSLATCCLKKTHLIQRXSEKLKIKGRKKIYYENSDQKXRGGPMWVLEKLDFK

SEQ ID NO: 3303 - DNA, 447 bp, Homo sapiens
gccggccgccccgtttccgcagattctggaggagtgccgatggccgagttcatctacaccatgcacaacgtccgaaaggcggtgggtgacaaagttatccttgacaatgtcacgctgtcgttcttcccgggcgccaagattggtgttgtcggaccgaatggcgctggcaaatcgacgatgctcaagctcatggctggtctcgataagcccaataacggcgatgccaacttggctaaaggcgccaccgtcggaatcttgcttcaggagcccccgctcaccgaggacaaaactgttcgcgagaacgtcgaagaggccgtcggcgacatcaaagccaagctggcacggttcgaggaagtctccgccgagatggccaaccctgacgccgactttgacgccctgatggcggagatgggtgagctgcagaccgagctcgataacgccaacgcg

SEQ ID NO: 3304 - protein, 136 aa, Homo sapiens
MAEFIYTMHNVRKAVGDKVILDNVTLSFFPGAKIGVVGPNGAGKSTMLKLMAGLDKPNNGDANLAKGATVGILLQEPPLTEDKTVRENVEEAVGDIKAKLARFEEVSAEMANPDADFDALMAEMGELQTELDNANA

SEQ ID NO: 3305 - DNA, 341 bp, Homo sapiens
  misc_feature (341)..(341): Wherein n may be a, c, g or t
cccgggagatgataatttggaaatgaagaggaaaagaaacgatggtacaaaaggtacagttgttctaaatagcggttctaaagtagagggattgttatgtcttttggaacaggccattcacagtggcagggcacttgttctgagtgaagatgagcttgctgattcagatctggtctatgaaaagtctgttgcttttacaaagtcaattccgcgaagactggtttttgagaatactcgaaggaagtccagtgccaggagaaatgtgccagacaatcatgcaagaactaaaacacatcttgtagaaaataaaatgttgagcagtcctgttgaaaataaattgn

SEQ ID NO: 3306 - protein, 106 aa, Homo sapiens
MKRKRNDGTKGTVVLNSGSKVEGLLCLLEQAIHSGRALVLSEDELADSDLVYEKSVAFTKSIPRRLVFENTRRKSSARRNVPDNHARTKTHLVENKMLSSPVENKL

SEQ ID NO: 3307 - DNA, 270 bp, Homo sapiens
  misc_feature (1)..(1): Wherein n may be a, c, g or t
nccccgttgatctcgcaggaggatggcgcctatcgctggcatgaaggcccggagcgcgatccctgcatgctgtgctacaccagcggcaccacgggtaaccccaagggcgtgctgtacgaacatcgctccaccgtgatccacgccatggctgaagttgcgccctgggtgttcaacctgtcgccgagcgccgtcgtgctgccagtggtgccgatgttccacgccgcctcctggggcctgccctttgccggcgcgctggcgggcgcgaaattt

SEQ ID NO: 3308 - protein, 90 aa, Homo sapiens
  misc_feature (1)..(1): Wherein Xaa may be any naturally occuring amino acid
XPLISQEDGAYRWHEGPERDPCMLCYTSGTTGNPKGVLYEHRSTVIHAMAEVAPWVFNLSPSAVVLPVVPMFHAASWGLPFAGALAGAKF

SEQ ID NO: 3309 - DNA, 261 bp, Homo sapiens
  misc_feature (1)..(1): Wherein n may be a, c, g or t
  misc_feature (199)..(199): Wherein n may be a, c, g or t
ntgtgaaaaggctatcaaaccttcttccactgaattgcttttgcatcttcaataaaaatcaactgggcgtattttcatggtcttcccacccttctttgtgaagcatattacactgttctgcagctttatattgtttttgctttttatttttttagagccaaggtcttgatctgtcatgcaggttggagcgcagtgtgtngatcatagttgactgcagcttcaaacccttgggctcatatgatcttcctgcctcagcctccg

SEQ ID NO: 3310 - protein, 57 aa, Homo sapiens
  misc_feature (56)..(56): Wherein Xaa may be any naturally occuring amino acid
IAFASSIKINWAYFHGLPTLLCEAYYTVLQLYIVFAFYFFRAKVLICHAGWSAVCXS

SEQ ID NO: 3311 - DNA, 247 bp, Homo sapiens
ggatccccaggcttctatgccagggagtaaacttacatggcgttttcctgaagggaagctctttattatactgagtagtaggcaagcttgcccgttagtctggaggaaacactatttgtcttccagtgctgcttacataaacattcttgagaatgtagttcaccacacagaaggtccattcttccatttataagatttcagaaatgttcctcctgctccagtccccttctcatattttgattcatga

SEQ ID NO: 3312 - protein, 58 aa, Homo sapiens
MPGSKLTWRFPEGKLFIILSSRQACPLVWRKHYLSSSAAYINILENVVHHTEGPFFHL

SEQ ID NO: 3313 - DNA, 485 bp, Homo sapiens
ggatccagatctccctcacatactgaaagtaccttgagaggattcccagccattcagcccttcctggccacacctgacttaagggtggcagtgccccgagctctccaggctgagcgcatccagaccctgatgcgcctgccattcaggaccacatgcgcccaaggaccttgtccatgtacagctgtgcctgtgccacatgctctggggcttgggcagggagcttcctcacccgcgttggtgtcagggttacagttctgggtcttgactgaacctctcctactgagtcttcgggcagcggagcagcagggccacagaagaacactgaccgccaggacatctccagtgtggtggggacagtggaaagggccctggcaagggcccaggtcctccaaaggccctgcctcaccccttgaaatacccacctgttcacagctgcctccttcccaaagcccctctggctatagcagtgaggacaggagcctagg

SEQ ID NO: 3314 - protein, 118 aa, Homo sapiens
MRLPFRTTCAQGPCPCTAVPVPHALGLGQGASSPALVSGLQFWVLTEPLLLSLRAAEQQGHRRTLTARTSPVWWGQWKGPWQGPRSSKGPASPLEIPTCSQLPPSQSPSGYSSEDRSL

SEQ ID NO: 3315 - DNA, 312 bp, Homo sapiens
  misc_feature (306)..(306): Wherein n may be a, c, g or t
  misc_feature (307)..(307): Wherein n may be a, c, g or t
  misc_feature (311)..(311): Wherein n may be a, c, g or t
  misc_feature (312)..(312): Wherein n may be a, c, g or t
gaattcggtacggttgtcggcgaggccgtcgcccatgtcgtgcagcagcaagtcgctgtaggggcgaatcacttggttggccaattcaggttcggtggccgttggcgccgtggtgaactgcggtgtgtggcagccctggcagccagcctggtagaacaggttttttccggccagcacctgcggtgcgttgacgtcgcggcggcccgggacggccaggttgcgggtgtagaacagcaccaggcgcaggatgttgtcgctgacctcaggctcgccgtccgggccattgccgttgggcgcctgtttgcnncccnn

SEQ ID NO: 3316 - protein, 104 aa, Homo sapiens
  misc_feature (103)..(103): Wherein Xaa may be any naturally occuring amino acid
  misc_feature (104)..(104): Wherein Xaa may be any naturally occuring amino acid
EFGTVVGEAVAHVVQQQVAVGANHLVGQFRFGGRWRRGELRCVAALAASLVEQVFSGQHLRCVDVAAARDGQVAGVEQHQAQDVVADLRLAVRAIAVGRLFAXX

SEQ ID NO: 3317 - DNA, 345 bp, Homo sapiens
  misc_feature (1)..(1): Wherein n may be a, c, g or t
ntcatgagcaacgagcctcacctcacccgcagggcggttatcggcgccggtatcgccgccgctgccgttccctcgctttcgcaccaagcctcggcgcaggagaccgttttgggcgcacccaccgcattctggcccaacggcgcgcggattgccgtcagcctgtcgctgatgttcgaggccggtggccagccgatctcgggcgctggcggcgtcattcccgacccgatcgaacacgggctgcccgacctgccgaccaacgccttcttccagtatggcgtctacgagggcatcccgcgcattctcgacatgctcgaccgccatcaggtgaaactctcgtcgttcatg

SEQ ID NO: 3318 - protein, 115 aa, Homo sapiens
  misc_feature (1)..(1): Wherein Xaa may be any naturally occuring amino acid
XMSNEPHLTRRAVIGAGIAAAAVPSLSHQASAQETVLGAPTAFWPNGARIAVSLSLMFEAGGQPISGAGGVIPDPIEHGLPDLPTNAFFQYGVYEGIPRILDMLDRHQVKLSSFM

SEQ ID NO: 3319 - DNA, 684 bp, Homo sapiens
gccggccatttaagaggagctccatgggaagaaaacagaagaaaactcatacagagcatccttctggagctgaagacacaaatcctccaattgacagggctgtgaagccctaaacagtggctgaggggaaagagcaaacgatctacaaacaaatgacaagaaagtgctgtcagaatgttcaccagcaatgtcagagagagaaaattccacgggaatgtgatcacaaacctagaacttacacccaaattcacatcaaactgagagagcacactaaaagcaccatgaacactttgaaaacctgtatcgtgtatgcaccacgtaagatctggtgatcagtccagcacagcatgtgtgagaagcacgcgcgccctgtgtgtgaaaatcagcacggtgcgtgtgaggggcaggcgcgcttctcacacatgctgtgctggactgatcaccagatcttacgtggtgcatacacgatacaggttttcaaagtgttcatggtgcttttagtgtgctctctcagtttgatgtgaatttgggtgtaagttctaggtttgtgatcacattcccgtggaattttctctctctgacattgctggtgaacattctgacagcactttcttgtcatttgtttgtagatcgtttgctctttcccctcagccactgtttagggcttcacagccctgtcaattg

SEQ ID NO: 3320 - protein, 63 aa, Homo sapiens [sequence omitted]

SEQ ID NO: 3321 - DNA, 322 bp, Homo sapiens
aagctttattgtgcctaaagccctgtaaaggccacataacagtcaccatccatccccaacagccaggaccaggggtaggtgcctgaaccaaaggcatataatccaaagggtgaccaactctttttggcgtgaaatactaccagaccaaactgattctctcattgcaatctggtctctgatctgagaaacacttgagagaagaaaggagttaaagaggagctgacaggtcatgatatggaggagcccagagaggccacacgaaagtaaaggtattgggcagaggcagattctacaaagaagggaagctggacagcaagtggct

SEQ ID NO: 3322 - protein, 62 aa, Homo sapiens
MTCQLLFNSFLLSSVSQIRDQIAMRESVWSGSISRQKELVTLWIICLWFRHLPLVLAVGDGW

SEQ ID NO: 3323 - DNA, 492 bp, Homo sapiens
  misc_feature (1)..(1): Wherein n may be a, c, g or t
  misc_feature (2)..(2): Wherein n may be a, c, g or t
nnctcgagattaattcgtatccgggggttataagggctttttttgtgtatgctacggtctactatatctctactgatgaatagtgctgctcagaaaacgatgacgaattctaattttgttctaaatgcacccaaaatcaccttaaccaaagtggaacagaacatctgtaacctgctgaacgattatacagacctgtacaatcaaaagtaccacaataagcctgagccattgactcttcggatcacgggcggatgggtgcgtgacaagcttctgggacaaggttctcacgacttggatattgccatcaatgtgatgtcaggtgagcaatttgctactggtttgaacgagtatttgcaacaacattacgccaaatatggagccaagcctcataatatccacaagattgacaagaatcccgagaaatccaagcatctggaaactgccactactaagctctttggcgttgaagtggattttgtcaatttaagatct

SEQ ID NO: 3324 - protein, 148 aa, Homo sapiens
MLRSTISLLMNSAAQKTMTNSNFVLNAPKITLTKVEQNICNLLNDYTDLYNQKYHNKPEPLTLRITGGWVRDKLLGQGSHDLDIAINVMSGEQFATGLNEYLQQHYAKYGAKPHNIHKIDKNPEKSKHLETATTKLFGVEVDFVNLRS

SEQ ID NO: 3325 - DNA, 201 bp, Homo sapiens
gtttcagcggagtccttttctaaggttggctttaataaaaaaaagattgatatagctagggggatttatcctacagaaacctttgtaaccgctgtagggcagggcaatatctatgcggattttttatccaaaggccttaaagatcaagggcatgttttagagggaaaagtcggtggcacgctaggaggggtcgcttatgat

SEQ ID NO: 3326 - protein, 67 aa, Homo sapiens
VSAESFSKVGFNKKKIDIARGIYPTETFVTAVGQGNIYADFLSKGLKDQGHVLEGKVGGTLGGVAYD

SEQ ID NO: 3327 - DNA, 330 bp, Homo sapiens
  misc_feature (292)..(292): Wherein n may be a, c, g or t
gtcgaccacggcatgaaaaagccggggatgatcctcatcaacaacccctggggcgagtccaacgaggcgggcttcaagcgcgccctcgaagagcgtggcatggccaacgccggtgtcgagcgtattcaggacagcgacctggacgtggtgccgcaattgaccccgcctgaaaaacgccggtgccgacaccttgctgatggtcggcaacgtcggcccttcggcacaggtggtcaagtccctggaccgcatgggttgggacgtgcctgtggtgtctcactgggggccggccggnggtcgctttggcgagctggcggggcctaacgcttctcg

SEQ ID NO: 3328 - protein, 102 aa, Homo sapiens
  misc_feature (94)..(94): Wherein Xaa may be any naturally occuring amino acid
MKKPGMILINNPWGESNEAGFKRALEERGMANAGVERIQDSDLDVVPQLTPPEKRRCRHLADGRQRRPFGTGGQVPGPHGLGRACGVSLGAGRXSLWRAGGA

SEQ ID NO: 3329 - DNA, 232 bp, Homo sapiens
  misc_feature (1)..(1): Wherein n may be a, c, g or t
  misc_feature (124)..(124): Wherein n may be a, c, g or t
  misc_feature (148)..(148): Wherein n may be a, c, g or t
  misc_feature (149)..(149): Wherein n may be a, c, g or t
  misc_feature (232)..(232): Wherein n may be a, c, g or t
ntgtacaagttcccagaggacaaaagtgagaccgacttccccgacggctgcctggggcggctgtggttctcggtggaatatgagcaggaggctgagcggctgctggtgggcttgatcaaggcancagcacctgcaagccccctcgganngacctgcagccccctggtgaagctctacctgctgcccgatgagcggcgcttcctccaatccaagaccaaacgcaaaacctccn

SEQ ID NO: 3330 - protein, 77 aa, Homo sapiens
  misc_feature (1)..(1): Wherein Xaa may be any naturally occuring amino acid
  misc_feature (42)..(42): Wherein Xaa may be any naturally occuring amino acid
  misc_feature (50)..(50): Wherein Xaa may be any naturally occuring amino acid
XYKFPEDKSETDFPDGCLGRLWFSVEYEQEAERLLVGLIKAXAPASPLGXTCSPLVKLYLLPDERRFLQSKTKRKTS

SEQ ID NO: 3331 - DNA, 336 bp, Homo sapiens
  misc_feature (1)..(1): Wherein n may be a, c, g or t
ncggcttagcacaaaaaaacatctctccgacgatctgcgaatctattcacttccatgctttatctaattttgtctactacactaagattcagagaagggcatctagatggtcagaaagggcaaggaacctacagtaacacatccttaaatatcacattcgaggaaaaatctattttgatcaaaaaaccctccatagaggaaaatttattcaaatacgcttatttaataatcaacacgctgacctttgagtgggaatcattcgaactaatacaatcgtggcttttgataaccttctatttcagaacctgttacagacagacggcgtgctggaacgcg

SEQ ID NO: 3332 - protein, 109 aa, Homo sapiens
HKKTSLRRSANLFTSMLYLILSTTLRFREGHLDGQKGQGTYSNTSLNITFEEKSILIKKPSIEENLFKYAYLIINTLTFEWESFELIQSWLLITFYFRTCYRQTACWNA

SEQ ID NO: 3333 - DNA, 354 bp, Homo sapiens
ccatggctgagcctaagaggagggtgtggagtcagcctagactgaggccagggacaggcagggccaggtaagggcttggtatttctttcaaagtgttccgggaagctctggggagttttccagctgggtagtgccatgctctcgtttctacttgggaagatcacactggcttctctgaaagtgcagattttatggagccaggaatggcagcagtgagactgatgaggaggttatcgtcaaggttcaggcagaacaccctggtgccttatactggcttggaaaaatcagctgggaggggctgcttggagatcaggccacagatcacagcggaactgaatgggccccttcacgcgt

SEQ ID NO: 3334 - protein, 54 aa, Homo sapiens [sequence omitted]

SEQ ID NO: 3335 - DNA, 300 bp, Homo sapiens
acgcgttttgaagtggttggtggttatttttctccagtaagtgataactatcaaaagcgagggttagccccagcttatcatcgtgtccgcatgtgcgaattagcatgcgagcggacatcatcttggttaatggttgatgcctgggaatctttacaatcaagttatacaaggacagcaaaagtcttggaccatttcaatcatgaaataaatatcaagagaggtggaatcatgactgtagatggtgaaaaaatgggcgtaaaaatcatgttattggcaggcggtgatcttatcgaatccatg

SEQ ID NO: 3336 - protein, 100 aa, Homo sapiens
TRFEVVGGYFSPVSDNYQKRGLAPAYHRVRMCELACERTSSWLMVDAWESLQSSYTRTAKVLDHFNHEINIKRGGIMTVDGEKMGVKIMLLAGGDLIESM

SEQ ID NO: 3337 - DNA, 219 bp, Homo sapiens
caactcctctgcttagatgtcacctcctccaagaaggcttcctgactcctccagttcattctgtgctcccctgtgccctttccagtagcagaggtagcactgaaatcaatattacccacagctgtagggggcacttccagtctgcgaagctctttcctgttcattaacatgtttaatccttgcaatgactctgcaaattaaggataatcactccctgtc

SEQ ID NO: 3338 - protein, 56 aa, Homo sapiens [sequence omitted]

SEQ ID NO: 3339 - DNA, 249 bp, Homo sapiens
  misc_feature (1)..(1): Wherein n may be a, c, g or t
ngtaagcctgacatcgagaagtacggcgttgaaccgttcaatgccaaatgccgcgagtccgttacccgccacgtcgatgcctttagcgaactcaccgagcgaatgggctactgggtcaatatggatgaggcgtattggacgatgagcccgtcctacgtcgagtcggtgtggtggggtcttaagcgaatctgggataaaggtctgctcggcgaggaccaccgcgtggccccgtactgcccgcgctggggc

SEQ ID NO: 3340 - protein, 83 aa, Homo sapiens
  misc_feature (1)..(1): Wherein Xaa may be any naturally occuring amino acid
XKPDIEKYGVEPFNAKCRESVTRHVDAFSELTERMGYWVNMDEAYWTMSPSYVESVWWGLKRIWDKGLLGEDHRVAPYCPRWG

SEQ ID NO: 3341 - DNA, 186 bp, Homo sapiens
aactacctgtcggtaggacagatctacctgatggccaacccgctgctgcgcgagccgttgctacctgagcacatcaagccccgcctgctcgggcactggggcaccaccccgggcctgaacttcatctacgcccacctcaaccgggccatcatggagcgcgacctggacatgatgtacgtgatgggc

SEQ ID NO: 3342 - protein, 62 aa, Homo sapiens
NYLSVGQIYLMANPLLREPLLPEHIKPRLLGHWGTTPGLNFIYAHLNRAIMERDLDMMYVMG

SEQ ID NO: 3343 - DNA, 264 bp, Homo sapiens
ggatcctcccaagtgaacgagctgttttgatttttagcaactgaaattttcctgtgtccagcaggatggagtcaagtctgcgctcccatgctgtggtcaaccacacggagtctttaatatcactgatattgcgtctggcagttagaactacatcatcctcacagcctctggccggcatcttctgtaggagctacactcccgacatgaacacttcccagctctcctcccccagagcagccagggttcttactggtgtagtctaga

SEQ ID NO: 3344 - protein, 65 aa, Homo sapiens
MESSLRSHAVVNHTESLISLILRLAVRTTSSSQPLAGIFCRSYTPDMNTSQLSSPRAARVLTGVV

SEQ ID NO: 3345 - DNA, 450 bp, Homo sapiens
acgcgttaaaaaggggaaagtgattgccactgtgatcactttaaatcatttcttcgttctcattcttttcgtctaattttcttctctaccactcattataccaggcattttatctacatcaaaatttgttttgaatcggatcatatcatgaatagtaccgccgctgcaataaatccaaatccaaatgttataccattcgatgacacatacattctctatgattcgcatgactttctatcattccttagtgcatatttctcgctgatgcccatcctagtgctagctttttatttgtcgtggtttatcatcacaagagagttagaagcctgcattgtagcctttggccaattgatgaacgaaatattcaataacgtgatcaagaatataataaaacagccacgccccgtatcgttcggtgcgtcgttccaaaatgacactataggatccgga

SEQ ID NO: 3346 - protein, 101 aa, Homo sapiens
MNSTAAAINPNPNVIPFDDTYILYDSHDFLSFLSAYFSLMPILVLAFYLSWFIITRELEACIVAFGQLMNEIFNNVIKNIIKQPRPVSFGASFQNDTIGSG

SEQ ID NO: 3347 - DNA, 201 bp, Homo sapiens
gcacagtttgcagaactgctgactcaaggtgaactaacacgtcgagcatgggcgaaagatgtgcaggtgatgaatgaagtcccgggtcacatcccaatgcataaaattcctgaaaacatggagaaacagttggagtggtgtagtgaagcgcctttctatacattgggtcctttgacaactgatattgcacctggttatgat

SEQ ID NO: 3348 - protein, 67 aa, Homo sapiens
AQFAELLTQGELTRRAWAKDVQVMNEVPGHIPMHKIPENMEKQLEWCSEAPFYTLGPLTTDIAPGYD

SEQ ID NO: 3349 - DNA, 309 bp, Homo sapiens
aagcttcccgttttgcagattggatcgggcctacacttccgcacacaagatgacgcttccgccaaagaagatatacatacgattggtgagtttattgagggtgataaaaaggtaaggttcgtggccaaaaaaaagaaaagaagtgacccagggttgcaacgaaataatatgtacaggatcactaaagatgatacgaaagccatgattgcgcttaaaagaaaaatgaggaaaggcgagaaggaaggactaaggaagaaacaagagcatagcaaaagcagcgtttcgaactcatatagtgccagtgatgaa

SEQ ID NO: 3350 - protein, 103 aa, Homo sapiens
KLPVLQIGSGLHFRTQDDASAKEDIHTIGEFIEGDKKVRFVAKKKKRSDPGLQRNNMYRITKDDTKAMIALKRKMRKGEKEGLRKKQEHSKSSVSNSYSASDE

SEQ ID NO: 3351 - DNA, 344 bp, Homo sapiens
  misc_feature (1)..(1): Wherein n may be a, c, g or t
  misc_feature (2)..(2): Wherein n may be a, c, g or t
  misc_feature (254)..(254): Wherein n may be a, c, g or t
nnattggaatcctctgcctttggaaccttctcccttgtcctctgatgtggtgtgattctcactgccctgtggtgacctggttttccctttcagaagctttcagaatcttccctgtgtgcttggtcttccaaaattttccaacgaaagacctgggtgagggtcctcttccattcctgctgcttggcactgggtgggccaagcatgtatccctttcatgcatgggacatttcttgtattttctttgataatatttntctcttctgctttcgctatagttttgttttggttgtttctctggaactcctattaattaagatacaggttgtttatcttttcgctcacat

SEQ ID NO: 3352 - protein, 66 aa, Homo sapiens
MWCDSHCPVVTWFSLSEAFRIFPVCLVFQNFPTKDLGEGPLPFLLLGTGWAKHVSLSCMGHFLYFL

SEQ ID NO: 3353 - DNA, 328 bp, Homo sapiens
  misc_feature (16)..(16): Wherein n may be a, c, g or t
  misc_feature (319)..(319): Wherein n may be a, c, g or t
  misc_feature (328)..(328): Wherein n may be a, c, g or t
tcatgatttcacctanaccaaattattttcccaaggccccacttcctgagaccatcacactgagggcaagagcttcaagatatgaagtttgtggggaatgccaacattcagtccatgacactaagcaaagtcttcctgtactcttcccacagcttcttgatgcagttttctacgttgtcaaatgtatcaccttgtgtcagtccactttttccccggagccctttgtcttcatgttataatctagacctgaagctcattaagcctgctacacagctgttgtcctagaaatttaactctctcctgcactgaatctcctgtntcctggatn

SEQ ID NO: 3354 - protein, 78 aa, Homo sapiens
  misc_feature (5)..(5): Wherein Xaa may be any naturally occuring amino acid
MISPXPNYFPKAPLPETITLRARASRYEVCGECQHSVHDTKQSLPVLFPQLLDAVFYVVKCITLCQSTFSPEPFVFML

SEQ ID NO: 3355 - DNA, 361 bp, Homo sapiens
tggccaagtgggagcagggagagcattccaggcaaagggacccccattgtgacagctttgagtgaggctgctgggtcaaatctaaaatgatactgaaatgttggtggaggccaggttaaacaagattttgcaggctcttcgagtccctgaatattatagtatttcttctcctaatgtcagtagttcaactggtattaaatgtttggatgttaaactaataatagctaccatttattatgctttgcagttgctaagtggttttgtctagtatttgatcttctcaacaatcctatgagctctgtttgaagaaaaagtggacttcacatatgggaaacatggagcatggttcagtacttgccta

SEQ ID NO: 3356 - protein, 56 aa, Homo sapiens [sequence omitted]

SEQ ID NO: 3357 - DNA, 353 bp, Homo sapiens
  misc_feature (334)..(334): Wherein n may be a, c, g or t
ccaaaaaagatagcttccaacggtagaaacaagaagggtagaggtcacgtcaagccagtgagatgtgttaactgttccaagtccattccaaaggataaggctatcaagagaatggctattagaaacattgttgaagctgctgccgtcagagatttgtccgaagcttctgtctacccagaatacgccttgccaaagacttacaacaagtggcactactgggtctcctgtgctattcacgccagaatggtgagagttagatccagagaagacagaaagaacagagctcctcctcaaagaccaagatttaacagggataacaaagtttctccagcgnctgccgcaaaaaagccttg

SEQ ID NO: 3358 - protein, 117 aa, Homo sapiens
  misc_feature (112)..(112): Wherein Xaa may be any naturally occuring amino acid
PKKIASNGRNKKGRGHVKPVRCVNCSKSIPKDKAIKRMAIRNIVEAAAVRDLSEASVYPEYALPKTYNKWHYWVSCAIHARMVRVRSREDRKNRAPPQRPRFNRDNKVSPAXAAKKP

SEQ ID NO: 3359 - DNA, 391 bp, Homo sapiens
tcgcgatccggagcgatcggtgctgcagatggctggcgacgccctgcggggcgcattgcgggacgccgacctggagccggccgccctagacgggctgatcgtccaggtggggtccccccgcggcgcggactacgacaccgtgtccgaaacctttggtctttcgccacaattctgcagccagacctggggcgcacggccggttcaccgcaacggtgatcctggcagcggccatggcggtgtccagcggcctcgcgcggcgggtggcttgcctcatgggcatgaagaattcggacctcgggcggttgggtgaggcggacaatccctttcatcatgagcaattccgggagaatggcgggccgcacggggaagagggttggatcggcatggcctc

SEQ ID NO: 3360 - protein, 110 aa, Homo sapiens
MMKGIVRLTQPPEVRILHAHEASHPPREAAGHRHGRCQDHRCGEPAVRPRSGCRIVAKDQRFRTRCRSPRRGGTPPGRSARLGRPAPGRRPAMRPAGRRQPSAAPIAPDR

SEQ ID NO: 3361 - DNA, 235 bp, Homo sapiens
ctccctgcgggctgcgtctccgaggacatgtgcagtcctgacccctgtttcaatggtgggacttgcctcgtcacctggaatgacttccactgtacctgccctgccaatttcacggggcctacatgtgcccagcagctgtggtgtcccggccagccctgtctcccacctgccacgtgtgtggcggaggccacgttccgcgagggtccccccgccgcgttcagcgggcacaacgcgt

SEQ ID NO: 3362 - protein, 78 aa, Homo sapiens
LPAGCVSEDMCSPDPCFNGGTCLVTWNDFHCTCPANFTGPTCAQQLWCPGQPCLPPATCVAEATFREGPPAAFSGHNA

SEQ ID NO: 3363 - DNA, 876 bp, Homo sapiens
atgatggatatattcgaacacgacgaattagttaacaagaatctgttatatgctctactagacttttatgttattgttgaaaaaacaggctcttcttcacaattttacgataaattcaacagcagatatagcatatcaataattttggaggagctttattacaagataccatcttataaaaaccaattgatccggcagtctcaaaacaatgctgacttttttgtgagattcgttgctcgtatgttgaatgacttgactttcctgttggatgaaggcctaagtaatttggctgaggtgcataatatccaaaatgagctggataatcgtgcaaggggcgcgccaccaacaagagaggaagaggacaaagaactacaaacaagattggcgtctgcttccaggcaagctaagtcctcgtgtggattggccgataaatcgatgaaactgttcgaaatctattcgaaggatataccggctgcatttgtcacaccagaaattgtatatagactggcaagtatgctaaactataacttagaatcacttgtcggtcccaaatgcggggaactaaaagtgaaagacccacaaagttattcattcaacccaaaagatttgttgaaagccttaacaactgtttatatcaatctttccgagcaatcagagttcatcagtgctgtcgctaaagatgaaagatcatttaatagaaatctctttgttcgcgcagttgatattcttggtagaaaaactggtttagcatctccagagttcatcgaaaaactattgaactttgccaataaagccgaagagcaaagaaaggctgatggagaggaggatcttgagtatggtgatgttcctgacgagttcttagatcctttgatgtac

SEQ ID NO: 3364 - protein, 292 aa, Homo sapiens
MMDIFEHDELVNKNLLYALLDFYVIVEKTGSSSQFYDKFNSRYSISIILEELYYKIPSYKNQLIRQSQNNADFFVRFVARMLNDLTFLLDEGLSNLAEVHNIQNELDNRARGAPPTREEEDKELQTRLASASRQAKSSCGLADKSMKLFEIYSKDIPAAFVTPEIVYRLASMLNYNLESLVGPKCGELKVKDPQSYSFNPKDLLKALTTVYINLSEQSEFISAVAKDERSFNRNLFVRAVDILGRKTGLASPEFIEKLLNFANKAEEQRKADGEEDLEYGDVPDEFLDPLMY

SEQ ID NO: 3365 - DNA, 276 bp, Homo sapiens
gggcccacggccataatgaggctgtccagggagaaccccactattgccaccattgctaagcaacagatgacatagttgatgccgtccaaccaatcacattggacagtgggtgttgtactgcaccactgagtcccttcctcgcctttctcccatccctgaacctggttgtcgttgccaccaccaccactgccccggaaattctcagcatccatgactgttttcatgagctgctcccaatttaaaacatactgatgcataaaattggctctgcctagg

SEQ ID NO: 3366 - protein, 85 aa, Homo sapiens
MHQYVLNWEQLMKTVMDAENFRGSGGGGNDNQVQGWEKGEEGTQWCSTTPTVQCDWLDGINYVICCLAMVAIVGFSLDSLIMAVG

SEQ ID NO: 3367 - DNA, 303 bp, Homo sapiens
ctaggctttgaatgttcattgacacatgcccaaccatcgtccctaaagactaacgctccatgggatgcaatctggtatgtgatgcagaaatgtgatgatgagaagaaagacttaagcaaaatgaatccaaatactacgggctataagattttatcggcaatgccaggatggttgagtggcactgtcaaatcagagtatgactcaaagctgtcgttcgcaccaaatgaacaaagcggtaatattgaaaaactaaggaagctaaaaattgtgagatatcaggaaaatccaacaaagaattggggc

SEQ ID NO: 3368 - protein, 101 aa, Homo sapiens
LGFECSLTHAQPSSLKTNAPWDAIWYVMQKCDDEKKDLSKMNPNTTGYKILSAMPGWLSGTVKSEYDSKLSFAPNEQSGNIEKLRKLKIVRYQENPTKNWG

SEQ ID NO: 3369 - DNA, 189 bp, Homo sapiens
  misc_feature (1)..(1): Wherein n may be a, c, g or t
  misc_feature (2)..(2): Wherein n may be a, c, g or t
nngtgcacacgtaacaatcttgctccccaggccctggctcttcctggacagcaggcaaaccgcaccggaggcctctttgcttgtcccctgagcctagaggagacagattgctacagagtggacattgacaggggagctaacgtgcagaaggagagcaaggagaaccaatggctgggagtcagtgtccgg

SEQ ID NO: 3370 - protein, 63 aa, Homo sapiens
  misc_feature (1)..(1): Wherein Xaa may be any naturally occuring amino acid
XCTRNNLAPQALALPGQQANRTGGLFACPLSLEETDCYRVDIDRGANVQKESKENQWLGVSVR

SEQ ID NO: 3371 - DNA, 546 bp, Homo sapiens
gctagcagaacgtcacggagtgcctggtaacgaggacagaccaccactgccgtgaccaaattcggatttggcgcaggttcggagtacaatccaatatagatggccagcagcccaatctcgtcatccgtgaagaaaattcccaacagccttgaaagcttgtcagccaagtatacagcggcgtcatagaggaatggtgaccgtgatctcaatgactcacgcagagtattgcgaaaatagggcattgaaggagcgtgggccatgagtcgcccaacgtgtttcgaactactgccgtacagctcttccttcgcgatgaccaaaccgaagtgttcaaccgtgtcatccagacacctactcaccgttgagtaaatgtcacaggaatcagagtgatgatcaagttcaccatgcccaaatccgagggtcgcaccaacgatggacctcaagtaggcatcatcagcagatgacagtgggcgttcggggtacaacttccgcaatccaaccagcaactgatcgcacaacatctcagattggttgctcatcatcagatct

SEQ ID NO: 3372 - protein, 179 aa, Homo sapiens
MMSNQSEMLCDQLLVGLRKLYPERPLSSADDAYLRSIVGATLGFGHGELDHHSDSCDIYSTVSRCLDDTVEHFGLVIAKEELYGSSSKHVGRLMAHAPSMPYFRNTLRESLRSRSPFLYDAAVYLADKLSRLLGIFFTDDEIGLLAIYIGLYSEPAPNPNLVTAVVVCPRYQALRDVLL

SEQ ID NO: 3373 - DNA, 295 bp, Homo sapiens
ggtaccacaaggattaagtttagcggattttctcgggagtatgtttacatgcactattggattgtcccgaaggacgctccatactgtcaggttcgactcttcctgcggatttgcctgcaggaatcaacatctacaccctttaacggactattccgtcagtccgcggcactgtcactgctccgtctccacgtcactccttgaggtagtaccggaatattaaccggttctgccatcggcctcgccgttcggctgagccttaggacccgactaaccctgatccgattagcggtgatca

SEQ ID NO: 3374 - protein, 59 aa, Homo sapiens
MFTCTIGLSRRTLHTVRFDSSCGFACRNQHLHPLTDYSVSPRHCHCSVSTSLLEVVPEY

SEQ ID NO: 3375 - DNA, 375 bp, Homo sapiens
cgcgtggtccgcggccgctaccgcgaccaggaacggccgatcctcgtcaataactgggaggccacctacttcgattttaatgaagcaaaattgcggcctatcgtggatgctgccaagaaactgggcatcgaaatgtttgtcttggatgacggctggtttggccaccgggacgatgacaccacctctctgggcgactgggtcgtggacagtcacaagtttccgctgggcttgaagcatttcgccgattacgtacataaccaaagtctgaaattcggtctttgggtcgaaccagagatgatttccaaggattctgacctctatcgtgcccaccctgattatttgttagcggtaccaggacgggcaccatcgccgagc

SEQ ID NO: 3376 - protein, 125 aa, Homo sapiens
RVVRGRYRDQERPILVNNWEATYFDFNEAKLRPIVDAAKKLGIEMFVLDDGWFGHRDDDTTSLGDWVVDSHKFPLGLKHFADYVHNQSLKFGLWVEPEMISKDSDLYRAHPDYLLAVPGRAPSPS

SEQ ID NO: 3377 - DNA, 513 bp, Homo sapiens
acgcgtatttcgtccaaatgattcaaatcaaaacgccgccgttaaaaacgatgcaggcgaagacaatgcgaataaaaaaggtggtaaataagcatgagttttaaaatgacacaatctcaatacacaagtctttatggaccaactgtaggagactccgtgagattaggagatacgaacttgtttgcacaagttgagaaagactatgcaaattatggggatgaagctactttcggtggcggaaaatcaattcgtgatggtatggctcaaaatcctaatgtgacaagagatgataaaaatgtagccgatttagttttaactaacgcattaattattgattatgacaagattgttaaagcagatatcggtattaaaaatggttatatttttaagattggtaaagctggaaacccagatataatggataacgttgacatcatcattggtgcaacaactgatattattgctgctgaaggtaaaattgttactgccggcggtatcgatacacacgtgcac

SEQ ID NO: 3378 - protein, 140 aa, Homo sapiens
MSFKMTQSQYTSLYGPTVGDSVRLGDTNLFAQVEKDYANYGDEATFGGGKSIRDGMAQNPNVTRDDKNVADLVLTNALIIDYDKIVKADIGIKNGYIFKIGKAGNPDIMDNVDIIIGATTDIIAAEGKIVTAGGIDTHVH

SEQ ID NO: 3379 - DNA, 323 bp, Homo sapiens
  misc_feature (323)..(323): Wherein n may be a, c, g or t
gaattcatcatctttatgaacctgtctttgactcttccagcctggtcctctgttgatgctttctctcttgataccatgtttactcctttcctttgtccctctctctgccacttcctgtgcttggtaaacaactttgtacctgggattgagttggctgaaagagagattgactctaccacttcattcactcagtgccctgggaggtctgccacatgccaggtaccagtatggggagcacagcacagcagcacacatcctcagtgtgcatatactgggttttggacagtttttgtatatggtacatgttacgatttatctctgcn

SEQ ID NO: 3380 - protein, 102 aa, Homo sapiens
MNLSLTLPAWSSVDAFSLDTMFTPFLCPSLCHFLCLVNNFVPGIELAEREIDSTTSFTQCPGRSATCQVPVWGAQHSSTHPQCAYTGFWTVFVYGTCYDLSL

SEQ ID NO: 3381 - DNA, 198 bp, Homo sapiens
acgcgtgaaggggaagcagattgccgctgcgctcatgctggacagcaccttcagcatcctgcagacctgggacaccatcaacctgaacagcttcttcacccagttcgagcagttttgttttgtcctgcaacagcctatgatttatgaaggacaggcacagctgtggaccgatttgcagtacagggacccttcacgcgt

SEQ ID NO: 3382 - protein, 54 aa, Homo sapiens
MLDSTFSILQTWDTINLNSFFTQFEQFCFVLQQPMIYEGQAQLWTDLQYRDPSR

SEQ ID NO: 3383 - DNA, 345 bp, Homo sapiens
ctagaatcacagcaacgttcgccaaattcatcttcaggcggaacgacaaatatagcacagaaagaaatatcatcaccgaaattaattcgagtacacgatgagcttccttctccaggcaaagtaccactgtcgccaagtccaaagagattagattatacgcctgatggttcccatttatatggatcttcgctacaagctcgatgtgcgtatgaaaaaagtactgttccaataattatcaggtgctgcattgatcgcattgaaaaagatgatataggcctgaacatggaaggcttatacagaaagtcgggctcacagactttggttgaggagatcgaaaatgaattc

SEQ ID NO: 3384 - protein, 115 aa, Homo sapiens
LESQQRSPNSSSGGTTNIAQKEISSPKLIRVHDELPSPGKVPLSPSPKRLDYTPDGSHLYGSSLQARCAYEKSTVPIIIRCCIDRIEKDDIGLNMEGLYRKSGSQTLVEEIENEF

SEQ ID NO: 3385 - DNA, 334 bp, Homo sapiens
  misc_feature (1)..(1): Wherein n may be a, c, g or t
ngcgcgccccaggcgcgcgtgggcatcgccgtgccctgtgccacggtgggcgccgagctgccgcccggtgaagatggcaagcctttcctgatcaagatcggcaagctgcgcggtgtggagagcttcggcatgctgtgctccggcacggagctcaagctgtccgaggaccatggcggcctgatggagctgccgctggacgcgcccctgggccagaacatccgcgagtacctgaacctggatgacacgctgctcacgctcaagctcacgcccaatctggcgcattgcctgagcgtctacggcgtggcgcgcgaagtggctgcgctgaccgacgcgt

SEQ ID NO: 3386 - protein, 111 aa, Homo sapiens
  misc_feature (1)..(1): Wherein Xaa may be any naturally occuring amino acid
XAPQARVGIAVPCATVGAELPPGEDGKPFLIKIGKLRGVESFGMLCSGTELKLSEDHGGLMELPLDAPLGQNIREYLNLDDTLLTLKLTPNLAHCLSVYGVAREVAALTDA

SEQ ID NO: 3387 - DNA, 330 bp, Homo sapiens
  misc_feature (1)..(1): Wherein n may be a, c, g or t
  misc_feature (2)..(2): Wherein n may be a, c, g or t
nnggtgcacgagcatcgaatcatcgccaccggctacaacggagccgctcccgggcgcccggactgcttggaaggcgcttgcccacgtgggcgtctgggctacgcagaggtgcctgctttcagcgactacgacgtaccgggggcgccgggattttgcatcgccatccatgccgaggtcaacgcgttgctcttcgccacgcgtgacaccgcaggatgcacggcctacgtcaccgaccagccctgccccggatgccgcaaggcgctggcggctgccggggtcgtgcgagccgtgtggcccgatggacagttcgacgctgacgagctcgtcgac

SEQ ID NO: 3388 - protein, 110 aa, Homo sapiens
  misc_feature (1)..(1): Wherein Xaa may be any naturally occuring amino acid
XVHEHRIIATGYNGAAPGRPDCLEGACPRGRLGYAEVPAFSDYDVPGAPGFCIAIHAEVNALLFATRDTAGCTAYVTDQPCPGCRKALAAAGVVRAVWPDGQFDADELVD

SEQ ID NO: 3389 - DNA, 223 bp, Homo sapiens
cgcatgaagggctctcttccagccgggcatggtgtcgctccctgcgctcgctgtcgggctcgctctttctcgctggctctcttctccgggggttttcggcgctcctcgctcgtcctctagggcagccgcgccggggctgttcagcggggctagggcgccgaggcggctcccgggcacattgaagcggcgccgcgcgccccgcgctcccctcaaactcgccggc

SEQ ID NO: 3390 - protein, 65 aa, Homo sapiens [sequence omitted]

SEQ ID NO: 3391 - DNA, 258 bp, Homo sapiens
tccggacggttcacctggcaggtgtgcaggatgaaatcaggggaggggcatgaggatggagaaaggcccaccaggttagaaagctggtgtaagctactgagtaggagacagttaagacagggacgcttgtcagagttagcaattcgactggctgtggttcttaagcaaaggtgagtaatgttgagaaaaaaggcagacatcttactgatgtgattgagttggatgctcagaggagagaggtacatttgtccaggactg

SEQ ID NO: 3392 - protein, 81 aa, Homo sapiens
MYLSPLSIQLNHISKMSAFFLNITHLCLRTTASRIANSDKRPCLNCLLLSSLHQLSNLVGLSPSSCPSPDFILHTCQVNRP

SEQ ID NO: 3393 - DNA, 592 bp, Homo sapiens
acgcgtcacgcaactgtcaaacttgccaatccgcttgacgatactcgcccctacctacgcactacgttgttgcctggtctattccatgcagtaacgacgaatatgtcgcgatctcaggatgatcttgcagtgttcgaaagcggaactgtattccgcgccgtcactccggctgcggcaccgcgtcccggtgtcgacgagcgcccctccgatgaagtccttgccgagatcgacgccgccttgccagcccagccgcgcatgctcgcggccgtgatctgtggcagctggctgcccgatcgctgggatggagagtcggtcaaggctgactggcgacacgctgtgctggtcgcccagaaggctgctgatgctcttggcgtgaggctggtgcgcaaggctgaccgtcaggctccatggcatcccggtcgttgtgcggctctcatcgtcgatgggaaggtcattggccatgctggtgagttgcaccccacagtagtgtcgaaggctggtctgcctcagcgcacctgtgcggtcgagttcaatctagatgctttggtagcctgcgctccgagcggtggtgaggtcatggttatttcaaggt

SEQ ID NO: 3394 - protein, 197 aa, Homo sapiens
TRHATVKLANPLDDTRPYLRTTLLPGLFHAVTTNMSRSQDDLAVFESGTVFRAVTPAAAPRPGVDERPSDEVLAEIDAALPAQPRMLAAVICGSWLPDRWDGESVKADWRHAVLVAQKAADALGVRLVRKADRQAPWHPGRCAALIVDGKVIGHAGELHPTVVSKAGLPQRTCAVEFNLDALVACAPSGGEVMVISR

SEQ ID NO: 3395 - DNA, 376 bp, Homo sapiens
  misc_feature (368)..(368): Wherein n may be a, c, g or t
  misc_feature (369)..(369): Wherein n may be a, c, g or t
  misc_feature (370)..(370): Wherein n may be a, c, g or t
  misc_feature (371)..(371): Wherein n may be a, c, g or t
  misc_feature (372)..(372): Wherein n may be a, c, g or t
  misc_feature (373)..(373): Wherein n may be a, c, g or t
  misc_feature (374)..(374): Wherein n may be a, c, g or t
  misc_feature (375)..(375): Wherein n may be a, c, g or t
  misc_feature (376)..(376): Wherein n may be a, c, g or t
tgtacagcgattatgttggcggcattgatcacgatcatttatttaaaaatgaaacctaaagaggcagtttcgacattctttgaaaccgtgaatgaactaaaaacaccaatttattcgattggtatggtgctcgcttttgccttcattgcaaactattcaggtctgtcagcaacgcttgctttagcactggcacatacgggtcaggcttttaccttcttctcaccattcttgggttgggttggggtgtttcttacaggttcagatacttcagctaacgcattgttttcagcgttacaagccactacagcacagcaaatcggtgtgcctgaagtcttgttagttgctgccaataccagtggtggggtacnnnnnnnnn

SEQ ID NO: 3396 - protein, 125 aa, Homo sapiens
  misc_feature (123)..(123): Wherein Xaa may be any naturally occuring amino acid
  misc_feature (124)..(124): Wherein Xaa may be any naturally occuring amino acid
  misc_feature (125)..(125): Wherein Xaa may be any naturally occuring amino acid
CTAIMLAALITIIYLKMKPKEAVSTFFETVNELKTPIYSIGMVLAFAFIANYSGLSATLALALAHTGQAFTFFSPFLGWVGVFLTGSDTSANALFSALQATTAQQIGVPEVLLVAANTSGGVXXX

SEQ ID NO: 3397 - DNA, 337 bp, Homo sapiens
  misc_feature (337)..(337): Wherein n may be a, c, g or t
acgcgtcgcacggtcgatgaggtgtttccgacgctgacgctcagcgagcggacgatcgagctcgaccgcgcgcagccgggcaatccgggtcgcaccgcgacgccgccgttcgcgccctatcggatcagccacgtcgatgccgcgcggatcagccgtgggcgaagcacctatcaggcgcagcgggcgcgcctcgcccgtgtcgagcgggagacgggcgtccccgaatcgatcatggtcgcaatctgggggcatgaaacgaattacggggcctatacgggcaatttcgatctgcttcgcagccttgcgacgctcgcctatgagggccgtcggcgcgagn

SEQ ID NO: 3398 - protein, 112 aa, Homo sapiens
TRRTVDEVFPTLTLSERTIELDRAQPGNPGRTATPPFAPYRISHVDAARISRGRSTYQAQRARLARVERETGVPESIMVAIWGHETNYGAYTGNFDLLRSLATLAYEGRRRE

SEQ ID NO: 3399 - DNA, 324 bp, Homo sapiens
agatctcacacctcagggcagggtgaaaagcagtgggcgaggagccaggaggtccacccagctaagcctcaggcttcctgggtgccccaagccaaatccttgacttctccaagcctggctgcacaaggggattcgcaggagcatcctcgcctcacagggttggtaccagatgaagcctcagaaatgagctctgaaaatggatatgaggcagtgttgtcactccacacctgggaatccaacacccccaggatgtcctgactctgcccagccatctgactctggaaagaacacaaaccatcctccacccaccacatcaatctttag

SEQ ID NO: 3400 - protein, 81 aa, Homo sapiens [sequence omitted]

SEQ ID NO: 3401 - DNA, 258 bp, Homo sapiens
caattgattgatgacatgttccagaccatggagcacgtcggcggtgtcggccttgcggccccgcagatcggcgtcgatctgcaactggtgatctttggttttgaggccagtgaacgctacccggacgcgccaccggtgccgcagaccatcttgatcaacccggtgattacgccgctcagtcccgtgctggaagaggggtttgaaagttgcctgtccgtgcccggtctacgtggcgcgggggaccgtttccagcagatc

SEQ ID NO: 3402 - protein, 86 aa, Homo sapiens
QLIDDMFQTMEHVGGVGLAAPQIGVDLQLVIFGFEASERYPDAPPVPQTILINPVITPLSPVLEEGFESCLSVPGLRGAGDRFQQI

SEQ ID NO: 3403 - DNA, 426 bp, Homo sapiens
  misc_feature (1)..(1): Wherein n may be a, c, g or t
  misc_feature (2)..(2): Wherein n may be a, c, g or t
  misc_feature (10)..(10): Wherein n may be a, c, g or t
nngtgcacgngccagaaggtgacctacttcctccggccgatatgggagaagcccccaaagcccttcaaagtactcccccactactaccacgagaacgtctcgatggccaacctctgcaagctgcacggatggagagtcagggagaccccgcgccgcgtcttcgacgccgtgctcttcagcaacgagctcgacatccttgacatccgctggcacgagctgagcccctacgtgtcggagttcgtgctgctggagtccaactcgaccttcaccggcataaggaaggacctccacttcagggagaaccggcagcggttcggcttcgccgagtcgcggctgacctacggcaccataggcgggaggttcgtgaagggagagaacccgttcgtggaggagtcgtaccagagggtcgcccttgaccagctgatc

SEQ ID NO: 3404 - protein, 142 aa, Homo sapiens
  misc_feature (1)..(1): Wherein Xaa may be any naturally occuring amino acid
  misc_feature (4)..(4): Wherein Xaa may be any naturally occuring amino acid
XCTXQKVTYFLRPIWEKPPKPFKVLPHYYHENVSMANLCKLHGWRVRETPRRVFDAVLFSNELDILDIRWHELSPYVSEFVLLESNSTFTGIRKDLHFRENRQRFGFAESRLTYGTIGGRFVKGENPFVEESYQRVALDQLI

SEQ ID NO: 3405 - DNA, 279 bp, Homo sapiens
gaattcttaaatgtcatccgcataggtgttttgtcaatattataaacaggaacactaattttcacaaaagacaaggataaccaatggcacagaattttaataaggtaacgactttttcacaggagaacttaatttgctactattttttccacattggcaaacctaagtcatcaaaatccaaatgcatgtgtgtgtgtgtacacttaattgtccttatgtttctggactttagatataagccatgcaactgtaaactatgttcatatatcttcacacaca

SEQ ID NO: 3406 - protein, 65 aa, Homo sapiens [sequence omitted]

SEQ ID NO: 3407 - DNA, 405 bp, Homo sapiens
  misc_feature (1)..(1): Wherein n may be a, c, g or t
  misc_feature (317)..(317): Wherein n may be a, c, g or t
ncaattcttcctgtctgggaggagtttataagaactactgaagaggcaatttccacacaagtgtacctgtgagcaaagggggtaggagtgcaagtgtgtgtacgcatgttgtgtgtggtgagtgtgattgtgaggttcactacctttctcagagcctggcgtgcaccccgaggtagatgccgtggtgggcaaggcccgcagcatcttcacgaccctagtgaatcttgcgtcttctctactcaaatcaccctctctcgtcctctgttattaggtttataactcgttgcccacttaaatttgtgcagcccaccacgganatctaaataggtttgagtcgccccatgggtacagaatggaggctttaataagaaagattaattgtgggtgtgtaccggccttcggaga

SEQ ID NO: 3408 - protein, 68 aa, Homo sapiens
  misc_feature (68)..(68): Wherein Xaa may be any naturally occuring amino acid
MLRALPTTASTSGCTPGSEKGSEPHNHTHHTQHAYTHLHSYPLCSQVHLCGNCLFSSSYKLLPDRKNX

SEQ ID NO: 3409 - DNA, 298 bp, Homo sapiens
accggtgtggcgggcgcggccttcaccaccatcggctccaccgggccgacggcgggttcgcaatacatcgtcgataccttcctggtagtggtgttcgggggggcccaaagcctgttcggccccatcgcctcggcgttcgtgattgcccagacccaatcgctgtcggagtttttcctcagtggctcgatggccaaggtgctgaccttgtcgtcggtgattctgatcctgatgctgcgcccgcaagggttgttctccatcaaagtgcgcaagtaaaggcgagcagataagggtttaagca

SEQ ID NO: 3410 - protein, 90 aa, Homo sapiens
TGVAGAAFTTIGSTGPTAGSQYIVDTFLVVVFGGAQSLFGPIASAFVIAQTQSLSEFFLSGSMAKVLTLSSVILILMLRPQGLFSIKVRK

SEQ ID NO: 3411 - DNA, 344 bp, Homo sapiens
  misc_feature (1)..(1): Wherein n may be a, c, g or t
nctcctacatgcgtggaaaattttgcagtaaagcacaagctccaggtcaagccccgcaaccagcggtcgagtaagatgaggcggctctcatcgcgcgctcagtctgaatccctgagcgaccgaccgtgcaccccagaggaggaggaaaacgaggagaagccacttttggaagtcagcccagaagagcgccccagctctgggcagcaggacgtggcgccagacagaggccctgagcctgggccaccggcgcccttgccgccaccggaggggcccgtgccagacgcgcccgcctgcagcactcctccgcgctcacggccagcgtggaggaggggggcgtccccggg

SEQ ID NO: 3412 - protein, 114 aa, Homo sapiens
  misc_feature (1)..(1): Wherein Xaa may be any naturally occuring amino acid
XPTCVENFAVKHKLQVKPRNQRSSKMRRLSSRAQSESLSDRPCTPEEEENEEKPLLEVSPEERPSSGQQDVAPDRGPEPGPPAPLPPPEGPVPDAPACSTPPRSRPAWRRGASP

SEQ ID NO: 3413 - DNA, 330 bp, Homo sapiens
atccggaccctgcgggtggggggagtccagctgccctgaccctgaaggtggggtgagtccagggcgccctgaccctgaagctggagtgaattttgggatactctgaccatctggcagcctggccacccctgagggctgaccccacctctgcacaccaggtgtgacatgaggacctatatgtgggccccgcccctccaggtcagacccttaaaggcagcattggtgtgcctgatgtgtggaacgggtgggtgcggcccaagcctgcttacgagggccaccgtgtcagagacactgtcgctcggctgcctgccttcccaggaccgcgtcttc

SEQ ID NO: 3414 - protein, 55 aa, Homo sapiens [sequence omitted]

SEQ ID NO: 3415 - DNA, 604 bp, Homo sapiens
  misc_feature (523)..(523): Wherein n may be a, c, g or t
  misc_feature (594)..(594): Wherein n may be a, c, g or t
ggtaccctgtgcctcctccgcccctgatgaatttctgccatgcccaagagagctgggtgctcccttccatatttgcaaagtggaaaagcagcatctacctgatcaagctgccgaaagcactgacaagaactcatgtaaaagcagaagtcagccccagcacagggtcaagactctgggagcagcaaagccatgtggtcaagatccaggctctgccacttctggttgaatggccttggctaagtttcttaaaatgtctgtgcctcacaccaaaagcacaggcaacaaaacaaagagttaaatgggaatgaatttaaaaaatcattcagtcttaaaagggcataaaattgtgacacaggctacaacggagatatacctttgaaagattacactaaggtggggcacggtggctcatgccttacatctataattttgtaggcattaatagtgtataatggtcttcaggttgaagctacattaaattcattcaccaattctgtcgcatccaaattatttgctagccatntatgttgtgggcagcataacataaatgatgctatagattattggaaggtgattcaatatgttggatttttntgggtgtaca

SEQ ID NO: 3416 - protein, 93 aa, Homo sapiens
MNFCHAQESWVLPSIFAKWKSSIYLIKLPKALTRTHVKAEVSPSTGSRLWEQQSHVVKIQALPLLVEWPWLSFLKCLCLTPKAQATKQRVKWE

SEQ ID NO: 3417 - DNA, 419 bp, Homo sapiens
gccacgccagccatctaccctttcctcgactcgccaaataagtattcactgaacatgtacaaggccttgctacctcagcagtcctacagcttggcccagccgctgtattctccagtctgcaccaatggggagcgctttctctacctgccgccacctcactacgtcggtccccacatcccatcgtccttggcatcacccatgaggctctcgacaccttcggcctccccagccatcccgcctctcgtccattgcgcagacaaaagcctcccgtggaagatgggcgtcagccctgggaatcctgttgattcccacgcctatcctcacatccagaacagtaagcagcccagggttccctctgccaaggcggtcaccagtggcctgccgggggacacagctctcctgttgcccccctcacgcgt

SEQ ID NO: 3418 - protein, 121 aa, Homo sapiens
MYKALLPQQSYSLAQPLYSPVCTNGERFLYLPPPHYVGPHIPSSLASPMRLSTPSASPAIPPLVHCADKSLPWKMGVSPGNPVDSHAYPHIQNSKQPRVPSAKAVTSGLPGDTALLLPPSR

SEQ ID NO: 3419 - DNA, 442 bp, Homo sapiens
tccggatttgagatttgcgagcacgagccgctgcccggacgcgaggagtacgcccactccgagaagtacgagtaccggccccgcgattacgattccgagccgaacatcacgctgctcgtcactcgcctcaacgagatccgtcgggctcacccggcgttgcagcaactgcgtgacactacgatccatcacgccccacacgacaacgtcttcgtgttctccaagaaagcgggaaatgacgttgtgatcgttgttacctccttggatccggtatggggtattgagtctcagatcatgctcgatatggctgccctcggcttcggtaatgacgactcgttcaccgtccacgataagctcactggagccgatttcacgtggggccagcaagccttcgtcaggctctaccccgctcagcccgcccatatcctgcatgtgcgaaagacca

SEQ ID NO: 3420 - protein, 147 aa, Homo sapiens
SGFEICEHEPLPGREEYAHSEKYEYRPRDYDSEPNITLLVTRLNEIRRAHPALQQLRDTTIHHAPHDNVFVFSKKAGNDVVIVVTSLDPVWGIESQIMLDMAALGFGNDDSFTVHDKLTGADFTWGQQAFVRLYPAQPAHILHVRKT

SEQ ID NO: 3421 - DNA, 285 bp, Homo sapiens
accggtgacttcggccacgacgaagcttccagccgccgcctggcgcgccagcaccgcgcgctcaccggggaggtggaggcacatcgcgggcccgtgagcggcctgcggcgccagctggcgacactcgggggtgccagtggcgcagggccactggtggtggcgctgcaggtgcgcgtggtggaagcagagcagttgttcgctgaggtgaccgaagtggcggcgctgaggcgccagtggctgcgggacgcgctcgctgtctaccgcatgtttggcgaggtgcacgcg

SEQ ID NO: 3422 - protein, 95 aa, Homo sapiens
TGDFGHDEASSRRLARQHRALTGEVEAHRGPVSGLRRQLATLGGASGAGPLVVALQVRVVEAEQLFAEVTEVAALRRQWLRDALAVYRMFGEVHA

SEQ ID NO: 3423 - DNA, 513 bp, Homo sapiens
  misc_feature (1)..(1): Wherein n may be a, c, g or t
naccggttggcatcatgctcacagcactgggggttcccttctttcttttcctcctcagaaagacattgtgagatgggaaatatcatggaaacacctatactttccggctcccacttgaacgtcaccttgggaaatcacaagattctcaatgacgtctccgtatcattccaagcgggagttatgcacgccatacttggccccaacggttctgggaagaccaccctggtacgcacgttatgcggagccctctcccccgagtcggggagcgtcaaattcgatggaacggatctatccacgatgtccgcatcctgtatcgcgcgtcgtattgcgatcgtctggcagagcgcgaccgctccctctgacctcaccgtacgtcacctcgttggctacgggagatatgcccacacaccgtggtggcagataagggacaccagcgccgacagccatgtggaacaagcaatggagctggccgatgtcacgtgcttcgccgatcgacgcgtcaccactctctca

SEQ ID NO: 3424 - protein, 171 aa, Homo sapiens
  misc_feature (1)..(1): Wherein Xaa may be any naturally occuring amino acid
XRLASCSQHWGFPSFFSSSERHCEMGNIMETPILSGSHLNVTLGNHKILNDVSVSFQAGVMHAILGPNGSGKTTLVRTLCGALSPESGSVKFDGTDLSTMSASCIARRIAIVWQSATAPSDLTVRHLVGYGRYAHTPWWQIRDTSADSHVEQAMELADVTCFADRRVTTLS

SEQ ID NO: 3425 - DNA, 207 bp, Homo sapiens
ccatggatggtgattcactgcacagcttggcagtgacaagcattcccaaagcatgggaggccagatcgtgcggagggcccagcagcagcctctccagaggggaaggggccctgcccacctctctcccttctgtatcccttggcctagaagagtgtctggcacagaaggtactgagaattatctatcgcagggctagcaggcagatct

SEQ ID NO: 3426 - protein, 68 aa, Homo sapiens [sequence omitted]

SEQ ID NO: 3427 - DNA, 438 bp, Homo sapiens
gctgctgcagaggccagagccaaagaggcacctaacgaattgaaacgtatcgtgaccaacaatgaagaagaagtcactgtcagtaagaccgccagccatttgaccatcgataagccaatgatttcaagaaggggtgcttccacatcctctttggcctccatggtgtccagtgataccaacggtacgaacgcagatgatgaaggagaaattcttcccccaccttctttgaagatacctcacgacattgtgtatacccgttgttgtcacttgcgagaaattctgcccataccagccacattgaagcaattgaaaaagggctcgacggaccctatccccatcttacagttacgtaacccaagaccttctatggtggaaatttggtcgttcagcgatttcttgagcattgctcccgttttatgtctttcgttggacggtgta

SEQ ID NO: 3428 - protein, 146 aa, Homo sapiens
AAAEARAKEAPNELKRIVTNNEEEVTVSKTASHLTIDKPMISRRGASTSSLASMVSSDTNGTNADDEGEILPPPSLKIPHDIVYTRCCHLREILPIPATLKQLKKGSTDPIPILQLRNPRPSMVEIWSFSDFLSIAPVLCLSLDGV

SEQ ID NO: 3429 - DNA, 306 bp, Homo sapiens
  misc_feature (1)..(1): Wherein n may be a, c, g or t
nacgcgtacacaggaaagagtacataaaataaccatagtatatttctggacatatcttattacacaacataaaatagaatgtttaacatgaatctactttctacaccttcttctgaagagggttctccacagaataggtcatcttcaacgtcttctgttgagggcaagaaggatagggacacctttactaatttgcaaaacgaatttgatggtaaagtatttggcgtctcactcgaggaatcactgaaagttgctcaagaggaagtaattatccaaaaaagtacaaatgaaattggttccataccg

SEQ ID NO: 3430 - protein, 76 aa, Homo sapiens
MFNMNLLSTPSSEEGSPQNRSSSTSSVEGKKDRDTFTNLQNEFDGKVFGVSLEESLKVAQEEVIIQKSTNEIGSIP

SEQ ID NO: 3431 - DNA, 324 bp, Homo sapiens
ggcccctggctggaaagtgcaaaaagccttgctataactgaaaaggaacgccagcagtacgagtggaacgccagaacacaggtgacgatgtggtatgacaacacggagaccgagcagagtaaactgcatgactacgccaataagttttggagcgggctgctgaagagctactaccttccaagggcgtcaaagtacttcgcctacttaacgaggagcctgcaagagaaccggagcttccagctggaggagtggaggaaggactggatctcgtattccaacgagtggcagtccgggcttcatggatagtcgatggcacccaagggc

SEQ ID NO: 3432 - protein, 101 aa, Homo sapiens
GPWLESAKSLAITEKERQQYEWNARTQVTMWYDNTETEQSKLHDYANKFWSGLLKSYYLPRASKYFAYLTRSLQENRSFQLEEWRKDWISYSNEWQSGLHG

SEQ ID NO: 3433 - DNA, 448 bp, Homo sapiens
  misc_feature (448)..(448): Wherein n may be a, c, g or t
actagtggtcctgagacaagtttactgagtttccctgctctccaaggtgtcagaggaagctgcatattgtctttttgtaccccaaagtgacatagttgtggaaacaaagagctattggacctaaagagaccctgtggatgggaacaaagaatgactcatagggtcttgcctgggctactggccaagggcagaatgggaggctgcgcttctcggtggatgccagcatgtgtagatgataagccaagaaccgatgttcccacctgcacatatgccccccgacgggcccattttgaaaattcagcaaatctgggtcccatgaacctagatgcaaccttatggaagagatggaattatagaaagtggatgggtttggaaggaagaccttagcagccagatgttaataaaaaagtcacttaatttgtaaacttttgggtgctaatcattgatn

SEQ ID NO: 3434 - protein, 78 aa, Homo sapiens [sequence omitted]

SEQ ID NO: 3435 - DNA, 386 bp, Homo sapiens
  misc_feature (386)..(386): Wherein n may be a, c, g or t
tgatcagagctcagtagctataattttggcagggacacagattattgtcctggaacagggatactgtacatggggtaagaaaggggaagaaagatcctaacccctctatcctcctgatatccatcatctcgtgccttgaagctagcccacaagaagctgaaaaaccaaagttcaaaggggtgggtttcccagcattcagacagaagagtgggaaaaggggtgaggtgggcagaacgaagaaacaacacaccttggacttgatttggagcctgcctgaaattgatttttcagaagctgaaaaagtatgtatatgtgcgcgtatgtggggatgtgggtgtataatggagattaatggatataccatgcacgcatacacacacactacn

SEQ ID NO: 3436 - protein, 117 aa, Homo sapiens [sequence omitted]

SEQ ID NO: 3437 - DNA, 426 bp, Homo sapiens
  misc_feature (1)..(1): Wherein n may be a, c, g or t
  misc_feature (2)..(2): Wherein n may be a, c, g or t
  misc_feature (382)..(382): Wherein n may be a, c, g or t
  misc_feature (391)..(391): Wherein n may be a, c, g or t
nntcgcgagcacactccaccctcttataggggcggcagtagaggtggcgggagcaactatatgagcaatctacccttcggattaggttatggagatgtaggcaaaaatcatattacggaatttccatccatcccattgcccatcaatggtcctataacaaataaggaaagatctttagcagtaaagtacatcaattttggaaagactgttaaagatggcccattttataccggatcaatgagcttgataatagatcaacaggaaaacagcaagagcggtaaacgcaaacccaacataatcctagacgaagacgatactaatgatggcattgaaagatattccgataaatattgggaaaaaaggaaaataggtatttctatgnatgatcacncgtataatttgaacctctttcccaatgaattgtac

SEQ ID NO: 3438 - protein, 142 aa, Homo sapiens
  misc_feature (1)..(1): Wherein Xaa may be any naturally occuring amino acid
  misc_feature (128)..(128): Wherein Xaa may be any naturally occuring amino acid
  misc_feature (131)..(131): Wherein Xaa may be any naturally occuring amino acid
XREHTPPSYRGGSRGGGSNYMSNLPFGLGYGDVGKNHITEFPSIPLPINGPITNKERSLAVKYINFGKTVKDGPFYTGSMSLIIDQQENSKSGKRKPNIILDEDDTNDGIERYSDKYWEKRKIGISMXDHXYNLNLFPNELY

SEQ ID NO: 3439 - DNA, 255 bp, Homo sapiens
acgcgttgggcccactagcgtatacctgtgcagggtccaatttccagaacctgaagggaaaggggagatgtactgggcactggtcagcccctttgcggctttcaactttatgaatgttctctgtgcggggtgtccaaggctgtgggtgatggggaaccaggtccaggaccagggttgtgtggctacttcctcccaattgaaacaccctctttggagggaagaggagagcttctgagactcaggaagtgaaaattt

SEQ ID NO: 3440 - protein, 55 aa, Homo sapiens
MYWALVSPFAAFNFMNVLCAGCPRLWVMGNQVQDQGCVATSSQLKHPLWREEESF

SEQ ID NO: 3441 - DNA, 305 bp, Homo sapiens
acgcgtgcagaaagaagggccatggaaattccaccctgtcagctatatttcgtgttcggattatgcctcaaagggaagtcctctccacagccagatgaacgacatttcagtggaaatgccaacacagagcatttaaaattcaaggagtcttttgaaagcaaggcgagtctagaggccctgcctggattccttgtctactgctgtgcgccctgtgaggaagctgctatccagtcacaagcactcacttttcagatacttgctgggaactccaaaaatgtttagcgacaggccccaccacaaaaatc

SEQ ID NO: 3442 - protein, 86 aa, Homo sapiens [sequence omitted]

SEQ ID NO: 3443 - DNA, 250 bp, Homo sapiens
cgaggtaggcagggtagggatgatttagcttgttgtacagatgtggaaacaggccgaatggttcctatttttttttgttgttgttgctgttgttaggttttttttttgtttttgtttttgttttttttttggggaaccccccccaaaaaaaaaaaaaaaaaaaaaaccccccaaaccccccgggggtagaacggtaaattttttttaaattccctttttttttttttaatcccaatccaacaaaaaacaa

SEQ ID NO: 3444 - protein, 55 aa, Homo sapiens
MWKQAEWFLFFFVVVAVVRFFFCFCFCFFFGEPPPKKKKKKKPPKPPGGRTVNFF

SEQ ID NO: 3445 - DNA, 402 bp, Homo sapiens
  misc_feature (97)..(97): Wherein n may be a, c, g or t
gaggtacgtgatgtacacgccactcattatggtcgtgtttttccaatcgaaacaccggaagtccaaaacattgatttaatcaactccttgtctgcgngcgcgcgtaccaataactacggcttcttggaaacgccttatcttaagattgtagatggcaagcagactgatgaaacagtgtatgtatccgcgatcgatgaagcgaaatatgttattgcccaagcctctgcaaatgtagatgaagaagggcgtttggttgatgagtgggttcaggtgcgtcatatgcacgaaaccactttgattccaaaagagaaagtgaacttgatggatgtatctcctcgtcaggtcgtttctgttgccgcctctttgattccgttcctagagcacgatgatgctaaccgagct

SEQ ID NO: 3446 - protein, 134 aa, Homo sapiens
  misc_feature (33)..(33): Wherein Xaa may be any naturally occuring amino acid
EVRDVHATHYGRVFPIETPEVQNIDLINSLSAXARTNNYGFLETPYLKIVDGKQTDETVYVSAIDEAKYVIAQASANVDEEGRLVDEWVQVRHMHETTLIPKEKVNLMDVSPRQVVSVAASLIPFLEHDDANRA

SEQ ID NO: 3447 - DNA, 351 bp, Homo sapiens
tgtacacagcatacaaagccatcaacatttcacctctaccaacggggacaagagagaccaggtgacctttgcctcagggtgggacatggccctgtggtggcagagtatggggttcctgcccccatgtcagggttctccatattctgtcttcagcctggctagccttctatcatgtcctgcccagagagcaccaggaaaatggctgactgctcagagcgctctcttgtggctactgtcctcatgactgtcacctctactggtaggtgtgcttggtacaagggttacagaaaagggacggctccccactggtctgactcccactcacaacagacccttggctcaacacctgcc

SEQ ID NO: 3448 - protein, 60 aa, Homo sapiens
MSCPESTRKMADCSERSLVATVLMTVTSTGRCAWYKGYRKGTAPHWSDSHSQQTLGSTPA

SEQ ID NO: 3449 - DNA, 416 bp, Homo sapiens
  misc_feature (208)..(208): Wherein n may be a, c, g or t
  misc_feature (299)..(299): Wherein n may be a, c, g or t
  misc_feature (340)..(340): Wherein n may be a, c, g or t
gccggctcgctgggagctggactcaccatgacagcagttgaccgctccctcgcatcaccgacctccacagtttcagactccacgttcagcacggcggcgctaacagtgttggcgacgaccgatatccacggtcatgtcttcgactgggattacttcgctgacgctgcctttccgccttcggataaggggcgttcctcggctcccttgngtgtaagccgcgtggccacgatcgcgaaacacgtgcgcgcggagcaaggcgccgactctgtcgtcatgctcgacaacggcgacaccatccnaggcaccccgctgacatacctttcagcgaagcaacccgaanagctcggtcacgatgaggtcatggctcgcgccttcaacctgggtagatatgacgctgcagatatcggcaatcatga

SEQ ID NO: 3450 - protein, 138 aa, Homo sapiens
  misc_feature (70)..(70): Wherein Xaa may be any naturally occuring amino acid
  misc_feature (100)..(100): Wherein Xaa may be any naturally occuring amino acid
  misc_feature (114)..(114): Wherein Xaa may be any naturally occuring amino acid
AGSLGAGLTMTAVDRSLASPTSTVSDSTFSTAALTVLATTDIHGHVFDWDYFADAAFPPSDKGRSSAPLXVSRVATIAKHVRAEQGADSVVMLDNGDTIXGTPLTYLSAKQPEXLGHDEVMARAFNLGRYDAADIGNH

SEQ ID NO: 3451 - DNA, 320 bp, Homo sapiens
cctccccaaaatctgcagcccttacctggccctggacccccaccaagttccgggcacagtggtctgctcactgctcctccaaatagagctcatgctccagccgccaccccgcccctgccgaccccgggccttcactcactctcaactctacatcttttcagggtcacactctcaacaccacaaccacagctgcttcaccatctgggctgctaaggccctccgagtgccacgcattctctccacagctctaagcactatctgaaattagctcacttcttttccttttttttgtcttctctctccccctgaacctggggccc

SEQ ID NO: 3452 - protein, 70 aa, Homo sapiens [sequence omitted]

SEQ ID NO: 3453 - DNA, 333 bp, Homo sapiens
tccggactctgttggtgccaccctggactacaagctgtggttccgcagctcttccaaccctgccagcctctgcctttatgacagagtccttgaggtgaatgccacactggactgtgacactcctggagcctgcttccagcatgcagcctccatcctggtgctcgatggtggccagccccagatgaccactgaggtgccggtactggtgatggtgacacccatcaacgagttctccccagcctgtgcccctcgcacgttccgggttcaggaggatgcggcgccccacactctactgggctccgtggtgggcacggatatggattaccctcatga

SEQ ID NO: 3454 - protein, 50 aa, Homo sapiens
MTTEVPVLVMVTPINEFSPACAPRTFRVQEDAAPHTLLGSVVGTDMDYPH

SEQ ID NO: 3455 - DNA, 498 bp, Homo sapiens
cgcgttctgttggtggacttcgatcctcagggctccctctcggtgggcttggggattaacccccatactctcgaaaattccatctacaccctgctgatgtcgcctcgtgacgacgttcatgacgtcatccagcccactgagaccgagggtatggacttgttaccggctaatattgatctgtctgccgctgaggtgcagctcgtcagcgaggtggcccgcgagcagaccctcaaacgggtcattgaccggatccgcggcgaatacgacatgatcctcatcgactgtgcaccgtcgttaggtctgctcaccatcaacgctctgaccgcttccgactacgtcatcatgcctttggaatgcgagttctttgccttgcgcggtattgccctgcttaccgacactattgagaaggttcaggaccgtctcaaccccgacctggaggtcctcggcatccttggaaccatgttcgacccgcgtaccctgcatgcccggtctgcatgg

SEQ ID NO: 3456 - protein, 166 aa, Homo sapiens
RVLLVDFDPQGSLSVGLGINPHTLENSIYTLLMSPRDDVHDVIQPTETEGMDLLPANIDLSAAEVQLVSEVAREQTLKRVIDRIRGEYDMILIDCAPSLGLLTINALTASDYVIMPLECEFFALRGIALLTDTIEKVQDRLNPDLEVLGILGTMFDPRTLHARSAW

SEQ ID NO: 3457 - DNA, 336 bp, Homo sapiens
agtactgcgatggacagctatgtcgtggatggtggtcgcaaattacatgtttgtggtaacaaccctgattgcgatggttatgaagtcgaagaaggcgaattcaagatcaagggttatgatggtccgactatcccatgcgataaatgtgatggtgagatgcagcttaaaacgggtcgttttggtccatatttcgcatgtactagctgtgacaatactcgtaaggtactcaagagtggtcaacctgctccgccacgtgtagacccaatcaaaatggagcatctacgttcaacgaagcatgatgatttcttcgtcttacgtgagggcgctgctggttta

SEQ ID NO: 3458 - protein, 112 aa, Homo sapiens
STAMDSYVVDGGRKLHVCGNNPDCDGYEVEEGEFKIKGYDGPTIPCDKCDGEMQLKTGRFGPYFACTSCDNTRKVLKSGQPAPPRVDPIKMEHLRSTKHDDFFVLREGAAGL

SEQ ID NO: 3459 - DNA, 412 bp, Homo sapiens
gtgcacaacgggatcgaatacgggttgatgcagtcgtatgccgagggctatgagctgttggcggccaaggacatcgtcaaggaccttcccggaactttccgggcttggcaaaaaggcacggtagtgcgctcctggttgcttgatctgatggtcaaggccctcgatgaagatcccggcttggcggccatcgacgactacgtcgaagattccggcgagggccgctggacggttgaagaagcaatcgccagcgcggtcccggtgcccgcgatcaccgccgcgctctatgcccggttcgcctcgcgtgaagacaactcacccgctatgcgaatggtttccgcgctgcgcaaccaattcggcgggcacgcgaccaaaccggccaaatagtgtgtatcttgaacgggttcgccgactg

SEQ ID NO: 3460 - protein, 127 aa, Homo sapiens
VHNGIEYGLMQSYAEGYELLAAKDIVKDLPGTFRAWQKGTVVRSWLLDLMVKALDEDPGLAAIDDYVEDSGEGRWTVEEAIASAVPVPAITAALYARFASREDNSPAMRMVSALRNQFGGHATKPAK

SEQ ID NO: 3461 - DNA, 222 bp, Homo sapiens
accggtgaacccaacccgctcgagcgggtgaaggagatccggttgacggtcaagcgcgaacgcaacagttcgctcgccgacatccgtggaccctcgttcggactgcatcccctggtgtgggtgggtatctggctcgcgatcttccaacagttcgtgggtatcaacgcgatcttctactactcgacgacgctgtggcagtcggggggcttctccaccgacgac

SEQ ID NO: 3462 - protein, 74 aa, Homo sapiens
TGEPNPLERVKEIRLTVKRERNSSLADIRGPSFGLHPLVWVGIWLAIFQQFVGINAIFYYSTTLWQSGGFSTDD

SEQ ID NO: 3463 - DNA, 345 bp, Homo sapiens
tcgaagatgttgggcctgagccaggaacaaactattgaagcattgtcacaagcatttgtagacggtcaatcactgcgtacttaccgtcatgccccaaatactggatctagaaagtcgtgggcggcgggagatgcagtttcgagggctgtaaacttggcttatttagtcaaaaatgctaatgttggcacgataccttcagtattaacagctagaacctggggattttatgacgttttatttaagggtaaacctttttcattccaacaaagatcaaaatatgattcctacgtcatggaaaacgttctgttcaagatatcatttcctgccgaattccatgcgcaaact

SEQ ID NO: 3464 - protein, 115 aa, Homo sapiens
SKMLGLSQEQTIEALSQAFVDGQSLRTYRHAPNTGSRKSWAAGDAVSRAVNLAYLVKNANVGTIPSVLTARTWGFYDVLFKGKPFSFQQRSKYDSYVMENVLFKISFPAEFHAQT

SEQ ID NO: 3465 - DNA, 174 bp, Homo sapiens
gcacatccacctttacgccaaaagccttggttgcttgagccgttagctttatctaagttctgtgcgacctttattgaacagcaagtaggcggaaatttaacggaagcctcgctcgcattacgtttaccaacacttttaccttataacggggtgttatttttaggtaatagtgta

SEQ ID NO: 3466 - protein, 58 aa, Homo sapiens
AHPPLRQKPWLLEPLALSKFCATFIEQQVGGNLTEASLALRLPTLLPYNGVLFLGNSV

SEQ ID NO: 3467 - DNA, 400 bp, Homo sapiens
  misc_feature (356)..(356): Wherein n may be a, c, g or t
  misc_feature (386)..(386): Wherein n may be a, c, g or t
gctagccatcccccaactttggtttgcaaaactctgagcctggtggggaaatgaagggctggcttgctaaccacaaatgaagactcatttgcacaggcaaagcgggggcaggggtgactcctcttgccctagcggaagggactgacttctgcaggctgctgtcttgctggagccagtcatgccccaccattgagcctgggcactcggacacagttaccagcagtgggctttgtcgtcctccggcctcattcttctcctttgataaatgggggggggaatagtgatattgtggcgattctgtggcactcaaatgaggaaatgcacataaagcctttgctcagtgcctgactcatggntgaatacttgggggatattcaccatcattngttactgttgtagt

SEQ ID NO: 3468 - protein, 62 aa, Homo sapiens
MVGHDWLQQDSSLQKSVPSARARGVTPAPALPVQMSLHLWLASQPFISPPGSEFCKPKLGDG

SEQ ID NO: 3469 - DNA, 347 bp, Homo sapiens
  misc_feature (1)..(1): Wherein n may be a, c, g or t
ngccaacatgatgaaaccctgtctctacttagaaagaaagaaaaaaaaaaaaggccaggtgtggtggtgtgccccctgtatccccaccagttttgaggtcggacgcaaaagaagttggttaaaacccaaaaggcccgatttgccattgagggggaatccggcccattggccccccagccctggttaaaaaagcggaaactcccttaaacaaaaaataaaaattaaaacccccccaaaaaaatacacattttgcccaatcccttctttttggggttttgaaaagggagccctaactgggtgtggtggttgaccccttttatcaccccatggatattcgagctcggtaa

SEQ ID NO: 3470 - protein, 59 aa, Homo sapiens
MMKPCLYLERKKKKKGQVWWCAPCIPTSFEVGRKRSWLKPKRPDLPLRGNPAHWPPSPG

SEQ ID NO: 3471 - DNA, 308 bp, Homo sapiens
ccgtcatctctgcttggatacgaggcactgacaggttccctggatgattttggatttgaagattatcttaacatgcctcatgattctgacagtttccgtcaacctgacatgcaccatggaatggaggttcgccttggtttgtccaagggacctatctgtcctagcttcaattgaggcagtaatgtaattctgctgcaagttcacctctcagtccagtacttcagtcaatagaccatattaagatggtgaaatatgaaaactggtagcttgcatctgttcaatgttatgttttaatcaacgctgaattc

SEQ ID NO: 3472 - protein, 57 aa, Homo sapiens
PSSLLGYEALTGSLDDFGFEDYLNMPHDSDSFRQPDMHHGMEVRLGLSKGPICPSFN

SEQ ID NO: 3473 - DNA, 246 bp, Homo sapiens
acgcgtgaagggggcgaagagtttgagattgccttggcagatgcctctgacaatgcccgcattggaagggtggcgacagccaaggtgctcattagtggtcccaacgatgcctcgactgtgtccctgggcaacacggctttcactgtcagtgaggatgcaggcacagtaaagattccagttatccgccatggtactgacctctctactttcgcatctgtctggtgtgcaacgcggccctcaaaccca

SEQ ID NO: 3474 - protein, 63 aa, Homo sapiens [sequence omitted]

SEQ ID NO: 3475 - DNA, 409 bp, Homo sapiens
  misc_feature (1)..(1): Wherein n may be a, c, g or t
  misc_feature (2)..(2): Wherein n may be a, c, g or t
nnacgcgttaacaattaaagcattaacgccagatgaatggcaaaaacaaaaacattttatatagtcggttaaatagggattttcatgggtcaatttattattcaaggtggctgccagttaaatggcgaggtaacaatttctggggcaaaaaatgccgcattaccaatcctatttgctactttattatctgagggtgatatcaatttaagcaatgtaccgcttttaaaagatattgccaccactatcgagttgttaaaagagctgggtgctactgctactcagactcaacactgcgtgcatattaatgcgaaagaagttaagaactatactgcttcttatgaattagtgagaagtatgcgtgcttcaattttggcattaggtccattggttgctcggttcggtgaagctt

SEQ ID NO: 3476 - protein, 108 aa, Homo sapiens
MGQFIIQGGCQLNGEVTISGAKNAALPILFATLLSEGDINLSNVPLLKDIATTIELLKELGATATQTQHCVHINAKEVKNYTASYELVRSMRASILALGPLVARFGEA

SEQ ID NO: 3477 - DNA, 401 bp, Homo sapiens
  misc_feature (1)..(1): Wherein n may be a, c, g or t
naggcctctgcatgggacctggccccatcctgtgctggtttcctgtttggtgtagccaacactgcaggggccttggcaggtgtggtaggcgtgtgtctaggtggctatctgatcgagaccactggctcctggacctgtgtgttccacctggtggccatcgtcagcaacctgggactgggcacctttctggtgtttgggaaggcacagagggtggacctggtacccactcatgaggacctctagcttcctgacgatcagtccccaggacatgacgtcagcagcctaaagacaacaactctgtcggtgaaactctgggaactccacctcggatgtatgagcagacaacgagaccacagtctcctgaggaatccagatgagttggagagatagcctgagtgcac

SEQ ID NO: 3478 - protein, 80 aa, Homo sapiens
  misc_feature (1)..(1): Wherein Xaa may be any naturally occuring amino acid
XASAWDLAPSCAGFLFGVANTAGALAGVVGVCLGGYLIETTGSWTCVFHLVAIVSNLGLGTFLVFGKAQRVDLVPTHEDL

SEQ ID NO: 3479 - DNA, 224 bp, Homo sapiens
  misc_feature (1)..(1): Wherein n may be a, c, g or t
ntgatctcgatcaagctgccgtccggatcgcggcaatagaccgaacgcagcgtgccgcgggcgccctgcctggggcccgggccttcctcgatcgcgacgccatgcgcctgcaaatgcgccaccacctcgtcgggcgtggcggaggtgagaaagcacagatcctcgctgtcggcggtctgatgatccgcggtgaacctttccaccttgtcggcatcgcgcggccg

SEQ ID NO: 3480 - protein, 67 aa, Homo sapiens
MPTRWKGSPRIIRPPTARICAFSPPPRPTRWWRICRRMASRSRKARAPGRAPAARCVRSIAAIRTAA

SEQ ID NO: 3481 - DNA, 243 bp, Homo sapiens
agatctctccctgactctgtgccacacagccagcagcagaggttcagacctgagtccctcagcccaagacctccctcccccagggagaaccctcttacgtgtatgtccaggtacagcctgggcaggtatctcacacatggctcctgtggaaagggataaggggttctgggatgcccacaggggcatacctggtcacaaaagtctccctaatggccctctcaacagccagaccagcccagatcc

SEQ ID NO: 3482 - protein, 62 aa, Homo sapiens
MPLWASQNPLSLSTGAMCEIPAQAVPGHTRKRVLPGGGRSWAEGLRSEPLLLAVWHRVRERS

SEQ ID NO: 3483 - DNA, 318 bp, Homo sapiens
ggccctcgtgggaactatcattatgagagaaactgccgttcccatctagggatgattgctggtggtactggtattgcgcccatgtatcagatcatgaaagctattgccatggaccctcacgacactaccaaggtctctctagtctttgggaacgtccatgaggaggatattctgttgaagaaggaactggaagcgttggtggccatgaagccttcccaatttaagatagtttactacttagactctcctgaccgtgaagactggactggtggtgtaggatacattaccaaggatgtcatcaaggaacacttgcccgcg

SEQ ID NO: 3484 - protein, 106 aa, Homo sapiens
GPRGNYHYERNCRSHLGMIAGGTGIAPMYQIMKAIAMDPHDTTKVSLVFGNVHEEDILLKKELEALVAMKPSQFKIVYYLDSPDREDWTGGVGYITKDVIKEHLPA

SEQ ID NO: 3485 - DNA, 153 bp, Homo sapiens
tcgacaagtggtaaatcacaagatgtaattaacccatcaactgaagaagtcttaggacaaatcgctaaaggtacacgtgaagatgtagacaaggcagtagaagcggcacacgcagtttatcttgagtttagaaacactccagttgaaacgcgt

SEQ ID NO: 3486 - protein, 51 aa, Homo sapiens
STSGKSQDVINPSTEEVLGQIAKGTREDVDKAVEAAHAVYLEFRNTPVETR

SEQ ID NO: 3487 - DNA, 325 bp, Homo sapiens
  misc_feature (1)..(1): Wherein n may be a, c, g or t
  misc_feature (2)..(2): Wherein n may be a, c, g or t
nnccgcaaaccacgtgaggcgaaaggcttctacgccgtgttcgccgggttgctgctggtgtctgcaaccatcgtgctcatccccggcagcccgctcggtctgctgaccgtcggcgtgcagaccctcgccggtgtcctgctgccatcggcgacggtgttcctactgttgctctgcaacgacaagcaagtcctcgggccgtgggtcaacggtcggtggctcaactttttccccccggccgtgatcgcaatcctcgtcatgttgtcaatcgtgctgcccgcgagtgtgctgttccccgacatcccggcccccacgatcctttggatcc

SEQ ID NO: 3488 - protein, 108 aa, Homo sapiens
  misc_feature (1)..(1): Wherein Xaa may be any naturally occuring amino acid
XRKPREAKGFYAVFAGLLLVSATIVLIPGSPLGLLTVGVQTLAGVLLPSATVFLLLLCNDKQVLGPWVNGRWLNFFPPAVIAILVMLSIVLPASVLFPDIPAPTILWI

SEQ ID NO: 3489 - DNA, 436 bp, Homo sapiens
cgcgccgaggcgctgattcagctgctggacgtgaatgacaatgacccggtagtgaagttccgctacttcccggccacctcgcgctacgcctcggtagatgagaatgctcaagtgggcaccgtggtggctctgctcaccgtgacggacgcagattctcccgcggccaacgggaacatctccgtgcaaattctcgggggcaatgagcagcgccactttgaagtgcaaagcagcaaagtgccgaacctgagcctaatcaaggtggccagcgccttggaccgcgagcgcatcccttcctacaacctcacagtttccgtctctgataactacggggcgccccctggcgcagcagtccaggcgcgctcttctgtggcaagcctggtgatttttgttaatgacatcaatgaccatcctcctgtcttttcacagcaagtgtaca

SEQ ID NO: 3490 - protein, 145 aa, Homo sapiens
RAEALIQLLDVNDNDPVVKFRYFPATSRYASVDENAQVGTVVALLTVTDADSPAANGNISVQILGGNEQRHFEVQSSKVPNLSLIKVASALDRERIPSYNLTVSVSDNYGAPPGAAVQARSSVASLVIFVNDINDHPPVFSQQVY

SEQ ID NO: 3491 - DNA, 246 bp, Homo sapiens
gaattcaatctctctaaagcatccttcaacttcttaatctccatagcttgttttcgagctagttcatgtgattcctgcaatcgcttaagtgccccactcagttttgtcttctctttggaaacctgagtttccagctcctgaatatgtttaatagctgcctgctcaatgcaagatcgacgcttgtattcttcctcaagcatgcctgttatctggtatcttagttcagccatttcttgggtgagatct

SEQ ID NO: 3492 - protein, 76 aa, Homo sapiens
MAELRYQITGMLEEEYKRRSCIEQAAIKHIQELETQVSKEKTKLSGALKRLQESHELARKQAMEIKKLKDALERLN

SEQ ID NO: 3493 - DNA, 298 bp, Homo sapiens
ccattactacacactcttcattatcgtggctgttgtatccatgccatggttggagagctcaccttggaaagtaagcactctgtggaagtatcatttcaaaactgactttaattttggaaattaaaaggaaaacccttcttaagctagagtaagtggagtgaattgacttggatcctgcctgggttcctctgtcaacattctgttttgtggtctttaaataacatacttgattaattccattggacatgaggtaatggctgctcttaagctattctaaagcttgagacagaactgtaca

SEQ ID NO: 3494 - protein, 62 aa, Homo sapiens
MSNGINQVCYLKTTKQNVDRGTQAGSKSIHSTYSSLRRVFLLISKIKVSFEMILPQSAYFPR

SEQ ID NO: 3495 - DNA, 417 bp, Homo sapiens
tgatcacagctcactgcagcctgggctacagagcgacactccgtctaaaaaaaagaaaaaaaaatggatgcatattcaggtaacaccatcaaggcaaagaggagtgctaaaagtcttctctgacacaaaatgtaaatatcccgctcaatcaacattctttcttatccttctaatactttcaagcagttgctcccacttcacttctttttggacccacagagaccgtcagccccttacttctgtgctatatccttatataacagcccactcttatttttacttcttttcctatatagcacaggctccacggatcatgacttcaaactttctcttatttatcttcatcccttctgttccccagaagcacttacctgcttatatcccccacatgggatcagtcaacacttgggtaaaatc

SEQ ID NO: 3496 - protein, 116 aa, Homo sapiens [sequence omitted]

SEQ ID NO: 3497 - DNA, 297 bp, Homo sapiens
ataagatgtgtatcagagatcatgattccaaagattttaaccgccactccgccacacgctttattcatggactgtacccatgataatgaaactccctttgaaaaaagaacagtggaggatactttgcccaatgctgcattggtggctctttgctcgtccgccattggatctgtttatggctacgacgaaatttttccacatttactgaatttggtcactgaaaaaagacattatgacatttctacgcctactggtagcccctcgataggaatacccaaagtcaaggccactttgaat

SEQ ID NO: 3498 - protein, 99 aa, Homo sapiens
IRCVSEIMIPKILTATPPHALFMDCTHDNETPFEKRTVEDTLPNAALVALCSSAIGSVYGYDEIFPHLLNLVTEKRHYDISTPTGSPSIGIPKVKATLN

SEQ ID NO: 3499 - DNA, 315 bp, Homo sapiens
  misc_feature (1)..(1): Wherein n may be a, c, g or t
  misc_feature (2)..(2): Wherein n may be a, c, g or t
nnacgcgtaatgactgcacaacttatcgacggcaaatcaatcgccgccagcctgcgccagcagatcgccaaacgagtcgccgagcgcagcaacaaaggcctgcgcacgccgggcctcgcggtgatcctggtcggcagcgatcctgcctctcaggtttatgtctcgcacaagcgtaaagactgtgaagaggtcggctttatttcaaaagcctacgacttggattccgacaccacccagcaggccctcaccgacctgatcgacagcctcaacgacgatccggccatcgacggcatcctgctgcagctgcccttgccc

SEQ ID NO: 3500 - protein, 102 aa, Homo sapiens
MTAQLIDGKSIAASLRQQIAKRVAERSNKGLRTPGLAVILVGSDPASQVYVSHKRKDCEEVGFISKAYDLDSDTTQQALTDLIDSLNDDPAIDGILLQLPLP

SEQ ID NO: 3501 - DNA, 370 bp, Homo sapiens
cgtacggttccggaacgtaaggaagtgagaccctcggagtggatctgagcagatgaccgcccaggctgaggcttgaaaatggctccagctgtcctttcgggcaagtccccagcttaggatgggagtggggttgctgaggctcttcctcctgcccagccccacccaggccttctggaacattccactgcacaagctcttctgattggggagggcaggtcctgtctcagtgggcttcttgtgggggcagaggtgtcacgccccagttaccccagttctcaccatgcacagcttgacccatggcagccctccggagaggcaggaacttccccacttcacagggttatttactctcccctcaggctgcacgcgt

SEQ ID NO: 3502 - protein, 60 aa, Homo sapiens [sequence omitted]

SEQ ID NO: 3503 - DNA, 321 bp, Homo sapiens
aggcctgagtccacaaaaagaaaccaaagctcagagaggttgaataactttcccagctcacatggaggagttggcctcaaacacccaaaaccacccagaaccggccacagggatgtccaattaggtgtggtgaggtcggggctgctgggaatgcccctctgtgtgtctcggaaagtgcctggaggccccaaggttcacagtctatttctgtgccaagagccgttggctcacaccccttgtcaaccaacaattagtaaaacctggacaagtcttccctgctctggaagtgcccccagcccgttcaatgacctcagtgcaccc

SEQ ID NO: 3504 - protein, 57 aa, Homo sapiens
MPLCVSRKVPGGPKVHSLFLCQEPLAHTPCQPTISKTWTSLPCSGSAPSPFNDLSAP

SEQ ID NO: 3505 - DNA, 238 bp, Homo sapiens
  misc_feature (136)..(136): Wherein n may be a, c, g or t
attcaagggtggttcaacatagaaaaatccatctacgtaatatcttacattagtagaaaaaaaagaaaaaaaatgattatctcagttgtttcagaaaaaacacatggcaaaattcagcactctttcatgataaaanacagaaaagtaggaatacaaaggaacttcctaaacataacaaagaacgtttataagatctcacactaataaccatctatgccattgtaaagactgaaagctt

SEQ ID NO: 3506 - protein, 67 aa, Homo sapiens
  misc_feature (46)..(46): Wherein Xaa may be any naturally occuring amino acid
IQGWFNIEKSIYVISYISRKKRKKMIISVVSEKTHGKIQHSFMIKXRKVGIQRNFLNITKNVYKISH

SEQ ID NO: 3507 - DNA, 374 bp, Homo sapiens
tgatcaagtgttagctgtgaaaacacggctgttagaatggctcccacagcttggcagtatgcagccaccaaagctatcttcctgtggaatgaacacagttggagagtgagtttggactccggattctttataccttgtcctgtagtcttacttttcttatgccttgctgaggaaggcatcaagtgatggatccgttgagtaaatgccatattattctttcctgcaaagacactaagctattcctttcaccactggtcgaattccttattgttttgtccctgcctttcttctaacctttccttacctttttcctttggattaacttttccccttcaggggcctggaagctgttgcttgattttccaacttcgtta

SEQ ID NO: 3508 - protein, 69 aa, Homo sapiens [sequence omitted]

SEQ ID NO: 3509 - DNA, 832 bp, Homo sapiens
tttctcagatgtctagcagaaggtagatggataaccctctgtagaccaggctccaaagattctagagtaaattaactcagtaaataaatagccacaattgcttggtgaccgaagccttataacatccacagaataagaccattctccagacctgactccccaactcatatcacctgctcctgccggccactaagctccttgcttggatatcgagttttctggagtatcctgaggaatgtttgtttgactttgtttgccaacagtttaggggaaggggaaagaactacaataaccagtttcctgggatctcattgatttcagattccctgccccaagcctacacccaattacctgccatagttggggaatcaagtagcatcctgtggctggaagtaaatgcaaaacactagtccgtgagatataaatactgttaaatgatggttttttaaggtcctgatccattatatgaagtagacaaaattcaaatttatttattcatttattttctcaacaaatgaatatatattatgtgccaggatacaagtagtggcaaattagacacagttcttgctttcatgaaacgtatagcttcatgatttagtatagacattgtcaaatcatcacccaaatataattacaaagtactctaaaggaaaggcacgtgatgctgtgagaacactcaactgggaaaccggaatcacctttgagaaactgtttcaggggctcttggaagagtctactgctcccaaatatctctgctacccactggccattgctttacattcctcaactaagctttcaccttttagtactaacctttgatgactgatca

SEQ ID NO: 3510 - protein, 65 aa, Homo sapiens [sequence omitted]

SEQ ID NO: 3511 - DNA, 296 bp, Homo sapiens
tctagatgtagaattaagaacacagattctggagtcagccagtcaagagttccaatcccatctctgccacttactagctgtgtgctcttgggccagtcacttaacatctctgtacctcagtcacatctaaaatgggtacgacaagagcacctacatcgtggtagtgttgtaagttttaaatctataaatatgggtttgtgtgtgtgtctacacacagatatgtttaagtgcctgacacaaagtaaagtattaactatcattatctttaccataacaagggttgaagaaaaatcaca

SEQ ID NO: 3512 - protein, 51 aa, Homo sapiens [sequence omitted]

SEQ ID NO: 3513 - DNA, 353 bp, Homo sapiens
gctagctccaaagtcctgattttgatctttaatttgcatagtgcacgaaatgatgctgttctgcacaagatgacaaggaagatgtttgtggggctgctttgctttgtacttgccatttgcatgtgtcagcttactggctgaaaaaccattccctgccttgggaaaactttccctttccctcaccacccctccccccatgctcaagtttgctctgttcctttgtgtttccaccaataaagagctccaggaggcaaaaggatttttttaggtgtcggcctttgtgtttaaagaagaccaactgaaagttgctccctctgtgcagggatgggaatgtgtgcctgtgggtattgtgg

SEQ ID NO: 3514 - protein, 66 aa, Homo sapiens [sequence omitted]

SEQ ID NO: 3515 - DNA, 462 bp, Homo sapiens
agatctgatttgttttttctgctttcttctaaagacatgttttggcaattctggaatgaaggtgggaatggacacccatctagacattgccctgggaaaatcaccgctctttgtgcctaaatgtcttcatctacaaaaggtggataaataatatttatctcatgaagtgtttggagatttaattaacacttgcaaagcactttgaataggagatgaaaggccctgttaaagggactattagtgtcagcacctagcgctctttggccactgaggaaatttaatcaagatggggaagtcggtgcaggcccctcctaggccatcctctcctccaccagaagccatattggcctttcattatcctctaagcctggaattctctccaccaagccgctgggtatgtcatttccctgcctacaattccctctcttcaattttctccctcctcttttcacgtattaaaat

SEQ ID NO: 3516 - protein, 58 aa, Homo sapiens [sequence omitted]

SEQ ID NO: 3517 - DNA, 609 bp, Homo sapiens
catgaattgggtaaattgcatagtaacgttacagctcactctctaagctttactctggaaaaactttctcaagcattaaaggttgacaagatcgaagatgcttttgatgaatttaatcgaacaccaattggagttgggtccatcgcacaagtttacgtgggtgaactatcccaaaagtacatcgataaatatgacaatatacaaattggtaaggatggaaatcgttggtgtgccatcaagatcttgcatccaaatgtaagatctcagatccggagagatttgaaaataatgaaattctgtgctgacgcaataaattggattccgactatggaatggctgtctttacccagcgaagtcgatcagttttccatattaatgaatattcagttggatctaagaattgaggcgttaaacctggaaagattcaatgagaactttaaaaattctattcaggtgaaatttcctaaaccatttctccccttgtcaaatagggatgttatgttcgaagagcatgtatatggtctttccatggaaaagtttttatctacgaagaagcaaattaacgacgttgaactttgtaaaaaagtcagtgatcccttcgttgacgcg

SEQ ID NO: 3518 - protein, 203 aa, Homo sapiens
HELGKLHSNVTAHSLSFTLEKLSQALKVDKIEDAFDEFNRTPIGVGSIAQVYVGELSQKYIDKYDNIQIGKDGNRWCAIKILHPNVRSQIRRDLKIMKFCADAINWIPTMEWLSLPSEVDQFSILMNIQLDLRIEALNLERFNENFKNSIQVKFPKPFLPLSNRDVMFEEHVYGLSMEKFLSTKKQINDVELCKKVSDPFVDA

SEQ ID NO: 3519 - DNA, 164 bp, Homo sapiens
gatccaccattacattttggccctacgaagtggtctgtgggcaatcagagcgctgaacccctggggcctctgccactggggacctcgcagttggagccttccagcaccccgcctcatgtctccatggtcaagatgagggctgcaaaggactttggggctccatc

SEQ ID NO: 3520 - protein, 54 aa, Homo sapiens
DPPLHFGPTKWSVGNQSAEPLGPLPLGTSQLEPSSTPPHVSMVKMRAAKDFGAP

SEQ ID NO: 3521 - DNA, 375 bp, Homo sapiens
  misc_feature (1)..(1): Wherein n may be a, c, g or t
ncatccactaagatcgggtcaggccatatcagtcaagtgggccaggaccacttatcgggtggagcttttgatccacaggacgctgctgctatccaaggctgcaacgacttcgtcaggatgtacagcaacgaggggcaaaactttgtcgaatttgaccctagggtccgttactctcggtggaagaagttgctctacaatgcagctatcaacacatccacgacacttgtggggctagacgttccgcgttgcctggagtttggggttaacaagaagagcacagaaattgaagtgttccaccctgccatgagggagatcatcgccattgcggcgagtgaaggcatcattatcgaagcagagttcataacgatgtttaca

SEQ ID NO: 3522 - protein, 125 aa, Homo sapiens
  misc_feature (1)..(1): Wherein Xaa may be any naturally occuring amino acid
XSTKIGSGHISQVGQDHLSGGAFDPQDAAAIQGCNDFVRMYSNEGQNFVEFDPRVRYSRWKKLLYNAAINTSTTLVGLDVPRCLEFGVNKKSTEIEVFHPAMREIIAIAASEGIIIEAEFITMFT

SEQ ID NO: 3523 - DNA, 289 bp, Homo sapiens
acgcgtacgtccgcgcggtcatggatgccatctttgggtacgggcggtacagctctttgggtacgggcggctacagcctctcttcgaaatccaagacgcggagaatattgaaatcaatggctgcgaccgggtctttgtgcagtacggggatggacgacgcgaacctggccccgtggtggccgacgatgacgctgagctcgtcgaggcaattcggttcctcggtgagtcggctaacccgcctcggccttttgacgacgctcaccccactatgacggtggcgttgggatcc

SEQ ID NO: 3524 - protein, 83 aa, Homo sapiens
MDAIFGYGRYSSLGTGGYSLSSKSKTRRILKSMAATGSLCSTGMDDANLAPWWPTMTLSSSRQFGSSVSRLTRLGLLTTLTPL

SEQ ID NO: 3525 - DNA, 291 bp, Homo sapiens
cctaggggcaggtgatgaacgcgggtgactgctggtgggagtggggttttgctctagggtgatggaaatgttccggaacctgcacagccttgtgaatacaccaaaaaccactgcgctctacactataaagtggagaatgttatgtgaattacgtctcacagaacacaaaattagcaggttgattcaaaacccattccagaccgtcctcaaagagaaatgggacaagtggaaagagtccgttacacagtatctttaagcttcagacgggtaatacatatttattgaaaattt

SEQ ID NO: 3526 - protein, 64 aa, Homo sapiens [sequence omitted]

SEQ ID NO: 3527 - DNA, 295 bp, Homo sapiens
tgatcaggttcgaagaggtcctgctggtttgtcatacggtcctcctcgaccttccgacgctgttgcgacatccgacatgttgggaacagtggaaccacgccaatgcgccttatgtgaagaaaatcacataagttctttgattcttctttgccacactgggtacatgacttcctatctgcccccgtcgtccgctcctgtccgccggcgtcaggcctcaccgccgatccgcaccaattccatcgcgagcagcgcaggtttgatggccgtcgtcttcgcgatcatgtggatcctcgag

SEQ ID NO: 3528 - protein, 73 aa, Homo sapiens
MLGTVEPRQCALCEENHISSLILLCHTGYMTSYLPPSSAPVRRRQASPPIRTNSIASSAGLMAVVFAIMWILE

SEQ ID NO: 3529 - DNA, 341 bp, Homo sapiens
gaattccctgcgcgtgtgacgccggtcgccgagcaactcggcgtgtcgctgacgctgcatcccgatgatccgccgcgtccgctgttcgggttgccgcgcattgcgtccagcgccgaggactatcaggcgctgttcgatgcggtaccgtccaaggcgaacggcatctgcctgtgcacgggttcgctcggcgtgcgcgcggagaacgatctgcctgaaatggccgaacgtttcggcccgcgtatcgcctttgcgcatctgcgcgcgaccaagcgcgacgccgatggcctgtcgtttcatgaatccgaccatctcgacggcgatgtcgacatggtcgcgtgctc

SEQ ID NO: 3530 - protein, 113 aa, Homo sapiens
EFPARVTPVAEQLGVSLTLHPDDPPRPLFGLPRIASSAEDYQALFDAVPSKANGICLCTGSLGVRAENDLPEMAERFGPRIAFAHLRATKRDADGLSFHESDHLDGDVDMVAC

SEQ ID NO: 3531 - DNA, 375 bp, Homo sapiens
  misc_feature (278)..(278): Wherein n may be a, c, g or t
  misc_feature (316)..(316): Wherein n may be a, c, g or t
  misc_feature (352)..(352): Wherein n may be a, c, g or t
gatcctaggatctggttccttgaccacaattatcatgagtccatgttctccatgttcaagaggattaacgccgaggagcatgttgttggctggtacagcactggcccaaagctaagggagaatgacttggatgttcatgcattgttcaacagttatgttcctaaccctgtcctagtgattattgatgttcaacccaaggagcttgggatacccaccaatgcgtattacgccgtggaagaagtctaagagaatgctacacagaagagtcagaaggtatntgtccatgttccttcagaaattgctgctcatgaagttnaggagattggagttgaacaccctttaagggacgtanaggacacaaccatcagcacactt

SEQ ID NO: 3532 - protein, 81 aa, Homo sapiens
DPRIWFLDHNYHESMFSMFKRINAEEHVVGWYSTGPKLRENDLDVHALFNSYVPNPVLVIIDVQPKELGIPTNAYYAVEEV

SEQ ID NO: 3533 - DNA, 385 bp, Homo sapiens
actagtcaactcccgtgctcacctcagccccaaacactcagttttcttcctcaaagcaaccatgatgaccagttacagatttatcatatttaatgagttcctaaataatggacatgtatttctaattctctgctattataaatagtacagcaaagaatatcttcattgataaatgatttccagtatgttagtatatctataaatagaagtggaattgctggattacagtatgtgtgtttagcatttgaagatatttgccatataatctattcttgacattgatcctgtacttccccattgcctttaggatagtttctaaattccataaaatggattccaaagccctgcgtgatttgacccctcttggccagctcatttatgatca

SEQ ID NO: 3534 - protein, 59 aa, Homo sapiens
MSWPRGVKSRRALESILWNLETILKAMGKYRINVKNRLYGKYLQMLNTHTVIQQFHFYL

SEQ ID NO: 3535 - DNA, 165 bp, Homo sapiens
gaagaagtggcgcgtatttatggttataacagcattccaaacaatgcgccattagcgcatctctgcatgcgtgagcacaaagaatctgatttagatttagctcgaattaagaccgcacttgtggatgcagattatcaagaagctattacttatagctttgtggat

SEQ ID NO: 3536 - protein, 55 aa, Homo sapiens
EEVARIYGYNSIPNNAPLAHLCMREHKESDLDLARIKTALVDADYQEAITYSFVD

SEQ ID NO: 3537 - DNA, 218 bp, Homo sapiens
aaatttgcccatttaattctcaaaacaattctatgattcacacccaggtgggctgctcactgctgcatctatgcaattctagggactcctgggcctcacacccagggagcaccctttcccagcagcctgaagaggcctgtgtcagcttggccacccaccccatctccatgctttccttctgcagattaacagggactggatgcagacagcactccgga

SEQ ID NO: 3538 - protein, 62 aa, Homo sapiens
MIHTQVGCSLLHLCNSRDSWASHPGSTLSQQPEEACVSLATHPISMLSFCRLTGTGCRQHSG

SEQ ID NO: 3539 - DNA, 292 bp, Homo sapiens
aaatttaaaataaacgcatgaaccctgaggtgggatttgcctgctttataaaatggcaactcccaaaagaggcaatgacagagagcagtgtgggcctggcttccctctggtgggtcctgcccctggggaagctctgctgctgacagctgtctctggtgaagacaggggttgcgtgactcccatgtccatgtggcacattgcacatctagcctcacttcctcaaatgtcaccaggctggactcacgaggacatggggacatacacactccttcccagaaactccctggcgcgc

SEQ ID NO: 3540 - protein, 86 aa, Homo sapiens [sequence omitted]

SEQ ID NO: 3541 - DNA, 386 bp, Homo sapiens
  misc_feature (1)..(1): Wherein n may be a, c, g or t
  misc_feature (2)..(2): Wherein n may be a, c, g or t
  misc_feature (3)..(3): Wherein n may be a, c, g or t
nnnaacgctgagctcaacctggcagtgcgcgagtcgaccgcgagcttctacttccacccttaccttgacccggcatacctggaagacatcgtcgacgggatcaccaagctgggatacgagttcgtcccggcaacagaactgtaagccggcagccatcagcgacgcttcgaaggagcacccgacatgaacaagatcctcactatttacggaacccgccccgaagcaatcaaagttgctccggtgattaaagccctcgaagccgacgaccggtttacctcagtggcggtctcgacgggccagcacagagaaatgctcgatcaagtcaacggcatgtttggaatcacccccgaccatgatctcgcgttgatgaagcagggccaaagctt

SEQ ID NO: 3542 - protein, 80 aa, Homo sapiens
AGSHQRRFEGAPDMNKILTIYGTRPEAIKVAPVIKALEADDRFTSVAVSTGQHREMLDQVNGMFGITPDHDLALMKQGQS

SEQ ID NO: 3543 - DNA, 410 bp, Homo sapiens
  misc_feature (21)..(21): Wherein n may be a, c, g or t
  misc_feature (119)..(119): Wherein n may be a, c, g or t
  misc_feature (226)..(226): Wherein n may be a, c, g or t
  misc_feature (227)..(227): Wherein n may be a, c, g or t
  misc_feature (273)..(273): Wherein n may be a, c, g or t
  misc_feature (314)..(314): Wherein n may be a, c, g or t
  misc_feature (355)..(355): Wherein n may be a, c, g or t
  misc_feature (371)..(371): Wherein n may be a, c, g or t
gggcccttcctgtctccattntcacctactgcagctgacctgcagaagacggaagacggaacacagaaatgaaccccaatggcccaatccggtgttccccacttcctgtctactcattntattattattggagtctccacattggtgtggaaaggggggtgtctatgaagtgagaagagggatacaataattgcgctgggacggaatgcaacaatgacactgtatnngtacaaggaagggcagcccacctttctgcttgcaacagactatgtntctgaactggtgggacgggcagacagcagaagaagggtganggacttcgtagcacagcatgcacaagccactgacagcattntcagaccagtgagctntctgtgcccaaagtagagaaatgtctcattgattctgac

SEQ ID NO: 3544 - protein, 57 aa, Homo sapiens
  misc_feature (5)..(5): Wherein Xaa may be any naturally occuring amino acid
  misc_feature (34)..(34): Wherein Xaa may be any naturally occuring amino acid
  misc_feature (48)..(48): Wherein Xaa may be any naturally occuring amino acid
  misc_feature (53)..(53): Wherein Xaa may be any naturally occuring amino acid
MTLYXYKEGQPTFLLATDYVSELVGRADSRRRVXDFVAQHAQATDSIXRPVSXLCPK

SEQ ID NO: 3545 - DNA, 393 bp, Homo sapiens
  misc_feature (1)..(1): Wherein n may be a, c, g or t
  misc_feature (2)..(2): Wherein n may be a, c, g or t
  misc_feature (3)..(3): Wherein n may be a, c, g or t
nnnatcttgtgtcgattttcggtcgcatatactatgggggagtattgtataatgcggcggtgtacccaagtagagaggtgttcgatgccacacagtccggaagaaaagaagcaagcactgacgcgcatcaggcgcatcaaaggtcaggtagcgactcttgagcaagcgcttgatgcaggtgcgaaatgtcctgcaattcttcagcagcttgcggccgttcgtggcgcagtcaacggattgatggcaacggttctggagagctatctgcgggaagagtttcccagtagcgaaatcaggagcgattcgcagaacaagtccattgacgagaccatctctatcgtccgctcctatctgcggtagaggcaccagggtgtcctcggtgagggcaaattt

SEQ ID NO: 3546 - protein, 119 aa, Homo sapiens
  misc_feature (1)..(1): Wherein Xaa may be any naturally occuring amino acid
XILCRFSVAYTMGEYCIMRRCTQVERCSMPHSPEEKKQALTRIRRIKGQVATLEQALDAGAKCPAILQQLAAVRGAVNGLMATVLESYLREEFPSSEIRSDSQNKSIDETISIVRSYLR

SEQ ID NO: 3547 - DNA, 260 bp, Homo sapiens
acgcgtgttctggcgccgagccgacgggcgcggacgttcttctacttgtccggtagctggagacccacgaacagcagcagcagatgctgaagtgacattttgagaccgcgacgcacccatgccatgcaaagcaccaccgctctgcgttgcctcgcgaattggcgcaaagccctgctccgtccgaatttcggcggtgctcaagcgcgttcccatctctcctacacgctgcctgttgcgtgcgccttgagcggtgggtgcac

SEQ ID NO: 3548 - protein, 71 aa, Homo sapiens
MGTRLSTAEIRTEQGFAPIREATQSGGALHGMGASRSQNVTSASAAAVRGSPATGQVEERPRPSARRQNTR

SEQ ID NO: 3549 - DNA, 230 bp, Homo sapiens
  misc_feature (230)..(230): Wherein n may be a, c, g or t
acgcgttttccacatatgtttaatggcttattggttggtgcccctggtctcaacttgccaaaatctgctttgcagtatgcatgggatgcacaaaccttgcatcaactacagccagaggtattaaccccacaggatttgatgatgtttgcgaacagccttcttaaacaatgtgatgggttagacggtatgaatgatgacttaatttttgcttcaaagcccccccccccccn

SEQ ID NO: 3550 - protein, 71 aa, Homo sapiens
MFNGLLVGAPGLNLPKSALQYAWDAQTLHQLQPEVLTPQDLMMFANSLLKQCDGLDGMNDDLIFASKPPPP

SEQ ID NO: 3551 - DNA, 330 bp, Homo sapiens
  misc_feature (1)..(1): Wherein n may be a, c, g or t
  misc_feature (2)..(2): Wherein n may be a, c, g or t
  misc_feature (139)..(139): Wherein n may be a, c, g or t
  misc_feature (286)..(286): Wherein n may be a, c, g or t
  misc_feature (307)..(307): Wherein n may be a, c, g or t
nnacgcgtcgacgggttttctgaattgggcgttacctctccgacgagtgccattcacgctttttctgaggacgccgatggcatcgtgcgcgccgatgccgctggtgtcctcgtcctcaagcgtttggaggacgcggagngggacggcgacgatatcttggctgtcattaaaggctcggccgtcaactccgatgggcactccaatggcttgaccgccccgaatccggaggcacaggaggatgttctccgccgagcttatgccgatgcgggcgtgaatccgcagacgntggactatatcgaggcccacngcaccggcaccatcttgggtgat

SEQ ID NO: 3552 - protein, 110 aa, Homo sapiens
  misc_feature (1)..(1): Wherein Xaa may be any naturally occuring amino acid
  misc_feature (47)..(47): Wherein Xaa may be any naturally occuring amino acid
  misc_feature (96)..(96): Wherein Xaa may be any naturally occuring amino acid
  misc_feature (103)..(103): Wherein Xaa may be any naturally occuring amino acid
XRVDGFSELGVTSPTSAIHAFSEDADGIVRADAAGVLVLKRLEDAEXDGDDILAVIKGSAVNSDGHSNGLTAPNPEAQEDVLRRAYADAGVNPQTXDYIEAHXTGTILGD

SEQ ID NO: 3553 - DNA, 271 bp, Homo sapiens
  misc_feature (3)..(3): Wherein n may be a, c, g or t
  misc_feature (4)..(4): Wherein n may be a, c, g or t
  misc_feature (5)..(5): Wherein n may be a, c, g or t
  misc_feature (8)..(8): Wherein n may be a, c, g or t
  misc_feature (10)..(10): Wherein n may be a, c, g or t
  misc_feature (13)..(13): Wherein n may be a, c, g or t
  misc_feature (14)..(14): Wherein n may be a, c, g or t
  misc_feature (15)..(15): Wherein n may be a, c, g or t
ggnnnggngnggnnnatcgggcgcccctcgatagatccggaactgatggtgcgcatgctggtcgtcggctattgctatggcatccgttccgagcggcgattgtgcgaagaggtgcacctgaacttggcctatcgctggttctgccggctgggtctggaagacgaagtccccaatcattcgaccttctcgaagaatcgccatgggcgttttcgtgacagcgatctgttccgctggttgttcaatgaagtgctgcggcgttgcatggcggccg

SEQ ID NO: 3554 - protein, 90 aa, Homo sapiens
  misc_feature (2)..(2): Wherein Xaa may be any naturally occuring amino acid
  misc_feature (3)..(3): Wherein Xaa may be any naturally occuring amino acid
  misc_feature (4)..(4): Wherein Xaa may be any naturally occuring amino acid
  misc_feature (5)..(5): Wherein Xaa may be any naturally occuring amino acid
GXXXXIGRPSIDPELMVRMLVVGYCYGIRSERRLCEEVHLNLAYRWFCRLGLEDEVPNHSTFSKNRHGRFRDSDLFRWLFNEVLRRCMAA

SEQ ID NO: 3555 - DNA, 246 bp, Homo sapiens
  misc_feature (1)..(1): Wherein n may be a, c, g or t
ncaaagaccacaaagggacaatgaaggcagtgcccaggacgaggtgccaagaaaaggtatgtggccaggggtggtgaggatgagggggatgggcagagtcacgggaggctgggacccagggctgccagaggatcccagccagggtagcactgtggggacagccgtgattggcactcatggaaagtagagtccccccccccccaggctgggggagggggccccgggcatatagggcatctggcagca

SEQ ID NO: 3556 - protein, 59 aa, Homo sapiens
MSANHGCPHSATLAGILWQPWVPASRDSAHPPHPHHPWPHTFSWHLVLGTAFIVPLWSL

SEQ ID NO: 3557 - DNA, 214 bp, Homo sapiens
accggtccgccagaacctccgtgagctggtgatgggcagctccccgcagctgaagaggagcgtgtgtcccggggcagcagcccgggcggctcctccgggggaggacgcggcagaggcgggggcgactcagacagcgcatcggtggcctcgtcgtccgcggaggaggagagcagcggcggaggctccgtgacgctggaccccctggagcacgcgt

SEQ ID NO: 3558 - protein, 63 aa, Homo sapiens
AGDGQLPAAEEERVSRGSSPGGSSGGGRGRGGGDSDSASVASSSAEEESSGGGSVTLDPLEHA

SEQ ID NO: 3559 - DNA, 336 bp, Homo sapiens
ctgcgggctggtcgcacgaagtcgctagccgacgaactctacctagcttctgagaccgatttaggtacggtgcttggacatatcgagcaaaccgagccctccctcatggtgttggactccgtgcaaacggttggcaccagccaggctgacggctcccccggcggcgtttcacaggtgagggaggtcccccgggccctggaccgggtggcgaagagacgcgggatggcagtcatcatcgtcggccatgtcaccaaagaagggtcgatcgctggcccgcgcaccatggaacatctcgttgacgttgttctcaacttcgagggtgaccgccattccgga

SEQ ID NO: 3560 - protein, 112 aa, Homo sapiens
LRAGRTKSLADELYLASETDLGTVLGHIEQTEPSLMVLDSVQTVGTSQADGSPGGVSQVREVPRALDRVAKRRGMAVIIVGHVTKEGSIAGPRTMEHLVDVVLNFEGDRHSG

SEQ ID NO: 3561 - DNA, 330 bp, Homo sapiens
  misc_feature (1)..(1): Wherein n may be a, c, g or t
nacgcgtctgaagcccttaatttgtgcgcgtacaccctgggtgagcgtctcggacctgatgacgaggtcgtcatttcggtgatggagcaccactccaacttggttccgtggcagatcgtttgtcagcgcaccggtgccaccctgaggtggttcgacatcactgatgacggccgcctcgacctcgagaaggctgaggcggaggggctcattaatgagcgcaccaaggtcgtctcgttgacgttggcctcgaacgtgctggggacgatcaatcccatcgggaagattgccgagcaggcccactccgtcggtgccgtcatggtcgtcgacgcg

SEQ ID NO: 3562 - protein, 110 aa, Homo sapiens
  misc_feature (1)..(1): Wherein Xaa may be any naturally occuring amino acid
XASEALNLCAYTLGERLGPDDEVVISVMEHHSNLVPWQIVCQRTGATLRWFDITDDGRLDLEKAEAEGLINERTKVVSLTLASNVLGTINPIGKIAEQAHSVGAVMVVDA

SEQ ID NO: 3563 - DNA, 361 bp, Homo sapiens
cttaagtaataaaaaaaagcctttgttactgtttgttattataaaacacctgactggaaagaaaagcagcgagataaaagtacatttagagttggcatataatgcggcagcatttctctgtggacactgaaatagctgcagaagtattgagcaaagtctgcttgaaaaatgacaaaaggaaaaaggtcagcagagggagaaaacccacagcagatacccaggtctgtaatgcagacttcgcactttgagtaggacttctctggatcgttttaattccttgcagtcttgacagctgacaactaaaactcatactctatcccatttttactatgagccattgctaaacattatttaaattcag

SEQ ID NO: 3564 - protein, 74 aa, Homo sapiens [sequence omitted]

SEQ ID NO: 3565 - DNA, 337 bp, Homo sapiens
ttggaatgagcgccgcccaggctgatgatcccatcggcaccggcctgttgcgcattggccaggtgctgggtgagcttgaaccacttgttgccgctgatcagtggatcgatgcagtccaggcgcagcacggccaactcgaccccgttcagccagtcgaggggcaacggttcaagcggtgcctggggaaaccagtcgaagggacccatcgggggatatctgaatgaaaaaggggcggtagtctaacaccgccccttgggtcgttttacagcgcggcagccagacgcgaaccctggttgatggcgcgcttggcatccagttcggccgccacatcggcgcc

SEQ ID NO: 3566 - protein, 72 aa, Homo sapiens
MIPSAPACCALARCWVSLNHLLPLISGSMQSRRSTANSTPFSQSRGNGSSGAWGNQSKGPIGGYLNEKGAVV

SEQ ID NO: 3567 - DNA, 295 bp, Homo sapiens
tccggacggcgagccgctgcgagaggagcagcggcccctgaagcagtccctgggaggctctctgtgtcgagagtctcactggaagtgcctgctccttacactgctcatccatgcctgtggggctgtggtggcctggtgtcgcttagccactgtgccccgcctggtcctggggcctgaagcagccttggctcgtggggctggcggtccaccgcccacctacccagccagtccctgctcggatggctacctgtacatcccattggccttcgtctccctcctctacctcctctacctg

SEQ ID NO: 3568 - protein, 51 aa, Homo sapiens
MGCTGSHPSRDWLGRWAVDRQPHEPRLLQAPGPGGAQWLSDTRPPQPHRHG

SEQ ID NO: 3569 - DNA, 195 bp, Homo sapiens
caggccttgtgcctccaaggaaaatcaacctcccagcttatgcacttacagctggattacatcaactccagagctgtgcagctggggtccctccttgtccgtggcctcaccacattggtactagtcaacagtgcatgtggcttcccttggacaaccagcgactttatgccctggaatgtatttgacggcaagctt

SEQ ID NO: 3570 - protein, 65 aa, Homo sapiens
QALCLQGKSTSQLMHLQLDYINSRAVQLGSLLVRGLTTLVLVNSACGFPWTTSDFMPWNVFDGKL

SEQ ID NO: 3571 - DNA, 309 bp, Homo sapiens
cgtccgttgccggataaattccacggtctgcaggatcaggaagcgcgctatcgtcagcgctacctggatctcatctctaacgatgaatcccgcaaaacgttcaaaatccgttcccagattatggcggggatccgtcagttcatggttggccgtgattttatggaagtcgaaacgccaatgatgcaggtgattccgggcgcgtctgcgcgtccattcgtgacccatcacaatgcgctggatttagacatgtacctgcgcatcgcgccggaactgtacctgaagcgtctggtggttggcggcttcgaacgc

SEQ ID NO: 3572 - protein, 103 aa, Homo sapiens
RPLPDKFHGLQDQEARYRQRYLDLISNDESRKTFKIRSQIMAGIRQFMVGRDFMEVETPMMQVIPGASARPFVTHHNALDLDMYLRIAPELYLKRLVVGGFER

SEQ ID NO: 3573 - DNA, 360 bp, Homo sapiens
caattgctccctgaccagcacagctttttgggtaagtttaatatgggggtgattatgcttgagaatgttcactggaccacaaggcacctcccatattctggagatgtgtgtgagctgcaaaaggggtacgtgagctccaggaacaggtagcatcatttccatcagctcagccagactctgttgcgcatatgcggcatgctggggattgagacgagagctacagacacaaagctcaaacagctccagttgttgctctggaggagcttgtagtctgcgtcagtgctacttagagtggggtctgtggaccagcagtatcagcatcacctggacatttattagaaatgcagaatctcaggactc

SEQ ID NO: 3574 - protein, 54 aa, Homo sapiens [sequence omitted]

SEQ ID NO: 3575 - DNA, 297 bp, Homo sapiens
  misc_feature (1)..(1): Wherein n may be a, c, g or t
ntctagagaaaaagtatacagaaagacttctctaaatgggcacaaaatatgaagatatttttgtcttacataaatgctcaaataagagcagcttcccaagaggaatatcttaaaaatctcatgcacaagattacccattcttttattcccataattgcccagttggctcatgaagagaatgatcatggaagcagagatggagtctatgcgtggtctcagcaacatggacttccattcattaaggccagtttggatagagccactgctgactacccaaactgccaagagcaaagatct

SEQ ID NO: 3576 - protein, 83 aa, Homo sapiens
MKIFLSYINAQIRAASQEEYLKNLMHKITHSFIPIIAQLAHEENDHGSRDGVYAWSQQHGLPFIKASLDRATADYPNCQEQRS

SEQ ID NO: 3577 - DNA, 256 bp, Homo sapiens
acgcgtgaagggccagggaaagaaggacttcttaccagaagaggatcaagcaaaagctttattgagaaaattacaatctaagcatttgtggaaataaaaagttaatatactttgggaagatattataatatcacttgcaagatgtattgtgctttgaatgagtaatgtaattattgttaatattatattactgataaagaactgacaattgaacaatatattttgatagttcttagctttcccataatataccatt

SEQ ID NO: 3578 - protein, 69 aa, Homo sapiens [sequence omitted]

SEQ ID NO: 3579 - DNA, 253 bp, Homo sapiens
ccatggaaaatttgggggccttgaagctctcagcggctcccaaagttggacccccgcagagcaggaggacatgtcatcagcagagaacacacagcctcgccaagcttccctggctcaaaaccctccaaccaaggaaagaactcaatggcctagcactggaatcaactcacaaacatttctgtgcccgaccccagccccaccttctgctcccaacagaacatgcacaaaaaacaaacgcaagattggacatgcc

SEQ ID NO: 3580 - protein, 83 aa, Homo sapiens [sequence omitted]

SEQ ID NO: 3581 - DNA, 255 bp, Homo sapiens
  misc_feature (94)..(94): Wherein n may be a, c, g or t
atgatgaatccgttttttattatacctttcctcctcgcgccgttggtgctatgcgtggtaacttggtttgcgtttatttggggtttgtcacgtnatatggctgttcagccgccgtggacgttacccgctccaataggcgcgtttttgatgacgggcggcgactggcgtgccatcgttttatgccttgtaaatatattaatttctactgctatttattatccatttatgaagatggatgacagggatcaactcaga

SEQ ID NO: 3582 - protein, 85 aa, Homo sapiens
  misc_feature (32)..(32): Wherein Xaa may be any naturally occuring amino acid
MMNPFFIIPFLLAPLVLCVVTWFAFIWGLSRXMAVQPPWTLPAPIGAFLMTGGDWRAIVLCLVNILISTAIYYPFMKMDDRDQLR

SEQ ID NO: 3583 - DNA, 280 bp, Homo sapiens
aggcctcagtcaagtctcctggtcacctcatcctgtcacccaccacagtaggatagcaggacaggacttcagcctccagccctcctgagcttccatgtttcttaaagctctggcctccccatctcaggaaacagacccagctgccatcactgcctcctctctcacctttgagagtcacctcagatccatcagcaagtctcaccagggccactctcaaagcatctctcgaatcagccctctgcaggtgacacccagccttccccagtgcaggcaccaggat

SEQ ID NO: 3584 - protein, 62 aa, Homo sapiens
MFLKALASPSQETDPAAITASSLTFESHLRSISKSHQGHSQSISRISPLQVTPSLPQCRHQD

SEQ ID NO: 3585 - DNA, 254 bp, Homo sapiens
gaattcataaatgtggctactctcttacttagcagttctaccattaggattttatcttaaggaaatgataagagatgtacaataaaatatgcataaggatgttcaacatagcatcatatataatatggaatattgccaaaaatgtagttgtcagcagagtccgattgcttatataaattatggtacagccataggatataagatacatacatttgtagtcacagtaagtgtgttgatcagagtgagaaactagt

SEQ ID NO: 3586 - protein, 54 aa, Homo sapiens [sequence omitted]

SEQ ID NO: 3587 - DNA, 329 bp, Homo sapiens
ctgcaggtggctcttccctcctttgtaaaaagcaggaatgagtatgttttctccaaaacctcttctagctttaggattctgcttccagggagatcattccattcccaagcctctttggttttggaaaagcctgtgggccttcctccctctagttcaccaacacaagaggcgggagggtcagagggtgacttcggcactgtcttgaatgtcaatagacacaacactactggaatatttttatatttctaaaattaaccccacatcccctttcatgaatgagacggtggaacataggattctctagctgctattttatctcttagactccg

SEQ ID NO: 3588 - protein, 55 aa, Homo sapiens [sequence omitted]

SEQ ID NO: 3589 - DNA, 436 bp, Homo sapiens
ctgcagcctcctttgaggcaatatagcctcgtggttaacagcaaggccttaatcctaagatatcagctccaatgcttcatgtctgagtcatcttgagtgagctcattaccctccctgaacctcagtttttcatctttaaaatgggggaaacaacagctctgactcctgggggctgttgtgacccttggataagtttatagaatttagcagagaggcaggcccatcgcagttgctcagtacaccttccagtggggcctcatccctcctgtgggcgggctgttggtgcctttcttgactgtaaatctcttcttcctcctgcagccacaccacccactgccaagcactgcctacacgtctcttccctttaaagtacctgccattcatgtctgcttccccaggacctggcatggaagcgtgcgcatgcccaatgtggcca

SEQ ID NO: 3590 - protein, 90 aa, Homo sapiens [sequence omitted]

SEQ ID NO: 3591 - DNA, 297 bp, Homo sapiens
acgcgttattgatgggcgatacggaattcctgcgcctgatgctgcgggagatgcacaccctgggcatcgaccctggctcgctgatccatgccttgcaaaaccatgacgaactgaccctggaactggtgcacttctggacgttgcacgcccatgacacctacctctatcaagggcagacctttcccggcggcatcctgcgcgagcacatccgcgaacagatgtacgaacgcctggccggcgaacacgcaccctataacctgaagtcgtgaccaacggcgtgtctgaccaccgccagca

SEQ ID NO: 3592 - protein, 85 aa, Homo sapiens
MGDTEFLRLMLREMHTLGIDPGSLIHALQNHDELTLELVHFWTLHAHDTYLYQGQTFPGGILREHIREQMYERLAGEHAPYNLKS

SEQ ID NO: 3593 - DNA, 282 bp, Homo sapiens
ggcgccttcccttcccccaactgcacccctagagcaggcagcattggggcttggttccacacctcccaaaggacgtggaggaagcgtggtgtggttctgcgagaggccgcaggttccacagcaatctccacgtatgtggccgagccccacaacctcctgtccccagggtccttcatagaggactctgctggatgggaagtcctggagactggtggtgtcacacgcttctgcttgtctcccttggggcaaaggcgctgtctgtcttgggctctggccgaattc

SEQ ID NO: 3594 - protein, 58 aa, Homo sapiens
MKDPGDRRLWGSATYVEIAVEPAASRRTTPRFLHVLWEVWNQAPMLPALGVQLGEGKA

SEQ ID NO: 3595 - DNA, 253 bp, Homo sapiens
  misc_feature (240)..(240): Wherein n may be a, c, g or t
  misc_feature (241)..(241): Wherein n may be a, c, g or t
  misc_feature (242)..(242): Wherein n may be a, c, g or t
  misc_feature (243)..(243): Wherein n may be a, c, g or t
  misc_feature (244)..(244): Wherein n may be a, c, g or t
  misc_feature (245)..(245): Wherein n may be a, c, g or t
  misc_feature (246)..(246): Wherein n may be a, c, g or t
  misc_feature (248)..(248): Wherein n may be a, c, g or t
  misc_feature (249)..(249): Wherein n may be a, c, g or t
  misc_feature (253)..(253): Wherein n may be a, c, g or t
agatctgatggttttatcagtggctgagagtttctccttcacactctcttctctcttacctgccgccatgtgtgatgtgcttgctttcgcttcaccttccttcacgattacaaattccctgagcttgtggaattgggaggcaattaaaccccttttccttataattttccagtctcaggggaagttctttatagcagtgtgaaaacggactaatacatcttgtaatggttctctgcaccnnnnnnncnncccn

SEQ ID NO: 3596 - protein, 64 aa, Homo sapiens [sequence omitted]

SEQ ID NO: 3597 - DNA, 348 bp, Homo sapiens
  misc_feature (100)..(100): Wherein n may be a, c, g or t
  misc_feature (101)..(101): Wherein n may be a, c, g or t
  misc_feature (160)..(160): Wherein n may be a, c, g or t
  misc_feature (161)..(161): Wherein n may be a, c, g or t
  misc_feature (292)..(292): Wherein n may be a, c, g or t
  misc_feature (293)..(293): Wherein n may be a, c, g or t
gtgtgtgtgcctccctctgtgtgtgtgtgtgcatgtgtgtgcgtctccctctgtgtgtgtccatctccctctgtgtgtgtgtgtgtgtgcatctccctgnntgtgtgtgtccatattcctctgtgcgtgtgtgcgtatgtgtgcgtctccctctgcgtgnntgtgagcatgtgtgtgcatctccccctgtgtgtgtgcgtctccctctgtgcgtgcacgcgtatgtgtgtacatctccctctgtgtgtgtgcacgcgtgtgtttatctccctctgtgtgtgtgcatgcgtgnntgtttatctccctctgtgtgtgtgtgtgtgcgtctccctctgtgtgtgcgtgtgc

SEQ ID NO: 3598 - protein, 116 aa, Homo sapiens
  misc_feature (34)..(34): Wherein Xaa may be any naturally occuring amino acid
  misc_feature (54)..(54): Wherein Xaa may be any naturally occuring amino acid
  misc_feature (98)..(98): Wherein Xaa may be any naturally occuring amino acid
VCVPPSVCVCACVCVSLCVCPSPSVCVCVCISLXVCVHIPLCVCAYVCVSLCVXVSMCVHLPLCVCVSLCACTRMCVHLPLCVCTRVFISLCVCACVXVYLPLCVCVCVSLCVCVC

SEQ ID NO: 3599 - DNA, 310 bp, Homo sapiens
acgcgttgtcttctcgccacctgccttgtggctcctattccaccccctcttcagtctcctctatgttgccttttgggcgcaatttggggacaggggtacccccgtgccatggcagcagcaaataatgggcatccattttctctttcctttctggaaccctatacacgttaaatctttttgtattgtcctgtctcttaggcaccattccttattttatttttctctctgatcttcagattgaattaatttcttttgctttaccttcaaattcacagatactttcttacgttatttctattctgatcccccc

SEQ ID NO: 3600 - protein, 56 aa, Homo sapiens [sequence omitted]

SEQ ID NO: 3601 - DNA, 303 bp, Homo sapiens
  misc_feature (1)..(1): Wherein n may be a, c, g or t
  misc_feature (2)..(2): Wherein n may be a, c, g or t
nnaagcttaattaaaattttagccgggttagaaacagctaattctggtcatattatgcttaatggtgatgagctgccagtagacggcacacgctttgatgctaaagttggtttgatttttcaagactttaacctttttccgcaatatactgtgatagaaaatattacactagcacccattaatgttagaaaaatagataaagttgtagcacggcaacaagcaaacaatattttgacgactttaggtatgctggacaaagctgatttatatccatatcaattatctggtggacaaaaacaacgc

SEQ ID NO: 3602 - protein, 101 aa, Homo sapiens
  misc_feature (1)..(1): Wherein Xaa may be any naturally occuring amino acid
XSLIKILAGLETANSGHIMLNGDELPVDGTRFDAKVGLIFQDFNLFPQYTVIENITLAPINVRKIDKVVARQQANNILTTLGMLDKADLYPYQLSGGQKQR

SEQ ID NO: 3603 - DNA, 471 bp, Homo sapiens
  misc_feature (404)..(404): Wherein n may be a, c, g or t
  misc_feature (442)..(442): Wherein n may be a, c, g or t
aggccggtgtgcattctccatataagtggaactattaaatccgcacgtgttctccactgtcacctcaagacaatcctcctagggagatgctacgatcatttccaccatgcagatgaggaagcaggttctctgaggctgaatcgtgcctggctaatgccacacacagatgaagccaggcagaggcatcacgtagacttctgcatcctcagtgttccctgtctccctgtgagtctgtcttcccttgagcactcttcccaccctagccctgtacgcagactacgctggatgcacgctctccgctgtcccggcttccctctgaggcttaaaagggctattgttcccaacgatgcctgcactttggccagggaacctctggtgcatggggcaccagaatggggagtatntggggatttggaaagaaaaaactaatgttttacagtanaacttactggtggggtgcagtggctcttg

SEQ ID NO: 3604 - protein, 91 aa, Homo sapiens
  misc_feature (84)..(84): Wherein Xaa may be any naturally occuring amino acid
MPHTDEARQRHHVDFCILSVPCLPVSLSSLEHSSHPSPVRRLRWMHALRCPGFPLRLKRAIVPNDACTLAREPLVHGAPEWGVXGDLERKN

SEQ ID NO: 3605 - DNA, 350 bp, Homo sapiens
acgcgtgaggggagagaaagagaagatctctgaatactgcaaactcagaggacgggggtgtgtgaccagctggagagctcagggaagcctttcaggaggcagtgatgcagaacctgattctgaaagaatgagtagaggtcaatcaagtgaaagagaacagggttctaggcagagagaaaaaggcatgcaacgacgcagaggcctgacagcaagcattcaatgtgactcgggaggtgggcactttggagacagattagggcatgaggctgctcagctgtcatgagccagattgcaaggaactgaattctgacatccttgtagctcctgcaggaccaaaagtaggtttgtct

SEQ ID NO: 3606 - protein, 51 aa, Homo sapiens
MSRGQSSEREQGSRQREKGMQRRRGLTASIQCDSGGGHFGDRLGHEAAQLS

SEQ ID NO: 3607 - DNA, 406 bp, Homo sapiens
tcatgactctcgtctggattaacggaacctatgcgacgccgtacatggcgacgaactgggtgtcgaccttggcctttttcttctcctactactccctcatggtgtgggtacggacacgtcgaatcgcgtggggatcgatgttggcggtcttcgtcgtcatcatgggctgggtcgccatgatgatggccttcgggaggtcgctcaccgagcagcttaagatcattaatcccgacagcaatggggagggggtcatctacctcgtcctcacctatgtgatcgtcaatgtcaccttcgtcgtcggagccgcattggtgggacaggtgtcctggctgtgggcacgagacctagccgaggttcgccgtcaggccgctacaatcgaacggcagcgtacccagcttgctgagca

SEQ ID NO: 3608 - protein, 134 aa, Homo sapiens
MTLVWINGTYATPYMATNWVSTLAFFFSYYSLMVWVRTRRIAWGSMLAVFVVIMGWVAMMMAFGRSLTEQLKIINPDSNGEGVIYLVLTYVIVNVTFVVGAALVGQVSWLWARDLAEVRRQAATIERQRTQLAE

SEQ ID NO: 3609 - DNA, 177 bp, Homo sapiens
  misc_feature (1)..(1): Wherein n may be a, c, g or t
  misc_feature (2)..(2): Wherein n may be a, c, g or t
  misc_feature (177)..(177): Wherein n may be a, c, g or t
nntggctgtgtgtgtgcagctgtgtgtcctcctgtgtgtgcggctgtgtgtctacctgtgtgcgtgcaactgtgtgtgtctatgtgtgtctgcctatgcatgcatgcgactatgtgtgtccatctgtgctgctgtgtgcgtgtctgcctgtgtagctgtgtgtccgcctgtgtgtgn

SEQ ID NO: 3610 - protein, 59 aa, Homo sapiens
  misc_feature (1)..(1): Wherein Xaa may be any naturally occuring amino acid
  misc_feature (59)..(59): Wherein Xaa may be any naturally occuring amino acid
XGCVCAAVCPPVCAAVCLPVCVQLCVSMCVCLCMHATMCVHLCCCVRVCLCSCVSACVX

SEQ ID NO: 3611 - DNA, 509 bp, Homo sapiens
acgcgtggacccccgttctgcccgcctttgcagtcatcgccctccctgaagtcaccgctgcagaaatacgcaggcactgacctgggggtacagccaggcaagggagagacgaggggctcactctgcaccagccaaggcctgtgtcctggcatggctcccccaggaagcgaggatggcggtgcctggcggtcgagcccctcttatcctggggaatgctggggggcgttcctgagcagacctgcctgctgcccctgctggctggcactgcccctcccccggggaaaggttgggtggtccccccaggggaactcaaagcaggggagcccctggaggccccaagtccctggaatatcttggcgctcagatggcccccctcgaacaccctcacacgggggggccgcgcggtgggaggtgacccagcagccactcttacttggcgaagacttttctcccaatgcgagcgcgggtggtatcagcctgagccttcaggttggtgaggctggggtacc

SEQ ID NO: 3612 - protein, 119 aa, Homo sapiens [sequence omitted]

SEQ ID NO: 3613 - DNA, 411 bp, Homo sapiens
acgcgttgaaaaatgtttcaggaagagatactgcgtaaaaaaaagacacatgtgttacgcaggaaaaagtttgtgaggctttttgccttaacagattgacttgtagccctgttaggtttacccaacagttgtttttctgtgtgtcgaaaattttttcagattgttttcaactgacacttgcctgtttcatattagttgtaacttaaactttcaaacataaaacttttttggaagtccatccttcacatgacttgaatcccttcaatatcgaaacagtatcctcaaaatctcttatcacttttctaattgttttcttcccctttttgtagtaactcgctgtaaagcacattttattcataatctcctttgtgccagaactcaaggtcaataggccagaattattggaagggg

SEQ ID NO: 3614 - protein, 51 aa, Homo sapiens
MNKMCFTASYYKKGKKTIRKVIRDFEDTVSILKGFKSCEGWTSKKVLCLKV

SEQ ID NO: 3615 - DNA, 556 bp, Homo sapiens
  misc_feature (175)..(175): Wherein n may be a, c, g or t
aaattttctttctccttatcagatcagatgtccaagcatgttccagcttaatggaatgtacaacacagtcattgtaggcacaagcaaaggtagccaggtcaccacatctagccaagactgtcagcctgaaaagtgctatattgagagcccttaacatgtatgggggacatgcccnagatcttctcaaaacaagccctatcacagaactgctccacgatctaaaaggatcctgtaaataaatgggcaagaggctcttggaagtctcctttactgtcctggggttcacaggatagaagcacacgtctgaattaatctcaaaatcctcagtgctgccccataatggaagagtctgcttacctgtggccaccgtttcagcttttcttcctagatataagcaccaaggaaaatcaatgctggtacatagtaggcattccataaatatttttcgagtggatgagcacatgaatgaatatgaatatgcatgtataaaacatcattttcctcccacactggctgacttcatctgtataaacttattcttgcctgagagctgcag

SEQ ID NO: 3616 - protein, 154 aa, Homo sapiens
  misc_feature (97)..(97): Wherein Xaa may be any naturally occuring amino acid
MCSSTRKIFMECLLCTSIDFPWCLYLGRKAETVATGKQTLPLWGSTEDFEINSDVCFYPVNPRTVKETSKSLLPIYLQDPFRSWSSSVIGLVLRRSXACPPYMLRALNIALFRLTVLARCGDLATFACAYNDCVVHSIKLEHAWTSDLIRRKKI

SEQ ID NO: 3617 - DNA, 348 bp, Homo sapiens
  misc_feature (118)..(118): Wherein n may be a, c, g or t
  misc_feature (119)..(119): Wherein n may be a, c, g or t
ttttcaggactactggaccctggctctgaactgacactaattccaggtgacccaaaatgtcactgtggccctccaatcagggtagtggattatgaaagtcaggtgatcagtggaattnntagctcagttcatctcatagtgggccctgaactatttgtgggtccctgaacccattctgtggttatttccccagttttggaatgcataattgaaacagatatagtcagtagctggcagaacctacaaactggttcactgacttgtgaagtgagagctatcctggtgggaaagatcaaatggaagccatttggaaaaggcttccacttttccccaggtttactacctagg

SEQ ID NO: 3618 - protein, 55 aa, Homo sapiens
  misc_feature (40)..(40): Wherein Xaa may be any naturally occuring amino acid
FSGLLDPGSELTLIPGDPKCHCGPPIRVVDYESQVISGIXSSVHLIVGPELFVGP

SEQ ID NO: 3619 - DNA, 237 bp, Homo sapiens
gtgcacactttacagaacaactgcttcaaaaaaggatccagatgtacaagcagagttaattttcaagggaaagatattaaatttagaagctttggtgtgaatcaatgtttggcatttagtgcatttgaaatttttgtcatcaatttaacgccaattcacgacagtagagaattggatttttacaagctaaaattaccgcacctaggtaataacaattcaattcttgaagtctgtccg

SEQ ID NO: 3620 - protein, 79 aa, Homo sapiens
VHTLQNNCFKKGSRCTSRVNFQGKDIKFRSFGVNQCLAFSAFEIFVINLTPIHDSRELDFYKLKLPHLGNNNSILEVCP

SEQ ID NO: 3621 - DNA, 313 bp, Homo sapiens
  misc_feature (1)..(1): Wherein n may be a, c, g or t
ngccgagaagggcactgggccaacccgattgagatttgagctaagccaggaagggggcaagggtgtgagtccggtggctgcctggaggaagatctttcccagcatggggaaaagctagagccgaggcccagcggtgggagcgagactggcgccggagaaagaacttggctaggcctgtgtggtggcggggattgagcggagggagaatggcaggacatgaaatcagaagtgtaaagggagcagtcctgcaggtgaggcagagccttgcaggctgctctaaggactttggccttactctggataaaacgggaac

SEQ ID NO: 3622 - protein, 72 aa, Homo sapiens [sequence omitted]

SEQ ID NO: 3623 - DNA, 191 bp, Homo sapiens
gtcgatgccggcgtcggacatcagcagcgccgcttccagctcctcgtacagggcgtcgtcgatcttcgcgccgacgaacagcacggacaaggtgttcgaggttttcgacaggcccgctttcaggcgcgtcatccacgattttttctcgggttcggcggccacgatcacaggaacgagctcggccggcgcgc

SEQ ID NO: 3624 - protein, 62 aa, Homo sapiens
MPASDISSAASSSSYRASSIFAPTNSTDKVFEVFDRPAFRRVIHDFFSGSAATITGTSSAGA

SEQ ID NO: 3625 - DNA, 309 bp, Homo sapiens
atgcattcaaaactacagcactcagaaaaatgccacagaaaatcaaaatcaaaattaaattcaatagctcaatctttttttttttttttggaaagggattctcattgtttggcccgggggggattgggggggaaaaattcgggctccttggaagccccgcccccggggttcacgccacccccccttttaattccccgaaatatttgggcctaaaaacccccgcaccttgggtggccattttttttttttttgattaaaaaggggttttctttgtttttcccgggatggtttggatcccccaaccccgaa

SEQ ID NO: 3626 - protein, 70 aa, Homo sapiens
MHSKLQHSEKCHRKSKSKLNSIAQSFFFFLERDSHCLARGGLGGKNSGSLEAPPPGFTPPPLLIPRNIWA

SEQ ID NO: 3627 - DNA, 270 bp, Homo sapiens
aggcggcgttaaacgccgcaatcatgcaggggatgaggatgctgcccctagcgcgctccgaggggccggtgataagcgtgccgacgaaagcaaacgacctgagaggctggtttaatggatgtccgcgccgctgtcgcgttcgaggccgggaagccgctggagctgaccacggtgcagcttgaaggcccgcgcgccggcgaggtgctggtggagatcaaggcgaccggcatctgccacaccgacgagtttaccctgtccggggccgatccg

SEQ ID NO: 3628 - protein, 52 aa, Homo sapiens
MDVRAAVAFEAGKPLELTTVQLEGPRAGEVLVEIKATGICHTDEFTLSGADP

SEQ ID NO: 3629 - DNA, 270 bp, Homo sapiens
aagcccgtgggttccaggtccgaagtacaaactggagaccgagtaggcgtcggatgtctggtcaactcgtgcggacactgtgagcagtgcgaggccggggaggagcaggcgtgtctcaacgggccggtcggtacttacaacgcccatgatgtcgacggaagtatcacccagggcggctactctcagaaaatcgtcgtcaacgagaggtttgtttgccgcatccccgattccctggacttcgtagaggcagctccgctgctgtgcgccggc

SEQ ID NO: 3630 - protein, 90 aa, Homo sapiens
KPVGSRSEVQTGDRVGVGCLVNSCGHCEQCEAGEEQACLNGPVGTYNAHDVDGSITQGGYSQKIVVNERFVCRIPDSLDFVEAAPLLCAG

SEQ ID NO: 3631 - DNA, 340 bp, Homo sapiens
acgcgtgaagggaggagacagggagggcagtagcagatgctgctctatacttcagactgggaattagagaggagaagtgtgtgctataggctttttgctagtgtcccagtctacacttgctctctccttgccccgagggacctggcaggcttggatgacatactcagtgaggatggagaggagctgggcaatggcactgagaggcagcgcaggggccagtcctgacgggacactccaaagccagcgctgatggtagaggtagcgggacagtgacgccaggctagaagaggctgagcggcctgacaccaagggcagtggacctggtggctccaatgtcagc

SEQ ID NO: 3632 - protein, 62 aa, Homo sapiens [sequence omitted]

SEQ ID NO: 3633 - DNA, 338 bp, Homo sapiens
  misc_feature (157)..(157): Wherein n may be a, c, g or t
  misc_feature (181)..(181): Wherein n may be a, c, g or t
  misc_feature (305)..(305): Wherein n may be a, c, g or t
gtcgacctgaagaccgtcggcctgctcaagcgcaacccgaacatggtcatcgaggaaaccaagggcgcccagcagtataccttcccgatgctctgcgacagcgatgcgttcaagaacaacgatatccgtatggcgatgaaacacggtttcgaccggnaaatgctgctctcctcggtgctcnagggctatggcgcggtgggcaacgaccatccgatccagcccggcagccgcttcctcaatacccaactgccacagcgcaaatacgaccccgaccaggctaggttctacctgcgcaaggccggggntggattcgctcaaggtccgtctgcaagccagcg

SEQ ID NO: 3634 - protein, 112 aa, Homo sapiens
  misc_feature (53)..(53): Wherein Xaa may be any naturally occuring amino acid
  misc_feature (61)..(61): Wherein Xaa may be any naturally occuring amino acid
  misc_feature (102)..(102): Wherein Xaa may be any naturally occuring amino acid
VDLKTVGLLKRNPNMVIEETKGAQQYTFPMLCDSDAFKNNDIRMAMKHGFDRXMLLSSVLXGYGAVGNDHPIQPGSRFLNTQLPQRKYDPDQARFYLRKAGXGFAQGPSASQ

SEQ ID NO: 3635 - DNA, 392 bp, Homo sapiens
tctagaaatgtttctggaacagtgagtacatgattttgggagattagaagatttacattttaaatacagtgtcaatgatctttaccttgccatgcataaattgtgttgccagatgtgcttaggtcaatgttttaaccattcacatatcctgtttattttatgaaattatttcatgagtcttgaagtgggacttatgattgaaacgaagggtttgagagaaagtatgttaatagtcttattaatagtacggaaaacagtccgtttggagcatgatgcgctctgtcacatagaaacagtttttggatgctttcatagccatctgtagaaggtggatcattgattatacatcagtcagatgaaaaagataattgtgacattatctcttcttcctg

SEQ ID NO: 3636 - protein, 50 aa, Homo sapiens
MSLEVGLMIETKGLRESMLIVLLIVRKTVRLEHDALCHIETVFGCFHSHL

SEQ ID NO: 3637 - DNA, 411 bp, Homo sapiens
acgcgtgaagggctatttttgaaaaatcctaactttatctttttaaaaatttctagtctcatttaaaaaatgtgaattatcattttttaaccattaaaaataacaaatgacgtaattttcctgttcttattagttcacattttagtgaaaaatgagaaaatgatccgtttgtgatttatgttatttgaagaatgaaaacggcaagatgcaataacgaatggctgagaagcagctagaacctggtgatgaggtggcagggctactctgaagaaataatattttgttgaaatttggaggaaaaataaggagccagccataaaaggtcagagggaagagagtttgatgagaatgtacagctactgactgtatatcatcattatcactttaaatgttcgctgattaatgtgatca

SEQ ID NO: 3638 - protein, 60 aa, Homo sapiens
MAGSLFFLQISTKYYFFRVALPPHHQVLAASQPFVIASCRFHSSNNINHKRIIFSFFTKM

SEQ ID NO: 3639 - DNA, 268 bp, Homo sapiens
cacgtgcgggcgaaagaaatcctgctcaagcacccgccggccctggctgatctcaataccctgaccgaacaggccgctctcggcgagcgccgcctgctcagccatgaagaattcaagcagctcagccgcaaggcgagggcggtggtgcgcaccggtgagtgccagccccactgcaatatcgcgctggtctccggcgtaacgttctagaattcccaccgacaaggagtgcgtcatgcaacgtggtacccaaacctgcgacacttttcgg

SEQ ID NO: 3640 - protein, 68 aa, Homo sapiens
HVRAKEILLKHPPALADLNTLTEQAALGERRLLSHEEFKQLSRKARAVVRTGECQPHCNIALVSGVTF

SEQ ID NO: 3641 - DNA, 201 bp, Homo sapiens
  misc_feature (1)..(1): Wherein n may be a, c, g or t
  misc_feature (18)..(18): Wherein n may be a, c, g or t
  misc_feature (22)..(22): Wherein n may be a, c, g or t
naccggttgcaggcatgnccgncccccgaacccgcacgcaccgcggaactgatcgcgcggctcaaatcgcccgagcgggcggtcgtcgtgatcgagcacgacatggattttgtcggcgagatcgcggacctcgtcagcgtgttgcatgaggggcggctgctcggtgagggatcgatggagagcgtgcgccacgatccacgc

SEQ ID NO: 3642 - protein, 67 aa, Homo sapiens
  misc_feature (1)..(1): Wherein Xaa may be any naturally occuring amino acid
  misc_feature (6)..(6): Wherein Xaa may be any naturally occuring amino acid
  misc_feature (8)..(8): Wherein Xaa may be any naturally occuring amino acid
XRLQAXPXPEPARTAELIARLKSPERAVVVIEHDMDFVGEIADLVSVLHEGRLLGEGSMESVRHDPR

SEQ ID NO: 3643 - DNA, 400 bp, Homo sapiens
  misc_feature (400)..(400): Wherein n may be a, c, g or t
aagcttatgggataccgcaagaactggtggcccgtcacgggggcgccctctaccgggtcagtccctgcgagctgctctgggacagcgagcgctaccatctgatcgcctacgcagagagggaggccgcgatccgcttctaccgggtggataaggtcacggatgccctggagctggatcagccccgtgaccgccagggtatggctgcctggaatcagatggacccgtccacctataccaagcggaccttctctatgttcgcgggtcaggaggagtgggtgaccctttgggcaaatgcccgcctgaccggtgttctcatcgaccgtttcgggacagatcttgccatgcggcagctggaggacgggagagtccaggccagggctctggtggaggtcagcccgcn

SEQ ID NO: 3644 - protein, 67 aa, Homo sapiens
MAAWNQMDPSTYTKRTFSMFAGQEEWVTLWANARLTGVLIDRFGTDLAMRQLEDGRVQARALVEVSP

SEQ ID NO: 3645 - DNA, 394 bp, Homo sapiens
  misc_feature (394)..(394): Wherein n may be a, c, g or t
gggcccaacctacctttggaagggcttgttatttgaaaccctggttggttttctctgtcgtgtgtctgggtttgttggcatcatctcctctggtcggcttccatttcagctgctctgtgggatagctgcctggctccgtgccccacagcctgcgctttaagacagaccattctaacatagcctctccatttggtgaaaacacgttcaggcatttcacatgattcaatgacagagagaaaccgttggttagatacagtcatccattttggctccgttcatgggtcatgtggatctgtgtgggactgatccatcttcaaggacctggtgaccccacattggtgggaactggttgcttgggtctggccctgagattgtgctctggcccatggactan

SEQ ID NO: 3646 - protein, 59 aa, Homo sapiens [sequence omitted]

SEQ ID NO: 3647 - DNA, 280 bp, Homo sapiens
acgcgtgaagggagagagatgacgggcgagtactgctgtgtcatcctggggggactggggagccctgagaccagggtcagggatttgttcttaattcataaggtaaaaggggccctggaagttattcttttttctccttctcaagggagaaaaatgggtcagagctgtccattagaaagattaatggggcagcaatttataagataaattgggatgtagagagatcagagcgggaccggagctgagaagcctattaggagacaggcaccacggagctggt

SEQ ID NO: 3648 - protein, 62 aa, Homo sapiens [sequence omitted]

SEQ ID NO: 3649 - DNA, 260 bp, Homo sapiens
  misc_feature (260)..(260): Wherein n may be a, c, g or t
ggtaccattatgtttgggtattcaaataaagtgcaacatcatgcaattttagtattttcagtaaaagtgatttgttcaaagtataaaaaagtatgacttaattatggtctttatccaagttccatttacagcacaagaattaagagtgcctgaattgcatattgacttactgtcgtgcttccactgtgtgagtgtaatgtctgggagcagagccttaggagacactcttctgcttgctgctcaggtgcttttcctggaan

SEQ ID NO: 3650 - protein, 52 aa, Homo sapiens
MVFIQVPFTAQELRVPELHIDLLSCFHCVSVMSGSRALGDTLLLAAQVLFLE

SEQ ID NO: 3651 - DNA, 246 bp, Homo sapiens
  misc_feature (241)..(241): Wherein n may be a, c, g or t
  misc_feature (244)..(244): Wherein n may be a, c, g or t
  misc_feature (245)..(245): Wherein n may be a, c, g or t
  misc_feature (246)..(246): Wherein n may be a, c, g or t
tcatgatccctggtaggctctgtgcacagctgcgggttctacctggatggtcctgggtccctcagctggagaaccagggaaggggcagattaggatatttggaaatggtgagcactgagcctctgacagcctgctttagccccccagggtacctgttaaccctttcctttacctgccaggggctgtgccgaatgccagctcctagaaatagctgaggcccaggccctgccttcaggtgccnccnnn

SEQ ID NO: 3652 - protein, 70 aa, Homo sapiens [sequence omitted]

SEQ ID NO: 3653 - DNA, 299 bp, Homo sapiens
  misc_feature (1)..(1): Wherein n may be a, c, g or t
  misc_feature (2)..(2): Wherein n may be a, c, g or t
  misc_feature (299)..(299): Wherein n may be a, c, g or t
nnacgcgtcggcgcgctggccaagctgcggccgggcatgtttttcaagccgctgttgcctcgtaacggcgagccgcgcaccgggctttcgatgggcgagcattgcgagctgatggccaagcgctggaacatttcgcgcgaagcgcaggacgtgctcgcttacgacagccaccgcaagctcagcgaggcgtatgcgcgcggcttcctcaacgatctgatgacgccgtaccgtggcctggcgcgtgacaacaatctgcgctccgacctgacgctcgaaaaactcgccggtctgaaccggan

SEQ ID NO: 3654 - protein, 99 aa, Homo sapiens
  misc_feature (1)..(1): Wherein Xaa may be any naturally occuring amino acid
XRVGALAKLRPGMFFKPLLPRNGEPRTGLSMGEHCELMAKRWNISREAQDVLAYDSHRKLSEAYARGFLNDLMTPYRGLARDNNLRSDLTLEKLAGLNR

SEQ ID NO: 3655 - DNA, 294 bp, Homo sapiens
caacagaattcattggcgaagcaacgatacataacgagctcggtacagcaatcatcgcatcgaagcatgtccgacaagatacaggaggagatattaggattagtaagcaggtccaacttcaaacaatgctatgcaaaactggggcaattgcaaaaacaatttcccaatgcgttgtacttcaagattttggaaacctatgttaaattcaagcagtcacctggtaagttcgattacaataaactgctagaagaaccatatgggctgaaagggacaacgattacgggcgacacgcgt

SEQ ID NO: 3656 - protein, 76 aa, Homo sapiens
MSDKIQEEILGLVSRSNFKQCYAKLGQLQKQFPNALYFKILETYVKFKQSPGKFDYNKLLEEPYGLKGTTITGDTR

SEQ ID NO: 3657 - DNA, 244 bp, Homo sapiens
cgcgtgattgtagaagggtttgttaaattcgattatgaaatcactttactcaccgtttgccacattaatggcaccactttcttagcgccaatcggccatcgtcaagaagatggcgactatcgcgaatcttggcagccacaagccatgtctgatgtagcggtgaaaacagcacaagacgtagcatagaaaattaccactgcattaggtggttgtggcattttcggcggggaaatgtttgtatggg

SEQ ID NO: 3658 - protein, 61 aa, Homo sapiens
RVIVEGFVKFDYEITLLTVCHINGTTFLAPIGHRQEDGDYRESWQPQAMSDVAVKTAQDVA

SEQ ID NO: 3659 - DNA, 287 bp, Homo sapiens
ctcgtcctccagcgtccgatcagtgcgctcaggatgctgatcggcggccccttgcgcatcccccatcctgcgggcttgcgcacggttgcgctcgaacccggcgtcgcgcacgcgcgcaccttgcgcgttgccggggcaggcttccccgctcgcggccagcgcgccgccggcgatctggtgatcgagctggagccgatgctgccgcaggcgcccgacaagcaactgcacgcgctgatcgagcagctcgacgtggcgctcgggaagagcgcgacacgccattttccgga

SEQ ID NO: 3660 - protein, 95 aa, Homo sapiens
LVLQRPISALRMLIGGPLRIPHPAGLRTVALEPGVAHARTLRVAGAGFPARGQRAAGDLVIELEPMLPQAPDKQLHALIEQLDVALGKSATRHFP

SEQ ID NO: 3661 - DNA, 419 bp, Homo sapiens
atcttccagcagcccgggcgtcaatacaaagacccgacactggtgctgttccgcggacgggtcgcctccgcctgcgggctggcctcctccgccaccggaccgttctattgcccggcggatcaacaggtctacctggacctggattttttccgtgagatgtcccaacgcttcaaggccgccggggattttgcccagggctatgtgatcgcccaccaaatcggccttaacgtccaaaacctgctcggcgtttccgccaggatgcaggcggcccgccagcaagggcaaaagatggaaggcgccgatggcttgctggtccgccaggaactacaagccgattgcctggccggggtctgggccaaccacgcgcagcaacgtctgaaatggctggaacccggcgatatcggagaagccttgaatgc

SEQ ID NO: 3662 - protein, 139 aa, Homo sapiens
IFQQPGRQYKDPTLVLFRGRVASACGLASSATGPFYCPADQQVYLDLDFFREMSQRFKAAGDFAQGYVIAHQIGLNVQNLLGVSARMQAARQQGQKMEGADGLLVRQELQADCLAGVWANHAQQRLKWLEPGDIGEALN

SEQ ID NO: 3663 - DNA, 303 bp, Homo sapiens
  misc_feature (1)..(1): Wherein n may be a, c, g or t
  misc_feature (303)..(303): Wherein n may be a, c, g or t
ntcatgatgtatgcttgtgtgaatgctacaaaagattcatacaacccatcccagcaagagatgatgtctgtagatagtccccatggatcacagctacactctccatcacacagcaccgatatgaatattttagcacctacgggaatgatggtctctaaacacatagatgggtctttgaatcagtgggcagtcacgtttgctgacaagtcagcctttaccactgttctgactgtgtcccacaaattcagatactgtggtcaccgattccacctcaatgacctggcatgccattctgttttaccn

SEQ ID NO: 3664 - protein, 101 aa, Homo sapiens
  misc_feature (1)..(1): Wherein Xaa may be any naturally occuring amino acid
XMMYACVNATKDSYNPSQQEMMSVDSPHGSQLHSPSHSTDMNILAPTGMMVSKHIDGSLNQWAVTFADKSAFTTVLTVSHKFRYCGHRFHLNDLACHSVLP

SEQ ID NO: 3665 - DNA, 248 bp, Homo sapiens
  misc_feature (1)..(1): Wherein n may be a, c, g or t
ngtaacacccaatggttcggcgataactaccgccaaaccttggagccacgcttgttctatctgtatgttcctgaaaagaaccaaacagacatcccagtgtttgacagcagcgagagcacttttagttactcctcgctgttccgtgacaatcgcttcagcggctctgaccgcataggtgatgaaaacaaactgtctctgggattgaccagccgctggattgaagaaaacggctttgagcgccaacgcgt

SEQ ID NO: 3666 - protein, 82 aa, Homo sapiens
  misc_feature (1)..(1): Wherein Xaa may be any naturally occuring amino acid
XNTQWFGDNYRQTLEPRLFYLYVPEKNQTDIPVFDSSESTFSYSSLFRDNRFSGSDRIGDENKLSLGLTSRWIEENGFERQR

SEQ ID NO: 3667 - DNA, 444 bp, Homo sapiens
tcgcgagcacactccaacctctgaaagcatgggctgtattaccacagaactacaaataaggcaccagaaactcagaggccgggtacgtgttgcttttaaaatatttcacccacccctccccacaagtgaaatcttcattccaagtccagttcagcagacgtgcccaaaacaggagagagccatgtaaaacggttaaagcccttggcatctgattttggtcatactaccaccctaggatgcaacatgctcagcgtaagtcacaggatggtgaagacaggaggagcagggcccttgccacggttccaaatgtctgctgccttcccaacagggtcatgcctgcctacctcattactcctgggactagctttggggccagtgaaatgggaatggaaacgggaagtgattgttgctcccaagcaaaagtgtccagagccagtgaccggt

SEQ ID NO: 3668 - protein, 69 aa, Homo sapiens [sequence omitted]

SEQ ID NO: 3669 - DNA, 396 bp, Homo sapiens
  misc_feature (1)..(1): Wherein n may be a, c, g or t
ntcatgacaaaggaagagcctcggatcgtgctgattcgacgacatcctcacacacgatgagtgtggacttcctgatccgagcatcgagatcacgccctcgagcgttcggtgatctacagtcccggcggcaacgtcgtcgacgatatgcgtacaagcaaaggaatgtggttcgagtacgcggagaacgaaatggtcaggtccattgaggagcgtgtgtgcgaactcgtcggctggtcgaccaaacacacacagaagctgcaggtccttcactacccgcaggactcggagtacgagcctcactacgattacttcggaagatacgcgggcgaagagcaccagatcgctcaacgagtcggaacgatgatctgtgcctgaacgagccgacgcgggtggcgg

SEQ ID NO: 3670 - protein, 99 aa, Homo sapiens
SEHRDHALERSVIYSPGGNVVDDMRTSKGMWFEYAENEMVRSIEERVCELVGWSTKHTQKLQVLHYPQDSEYEPHYDYFGRYAGEEHQIAQRVGTMICA

SEQ ID NO: 3671 - DNA, 276 bp, Homo sapiens
  misc_feature (276)..(276): Wherein n may be a, c, g or t
tccggagggaggcggtggggctaacgtccacactgcccctgccgccttctgtccattccatcactcattcactctgcattctcagagtggcattcattcatgcattcattcatgcattcattcatttactcatttgctccacacattccatcactcattcgctctgcattctcagaggggcattcattcattcattcattcatttactcatttgctccacacattccgtcactcattggctgtgcattctcagagtggcattcattcattcacgcn

SEQ ID NO: 3672 - protein, 59 aa, Homo sapiens
MHSFMHSFIYSFAPHIPSLIRSAFSEGHSFIHSFIYSFAPHIPSLIGCAFSEWHSFIHA

SEQ ID NO: 3673 - DNA, 337 bp, Homo sapiens
gtgcacacacctagtgaagtgcgtattctgcgttatgcccatgggatgcaggaagaaggcacacactacttcctcacctccccttcaaaacacaactatcacaatatggaaaaaggcttctcagccattcatattctattattaaggacaaagaggaatgaggttgtcattttttttcacaatactgatccaaacctttttcgggtcccgctaaatgcggaaattattattattatttttaccttttgattccctaaaaaaatgagggcccccgagaaaactttaccttcccttctttttcctccccccccggattcctgccgaaattcaacttcgt

SEQ ID NO: 3674 - protein, 67 aa, Homo sapiens [sequence omitted]

SEQ ID NO: 3675 - DNA, 288 bp, Homo sapiens
  misc_feature (288)..(288): Wherein n may be a, c, g or t
acgcgtcacgtaggtggtggtcataagcagcattatcgtatgattgattttcgtcgtaacaaagacggaatcacatcggtagttgagcgtttggaatatgatccaaaccgttctgcgaatattgcattagttagatatgctgatggtgagcgtcgttatattatcgcttccaaaggcatggtggctggcactgttctttctagtggtgcagatgcgcctatcaaagctggtaatactttgcctctgcaaaatattccagttggtagtaccgttcactgtatcgaggtn

SEQ ID NO: 3676 - protein, 96 aa, Homo sapiens
TRHVGGGHKQHYRMIDFRRNKDGITSVVERLEYDPNRSANIALVRYADGERRYIIASKGMVAGTVLSSGADAPIKAGNTLPLQNIPVGSTVHCIEV

SEQ ID NO: 3677 - DNA, 360 bp, Homo sapiens
  misc_feature (1)..(1): Wherein n may be a, c, g or t
  misc_feature (358)..(358): Wherein n may be a, c, g or t
  misc_feature (359)..(359): Wherein n may be a, c, g or t
ntccggaatgaaggagaggacaagatcttcctgatcaacaagcttcactctgtttacgaggaggagggaaggagcaggcctggcagaacccaggacactactgaaccacctgcctggcatgaggatggaggggaccagaaggaaccctgtaacccccggtcaccatgatcctgcaagcagagacttggacctgagatccccacaggatgtggcagtagagtgacttcccatgaactctagttggcatagagcaagaatgtgggatgtgggaccccttcccctggtagggtgtatctacatagccctggggtgtcctggcactctgttgacctggctgaccttgaagtcagagatcccnnc

SEQ ID NO: 3678 - protein, 55 aa, Homo sapiens
  misc_feature (1)..(1): Wherein Xaa may be any naturally occuring amino acid
XRNEGEDKIFLINKLHSVYEEEGRSRPGRTQDTTEPPAWHEDGGDQKEPCNPRSP

SEQ ID NO: 3679 - DNA, 339 bp, Homo sapiens
  misc_feature (1)..(1): Wherein n may be a, c, g or t
  misc_feature (2)..(2): Wherein n may be a, c, g or t
nnccgcggcgaagtcgccgaagatgcagtggagtccatggtgcaggtccacaactttctaaatgaagggtgctggcaggaagtgctcgaatgggaaaaaccgcacacagatgaaagccacgtgcagcctaagttgctgaaattcatggggaaaccgggcgtattgagccctcgtgctcgctggatgcacctgtgcggcctactgtttccgtcccattttagccaagaactaccattcgacaggcacgattggattgtactccgaggcgagcgcaaagcggaacaacaacctccaaccttcaaggaagttagatacgtcttggatttctacggagggccc

SEQ ID NO: 3680 - protein, 113 aa, Homo sapiens
  misc_feature (1)..(1): Wherein Xaa may be any naturally occuring amino acid
XRGEVAEDAVESMVQVHNFLNEGCWQEVLEWEKPHTDESHVQPKLLKFMGKPGVLSPRARWMHLCGLLFPSHFSQELPFDRHDWIVLRGERKAEQQPPTFKEVRYVLDFYGGP

SEQ ID NO: 3681 - DNA, 387 bp, Homo sapiens
ttcaattaccgtgaacaggagaaacttagggtaagggtggaactgttgcataacccagtcttctgcagcatggccactgccaagaagcggtactaccagaccatcgaaatccctcccaagtcctctgtggctgtgccttatgtcattgtccccttgaagatcggcctccaggaggtggaggtcaaggccgccgtcttcaaccacttcatcagtgatggtgtcaagaagatactgaaggtcgtgccagaaggaatgagagtcaacaaaactgtggctgtccgtacactggatccagaacacctcggtcaagggggagtgcagagggaggatgtacctgcagcagacctcagtgaccaagtgccagacacagattctgagaccagaatt

SEQ ID NO: 3682 - protein, 129 aa, Homo sapiens
FNYREQEKLRVRVELLHNPVFCSMATAKKRYYQTIEIPPKSSVAVPYVIVPLKIGLQEVEVKAAVFNHFISDGVKKILKVVPEGMRVNKTVAVRTLDPEHLGQGGVQREDVPAADLSDQVPDTDSETRI

SEQ ID NO: 3683 - DNA, 204 bp, Homo sapiens
tacagccttagtgtcctttacaaaggcgatccgaaagcggtgctgctcaaggccgcgtacgacgtgtcttcctttagtttcttccagaggtccagtgtgcaggaattcatgacctttacaagtcaactgattgtggaacgctcggggaaaggcagcagagcttctgtcaaagaacaagagtatctttgccatgtctacgtccgg

SEQ ID NO: 3684 - protein, 68 aa, Homo sapiens
YSLSVLYKGDPKAVLLKAAYDVSSFSFFQRSSVQEFMTFTSQLIVERSGKGSRASVKEQEYLCHVYVR

SEQ ID NO: 3685 - DNA, 384 bp, Homo sapiens
agatctagtccaatgcttatgttcagcaaagaccctccaaggctgccaggcagtggggaaagagggtgtgatggataagccagagacacagttcaccttctgttttctgtattggcctcccaaaggttccactgctttacatttttgaaaaccagaatctgattctttcagtttaaagatgaggaaactgtggcccaaagaggtagacctcttgttccagatcatccactgagttactagtaacagaacagactctaatgactggggagtcagtctttgaaaaattagagcaagtgagaaccgttaagcagcagtttacagtcacagctaatgtgcacaagtaaagttgtttctggagacataggtcagattttacctgctagc

SEQ ID NO: 3686 - protein, 75 aa, Homo sapiens
MIWNKRSTSLGHSFLIFKLKESDSGFQKCKAVEPLGGQYRKQKVNCVSGLSITPSFPTAWQPWRVFAEHKHWTRS

SEQ ID NO: 3687 - DNA, 600 bp, Homo sapiens
agcttttcaaatctttgggttaaaaagaggtacatacctgaagatgacttaaaacgggctttgcatgagatcaaaatccttcggttgggcaaactttttgctaaaattcgcccacctaaatttcaagagcctgaatacgccaactgggccaccgtaggcctcattagccacaaatcggacatcaaatttacatcatctgaaaagccagtcaaattcttcatgttcaccataacggactttcagcatacactagatgtttatatcttcgggaaaaagggtgtagaaagatattataatcttcgcctgggtgatgtgatagcaatattaaacccagaagtactaccatggagaccctcagggcgaggaaattttatcaaatccttcaaccttcgaattagtcatgacttcaaatgtatcctggagataggttcaagtagagatttaggttggtgtcccatagtgaataaaaagactcacaaaaaatgtggctctcccattaacatatctcttcataagtgttgcgattaccatagagaagtgcaatttcgtggaacaagtgctaaaagaattgaattaaatggtgggtacgccttgggcgcg

SEQ ID NO: 3688 - protein, 200 aa, Homo sapiens
SFSNLWVKKRYIPEDDLKRALHEIKILRLGKLFAKIRPPKFQEPEYANWATVGLISHKSDIKFTSSEKPVKFFMFTITDFQHTLDVYIFGKKGVERYYNLRLGDVIAILNPEVLPWRPSGRGNFIKSFNLRISHDFKCILEIGSSRDLGWCPIVNKKTHKKCGSPINISLHKCCDYHREVQFRGTSAKRIELNGGYALGA

SEQ ID NO: 3689 - DNA, 368 bp, Homo sapiens
  misc_feature (1)..(1): Wherein n may be a, c, g or t
ncagccagcttcaaggagtcaaccggatcgtcggagagaggctggagtgtgctaccgacgtcgaatatccatgcatcctagtttcctcattcgtactataaggccaaaagggaaacaatgacagcccccgcacagagcagtgtgtgtggcacctaatacatcattagcgctcaaaaaatggcaaaaaatggagctgccattaatgtaaggacatcaatttctcaaacacaacctaagccccctaactcaagagcctaccatggctactttgcagcttctcaaccaagtctgaagggtaggctgaggcgtaaggcaccctcagctgtccatgctgttcctttcctgactggtcctttagctcccctaag

SEQ ID NO: 3690 - protein, 63 aa, Homo sapiens
MAKNGAAINVRTSISQTQPKPPNSRAYHGYFAASQPSLKGRLRRKAPSAVHAVPFLTGPLAPL

SEQ ID NO: 3691 - DNA, 447 bp, Homo sapiens
  misc_feature (376)..(376): Wherein n may be a, c, g or t
agatctcatttgttctttattccttttgtgttctcttcccagacttgtggttttgtcacaaggagataatattttcagcaaaaaatataaactttccctcaagacacaaattagaaaatatggtggtgcggtccctggtgaggaagccatccttcccggccccgaattttcttgcccggtccttttccaattattattaattcttttctgaacccctaaattgcggacactgattcactcaatttagaagtttttatttcaagccctgctggctttacaaaggactgcatttgactcttggcattgattccaagtccttttgaataaatgacctgcttatctagctgttcaaatgtggacctcactggcactcttnactattgccctgatttcagtttatgtgccagaaacggaacttctgtcttttcaatttcacagggtctttcg

SEQ ID NO: 3692 - protein, 50 aa, Homo sapiens
MASSPGTAPPYFLICVLRESLYFLLKILSPCDKTTSLGREHKRNKEQMRS

SEQ ID NO: 3693 - DNA, 307 bp, Homo sapiens
agatcttgcaaagcagaaaatatttactatctgacttactccaggaaaagtttgctgacccctgcattagagcattatttagaatactaaaagattggcagtgaccgatatgtccatcagtaggggaattattggctaaatccttgataaaactggatctagccatttacaatgatgattatagagactgtttaaccaacaaatatctaatgggtattcaccatgtgttaggtacttttctagatgctaggaaatcagtaaaaacaaagtacttgccctcatagagtttaaattttagtagtggcca

SEQ ID NO: 3694 - protein, 55 aa, Homo sapiens
MARSSFIKDLANNSPTDGHIGHCQSFSILNNALMQGSANFSWSKSDSKYFLLCKI

SEQ ID NO: 3695 - DNA, 286 bp, Homo sapiens
  misc_feature (1)..(1): Wherein n may be a, c, g or t
  misc_feature (2)..(2): Wherein n may be a, c, g or t
  misc_feature (3)..(3): Wherein n may be a, c, g or t
nnngggctggcaagtgtggtactggtactttttgcacgctttatttccatctggctgcctacaaaactcataaacttcagggaaaaattcagcaaaggcaccatcaagatactggtgtggggcggcctgcgtggcggtgtctctatcgccctggcactgtctatggaagataataaatacaagaatacgcttatagctatcacctactttgtggtggtattctcaataatcgtacaggggctgactattgggcggtttgcttcgaaggtgctggcgaaggaagctt

SEQ ID NO: 3696 - protein, 95 aa, Homo sapiens
  misc_feature (1)..(1): Wherein Xaa may be any naturally occuring amino acid
XGLASVVLVLFARFISIWLPTKLINFREKFSKGTIKILVWGGLRGGVSIALALSMEDNKYKNTLIAITYFVVVFSIIVQGLTIGRFASKVLAKEA

SEQ ID NO: 3697 - DNA, 306 bp, Homo sapiens
gaggcgctggcattctgcggcagcattcatccgcagctgattctgctcgatctggggatgcctgtgatgactggctgggaatttcgtgaacaacagcgcggtgaccctacattagccgatattccagtgatcattatgtcggcgaccccgcatcttgatcagacagctgctgcccttcaggccaataattgccttgacaagccgatcgagcttaacatgctgctgggcctcgtggagcatttctgttccacaagcaattagcgttgcgccgttcttcgtgggatctgatggcgaagagcagctagc

SEQ ID NO: 3698 - protein, 86 aa, Homo sapiens
EALAFCGSIHPQLILLDLGMPVMTGWEFREQQRGDPTLADIPVIIMSATPHLDQTAAALQANNCLDKPIELNMLLGLVEHFCSTSN

SEQ ID NO: 3699 - DNA, 243 bp, Homo sapiens
  misc_feature (28)..(28): Wherein n may be a, c, g or t
aaccgccggctggcttacgtcggcatancccgggcgatgcagaacctggtgctgacctacgccgagacccgacgcctgtacggcaacgagacctacaacaaggtctcgcgtttcgtgcgcgaagtgccgaaaggtctgatccaggaagtgcgcctgtccaacagcgtcagccgaccgttcggcggcgcccaggcccaggccggcagcagcctgttcggtggcagcgacatcccggacaccggt

SEQ ID NO: 3700 - protein, 81 aa, Homo sapiens
  misc_feature (10)..(10): Wherein Xaa may be any naturally occuring amino acid
NRRLAYVGIXRAMQNLVLTYAETRRLYGNETYNKVSRFVREVPKGLIQEVRLSNSVSRPFGGAQAQAGSSLFGGSDIPDTG

SEQ ID NO: 3701 - DNA, 243 bp, Homo sapiens
gtacacgctcgccgtatcaatcaatcaggacccttaggagaactattcgatcatagtattgatgccattaattctactctgtctattttcatcttcgcatccgaaactggaatgggattttcgtataacttaatgttatcccaatttgcgatgctgacgaatttttacttaagtacttgggaagagtaccatacacacacattatacttaagtgagttttctggacccggggaaggcatcctg

SEQ ID NO: 3702 - protein, 81 aa, Homo sapiens
VHARRINQSGPLGELFDHSIDAINSTLSIFIFASETGMGFSYNLMLSQFAMLTNFYLSTWEEYHTHTLYLSEFSGPGEGIL

SEQ ID NO: 3703 - DNA, 241 bp, Homo sapiens
  misc_feature (231)..(231): Wherein n may be a, c, g or t
  misc_feature (232)..(232): Wherein n may be a, c, g or t
  misc_feature (238)..(238): Wherein n may be a, c, g or t
ccatggcaagacagagcctgggcacactttggtggaggtgctgggtgggacacactgtatgggacaggctatgaccacgggcttctgcagcaccatctgctccagcagtgccacctccaggtccctggtcccataccatgtccctcatcctcacgctgcatcccttggggatgcacagacttccctccaggaatgggtgcaggaagatgtcatcgtgctgattcctccccnncccccnccc

SEQ ID NO: 3704 - protein, 61 aa, Homo sapiens
  misc_feature (58)..(58): Wherein Xaa may be any naturally occuring amino acid
MGQAMTTGFCSTICSSSATSRSLVPYHVPHPHAASLGDAQTSLQEWVQEDVIVLIPPXPPP

SEQ ID NO: 3705 - DNA, 156 bp, Homo sapiens
  misc_feature (1)..(1): Wherein n may be a, c, g or t
  misc_feature (2)..(2): Wherein n may be a, c, g or t
nnggatccttccgccaccggtcaagggtccggaacgccatccaaccctgcttcgggcaatagcagccagattgaggcagtgatcgctcgcgcagaatccgtcatcggcactccatacctgtggggcgggggcgacaacaatggcccaactggtggg

SEQ ID NO: 3706 - protein, 52 aa, Homo sapiens
  misc_feature (1)..(1): Wherein Xaa may be any naturally occuring amino acid
XDPSATGQGSGTPSNPASGNSSQIEAVIARAESVIGTPYLWGGGDNNGPTGG

SEQ ID NO: 3707 - DNA, 340 bp, Homo sapiens
acgcgtgaagggaccaggctcccaggcacctggtgtgtgaaaggaaaaacagcctccctaggcaggattctatcaggaccaaagggaaagggcccttcagagaagacagcccatgttccggaaagcatgtgaaaggctttgggaggtctggaaaggagatgagggtcaacaagaatgtattgcctcatccaggcagtgcgctggacacgcagatgcgcttgggagccagcggtccctgccttggctgcttgtggtctgatggagcagttgaggcacagtggtggcagctggctaagcacctgcggcctgcttcggatctggactaattctgagggccggc

SEQ ID NO: 3708 - protein, 62 aa, Homo sapiens [sequence omitted]

SEQ ID NO: 3709 - DNA, 219 bp, Homo sapiens
ctagtagttcaagagggaagcagggacagcgttcctgaaagagatggctcccggagtcccattgagcacacaggacagtcttctacctggccaacaaccagtggatccaccaaaatatcaaatgacaccatggatcaagtagccaacgagtccttcatccagcatgtccaaccagctgctcagctacctgaggattctcccagccagtctcccgtgaat

SEQ ID NO: 3710 - protein, 73 aa, Homo sapiens
LVVQEGSRDSVPERDGSRSPIEHTGQSSTWPTTSGSTKISNDTMDQVANESFIQHVQPAAQLPEDSPSQSPVN

SEQ ID NO: 3711 - DNA, 391 bp, Homo sapiens
  misc_feature (91)..(91): Wherein n may be a, c, g or t
  misc_feature (106)..(106): Wherein n may be a, c, g or t
  misc_feature (145)..(145): Wherein n may be a, c, g or t
  misc_feature (150)..(150): Wherein n may be a, c, g or t
  misc_feature (167)..(167): Wherein n may be a, c, g or t
  misc_feature (227)..(227): Wherein n may be a, c, g or t
  misc_feature (238)..(238): Wherein n may be a, c, g or t
  misc_feature (267)..(267): Wherein n may be a, c, g or t
tgtacattgtatatatttcaatgaaagcacctgtaaacattttattgcactaattttagtacaggttgagcatctctaatctggaaaatcnaaatccaaaatgctngcaaacttgaaactttttgagcaccaatgtgatactcanagaanatgctcatcggaatgtntcagatttcggatttccagattagaatgttgaactggtaagtataatacaaatatttcanaatcccagganacctgaaatctgaaacatgtctgcccccnagcatttcagataagggatttctcacctgtatgtgtcttttcttacagttgaataactgtgagctgattggagggtaaaataatatatatttttgcaccttcatcttttatagtagagcctagg

SEQ ID NO: 3712 - protein, 67 aa, Homo sapiens
  misc_feature (45)..(45): Wherein Xaa may be any naturally occuring amino acid
  misc_feature (49)..(49): Wherein Xaa may be any naturally occuring amino acid
MKVQKYILFYPPISSQLFNCKKRHIQVRNPLSEMLGGRHVSDFRXPGIXKYLYYTYQFNILIWKSEI

SEQ ID NO: 3713 - DNA, 290 bp, Homo sapiens
  misc_feature (1)..(1): Wherein n may be a, c, g or t
nggggggatccgattactgagttggagcgggctggtgtagcagcattaaccatcgaagacaccttgttacctgcaaaatatggtcgtaaatccacagatttgattcctcttgaagaggccattggtaaattaaaagcagcattagaagcacgtattgatccggcgatgagtattattgcgcggacgaatgctggtcagttaaccattgaagaaacggtcactagagtaaaggcttatcaagcagtaggtgttgatggtatttgtatggttggtattcgtaattctgatca

SEQ ID NO: 3714 - protein, 96 aa, Homo sapiens
  misc_feature (1)..(1): Wherein Xaa may be any naturally occuring amino acid
XGDPITELERAGVAALTIEDTLLPAKYGRKSTDLIPLEEAIGKLKAALEARIDPAMSIIARTNAGQLTIEETVTRVKAYQAVGVDGICMVGIRNSD

SEQ ID NO: 3715 - DNA, 249 bp, Homo sapiens
ggctggagtgtgctgcgcgacctgaagcagtgcggcctggcgggtgagttcttcgacgccttcttcaacgtggacaagtacctggcacgggagcagcgcgagcaggcggggactccgcaggacactgactccgaccccgcggcatctgcctgggacaggtatgccgccgaggagtacgacttcctcgtggccgaggaggccatggcagaggacgacgacgaccatgacgaagggtccgaccccatagat

SEQ ID NO: 3716 - protein, 83 aa, Homo sapiens
GWSVLRDLKQCGLAGEFFDAFFNVDKYLAREQREQAGTPQDTDSDPAASAWDRYAAEEYDFLVAEEAMAEDDDDHDEGSDPID

SEQ ID NO: 3717 - DNA, 387 bp, Homo sapiens
acgcgtgaaggggaagggttgtgggggggccagggataaaaagtacaccttagatacagtgtacgctacccagttggcaggtgcactgaaatttcagaattcaccactgtataactcattcatgcaacaaaaaaccatgtgtatcccaaaagcaattgaaataaacattttaaaaaataataatatctgccttatagagctgtggtggcagtcccatagatgcctgttagagaagtgcctgacacgcggctgttgtttgttcactcagcaaacattcacagagtgcctgctgtgtgccccgcactggtccagcacttggggatcagggagtgaacaccactgctttcagagcacacattcttggggggtgtgattattattggatgg

SEQ ID NO: 3718 - protein, 83 aa, Homo sapiens [sequence omitted]

SEQ ID NO: 3719 - DNA, 361 bp, Homo sapiens
tgatcacgcctagcgggatgccttgactaccgtagctaaaggggttggtcgggttgggtaggctccaacctagatcaacgctggtgggcataggagtcgctgccaccggagcaggcagaacagatgcagctgattgcccggggttgaaccagctacccatcaaaccaccgccagtgggacgccagtcatcaatgataccgttcatgtcgccaatcctcagggtttacctacattatccaatggtgggtagccggagaccaagtccggcgaattcgttgatctgatctagggtgatttcgcaaacgtcgttacccgtaagtagggtacggctcaggaaggtatccatgggttcgaagtagaa

SEQ ID NO: 3720 - protein, 68 aa, Homo sapiens
MNGIIDDWRPTGGGLMGSWFNPGQSAASVLPAPVAATPMPTSVDLGWSLPNPTNPFSYGSQGIPLGVI

SEQ ID NO: 3721 - DNA, 295 bp, Homo sapiens
  misc_feature (214)..(214): Wherein n may be a, c, g or t
  misc_feature (292)..(292): Wherein n may be a, c, g or t
tcatgaagcagtaataggctaacttatcatgttcgtgtcagttctccttgccaaggagatgagagcgcggcagtacttaataaaggaaactcgttcttggatagctacaagaatcttttggggaggcattttgaaggaagctgaggttctgtgtgagcaaatgaggggtgacctgccagcaaaattgtgggtaagtgctgatgtgaccttattngcacccctaggctgataagaactggaacattcaagttagacttttaaaatgcctgtaggtattgtacaatgagatggncag

SEQ ID NO: 3722 - protein, 66 aa, Homo sapiens
  misc_feature (62)..(62): Wherein Xaa may be any naturally occuring amino acid
MFVSVLLAKEMRARQYLIKETRSWIATRIFWGGILKEAEVLCEQMRGDLPAKLWVSADVTLXAPLG

SEQ ID NO: 3723 - DNA, 275 bp, Homo sapiens
acgcgtgaagggaggagccagaagacaagagtgaaggggtgaggggttacccaggacagaggaaggagcccagagggacccaagacaaactccaccgacatcataggcttggtgggtttggtggcagggccagcacttgaaccgcccatctccctgaaggctccagggcaggggcagaagcacagcctcagaggggtccaccgacatcacaggcttggggggcttggtgcagcgaccagcactgaactggcagctctctgaagctccagggcggg

SEQ ID NO: 3724 - protein, 69 aa, Homo sapiens [sequence omitted]

SEQ ID NO: 3725 - DNA, 276 bp, Homo sapiens
ctagagaacgtatttcgctcatctaaaactccagatgaagaacagtccgaatatatgaaattaggagaaattaggctatcttcttcatcatatggaggaagtatttctaaagaaaatagtttacccaaggtattagatgagctccagtcccaaaatgaagagatcaaagcactaagacaaaaactagaagagaaggatgacaggattcaagaactagaagaacttaatagcatgaatgatgctaaacttcaaagaatagaagacttgccgaaggaa

SEQ ID NO: 3726 - protein, 92 aa, Homo sapiens
LENVFRSSKTPDEEQSEYMKLGEIRLSSSSYGGSISKENSLPKVLDELQSQNEEIKALRQKLEEKDDRIQELEELNSMNDAKLQRIEDLPKE

SEQ ID NO: 3727 - DNA, 393 bp, Homo sapiens
  misc_feature (386)..(386): Wherein n may be a, c, g or t
  misc_feature (387)..(387): Wherein n may be a, c, g or t
  misc_feature (388)..(388): Wherein n may be a, c, g or t
  misc_feature (391)..(391): Wherein n may be a, c, g or t
gtgcacgcttacgccaatactgcccgacggtgtcgattctcagaagaacacatgcaagcattctttcgctcaatgcgcatggacctgagcactaccagcttcgccgaacccgagctgcaagaatacatctatgggtccgcgggaggtcataggactgctatgcctcgatattttttacgccgagacaccacgcccagattcagctacctggtcacggatacaggagggggcacaacgcctcggcgccggcttacaaaaaatcaatttcctcagagactacactgaagacactacagttcgtcggcgcgattattaccctcgcttgtccgcaccgtccgcagaagaagcattcaacagcatcttggcagaagctcgctccgatctgnnnccncc

SEQ ID NO: 3728 - protein, 87 aa, Homo sapiens
  misc_feature (86)..(86): Wherein Xaa may be any naturally occuring amino acid
MGPREVIGLLCLDIFYAETPRPDSATWSRIQEGAQRLGAGLQKINFLRDYTEDTTVRRRDYYPRLSAPSAEEAFNSILAEARSDLXP

SEQ ID NO: 3729 - DNA, 355 bp, Homo sapiens
aagcttttggcccttggcgtctacccggaggtcagccttaaggaggcgagggaccggcgcgaggaggccaagcggcttctgggcgagggcgttgacccgtcattcgagcgcaaggcacagaaggtggcgacggtcgagcgaacggcaaacagtttcgaggccgtcgctcgtgagtggcacgccaagtacgcgccaagctggtccaagagcaacgcctacaaggtgattgctcgcctgcagaacgatgtatttccctggctgggcggccggccgatcgctgaaatcaaggcgccagagctgcttggtgtggctcgccgcgtcgagtctcgcggcgccctcgacacggcgcaccgtg

SEQ ID NO: 3730 - protein, 118 aa, Homo sapiens
KLLALGVYPEVSLKEARDRREEAKRLLGEGVDPSFERKAQKVATVERTANSFEAVAREWHAKYAPSWSKSNAYKVIARLQNDVFPWLGGRPIAEIKAPELLGVARRVESRGALDTAHR

SEQ ID NO: 3731 - DNA, 399 bp, Homo sapiens
gcgttgtttatgtttttattggcgcctcaacagggaactgagtttatgggaaccgagacggttctattatcgcttggtttttactctattacacaagaaacacttttttatttagtggctattaccttgaaatacttcagcatgtttccgattgctttagtatttgtctttactacacacccaactgaattttcggccagtcttaatcgtttaggtgtgccttataaaatagcttatgcggtgagtttaacattacgctatttacctgagattaaaaaagattacgttaatattatgcacgctcaacaagcgcgtggtattgaattatctaaaaaagcgtctttattgtctcgtctgaaaaacctaaccagtattttagggccattaatttttaccagc

SEQ ID NO: 3732 - protein, 133 aa, Homo sapiens
ALFMFLLAPQQGTEFMGTETVLLSLGFYSITQETLFYLVAITLKYFSMFPIALVFVFTTHPTEFSASLNRLGVPYKIAYAVSLTLRYLPEIKKDYVNIMHAQQARGIELSKKASLLSRLKNLTSILGPLIFTS

SEQ ID NO: 3733 - DNA, 171 bp, Homo sapiens
gatcacgatgcttcattgccttctcaatatcaaaaggaaactaccgatattttctttccaccagatgcaacgaatgatttcccaatcgctgttcaggtgtctgagaaatacggcataatttacctattaaccaagtatggcttcatccatttgtacgaattggaaaccggt

SEQ ID NO: 3734 - protein, 57 aa, Homo sapiens
DHDASLPSQYQKETTDIFFPPDATNDFPIAVQVSEKYGIIYLLTKYGFIHLYELETG

SEQ ID NO: 3735 - DNA, 320 bp, Homo sapiens
  misc_feature (1)..(1): Wherein n may be a, c, g or t
  misc_feature (2)..(2): Wherein n may be a, c, g or t
nntcagctccgttgctcctggccaccccttctccaccccgggtatacccaggtgatcagcgcttctgccctggcaccttccagtccctgcagcctgagtacaccctttctgaagcacagacctggtcacatctttcctccacctcctcccagggctccaggtcagtccttgggcccccagcccagccgcctccgtggactcctggggcctgtgcctttgcaaccttcactggcctgggccacacgctgctccatgtatcacacccctcccagcccagggccttttcccaagttgtacctcctcctccctagccctggcca

SEQ ID NO: 3736 - protein, 106 aa, Homo sapiens
  misc_feature (1)..(1): Wherein Xaa may be any naturally occuring amino acid
XQLRCSWPPLLHPGYTQVISASALAPSSPCSLSTPFLKHRPGHIFPPPPPRAPGQSLGPQPSRLRGLLGPVPLQPSLAWATRCSMYHTPPSPGPFPKLYLLLPSPG

SEQ ID NO: 3737 - DNA, 382 bp, Homo sapiens
accggtgcacagatcgttctggccgcgtgcactgccccgctcaagcaaatcgctatcaacgctggtcttgagggcggcgtcgtggctgagaaggtcgctggtctgcccgcaggacagggcctcaacgcggccaatgacgagtatgtcgacatggtagaggccggcatcattgacccggccaaggtgacccgttcggctctgcagaacgccgcgtccatcgcggccctgttcctcaccactgaagccgtcatcgctgacaagcccgagcctgttaaggctcccgctggcggcggtgatatggacggtatgggtggcatgggcggcatgatgtgatcgtgtattgccttcgctgatttgagtgggatgccactttgccccaggc

SEQ ID NO: 3738 - protein, 110 aa, Homo sapiens
TGAQIVLAACTAPLKQIAINAGLEGGVVAEKVAGLPAGQGLNAANDEYVDMVEAGIIDPAKVTRSALQNAASIAALFLTTEAVIADKPEPVKAPAGGGDMDGMGGMGGMM

SEQ ID NO: 3739 - DNA, 208 bp, Homo sapiens
ggatcccatcccttccagtgtgtcttcttgcttctaagagtatgagatcatcctgctctcaggtgtgtgaaccctcttgtttttctgcctcccccacgccctcttccacccacccaccttcccatccagggggagtgtctctttccccacccacataccttcccttctcttttatctctctggccatctatgccccccctcacccttt

SEQ ID NO: 3740 - protein, 55 aa, Homo sapiens [sequence omitted]

SEQ ID NO: 3741 - DNA, 309 bp, Homo sapiens
  misc_feature (1)..(1): Wherein n may be a, c, g or t
  misc_feature (2)..(2): Wherein n may be a, c, g or t
nncggccgctgctgccaaagccaatggagggcgcggctgatgtctcttagtttgaacaagatttttgcccacgccggacgcgatctgctgattcgcgagttgagcctggacagccgtaatgtacgcgccggtgacctgttcctggcggtgccgggcggcaagctcgatggccgtgcgcacatcgctgatgccctggcgcgcggtgcggctgcggttgcttatgaagtggacggcgccactgtgttgccgatcaccgatgtgccgctgattccggtcaaagggctggcagcgcaactgtcggatattgcc

SEQ ID NO: 3742 - protein, 90 aa, Homo sapiens
MSLSLNKIFAHAGRDLLIRELSLDSRNVRAGDLFLAVPGGKLDGRAHIADALARGAAAVAYEVDGATVLPITDVPLIPVKGLAAQLSDIA

SEQ ID NO: 3743 - DNA, 209 bp, Homo sapiens
  misc_feature (1)..(1): Wherein n may be a, c, g or t
ncgcacgcatatgcatgttcgcctgtgcatgggtgtacacacacaggcagccacttgagtataggtgtgtacaaaatacagaagacaacattggattctttgtagctggagttaccgaagttgtgatacgggtgctggggaccaggttccgagcctctggaagtacgtgtcctttactactgagctgcatctccaggaaatgggaattc

SEQ ID NO: 3744 - protein, 65 aa, Homo sapiens
MFACAWVYTHRQPLEYRCVQNTEDNIGFFVAGVTEVVIRVLGTRFRASGSTCPLLLSCISRKWEF

SEQ ID NO: 3745 - DNA, 527 bp, Homo sapiens
gtgcacaggtttgcagcctgggaacaacaggctatcccataaaacctaggtgtgtagtaggctgttccatttaggtttttgtgagtgtactctgcggtgtgcaaaaaatgaggaaatctgctacctgtacatttctcagaacatgaccccctcgttaagcgatgtgtaactgtacttaagagactgcctatgagagttttacagttatttcagtactcaatcttggatgtgtaccagaagggggtcatttctatgcaagattattcaatacttttaagtgaaaaaggcagtatgagcccaacaaatgtatcatttattgagcctttactctatagagatagaaagcatttaataactaactagatgttatctcaggaatggaagtgagtcctatagtttggtccttaattcattgctacaatatggtttatttggtgcttttaaaaaatatttaattgcctcttgatttttaccaacaagtatgtaagaaccaattttggctcaatatttgccatgtttttctacag

SEQ ID NO: 3746 - protein, 57 aa, Homo sapiens
MRVLQLFQYSILDVYQKGVISMQDYSILLSEKGSMSPTNVSFIEPLLYRDRKHLITN

SEQ ID NO: 3747 - DNA, 336 bp, Homo sapiens
  misc_feature (1)..(1): Wherein n may be a, c, g or t
ncgtacggcctgacatacattgaaacagcagacctggacggtgaaaccaacctgaaagtgaagcaagccatctccgtcaccagtgccatggaggacaacctggagctgctggcctcctttaatggagaagttaggggggaacctcctaaaaaccaactggataagttttcgggaaccctgagctacctggggaacacctacttactgaaccatgaaaggctactgctccgaggctgcgtcatccggaacacagactggtgctacggtttggtcgtttacactgggcaagacaccaaattaatgcagaacaggggacgggccaccttcaaacgaaca

SEQ ID NO: 3748 - protein, 112 aa, Homo sapiens
  misc_feature (1)..(1): Wherein Xaa may be any naturally occuring amino acid
XYGLTYIETADLDGETNLKVKQAISVTSAMEDNLELLASFNGEVRGEPPKNQLDKFSGTLSYLGNTYLLNHERLLLRGCVIRNTDWCYGLVVYTGQDTKLMQNRGRATFKRT

SEQ ID NO: 3749 - DNA, 366 bp, Homo sapiens
ctagaaatggcagcacaagctattattttcatttttgggggttatgatgccacaagcacctccatttccttcataatgtatgaactggccactcgccccaatgtgcaaaagaaactccagaatgagattgatagagctctgcccaataaggcacctgtcacctatgatgctctgatggaaatggagtacctggacatggtggtgaatgaaagtctaagattgtacccaattgctaccaggctagacagagtctcaaaaaaggatgtggaaatcaatggagtttttattcccaaagggactgtagttacgataccaatctatcctcttcatcggaaccctgagtactggctagagcctgaggaattc

SEQ ID NO: 3750 - protein, 122 aa, Homo sapiens
LEMAAQAIIFIFGGYDATSTSISFIMYELATRPNVQKKLQNEIDRALPNKAPVTYDALMEMEYLDMVVNESLRLYPIATRLDRVSKKDVEINGVFIPKGTVVTIPIYPLHRNPEYWLEPEEF

SEQ ID NO: 3751 - DNA, 221 bp, Homo sapiens
cggccgctgcgtgctctgcatgctggagaggcctctgcgtgctctacatgctggagagggctctgcgtgctctacatgctggagaggcctctgcgtcctctacatcctggagaggcctctgcgtcctctacatgctggagaggcctctgcgtcctctgcatgctggagagggctgagcgcgcttcccccacactcacggccctggctggcggttccaagcg

SEQ ID NO: 3752 - protein, 67 aa, Homo sapiens
MLERPLRALHAGEGSACSTCWRGLCVLYILERPLRPLHAGEASASSACWRGLSALPPHSRPWLAVPS

SEQ ID NO: 3753 - DNA, 625 bp, Homo sapiens
gtacggcttcgagagggctacagtgtccgagaggtcacactggccaaaggagggtcccaattggaggtaaagctggtgctgctgtggaaacacaacatgcgcattgagtatgtggctatggcatcctggcccctggagcctgagggccctcgagtaacacgggtggaagtgacgatggaaggcggctacgacattttgcatgatgtgtcctgtgcactaaggcagcccattcgttcattgtatcgtacccatgttatccggcgtttctggaacacgctgcagagcatcaaccagacagaccagatgcttgcccaccttcagtccttctcctcagtgcctgagcatttcacgcttcctgacagcaccaagagcggagtgccactcttctacatccctccaggctccaccaccccggtgctctccctccagcccagtggttctgactcatcccatgcccagtttgctgcctactggaagcccagtgctgtccatggatgcaaattcctggcagcgatggctgcacatgcatcgcctggtgctaatcctggagcatgacacaccaatccccaagcacttgcacaccccgggcagcaatgggcgctactacggagagaagacaacgcgt

SEQ ID NO: 3754 - protein, 184 aa, Homo sapiens
VRLREGYSVREVTLAKGGSQLEVKLVLLWKHNMRIEYVAMASWPLEPEGPRVTRVEVTMEGGYDILHDVSCALRQPIRSLYRTHVIRRFWNTLQSINQTDQMLAHLQSFSSVPEHFTLPDSTKSGVPLFYIPPGSTTPVLSLQPSGSDSSHAQFAAYWKPSAVHGCKFLAAMAAHASPGANPGA

SEQ ID NO: 3755 - DNA, 244 bp, Homo sapiens
gctagccaggtgaggtgagagttggtgtggaggcaggtggtgtggggtgtgtagaccaggaggaagaaaatgcacctgtgaagatggagaggtgcacacgtgcatggagcagagaggttccatgttgctggaggcagagaacaaaccagggaaggccttgtcagcatggtaaggaggtacgactacttattctcagcatgatgagagaccagtggaggtgaggtgaggagtgatggggtgatca

SEQ ID NO: 3756 - protein, 55 aa, Homo sapiens [sequence omitted]

SEQ ID NO: 3757 - DNA, 288 bp, Homo sapiens
atgacatatgatctccatgatcctaaggatgtctacactggagaaaatagtcccctctataaatctccatatgacattggaaagagtgctgatctcaatgtggattcaatcatttcctactggaaggaccatggagcagcttctgagaagctcattgggggatttccagcatatgggcatacctttatcctgagtgacccttctaagactggaattggggcccctacaattagtactggcccaccaggaaagtacgcagatgaatcaggactcctggcttactatgga

SEQ ID NO: 3758 - protein, 96 aa, Homo sapiens
MTYDLHDPKDVYTGENSPLYKSPYDIGKSADLNVDSIISYWKDHGAASEKLIGGFPAYGHTFILSDPSKTGIGAPTISTGPPGKYADESGLLAYYG

SEQ ID NO: 3759 - DNA, 426 bp, Homo sapiens
agatctaaatgaagggaaagacaggtttcaaacactgcctgaatctgttacaagcttaacaaaacagcagaactttttgtaaacagacgaggacacagctcatcaacaagcaggatttgttcctgaacatagcccaagaacaggcctgacagagaaaatgagtcaggctgtgaaaaaacagatcatttctgtgcatattgacagccccaagattgatttctgccatcagaacaaatgcacagatatcaagtcacagaccagaattcctgtctccttccacagactcaaagcagataaggaaatggaaaccactgtggcactctaggaggcttaaagaacagtcaacctgcacctcttattctccacccatcttagaaaaacactaccaccctaaaagcaccaggcaatttatagaccttagtcaaa

SEQ ID NO: 3760 - protein, 56 aa, Homo sapiens
MAEINLGAVNMHRNDLFFHSLTHFLCQACSWAMFRNKSCLLMSCVLVCLQKVLLFC

SEQ ID NO: 3761 - DNA, 374 bp, Homo sapiens
atgcatcacaaagccccttcctggggcttcacattgccccttcctgtgactttacactgcccttcctgtcatgtcacactgctccttcctgtggcttcacacagcctctacctgtgtcttcacagggacacttctggcatgttcacactgcctctgcctgtggcttcacacagcctgtttccctgtcatcacagcccctacctatggcttcacacagcctgtttccctgtcatcacagccccttcctgtgtcctcacacttccccttcttgtggcttcacacagcctctacctgagacttcacactgccccttcctatgacttcacactgcctcttcctgtaacgtcacacagccacttcctgtgacttcctat

SEQ ID NO: 3762 - protein, 121 aa, Homo sapiens
MHHKAPSWGFTLPLPVTLHCPSCHVTLLLPVASHSLYLCLHRDTSGMFTLPLPVASHSLFPCHHSPYLWLHTACFPVITAPSCVLTLPLLVASHSLYLRLHTAPSYDFTLPLPVTSHSHFL

SEQ ID NO: 3763 - DNA, 233 bp, Homo sapiens
gggcccgccgcaaaaaccaagggcctgcggatgcggcatccggcaggccctgtggggggaagggtcaggccagggtcgatgcccggcccgccgggctcaggggcactggggcgcctgggccttggccagttcgtcgatcggatccaggtccggctggcgggtcaggttgtagttcaggttgggcgtctggccgccgatggaacgcacgcgcagcacgttggtggcggcgacca

SEQ ID NO: 3764 - protein, 67 aa, Homo sapiens
MRHPAGPVGGRVRPGSMPGPPGSGALGRLGLGQFVDRIQVRLAGQVVVQVGRLAADGTHAQHVGGGD

SEQ ID NO: 3765 - DNA, 333 bp, Homo sapiens
ggatccaaaatatagaaaagtgtctaatttgtatttacaaaatgagtataatattggtgccaaaaaacttcggaaaaattgaatatataaatacagatatgaaaatccttgattaaaaaaaaaaagtaacaaccaaaattaccagtacattttaggaataaaccatgtccaagtgagattttttgcataaatacagtccaacactaacattaacaattctgctgatataattcagcattaatgctcaaagaagaaaaatcatatggctatctcctttacatgagttttaaaaaacaaaaaactaataccaaataccagattatgctgactagt

SEQ ID NO: 3766 - protein, 54 aa, Homo sapiens
MQKISLGHGLFLKCTGNFGCYFFFLIKDFHICIYIFNFSEVFWHQYYTHFVNTN

SEQ ID NO: 3767 - DNA, 192 bp, Homo sapiens
gatctggacgtaaatacatactatacattacctacttcattgttatcaaatactacttcaattcccatctttattttccaccatggggcgggctcctcaggtttatcatttgcaaacttggccaaggaattaaatactaaactagaaagaagatgcggatgctttacatttgatgctagggggcatgcagaa

SEQ ID NO: 3768 - protein, 64 aa, Homo sapiens
DLDVNTYYTLPTSLLSNTTSIPIFIFHHGAGSSGLSFANLAKELNTKLERRCGCFTFDARGHAE

SEQ ID NO: 3769 - DNA, 282 bp, Homo sapiens
  misc_feature (1)..(1): Wherein n may be a, c, g or t
  misc_feature (2)..(2): Wherein n may be a, c, g or t
nnccccggtgcattatggattatgggtgagtatgctgaaggagaaagtgagatacaacattgttggaagcacattcgtaacagcgtaggtgaagttcctatccttcaatcagaaatcaaaaagttaacacaaaaccaagaacacaccgaagaaaatgaggttgacgctaccgccaagccaactggtccagttattctaccagacggtacgtatgccactgaaagcgctttcgatgtgaagacttctcaaaagtcagttaccgatgaagaacgtgattctaga

SEQ ID NO: 3770 - protein, 94 aa, Homo sapiens
  misc_feature (1)..(1): Wherein Xaa may be any naturally occuring amino acid
XPGALWIMGEYAEGESEIQHCWKHIRNSVGEVPILQSEIKKLTQNQEHTEENEVDATAKPTGPVILPDGTYATESAFDVKTSQKSVTDEERDSR

SEQ ID NO: 3771 - DNA, 295 bp, Homo sapiens
  misc_feature (53)..(53): Wherein n may be a, c, g or t
  misc_feature (185)..(185): Wherein n may be a, c, g or t
  misc_feature (240)..(240): Wherein n may be a, c, g or t
  misc_feature (285)..(285): Wherein n may be a, c, g or t
cagctgccagcggtggagagctcactctatgggtaccaagcacccagctgatntagcaaaccacctgggaggtcacggtctcctcgttgcaggtgaagaaacggaggcgaggtggaggttagtcccttgccaggtcacacggcgggccagtgctgggtctgatggccttaccggctgggtctgantgccttaccggccaggctgcgcacgtgcgttgggcctccgctgagggctggtctngggtgggagcacatgtagggaaggggctcgtgcggcatgttggcngtggagctgg

SEQ ID NO: 3772 - protein, 51 aa, Homo sapiens
  misc_feature (9)..(9): Wherein Xaa may be any naturally occuring amino acid
MGTKHPADXANHLGGHGLLVAGEETEARWRLVPCQVTRRASAGSDGLTGWV

SEQ ID NO: 3773 - DNA, 267 bp, Homo sapiens
ccggaggatcacatggctaaattacttctgcaattgagttcaaaattggggaatacgaccaaggaatcgtcaattagaacaactagaaccaatgctagtgatgtgaatgcaaacccgacagtggtcaacatgaaaaatagtcaggaagactgggacccgaatcacaggtctgcaatatgtgactctgcagaggctcttcataataacaacatcaattctaaagagaataagataatcaactctcaaatacccccccctgttaatgat

SEQ ID NO: 3774 - protein, 89 aa, Homo sapiens
PEDHMAKLLLQLSSKLGNTTKESSIRTTRTNASDVNANPTVVNMKNSQEDWDPNHRSAICDSAEALHNNNINSKENKIINSQIPPPVND

SEQ ID NO: 3775 - DNA, 333 bp, Homo sapiens
  misc_feature (1)..(1): Wherein n may be a, c, g or t
  misc_feature (2)..(2): Wherein n may be a, c, g or t
nngactggcggccgatcggcggcaataaaggccctgtacacggtgacggtgaacaaacagtttcgtgatatgggcacccccgtctacgcaagctacaacaaacagacgtattgggaccggccggacacccagcgttggaacctgacagtgtcccgctacttcaatgtgggcagcgtcaagaacatgagcttgtcactgaatgcctaccgcactcaggaatacagctacaaagataacggcttggcgctgacggtgagtttaccgttggggcgcaccggcaccttgtcgatggatgctaacagggccgcaggcgaaaacaccttttcaacgcgt

SEQ ID NO: 3776 - protein, 111 aa, Homo sapiens
  misc_feature (1)..(1): Wherein Xaa may be any naturally occuring amino acid
XTGGRSAAIKALYTVTVNKQFRDMGTPVYASYNKQTYWDRPDTQRWNLTVSRYFNVGSVKNMSLSLNAYRTQEYSYKDNGLALTVSLPLGRTGTLSMDANRAAGENTFSTR

SEQ ID NO: 3777 - DNA, 444 bp, Homo sapiens
  misc_feature (312)..(312): Wherein n may be a, c, g or t
  misc_feature (331)..(331): Wherein n may be a, c, g or t
  misc_feature (418)..(418): Wherein n may be a, c, g or t
tgtacatgtcatattctagatggtttttatcctgtcccctatcccctccctgctgttgtaaaaatagcttattttttggcctctctactgttgtagagattttctttctatactgctactttcctccacaagcccaggcatattgcatttcccatgtcgagtattcctcctgaagtgttcatcatatcgtgcttcccccatgggaaaagcacttgcgtggctcccagagtggctactacgaaaatgaggttgcctgaagctgggatggggaagactgtgggtaaagcaggcttgacaaaaggccagaattangtttcagatgtttaaaatntgggctgtgttggtatgcagtgagtggcagcatcaggaaagccagttcggggtgtgtgtgtgtgtgtgtgtgtagttcggagctgtngtagctgtgttaatatgcaatgagtg

SEQ ID NO: 3778 - protein, 57 aa, Homo sapiens
  misc_feature (53)..(53): Wherein Xaa may be any naturally occuring amino acid
MSSIPPEVFIISCFPHGKSTCVAPRVATTKMRLPEAGMGKTVGKAGLTKGQNXVSDV

SEQ ID NO: 3779 - DNA, 379 bp, Homo sapiens
  misc_feature (32)..(32): Wherein n may be a, c, g or t
  misc_feature (131)..(131): Wherein n may be a, c, g or t
  misc_feature (234)..(234): Wherein n may be a, c, g or t
  misc_feature (251)..(251): Wherein n may be a, c, g or t
  misc_feature (293)..(293): Wherein n may be a, c, g or t
  misc_feature (294)..(294): Wherein n may be a, c, g or t
  misc_feature (320)..(320): Wherein n may be a, c, g or t
  misc_feature (322)..(322): Wherein n may be a, c, g or t
ggatcctttccctatgtctcctaacaacttanggcagggatcacttttgttaatttctatattgctagcaagtggggcaatgcttgggacacagcaggccttcagatcttgttgcgcaaataacaactatnaggttacatgctatgaggtctgtaaaaagaggagcagaagaaaccacggcattttgccttgaaagaagcagaaggcttttcagggaatattcacactcacctntgaagcggagtgagatntagtacacaaagattggcactcacaggagggaagagcctctnncaggcagcaagaatgaagaacagatntncgaagacagcggtgtattcaggaagcatcactgaagagtagacgatgggaggaggca

SEQ ID NO: 3780 - protein, 59 aa, Homo sapiens
  misc_feature (7)..(7): Wherein Xaa may be any naturally occuring amino acid
  misc_feature (40)..(40): Wherein Xaa may be any naturally occuring amino acid
MSPNNLXQGSLLLISILLASGAMLGTQQAFRSCCANNNYXVTCYEVCKKRSRRNHGILP

SEQ ID NO: 3781 - DNA, 435 bp, Homo sapiens
accggttggagggtttcgggctggcactgccaggccgaggcacggacccccctgtctaatatggggccggtgtttatggagcccggtactgtgctgtgctctggtgtggacgctgcagatgccactgtgaagagacaggctggtgccctcgcaggtcttcatggaaggaggccacctggggcctgtggccgagcatgtgtgcctgtggggtggcgccagaagcctctctgaggactgggtgcatgggggaggccaggcaggcgaggagggcaacgtggccatgggcatgacggtggccaggcttggctccaggggctggtggtgaggtcagcttcaggatggggtggcctggacggtggagctgctcacatgctcagacccacgcaagggctgagcccgggactgaaatcctgtttcaggtgtgtttggttgcaa

SEQ ID NO: 3782 - protein, 96 aa, Homo sapiens [sequence omitted]

SEQ ID NO: 3783 - DNA, 345 bp, Homo sapiens
gggcccttcttctttttggatttgtttttcttctttttcttctttacagctgctgctccatcttgagatggaccatcagcttgtgcttcatcatcatcgtcgtcctctggtagcaaggactgagctgtaacaacagaatgattgctgtttgcagctttgtcttctttaatcagagtctcttttgtttcatcattttgtccaacatgcagtgcatccatctccttggttgtcgcatcaaccgcggccattttataaatttctatagcaggttcaaacgcagggtcaccggccggtgtgcggaggaccggagtccgggcttcatggatagtcgacagagataagggc

SEQ ID NO: 3784 - protein, 82 aa, Homo sapiens
MAAVDATTKEMDALHVGQNDETKETLIKEDKAANSNHSVVTAQSLLPEDDDDDEAQADGPSQDGAAAVKKKKKKNKSKKKKG

SEQ ID NO: 3785 - DNA, 272 bp, Homo sapiens
  misc_feature (1)..(1): Wherein n may be a, c, g or t
  misc_feature (2)..(2): Wherein n may be a, c, g or t
nnaaccgacggcgcactgcgtcagcggattgatgtccaggcgctctccgtatggtgtgtgtgcgcgttgtcgaacggcgatcttgcgtgcggtgcgagcgacggcatcgtacgtgtttttacacgcgcttccgagcgccgggcacccgctgacgcgatcgctgtgcatagcgacgctgtcgcgacacagtcgctgagcttcgccgaggaatgaaggccattgcaccgcaggaacgcagcgcactgaacacgcctggcgcatcggaaggtacc

SEQ ID NO: 3786 - protein, 70 aa, Homo sapiens
  misc_feature (1)..(1): Wherein Xaa may be any naturally occuring amino acid
XTDGALRQRIDVQALSVWCVCALSNGDLACGASDGIVRVFTRASERRAPADAIAVHSDAVATQSLSFAEE

SEQ ID NO: 3787 - DNA, 422 bp, Homo sapiens
  misc_feature (1)..(1): Wherein n may be a, c, g or t
  misc_feature (422)..(422): Wherein n may be a, c, g or t
natccaaatcaaatcaggaggcagatccaaattaatccaggaaaaattgcgttttgaatgtaaagagcttcctttaatgcattttctaaactctatgctgtttgtttctttgggctacataaatctaggaatcattaagctccccatgtctgctgggtatgtgggtatgccaagaatgcaaggccctgaccttccagaaaatgcaacaatttaccctccttcacagatttcagccacagaactacagtagtcaatctaattatcccttgatagtgccctctacccactacatagtagctctatgaatacaggggctgtgtcttagaatctactgtgattcagagcacctaacacagtacctaggctataccaggtgtgtagcaattgttgaattactgacttaaagtgtcttatttgagcan

SEQ ID NO: 3788 - protein, 57 aa, Homo sapiens
MHFLNSMLFVSLGYINLGIIKLPMSAGYVGMPRMQGPDLPENATIYPPSQISATELQ

SEQ ID NO: 3789 - DNA, 383 bp, Homo sapiens
cctaggcgatagagcaagactctgtctcaaaaagaaaaaagtcacatactttatgattcaatttataacattctttcaataacattagagatagagaacagagtagtggctgccaggagagaagtggaagagcagagaggtggatgtgattgcaaagagacagcatgagggagaactgtactgatgcaatggttctgtgtcttcaccatttgtgtggtggtggttacacaaatctacacgatgaaactgcacggaacaacacacacataacacacacgtgcacatggtgaaaactaaataagctctatgcattgtactaatataccatctacattgtacactgaaactgaatgcaagggttttgatattgcaccacagttatg

SEQ ID NO: 3790 - protein, 75 aa, Homo sapiens [sequence omitted]

SEQ ID NO: 3791 - DNA, 273 bp, Homo sapiens
cggaacaccaaggaggcagatgtgtcgcttacagcctttgtcctcatcgcactgcaggaagccagagatatctgtgaggggcaggtcaacagccttcccgggagcatcaacaaggcaggggagtatcttgaagccagttacctgaacctgcagagaccatacacagtagccattgctgggtatgccctggccctgatgaacaaactggaggaaccttacctcaccaagtttctgaacacagccaaagatcggaaccgctgggaggagcctggc

SEQ ID NO: 3792 - protein, 91 aa, Homo sapiens
RNTKEADVSLTAFVLIALQEARDICEGQVNSLPGSINKAGEYLEASYLNLQRPYTVAIAGYALALMNKLEEPYLTKFLNTAKDRNRWEEPG

SEQ ID NO: 3793 - DNA, 201 bp, Homo sapiens
tacctgctcttccatttggtgaagtacatctttggcatgacccacaggaccttcatcccttaccccttgccacggtttgtgtatagctggattggcagactcttcgggctgagtccatttgagccctggacaacaaaggacaaggtggagcggatacatatctcagatgtgatggcgaccgacctgcccggcctggaagat

SEQ ID NO: 3794 - protein, 67 aa, Homo sapiens
YLLFHLVKYIFGMTHRTFIPYPLPRFVYSWIGRLFGLSPFEPWTTKDKVERIHISDVMATDLPGLED

SEQ ID NO: 3795 - DNA, 347 bp, Homo sapiens
  misc_feature (347)..(347): Wherein n may be a, c, g or t
tgatcacgtactgccgagacatctccttcggcttacgctgcttgtcgccactcatacgcgcccgcagcgattccaggtcgcgagcgctcaaactcccgtcgagtgccttgtcaacgatgggctccagttggtcaacaggcatgaccttggccaacagggagatttcgtagcccaggcgaatggtgaccgcttctgatcggtccacgagcatctggcgaatttcgtccggcagccgcgacaacgccagtgtcttggaccctcgcccttggaagcgccgaccagctccgctaactcgtcttggtcagcgacgatcttctgttccagaagatccgcccaagcgaacgggn

SEQ ID NO: 3796 - protein, 70 aa, Homo sapiens
MLVDRSEAVTIRLGYEISLLAKVMPVDQLEPIVDKALDGSLSARDLESLRARMSGDKQRKPKEMSRQYVI

SEQ ID NO: 3797 - DNA, 365 bp, Homo sapiens
cccgggattacatgtgtgagctaccgcacccagcccgctctttaggctctccatttaccttgtttgattaagcacaattattttaggcctcccatttatataatttgaataaatggcattcccaaatcactgaagatgtttaatcagaagtctcaaagctcctttacgagattatcaaagatacacttgttccgtagaatggaccgtgggatgcacaatagatgcgacttccattctaaccataacattagctgtagatttctttgtttttctacttcggaaaacagtatactcatattttttaaacttaaaaactcattgttggttggtgtattaagcaagtaccatatttacttgttcagaaa

SEQ ID NO: 3798 - protein, 76 aa, Homo sapiens
MFNQKSQSSFTRLSKIHLFRRMDRGMHNRCDFHSNHNISCRFLCFSTSENSILIFFKLKNSLLVGVLSKYHIYLFR

SEQ ID NO: 3799 - DNA, 354 bp, Homo sapiens
acgcgtagtgaaggtagatgcacgctgtccattatacagcggcatacgcatatcccaaccttttagggccaaatcatcaccaccactccaagccacaacaccatcattccaacaatcccatgccgtgatccatgcctcgaagtcatgtgccaaccacgtttcgcatgcttggggaagtggtgcagctgaatttaagcttggtaccatacataacgttccgttgctttgactcaaaatcatacgtgcatcatcggcgccaggacgacacctatcggaccagtcgagactcaaacataatgcatcatgatggttcatgcgccacgatttccaaggggctaggcgataggctgattc

SEQ ID NO: 3800 - protein, 105 aa, Homo sapiens
MNHHDALCLSLDWSDRCRPGADDARMILSQSNGTLCMVPSLNSAAPLPQACETWLAHDFEAWITAWDCWNDGVVAWSGGDDLALKGWDMRMPLYNGQRASTFTTR

SEQ ID NO: 3801 - DNA, 305 bp, Homo sapiens
  misc_feature (1)..(1): Wherein n may be a, c, g or t
  misc_feature (2)..(2): Wherein n may be a, c, g or t
nnggggggggggggggctctctccgacatccgccgcggcggcaatccggccgatttcgcagaggccggcacaagccagctgcccggctggtcgtaccggaacatgtggtgggtgacgcacaacgcccatggtgcttttgccgcgcgcggcgtgcacgggcagaccctttacatcgatcccaaagccgagatggtgattgcgcggtttgcatcacacccggtggccggcaatgcggccaacgatgccacttcgctgccggcctaccacgcgctggcgctgcacctgatgcgctccggcaaggcgcc

SEQ ID NO: 3802 - protein, 101 aa, Homo sapiens
  misc_feature (1)..(1): Wherein Xaa may be any naturally occuring amino acid
XGGGGALSDIRRGGNPADFAEAGTSQLPGWSYRNMWWVTHNAHGAFAARGVHGQTLYIDPKAEMVIARFASHPVAGNAANDATSLPAYHALALHLMRSGKA

SEQ ID NO: 3803 - DNA, 603 bp, Homo sapiens
cccggggtagcgatggcagcggcgacccagatgaacaggccttggatggcgaagagggaacacgtccggaggcggttgctggtgcagcctttgggagtgagccacttggaagcgtggaaggtcgccatcgcgccgatcaagaaggttatgatggagaccagggttgctagccacgcatggggcatatctgggaggcctgcggtggacagaccaagaataacggtgttgcctgagatgatgttagtatactggccatcaaatgtgaagcaatcgaaaaggcgtaagtgaagtacatgtatatgtacatcgacccgtcctccgcggctacacaatcgatcacaacggccaaattgattgggaaagacttaccagtctgcattcccacaaacacaccccaattcagaaacgacgctccgtcgaccatgcccgtcaccagcgagcaggccaacaggcacacaatctctggcagtccttgaggttttgcacgcggctgttgggctcgtgagagcgtctcccgtcaccactgccatccaggtcgtgggcaagaatctcgtcgtgtggactgtcatggctgcgtttcccgacatcgtggtgggccgtgat

SEQ ID NO: 3804 - protein, 83 aa, Homo sapiens
LGKTYQSAFPQTHPNSETTLRRPCPSPASRPTGTQSLAVLEVLHAAVGLVRASPVTTAIQVVGKNLVVWTVMAAFPDIVVGRD

SEQ ID NO: 3805 - DNA, 262 bp, Homo sapiens
gggcccagtgccatctttgactttccactaaaatacagggatctggtggtaacacccatgcgactggctttcgaaaagatccaatttcatgggtcaggggcttcatgcttccgtcactgttgggatccccagaatattctgaacccacccaagatacttccggtggaaaaggcccaagggaagatcctcttcattgtaggagagaatgaccaatgcttggctagcaagttgcatgcacagagggccatggaccgggtccgga

SEQ ID NO: 3806 - protein, 87 aa, Homo sapiens
GPSAIFDFPLKYRDLVVTPMRLAFEKIQFHGSGASCFRHCWDPQNILNPPKILPVEKAQGKILFIVGENDQCLASKLHAQRAMDRVR

SEQ ID NO: 3807 - DNA, 298 bp, Homo sapiens
  misc_feature (280)..(280): Wherein n may be a, c, g or t
gaattcgcacaaaaggctttggaaggtgctgaaaagattgccaaaagaggtggtcaatctttggaagtcaaacagaagaaggaagaaatggatttgattacgaaaatcattaaattgctagagagtggtcaaagagttgctaatcactcctggacttcaaaagaagttgaaattatcaactccatgttcttgttgactgctaagccatgtatctatttgattaatttatctgaaagagattacatcagaaagaaaaacaagcatctgctagaaatcaggnaatgggtagccccccccc

SEQ ID NO: 3808 - protein, 99 aa, Homo sapiens
  misc_feature (94)..(94): Wherein Xaa may be any naturally occuring amino acid
EFAQKALEGAEKIAKRGGQSLEVKQKKEEMDLITKIIKLLESGQRVANHSWTSKEVEIINSMFLLTAKPCIYLINLSERDYIRKKNKHLLEIRXWVAPP

SEQ ID NO: 3809 - DNA, 419 bp, Homo sapiens
gaattcgataaggtaatgcatgtgaagtgcttacaggaggctctggcttagaactgaaagttcagtaagtgttgctcttactatcatgaagccattggaactgcagtaatcatggagctaccccagatgcctggacagatgatgggcaaggacccaggctgaaggtggggaaaaaatattgggcaataacacaggctgaggttggtgagagagatgggcaaggacacaggctgaggttggtgactctgaccgtgggtttggatacaagcaggacgttgactattgcgtggcatattatggatgctcctcaacttacaatgggactaagtctggaaaaacccatcgtaaattgaaaatatccctaagtcgaaaatgaatttaatacacctaacctactgcacactgtagcttagaatagc

SEQ ID NO: 3810 - protein, 69 aa, Homo sapiens [sequence omitted]

SEQ ID NO: 3811 - DNA, 245 bp, Homo sapiens
agatcttactgacttgacttacctattttcaaaaattggtctatttctgctgttaggaggactgtatgtctatatgtgtgttcattcagcaaatatctctatacccgttttgtgccaggcatcaatcagttgcaccatgcatttgggatataagggagacagaacggaggctctgccctcggggggttggcaatctctacaagaaacattacaaacaagggaacatcaaatattatgagaaatga

SEQ ID NO: 3812 - protein, 59 aa, Homo sapiens [sequence omitted]

SEQ ID NO: 3813 - DNA, 1055 bp, Homo sapiens
cagctcgacgatgacgcctgggatgacttcgagaccacccttatcacctccgatctgggtgttggtccgacgacggagctcgtcgagaagctgcgctcggaactggctattgatgggatctctgacccggcccatgctcgcgaggttctgcaccatgagcttgtcgaactcgtcggatcggatatggatcgttccatcaacctagaccgcctggaaggcaagccggctgtcgtcctcatggtgggcgtcaatggcacgggtaagacgacgacctgcggcaagctggcgcgcgttctcgtcgccgagggaaagacggtcctcctcggtgcagcagacaccttccgcgccgccgctggcgagcagctggagacgtggggagaacgcgtcggtgtgcgtaccgtcgccaaggacgcgggccccgatcctgcctccgtcgcttacgaggccgttcaggctggcattgataaaggtgttgatgtcgtgctcgttgacactgctgggcgacttcacaccaaggccggtctcatggatgaactgggtaaggtcaagcgtgtcatcgagaagcttgcaccggtgagcgaggtgttgcttgttttggacgccaccaccgggcagaatggcctagctcaagcccgcgtcttctcggaggtcgtcgacgtgactggcatcgtgttgtcaaagcttgacggttccgcgaagggcggcatcgttgtccaagtgcagcgtgagctaggtgtgcccgtcaagctcatcggtctcggcgagggagtcgacgatctggccccctttgatgctgataactttgtcaccggtctcatgggtgacgattctgccgagtgctgaggtccgataagtgacagatatcgcgtggtttgccccggctggtggggtcatgatggtcagtatcctcagccataagctgtgcgtagcggtgcttattgcggctttcgctttgcctctaactttcgtcgtgcggcgggctatagcgggtacggggagctggtggcgcaagatcctgcgcggtctcgcccctccggccgttattctgctcgcga

SEQ ID NO: 3814 - protein, 280 aa, Homo sapiens
QLDDDAWDDFETTLITSDLGVGPTTELVEKLRSELAIDGISDPAHAREVLHHELVELVGSDMDRSINLDRLEGKPAVVLMVGVNGTGKTTTCGKLARVLVAEGKTVLLGAADTFRAAAGEQLETWGERVGVRTVAKDAGPDPASVAYEAVQAGIDKGVDVVLVDTAGRLHTKAGLMDELGKVKRVIEKLAPVSEVLLVLDATTGQNGLAQARVFSEVVDVTGIVLSKLDGSAKGGIVVQVQRELGVPVKLIGLGEGVDDLAPFDADNFVTGLMGDDSAEC

SEQ ID NO: 3815 - DNA, 338 bp, Homo sapiens
tggccacagtcccccctggtaaggggggtagctccaggaaggcccacagctcacgacagccaggaaggagaaggcggaggtgggatgcagggtggggctcagccctgcccagtggtcagcagagggtggagaggaggccaaggtcagcggcgcagctgccgagagccccagcaccgacgaaggaggctgtggggggttgtcctggcactgcctggctcagaaatccacgcatggggcctgcttccccgtagcagctgaggcccatggaggccatagccctgcaactgccattagtcatgtggcttcagaatttccctgtcatcggtgttctttgtaca

SEQ ID NO: 3816 - protein, 60 aa, Homo sapiens
MTNGSCRAMASMGLSCYGEAGPMRGFLSQAVPGQPPTASFVGAGALGSCAADLGLLSTLC

SEQ ID NO: 3817 - DNA, 274 bp, Homo sapiens
  misc_feature (1)..(1): Wherein n may be a, c, g or t
  misc_feature (271)..(271): Wherein n may be a, c, g or t
ngttcaagggccctggggtgggactgtgcctagagtgagacacaaaatgatccagagtgactggaagggagttgggaaggaagctgggcttcctagtcttgggaaggactctggctttgttctgagagacgtggagagccgttctgactgggcgcttccttacaggattgctgtgctgaaaagaaatggaggcaaggggtgtatgggaacactctggactctgtctgattttgctgggacctaaaactgctctagtctgcatggatatccnccc

SEQ ID NO: 3818 - protein, 87 aa, Homo sapiens [sequence omitted]

SEQ ID NO: 3819 - DNA, 549 bp, Homo sapiens
ccacaggaggtgatcggacagatctgagccctggggcgctcatccctccagctggggctcttgccttgtctccagctgcccagactggcggaatgcggagctgcccggccagcgagccggcagaggggccgggacccaccccgccctcgggtgctgtggtctcaagcctggttctcatcctggccctgctcgctgtagctgtgagacctcgggcaaatggcttaacctctccgtgcttcattttccttctctgtgaaatgacgaaaaaataacaccctccttatggggttgctgtggggactaaataaaccagtcggcacactatgggagctcagtaagggttaccgttgttatgcatctcttcaagaatatttcttgaggacctgctatgtgtcaggaactcttctaggctctggggagtttgcagtattggcatctgctcatagccttactttctagtgcaagagctagagaaaggataatttcagctgctggtaagtgttatgaaagaactaagacggttgtgaaagtgtcgcgcgaggactgcag

SEQ ID NO: 3820 - protein, 80 aa, Homo sapiens
MKHGEVKPFARGLTATASRARMRTRLETTAPEGGVGPGPSAGSLAGQLRIPPVWAAGDKARAPAGGMSAPGLRSVRSPPV

SEQ ID NO: 3821 - DNA, 291 bp, Homo sapiens
  misc_feature (58)..(58): Wherein n may be a, c, g or t
  misc_feature (59)..(59): Wherein n may be a, c, g or t
  misc_feature (71)..(71): Wherein n may be a, c, g or t
  misc_feature (80)..(80): Wherein n may be a, c, g or t
  misc_feature (291)..(291): Wherein n may be a, c, g or t
tgatcagcaaagcatgacctcccttcctcagccgccttgcaaaaataaaaataaacanncaccttaccaangaaaggaanccccatttcatggcacatcttctcgacgcctcccttgctgctatcaaatacctcactgcaggccatgaccgacagaagctcaggggctttctccttgatgtaattcagggcccattctgtcgcatctatcttacccgcctcatctgacttgatgaatctgaggtctgaaagcggctgcctcagaccactcatgttctccacaacacctaan

SEQ ID NO: 3822 - protein, 90 aa, Homo sapiens
  misc_feature (65)..(65): Wherein Xaa may be any naturally occuring amino acid
  misc_feature (68)..(68): Wherein Xaa may be any naturally occuring amino acid
  misc_feature (72)..(72): Wherein Xaa may be any naturally occuring amino acid
MSGLRQPLSDLRFIKSDEAGKIDATEWALNYIKEKAPELLSVMACSEVFDSSKGGVEKMCHEMGXPFXGKVXVYFYFCKAAEEGRSCFAD

SEQ ID NO: 3823 - DNA, 372 bp, Homo sapiens
  misc_feature (359)..(359): Wherein n may be a, c, g or t
  misc_feature (360)..(360): Wherein n may be a, c, g or t
  misc_feature (363)..(363): Wherein n may be a, c, g or t
  misc_feature (364)..(364): Wherein n may be a, c, g or t
  misc_feature (366)..(366): Wherein n may be a, c, g or t
  misc_feature (367)..(367): Wherein n may be a, c, g or t
  misc_feature (368)..(368): Wherein n may be a, c, g or t
  misc_feature (369)..(369): Wherein n may be a, c, g or t
  misc_feature (370)..(370): Wherein n may be a, c, g or t
  misc_feature (371)..(371): Wherein n may be a, c, g or t
  misc_feature (372)..(372): Wherein n may be a, c, g or t
agatctgcttcacagatagcaagacagaaaggtgcaagacttcgtcccccgcctctgtgtcaaatagaatatctagtgcagtgtgagtgttgtcagagaaggggtgaaggtgcaaactgggggagtcctcatgtgagaaatggggctctaaatggcctaccaaggtggccctcatggtagccaacagcgagcacctccgtgatgaaaccaccaacccgaaaacagcacgcaggtcggccagggaggtgcctggtggggtgtttctcttggtgttctcagagatttgtgctcctcttgcgtaagctgcagattaggaaagcattaggtaacgacagggtggccggagcgtattacacacnnccnncnnnnnnn

SEQ ID NO: 3824 - protein, 58 aa, Homo sapiens
MRATLVGHLEPHFSHEDSPSLHLHPFSDNTHTALDILFDTEAGDEVLHLSVLLSVKQI

SEQ ID NO: 3825 - DNA, 269 bp, Homo sapiens
  misc_feature (269)..(269): Wherein n may be a, c, g or t
acgcgtgtcctcagctgcttttcgttggtgagtctttgctcagcatcgtgcgcctggggcccgtcctcagcgtgtgtgtccgcagcgcgtgtgtctgcacctccttttggttggtgagttgtgtgcactgttctgtggctatacagtttttctgtgagtttgcctgacatttaggttattttgaatttttggctctgatgaataaagcagttgtatatatttatttagaaatcatcttcatgtggatgtgtattttcatttctttcagn

SEQ ID NO: 3826 - protein, 56 aa, Homo sapiens
MSGKLTEKLYSHRTVHTTHQPKGGADTRAADTHAEDGPQAHDAEQRLTNEKQLRTR

SEQ ID NO: 3827 - DNA, 200 bp, Homo sapiens
acgcgtccctgatgttgaatctggattcgccgttctgctgtaaggtagtccatggtggcgtaggcgacaatttgttcggcttggaatttaacgttgttgatgttgatgtgttgttgtgccttttgggcgacgacttcggattcccacgaggcctgcttggccaagacaatcttgaccttcaatttgtatccgtttccgga

SEQ ID NO: 3828 - protein, 63 aa, Homo sapiens
MLNLDSPFCCKVVHGGVGDNLFGLEFNVVDVDVLLCLLGDDFGFPRGLLGQDNLDLQFVSVSG

SEQ ID NO: 3829 - DNA, 198 bp, Homo sapiens
ccagccatattggctgacggtacccaaacaaatattattttaccaaacagccaagcaacaattttaaactctcatatatttatcaagatcaaccaaaaggctgcgaagacattatctaaaagcggatatgaacttgatatagatccaatcttattgtctattttcagtcataggtttatggatatcgccctccagatg

SEQ ID NO: 3830 - protein, 66 aa, Homo sapiens
PAILADGTQTNIILPNSQATILNSHIFIKINQKAAKTLSKSGYELDIDPILLSIFSHRFMDIALQM

SEQ ID NO: 3831 - DNA, 294 bp, Homo sapiens
  misc_feature (1)..(1): Wherein n may be a, c, g or t
ncgcttgataatgccgatgatattattagtcagatgatcactatgtatcgtcgccgctgtaagttgatcctagaagagctaattgattgtcctagtatcaagctagttgagcctgatgcgggtatgtttatgttgctcgatgttcgtggattacctttgtctgctgagcaatttagttgggctttttttgctcactctaaggtctcaacattagatgcttctgcgtttggtgcaagtgcgaaaggatttatacgatggtcttttacgctgagtgatgatcgcttaaccgaagct

SEQ ID NO: 3832 - protein, 98 aa, Homo sapiens
  misc_feature (1)..(1): Wherein Xaa may be any naturally occuring amino acid
XLDNADDIISQMITMYRRRCKLILEELIDCPSIKLVEPDAGMFMLLDVRGLPLSAEQFSWAFFAHSKVSTLDASAFGASAKGFIRWSFTLSDDRLTEA

SEQ ID NO: 3833 - DNA, 678 bp, Homo sapiens
ctagatgacaacggcaaagatccgcttttccaccaaatagacaaagttttggattttattagcaattccgaagcaacaggagggaaagttctggtgcattgtatggtcggagtctccagatctgcaacagtttgtatagctgaatgtatgagatatctccagtgtgacctggcaagtgcgtatttgtttgtgagggtacggaggcttaatgttatcattcaaccaaacttgttcttcgtatatgagctcttcaaatggtggaaaaagcattataatcgcgaaaaagacaaaactatggattggcacatcatctgtaggggtatcgctgaggttaatatgaagtgcacatgaactttgttatataagtatacgtacaactgtataatacgtaggaaaattaccaattataagaaaagtatgcaaaattaacgctatcagccaagtataacgaactgctgtaatcctttacaaatcgttaaaaaagggccgcagcaaatatttatatagtaaggacagctatcttagatttacatcgtgaatatactctacttttgataagaaacaagaagtcaacagaaggcaggtgattagtgccattttgattttcagttctttgtgtttttcctcttatgtcatatttactacaataatagaagttactataattgaccgacgcgt

SEQ ID NO: 3834 - protein, 116 aa, Homo sapiens
LDDNGKDPLFHQIDKVLDFISNSEATGGKVLVHCMVGVSRSATVCIAECMRYLQCDLASAYLFVRVRRLNVIIQPNLFFVYELFKWWKKHYNREKDKTMDWHIICRGIAEVNMKCT

SEQ ID NO: 3835 - DNA, 344 bp, Homo sapiens
agatctttctttggaggtaaaatgataaaataaagggaaagcataaataagattcattctaattttttgaaagcaaagaacttggaatgccctttgtagatagcaaaggatctgtgaagaacattaaggagaggagtaatgataaatctgtgccttaagatttctctaactttaaagaaaataatggattgaggcagatatggagggaagtaaacccaagaccagaaccatattattagcctaaaaccataataaaatctatatgagagataataaaggcttgacaccatgcaattgctatccgattaaaaaagaagtctttataatattttgttgtagaattc

SEQ ID NO: 3836 - protein, 78 aa, Homo sapiens [sequence omitted]

SEQ ID NO: 3837 - DNA, 258 bp, Homo sapiens
cgggagcgcctgagctctgcccatgctgtagttccggtcattctccagaagccacgcaacagcacggagttgtgagaaagtccttacgagtttcaccgataaccagtctggagtgaatcagatgtgtctgcttcacggccaggcaggaagctatgtgaaggaatcttctgatgtcataattctgggtgtcactggaacatttggtcaccattcctttggcaagtctagccttctatggaaagtcagtagaagcaattg

SEQ ID NO: 3838 - protein, 57 aa, Homo sapiens
MVTKCSSDTQNYDIRRFLHIASCLAVKQTHLIHSRLVIGETRKDFLTTPCCCVASGE

SEQ ID NO: 3839 - DNA, 249 bp, Homo sapiens
gtcgacctctacaacggcctcaacgagaaggacgccaacgagatcacggcagagctcgaccggaacgggatggaggccgagaaggtcgccctgggcaagcagttgttcgccgttcgcgtcccgcaagaccgcttcgcggcgtccgtggccgtcctgcagtccgcgggactgccacgcaacgccttcagccgcaggggggacgtgttcaagaaggacgggatgatctccaccccgaccgaggaacgcgcc

SEQ ID NO: 3840 - protein, 83 aa, Homo sapiens
VDLYNGLNEKDANEITAELDRNGMEAEKVALGKQLFAVRVPQDRFAASVAVLQSAGLPRNAFSRRGDVFKKDGMISTPTEERA

SEQ ID NO: 3841 - DNA, 378 bp, Homo sapiens
  misc_feature (1)..(1): Wherein n may be a, c, g or t
  misc_feature (2)..(2): Wherein n may be a, c, g or t
nnctcgacgaggacgaccgacgacgcacgcagagatccggcgtactgcaaattttgaaaactgaactgtaagatggcatcagcagagctttcccgtgaggaaaatgtgtacatggcgaagctcgccgagcaggcggagaggtacgaggagatggttgagttcatggagaaggtagccaagactgttgactcggaggagctcactgtggaggagcgaaacctcctgtctgttgcatacaagaacgtcattggagcccgccgcgcctcatggcgcatcatctcctccatcgagcagaaggaggagggccgaggcaatgaggaccgagtaacactcatcaaggattatcgtggcaagattgagactgagctgaccaagatc

SEQ ID NO: 3842 - protein, 102 aa, Homo sapiens
MASAELSREENVYMAKLAEQAERYEEMVEFMEKVAKTVDSEELTVEERNLLSVAYKNVIGARRASWRIISSIEQKEEGRGNEDRVTLIKDYRGKIETELTKI

SEQ ID NO: 3843 - DNA, 194 bp, Homo sapiens
tccggatggcgctgaaggatagccccgcaaaggtagtggaccagctccgccacatagcacgtgacgtcttccttgtcttcctgattgatacggtcagtcccggcgacaaacgctccgatttcccgctcaaggtgctcaatcaccgcgctatgatgttcggtgtagaacatcttcatcatttttgcgtcattcac

SEQ ID NO: 3844 - protein, 63 aa, Homo sapiens
MALKDSPAKVVDQLRHIARDVFLVFLIDTVSPGDKRSDFPLKVLNHRAMMFGVEHLHHFCVIH

SEQ ID NO: 3845 - DNA, 347 bp, Homo sapiens
  misc_feature (1)..(1): Wherein n may be a, c, g or t
ncctaatgcagaagtctcttgagagcagagtggttttatttttaccgctggaaaaaactgactttggaaattttcagtatatttctgaaattattctcccaggaattggaagcttaaaagaaggagctaatgttattcaatttgtcttaaggtattgatccagatcacgttgaggtctacgcttaatccctttggaattttttttcttttcttttcttttctttttttttttttttgaaaaataggccgggggcataataaatccccaaaaaaatattcttcagcaataaacaaccaaaactgtaaataaaactttttttttaatttttggaaattgtgtgaatgat

SEQ ID NO: 3846 - protein, 50 aa, Homo sapiens
MQKSLESRVVLFLPLEKTDFGNFQYISEIILPGIGSLKEGANVIQFVLRY

SEQ ID NO: 3847 - DNA, 311 bp, Homo sapiens
ggggcgggatggtcagcgtcctggactgatcccgcagcctttcgccaccagcgagcgtcagcgctggcttcattcgccggatctttttcgtccaaagaagtcgtcgatccaatgaccttaccgttttctccaatggaccggaaccccggtttggcccggattcccccagccgagctgggagcgcgcctgaacacggacgtagtcgggatcgtgccacctcttgacctcgtcttgaagggtcgagatagaagcgcgtgtccgagcctcgtcgtcttggggtccgggagatctgggaacgctgggagaaggtg

SEQ ID NO: 3848 - protein, 66 aa, Homo sapiens
MTLPFSPMDRNPGLARIPPAELGARLNTDVVGIVPPLDLVLKGRDRSACPSLVVLGSGRSGNAGRR

SEQ ID NO: 3849 - DNA, 287 bp, Homo sapiens
gctagctagaatataaattgatatcactacttaggaaaacagtttatcattacttagtagaattgaacttgtaccatgtaaccacctcgcagttccacccctagcaatacattgtagaaaacttcttgatacataatgtgccagaagatatatttgagaatgttcaaagtagtatattttgagattgtggaaaaatggaaataacacattccaactacactagagtggatttaaaaattatggtttattccaatagtaaaacactatatagtaatgaaaatgaattg

SEQ ID NO: 3850 - protein, 51 aa, Homo sapiens
MCYFHFSTISKYTTLNILKYIFWHIMYQEVFYNVLLGVELRGGYMVQVQFY

SEQ ID NO: 3851 - DNA, 308 bp, Homo sapiens
gggcccaccctaatccaggatggcctcgtctctatctgcaccttacttccatctgcaaagaccctgtttccaacaaggttgccttctcaggttccaggaggacatgaatcttaggggccactattgagcccctgcaggccgaggctccgggaggaaggaggcacgcccaggaccctggcctagaacctggcccaccctcgtcacacctgctccttctcacgcttggacccatctctgggccaagtttatttccctctcctgatgaccctgccccaagcgatttctctttccacaaacccttcacgcgt

SEQ ID NO: 3852 - protein, 66 aa, Homo sapiens
MGPSVRRSRCDEGGPGSRPGSWACLLPPGASACRGSIVAPKIHVLLEPEKATLLETGSLQMEVRCR

SEQ ID NO: 3853 - DNA, 419 bp, Homo sapiens
  misc_feature (398)..(398): Wherein n may be a, c, g or t
tgtacattgctaaatgtttacctatcatctagggatagttcagctcataaagggtcaaatgaataggcaaaggatggacagatatggaactagctgtgtttttcctactcagaggttagactggagcccagcttttaatgacaaagataatcttagcattttataaaatttatctgctgtaggtttgttcctgaccttggcattgctcacactaattgctcgtaagtggtactatgctgattaaataaatatgttcctttttagtgtcttatctgggtacagtaatttactgtcccaaggattttttgtaatgctaaccaaaatgttaaggtagaatacctacccagaggaccaaaactataggttaacattaaagtctaatttatttgaatgtagtngtataaaatacaatacataaa

SEQ ID NO: 3854 - protein, 50 aa, Homo sapiens
MFTYHLGIVQLIKGQMNRQRMDRYGTSCVFPTQRLDWSPAFNDKDNLSIL

SEQ ID NO: 3855 - DNA, 402 bp, Homo sapiens
  misc_feature (377)..(377): Wherein n may be a, c, g or t
actagtgatagctgatgggcatcagctctaacaggtcaatgaaagcttgtgtacatactaaccatggagttgcaatgttatatgtatgggaaaattattttatattggctgaaatagtatatgtaccttatgcattggtggtgatcatatcttttcctcatcactatatctcccatgtctaccacagttggcttatagcaggtgttaatcttgggcttttgttatgtacctaaatccataggtatcaagtgtggcacgctagaccactgtaggtactttggaaaataaaaagttatgtaaaatgtggttcctaacttcaagaaacttatgatattgttgggaagaagagtcacattctcatgaagactgcgcagtanagaatgggtcatacatgataaattt

SEQ ID NO: 3856 - protein, 72 aa, Homo sapiens [sequence omitted]

SEQ ID NO: 3857 - DNA, 333 bp, Homo sapiens
tgatcaagacctagcacaaaagtcaaattctaaattgcaaaataaataaataataaaagaagaggcagcaagagaaaatactaaggaaatagatgtacgcacagcgacttgcatcaggttgtaagctatctctgaaactccactatggtggtagggatgagatgccctgcactgcagtcccatcaccaaagagagtgaagcacgagttcagggctgcttagtaagaccctctccaaagaaccagaataaaacactctatcctctcttgcctgggctcttccagcagcgggctctcccctgccgctttttacacccttcaattttctctgtaca

SEQ ID NO: 3858 - protein, 59 aa, Homo sapiens
MGLQCRASHPYHHSGVSEIAYNLMQVAVRTSISLVFSLAASSFIIYLFCNLEFDFCARS

SEQ ID NO: 3859 - DNA, 351 bp, Homo sapiens
acaagtccgtcgacgattcgctttccggaggcgggcccaggaatggtaatgaaacccgagttatggggccctgcgctcgacgagattgccgcgggaaaacgtgccggaggggctgaacagttagattccgcagtgcagcacatccacggtgctactcacgataaactgtccggtgctgttccgaaacgctacgatggtcgggatgtcttggcaggcgaggacccgaatgcaccgttgctgcttgtgcctagcccggctggtgcagtgtttagtcaaaataaggcacaagcctggtccaatgaagaccacattgtttttgcctgtgggcgctatgaaggtattgatcaacgc

SEQ ID NO: 3860 - protein, 117 aa, Homo sapiens
TSPSTIRFPEAGPGMVMKPELWGPALDEIAAGKRAGGAEQLDSAVQHIHGATHDKLSGAVPKRYDGRDVLAGEDPNAPLLLVPSPAGAVFSQNKAQAWSNEDHIVFACGRYEGIDQR

SEQ ID NO: 3861 - DNA, 182 bp, Homo sapiens
cgtacggcttactatgtggctagtgagggaatcgcaaacgccttgaagcactccaaagcatccgagattggggtagaggctgtaaccgcccaaaacaatctggtcctgaccgtcaccgaccacggcgtgggtggagcccacatcggtactggtagcggtttgagtgggttagcggaacgcgt

SEQ ID NO: 3862 - protein, 60 aa, Homo sapiens
RTAYYVASEGIANALKHSKASEIGVEAVTAQNNLVLTVTDHGVGGAHIGTGSGLSGLAER

SEQ ID NO: 3863 - DNA, 247 bp, Homo sapiens
ggatcccgcgctgcccgcgccagacgcttgagcggccggctctgccagtgcaccagcaggccgatgaacaacagcaagaagccgctggtgaggacgataaaccacacctgctgcgccggcaggccttgctcttcgagactggtgtacggctccggcagcaacgaggcgatgtacagccattcccccggggccatttgaatctgcgtgaccagcaccggcggattcaccggttcaagcgtcaacgcgt

SEQ ID NO: 3864 - protein, 64 aa, Homo sapiens
MAPGEWLYIASLLPEPYTSLEEQGLPAQQVWFIVLTSGFLLLFIGLLVHWQSRPLKRLARAARD

SEQ ID NO: 3865 - DNA, 207 bp, Homo sapiens
ccatggggggggagggagggagtgcaagtgtgtgtgagtgacatgtacacacactcgcccagatgcacacacatgcacacacaggcaaggatgtactgttgccaccgaggaggagggtacgtggagtcgggtgtgcacatgcattaaaacacacgcacttacccagatgcatagctgggcgcatctggggggcgatctcttcccagt

SEQ ID NO: 3866 - protein, 61 aa, Homo sapiens [sequence omitted]

SEQ ID NO: 3867 - DNA, 253 bp, Homo sapiens
  misc_feature (253)..(253): Wherein n may be a, c, g or t
cacgcaacgaaagtgattttcttaactgcagacgcattcggcgtattgccaccggtttctaaattgactccggaacaaaccaaatactacttcttatccggttttactgcaaaattagcgggtacagaacgtggtatctccgaaccaacccccattttttaagcgtgttttggtgctgcgttcttaactttacacccaactcaatatgcggaagtattagttaaacgtatgcaagcggcaggtgcagaagttn

SEQ ID NO: 3868 - protein, 53 aa, Homo sapiens
HATKVIFLTADAFGVLPPVSKLTPEQTKYYFLSGFTAKLAGTERGISEPTPIF

SEQ ID NO: 3869 - DNA, 269 bp, Homo sapiens
tgatcatatttgagatcgttgctaaattggcgattaactctcgtttccatggtgtagagtgaggtgtgccatgttctgtttatagctgttgtgcagtatacaccttcctcagaggttgccccacctcccccggttggatccactgaacttccaatgtgtcctgtttgcattggtgaacttactgttttgtattttttttgtattttggggcctctgcaatacaatttatagtcatatgtacgtgtcaccatggtgtcacatttgaattc

SEQ ID NO: 3870 - protein, 57 aa, Homo sapiens
SEVCHVLFIAVVQYTPSSEVAPPPPVGSTELPMCPVCIGELTVLYFFCILGPLQYNL

SEQ ID NO: 3871 - DNA, 560 bp, Homo sapiens
  misc_feature (1)..(1): Wherein n may be a, c, g or t
nacgcgtaggatgcagccgaaaccacctcgtccatcaggagtctcgtgtctgccgctgatcacctcatgacagtccatctagtgtcgatgggctgcgcccgcaacgacgttgactctgaggagcttgcggcccggatggaggctggtgggttccgcctcgtcgacgaccccgccgaggcggagaccgtcgtcgttaatacctgtggcttcatcgagcaggccaagaaggattccgtcgatactttgctggctgctgccgatctcagggggaatggcatcacgacctcagtcgttgcggttgggtgcatggccgagcgttacgggcgtgagctcgcggagtctttgcctgaggctgacgcggtgttgggttttgacgattacggcgacatcgcgggtcggttgcgaaccatcttggacggcggatcgcttgagacccatgttccccgtgaccgacgtaccctgttgccgattagtccggtcgatcgaccaaccgcacgcgctgaggtttctgttcccggtcacggcacggcccccgacctttcagcctccgtgactccgga

SEQ ID NO: 3872 - protein, 164 aa, Homo sapiens
MTVHLVSMGCARNDVDSEELAARMEAGGFRLVDDPAEAETVVVNTCGFIEQAKKDSVDTLLAAADLRGNGITTSVVAVGCMAERYGRELAESLPEADAVLGFDDYGDIAGRLRTILDGGSLETHVPRDRRTLLPISPVDRPTARAEVSVPGHGTAPDLSASVTP

SEQ ID NO: 3873 - DNA, 286 bp, Homo sapiens
agcccccgcactaatgcttggtcttctggggagcttattgaggacggataatccggcgagcctgtgactggatccatgaactccgttattcctggatggaagaagggattgattgggcagaccgtcagttctcgggtgatgctcatcgtgccgcccgctgacgcctacccgaacggcagcactaacccgccggtaaagaagggcgagaccctgatctacgttatcgacatcctttcggctcaaaaagaatcctgagtggcgatggctttgcgcgagacatgccggc

SEQ ID NO: 3874 - protein, 67 aa, Homo sapiens
SGEPVTGSMNSVIPGWKKGLIGQTVSSRVMLIVPPADAYPNGSTNPPVKKGETLIYVIDILSAQKES

SEQ ID NO: 3875 - DNA, 254 bp, Homo sapiens
gccggcttgttgttgtcctgcagccctgtgggagctgcctgaccctggggcagggtgcacggacttagattaaggccagaaccaaggtcagcttaactggagtagtatccatgggctatgcccctttctttttagctctctgaagtgtggatgctgcagcatcaggtttctgaagggcaggaaaggggagctgacgtcagcagagcacctatggagcacctggcactgtgccaagcagcctagactcctcatga

SEQ ID NO: 3876 - protein, 54 aa, Homo sapiens
MRSLGCLAQCQVLHRCSADVSSPFLPFRNLMLQHPHFRELKRKGHSPWILLQLS

SEQ ID NO: 3877 - DNA, 224 bp, Homo sapiens
  misc_feature (1)..(1): Wherein n may be a, c, g or t
  misc_feature (2)..(2): Wherein n may be a, c, g or t
nnaccggtgcgcgggtttcacaccttgcgcattgccgatgacattgcgctgatgctgtgcctgggcgatgtgactgacatgctgccggaactcgacatcaaagccgacgcatggttccttgacggcttcaccccgtcaaaaaaccccacgatgtgggacagtgcgctctatacctacatctgggagcgcacggccgcaggcggcacgctcagcacttttttcct

SEQ ID NO: 3878 - protein, 74 aa, Homo sapiens
  misc_feature (1)..(1): Wherein Xaa may be any naturally occuring amino acid
XPVRGFHTLRIADDIALMLCLGDVTDMLPELDIKADAWFLDGFTPSKNPTMWDSALYTYIWERTAAGGTLSTFF

SEQ ID NO: 3879 - DNA, 286 bp, Homo sapiens
ggtaccaggtggtgggcggtctccttcatatgtgagggtccgcagcatggctttgggactagaccaggcagaggtcacattcctatttgtccaggcgttctttagtggtgtgggtggagaccttctacccatgaaacaccagccgtggctgcggcgagacctgctctcttttctgcgtcttgcctcctctgcctcccggctccaccgtctttcgtccaccgttgccccaccagcctcctagacttcaccattgggcaactccaactaaatgtagaccctgagatct

SEQ ID NO: 3880 - protein, 64 aa, Homo sapiens [sequence omitted]

SEQ ID NO: 3881 - DNA, 172 bp, Homo sapiens
  misc_feature (1)..(1): Wherein n may be a, c, g or t
nccgccgaggccgcgtactacctcgcggcgaaccgcaacaagcgttcggtgacgatcgacatcgcgacgcccgaaggccagcagatcgtgcgcgagctcgccgcgcaaagcgacgtcgtgctcgagaactacaaggtcggccagttgaagaaatacgggctcgattacgcgt

SEQ ID NO: 3882 - protein, 57 aa, Homo sapiens
  misc_feature (1)..(1): Wherein Xaa may be any naturally occuring amino acid
XAEAAYYLAANRNKRSVTIDIATPEGQQIVRELAAQSDVVLENYKVGQLKKYGLDYA

SEQ ID NO: 3883 - DNA, 309 bp, Homo sapiens
  misc_feature (1)..(1): Wherein n may be a, c, g or t
  misc_feature (2)..(2): Wherein n may be a, c, g or t
nnacgcgtggccttcggcgcctcgccgaagggtaccgcgatcggcagcgtgacgccgctgtcgaacgacgccacgatcctcagctacccggaccggcgcagcggcagcccaaagccgtcgggggagggcgtcgcagcgcttgccgcgaaggcggcccaggccaatggggacaaggcgatcgacatcccgaccgcgatcggcttctgcatgttcatccgccgcgactgtctcgacgaggtcggcctgctgcgcgaggacctctatgcgcagggctatggcgaggagaacgactggagcctgcgcgccggc

SEQ ID NO: 3884 - protein, 103 aa, Homo sapiens
  misc_feature (1)..(1): Wherein Xaa may be any naturally occuring amino acid
XRVAFGASPKGTAIGSVTPLSNDATILSYPDRRSGSPKPSGEGVAALAAKAAQANGDKAIDIPTAIGFCMFIRRDCLDEVGLLREDLYAQGYGEENDWSLRAG

SEQ ID NO: 3885 - DNA, 258 bp, Homo sapiens
gaggatagttcaaatgaaggagaagaagattcgttttctttttctcgttgttcaggtactgcagccagcgttcaaccactaaaaaacaaaatttttattactgatgaagatgatctgggtgatattgatgataaaagcgatagactaaatcacagagaaaataatcgtaatctttttgtggtgaaggaaatgaacttacggccaaacttgtcagaagaatgttccaagcaaagtagacacagtagaagcgcaactagt

SEQ ID NO: 3886 - protein, 86 aa, Homo sapiens
EDSSNEGEEDSFSFSRCSGTAASVQPLKNKIFITDEDDLGDIDDKSDRLNHRENNRNLFVVKEMNLRPNLSEECSKQSRHSRSATS

SEQ ID NO: 3887 - DNA, 325 bp, Homo sapiens
tctagagatgcactaggggattgttcagaggactaggaacacaatttgcttgcaagtagagcaagtgttgaatcaaacaaacttaatttggcaattcattgtctcatataggctttttttgttgttgttgccccaaacagaatcatggataaccttgataaaaatggagacaagagaccttcctcattgtatttccccagcagtcaacctgtagtttttcaggaactcaatttctggtgttatttaattacttttatttcccatcccagccctctgaaatggatttttttttttttgggcctgtcaactgaaaattaggattccc

SEQ ID NO: 3888 - protein, 57 aa, Homo sapiens
MDNLDKNGDKRPSSLYFPSSQPVVFQELNFWCYLITFISHPSPLKWIFFFLGLSTEN

SEQ ID NO: 3889 - DNA, 244 bp, Homo sapiens
ctcgagcttttcccaagaactcaatgaagtcaccatagtggcgtgggctaatgtgggtgaggcgagagtggctggtggttatatacgcagctaccgcagcgtccaggagctggcaaagtggtgccctgtcagtcccaagtggtttggtagctctgcgggcccccagcgggcccagtccaggtgcggagagcgtccagcgtcgcagaatgtctgagagcatcggtgcacagtggatacttcggac

SEQ ID NO: 3890 - protein, 73 aa, Homo sapiens
MLSDILRRWTLSAPGLGPLGARRATKPLGTDRAPLCQLLDAAVAAYITTSHSRLTHISPRHYGDFIEFLGKAR

SEQ ID NO: 3891 - DNA, 402 bp, Homo sapiens
atcgaggcttcccaaaaaggagcgtttatgaataggttggaaaccgatgggggtgagggtgaggtgggctgcagagaggatcttgtggccatgtgaaaaacctgggatctgttctagcaggggttgggtggcaatgattttaagttgggagaaacacaaatgtgcatttgataaatgcactctcattgtaaatacgtttccatcaaaacaacagttaaatagattatgaagtataatggaatgtatatgttacaagtatgtttcatgtataccaaacaaaagtgtcagaatttttagtgtcataagaaaggttcacaacataatgttgaataaaataaagcaagacacaaacctgtctatgcagtatgattaacaatctgagggaaaacagtgtgtgttatc

SEQ ID NO: 3892 - protein, 62 aa, Homo sapiens [sequence omitted]

SEQ ID NO: 3893 - DNA, 385 bp, Homo sapiens
acgcgttttattcagttgcatctggagatggacgatgcgttaccgctgatgcaggcgcatattctggctgaacaggtggaacaggcgctgttgcaccgtttcccgggggctgatgttcttatccatcaggatccttgttctgtagtgcccgcgtgccgaacagggcgttgggagctataattaatgcaggacaacgggaaactctcacagcggatagataacggcattagctccgcgtgccatgacgcttttttaccgcaatattgcgtgacttgaatcaattcagctgggtgtttttgctataatatccagcaataaagccgtaaagctggttttctgcagccggagaggtttcaagacaatcggcgaataccgaattcttaag

SEQ ID NO: 3894 - protein, 59 aa, Homo sapiens
TRFIQLHLEMDDALPLMQAHILAEQVEQALLHRFPGADVLIHQDPCSVVPACRTGRWEL

SEQ ID NO: 3895 - DNA, 240 bp, Homo sapiens
gaaaaccaattccgtgttggtttggttcgagttgaacgtgctgttaaagagcgtttatctatggctgaagcggatggcctgatgccacaagatcttttgaatgcgaagcctgtggctgcagcaatcaaagagttctttggttctagccagctttctcagttcatggaccaaaacaacccgctttctgaagtaactcacaagcgtcgtgtttccgcattagggcctggtggtctaacgcgt

SEQ ID NO: 3896 - protein, 80 aa, Homo sapiens
ENQFRVGLVRVERAVKERLSMAEADGLMPQDLLNAKPVAAAIKEFFGSSQLSQFMDQNNPLSEVTHKRRVSALGPGGLTR

SEQ ID NO: 3897 - DNA, 252 bp, Homo sapiens
ctagacgaaactttggtacattcttcctttaaatatatgcattcagctgatttcgttttgcccgtcgaaatcgatgatcaagttcacaatgtctatgttattaagaggccaggcgtcgatgagttcttgaacagggtgagtcagctatacgaagttgttgtgttcacggcaagtgtttcgaggtatgcaaacccccttttagatacgttggaccctaatggaaccatccatcatcgattattcagagaagct

SEQ ID NO: 3898 - protein, 84 aa, Homo sapiens
LDETLVHSSFKYMHSADFVLPVEIDDQVHNVYVIKRPGVDEFLNRVSQLYEVVVFTASVSRYANPLLDTLDPNGTIHHRLFREA

SEQ ID NO: 3899 - DNA, 406 bp, Homo sapiens
  misc_feature (399)..(399): Wherein n may be a, c, g or t
  misc_feature (400)..(400): Wherein n may be a, c, g or t
  misc_feature (401)..(401): Wherein n may be a, c, g or t
  misc_feature (402)..(402): Wherein n may be a, c, g or t
gtagctcaccagaccatggtgatgcagtttattctggagctggccaagagtctgaaggtcgacccccgagcctgcttccggcagtttttcaccaagatcaagaccgctgaccaccagtacatggagggcttcaagtatgaactggaagcctttaaggagcgagtgcggggccgcgccaagctgcgaatagagaaggccatgaaggaatatgaagaggaggagcgcaagaagaggctaggccctggtggcctggaccccgtggaggtctacgaatccctgcctgaggagctgcagaagtgctttgatgtgaaggatgtacagatgctgcaagacgccatcagcaaaatggatcccactgatgccaagtatcacatgcagcgttgcatcgattctggcccnnnncccc

SEQ ID NO: 3900 - protein, 135 aa, Homo sapiens
  misc_feature (134)..(134): Wherein Xaa may be any naturally occuring amino acid
VAHQTMVMQFILELAKSLKVDPRACFRQFFTKIKTADHQYMEGFKYELEAFKERVRGRAKLRIEKAMKEYEEEERKKRLGPGGLDPVEVYESLPEELQKCFDVKDVQMLQDAISKMDPTDAKYHMQRCIDSGPXP

SEQ ID NO: 3901 - DNA, 491 bp, Homo sapiens
ttcagccgcctttcagggcttcctaaagaaaggattttagaattagtcaatcttggtaaaatcaagagcaaaataagccacaacaagcttttaattgatgcgagcagcgggacaaacgctttaatcaaaaaggtagaaaataatttgatttctatggatatgaacgggcgttctttagagcctgtgtttgtggaaaaaaccattaacacgattttaaacttgcatgataaagtcattagcgctaaagacgaaacgatttcagcctttaaaaatgaaaacatgtttttaaaagacgctttaatttctatgcaagaagtctatgaagaagataaaaaaaccattgatcttttgcgagatgaactcaatcaagcgagagaagaaattgaattcatgaagaggaaataccgcttgatgtgggggaaagtcgctgacatgagcagcgtgaataaaaagtagtttcaaattaatctcaatagtgggattttattagc

SEQ ID NO: 3902 - protein, 151 aa, Homo sapiens
FSRLSGLPKERILELVNLGKIKSKISHNKLLIDASSGTNALIKKVENNLISMDMNGRSLEPVFVEKTINTILNLHDKVISAKDETISAFKNENMFLKDALISMQEVYEEDKKTIDLLRDELNQAREEIEFMKRKYRLMWGKVADMSSVNKK

SEQ ID NO: 3903 - DNA, 500 bp, Homo sapiens
  misc_feature (328)..(328): Wherein n may be a, c, g or t
gccggcgcacccacctgggacgtggtgaaatcggcaaaactcacctctttagctacctgcgcgccaaccgcacgggcagcctcccacacgccctctagagcgctgctggacagaatggcttgattgtttggcatgctctcaggatacccgtttagccaggaaacaccggtaggcttgctactatgcgagcagccgacgcacgggtagagggaattcccaccacagtccctcgcactccacccgcacacgccctgggaaccgtcacccgcggtaccaccgggtcaatcggctccgcaaatgcgaccgctggatgtgccaccaccccgcncatccgcagtgcgctccgtaacgccgtctgcaacaccgtcccctccgtatctgccgacacctgtgccaacacttgtaccgatgcatgcaccgatgcagcaacaggcgctccgctcgctatcgatctgggatacggcgccgccccctggaccactgttgagatggctacgcgt

SEQ ID NO: 3904 - protein, 97 aa, Homo sapiens
  misc_feature (41)..(41): Wherein Xaa may be any naturally occuring amino acid
REFPPQSLALHPHTPWEPSPAVPPGQSAPQMRPLDVPPPRXSAVRSVTPSATPSPPYLPTPVPTLVPMHAPMQQQALRSLSIWDTAPPPGPLLRWLR

SEQ ID NO: 3905 - DNA, 150 bp, Homo sapiens
aaatttcctgtacacagattgacgaaaaagttacaagatcctgaaaaactgcctctgatcatcgttgcttgtggatcattttctcccataacatacctacatttgagaatgtttgaaatggctttagatgatatcaatgagcaaacgcgt

SEQ ID NO: 3906 - protein, 50 aa, Homo sapiens
KFPVHRLTKKLQDPEKLPLIIVACGSFSPITYLHLRMFEMALDDINEQTR

SEQ ID NO: 3907 - DNA, 412 bp, Homo sapiens
aagcttcactatctttgctactttcctcattcccctcacccccatcagttcaacagtgtacagacaacctgggcaggccagtgtgaaaacctccttaaaatgtcaagctggaaatgctctcaatgcaataaagtggcattataagtgcaaatataaatttgaattgcacacagtattaaattgtgtggtttgagaacagtgcaattttaataatattaacacagcttcccattaggcacaaattttgaaataatgtgtagccaccacaaataaacacttgttaagattatctaacttaaggctgataggatatataaattgtaaactgaactgagacatcatcatagccttcccatattggcctttgaacagacacccactgtccttcagcatggtttccccttagctatgg

SEQ ID NO: 3908 - protein, 53 aa, Homo sapiens [sequence omitted]

SEQ ID NO: 3909 - DNA, 239 bp, Homo sapiens
  misc_feature (1)..(1): Wherein n may be a, c, g or t
  misc_feature (2)..(2): Wherein n may be a, c, g or t
nngcccagccctggaagccgggtgctcaccatcctagaacagatcccgggcatggtggtggtggcggacaagactgcagcgctctacaagacgacctactgggctagctacaacatcccgtactttgagagtgttttcaacgctagtggtctgcaggccctggtagcccagtacggagattggttctcctacaccaggaaccctcgagccaagatcttccagagggaccagtcactagt

SEQ ID NO: 3910 - protein, 79 aa, Homo sapiens
  misc_feature (1)..(1): Wherein Xaa may be any naturally occuring amino acid
XPSPGSRVLTILEQIPGMVVVADKTAALYKTTYWASYNIPYFESVFNASGLQALVAQYGDWFSYTRNPRAKIFQRDQSL

SEQ ID NO: 3911 - DNA, 384 bp, Homo sapiens
ccatggcagcaaagaaaaaaggaatttgctaagttatctgatgccagtgcaccatgcctcatgcacagcaagccttcagtaaagttccttgtagagtcacgactggaaggagctttagaaaggcaattataactaaaggaggccttagagagtataaatttaacaaaatccatcagttagtatgtcttcagcttccaataaaagtttaaacaataaggaacatttattatttcatgtataaagcccaaagatgaggcagcccccaggttagtttatttcatcagttcagggatctagtttctttctgttctgttccgttctatgttggctgccatcttggttgcaaggagatccaggcaacacatctccagacaagatcctagg

SEQ ID NO: 3912 - protein, 57 aa, Homo sapiens [sequence omitted]

SEQ ID NO: 3913 - DNA, 283 bp, Homo sapiens
ggatcccgggtgcacgattgctatgccaaggacgtgatcgtcgagcgtcaccgtcaccgttacgaagtgaacaacaagctgctgccgcagatcatcgaagccggcctgaagatttccggtcgctccggtgatggctcgttggtggaagtggtcgaggccccggatcatccatggttcgtcgcttgccagttccaccccgagttcacctcgaccccgcgcgacggccatccgctgttcagcggtttcgtcaaggcggccttggctcaacaccagaagaacgcgt

SEQ ID NO: 3914 - protein, 94 aa, Homo sapiens
GSRVHDCYAKDVIVERHRHRYEVNNKLLPQIIEAGLKISGRSGDGSLVEVVEAPDHPWFVACQFHPEFTSTPRDGHPLFSGFVKAALAQHQKNA

SEQ ID NO: 3915 - DNA, 559 bp, Homo sapiens
tttatttttaaatcccaaacatttccaaaccctgagggtatataaaacaaagaaagaattacatagacagaaatagactttgatacagagtccttttctgtgttggtgtaacaccagtgagtttttagtaggctccatttccaacaaaaagttgtcactatgccctgaaaacatttctacttttatagcggcctaattccttggctttggaactgttgacacatgggagaaacaactgatcacattctttcaaacaggtcacatgaatgacaaagttctttcccaggtcacccaggcgcttagcaaactccaggagagcccatgtggccatgtcattgctgggtggttttcttcttcttatcacatggcttccagaccaccatgcatgttatgaagcctgcacagttcactgtggtcaggactgggcccagcaaatgtaccatgaccagagtgctggtaaggttaggcaggtttaatattcagccatactctgtagctttcccatgttacagtttttacatttaaaacccaagctctgaagagttatctgtatgctcac

SEQ ID NO: 3916 - protein, 69 aa, Homo sapiens [sequence omitted]

SEQ ID NO: 3917 - DNA, 455 bp, Homo sapiens
  misc_feature (321)..(321): Wherein n may be a, c, g or t
  misc_feature (322)..(322): Wherein n may be a, c, g or t
  misc_feature (333)..(333): Wherein n may be a, c, g or t
  misc_feature (380)..(380): Wherein n may be a, c, g or t
  misc_feature (414)..(414): Wherein n may be a, c, g or t
ctgcactcacaagcacagttacgataacgacattattaaacatagtcgacttcacggcagtgggagatcacagcatcagactggtgtcttcattgctgcctcaggttgctggcatctctcaaatgggagagatgagctttagatgtggtttccttgccctcttctcgaagcagaagttcaggcaagctgaccaggactgaatccattgtggcagctcctgtgcttctttggcagtcctctcaagaaggcaggctttctgctgattcaacttgtgcttaatctgagtagcttcatggcaggggcagaatggtgaagacttanntgggttcagcntgtgctttaagcatttcaaagctaaatgtgctgacctcatttccttnaattgctgttccagcctcagcgacctgccacatntaagttaggtgctctccccagaagtgtcacacatgagcacc

SEQ ID NO: 3918 - protein, 84 aa, Homo sapiens
  misc_feature (14)..(14): Wherein Xaa may be any naturally occuring amino acid
  misc_feature (18)..(18): Wherein Xaa may be any naturally occuring amino acid
MRSAHLALKCLKHXLNPXKSSPFCPCHEATQIKHKLNQQKACLLERTAKEAQELPQWIQSWSACLNFCFEKRARKPHLKLISPI

SEQ ID NO: 3919 - DNA, 246 bp, Homo sapiens
  misc_feature (88)..(88): Wherein n may be a, c, g or t
atccctcggcaccagggcctaggcatggtgatccacacttggctgagcttgctgcagaacgtgggacaggctaatctgtgtgatgtgntcaccagtgccgtgtgcctggcagtgctgctgacagctaaggaactctcggatcgctatcgacactatctgaaagtgccagtgcccacaaacctattaattattgggggggcccacaattgcgtccattttggacagctccatacacggtttggctcg

SEQ ID NO: 3920 - protein, 82 aa, Homo sapiens
  misc_feature (30)..(30): Wherein Xaa may be any naturally occuring amino acid
IPRHQGLGMVIHTWLSLLQNVGQANLCDVXTSAVCLAVLLTAKELSDRYRHYLKVPVPTNLLIIGGAHNCVHFGQLHTRFGS

SEQ ID NO: 3921 - DNA, 351 bp, Homo sapiens
  misc_feature (53)..(53): Wherein n may be a, c, g or t
aaatcaattaggaacattgaagcttctgttcaaccttcgagagatcgtaaggnaaagatcacagatgaaattgcccatttgaaatataaagatcctcaatcaacaaaaatcccagttttagagcaagaactagttcgtgccgaagctgaatctttggttgcggaggctcaattatcgaatatcacacgtgaaaaattaaaggctgcttatagttatatgtttgattcattaagagagctttctgaaaaatttgccctgattgctggatacggaaaggccttattggagctgctagatgactctcctgtcactccaggtgaagctagaccagcgtacgatggctatgaagct

SEQ ID NO: 3922 - protein, 117 aa, Homo sapiens
  misc_feature (18)..(18): Wherein Xaa may be any naturally occuring amino acid
KSIRNIEASVQPSRDRKXKITDEIAHLKYKDPQSTKIPVLEQELVRAEAESLVAEAQLSNITREKLKAAYSYMFDSLRELSEKFALIAGYGKALLELLDDSPVTPGEARPAYDGYEA

SEQ ID NO: 3923 - DNA, 421 bp, Homo sapiens
gtcgacaccggtgtcgtggatcgaagaggaagatcgagcgcgtgttgaagcggcatggcctcagcttccgcgacgtcaagctgtttgacgttacgcatgcccaccaatcatgcgggtgccgaggcgcggctccgctcgccgtcgggtgctccgctcctcgctcaccaggcggacgttgaattctacactggcaaaagagagatgacgctgcgcccgacggggccgtttggccggttcttcatcaagacgccgcttccgcaccggccttacgaggcgtttcagctggacattacgatgcgcgaaggcgaaacagcgaatctggtggacttcagatcgatgggatagtgcgccatgtcggcggtcatacccccggctcgattgcgatcgagcttgccctgcaggaggcactggtcggagatct

SEQ ID NO: 3924 - protein, 96 aa, Homo sapiens
MASASATSSCLTLRMPTNHAGAEARLRSPSGAPLLAHQADVEFYTGKREMTLRPTGPFGRFFIKTPLPHRPYEAFQLDITMREGETANLVDFRSMG

SEQ ID NO: 3925 - DNA, 499 bp, Homo sapiens
gtcgacggcggccgtattcaggtgggcgagcaacgtctggatcaactgagcgaagcgcaactggcgcactggcgtcgtaccgaaatcggcctggtattccagcagttcaacctgatcggcagtttgcgcgtcgaggacaacctggcgttccaggcacgcttggcagggcgctttgatcccgcgtggcaggcgcagttggttgagcgcctgggcctgggggacttgctcaagcgttatcccgaacagctgtccggcggccagcagcagcgggtcgcggtggggcgcgcgttggcgtcgcgcccgggtttactgctggccgatgaacccaccggcaatctcggccgaaagccccaatggatgaaggtgttgcatttgttgttcgccttgctgcgcgacagccccaccagcctgttgatggtcacccacagcccgcgcatcgctgcgcgcctggaccggcaggtggtgttgcaccgtgggcgtgtcgtgcctgcggacgcgt

SEQ ID NO: 3926 - protein, 166 aa, Homo sapiens
VDGGRIQVGEQRLDQLSEAQLAHWRRTEIGLVFQQFNLIGSLRVEDNLAFQARLAGRFDPAWQAQLVERLGLGDLLKRYPEQLSGGQQQRVAVGRALASRPGLLLADEPTGNLGRKPQWMKVLHLLFALLRDSPTSLLMVTHSPRIAARLDRQVVLHRGRVVPADA

SEQ ID NO: 3927 - DNA, 387 bp, Homo sapiens
atccaagcgtatgctgatgataactatggattgcccgtggttaggcaatatttaaacttattactatcattgattgcgccagaaaatgaattaaaacattcatactccactagaatatttggcctagagttaattcaaacggcattagaaatttcaggtgatcgattgcagctatacccacggctttttacactgatatcagatcctattttcaaaagcattttgtttatcatacagaacactacaaaattatcactacttcaagctacattgcagctatttactactctagttgttatattgggcaacaacttacaattacagatcgagctcactctaacaagaatattttctattcttttagatgatggtaccgcaaataactcg

SEQ ID NO: 3928 - protein, 129 aa, Homo sapiens
IQAYADDNYGLPVVRQYLNLLLSLIAPENELKHSYSTRIFGLELIQTALEISGDRLQLYPRLFTLISDPIFKSILFIIQNTTKLSLLQATLQLFTTLVVILGNNLQLQIELTLTRIFSILLDDGTANNS

SEQ ID NO: 3929 - DNA, 159 bp, Homo sapiens
ggcatcctcttcccggaaacatcccagcagctgaatgctgctaaagtggtggctgttggccctggtgagcgcgacaaggtaggcaatctgatcccagttgctctgaaggaaggtgacactgttctcctgccagagtatggtggaactgaagttaagctt

SEQ ID NO: 3930 - protein, 53 aa, Homo sapiens
GILFPETSQQLNAAKVVAVGPGERDKVGNLIPVALKEGDTVLLPEYGGTEVKL

SEQ ID NO: 3931 - DNA, 231 bp, Homo sapiens
  misc_feature (1)..(1): Wherein n may be a, c, g or t
nacaatgggaaatcctttggtggaaggtcatgctttcatatcacaaacatagagaacaaaaattaaattatccgtctggcttttctaaaaggaatggagtcattccaataccactcttaaagattccctgcttcctgtttccagggtgtactcagagcagggatctatacggcagaggagccagttttactccgagtttgacaaaaacaatcccatcaagtgtgaaaaatc

SEQ ID NO: 3932 - protein, 67 aa, Homo sapiens
MLSYHKHREQKLNYPSGFSKRNGVIPIPLLKIPCFLFPGCTQSRDLYGRGASFTPSLTKTIPSSVKN

SEQ ID NO: 3933 - DNA, 369 bp, Homo sapiens
taattaaccacagaagtaacttgcccaaagtcaaacagcgacttagtgatggaactcggactacaacccggtgtcagtatgaaagaggatcagcaatgtctgtaaggacatgattgtgagagagggagtagtgaatactaggaaggtgcctcttacaaagtggagcctaagccaggacctaagcaaagattgagagttgagggctcaggctctgcaatgagtgtcagtgaggagctccagcaaaagactgaaatcactcatgctttccttaaacccctaaggaaagggaaggaaagtagccagctcccaatgagctgtcatttcaggcactctcttggcaataagagtaatgttagtttgaatttattg

SEQ ID NO: 3934 - protein, 51 aa, Homo sapiens
MSVSEELQQKTEITHAFLKPLRKGKESSQLPMSCHFRHSLGNKSNVSLNLL

SEQ ID NO: 3935 - DNA, 395 bp, Homo sapiens
  misc_feature (303)..(303): Wherein n may be a, c, g or t
  misc_feature (314)..(314): Wherein n may be a, c, g or t
  misc_feature (341)..(341): Wherein n may be a, c, g or t
actggcttctctgtctttgtcctgtgactctctgtccttacttctcaaggttcatgcttaccaagaggatgctagatttgttcctggacctgtttatacaattagtactcactattgaaatgatgtgattattgaatgtcatgcaaaccactgaggcatgagaagatagtcattgctgtggattcagtgctttggaaagagtggggtaccacaaaatattcaatgaaaaaggtagagacaggtcaagtatggattcagaaggattctgatctcagattctgccacaggactttgctccacttntaagacagganaattggtgtggctcatggcagatcatntgaaactgtagtgggggtgcccacattcaagaaaacgtctgggcctcacctcta

SEQ ID NO: 3936 - protein, 56 aa, Homo sapiens
  misc_feature (56)..(56): Wherein Xaa may be any naturally occuring amino acid
MSCKPLRHEKIVIAVDSVLWKEWGTTKYSMKKVETGQVWIQKDSDLRFCHRTLLHX

SEQ ID NO: 3937 - DNA, 445 bp, Homo sapiens
gtcgacgaggccgagccgacgcgcgtgtgggtcctgctgccgaccatcaaccccgacatcaccttcggcggctatcgcgccgtgctggaactgatctgccgcctgcacgacagtggccggaaagtgtgcgtggtttgcacggaagacggcaacgctaatcgcaactacttcctctaccgcgagacctcgacttcgttccgcaaagtcttcgaggaaatcgagatccgtgagtatttcgacagtttcgacctgcgcatcagcccgcgcgacacggtggtcgcctattcgctgtgggatatctatgccgcggccgacatgcgggcggccgcacccacggtgcgcgtcgtgctgctcgcacaggaatacgagccgatcttctacgacaacaattcggcccgcgcgctggtcgagcaggcctatgaggtcgcgcatgtcgcgctgatca

SEQ ID NO: 3938 - protein, 144 aa, Homo sapiens
MRDLIGLLDQRAGRIVVVEDRLVFLCEQHDAHRGCGRPHVGRGIDIPQRIGDHRVARADAQVETVEILTDLDFLEDFAERSRGLAVEEVVAISVAVFRANHAHFPATVVQAADQFQHGAIAAEGDVGVDGRQQDPHARRLGLVD

SEQ ID NO: 3939 - DNA, 633 bp, Homo sapiens
  misc_feature (1)..(1): Wherein n may be a, c, g or t
nacgcgtgtcggtcgggtaaccatcattcttattcgacgaaaatgattagtttccagagaagcagttgcactccagtttgatctgcagtccagcgactatttttaacattcaaagatcatttttcgtttgaatagttgagcaaggtcatataaatttctatatcacacgaataagggttcagatattgctttattatcggcgaacactgatattaccacatagatatcgctctttttttgaaacgtaagcgtaaatttcagtataggtacacgtctgcgctgatccttctgtaatcctctgcagttttcgcaatgtataatagcagcaccaatcatcatgagggtgcacctacttcaggacatggctattatatgtcccaacaacaagaccaacagcatcaacaacaacaacaatacgccaacgaaatgaatccgtatcagcaaattcctagaccgcctgctgcaggatttagtagcaactacatgaaagagcaaggctctcatcaatcgttacaagagcatttacaacgtgagacaggtaaccttggcagcggttttacagacgttccagccctgaattatccagccacaccaccaccacataataattacgcagcttcaaatcagatgatc

SEQ ID NO: 3940 - protein, 107 aa, Homo sapiens
MYNSSTNHHEGAPTSGHGYYMSQQQDQQHQQQQQYANEMNPYQQIPRPPAAGFSSNYMKEQGSHQSLQEHLQRETGNLGSGFTDVPALNYPATPPPHNNYAASNQMI

SEQ ID NO: 3941 - DNA, 321 bp, Homo sapiens
gtgcactctgcggccaggtttatttctgctttgaaacaagatttgttgccaccagatatcaatgccaccaatggcaaaccactgtcaatggctccatttctgaacttgttcggtactactcgtagtcctgtttttcagcgcggtgaggttgaaaattttgatttgaacaaaccttacacagcatctgatttagaagaccctgattattcaagcgatgaggacgataacgacgaacccacccaaaaagactttgatgaccgtaaaagaaaacacgaagaagacatattcactggcaatggtataactataaaaagacatccg

SEQ ID NO: 3942 - protein, 107 aa, Homo sapiens
VHSAARFISALKQDLLPPDINATNGKPLSMAPFLNLFGTTRSPVFQRGEVENFDLNKPYTASDLEDPDYSSDEDDNDEPTQKDFDDRKRKHEEDIFTGNGITIKRHP

SEQ ID NO: 3943 - DNA, 296 bp, Homo sapiens
cctttcagatgctgaaactgggatactacaaactgcatttcgcctttgccccaggcttcctgttagacactgcaattagggagcactagaggaagactggaaggcaggcggagggaaaaagaacttgctccttcctgtgctcttaatgttccacccacattgcctcagcaatggtactttactctggcagctacacagttggttccggcttccagcttccttcagtgctcccagagtcaacttcattactctcacgggtatcacaagtagtctggcagttctctcctcagagatct

SEQ ID NO: 3944 - protein, 56 aa, Homo sapiens
MKLTLGALKEAGSRNQLCSCQSKVPLLRQCGWNIKSTGRSKFFFPPPAFQSSSSAP

SEQ ID NO: 3945 - DNA, 390 bp, Homo sapiens
gtgcacgagcgttcgccgtatggtggcgatctggtgttcaccgcgttctctggttctcaccaggatgctattaagaagggctttgaggctctggagcgtaccgctgctgaggcgggtaagaccgtggatgaggtgtactgggaggttccgtacctgccgattgaccctcgcgacctgggtcgtacctacgaggcgattattcgtgtgaactcgcagtccggtaagggcggcatggcgtacctgctgaagcaggatcacggtctggatctgccgcgtcgtgctcaggttgagttctcgaagattgttcaggctcgtactgacgctgagggcggcgagatgaccagcgagaagctgtggaacatcttcgcggatgagtacctgcccgctccg

SEQ ID NO: 3946 - protein, 130 aa, Homo sapiens
VHERSPYGGDLVFTAFSGSHQDAIKKGFEALERTAAEAGKTVDEVYWEVPYLPIDPRDLGRTYEAIIRVNSQSGKGGMAYLLKQDHGLDLPRRAQVEFSKIVQARTDAEGGEMTSEKLWNIFADEYLPAP

SEQ ID NO: 3947 - DNA, 430 bp, Homo sapiens
  misc_feature (430)..(430): Wherein n may be a, c, g or t
acgcgtgcgatgttgaaggagcgcttcggcatcgggcatgcgacgctgcaggttgaactgtccggtgccgaggcagacgatgccgaggcgggcggctgctaagggtcgccgtcgttcagtggcgcaaagcggcgatgatcgcgtcgaacagcgttactccagccagcgggccaaccaacagcatcaccaggttgaaaccgatgatccacgccgcgatgctttctcggcgcgggtttggcagcggcttgggctcggcttcccagcgttccggcggcggccagccattttggaaatcgacgaacatctccggcgctcctgctgtcaggcgctgaaggtatcgaaagtcatgcgccgtgacaaaggaagatcggcgacacaggagccgaagcgccgccgcctgcaataagcgcgcgcgatcgcaattgtcggn

SEQ ID NO: 3948 - protein, 122 aa, Homo sapiens
MRRCRLNCPVPRQTMPRRAAAKGRRRSVAQSGDDRVEQRYSSQRANQQHHQVETDDPRRDAFSARVWQRLGLGFPAFRRRPAILEIDEHLRRSCCQALKVSKVMRRDKGRSATQEPKRRRLQ

SEQ ID NO: 3949 - DNA, 474 bp, Homo sapiens
gatctagagactcgcatcgccatcctgcggcgcaaagttgcggccgagaagatcaccgtcgagccggacgtactggagttcatcgctagccgtatccaaaccaatattcgtgagctcgagggagccctcatccgggtgacggcttttgccagccttaaccagcaatcggtggatatctctctggctgaagtcgtcctcaaggacctcatcccggaaggtcgcgagaccccggtgacaccagagcgcattatcgcggagaccgccgactacttcgacatctctgcggacgatcttttaggcacctcccgcgctcagacccttgtcacagcccgacaaattgcgatgtacctgtgccgcgagctcactgacctctcgttgcccaagatcggcgccgaatttagcggcaaggaccacaccaccgtcatgcatgctgaccgcaagattcgcgccctcatgggggagcagcgtcagatc

SEQ ID NO: 3950 - protein, 158 aa, Homo sapiens
DLETRIAILRRKVAAEKITVEPDVLEFIASRIQTNIRELEGALIRVTAFASLNQQSVDISLAEVVLKDLIPEGRETPVTPERIIAETADYFDISADDLLGTSRAQTLVTARQIAMYLCRELTDLSLPKIGAEFSGKDHTTVMHADRKIRALMGEQRQI

SEQ ID NO: 3951 - DNA, 351 bp, Homo sapiens
  misc_feature (336)..(336): Wherein n may be a, c, g or t
gctagcaggactcttggacatacaaagcagggaaaggccctggctctcccaaacggtttgaaaccttcctcctagggcccccttcctccagcatccaagtcaggggcttcccagcacccctcgcctcttgctaactcacctttctggaaaagctgggctctgacattgtccagttcattctgaaaggcaatacccacaataagcagcaggaaagcatcatagctgacctccacgtggtctcccataaggctgtggggagccccaggattgaacaatgaggccttctagggcatgaatcctgcagtgcctcaaggccaagctaagctaacaatgganagataagcactgctg

SEQ ID NO: 3952 - protein, 57 aa, Homo sapiens [sequence omitted]

SEQ ID NO: 3953 - DNA, 322 bp, Homo sapiens
agatctctagtttcgggaagttcctctgtgtttcttgtcagctgatgcacctgtccgtccgctcccaggcattgctggaagtgctttccaatcctgcttttcatcattttagtgggttttgggaggaagagaaatcattaatactaaaggattcagtttgctctcttgagcgggaaatttctaggtgtgtcagagcacagccacggaaccgctgtcccttttccttgagccgaggagccgagtcctggcaacgtggtgttcggggcctacctggctgcacctcccctccctccgtgtgtctctcgtgccgtcctctgctagc

SEQ ID NO: 3954 - protein, 92 aa, Homo sapiens
MHLSVRSQALLEVLSNPAFHHFSGFWEEEKSLILKDSVCSLEREISRCVRAQPRNRCPFSLSRGAESWQRGVRGLPGCTSPPSVCLSCRPLL

SEQ ID NO: 3955 - DNA, 269 bp, Homo sapiens
  misc_feature (1)..(1): Wherein n may be a, c, g or t
  misc_feature (2)..(2): Wherein n may be a, c, g or t
  misc_feature (269)..(269): Wherein n may be a, c, g or t
nntgatcaccgatgagcaacgggcacatcggcagctggacagcgggaagatgagcgagcaggagcttggcacctcattgtggagctcaccgcgcagatgcgtgacgctgctggcgagctcaagttcgagttggcggcacgtctgcgtgacgagatcgctgacctcaagaaggatttgcgccagatggtggaggccaaccgctgagttgagagcatcggtcggtgggagacccttgggtggcccaatattttctaccgaccgctgcacgn

SEQ ID NO: 3956 - protein, 62 aa, Homo sapiens
ATGTSAAGQREDERAGAWHLIVELTAQMRDAAGELKFELAARLRDEIADLKKDLRQMVEANR

SEQ ID NO: 3957 - DNA, 250 bp, Homo sapiens
atccacctgaccaggctccgccacgatgagatcatcaccctgctcaagaatgtgggcgagcgcgtggtgctggaggtggaatatgagctgcccccgcccggtgggtgcccttggacggggaactttctccactgcctcggttgcgggtggacacggttacctccccaccagggcctgggtggcagggatcatgccagatggagtgggtagaacctggagactggccacaagcatccatacctcgtctaga

SEQ ID NO: 3958 - protein, 69 aa, Homo sapiens
IHLTRLRHDEIITLLKNVGERVVLEVEYELPPPGGCPWTGNFLHCLGCGWTRLPPHQGLGGRDHARWSG

SEQ ID NO: 3959 - DNA, 205 bp, Homo sapiens
gccggccttggctagcatgcgggctttgttctcggcgatctccaattgggcgcggacgcggtcgacgtgggcctgttccttggcgatctcagattccacaacgcgggggtcggtggtcgaactatcgtgtgcggtcaaagtcgtccttcacgagatgtttgcctccaggcgcggtgccgtggggctaacggtcaagtctacgcgt

SEQ ID NO: 3960 - protein, 63 aa, Homo sapiens
MRALFSAISNWARTRSTWACSLAISDSTTRGSVVELSCAVKVVLHEMFASRRGAVGLTVKSTR

SEQ ID NO: 3961 - DNA, 234 bp, Homo sapiens
gggtactcgggtgacatccagcaggccaagtcccgcgcggctgaagccggtggcaaggtcaaggttgcctacgacattccgaaagaaggcgccggcagcttctatgacatggtcgccatccctaaagatgccgaaaacgtcgatgctgcctacaagttcatgaactacctgctcaagccggaagttatggccgctatcaccaatagcgtccgtttcccgaacggtaacgagaaa

SEQ ID NO: 3962 - protein, 78 aa, Homo sapiens
GYSGDIQQAKSRAAEAGGKVKVAYDIPKEGAGSFYDMVAIPKDAENVDAAYKFMNYLLKPEVMAAITNSVRFPNGNEK

SEQ ID NO: 3963 - DNA, 206 bp, Homo sapiens
gatcttcccaatgccatgaatgctgctgagattactgacaagcttggattacactccctgcgccagcgacactggtacatccagagcacttgtgccacaactggcgagggtctgtatgaaggcctggactggctgtccagcaacattgcgagcaaggcttgaggcctaccttgaatgtcaaccgcgaactgactaggagctccgga

SEQ ID NO: 3964 - protein, 53 aa, Homo sapiens
DLPNAMNAAEITDKLGLHSLRQRHWYIQSTCATTGEGLYEGLDWLSSNIASKA

SEQ ID NO: 3965 - DNA, 326 bp, Homo sapiens
tcatgaaagagaatacaaaaacaaacagagaagtgcactctacaagatagaaatggtgtttaataactgaccttgatggggaatcaaggtaggcttctttggtaagtgactcctgagctcacatgtgaaaagacaagtgttagctaggctggtgtggaagcaagcagaggtggcacagacctccaggtagaagggactgcatgggaggaggggccttgtagtagaaaggagcatgggcacccccaaaaagatttttttttttttaaaaaaaacaaacaaaaaattttttttttgaagcaaagaaagaggtggatgcatctggaggt

SEQ ID NO: 3966 - protein, 92 aa, Homo sapiens [sequence omitted]

SEQ ID NO: 3967 - DNA, 279 bp, Homo sapiens
  misc_feature (1)..(1): Wherein n may be a, c, g or t
ntgatcaccggcattggctgggtgaaagcctgggccacggttgacggctacttctggaactcgatcaagatcaccgttccggcggtactgatctccaccgccatcggtgcgctgaacggctacgtgctgtcgatgtggcgtttccgcggttcgcagttgttcttcggcctgttgctgttcggctgcttcctgcccttccagaccgtgctgctgccagcctcgttcacgctcggcaagatgggcctggccagtactaccacgggcctggtgtttgtgcac

SEQ ID NO: 3968 - protein, 93 aa, Homo sapiens
  misc_feature (1)..(1): Wherein Xaa may be any naturally occuring amino acid
XITGIGWVKAWATVDGYFWNSIKITVPAVLISTAIGALNGYVLSMWRFRGSQLFFGLLLFGCFLPFQTVLLPASFTLGKMGLASTTTGLVFVH

SEQ ID NO: 3969 - DNA, 255 bp, Homo sapiens
gatcctaaccatacggtttgggcagatcaattaaaaaagcatttgaaaaaatgcaacaagaccaaactaagccatttaaacgatgataagccatactatgaaccgggctataacggagagaatggactgttatcgtcgtctgttaaaatagatattactgcggaacatttggtacaatctattgaattgctgtataaggtgtttgagggagaatccatggacgagctgcctttgagacaactgaacaagaagctt

SEQ ID NO: 3970 - protein, 85 aa, Homo sapiens
DPNHTVWADQLKKHLKKCNKTKLSHLNDDKPYYEPGYNGENGLLSSSVKIDITAEHLVQSIELLYKVFEGESMDELPLRQLNKKL

SEQ ID NO: 3971 - DNA, 311 bp, Homo sapiens
tccggattcctgcagctgacatatctgatattctctgtagacacaggggagccccaggagataacctggtcccactatcatgtaagtaagggctcccatttgttgtacacctagtatgccaaatattgtcccacttgattctcacaatgtctctaagactaagtgctgtcatttttttctttaacaaatgaggagccagagactgaagaggaataattagagagttatcaaaagtcacataaccagtgatgtacattacctaataaggggacaatcaccatctcctattcaaatgctaaaacataccatgg

SEQ ID NO: 3972 - protein, 85 aa, Homo sapiens
MYITGYVTFDNSLIIPLQSLAPHLLKKKMTALSLRDIVRIKWDNIWHTRCTTNGSPYLHDSGTRLSPGAPLCLQRISDMSAAGIR

SEQ ID NO: 3973 - DNA, 246 bp, Homo sapiens
caattgttcctctctctctagagcattttgaggacctacaaaggcagtgtagtgtagaggttaagagtagaggctttgaaatctggcaggtgttagttacagccccatctccaccatttcctggctggggtaaccttaaaaaaaataaacataaccttttaaggttttccccatccataaaatcggaaactattgagtaggagtgtgaggattatacaggatcatgctcctcaagcccttagcgta

SEQ ID NO: 3974 - protein, 59 aa, Homo sapiens [sequence omitted]

SEQ ID NO: 3975 - DNA, 355 bp, Homo sapiens
acgcgtacgtcgacgtcggcatcccttcaaggtcgtcatagtgctgttgttggcatgggtggtgtggctcgtcgcggtgccgtcatatgccctaggccatactggaacggtggacgccactccagacggaccacgaggcgcagatcacccgggcaccctcgtactgctggtcggcaccgatgagcggcagaatctcacgcccaggcaacagaagcaattgggcaccggcaccgaagccggtctgcgcaccgacaccatgctgctgctctacatgccaccagaaggcaaggatgtcctcatctccctgccgcgagatacgttcctgcgcattcccgggcatcatcacaacaagctt

SEQ ID NO: 3976 - protein, 83 aa, Homo sapiens
MMPGNAQERISRQGDEDILAFWWHVEQQHGVGAQTGFGAGAQLLLLPGREILPLIGADQQYEGARVICASWSVWSGVHRSSMA

SEQ ID NO: 3977 - DNA, 389 bp, Homo sapiens
  misc_feature (1)..(1): Wherein n may be a, c, g or t
  misc_feature (389)..(389): Wherein n may be a, c, g or t
nctggccccccccaaatttttttaactaaaaaaaaagaatctaagaaaaagaataaaaggaatcagatgtgttttaagagtctcaatgatggtaacttcattctaaaggaaatggaatatgaatgtcattatttagcccattgctttgggagactaggagtagaagagaaggtgacatagccttaaattctgttgtcctgaaatgtgtgtatggagcatggcctggtcctcaaaggacagaaagtgtttggccccagagaggttgggagaaaggacataatagcactcagggagggcatgagcaggaaaatagctggaaaacttgggcagctataagcagcacattacggacattggtccatcttacatcttcactgggggtaggtgan

SEQ ID NO: 3978 - protein, 89 aa, Homo sapiens
  misc_feature (89)..(89): Wherein Xaa may be any naturally occuring amino acid
MSLFSPLLWETRSRREGDIALNSVVLKCVYGAWPGPQRTESVWPQRGWEKGHNSTQGGHEQENSWKTWAAISSTLRTLVHLTSSLGVGX

SEQ ID NO: 3979 - DNA, 471 bp, Homo sapiens
tcatgagaccaaggaaggaacggacgtcgcctaccgattacagtaagcaaagaggatggtgttgccacaacaacgcccatcgggaaggcaagagacgctgtggtgaacaataactgccaaaacgtggttctcgcacgctgaaaagcgcgttctcgtgcgccgctttcagtgtgctagaacttgcactgtccggtttccggtgcttggtgttgggtggtcgtacctgctagttccattggtgcggtgtatgggcaggtaccctcaaaaagggaaacgaaggtaggcgcacggtgcttattaagctcagaggcgacctcgcagaagggggcagaccacacaagcggtggaggcgctccagatatccagtggagtggggcttgctcatgttctgtgttggttttggatagaaaaagagcgggttgaatagtttgccatggctaccactctggaagcgaaatcacatagacgcgt

SEQ ID NO: 3980 - protein, 52 aa, Homo sapiens
MSKPHSTGYLERLHRLCGLPPSARSPLSLISTVRLPSFPFLRVPAHTPHQWN

SEQ ID NO: 3981 - DNA, 347 bp, Homo sapiens
acgcgttcccaaagtaggatggctgggatagagggaaaggacatctttcaggcttgttatgcactgtgctgtggactcttgttgtggggtcctaggtctgcccagcattttggggttcaccccgtgaccctctacgggtttccatgcccccagcaccacgtccatcatcatttctggggtcccctcacctcagagagcctgcttcctatgactgcgtgggccagctggagaaggacgacccaagacccctcaagtttctgtgtcctgaccccaagcataggcctgagtgctcctggggcccaagggcctttacgcactactctctggggcccactgtctgcactctt

SEQ ID NO: 3982 - protein, 109 aa, Homo sapiens
MAGIEGKDIFQACYALCCGLLLWGPRSAQHFGVHPVTLYGFPCPQHHVHHHFWGPLTSESLLPMTAWASWRRTTQDPSSFCVLTPSIGLSAPGAQGPLRTTLWGPLSAL

SEQ ID NO: 3983 - DNA, 300 bp, Homo sapiens
acgcgtgaaggggtcctgcaacgagaagtaggaggcagtagctaaccattcctccattcagcaagcactcaatgggcacctacaatgtactcgtgttgggagatttggaggaaaaacaaaaagccccagtccctgtcctctctggctcacaatccagtggctatctccacacacccagagaggcagcaattcaaactcttctctagtgagaaggttaacaagatgaaaacagatgcctggagatctgcttgtcttgaactagtcaagccacttgactaggggcttctgttggccttccca

SEQ ID NO: 3984 - protein, 64 aa, Homo sapiens
MYSCWEIWRKNKKPQSLSSLAHNPVAISTHPERQQFKLFSSEKVNKMKTDAWRSACLELVKPLD

SEQ ID NO: 3985 - DNA, 278 bp, Homo sapiens
tgatcaagacacaagagcctcattctggaagaaaagagaaaacatccttcctgaccaggcactcagagggatttgatgcatgttgcatcctttctttgcttctccagctgcagaagctggtactgcaaactggtacccgatcctggccagggggaagctcggtggccatgtacacactctcaggccggtgcagccagggcaagaagagaagaggaggggctgctttcactctgccagggccagaggccagggaccacacacacagccagggtactagt

SEQ ID NO: 3986 - protein, 67 aa, Homo sapiens [sequence omitted]

SEQ ID NO: 3987 - DNA, 174 bp, Homo sapiens
acgcgtgtttttttagttgactggcttaaagtcttgctcaataccccaggactagagctcatatcgtatctaccatcatttcttggcgggttattcacgttcttgggcgattctcataaagatgtcagaacagttacacacacccttatggactcactacttcacgaagtcgac

SEQ ID NO: 3988 - protein, 58 aa, Homo sapiens
TRVFLVDWLKVLLNTPGLELISYLPSFLGGLFTFLGDSHKDVRTVTHTLMDSLLHEVD

SEQ ID NO: 3989 - DNA, 156 bp, Homo sapiens
atccaaagaacgaatttgtcaaacacccttttactgctaaaatctctggacgttactgacgaattgagtaagttcccgttcattgataaaccacccttacaaacatttttatcctcattgtatgagttatggttcataggggctatagacactagt

SEQ ID NO: 3990 - protein, 52 aa, Homo sapiens
IQRTNLSNTLLLLKSLDVTDELSKFPFIDKPPLQTFLSSLYELWFIGAIDTS

SEQ ID NO: 3991 - DNA, 176 bp, Homo sapiens
  misc_feature (1)..(1): Wherein n may be a, c, g or t
  misc_feature (2)..(2): Wherein n may be a, c, g or t
  misc_feature (67)..(67): Wherein n may be a, c, g or t
nncattgaccacctcatctcaggaaaacaacaatcactagctctattcaaaattgtcctggaaatcntagccagtgtaataagtcaagatagggaaataaaagacgtaaagattggtaagaaagaagaaaaattgatatttgcggaatacatgattgtatatgtagaaaatctaga

SEQ ID NO: 3992 - protein, 58 aa, Homo sapiens
  misc_feature (1)..(1): Wherein Xaa may be any naturally occuring amino acid
  misc_feature (23)..(23): Wherein Xaa may be any naturally occuring amino acid
XIDHLISGKQQSLALFKIVLEIXASVISQDREIKDVKIGKKEEKLIFAEYMIVYVENL

SEQ ID NO: 3993 - DNA, 375 bp, Homo sapiens
  misc_feature (1)..(1): Wherein n may be a, c, g or t
  misc_feature (2)..(2): Wherein n may be a, c, g or t
  misc_feature (226)..(226): Wherein n may be a, c, g or t
  misc_feature (351)..(351): Wherein n may be a, c, g or t
  misc_feature (356)..(356): Wherein n may be a, c, g or t
  misc_feature (357)..(357): Wherein n may be a, c, g or t
  misc_feature (372)..(372): Wherein n may be a, c, g or t
nnctcgagaaaaaactaacagtgaaagcacacaaattctctaatagtgcgaaagaagcaattgagaacaacggcggaactgtagaggtggtctaagactatgggaatgttcaatataattaaaggggcattcactgaaaagaaagttagaagtcgggtgttctttacactagcattgttatttgttttccgaattggaacgcatattacagtgccaggcgtcgatncttcggcacttgatgaacttcaacaaagtggactttttaacttgttggatatgtttggtgggggtgcgttgtcacagtattctgtgtttgcactaggggtatccccctacattacctcctccatnatcgnntcactcttgcagatngac

SEQ ID NO: 3994 - protein, 90 aa, Homo sapiens
  misc_feature (41)..(41): Wherein Xaa may be any naturally occuring amino acid
  misc_feature (82)..(82): Wherein Xaa may be any naturally occuring amino acid
  misc_feature (84)..(84): Wherein Xaa may be any naturally occuring amino acid
  misc_feature (89)..(89): Wherein Xaa may be any naturally occuring amino acid
MFNIIKGAFTEKKVRSRVFFTLALLFVFRIGTHITVPGVDXSALDELQQSGLFNLLDMFGGGALSQYSVFALGVSPYITSSXIXSLLQXD

SEQ ID NO: 3995 - DNA, 495 bp, Homo sapiens
  misc_feature (1)..(1): Wherein n may be a, c, g or t
  misc_feature (2)..(2): Wherein n may be a, c, g or t
nngctagccggtcccgttccggggcttatcgtcgccggcgccatgctggtggtgttggggagttggtttgccctggacccgacgtcgaaactcgttgaggttcatccgggccgaacgattcgtgccggggccttggctcggtcagatcgtggtggccccggtccgctatttacctccggtgtcgcggccacctgcgttggcatgatctttatgggcatggtgtttgggtctgtgcagaccggcacgaccagcctcgccaccgacgctggacgtccaggcctggcagggctgttccacgccttgctttcggtgggtagcgctgctgctgggctggctctgccacggttggctcatcgtctggacctgccggccaggtggcgtcttttcgctgccggattggccctttttgcagcccccttgctgctggtcgatcgccttgggccattggtgccggtcctcatcatccttggtatggcggcggccccgtacatgatc

SEQ ID NO: 3996 - protein, 165 aa, Homo sapiens
  misc_feature (1)..(1): Wherein Xaa may be any naturally occuring amino acid
XLAGPVPGLIVAGAMLVVLGSWFALDPTSKLVEVHPGRTIRAGALARSDRGGPGPLFTSGVAATCVGMIFMGMVFGSVQTGTTSLATDAGRPGLAGLFHALLSVGSAAAGLALPRLAHRLDLPARWRLFAAGLALFAAPLLLVDRLGPLVPVLIILGMAAAPYMI

SEQ ID NO: 3997 - DNA, 273 bp, Homo sapiens
  misc_feature (1)..(1): Wherein n may be a, c, g or t
ntgatcatccttgtggcactgctcacagaggcatccatcgacatgcttgtaaggtgcagccaccagggcaagattacatcatatgggtggctgatgggcgaggttttcgggcagtgggggagaattgcgctgcaggcctccgtcatcataaacaatgttggcgtgctaattgtttacatgattatcattggtgatgtattatctggaacaacatcaggcgatgttcatcatcgtggtatattggagggctggtttggagctcatttgtggaat

SEQ ID NO: 3998 - protein, 91 aa, Homo sapiens
  misc_feature (1)..(1): Wherein Xaa may be any naturally occuring amino acid
XIILVALLTEASIDMLVRCSHQGKITSYGWLMGEVFGQWGRIALQASVIINNVGVLIVYMIIIGDVLSGTTSGDVHHRGILEGWFGAHLWN

SEQ ID NO: 3999 - DNA, 351 bp, Homo sapiens
  misc_feature (287)..(287): Wherein n may be a, c, g or t
gctagcttttcacagagtgagtaatcagagagacagagagagattgactaagacagcagagctcatgacagatggaagacactataaccaataccattgcttctgccatatgctattggtcatcccaaccaaccttggtacaatgtgggactactttaatagcaggcagtgaggatcatagggcatcctcttggagactggctccacacccatccaaatggttctgggaggattaggttcaccagggtgtccaactcatcccagtttgcccggaactgtcccagttntaaaacagaaagtctgtatcatgagaacttctctgagtctcaagcaaactgggatgagtgatca

SEQ ID NO: 4000 - protein, 54 aa, Homo sapiens
MEDTITNTIASAICYWSSQPTLVQCGTTLIAGSEDHRASSWRLAPHPSKWFWED

SEQ ID NO: 4001 - DNA, 407 bp, Homo sapiens
tgtacagcatagatagaaaaatattcaaaatatgtttaatgtttggattataatgtaaactacaacaggtatccttgggttttcagatagatggagaattaggaaaataatttttcttaaaactctcagagaagtgaaattgataaaccacaaatttggttttgggtgggccttggaaggcctttgaaaccttgtccccggacattggacctctgggtatatgtagcctccaatattccaaggcatttcctacccctgctctcagcatttatgattcatatttaatttctcaagcctgagcactgtaaaaatactgtactttggtaagttgagtatatatttcatgagattattgcctggaatatttttggcaaaatttttgcagattttggcaaagcaaaaggaaa

SEQ ID NO: 4002 - protein, 73 aa, Homo sapiens [sequence omitted]

SEQ ID NO: 4003 - DNA, 315 bp, Homo sapiens
  misc_feature (1)..(1): Wherein n may be a, c, g or t
  misc_feature (139)..(139): Wherein n may be a, c, g or t
ntcggtgagcgtaagattgtcctgattgaagataactgcgagtcgatgggagcaacttacaacgaaaaacaagctggcaccctcggagttatgggtagttttggttcctttttcagccatcatattcggcggatggaangaggcttgatcgtaaccgatgacgaagagctgtatcaaatcttgctctccctacgcgcgcatggctggacccgaaacctgcccaagcaaaacctcgtatgtagcgagaaaagtgatgatccgttcgaagagtcatttcgtttcgttttgcctggctacaacgtccggccactcgag

SEQ ID NO: 4004 - protein, 105 aa, Homo sapiens
  misc_feature (1)..(1): Wherein Xaa may be any naturally occuring amino acid
  misc_feature (47)..(47): Wherein Xaa may be any naturally occuring amino acid
XGERKIVLIEDNCESMGATYNEKQAGTLGVMGSFGSFFSHHIRRMEXGLIVTDDEELYQILLSLRAHGWTRNLPKQNLVCSEKSDDPFEESFRFVLPGYNVRPLE

SEQ ID NO: 4005 - DNA, 317 bp, Homo sapiens
gatcaaacagccatctttggcgactttctcaacgacctcgagatgatgaccatggcgaagtggtcctttgccatggccaacggccatcccaacattgtcaaagcatcgaattacgtggtaccaccgaacaccgaaaacggcgtcattacggtccttgccgcgttgctaggtacccgcgtcccgaccacgtgacggccacaggtcagaccagggatagctctttggcctcgcgccagagtttttctcgggcattaggatgagcggcattgtcgatgagttgtcgcgcctgctcctcttgggatttcccgaaaagatct

SEQ ID NO: 4006 - protein, 63 aa, Homo sapiens
DQTAIFGDFLNDLEMMTMAKWSFAMANGHPNIVKASNYVVPPNTENGVITVLAALLGTRVPTT

SEQ ID NO: 4007 - DNA, 336 bp, Homo sapiens
tgatcaactctccctgcttttatctagtccttgtttctgcctggggatgcctgggctgaggctatgagactttcacagtttttgtttaaagagttaaaagccggctgacgccttttttattttttcccacctatttgcattttggcaactgacacctcttaaaaaccatttatttaaaagatcctgcagaacataacctttcttcaccttctgtctaagccagctgaggtcagaggaaacgcctgtttttaaacttgggtgtgttctcctcatatgaatgttaaaatgcaattcgaagaaatacaaaaggccaggtattagtggtatgcacctgta

SEQ ID NO: 4008 - protein, 59 aa, Homo sapiens
MRRTHPSLKTGVSSDLSWLRQKVKKGYVLQDLLNKWFLRGVSCQNANRWEKIKKASAGF

SEQ ID NO: 4009 - DNA, 684 bp, Homo sapiens
  misc_feature (1)..(1): Wherein n may be a, c, g or t
  misc_feature (2)..(2): Wherein n may be a, c, g or t
nnacgcgtgaccccctctcagatcctcgacattctgtctgccggcctgattttcgttgcgctgcttgtgctcgtcattcggcccgcttcggtgctgttggggttggtcggcaccgagacgacccgtcaagaacgcaccctgatgtcgttcatggccccgcgaggaatcgtggcggcgtcggtggcgtcgatttttgccatgcagttcagtgagtccgccgaccacgtgcgggagcaggcgaagcagatcgccgcatctgatccggaacattccaagcggttgttctcctttgctaaccagatcgctggtatggccagccaagtcgaccgactcgtaccgctggtcttcctcgtgatcgtctgtactgtcgctatctacggtctgggtattggaagactcgccgagaaactcgggttggcctctgcgagcccgcgtggagtgatgttcgcggggtcacctgcttggactatcgataccgccaagaccctacgcgatttcgatgtgccgactctcatcgtcacccgacgtgcgtatgacctgtacgcggcacgtaaagctggtctgagatgcgaggctgcggactttctatctgaatacgccaccgaagatatggaccttgccggaatcgcttcgatggtggcatgcacgccggatgacgacaccaattcaattgcgtccgtgcac

SEQ ID NO: 4010 - protein, 228 aa, Homo sapiens
  misc_feature (1)..(1): Wherein Xaa may be any naturally occuring amino acid
XRVTPSQILDILSAGLIFVALLVLVIRPASVLLGLVGTETTRQERTLMSFMAPRGIVAASVASIFAMQFSESADHVREQAKQIAASDPEHSKRLFSFANQIAGMASQVDRLVPLVFLVIVCTVAIYGLGIGRLAEKLGLASASPRGVMFAGSPAWTIDTAKTLRDFDVPTLIVTRRAYDLYAARKAGLRCEAADFLSEYATEDMDLAGIASMVACTPDDDTNSIASVH

SEQ ID NO: 4011 - DNA, 249 bp, Homo sapiens
  misc_feature (249)..(249): Wherein n may be a, c, g or t
gaattccagtgacgtgaacttaaaggcagaatgttcacaataggcaaggggcagccataaaacacagcaaggttgaggagtacaagctggtagacgctggggtcctaggccctgtgccccaagcccagatcctaggggccaccaagcactaagtctaccggaagctctgtagcctccgccggagatgtgcatagtaaacatcaccaaaagtgccgggcacaatgggaagtggggctttcccaaggtgcn

SEQ ID NO: 4012 - protein, 67 aa, Homo sapiens
MFTMHISGGGYRASGRLSAWWPLGSGLGAQGLGPQRLPACTPQPCCVLWLPLAYCEHSAFKFTSLEF

SEQ ID NO: 4013 - DNA, 288 bp, Homo sapiens
accggtcccgtccaaaagagtctacttgattacaacgctaagtaccattctgatctagatgatccaaatacttggaagaatgcggatttgatcattttggccttgcccagtacggcctctacaaacaatattatcaatcgtaaaagtttggcctggtgtaaagatggtgtcaggatagttaacgttgggagaggcacatgcatagatgaagatgtgctactagacgctcttgaatctggaaaagtggcaagctgtggtctcgatgtgtttaaaaatgaggaaacacgc

SEQ ID NO: 4014 - protein, 96 aa, Homo sapiens
TGPVQKSLLDYNAKYHSDLDDPNTWKNADLIILALPSTASTNNIINRKSLAWCKDGVRIVNVGRGTCIDEDVLLDALESGKVASCGLDVFKNEETR

SEQ ID NO: 4015 - DNA, 297 bp, Homo sapiens
  misc_feature (1)..(1): Wherein n may be a, c, g or t
  misc_feature (2)..(2): Wherein n may be a, c, g or t
nnaacatgcggtctctccttcactgcagctgaggtgagtaagacatttaaacgtgttaaccctcgcaaggctgcaggcccagacggcatccccagccgagccctcagagcatgcgcagaccagctggccggtgtgtttacggacatattcaatcaatccctataccagtctgctgttcccacatgcttcaagagggccaccattgttcctgttcccaagaaagctaaggtaactgagctaaacgactaccgccccgtagcactcacttccgtcatcatgaagtgctttgagagacta

SEQ ID NO: 4016 - protein, 99 aa, Homo sapiens
  misc_feature (1)..(1): Wherein Xaa may be any naturally occuring amino acid
XTCGLSFTAAEVSKTFKRVNPRKAAGPDGIPSRALRACADQLAGVFTDIFNQSLYQSAVPTCFKRATIVPVPKKAKVTELNDYRPVALTSVIMKCFERL

SEQ ID NO: 4017 - DNA, 458 bp, Homo sapiens
acatgtcctgactataaccgcatgcatgagggcttcaagcttgcgtacactgagatggcaagacagtacccttgctttggatttgcagctaagatgccgaacatcgaatggtggaggacatgtgttaagaattcattcgttaaggctggctatgattatgatgaagagacatttgagaaagtcttcaggcgcatttattctgcatttggctcctctgcgccatactcggcgtttcctgattcgcagcccttcctaaggtgggcacgcgaaaagggactcactgttggcatcgtcagcaatgcagaataccgctacaaagatgtaatcctgccagctttaggattgaatcagagctccgaatgggactttggggtgttctcaggtgtcgttggcgttgagaagccagacccaagaatttacaagatagcgctggagatggcaggaaacgtcgctccgga

SEQ ID NO: 4018 - protein, 152 aa, Homo sapiens
TCPDYNRMHEGFKLAYTEMARQYPCFGFAAKMPNIEWWRTCVKNSFVKAGYDYDEETFEKVFRRIYSAFGSSAPYSAFPDSQPFLRWAREKGLTVGIVSNAEYRYKDVILPALGLNQSSEWDFGVFSGVVGVEKPDPRIYKIALEMAGNVAP

SEQ ID NO: 4019 - DNA, 447 bp, Homo sapiens
  misc_feature (2)..(2): Wherein n may be a, c, g or t
cnggaatctgaatttgagaatgttgcgaatgctgggtcgatggagcaatttgaaaccatagaccataaggatctcgatgacgaactacaaatgaacgcttttacagggacgttaactagttcctctaacccaactatcccaaaaccacaagtacaacaacagtcaaccagtgaccctgctcaagtaagcaacgatgagtgggacgagatttttgctggatttggtaactccaaagctgaaccaaccaaagtagctaccccaagcattccacaacaaccaattccattgaagaatgatcctatcgttgatgctagcttgtcaaaaggtccaatagttaaccgcggggttgcaactactccaaagtctctagccgtcgaggagttaagtggcatgggatttactgaagaagaagcgcacaatgccttggaaaagtgcaactgggatcta

SEQ ID NO: 4020 - protein, 149 aa, Homo sapiens
  misc_feature (1)..(1): Wherein Xaa may be any naturally occuring amino acid
XESEFENVANAGSMEQFETIDHKDLDDELQMNAFTGTLTSSSNPTIPKPQVQQQSTSDPAQVSNDEWDEIFAGFGNSKAEPTKVATPSIPQQPIPLKNDPIVDASLSKGPIVNRGVATTPKSLAVEELSGMGFTEEEAHNALEKCNWDL

SEQ ID NO: 4021 - DNA, 420 bp, Homo sapiens
  misc_feature (1)..(1): Wherein n may be a, c, g or t
  misc_feature (420)..(420): Wherein n may be a, c, g or t
ntaatatttatgtagtttggtttgtttgtaaatagtattgatattgtattgttagatattttggttggttttgtggttgtttttaatagtgatgaggtattgtggtatcttgttgaagattattggggtaaaactgtttatgatgtggcttttggcgatgtgttatttatttttgaacttggtttgttattggaaaattttatttggttattgttgggaggggaatattagaagtggaatggtatagtctgggtgaaggatatggaagtagaaaaattgttttggatttgggaggtggaagaaacaaaaaaaagcttgatgtaggtagttagtgagcatattgtgctgttttaggatgttgtagatttggaaattgcaatgaaggaagaaagtttgttggtggaagcatggaagaagtan

SEQ ID NO: 4022 - protein, 71 aa, Homo sapiens
FGLFVNSIDIVLLDILVGFVVVFNSDEVLWYLVEDYWGKTVYDVAFGDVLFIFELGLLLENFIWLLLGGEY

SEQ ID NO: 4023 - DNA, 419 bp, Homo sapiens
tctagaccctgagggtggtctatagactagcagcatcaacatcacctgatatgaagttaaaaatgcagaatctcaggttcttccaaactactgaatcaaaatctgcaacttatcaagctgcccaggcaattgctaatgtgcataggaattctgaatctgaagaatatgattcctgtgcacattagggatcacctggggagcttgatcaattgcagactttgtgttcgaaaagcacagggccgaacagtgttgggtggtaacactgtggctgctttctcctcctgcccgctggaaaaaggccatcattctgctgcatctatattcatcctgattccggttcaaacacaagacaacatattgagcacattccttagcccaatactgcatttagagacagcatagtgtcctgggaagtgctg

SEQ ID NO: 4024 - protein, 88 aa, Homo sapiens [sequence omitted]

SEQ ID NO: 4025 - DNA, 282 bp, Homo sapiens
  misc_feature (1)..(1): Wherein n may be a, c, g or t
  misc_feature (2)..(2): Wherein n may be a, c, g or t
nncctaggagcgattatcggcaagttgttagcagattccggtggcgccgacgaaatcgtcgacaccctagtctctcaggcttctcccgccaccttgccatgggcgatggccctcattggcgctgtcattggactgcccatgttcttcgagatcggtctcgtcctgctcgttccggtcatcctgctggtaacccgccgttccaagctgcccctcatgagagtagctatcccggccctggctggcctatcgacgatgcatgcccttgttccacctcatccgggc

SEQ ID NO: 4026 - protein, 76 aa, Homo sapiens
IVDTLVSQASPATLPWAMALIGAVIGLPMFFEIGLVLLVPVILLVTRRSKLPLMRVAIPALAGLSTMHALVPPHPG

SEQ ID NO: 4027 - DNA, 204 bp, Homo sapiens
  misc_feature (1)..(1): Wherein n may be a, c, g or t
nctatgcagctgagtagaagtcatcctactaaagtgattgatgctaagtttaagaatgagtttgaatcatacgttaattctgcgattgaccacatctttaggcattttcaagaaaagttccgaataaagaagagtgatgatgacaaagacccctgctgggatgacatattaaaagacaaaaacaagtttgtaagaaattttgta

SEQ ID NO: 4028 - protein, 68 aa, Homo sapiens
  misc_feature (1)..(1): Wherein Xaa may be any naturally occuring amino acid
XMQLSRSHPTKVIDAKFKNEFESYVNSAIDHIFRHFQEKFRIKKSDDDKDPCWDDILKDKNKFVRNFV

SEQ ID NO: 4029 - DNA, 555 bp, Homo sapiens
cttaaggaacagtggcagagagacaagctttggcagtaagtaattatcaagggatattcaccatagatgaggaggcctgtgtgggctatggagcaagacatgaatactgtctgctgtggggcctcatgaggcaaaagcctgaaatgatacatggccaataccaccccccaagcaagagccaatctcctagatgacaatcaactgaaagttttaaatcaaaattaaaagaataaagagttgaagaatatgaagaagggaaacatattcccacctgtcatctttttaggagggaaactgtagttctcaaagcttatctccagaattaccagaaggtttgttagaacacacattgttctatgccctacttagagcttctgatttgtagccacagatgagacctgagaatttgcctttaaaacatgtcgctgttgctccttgtgcatgaaccacagtttgacaatcactgagctagggtaaccctctagcttctcactctctcatttattaactcacagtgggaggagaagagagggtgaaggagaccccttcacgcgt

SEQ ID NO: 4030 - protein, 50 aa, Homo sapiens [sequence omitted]

SEQ ID NO: 4031 - DNA, 256 bp, Homo sapiens
cccgggactccggggggactccggagccggattatgtcatgaaacatctctgaagtgaaacgcatgggctggaggagctggaggggctggtggggctggctgcaggacaaagatcttggaatgatcaagagacctgcgcggcctgacctcttctcactggcccgctggcttcgcattcgttccttaaagtctgatgtggatgtcttgaaagcgagggacttcctgatcttaatgaaaaggtcaggggaaaagttgg

SEQ ID NO: 4032 - protein, 64 aa, Homo sapiens [sequence omitted]

SEQ ID NO: 4033 - DNA, 341 bp, Homo sapiens
acgcgtcgtttgaaggcttgatccgcacgtccaattcgctttgcgccaatgcgccgcagcttgtgaacagcagaatcaagccgctggtaaatcttcctgggagcttcataggcggggatgctacacgagctggggagacactttgaacccggaattgtctgaataattctgtctcaaacctttgcagcctgtaacgactgagggttcggatggaaaaacacatgctccaggatgggaccgacggccacttcaccgatctcttcatagccctggcgtttgtagaaatccaggtagcgcgaatcgccagcgtcgagcacgacgcctgatgagtgcgggtcatt

SEQ ID NO: 4034 - protein, 113 aa, Homo sapiens
MTRTHQASCSTLAIRATWISTNARAMKRSVKWPSVPSWSMCFSIRTLSRYRLQRFETELFRQFRVQSVSPARVASPPMKLPGRFTSGLILLFTSCGALAQSELDVRIKPSNDA

SEQ ID NO: 4035 - DNA, 198 bp, Homo sapiens
actagtcttttggtgaatatatggtttgtatactttcttccagtctagatcttctcttttctttctcttcacatgaccattcgcagagcaaaagtattttgttgttgttgttgttgtttgattatgtccaatttatccattttttctttgatagattatgcttttggagtcaagtctaagaagttgttccttggatcc

SEQ ID NO: 4036 - protein, 52 aa, Homo sapiens
MVCILSSSLDLLFSFSSHDHSQSKSILLLLLLFDYVQFIHFFFDRLCFWSQV

SEQ ID NO: 4037 - DNA, 346 bp, Homo sapiens
actagtgaatgacttgtgtgacaccctgcagagactcgccacctcctcctccacggaaccgaagctgcagcaggcagcccttaagctgcagcggagtcctctcggctccctgttagtggaggtggcctgtggatccagaacagctcttgaggtccctttccgctaaggacttggcagcctgaggagcacccagtgctgggtcagagccagcctgatcccgagcaaacactgcagcccaggaggggctgccagggctcctcgtgaatcctgacaacaccgccatcattaaacattgctttctctttcctcctcttcaaatcttttgatatttttcagagcaaaattt

SEQ ID NO: 4038 - protein, 57 aa, Homo sapiens
MMAVLSGFTRSPGSPSWAAVFARDQAGSDPALGAPQAAKSLAERDLKSCSGSTGHLH

SEQ ID NO: 4039 - DNA, 348 bp, Homo sapiens
  misc_feature (348)..(348): Wherein n may be a, c, g or t
aaatttggtctttcagcagttggctttgggaagccactaaaaatgacatgatcagaaagataaatctggcagccctgtggagggtccattggagtaggggagggactgttggttggggatgggttagaagatcactgtgataggctaggagagtctgaacttgagaagcagcagcagaaatggagaggaggggatggatatgagttactttgggaggtggagtctatagggcctggcatcttggatgttgatgtgtcaagaaagagataggaacccaagattactccaaagtttagaggttgagtgactgagagaacagacatacccttaatgaaagtcaggaactgn

SEQ ID NO: 4040 - protein, 63 aa, Homo sapiens [sequence omitted]

SEQ ID NO: 4041 - DNA, 293 bp, Homo sapiens
gtgcacttgtaatccctgctattcgggaggctgaggtaggaaaactgcttgagcctaggaggttggaagagaaggctcctgtgctgcctctctgtacttgctcttccctggttttgtgtgtatgaatttgtgtgtgcttcctgccctgagctcactgaaagcaagtctggatcaaggcatgttagcagtcagtgatgtgctgctggttggtagtagggacctagaaaagcagtcacctgggtttgcgccagcaaagaaaaccagttctgtgatgtcccctgtgtagtgaattc

SEQ ID NO: 4042 - protein, 54 aa, Homo sapiens [sequence omitted]

SEQ ID NO: 4043 - DNA, 461 bp, Homo sapiens
  misc_feature (1)..(1): Wherein n may be a, c, g or t
  misc_feature (2)..(2): Wherein n may be a, c, g or t
nntcatgaagctggaaaagaagaatgggctcgtcaggaatttgcccatcttgtcgaggtagcagcggacttgccgagcgaggaaccaggaatcgatccgaagcgctggcgcaagcttagccatatcggtgatattcacagtcgggctggactgcaattagcgcacgatctgtggctagcacgagagaacctcgcccatgacctcgatattatgcccggacgtctgctccgtgacgaagccttggtcgccgcggctcgtcactgcgaccgcactggcaacgttgacgtcgaaacagttcttgccatcaggggatttcatcgaggacgggcgaaaaagtaccgccaaacctgggccgaggccatcaaccacgcacgaagcgtgtcaccgacgaagtatccgccgttgcgggagccatcctcaggcatcccccacccccggtcgtgggagcgccatcatccgga

SEQ ID NO: 4044 - protein, 153 aa, Homo sapiens
  misc_feature (1)..(1): Wherein Xaa may be any naturally occuring amino acid
XHEAGKEEWARQEFAHLVEVAADLPSEEPGIDPKRWRKLSHIGDIHSRAGLQLAHDLWLARENLAHDLDIMPGRLLRDEALVAAARHCDRTGNVDVETVLAIRGFHRGRAKKYRQTWAEAINHARSVSPTKYPPLREPSSGIPHPRSWERHHP

SEQ ID NO: 4045 - DNA, 372 bp, Homo sapiens
  misc_feature (1)..(1): Wherein n may be a, c, g or t
  misc_feature (2)..(2): Wherein n may be a, c, g or t
nnaataccaaaccgcataagcccgtgtacaccactcgtgaggtccagcttgctgacgtggcgaaggccgtcgtccaggtggagctcaatcgtcgcgacgcacaggcgtcaaaggaggagaactgagatggacatcgacctgtcaactctgcgcatgatcgagcgggacaaggacatcccgcttgactatctgctgacgaccctagaggacgccctcctcaacgcatatgacaagactgaggctccggttaacggtgccaaggttcagctggaccgcaaaactgggaaatgtccctgttcatgctcccggaagaaggacgaggaggggcaggtcgtcggctggtatgacggcactcccgaggacttcggacgc

SEQ ID NO: 4046 - protein, 82 aa, Homo sapiens
MDIDLSTLRMIERDKDIPLDYLLTTLEDALLNAYDKTEAPVNGAKVQLDRKTGKCPCSCSRKKDEEGQVVGWYDGTPEDFGR

SEQ ID NO: 4047 - DNA, 276 bp, Homo sapiens
  misc_feature (1)..(1): Wherein n may be a, c, g or t
  misc_feature (115)..(115): Wherein n may be a, c, g or t
  misc_feature (117)..(117): Wherein n may be a, c, g or t
  misc_feature (119)..(119): Wherein n may be a, c, g or t
  misc_feature (121)..(121): Wherein n may be a, c, g or t
  misc_feature (125)..(125): Wherein n may be a, c, g or t
  misc_feature (127)..(127): Wherein n may be a, c, g or t
  misc_feature (129)..(129): Wherein n may be a, c, g or t
  misc_feature (131)..(131): Wherein n may be a, c, g or t
  misc_feature (133)..(133): Wherein n may be a, c, g or t
  misc_feature (135)..(135): Wherein n may be a, c, g or t
  misc_feature (137)..(137): Wherein n may be a, c, g or t
  misc_feature (139)..(139): Wherein n may be a, c, g or t
  misc_feature (141)..(141): Wherein n may be a, c, g or t
  misc_feature (147)..(147): Wherein n may be a, c, g or t
ncttagcacactccacctcctctctcccgcgtatgtgcatgcgcatgtgtgtgtgtgtgtgcccacgcatatataacaacatgtatgtgtgtgtgtgcgcacgcatgtgtgcatngngngntctntntngntngngncncnccatanatacatacaatgtgtgtgtgtgtgtgcacacgcaaatatacatgcacatgcgtgtgtgtgtgtgtgcacacgcatatatacatacacgtgtatgtgtgtgtgtgtgcacgcgcatatatacatacgcgt

SEQ ID NO: 4048 - protein, 90 aa, Homo sapiens
  misc_feature (37)..(37): Wherein Xaa may be any naturally occuring amino acid
  misc_feature (38)..(38): Wherein Xaa may be any naturally occuring amino acid
  misc_feature (39)..(39): Wherein Xaa may be any naturally occuring amino acid
  misc_feature (40)..(40): Wherein Xaa may be any naturally occuring amino acid
  misc_feature (41)..(41): Wherein Xaa may be any naturally occuring amino acid
  misc_feature (42)..(42): Wherein Xaa may be any naturally occuring amino acid
  misc_feature (43)..(43): Wherein Xaa may be any naturally occuring amino acid
  misc_feature (44)..(44): Wherein Xaa may be any naturally occuring amino acid
  misc_feature (45)..(45): Wherein Xaa may be any naturally occuring amino acid
  misc_feature (47)..(47): Wherein Xaa may be any naturally occuring amino acid
HTPPPLSRVCACACVCVCAHAYITTCMCVCAHACVHXXXXXXXXXPXIHTMCVCVCTRKYTCTCVCVCVHTHIYIHVYVCVCARAYIHTR

SEQ ID NO: 4049 - DNA, 214 bp, Homo sapiens
gtacaccactgtgtatgccccgttgtggttgttcgctaccctgatgatgctgcagatgccagtggagatgcatcaggggcgacagatgagttgcacactgtacctgaggacgaacctgtttatcacgatgcgcctgaggtgcagaaagaaaactgaggcaatggccgcaagcagctgaagaacgaaggaaaacatggggcctgtagtgactagt

SEQ ID NO: 4050 - protein, 51 aa, Homo sapiens
VHHCVCPVVVVRYPDDAADASGDASGATDELHTVPEDEPVYHDAPEVQKEN

SEQ ID NO: 4051 - DNA, 444 bp, Homo sapiens
  misc_feature (1)..(1): Wherein n may be a, c, g or t
nggggcagagggggcgggattcacgtggctgagctcgctaacttcccgaggcacgtgatagcgtgcgccaagcagaaggctctggagcttgaggaatttcagaacattggaacctcgctgggatgtgacgaagccgagccggctgcaaagagacgctgcctggaaagagagcaaggtgagaaaattattctgggattcctgtcgaaggtcaagcaggtgccctttactgccatgtcggaggagagcatctccgcgaagctgaagcaactgaaagctgaggtggtcgcaaagaccaacagcttcgtaaacgagatcttttcacggataaaggctccggctccgggaggggacagtgggtgtggcggtgcacagggggagctcacctttactgtgtgctgttctgggtagtgctccccactggaccctggcctagcagcatccgga

SEQ ID NO: 4052 - protein, 135 aa, Homo sapiens
  misc_feature (1)..(1): Wherein Xaa may be any naturally occuring amino acid
XGRGGGIHVAELANFPRHVIACAKQKALELEEFQNIGTSLGCDEAEPAAKRRCLEREQGEKIILGFLSKVKQVPFTAMSEESISAKLKQLKAEVVAKTNSFVNEIFSRIKAPAPGGDSGCGGAQGELTFTVCCSG

SEQ ID NO: 4053 - DNA, 411 bp, Homo sapiens
  misc_feature (357)..(357): Wherein n may be a, c, g or t
  misc_feature (368)..(368): Wherein n may be a, c, g or t
ccggacgatcggttagatcaggcgctaaaagagcttcgtgatgcggtggctgatgaggttctggaaaacttattgcaggtttctccttcgcgctttgaagtcattgttctggatgttttgcatcgcctggggtatggcggccaccgtgatgatttgcagcgtgttggcggtactggagatggtggcatcgatggtgtgatatcgcttgataaacttggcctggagaaagtttatgttcaggcaaaacgttggcagaatactgtaggcaggccagaattacaggcattttacggcgcactggctgggcaaaaagcgaaacgtggggtgtttattaccacttctggatttacttctcangcgcgtgactntgcccaatccgtcgagggtatggtgttggttgatggggaacgc

SEQ ID NO: 4054 - protein, 137 aa, Homo sapiens
  misc_feature (119)..(119): Wherein Xaa may be any naturally occuring amino acid
  misc_feature (123)..(123): Wherein Xaa may be any naturally occuring amino acid
PDDRLDQALKELRDAVADEVLENLLQVSPSRFEVIVLDVLHRLGYGGHRDDLQRVGGTGDGGIDGVISLDKLGLEKVYVQAKRWQNTVGRPELQAFYGALAGQKAKRGVFITTSGFTSXARDXAQSVEGMVLVDGER

SEQ ID NO: 4055 - DNA, 391 bp, Homo sapiens
  misc_feature (70)..(70): Wherein n may be a, c, g or t
  misc_feature (196)..(196): Wherein n may be a, c, g or t
  misc_feature (391)..(391): Wherein n may be a, c, g or t
actggtgatcacgtactgaatacgtacccagatattggcaggaccatgactgtcggggaagcaaaccgtnacgcagaggatgttgtcgccaggttcttggaagtgggtcggattgctttgagagctggtgcaaatgaatctgctttggtgaggatgaggcttgttctcaccaggcagggcctcaatgtctctggtnttatcatcagagttctagtagattgttccggtttacccataaactacacattggcattcgctctgattcagctgtggttgaatcagagctcttgtgtaacgtggtaagagagcttaccacttggcggtgtagtgcaaatatgatactatagcatcatgtaacagacagcatggttttgtaaatagacgtcatgtn

SEQ ID NO: 4056 - protein, 100 aa, Homo sapiens
  misc_feature (24)..(24): Wherein Xaa may be any naturally occuring amino acid
  misc_feature (66)..(66): Wherein Xaa may be any naturally occuring amino acid
TGDHVLNTYPDIGRTMTVGEANRXAEDVVARFLEVGRIALRAGANESALVRMRLVLTRQGLNVSGXIIRVLVDCSGLPINYTLAFALIQLWLNQSSCVTW

SEQ ID NO: 4057 - DNA, 386 bp, Homo sapiens
ctgcagggttttgtggttggtgctcctcttgcccaccaggctgtgagcccccagggactagaaaaatgacaccctgtgcctagcactgggtctgacccacggcagatgctcaaagatgctggttgaatgagcaaatgaacaatcgtgacaaaaactgaaacaaggaacgcagggagaagacacagtcagcatgcataagacgccttgggaagagaccctcaggctcttctggaaatccataggccctgcaacatcagcaacaccgaggcccaaataaatgcagagagggaacagtcccacctgggagatgctgcaaaaatacgagcaattttgcaaaaattattgtgggaagaacatttaacatgagatctatcctcaacaaattt

SEQ ID NO: 4058 - protein, 60 aa, Homo sapiens
MDFQKSLRVSSQGVLCMLTVSSPCVPCFSFCHDCSFAHSTSIFEHLPWVRPSARHRVSFF

SEQ ID NO: 4059 - DNA, 315 bp, Homo sapiens
  misc_feature (315)..(315): Wherein n may be a, c, g or t
ccggctgccactacctttatttccaccactgatcataaaaaatattatgcatctgggtttcctttaggtttcatagatcctgatacagataaaacctatctgcataatcacgtaatgctggtaatacgttttcatgccagtgataatgataaaaataccatagtcggctttgaagtatatccaagatctgtgtcagattatcattgtcctggggcatcgaagaactacgaacaatacgaaatagtcattcctgaggatgaaaatgagttgacatatttgccatttaccccctccgtatattggagggaaccactn

SEQ ID NO: 4060 - protein, 105 aa, Homo sapiens
PAATTFISTTDHKKYYASGFPLGFIDPDTDKTYLHNHVMLVIRFHASDNDKNTIVGFEVYPRSVSDYHCPGASKNYEQYEIVIPEDENELTYLPFTPSVYWREPL

SEQ ID NO: 4061 - DNA, 266 bp, Homo sapiens
  misc_feature (116)..(116): Wherein n may be a, c, g or t
aaatttgatgacttcgaaccggaacttgccggtggcgttgggtgactaggaggtcgcgcggtcgcccaactggaaggcgtaggaggcgcgggcgaggaagctgccgttgcgcagcnaggtgagcgatgcaccgacagcctggcgcgtgaagcgattgtcgccaccgacccacggcgtgtggttcagccagacctggccataatcgtagaaccccgcgacctgcagccgaccgggcagccccttgaatcggatccagcatcacgcgt

SEQ ID NO: 4062 - protein, 86 aa, Homo sapiens
MLDPIQGAARSAAGRGVLRLWPGLAEPHAVGRWRQSLHAPGCRCIAHLAAQRQLPRPRLLRLPVGRPRDLLVTQRHRQVPVRSHQI

SEQ ID NO: 4063 - DNA, 390 bp, Homo sapiens
  misc_feature (390)..(390): Wherein n may be a, c, g or t
ttctctgctccatacacacctcagcagaatggcatcgccgagcgcaagaacataactcttattgagatggcccgaacgatgcttgatgagtacaagactccgcggaagttctggcctgaagccattgatactgcttgtcacaccatcaaccgcgtttatcttcacaaggttttggagaaaacctcttatgagttcctaactggtaagaaacccaatgtaagctatttcagagtatttggtgctaggtgctggatcaaggatcctcatcacacttcaaaatttgcaccgaaagcacatgaaggttttatgcttggttacggaaaggattcgcactcctacagagtcttcaacctctttcactataaagtggttcaaactgtggatgtgcgn

SEQ ID NO: 4064 - protein, 130 aa, Homo sapiens
FSAPYTPQQNGIAERKNITLIEMARTMLDEYKTPRKFWPEAIDTACHTINRVYLHKVLEKTSYEFLTGKKPNVSYFRVFGARCWIKDPHHTSKFAPKAHEGFMLGYGKDSHSYRVFNLFHYKVVQTVDVR

SEQ ID NO: 4065 - DNA, 261 bp, Homo sapiens
  misc_feature (1)..(1): Wherein n may be a, c, g or t
natagcacgcggcggccagggccatttccccgcgaccatgttcgtcatcatgctccggcgtccagccctcgaccgcgatctgccggcgccgctcggcgagcacatcagccagggcggaggacggctccggctcctgctcggtctgcgcggggcgggtgttccagcgagccacgtcgtccggctggtcgatgttgagcagcggcaactgtgcgcccttgcagttctctgtcgcgcaatgagcgtgcgggttgtagcgacgct

SEQ ID NO: 4066 - protein, 74 aa, Homo sapiens
MFVIMLRRPALDRDLPAPLGEHISQGGGRLRLLLGLRGAGVPASHVVRLVDVEQRQLCALAVLCRAMSVRVVAT

SEQ ID NO: 4067 - DNA, 393 bp, Homo sapiens
accggtgagttctacgtcccggttaaccacctcggaggtgaacaggcgcacctcgacgtcttcgattctccgcttaacgagtacgcagcgatgggatttgagtacggctactctgttgcccgtccggattctctggtattgtgggaagcccaattcggcgatttcaccaacggtgcccagacgatcatcgatgagttcatcgcctcggctggctccaagtggggtcagaagtcgggagtcgtgctgctgctgccgcacggttacgaaggtcaggggcctgatcactcgtcggcccgtctggagcgcttcctcaatctatgcagtgaagacgctttggccgtctgccagccctcgaccccggcaagctacagccatttattgcgtcagcacgcg

SEQ ID NO: 4068 - protein, 131 aa, Homo sapiens
TGEFYVPVNHLGGEQAHLDVFDSPLNEYAAMGFEYGYSVARPDSLVLWEAQFGDFTNGAQTIIDEFIASAGSKWGQKSGVVLLLPHGYEGQGPDHSSARLERFLNLCSEDALAVCQPSTPASYSHLLRQHA

SEQ ID NO: 4069 - DNA, 240 bp, Homo sapiens
tgatcatatgaaggctatcagggagaaatgcgatcgataccgagcctcgaaaatctggcgggcggcgattattcgcgccacgcatcccgaccgacgccgcaccggcatgccccatcgacagtttggtgatgagcgaaagggagttggcatcccaaatcctcacttcctgccgcagccccagagcgagccatttcccgttgggcgagagggccacggcctggcacgggccgtcctggacgg

SEQ ID NO: 4070 - protein, 77 aa, Homo sapiens
MKAIREKCDRYRASKIWRAAIIRATHPDRRRTGMPHRQFGDERKGVGIPNPHFLPQPQSEPFPVGREGHGLARAVLD

SEQ ID NO: 4071 - DNA, 360 bp, Homo sapiens
  misc_feature (1)..(1): Wherein n may be a, c, g or t
ncaccgcccatgtggggataaaaaccttatcctgttcgtctctaatgccccagcatccagcagggcagagagacgtacagagttacctgacaccttcctatccatcatcttactctcaatctgatacaaagaccaggctgaagacaaatcaacaaaatcaggccgaagctcctccgccgggtctttatttgactttggcactagcgggctcttctagcttaatctcccgccgcagcccaaatccaccgccgagccatcaagctcagagggggagcctgggaagacttccggaccatgggagagaacagtcctcgtcccctagctccaggcctgtacctcggagcccaggcaagggttcta

SEQ ID NO: 4072 - protein, 105 aa, Homo sapiens [sequence omitted]

SEQ ID NO: 4073 - DNA, 524 bp, Homo sapiens
gtgcactccgcatctttgaccagctgcgtggaaaatccgcgcctgaccaccggagggaacatgagtgctgatcgcgccacccgtcactaccagtacggcgggagccccgcaaactgggcaggttcgatcgtcgccctcatcggcttcatcgtggctaccgtcggtgcaatggccgggccaagttggactacctgcatcatgggtgccgccttagttgtactgggtggagtcgtcaccctggtgatgcgcgctatgggctacggcggcgctcgctgaatgccgcccactgttaccggaacggtccttgacggaatcatttcgggggttctcgaagatcttcatgagcgccaattcagggttccttgggacaatcttcgtgaggcccctgagttcgtggcccttgctatcgatccgatcccgaggctgacagcgcctggcctgtcggttatctcagaaatcaagcggtcgagcccgtcaaacggccagctggctgctattcatgaccctgccgcactggctgatca

SEQ ID NO: 4074 - protein, 82 aa, Homo sapiens
MPPTVTGTVLDGIISGVLEDLHERQFRVPWDNLREAPEFVALAIDPIPRLTAPGLSVISEIKRSSPSNGQLAAIHDPAALAD

SEQ ID NO: 4075 - DNA, 334 bp, Homo sapiens
gaattcgagggagaattgggggggatagtagaggatttgaagagggagggatagaaaggatataagtacaccattcaatatgacattctgaaacaaaaacaataaaaaattattctcctttctgtgcatctggtttctcatctgtgtgagggagaaggattatgtctaaaaattttttaattaaatacacatacacacaccgtgggtaagtcaggttctctttgataaagagtagtgggatgcacatgctggaagccttacatttaaattccatgctctagtgctgaggaccacagagcagagaagtgaaaggccatattcacaaaacagatct

SEQ ID NO: 4076 - protein, 54 aa, Homo sapiens
MEFKCKASSMCIPLLFIKENLTYPRCVYVYLIKKFLDIILLPHTDEKPDAQKGE

SEQ ID NO: 4077 - DNA, 269 bp, Homo sapiens
gccggcaccgacagcacggcgaaccctaccgtaatggccgcaacgatcgcaatcctcttccgcagtagcgcgaagagggcgatcgagagtccgtagaacacaccggtcagaatgatgatccaccaaagcgcagcgtagcctgcgccgccttcgaaattcgatacgttctgcgtgatccgggtcgcggcataaccagcgacggtcatgctcgcgggcaggcacagcaccgaatacagcacgaagacgatgatctgccgcggtgttgtcgg

SEQ ID NO: 4078 - protein, 68 aa, Homo sapiens
MTVAGYAATRITQNVSNFEGGAGYAALWWIIILTGVFYGLSIALFALLRKRIAIVAAITVGFAVLSVP

SEQ ID NO: 4079 - DNA, 354 bp, Homo sapiens
  misc_feature (343)..(343): Wherein n may be a, c, g or t
  misc_feature (344)..(344): Wherein n may be a, c, g or t
  misc_feature (350)..(350): Wherein n may be a, c, g or t
aaattttcccagttagaaccaggttctaattcagtaatgtgattgttatgtttctttaatatagaatacctttattcctcctccactttctcctctttttctccttttcttttcctctttctcctcctcttttttccccttcttcgtcctcttcattgttgtgagagattgtcctgtgcattgtaggatgcttagcaacatccctggcctggtctatgatagtgccttccctaacaaggtgtgataatccatactttctccatacattgccaagtgtctcatggggagcaaaattgcccttggctgagaaccactgcactagagatagtaccttattttttanncccccncccc

SEQ ID NO: 4080 - protein, 51 aa, Homo sapiens
MLLSILQCTGQSLTTMKRTKKGKKEEEKEEKKRRKRGESGGGIKVFYIKET

SEQ ID NO: 4081 - DNA, 373 bp, Homo sapiens
  misc_feature (1)..(1): Wherein n may be a, c, g or t
  misc_feature (59)..(59): Wherein n may be a, c, g or t
  misc_feature (189)..(189): Wherein n may be a, c, g or t
  misc_feature (197)..(197): Wherein n may be a, c, g or t
  misc_feature (284)..(284): Wherein n may be a, c, g or t
  misc_feature (355)..(355): Wherein n may be a, c, g or t
  misc_feature (356)..(356): Wherein n may be a, c, g or t
nttattgtgggatgggggtgttctggtcatcaccgttgttgttggcattcacatatatngtggacattgaggcttctccacttgccgcaccacacttccatgccttagaagaaggtcatatgaatgggcttatagctgtcacactttgcagcagaaatttctaagaacaaagggaaggtagcatccctnagtatgtnttcaaattaattctaactgtcaccaagggttcagttcctggctttatgacctgccttcccttggttggacttccccaatttctctcnccttcggtgcacgataaaggggtttcgggctacctcttcccagcagcacggcaggcatcagagcacagatnngacagtgcatcactgtc

SEQ ID NO: 4082 - protein, 50 aa, Homo sapiens
  misc_feature (16)..(16): Wherein Xaa may be any naturally occuring amino acid
MGVFWSSPLLLAFTYXVDIEASPLAAPHFHALEEGHMNGLIAVTLCSRNF

SEQ ID NO: 4083 - DNA, 218 bp, Homo sapiens
aagcttggcgcacaatctcggtgtgcgagcgcgccgccatgcctgtgttgataacccaaagcccccctcatcgattgccccgttgcggcaccggtcaaagcgccgaaccgcagcatggcgtcattggtttacgcctaacttggccgcacacgtgccaacaaaggcggggccagttcaatggcaggcaccaagcgacagaccctcgaatatcgacgcgt

SEQ ID NO: 4084 - protein, 60 aa, Homo sapiens
MPVLITQSPPHRLPRCGTGQSAEPQHGVIGLRLTWPHTCQQRRGQFNGRHQATDPRISTR

SEQ ID NO: 4085 - DNA, 288 bp, Homo sapiens
  misc_feature (55)..(55): Wherein n may be a, c, g or t
cggccggtgcggctgctgcgcggggtccagagcccgctcgccgagcccggggacntcgacctggtggtggtacgggagaacaccgagggcgagtactccgacgctgggggagggctccaccgggggacgccgcacgagatagccgtacaggagaccgtcttcacccggcgcggggtggagcggatcgtccgctacgcctacgaggaggcaaagaagcggcggggcaggctcaccggggccacgaagtccaacgggatcagcataaccatgccgttcttcgacgagatc

SEQ ID NO: 4086 - protein, 96 aa, Homo sapiens
  misc_feature (19)..(19): Wherein Xaa may be any naturally occuring amino acid
RPVRLLRGVQSPLAEPGDXDLVVVRENTEGEYSDAGGGLHRGTPHEIAVQETVFTRRGVERIVRYAYEEAKKRRGRLTGATKSNGISITMPFFDEI

SEQ ID NO: 4087 - DNA, 583 bp, Homo sapiens
tgtacaccttgatttaaaggtaacgtaacgtgatttaaagtaatgcaacatctgtgttcttcttctgctcttagtatgcacagttgcaaactggtattaacaggaaacaatggttggttcctggtcttctagactgcactggtgtgctctttgcttacgtgtgcctatgtggccttaattttatattggcagaaaggagaagagtgcatgtgtaagcagctcaaattactgggctcttaaaatgcatcattcctgtgttctaatcctacattagatggaattattccattccatcccactcttacaaccacatcctggaccttcttattttaaaatgctgtctatctctgaaatgctcaattgtgtaatctccatctctgaaaataaatcctgctaatcctcatgcatttgctcctattaccttcattcatttttgtcttgaggttttcagtcttttggcttcttccagatcgttcaggctctttacccaagccccgaacctccagtctcttatctccatctctcatgttgttatcctttctccttatccttctttcataaccacacaaggaccttaagatct

SEQ ID NO: 4088 - protein, 56 aa, Homo sapiens
MRDGDKRLEVRGLGKEPERSGRSQKTENLKTKMNEGNRSKCMRISRIYFQRWRLHN

SEQ ID NO: 4089 - DNA, 192 bp, Homo sapiens
  misc_feature (1)..(1): Wherein n may be a, c, g or t
  misc_feature (2)..(2): Wherein n may be a, c, g or t
nnggtaccacgcattcgtccagtccttgacactgttgctactgtcagttatgagttggatgatactgaatatggggaaaatgaggtgaacgatccatgggtgcagaagcttatacttacagttaacactaatgttgcttggctccagccagttatgacattaaacaactacgattcctttgtgcacttgatc

SEQ ID NO: 4090 - protein, 64 aa, Homo sapiens
  misc_feature (1)..(1): Wherein Xaa may be any naturally occuring amino acid
XVPRIRPVLDTVATVSYELDDTEYGENEVNDPWVQKLILTVNTNVAWLQPVMTLNNYDSFVHLI

SEQ ID NO: 4091 - DNA, 516 bp, Homo sapiens
gcgtcctcaatccgcaaagccatcagttatgagcaactttccctagctagtgtaggctcagttgaaaggttagagggcaaaattgttggcatgaatccacctcaattcgccagtataaatgagttcaaatattgcacattgaaattatattttacgcagctcttaccaaatgtcccagacaaggtcctggtgccaggcgtcaattgcattgagatcgttatcccgacgagagagcgaatctgtgagctcttcggtgttttaaactgtcaaagcgacaagatatcggatattttactactggaaaagcctgatcgaatttccgtcgaagttgaaaggatcctgtgggacaatgacaagaccgccagcccaggtatggcagtatggagtttgaagaacattagcaccgacacgcaggcgcaggcgcaggtgcaggtgcctgcgcaatcgtcggcgtcaatcgatccgtctcgaacatggatgagcaaaatggcaaggaaagaccccaccatcgaattc

SEQ ID NO: 4092 - protein, 172 aa, Homo sapiens
ASSIRKAISYEQLSLASVGSVERLEGKIVGMNPPQFASINEFKYCTLKLYFTQLLPNVPDKVLVPGVNCIEIVIPTRERICELFGVLNCQSDKISDILLLEKPDRISVEVERILWDNDKTASPGMAVWSLKNISTDTQAQAQVQVPAQSSASIDPSRTWMSKMARKDPTIEF

SEQ ID NO: 4093 - DNA, 225 bp, Homo sapiens
  misc_feature (139)..(139): Wherein n may be a, c, g or t
  misc_feature (140)..(140): Wherein n may be a, c, g or t
  misc_feature (225)..(225): Wherein n may be a, c, g or t
ttcgaccccattcctatccatccatcctcccattcatccacccatctacccactcattcacctacccatccacccctccacctgcctatccatccattcatctatccatccacccaccactcatccctcccgacttcanntccatctacccatccacccagctgcccatccactcaccaatgcattcatccactcagacatctatttatccatccactcagacan

SEQ ID NO: 4094 - protein, 75 aa, Homo sapiens
  misc_feature (47)..(47): Wherein Xaa may be any naturally occuring amino acid
  misc_feature (75)..(75): Wherein Xaa may be any naturally occuring amino acid
FDPIPIHPSSHSSTHLPTHSPTHPPLHLPIHPFIYPSTHHSSLPTSXPSTHPPSCPSTHQCIHPLRHLFIHPLRX

SEQ ID NO: 4095 - DNA, 479 bp, Homo sapiens
tctagacctgcaatctattcagattctctattttgaggaacaaatatattcacatctgatctacctcttacatttttagtcttgtgagaccaattcattcatttactcattcactgatttaaaaaaacaatgagtttccattatgccccatggtctgtcttaagtgctgaagacaaaaatgaaaaaggcatggtgcctgccttcaagtagatgagaatttagctggagagacaaacagaagcatatggtaataaaacaatgtgataagcaccgtgatagaaatacactttgggaacataaacaaggagccgctaaccctggcttgggtgaagcgtggctcaggaaggattccaggctgcaataacctctgactgagcctaaaaccctgaggaggcagggttcactcatcttgagggcatgggcattcctagcagagggggtaacatgagaagggaggggagtgagccctggccacgtta

SEQ ID NO: 4096 - protein, 82 aa, Homo sapiens [sequence omitted]

SEQ ID NO: 4097 - DNA, 324 bp, Homo sapiens
cggccgaactggccgcgcagctgtccgaggtcctgatgcatcccgaaaccctgcgctccatggcagaccaggcacgcagcctggcgaaacccgaggctacccggacggtggtcgatgcatgcctggaggtggcccgtggttaaagaaacgaatggcgtcacccggaccatgcgccgtatccgccgtatccatttcgtcggcatcggcggcgccggcatgtgcgggatcgccgaagtgctgctgaacctcggctacgaggtatccggctcggacctcaaggcctcggcggtgaccgagcgcctggagaagttcggcgcgaatatc

SEQ ID NO: 4098 - protein, 70 aa, Homo sapiens
MHAWRWPVVKETNGVTRTMRRIRRIHFVGIGGAGMCGIAEVLLNLGYEVSGSDLKASAVTERLEKFGANI

SEQ ID NO: 4099 - DNA, 378 bp, Homo sapiens
acgcgtatctggagagccctgcaggcagccccctccagggcccctgcaatccctttctgatgtttcgcaggcccagaagaaggtgcttttcctcttcttctttccttagctaatcctgaccttgctcgagcaatctctctctttctcacctcctgcccctcagtcttctccatctttccctccagccccgaggcattgcaatcattagcactactagacttgttctatttttatttctagtttgcttctaatataagttattagcactattcttattattagctcttcttaaataataatgtcagagttcttaccggcgcagtacaggggaaacgtgaaaaaacataggccctgccctccaggagcttccagtctaga

SEQ ID NO: 4100 - protein, 57 aa, Homo sapiens
MEKTEGQEVRKREIARARSGLAKERRRGKAPSSGPAKHQKGIAGALEGAACRALQIR

SEQ ID NO: 4101 - DNA, 198 bp, Homo sapiens
  misc_feature (1)..(1): Wherein n may be a, c, g or t
  misc_feature (2)..(2): Wherein n may be a, c, g or t
  misc_feature (3)..(3): Wherein n may be a, c, g or t
  misc_feature (61)..(61): Wherein n may be a, c, g or t
  misc_feature (62)..(62): Wherein n may be a, c, g or t
nnngcacaccacacaacacacacacaccacacgcaccacacaccccacacaacacacaacnnacatcacggacaccacacacaccacacaacacacacatcacatacgcaccacacaccacacacaacacatacacatcacacccacaccacacaccacacacaacacacacaacacaacacacacaccctggcgcgc

SEQ ID NO: 4102 - protein, 66 aa, Homo sapiens
  misc_feature (1)..(1): Wherein Xaa may be any naturally occuring amino acid
  misc_feature (21)..(21): Wherein Xaa may be any naturally occuring amino acid
XAHHTTHTHHTHHTPHTTHNXHHGHHTHHTTHTSHTHHTPHTTHTHHTHTTHHTQHTQHNTHTLAR

SEQ ID NO: 4103 - DNA, 587 bp, Homo sapiens
  misc_feature (1)..(1): Wherein n may be a, c, g or t
  misc_feature (523)..(523): Wherein n may be a, c, g or t
naccggtcacatctccattcttgacggcgaggatcaggtcctgttcacgacccatactggctcctgggctgagctctacactcaggagtccagggcaaaggcaggcaacgggtccaagcttgggccgtcaaggcccccatcccacaaccccttggagggctcccggttccgggggagcaagtctggtgtcccaggcagtgggctcctcgtcaggtactgagggatactcccaaaggtgctccgtgaactgccaccacacgaaggaaagctaatctttgagggggtgaaggctacatggaaatctggatggatatcagcttgtggcttccgacagctccaggatgggctgggactgggcacaccaatcttcccggcttggctgtggaacaccagtgcccacccagagagcagccagcattcccttgggcctcaggcagcagcggtgcactggtctcagggctctctcccggccgcccgccggggtccggctggccctgctcggtccctggcactcaggacggtnggctcccactcccccctgcccccctttctccttctccttttccaaggccggctcggcgcctccc

SEQ ID NO: 4104 - protein, 97 aa, Homo sapiens
  misc_feature (77)..(77): Wherein Xaa may be any naturally occuring amino acid
MEIWMDISLWLPTAPGWAGTGHTNLPGLAVEHQCPPREQPAFPWASGSSGALVSGLSPGRPPGSGWPCSVPGTQDGXLPLPPAPLSPSPFPRPARRL

SEQ ID NO: 4105 - DNA, 495 bp, Homo sapiens
actagtaaggggagccatcaccagggcctatgatccaaccccataccgggatggatgcccttatgatgatgggcgtgatccatagccgatgttggctagaagcagtatcagttgaagctatggagcacccttcaagtttcagatcgatattgagttccatatccacagatattccagatgtagagacagatccaaagctatttgatcgagatcgagtagctatagcagatccatttagagatcgggaaccccgttcagggtacacccattttagtagcaactgaccctaagccggtaggtctcgttcaaaagccactttagttgacgtgtcccaatcaatgtgctcggtaatgataatgatgttgtcatcgctgatgcgcaagttgctgaagtttattttcagtgtcttcagccaatttcaactcaaaaatatctgatttctgacacaggtgcatttgagtttgctaagcgcttttgcgtcaagggtggacgcgt

SEQ ID NO: 4106 - protein, 84 aa, Homo sapiens
MIQPHTGMDALMMMGVIHSRCWLEAVSVEAMEHPSSFRSILSSISTDIPDVETDPKLFDRDRVAIADPFRDREPRSGYTHFSSN

SEQ ID NO: 4107 - DNA, 267 bp, Homo sapiens
ggatcccagacgagtgctggcagcagtatgggggccgtgggggcgacggccaccgtcagcaccccggtcaccatccagaacatgacctcctcttatgtcaccatcacatcccatgtccttaaggcctttaccctttgggaacaggcagaggccctcacaaggaagaacaaagaattctttgctcagctcagcacaaaagtgcgcgtgttggccctcaacagcagcctggtggacctggtgcactacacaaggcagggcctccagcgg

SEQ ID NO: 4108 - protein, 89 aa, Homo sapiens
GSQTSAGSSMGAVGATATVSTPVTIQNMTSSYVTITSHVLKAFTLWEQAEALTRKNKEFFAQLSTKVRVLALNSSLVDLVHYTRQGLQR

SEQ ID NO: 4109 - DNA, 423 bp, Homo sapiens
cgcgttccaattgacggcaaacaagaggtcagatactataatccgatcagttctaaactagaaagtggatacttggatttggtggtgaaagcatacgttgatggtaaagtctccaaatatttcgctggcttaaattctggtgacaccgtggatttcaaggggccaataggtactttgaactacgaaccaaattcctccaagcatttaggtatcgtagccggtggttctggtatcacgccagtcctacagatcttgaatgaaatcatcaccgttcctgaagatttgacgaaagtctccctgctatatgccaatgagactgaaaatgacattctattgaaggacgaactggatgagatggccgaaaaatacccacatttccaggtccattacgtggtacactatccatccgacagatggaccggt

SEQ ID NO: 4110 - protein, 141 aa, Homo sapiens
RVPIDGKQEVRYYNPISSKLESGYLDLVVKAYVDGKVSKYFAGLNSGDTVDFKGPIGTLNYEPNSSKHLGIVAGGSGITPVLQILNEIITVPEDLTKVSLLYANETENDILLKDELDEMAEKYPHFQVHYVVHYPSDRWTG

SEQ ID NO: 4111 - DNA, 297 bp, Homo sapiens
gatccatataaaattgaacaagatagtacattattaaaattatctttcaatcctacagaaaatcatcgttttacctttgccgctgatttatatgaacatcgttctcgtgggcaagatttatcctatacattaaaatatcaacgtagtggtaatgaaacccctgaagttgattctagacacaccaatgataaaacaaagagacgtaatatttcatttagttatgaaaatttctctcaaactccattttgggatacgctaaaactcacttattctgatcaacgtattaaaactcgtgca

SEQ ID NO: 4112 - protein, 99 aa, Homo sapiens
DPYKIEQDSTLLKLSFNPTENHRFTFAADLYEHRSRGQDLSYTLKYQRSGNETPEVDSRHTNDKTKRRNISFSYENFSQTPFWDTLKLTYSDQRIKTRA

SEQ ID NO: 4113 - DNA, 158 bp, Homo sapiens
atgagctctgcgaccgcattccagaggataaccaacaaggtttttgccaacccagaagactgcgctggctttggcaaggtagagaatgccaagaaatttgttcgcactgacgagaaggtggaacgcgtgcgccgagcccacctgaatgaatttggaaa

SEQ ID NO: 4114 - protein, 52 aa, Homo sapiens
MSSATAFQRITNKVFANPEDCAGFGKVENAKKFVRTDEKVERVRRAHLNEFG

SEQ ID NO: 4115 - DNA, 294 bp, Homo sapiens
gtgcacctgctgttgtggggggaatggctgggagccttggaacctcagactgagctagcatgtgggggtcacgcccgcacccacggggcatgcatgccaggcacacccgacgggtgagcagagcctggagccccgggcaggcagggcccaaggttccagaagaggcagtgtgggtggagagagtggaggcctcgccttaccccgtggggatcacaccccatggccacccaccgtggggcccctggactccacacagtcctggcctcatcaggggtggggattgctaactgtggg

SEQ ID NO: 4116 - protein, 75 aa, Homo sapiens
MWGSRPHPRGMHARHTRRVSRAWSPGQAGPKVPEEAVWVERVEASPYPVGITPHGHPPWGPWTPHSPGLIRGGDC

SEQ ID NO: 4117 - DNA, 376 bp, Homo sapiens
  misc_feature (1)..(1): Wherein n may be a, c, g or t
  misc_feature (2)..(2): Wherein n may be a, c, g or t
  misc_feature (40)..(40): Wherein n may be a, c, g or t
  misc_feature (41)..(41): Wherein n may be a, c, g or t
  misc_feature (148)..(148): Wherein n may be a, c, g or t
nnacgcgtgaagggcacaataagccaacttgatttaacannggcacacagaacactgtacctaacaacaacagaatacacatccttcccaagtacacatgggacattttccaggaaaggcggtaagttaggctaccaattaggcctangattcaaaaacatagatatcatacaaagcatattctccaaaaactaatttccagccagttaatggagggagccagaaaacttgcgagaattgttttcctttctgtcccctttataatagaaagctctacacctttaaaatgacaaggtagtaaatgaggggtagaagttaaaggggatttaaaatacaaatgtggttgggtgcggtggcttacgcctgtagtctcagc

SEQ ID NO: 4118 - protein, 64 aa, Homo sapiens
  misc_feature (1)..(1): Wherein Xaa may be any naturally occuring amino acid
  misc_feature (14)..(14): Wherein Xaa may be any naturally occuring amino acid
  misc_feature (50)..(50): Wherein Xaa may be any naturally occuring amino acid
XRVKGTISQLDLTXAHRTLYLTTTEYTSFPSTHGTFSRKGGKLGYQLGLXFKNIDIIQSIFSKN

SEQ ID NO: 4119 - DNA, 186 bp, Homo sapiens
gccggctacaagcctattcgaataatgttctactacccccatagaacgcaggcaattcggatacaagaaactcttgagaccctgtacaatggagttcatggtgagtatcactacggcgaagcagcctgggactacgtcttgcaacgcacctctgtaaacctcaaagtagcactggaacaaattgct

SEQ ID NO: 4120 - protein, 62 aa, Homo sapiens
AGYKPIRIMFYYPHRTQAIRIQETLETLYNGVHGEYHYGEAAWDYVLQRTSVNLKVALEQIA

SEQ ID NO: 4121 - DNA, 279 bp, Homo sapiens
gctttgtcagtttctcctaacgattctatttttgcaacagcgtcatacgacaagacctgtaagatctggaacctagaaaatggtgaattggaagccacgttggccaaccacaagcgtggactatgggatgtatcattttgccaatatgataaattattggcaacctcttcaggtgataaaacagtcaagatatggtcattggatacattcagcgttatgaaaacattggaaggtcataccaatgcgggtcaaagatgttcggttattaataagccaaaa

SEQ ID NO: 4122 - protein, 93 aa, Homo sapiens
ALSVSPNDSIFATASYDKTCKIWNLENGELEATLANHKRGLWDVSFCQYDKLLATSSGDKTVKIWSLDTFSVMKTLEGHTNAGQRCSVINKPK

SEQ ID NO: 4123 - DNA, 292 bp, Homo sapiens
acgcgttggcgttgttcggcggcattcgcatcacgaaggatgtcggcgctcgcctcgatgaggcgctggaacgagggttggccgtcggtgtgctcaatcagttgtcatcgggaatcgttgtggtcggaactgcatgagcgcagccgacttcgacgactcgttgttcgaccaggtgtcggaggtggtcggccccggcaccgcgatcctgacgctgtcgaccaagaaactcaacagagtgaccgcagtggaggacaagggtgtgtgggtggagaccgaatgctcggtgagcttc

SEQ ID NO: 4124 - protein, 84 aa, Homo sapiens
MSALASMRRWNEGWPSVCSISCHRESLWSELHERSRLRRLVVRPGVGGGRPRHRDPDAVDQETQQSDRSGGQGCVGGDRMLGEL

SEQ ID NO: 4125 - DNA, 300 bp, Homo sapiens
  misc_feature (1)..(1): Wherein n may be a, c, g or t
  misc_feature (2)..(2): Wherein n may be a, c, g or t
nnatcccgggagccacactggaaaaatgtgccgaagcctttgcagaaggccttgcgtgaagcggcagtcgctggggaccgcgaagccgctaaccgcgcgacctatcaactttacggattgaacgaggccgagcgagacattgtcgctacggtctgaggggaacgaacatggcattggatctagccgaatacgaccgcttggcgcgattgggcgttgcgcagttttgggatggcaggagtagcgcgctcgaaaacgatgaagagcgtagtcagggcggtgagcgatctggcgtcctgggtg

SEQ ID NO: 4126 - protein, 51 aa, Homo sapiens
  misc_feature (1)..(1): Wherein Xaa may be any naturally occuring amino acid
XSREPHWKNVPKPLQKALREAAVAGDREAANRATYQLYGLNEAERDIVATV

SEQ ID NO: 4127 - DNA, 351 bp, Homo sapiens
  misc_feature (1)..(1): Wherein n may be a, c, g or t
  misc_feature (2)..(2): Wherein n may be a, c, g or t
  misc_feature (124)..(124): Wherein n may be a, c, g or t
nnagagtcataaaactggaagggaccttagagactcactacacatcttcagcagatgtcccagacagattgaaaaaggctgaagcaggaaagatttagtgtagacattttaaatccaaaggatntgattagtgtccagctggaagacactacctcttgcaaaactttttgcagcctatcttgtctttcatcatatgaagaaaaaagaaaaccatttgttaccatatgtactaatagcattttgaccaagtgcagcatgtgccagaagactgctattattcagtatgaagtaaaataccaaaatgtgaaacataatctttgcagtaatgcctgcctttcaaagtttcactct

SEQ ID NO: 4128 - protein, 93 aa, Homo sapiens
  misc_feature (18)..(18): Wherein Xaa may be any naturally occuring amino acid
KRLKQERFSVDILNPKDXISVQLEDTTSCKTFCSLSCLSSYEEKRKPFVTICTNSILTKCSMCQKTAIIQYEVKYQNVKHNLCSNACLSKFHS

SEQ ID NO: 4129 - DNA, 372 bp, Homo sapiens
gcttgtattcccaaaatcttagaaggaagagattgtattggtggtgccaagactggttctggtaaaactattgcatttgcagggcctatgctgactaaatggtccgaagatccgtcagggatgtttggagtggtcttgaccccaaccagagagttagccatgcaaattgccgaacaatttactgcacttggtagcagtatgaacattcgcgtgtcagttatagttggtggtgaaagcatcgttcagcaggcattggatttacaaaggaagccgcactttattattgccacgcctggacgtctggcacatcatatcatgagcagcggagatgataccgttggagggctaatgagagctaaatatttagttcta

SEQ ID NO: 4130 - protein, 124 aa, Homo sapiens
ACIPKILEGRDCIGGAKTGSGKTIAFAGPMLTKWSEDPSGMFGVVLTPTRELAMQIAEQFTALGSSMNIRVSVIVGGESIVQQALDLQRKPHFIIATPGRLAHHIMSSGDDTVGGLMRAKYLVL

SEQ ID NO: 4131 - DNA, 306 bp, Homo sapiens
gtgcaccaagcagtagatggcaccggtgaagattccatcgcaaacaagagggataaatcttcaagaccagcggcgaacagtggaggctccataacgatagaacaatttttatttaataagaatgccgataaacaaggactatccaaaacagagtctgtaactatgaagagggagcctgtggtggatcaaatggactcaaaaaaggggcacgattttacccattgtaacgacaacggccgccggtcttttagtggcttttctcaaggttcgatagaaaatgattatagtaatgaagttacaaatgat

SEQ ID NO: 4132 - protein, 102 aa, Homo sapiens
VHQAVDGTGEDSIANKRDKSSRPAANSGGSITIEQFLFNKNADKQGLSKTESVTMKREPVVDQMDSKKGHDFTHCNDNGRRSFSGFSQGSIENDYSNEVTND

SEQ ID NO: 4133 - DNA, 293 bp, Homo sapiens
  misc_feature (1)..(1): Wherein n may be a, c, g or t
  misc_feature (286)..(286): Wherein n may be a, c, g or t
  misc_feature (289)..(289): Wherein n may be a, c, g or t
naacctattcaaggggtgaccagggacccgaacctacaccaccgccgacatcatccaagccgcccaatggatctggaacggaggcccatggaaacccagtgtcgaaccaggaatgccaccaccaccaaccgcgccacaacaccacggcaacaacattgttaccatgatcgatctacagctagccatcgacgactacaccctcacctgccagccatcccaacagcgaaaacacttcggccgactagccgcattccgggaagtctatggatatgaccaaacatatggnccncccc

SEQ ID NO: 4134 - protein, 68 aa, Homo sapiens
MDLERRPMETQCRTRNATTTNRATTPRQQHCYHDRSTASHRRLHPHLPAIPTAKTLRPTSRIPGSLWI

SEQ ID NO: 4135 - DNA, 388 bp, Homo sapiens
  misc_feature (1)..(1): Wherein n may be a, c, g or t
  misc_feature (62)..(62): Wherein n may be a, c, g or t
nagcatcaccatcctttcgatttcataaccaccgtcttcacttctctgttaaactatgtagncatatactttcccctttgaaatccgcttttcaaataaatcatcatcaaaacccgttctccatcctatacctgtcttttttcatctttccttcccttatttataggaaaatatggtaaaatagaacagactaaaaatcatcatttcacgaaaggatgcaagatgaaaattacgcaagaagaggtaacacacgttgccaatctttcaaaattaaaattctctgaagaagaaactgctgcctttgcgactaccttgtctaagattgttgacatggttgaattgctgggcgaagtcgacacaactggtgtcgcacctactacaaccatgg

SEQ ID NO: 4136 - protein, 55 aa, Homo sapiens
MKITQEEVTHVANLSKLKFSEEETAAFATTLSKIVDMVELLGEVDTTGVAPTTTM

SEQ ID NO: 4137 - DNA, 373 bp, Homo sapiens
  misc_feature (1)..(1): Wherein n may be a, c, g or t
  misc_feature (143)..(143): Wherein n may be a, c, g or t
nggggaggggaaacccagtccatatctcggtcaccatgcccaggtgtggggcttcacctgcccagagggaagaggaggttcactctttgctcaaaggcacctgcagggctgctcccctcacaaagtcccaacatggaactgtngggagtcctggcctgcccttgcatgctgcaaatccccaagaactgcaatttaatttcatttcttaaatattttaaactaaatttaaaagtatactccccaaaatgcacttaagggaagaccatcagaccgaattatcttgtttggggacagagacatcttagaataaagcttcttgcaatctctaagcatatatctgaactcactgtcaatgtgttatttactttgatca

SEQ ID NO: 4138 - protein, 57 aa, Homo sapiens
MPRCGASPAQREEEVHSLLKGTCRAAPLTKSQHGTVGSPGLPLHAANPQELQFNFIS

SEQ ID NO: 4139 - DNA, 318 bp, Homo sapiens
tcgaccgccgaggagcgtctcggttggcacgcccggtccttgccgtccgatgacttgtgcgtggagaacgccatcatgctcaagcgctcggaccggtatcctctcgtcatcgacccctcggggcaagcgaccaagttccttctcgaggaataccgggaccgcaagctcgccgtcacgtcgttcctggacgaggcattcctcaagaacctcgaatcggcgctgcgcttcggcacccctttgctgattcaggatgtcgagcatctggaccccatcctcaacgcggggttgaacaaagagctgcgccgcgccggtggtcga

SEQ ID NO: 4140 - protein, 106 aa, Homo sapiens
STAEERLGWHARSLPSDDLCVENAIMLKRSDRYPLVIDPSGQATKFLLEEYRDRKLAVTSFLDEAFLKNLESALRFGTPLLIQDVEHLDPILNAGLNKELRRAGGR

SEQ ID NO: 4141 - DNA, 500 bp, Homo sapiens
ggcaactgggaggcccaaaatctctgcttctctccggctccggtgcggcgggcggcggggcttgtccaacatccctcacctccctcagttggacatttcccttccacgctcggatgcccagccgcgcctgttttcttgcatccctcctgtcgtgtctgcggggctgccctgaaggcctctttccctccagggaagaaagggatccaaagctaggggtgaaaatagggccagcagtatctagcagactggtcctggccaggagaaggggttaagggagccactcattcttcgcctgggtacacttcaaagaggggaaccagatcctacgggaagctaggtgccagaactcctgcctttccaagacgagctcatccccatcatcaccatacccaggaatacttgttcatagccagctcagaggtgcaccatactttagcttcccacggccttcactcgttttctcctgtgggtgaattctaactaggctcccctgtcaccaa

SEQ ID NO: 4142 - protein, 52 aa, Homo sapiens
MPSRACFLASLLSCLRGCPEGLFPSREERDPKLGVKIGPAVSSRLVLARRRG

SEQ ID NO: 4143 - DNA, 315 bp, Homo sapiens
aagcttgatattcatccagacctttggttcttccagtgccactttcctggtgatccagttatgcctggctgcttaggtttggatgctatgtggcaactagttggcttcttccttggctggaaaggcaacaaaggccgcggtcgcgcgttggggtctggtgatgtaaaattcacaggtcagattcttccaaccgcaaagaaagttacctttcatattcatcttaagcgcgttattgagcgcaagctgattatggggattgcagacggaagcgtatcagttgatggccgagaaatttacactgcgcaagatttacgc

SEQ ID NO: 4144 - protein, 105 aa, Homo sapiens
KLDIHPDLWFFQCHFPGDPVMPGCLGLDAMWQLVGFFLGWKGNKGRGRALGSGDVKFTGQILPTAKKVTFHIHLKRVIERKLIMGIADGSVSVDGREIYTAQDLR

SEQ ID NO: 4145 - DNA, 345 bp, Homo sapiens
  misc_feature (1)..(1): Wherein n may be a, c, g or t
naacttcttgcactcactcaggcgcacggttggcggccgacttggaagccgctgcagcacttgacgcggggcgatctcgaagcgttcggtcttggcctgacggtcgatggctgcggcgtgccgttgatcgcgcgaatgcgacgggtggggcagggcgtgcggccgacaccaccgcaagaacgcaactcacggcagatgaatctgttttgaaacgcaaggaagggtaatgacaggcaccgacaagaagcggatcccgcagctgctgcgtgttgagctcactgaacttaccggcccgatcgagcagccttacgcgcccgatgcacgtcattctttcgggccacgcgt

SEQ ID NO: 4146 - protein, 104 aa, Homo sapiens
MTCIGRVRLLDRAGKFSELNTQQLRDPLLVGACHYPSLRFKTDSSAVSCVLAVVSAARPAPPVAFARSTARRSHRPSGQDRTLRDRPASSAAAASKSAANRAPE

SEQ ID NO: 4147 - DNA, 308 bp, Homo sapiens
agatcttagcctctatgaactcttcccccattccaaggaatgggagcccttgccacattcctccctgtctctgctgcctgtggccagatgacctggtgggtctttccttccagaaacctctctccaggaaatccctgaccttgagaccctctttcagcacctcttctttctcagcagcatccttggagctatgctcatctctgccacagggcctttccttgggcacacccacctactaaagcatcctggcagcctagcctgttaccttagcaacggcagcaaaggaaggcagagcggcactgggtacc

SEQ ID NO: 4148 - protein, 74 aa, Homo sapiens
MNSSPIPRNGSPCHIPPCLCCLWPDDLVGLSFQKPLSRKSLTLRPSFSTSSFSAASLELCSSLPQGLSLGTPTY

SEQ ID NO: 4149 - DNA, 294 bp, Homo sapiens
  misc_feature (294)..(294): Wherein n may be a, c, g or t
gtcgactacgtggccaacatttctaatactctgttgagggagttcctgatcaagccattgcacttgcaaggttctaccgcatcgaaggagatcggctcttccggtgaggagaacaaggtcactgatgcttcttctttgccccacgtggcagagttgtcttcaacgaccagaggtatgtcgcaggagatccagtccaaggtcaagtcgaactatatcgacccaaccaaggacctggctaaagaaaagtacgacgccatagtgaagcccacaactgacaagttgcagtctgtgtan

SEQ ID NO: 4150 - protein, 98 aa, Homo sapiens
  misc_feature (98)..(98): Wherein Xaa may be any naturally occuring amino acid
VDYVANISNTLLREFLIKPLHLQGSTASKEIGSSGEENKVTDASSLPHVAELSSTTRGMSQEIQSKVKSNYIDPTKDLAKEKYDAIVKPTTDKLQSVX

SEQ ID NO: 4151 - DNA, 421 bp, Homo sapiens
accggtgtgtccctggggtggatcactttgaccaaggcgggccgggatgatcccgatctctgcttcgaagaatggccctggcaggtggcacaaccgattggtgaaacgatggcccgacgcgctcaggctgtcacctgggcgtgtctcagtgacgagggcctgcttgctcgacgttggcgcatcgcccccaacgttgacagcgaaactgccggacaccccggtgctaccgaccctgagcacatcgtgctgcgtcagcgtcgcgggctgtgccgggctgtcgagatgacgacggcttctggcggagtattgggtgcttgcgacggtgaactcaccttggcacagatcaccgatgccgtctctgcgattcttgaggttgaccatgacgccttgctcatcgaggtgctggctctggttcgcgagt

SEQ ID NO: 4152 - protein, 140 aa, Homo sapiens
TGVSLGWITLTKAGRDDPDLCFEEWPWQVAQPIGETMARRAQAVTWACLSDEGLLARRWRIAPNVDSETAGHPGATDPEHIVLRQRRGLCRAVEMTTASGGVLGACDGELTLAQITDAVSAILEVDHDALLIEVLALVRE

SEQ ID NO: 4153 - DNA, 207 bp, Homo sapiens
atgcggaaaggtaagaattcattagctttcagggttttctatcaggctatgaatcggatagctgatgctacccaacaagacccagtaaaggtaattgaacaggcagttcgtaatgccacgcccctagttgaggttaaggcccggcgtgttcgcgggtcaacctatcaggtccctttagctgtacgctcagaacgaggtaccgcgcta

SEQ ID NO: 4154 - protein, 69 aa, Homo sapiens
MRKGKNSLAFRVFYQAMNRIADATQQDPVKVIEQAVRNATPLVEVKARRVRGSTYQVPLAVRSERGTAL

SEQ ID NO: 4155 - DNA, 334 bp, Homo sapiens
agatctggccatgccacacctctgtcctaagcccttcaattgcttctggctatcttcccataacattgagctcctcattgggcctacagaggcaggtgaggtccaggcccctgctttcgcttcaacttcactggcttgccaacccacaccccttggcgtctgaaccctaacaagctggtcagctcgctgtcgcacctcaccacctttggctgggcagtgcccttcctttgccaagaatgcccttgctgtccctgcctgttctttgagtgtctgaagagccgccctgcacttcccaccgcctctgccccattggtggggtgccgattacatttta

SEQ ID NO: 4156 - protein, 50 aa, Homo sapiens [sequence omitted]

SEQ ID NO: 4157 - DNA, 344 bp, Homo sapiens
  misc_feature (1)..(1): Wherein n may be a, c, g or t
  misc_feature (2)..(2): Wherein n may be a, c, g or t
nngctagcaggttgctgatgttgttatccagtgactaccaacagaccacgatgccctatatgcgctgggcaaatgaagaaaaacggcactacatctaaaggcaaaaccagatggcgatgcacaaacccctcctgtggcagctccttaacacgccaccgagccgataagacccaaacccgagattttcaagctttctaccgctacgcagtatcgacaacttcgctcacgcagctcgctgggcaattagatgtcagtagatggaccctcaaccgccgcttcgcacccttttggcttattgacatcccccaacaccccagaccccaaccgcatctacgaccagatct

SEQ ID NO: 4158 - protein, 108 aa, Homo sapiens
CCYPVTTNRPRCPICAGQMKKNGTTSKGKTRWRCTNPSCGSSLTRHRADKTQTRDFQAFYRYAVSTTSLTQLAGQLDVSRWTLNRRFAPFWLIDIPQHPRPQPHLRPD

SEQ ID NO: 4159 - DNA, 378 bp, Homo sapiens
  misc_feature (178)..(178): Wherein n may be a, c, g or t
acgcgttctcgggcgagggcatcgcagatttcgaatgcacggtgatggcggtgtgccgcatcccctttgaatacgtggtgctgtcaccgccgcgggaatcaagaaccgcacgttgcgcaaatcgctgcgctacgcaccaacgtggtcggcaagatgttggtcagcggcgagccccgcnaatgattcatatctccgatatcagcacgacaggggcgtcattccgctctgcacatcggcttggaagtcagcggtgcgcccgcacgcctgcgatttcgggtgaagacgcgcgactaccattcagaactggtggccgcaacactcattcgcagcgagaagcccgccgatttgcccaacacctatcaatacggcgtggaattc

SEQ ID NO: 4160 - protein, 111 aa, Homo sapiens
  misc_feature (45)..(45): Wherein Xaa may be any naturally occuring amino acid
MAVCRIPFEYVVLSPPRESRTARCANRCATHQRGRQDVGQRRAPXMIHISDISTTGASFRSAHRLGSQRCARTPAISGEDARLPFRTGGRNTHSQREARRFAQHLSIRRGI

SEQ ID NO: 4161 - DNA, 291 bp, Homo sapiens
  misc_feature (1)..(1): Wherein n may be a, c, g or t
  misc_feature (2)..(2): Wherein n may be a, c, g or t
nntctagacctggcctccatgctcacgtccttcatggtgggactgtattacaacaccatcatctcctggatcatgtggtacttattcaactccttccaggagcctctgccctggagcgactgcccgctcaacgagaaccagacagggtatgtggacgagtgcgccaggagctcccctgtggactacttctggtaccgagagacgctcaacatctccacgtccatcagcgactcgggctccatccagtggtggatgctgctgtgcctggcctgcgcatggagcgtcctgtac

SEQ ID NO: 4162 - protein, 97 aa, Homo sapiens
  misc_feature (1)..(1): Wherein Xaa may be any naturally occuring amino acid
XLDLASMLTSFMVGLYYNTIISWIMWYLFNSFQEPLPWSDCPLNENQTGYVDECARSSPVDYFWYRETLNISTSISDSGSIQWWMLLCLACAWSVLY

SEQ ID NO: 4163 - DNA, 486 bp, Homo sapiens
ggcgccagcctgttgacttatcaacaacgtaaaggtagaagactatctgcggcctctttgttacaatctcaattttttgattccatgtcgccagttaggccggattccaaacagctcctattatcaccggggaagcaatttagacaaatagctaaagttccctatagagttttagatgccccatcattagcagacgatttttactacagcttgatagattggtcaagtactgatgttttggcagttgctcttggaaaatcgatttttttaaccgataataacactggcgacgttgttcacttatgcgacacggaaaacgaatacacaagcttaagctggattggagcaggctctcatctggcagtaggtcaagcaaatggacttgtagaaatttatgacgtaatgaaaagaaaatgtattaggacgttgtcgggacatattgacagagtagcgtgtttatcttggaataatcatgttttgacgtca

SEQ ID NO: 4164 - protein, 162 aa, Homo sapiens
GASLLTYQQRKGRRLSAASLLQSQFFDSMSPVRPDSKQLLLSPGKQFRQIAKVPYRVLDAPSLADDFYYSLIDWSSTDVLAVALGKSIFLTDNNTGDVVHLCDTENEYTSLSWIGAGSHLAVGQANGLVEIYDVMKRKCIRTLSGHIDRVACLSWNNHVLTS

SEQ ID NO: 4165 - DNA, 281 bp, Homo sapiens
ccatggaggagccagaagtcccagagaccaaggtgctgctctgtcctcactggtccagcccctgccgccatgctcagatgtccagtcactagtggatcctgagacatagggcagaccacagaccccagtgtccgcctctgggaaaatgctcagcagattatccatgaagaaataatcctgacttaaactggaagaagaacaaatagcttgttctgtgacagaaattggtggcagccaagggctggaaggggtttatttggtgagcaaccaccccagctagc

SEQ ID NO: 4166 - protein, 55 aa, Homo sapiens
MDNLLSIFPEADTGVCGLPYVSGSTSDWTSEHGGRGWTSEDRAAPWSLGLLAPPW

SEQ ID NO: 4167 - DNA, 288 bp, Homo sapiens
  misc_feature (1)..(1): Wherein n may be a, c, g or t
  misc_feature (2)..(2): Wherein n may be a, c, g or t
  misc_feature (3)..(3): Wherein n may be a, c, g or t
  misc_feature (4)..(4): Wherein n may be a, c, g or t
  misc_feature (5)..(5): Wherein n may be a, c, g or t
  misc_feature (9)..(9): Wherein n may be a, c, g or t
  misc_feature (12)..(12): Wherein n may be a, c, g or t
  misc_feature (15)..(15): Wherein n may be a, c, g or t
nnnnngggnggnggntccgtcggtccacttccaaagtccctgcaagacctacagctgaccaataataaaatcagcaagctcggctccttcgacgggctggtcaacttgaccttcatttatcttcaacacaaccagctcaaagaggatgctgtctcggcttctctgaaaggtctcaaatcactagagtacctggatttgagcttcaatcagatgagcaagctgcctgctggtctacctacatctcttctaactctctacctagacaataataagatcagcaacattccg

SEQ ID NO: 4168 - protein, 96 aa, Homo sapiens
  misc_feature (1)..(1): Wherein Xaa may be any naturally occuring amino acid
  misc_feature (2)..(2): Wherein Xaa may be any naturally occuring amino acid
XXGGGSVGPLPKSLQDLQLTNNKISKLGSFDGLVNLTFIYLQHNQLKEDAVSASLKGLKSLEYLDLSFNQMSKLPAGLPTSLLTLYLDNNKISNIP

SEQ ID NO: 4169 - DNA, 333 bp, Homo sapiens
agagaagtcctttgcagtggggacactggcagaatccattcagggtctaggtgctgcctcagcccaatttgtgtcccggctgtttcctgtgctgttaaacaatgcccgggaagcagaccccgaggtgcggagcaatgccatctttggggctggggcgtacttgcagagcatggggggctgccctgctcaggaccacttccctaagctactgggcctccttttgcccctcctggcaagggagcggcatgatcgagtccgtgataacatctgtggggctcttgcccgtctgctgatggccagtccggcaggaaaaacagaaccccaggtgctagc

SEQ ID NO: 4170 - protein, 63 aa, Homo sapiens
MPGKQTPRCGAMPSLGLGRTCRAWGAALLRTTSLSYWASFCPSWQGSGMIESVITSVGLLPVC

SEQ ID NO: 4171 - DNA, 465 bp, Homo sapiens
  misc_feature (408)..(408): Wherein n may be a, c, g or t
  misc_feature (412)..(412): Wherein n may be a, c, g or t
  misc_feature (455)..(455): Wherein n may be a, c, g or t
ggatccctcttaacaagttttgagttattccaagggcagagtcaaacccaataatccctgggtgacagccttcccctccctccagctactactgtctccgtgatcagtttttctctctttctttctctctctctctctttatttttactctccttttaatcttgggccaaatacatagctctgttttgaatatttacctaagtctccagcaccatattcaatgagcacaaagcaaaaggaaaacataacaaagaatttaacacacagctttttctgaatatatgaaacgtgtatagagaatcgtgggctgcctccattcctctttctgtctggggaggcgaatattggacatggtgagtggggatagtcatacagccatgggccacttcctgctgggaacagcacatnttanaacttcaagtatactatccgatgaatgagattttgtagctganaaggaaggaa

SEQ ID NO: 4172 - protein, 69 aa, Homo sapiens [sequence omitted]

SEQ ID NO: 4173 - DNA, 365 bp, Homo sapiens
  misc_feature (365)..(365): Wherein n may be a, c, g or t
ggtaccgccattggccccaaggcaaaaatagacgatggctcggactatgccgttgcactgggtaataatgccagtatagagaccagtaacaacggagtggtattgggctccgatgccagtcttacaggtgccgagaactcggtcgccataggaaatgcagcgtccgttagtggggttaaaaacgccgttgccataggcgcaaactctacggcaaccgaagaaaataccgtctccattggttctaaagggcatgagcgcaaactggttaacctggctgacggcgatgtttctgcgacgtctaaagaagcggtcaacggcagtcagctgaataaaactaatcagcaggttgctgcattcgatacgcn

SEQ ID NO: 4174 - protein, 121 aa, Homo sapiens
GTAIGPKAKIDDGSDYAVALGNNASIETSNNGVVLGSDASLTGAENSVAIGNAASVSGVKNAVAIGANSTATEENTVSIGSKGHERKLVNLADGDVSATSKEAVNGSQLNKTNQQVAAFDT

SEQ ID NO: 4175 - DNA, 378 bp, Homo sapiens
gggcccagtttgtcccacgagctatgcgttaccgcttcagacgtcctaggcctattccaaggcgacacggcaaggttcagctcgtacggaagaatggggtacgtccacatcgacgacgttgcgagcagccacatcctggtgtacgaggtcccccaggccgccgggaggtacctgtgcagctcagtggtgctggacaacgacgagctggtctcctcgctcgcgaaacgctacccgatattccccataccccggaggctgaacagcccctacggcaagcagtcgtaccagctgaacacgtcgaagctgcaggggctgggcttcaagttcagaggggtgcaggagatgttcgacgactgcgtgcagtcgctcaaagaccgg

SEQ ID NO: 4176 - protein, 126 aa, Homo sapiens
GPSLSHELCVTASDVLGLFQGDTARFSSYGRMGYVHIDDVASSHILVYEVPQAAGRYLCSSVVLDNDELVSSLAKRYPIFPIPRRLNSPYGKQSYQLNTSKLQGLGFKFRGVQEMFDDCVQSLKDR

SEQ ID NO: 4177 - DNA, 195 bp, Homo sapiens
gtcgactattacggcaacaccgtcgtctcagagctcggtgcccgctaccccgtgacgatcaagctggcgatcatcgccctgctcgttgagatcgtcattggcatcctcgccggtgcgtgggcgggtgtgcgacgcggcaaattcatcgactatttcgtcctggtgtcctcgctcgtcgtcatttcaatcccgatc

SEQ ID NO: 4178 - protein, 65 aa, Homo sapiens
VDYYGNTVVSELGARYPVTIKLAIIALLVEIVIGILAGAWAGVRRGKFIDYFVLVSSLVVISIPI

SEQ ID NO: 4179 - DNA, 270 bp, Homo sapiens
  misc_feature (1)..(1): Wherein n may be a, c, g or t
nacgcgtccccgcattccatcctgtcggtgaccttcaccaacaaggccgctgccgagatgcgccaccgcatcgagcagttgatgggcatcagccggaccggcatgtgggtgggcacgttccacggcttggcgcaccgcctgttgcgggcgcactggcaggaagccgggttgagccagaccttccagattctcgacagcgacgaccagcaacgcctggtcaagcgagtgatccgcgagctgggcctggacgagcaacgctggccggcgcgc

SEQ ID NO: 4180 - protein, 90 aa, Homo sapiens
  misc_feature (1)..(1): Wherein Xaa may be any naturally occuring amino acid
XASPHSILSVTFTNKAAAEMRHRIEQLMGISRTGMWVGTFHGLAHRLLRAHWQEAGLSQTFQILDSDDQQRLVKRVIRELGLDEQRWPAR

SEQ ID NO: 4181 - DNA, 293 bp, Homo sapiens
ggatcctgtcttcacagaggcacccagagaccctgtggtgaggagaggcctgagcaagtgcgccccatggcagggtagggccctggtggcctgggcttgggggttccctgcagccttcccggctgacgtgcctcctggcctctgaggtgggcatggtggatgccagtgcgccacagggagagtgaagcgtgtgacagacgatgccatccccgggtggcgcagcagccaggactcgactgtttgcaagatccagccgtgcacagagaggcatggggccggccacgtccactagt

SEQ ID NO: 4182 - protein, 90 aa, Homo sapiens
MPLCARLDLANSRVLAAAPPGDGIVCHTLHSPCGALASTMPTSEARRHVSREGCREPPSPGHQGPTLPWGALAQASPHHRVSGCLCEDRI

SEQ ID NO: 4183 - DNA, 204 bp, Homo sapiens
  misc_feature (1)..(1): Wherein n may be a, c, g or t
  misc_feature (2)..(2): Wherein n may be a, c, g or t
nntccggagactgttgagccgtcagaggccccagtgatggctgctgagcccacgggtgacaagggcactgtgctggcactcaccgagaagagcttcgaggacactattgcacaggggataaccttcgtcaagttctatgctccgtggtgtggccactgtaagaatctggctcctacctgggaggagctctctaaaagggaattc

SEQ ID NO: 4184 - protein, 68 aa, Homo sapiens
  misc_feature (1)..(1): Wherein Xaa may be any naturally occuring amino acid
XPETVEPSEAPVMAAEPTGDKGTVLALTEKSFEDTIAQGITFVKFYAPWCGHCKNLAPTWEELSKREF

SEQ ID NO: 4185 - DNA, 375 bp, Homo sapiens
gtgcacgcaggtatgtgtgtttgtgatgctgatgaaagatattttcatctactggccatgtaacctttggcaacttgctttatgtctctggctcaatttcccattctatacaatggaaataataatcacatctgcccacaggttgggaagataaaatgagaaactgcatgtgaaagtgctctaagaagcacaatatgctacctaaatgtttggcattacatattacatccataactggctactgccaacctgtcattccaatggaagatagagtcatttgttgcttaagcgcgtatactaatttatggaaattatccttgtttagtatgtcttgtttgtacattcgtattacttctgcaagtattaatagctagc

SEQ ID NO: 4186 - protein, 59 aa, Homo sapiens
MLPKCLALHITSITGYCQPVIPMEDRVICCLSAYTNLWKLSLFSMSCLYIRITSASINS

SEQ ID NO: 4187 - DNA, 264 bp, Homo sapiens
  misc_feature (264)..(264): Wherein n may be a, c, g or t
cgtccaggagtccattttcaccatggtcgtgaactggaaatggacgatgtgatcgcctctttaaaacgaatcaatacgctgccgctctattcgcatattgctgacattgtgtcgccgccgccctggacgctggatatccatctcacgcaaccggaccgctgggtaccggtactgctggggcaagttccggcgatgatcctgccgcgcgaatgggaaaccctcagtaactttgccagccatcccatcggtaccggtccgtatgcn

SEQ ID NO: 4188 - protein, 88 aa, Homo sapiens
RPGVHFHHGRELEMDDVIASLKRINTLPLYSHIADIVSPPPWTLDIHLTQPDRWVPVLLGQVPAMILPREWETLSNFASHPIGTGPYA

SEQ ID NO: 4189 - DNA, 246 bp, Homo sapiens
cgtgttttcctcagctccgacggtaacggttgccagccgttcttcgatgacgtttggaatttaacccatatcggtgttgccggttttgaaaagttgttggaactcgtgcaggtgctggtcaaagactatgatttcagtatcagcgatgccctgcgcccgctcaccagtattttaccggttttccttaaccttaccgggaaaggcgaaattctgtcagtcatccatgccgacttgctggtcatgacg

SEQ ID NO: 4190 - protein, 82 aa, Homo sapiens
RVFLSSDGNGCQPFFDDVWNLTHIGVAGFEKLLELVQVLVKDYDFSISDALRPLTSILPVFLNLTGKGEILSVIHADLLVMT

SEQ ID NO: 4191 - DNA, 402 bp, Homo sapiens
acgcgtctctacagccggactaagcacaggctcagccccggtcgccatgcgcccaggctcggttatcagccgaggaatccacggcgaaatgaccagtagcggccctaatacaactatgctgccgagcagcagacgtcgaggtcgggtcatgaggatgccgacggccaccgcgaccgggtatacccacaatgcaggaacaaggctgatagctagggctgaccacagagccaggccgcctgccgaggaaacgccccccacctggtgactgccagtatcagcaccgcgcagctcaacgacgtcaacagtctcgggattgaccaaccgccacgtatgcagggccatgtgggggagaatcacccccaacgccaatgctgtcaccgagcctcgggctaggccgccggc

SEQ ID NO: 4192 - protein, 114 aa, Homo sapiens
MALHTWRLVNPETVDVVELRGADTGSHQVGGVSSAGGLALWSALAISLVPALWVYPVAVAVGILMTRPRRLLLGSIVVLGPLLVISPWIPRLITEPGRMATGAEPVLSPAVETR

SEQ ID NO: 4193 - DNA, 446 bp, Homo sapiens
ctccactctgtcagggactaaaatccaattaaatgatcagtctaaataaaatatccctggaatagcaattggtgtccagaaacatcgtgagaaattccagaaccaaacataaacttttgtgattaactataccatggagcctcactattagtaccagtaaattaaagtttgctataatcataaataatgaccacatgtctattttcaaagacatgatttctaggttcctttgttattacagattaagattgtctcaagggcacttcaaaacaaagcatcccattctacagggacagaaagcctgttactgtacagcacttgtgaccgcctggttaatgagcccaagtcaccggtaaattcaaaggaaaaattaacccaacctatatcatgcagtgacagttgttgcttgcaaaaaaaccagaaatgaaatcagctagctgctaaca

SEQ ID NO: 4194 - protein, 61 aa, Homo sapiens [sequence omitted]

SEQ ID NO: 4195 - DNA, 375 bp, Homo sapiens
  misc_feature (25)..(25): Wherein n may be a, c, g or t
  misc_feature (214)..(214): Wherein n may be a, c, g or t
atgcatcacacatgtacacaccacnacaaataccacacagaaacacaccacgcacatcacacaaacacttcatatacctcacacatgcacacacacacctctcacagacaccgtgcacaccatttatacagacccccccctatccacccacacatgcacacacacctcacactatacacacatgctacacaaagacacgctccacacaaacatngccacacacaccacacacacacaactcacacacacatctcacataaacacacacttcatacacacacaccatatacatatttcacacatatacacacctcacacacacacccaaggcccctttagatatgccaagcaaaccaaaatcccatgcagcgcgcg

SEQ ID NO: 4196 - protein, 112 aa, Homo sapiens
  misc_feature (9)..(9): Wherein Xaa may be any naturally occuring amino acid
  misc_feature (72)..(72): Wherein Xaa may be any naturally occuring amino acid
MHHTCTHHXKYHTETHHAHHTNTSYTSHMHTHTSHRHRAHHLYRPPPIHPHMHTHLTLYTHATQRHAPHKHXHTHHTHTTHTHISHKHTLHTHTPYTYFTHIHTSHTHPRPL

SEQ ID NO: 4197 - DNA, 390 bp, Homo sapiens
agcttcagcaacttgaacgggttgattgcccaagtgatatcatctgttacagcctctttgaggttcgatggttcattaaacgtggatttgaacgaatttcagaccaacttggtaccatatccaagaattcatttccctttggtttcctacgcacccatcttgtccaagaagagggccacccatgaatccaactccgtgtcagaaatcacaaacgcttgtttcgaaccgggcaatcaaatggttaagtgtgacccaacaaaggggaagtacatggctaactgtttgttatacagaggtgacgtggtgaccagagatgtccaaagagccggcgaacaggtgaagaataaaaaaacagtacaaatggtggattggtgtccaacaggatttaag

SEQ ID NO: 4198 - protein, 130 aa, Homo sapiens
SFSNLNGLIAQVISSVTASLRFDGSLNVDLNEFQTNLVPYPRIHFPLVSYAPILSKKRATHESNSVSEITNACFEPGNQMVKCDPTKGKYMANCLLYRGDVVTRDVQRAGEQVKNKKTVQMVDWCPTGFK

SEQ ID NO: 4199 - DNA, 294 bp, Homo sapiens
acgcgttttatcaacgatcaagtgatgcgctccggtcaacaagcggcgctggccaaggatttgctggatttcatggatgccctctccatcgataaagccacgctggtgggctatgactggggcggacgcgcggcgtgtatcgttgcggcgctatggcctgaacgggtgcgaggcctggggacgggcggtggctacaacatcccagacattgctgcgtcgatcaagcctcgggcgccggaaacggagcatcggctggggtatcagttttaccttcatacccaacgtggtgtcgac

SEQ ID NO: 4200 - protein, 98 aa, Homo sapiens
TRFINDQVMRSGQQAALAKDLLDFMDALSIDKATLVGYDWGGRAACIVAALWPERVRGLGTGGGYNIPDIAASIKPRAPETEHRLGYQFYLHTQRGVD

SEQ ID NO: 4201 - DNA, 171 bp, Homo sapiens
  misc_feature (1)..(1): Wherein n may be a, c, g or t
ngcggccacctggcagaagtgcaggcagcccagcctgctctatgtgcagagcgctcccggcggtcttcgccagacctgggacttcagcgccgagaccaagcgcctcaagcgtgccctgggaggcgtgcgcctgatcgagctgaaggatccgagctggcagcaacttcatga

SEQ ID NO: 4202 - protein, 56 aa, Homo sapiens
MKLLPARILQLDQAHASQGTLEALGLGAEVPGLAKTAGSALHIEQAGLPALLPGGR

SEQ ID NO: 4203 - DNA, 438 bp, Homo sapiens
  misc_feature (1)..(1): Wherein n may be a, c, g or t
  misc_feature (2)..(2): Wherein n may be a, c, g or t
nnacgcgtcgactattgcgtgcggtattcgggaggcaataacgctggacacactgtcgtcgtcgatgacgagaagttcttcatgcacctgcttccgtctggggtccttaacccgaactccacggccgtgctcggcaacggagtcgtgctcaaccttgacgtgctggccgatgagatcgacaccttgcgcggccgcggcgtagacattccgcacccgctcatcagcgccaatgcgcacctcatcaccccgtaccatcagaccctcgacaaggtcactgagcgttttcttggcagtcgacgtatcggcaccacgggtcgtggcatcgggccgacctactctgacaagatcaatcggatgggtattcgcgtccaggatcttttcgacgagtcgatcctgcgtcagaaggtcgaggcttctctagaccaaaagaaccagatc

SEQ ID NO: 4204 - protein, 146 aa, Homo sapiens
  misc_feature (1)..(1): Wherein Xaa may be any naturally occuring amino acid
XRVDYCVRYSGGNNAGHTVVVDDEKFFMHLLPSGVLNPNSTAVLGNGVVLNLDVLADEIDTLRGRGVDIPHPLISANAHLITPYHQTLDKVTERFLGSRRIGTTGRGIGPTYSDKINRMGIRVQDLFDESILRQKVEASLDQKNQI

SEQ ID NO: 4205 - DNA, 187 bp, Homo sapiens
ggatccatttgcatgtccagttggaaagcccagcatgacgggaatggggacgggactctctaagcagaaacacatacattctgcacactggggaagtaaacgtgttccaggtatggatgaagaaaaggccacttgatttttcagacagtatcatgttgatttgaatctctgcctcattacacttcct

SEQ ID NO: 4206 - protein, 51 aa, Homo sapiens [sequence omitted]

SEQ ID NO: 4207 - DNA, 388 bp, Homo sapiens
gtcgactaacctgcgtacagccgccaccctacgtttagtcgcgaagcgtgtcggctccatgttcattccggagctacaccatgaataaagtactacctgatccacccatcgatcccgcaaaagaccgcgtcgctttcaaccgcgccatcgaccattacctgcctacccagggcttccactgcgtcaacgaagacctgagtttcgaagacgccctgctctacaccgccagcctgctcgacagtgcctctgccacggcgctggattgcggtgagctgctgcaaagccctgaacgggcgaagatcctggccgtgtggcatttgctggaaattgcaaaaaccaccgtagatcgcttccccatcgagtgcctgaccgcaccaaagccctgcct

SEQ ID NO: 4208 - protein, 102 aa, Homo sapiens
MNKVLPDPPIDPAKDRVAFNRAIDHYLPTQGFHCVNEDLSFEDALLYTASLLDSASATALDCGELLQSPERAKILAVWHLLEIAKTTVDRFPIECLTAPKPC

SEQ ID NO: 4209 - DNA, 275 bp, Homo sapiens
caattgaaaagaaacaaccgtactaaattttttagttctgagcttctttcttagcaatatcttaacacaaggccaagagaaaagtctgggaaagcagtaaacagtcctttggagtatgggttttagtctactgccaaaggtaggagatacaactaatgttttgatttctacatttgtacccaaaaacctaaagataatcactctatgaaccaggataggaatagaagggaacatctgataaattatgtaaatctgtataggtacagacaggtacc

SEQ ID NO: 4210 - protein, 78 aa, Homo sapiens [sequence omitted]

SEQ ID NO: 4211 - DNA, 589 bp, Homo sapiens
cggccgtgcttataaagcattaccagtatgaaagtcctaaacaagaaggaagcacctcctccaaagacgaacccaccttaattatataacttttaatgtctaggttataaaacattgaccgcttaaaccaaagaaaaaacatgtgatacgaatcatttcgccgttgtgtgttttaagaagaaaaatgttaatgttaacaagacgagatcacacgtataaataaatatagcagcacgaccagcttggaagttcaaaaaaaaaaaagtgaagatagacaatcataggcacaatttctgatggtagtgaacatataatgggcagacccaagctctagcaacttaatgcagagaaagatttgaagctaccgccgcgtgttcagcgtggctctctataataggccatttatgtacaagatcttctgcaatcctatcaagtgttcgtactacaattttccctgccaattagacgtgatgaaaaatattgctgggctttggtttaaaaacgactatttaaataaatattacctttccttttcttcaattgtttctcatctccttcggcctccgttaagtatattttttttacgcgt

SEQ ID NO: 4212 - protein, 61 aa, Homo sapiens
MYKIFCNPIKCSYYNFPCQLDVMKNIAGLWFKNDYLNKYYLSFSSIVSHLLRPPLSIFFLR

SEQ ID NO: 4213 - DNA, 345 bp, Homo sapiens
  misc_feature (1)..(1): Wherein n may be a, c, g or t
  misc_feature (2)..(2): Wherein n may be a, c, g or t
nngaacatcggcctcggcgtgctcggctggggcgtcggcggcatcgaggcggaagccgccatgctcggccagccggtatcgatgctgatccccgaggtcatcggcttcaagctcaccggcaagctgcgcgagagcatcaccgccaccgacctggtgctgaccgtcacgcagatgctgctcttgaagggcgtggtggggaaattcgtctttttctacggcgacggcctgaccgacctgcccctggcggaccgcgccaccatcgccaacatggccccggaatacggcgccacctgcggcttcttcccggtggacgagatcaccctcggctacctgcgcctgtccgga

SEQ ID NO: 4214 - protein, 115 aa, Homo sapiens
  misc_feature (1)..(1): Wherein Xaa may be any naturally occuring amino acid
XNIGLGVLGWGVGGIEAEAAMLGQPVSMLIPEVIGFKLTGKLRESITATDLVLTVTQMLLLKGVVGKFVFFYGDGLTDLPLADRATIANMAPEYGATCGFFPVDEITLGYLRLSG

SEQ ID NO: 4215 - DNA, 192 bp, Homo sapiens
gtggacatctactcttcccccaaggatccagagattcaattcagtggcccctgggaggttgggaagccggtcacggtcaagtgtttggctccagacatttacccagtttacaggctggagattgatctgttcaagggtgaccagctcatgaacagacaggagttttcttcagaagagatgacaaagtctcta

SEQ ID NO: 4216 - protein, 64 aa, Homo sapiens
VDIYSSPKDPEIQFSGPWEVGKPVTVKCLAPDIYPVYRLEIDLFKGDQLMNRQEFSSEEMTKSL

SEQ ID NO: 4217 - DNA, 273 bp, Homo sapiens
ggatccttctgtgcttaaggcacttttctgggtgcttgggaggattaaaaaataaatatgacatagtgcctgttctcacggaatttataatatggtgggaaacatgaacataataaaaaggtaggtatgtggaaagtgttttggtggaggtacaaagtcctttggaagcacagactgatggaagcaattaattcctgttggaagtctagatccagtttcatggagaaggtggcattttagattggagcaaaattgatgaaggggtatttgcaa

SEQ ID NO: 4218 - protein, 58 aa, Homo sapiens
MKLDLDFQQELIASISLCFQRTLYLHQNTFHIPTFLLCSCFPPYYKFRENRHYVIFIF

SEQ ID NO: 4219 - DNA, 210 bp, Homo sapiens
  misc_feature (210)..(210): Wherein n may be a, c, g or t
ggcacaacaggtacgccaaaaggcgccactttaagccatcgtaatatctttaataatggttattttcttggcgaaggcatgaagttgacatgtgatgacaggctgtgtatcccattgcccctctatcactgctttggcatggtgggcggtaatctcgccattttgactcatggtggctgtgcagtttatcctaacgatggttttgatccn

SEQ ID NO: 4220 - protein, 70 aa, Homo sapiens
GTTGTPKGATLSHRNIFNNGYFLGEGMKLTCDDRLCIPLPLYHCFGMVGGNLAILTHGGCAVYPNDGFDP

SEQ ID NO: 4221 - DNA, 211 bp, Homo sapiens
tccggacctcctcgtagcgcggcgagggccaggacgatccatgccggacgaggacatcgagtcggtgttgggggtacggcccgatatgacgatcaaggacgaccgccgactggctcgtggtcagggggatggggaagcaccatgggtggtggcctcccgacgatggcgtagcgggtgcgctgagctcgttgatcaggtgatgggctcatga

SEQ ID NO: 4222 - protein, 56 aa, Homo sapiens
MPDEDIESVLGVRPDMTIKDDRRLARGQGDGEAPWVVASRRWRSGCAELVDQVMGS

SEQ ID NO: 4223 - DNA, 384 bp, Homo sapiens
  misc_feature (137)..(137): Wherein n may be a, c, g or t
agatctgcgcagatcgataatggattaaagactcttgacgctggagtcaccgagatgaacaacaaggtgttgggggcaacgaaggctgtcggtgattccaccactaccgtcaaccaggtgaattctgcgttaggaantgccgactcagcggcagagaagacgtcgagcgccgttactcagacgcgcgtgggtgcccaggcgattaccggcgctgctcaaaatgtcatggctgattcccaagctgtcaactcagccatggttccgcttattaataacgtgacaaagaatcttcctaccttgcaaaaacaggccaggaatctcgtgtcagtgaacggtaccctgcagaaccccaacggtgattctgtcattaagattcaacagacc

SEQ ID NO: 4224 - protein, 110 aa, Homo sapiens
  misc_feature (28)..(28): Wherein Xaa may be any naturally occuring amino acid
MNNKVLGATKAVGDSTTTVNQVNSALGXADSAAEKTSSAVTQTRVGAQAITGAAQNVMADSQAVNSAMVPLINNVTKNLPTLQKQARNLVSVNGTLQNPNGDSVIKIQQT

SEQ ID NO: 4225 - DNA, 328 bp, Homo sapiens
gcgtggacggcgaacaggcgggtgctggcagcccgtacctgctaccgccacctggccgggcgactcggtgtggggctggccgagcagctccgggagtgcggtcgcctggatccctcgtggggactgaccggttccggcgaggacctcctggctacctgggggatggagaagccgcttcatacccgtggggaggcgtgcatggactccactgagcggcggttccacctctcgggtccgctggggaccgcactgacgcaggcgctgttcgatcgcgcctggatcgcgcgcatcggcggaccccgggcggtgaaactcacagaagcccggc

SEQ ID NO: 4226 - protein, 109 aa, Homo sapiens
AWTANRRVLAARTCYRHLAGRLGVGLAEQLRECGRLDPSWGLTGSGEDLLATWGMEKPLHTRGEACMDSTERRFHLSGPLGTALTQALFDRAWIARIGGPRAVKLTEAR

SEQ ID NO: 4227 - DNA, 750 bp, Homo sapiens
tctagaggacgtgagacattggggatggtaacatgggtagagctgaaaggaaggttgacccaggagatggcctgtgaggataaaaccaagggagggagagtaggacagaggcagtacataagagtggtaagaatggggctcggggaagaagccttaccccttttcttctttaatttggcgaaaggacttttgggccaaggtcaccctagccttctcttgggggcctcaattttccttcattctgtaaaaaatgggggggtaattcagaagtaccctccttattgtcagggttttggggaagggagtaaaaagaaattggcttgggaaaatacttaatacagggcctgggcatgtaacaaatattcacaaaatgctagcagttatcaccacagtgggagccacagggagctctgaggataagcagggatgtcgagggatgggacagaacttgattgaaggcagacagacctccaaattcttgactcagacagaatgatcactgatccagcgagacgtcaggatcgagaggagtgtagcaaggagtcaggagggtgggcctgcgccagtgtcgccccgactctgttcagtaacatgaaggcaaacacagaagggcatgtgcggagacacacgtgatcacgctagtgatgcagaggcagacccagacaaaagaccgagacaggagctaggcagacacacagacagagacagccccgcggagtcatgtagacagggataatgacaggaacgcgt

SEQ ID NO: 4228 - protein, 103 aa, Homo sapiens [sequence omitted]

SEQ ID NO: 4229 - DNA, 253 bp, Homo sapiens
tgatcacttgctgttcaatattcacaactcccagactccttttgacataatgaagagtatacagtgtttctaaatcccttgttggtaattattccatgtccccactgagaaacatgtcacaattggctatatgttcctacttaaactacttttttcttggagtttctcacactgtaccctcctggtttacatctactcccaactttctggtccgtagaataactcatcacctaccattgcatttgacaaattt

SEQ ID NO: 4230 - protein, 52 aa, Homo sapiens [sequence omitted]

SEQ ID NO: 4231 - DNA, 267 bp, Homo sapiens
  misc_feature (1)..(1): Wherein n may be a, c, g or t
  misc_feature (267)..(267): Wherein n may be a, c, g or t
naaaaatgtccatccacagaaggatgaacttattttggtgtgttggtacagtaaaatacttctcagcaagaaaaaaaggatgaactattcaacaacatggatggatgcacctcaaaaacattatattggtcaaaaaagccacagttttttttggagtctgttcttgtgaagctcagaacaggcaagcataatctctggttgactgttagtggcaggcagagccaagcgactggaagggtgaatgacagaacttaagatcttggaatn

SEQ ID NO: 4232 - protein, 52 aa, Homo sapiens
MDGCTSKTLYWSKKPQFFLESVLVKLRTGKHNLWLTVSGRQSQATGRVNDRT

SEQ ID NO: 4233 - DNA, 354 bp, Homo sapiens
ggatccttgggtgccttctctctgcacccctccacatgaacctggttgactgaacagcaaggacatctttgaggggaaggaagcctggcccctctgaaggagtcgctactacaggcccccagtctccttgagggcaggggccagcatggttgtcctgcactgagcgctggctcctgaaaggccgcgcagccatggagagtgtgtatggaaaggcagcctgggccaggcctctgtcgctgccttggtgactgattttcgcagagcctcctggttccttctccccagcccgtgggggatggacaggctgtctcaaagccttcctgtggtcttagggattcttggaactccttagca

SEQ ID NO: 4234 - protein, 64 aa, Homo sapiens [sequence omitted]

SEQ ID NO: 4235 - DNA, 337 bp, Homo sapiens
ggatcccgtcaaggatgatacacttcaatagttgtggataggttgtcatgcgttttttcgcatgacaatttgttacataaaatctattacaagggtgtttgggaatgaagtactttaaaacaggcggttttcatcgaaaactgcagctagccagtctatggatcgtcgtgccgctattagccgttgcaatctttttgcatgcctatttgatcggaccattacaacgatcgtatcaagaactaaacaatcgccgagtcgaaggaatcgttagtaacatcaaccaacagtctcgcagctggaagtgacttttagcgttgggggggcatcgtttcaaagg

SEQ ID NO: 4236 - protein, 66 aa, Homo sapiens
MKYFKTGGFHRKLQLASLWIVVPLLAVAIFLHAYLIGPLQRSYQELNNRRVEGIVSNINQQSRSWK

SEQ ID NO: 4237 - DNA, 308 bp, Homo sapiens
  misc_feature (1)..(1): Wherein n may be a, c, g or t
nacgcgtttctttgcgcggcgcgtggcgtgagcctgggcatcgccttccagcagaagctttccaccggcttcttcggcggcgagggcttcatcatggagcggctggacggcgacggcctggccttcgtgcatgcgggcggcaccatcgtcaagcgcagcctgcagccagggcagactctgctggtcgacaccggctgcgtcgtggcttacacgcccaacgtcaacttcgagatccaatacgtcggcaagatcaagaccgcgctgtttggtggcgagggcctgttcctggccaagctggccggccccgg

SEQ ID NO: 4238 - protein, 102 aa, Homo sapiens
  misc_feature (1)..(1): Wherein Xaa may be any naturally occuring amino acid
XAFLCAARGVSLGIAFQQKLSTGFFGGEGFIMERLDGDGLAFVHAGGTIVKRSLQPGQTLLVDTGCVVAYTPNVNFEIQYVGKIKTALFGGEGLFLAKLAGP

SEQ ID NO: 4239 - DNA, 168 bp, Homo sapiens
  misc_feature (1)..(1): Wherein n may be a, c, g or t
  misc_feature (168)..(168): Wherein n may be a, c, g or t
ngcgcgccagggatgctgctaacttcctataatgcacaggacgcccccacaacaaatgcacaggacgcccccacaacaaatgcacaggacgcccccacaactaacgcacaggacgcccccacaactaacgcacaggacgcccccacaactaacgcacaggacagccgn

SEQ ID NO: 4240 - protein, 56 aa, Homo sapiens
  misc_feature (1)..(1): Wherein Xaa may be any naturally occuring amino acid
XAPGMLLTSYNAQDAPTTNAQDAPTTNAQDAPTTNAQDAPTTNAQDAPTTNAQDSR

SEQ ID NO: 4241 - DNA, 391 bp, Homo sapiens
ggatccagaccctctggccttcccagctcagcagcttcagcctgggagagcccacttttcctcagcagacagctgatgatcgttgactgggcttggtgggaggtaaggaggtaaccagcaggttttctttctgtgatggtaagaggccgccttggaagcagacagctgagaaaacacaaagacctgggctggccggccccacccttggtcgagccgcttctgcctgtgaagtgtaaatgcaggtggtgtcaagccggcagacaggcccagctccctcttccccttgagcaggcagggtgacgccccctgtagcaggcccgggattcagttgctctggctgatgaggagcctgggcccgggaggagtgtcgcacagccccagcctggtccgt

SEQ ID NO: 4242 - protein, 54 aa, Homo sapiens [sequence omitted]

SEQ ID NO: 4243 - DNA, 208 bp, Homo sapiens
  misc_feature (1)..(1): Wherein n may be a, c, g or t
ngtcgacagccaccccccttccctcccaatcctatgggccctgctttcaacatgcccccccagggtcgaggctacccacccccaggcaacatgaactttcccagccaacccttcaaccagcctctgggtcaaaactttagtcctcccagtgggcagatgatgccggggccagtggggggatttggtcccatgatctcacccaccatgg

SEQ ID NO: 4244 - protein, 69 aa, Homo sapiens
  misc_feature (1)..(1): Wherein Xaa may be any naturally occuring amino acid
XRQPPPFPPNPMGPAFNMPPQGRGYPPPGNMNFPSQPFNQPLGQNFSPPSGQMMPGPVGGFGPMISPTM

SEQ ID NO: 4245 - DNA, 363 bp, Homo sapiens
  misc_feature (1)..(1): Wherein n may be a, c, g or t
  misc_feature (2)..(2): Wherein n may be a, c, g or t
  misc_feature (3)..(3): Wherein n may be a, c, g or t
  misc_feature (43)..(43): Wherein n may be a, c, g or t
  misc_feature (100)..(100): Wherein n may be a, c, g or t
  misc_feature (160)..(160): Wherein n may be a, c, g or t
  misc_feature (253)..(253): Wherein n may be a, c, g or t
  misc_feature (295)..(295): Wherein n may be a, c, g or t
nnntcctggtgtcctgtctaccctccacctctccagtctcctnggtgtcctgtctatcctcaacctctccagtctcctggtcctgtctaccctccacctnctccagtctcctggtgtcctgtctatcctcaacctctccagtctcctggtgtcccatctnacactcagcctttctagtgtcctggtgtccgtctaccctccacctcttcagtctcctggcatcctgtctaccctccacctctccagtctcctnggtgtcctgtctacacttaacctctccagtttcctggtgtcnctgtttatcctcaaccccttcagtctccttgttccctgtctaccctccagtctcctgagtgtcctact

SEQ ID NO: 4246 - protein, 58 aa, Homo sapiens
  misc_feature (1)..(1): Wherein Xaa may be any naturally occuring amino acid
  misc_feature (15)..(15): Wherein Xaa may be any naturally occuring amino acid
  misc_feature (34)..(34): Wherein Xaa may be any naturally occuring amino acid
  misc_feature (54)..(54): Wherein Xaa may be any naturally occuring amino acid
XSWCPVYPPPLQSPXCPVYPQPLQSPGPVYPPPXPVSWCPVYPQPLQSPGVPSXTQPF

SEQ ID NO: 4247 - DNA, 402 bp, Homo sapiens
  misc_feature (402)..(402): Wherein n may be a, c, g or t
tgtacaacatactctgctgccaaggtggacagcagaaagattacaaaaaatgttacaaaaggataaaaaaaatagtcactttaatgaagaaaccagcagaagcatcattagattgaacttgatttctttgggactttatctctgcatagaagtgatctcagtctctaagaaaaggaaggatattagttagtctatgcctgaccagggaggtagaagggcttggagattgaaaggaagattccaaaggcaatggctactaggaagtttgagactaaaacaaacatggtatttcactggaagcaatccgggtgtctactctgctgtattactcaggatttctttggtttcaagtgacaaaaacccaactgaagcaagcataggtggaaaaacaattgtgttgtn

SEQ ID NO: 4248 - protein, 69 aa, Homo sapiens [sequence omitted]

SEQ ID NO: 4249 - DNA, 316 bp, Homo sapiens
agctctggccagtccactcataaatcttcccatagttcctacagtcccaagcgcgctcccgatggtgcagctacagtatccccagcatcctcggcatcttccgcgtcttcttctgcttcagctagcacgggtcgacatggctcacatgggacaaggccgacagaaaatgccagcgtttctgcacataccgaaaaagcgtatgcagaaagagaaggcgggcaccatgccgcgcatagccatgaccaggaacagtcaggcgcgcacactaatggtcttagcttggcagatattatgaagcgattggagcgggacgcgt

SEQ ID NO: 4250 - protein, 105 aa, Homo sapiens
SSGQSTHKSSHSSYSPKRAPDGAATVSPASSASSASSSASASTGRHGSHGTRPTENASVSAHTEKAYAEREGGHHAAHSHDQEQSGAHTNGLSLADIMKRLERDA

SEQ ID NO: 4251 - DNA, 512 bp, Homo sapiens
acgcgttgcacacaggatcgctattggaggatgccggccttccttagataatagttgccatgtttctgctacagagatatccatggctcccttagtctcctccctttgtgcaaaacaatatctcacaggaagtaacagaaaaaaattatgtccagcaatcactgcccttttcttttggcattttgacagtggcagggttatgccctataatcaaaggaaacacagagcggccatctcctagcaaccccctgaaggtcgctcccggggaatcactgctgtggctgggtgtgggtgcacttcacttccaggtttgaagacagcggcgctcccacgccagccacgagctcttctcaatatacttccaatacagtgaacctgtggtgggtagtgttgcaggaagaatgagcactaaagtgtcctaagctcggacagttttatggaaaatacatggaaaagctttatcatcttcttggttgtggttaaaaatctaattgcaattaaatgtcactagt

SEQ ID NO: 4252 - protein, 52 aa, Homo sapiens
MAPLVSSLCAKQYLTGSNRKKLCPAITALFFWHFDSGRVMPYNQRKHRAAIS

SEQ ID NO: 4253 - DNA, 249 bp, Homo sapiens
  misc_feature (1)..(1): Wherein n may be a, c, g or t
  misc_feature (2)..(2): Wherein n may be a, c, g or t
nngagttttccttatacccaattagatctgataatattttctataagtgtgagaatttcagatcaaggataaatgaattgttatttcaacaaatggtgccagggcaattggatatccacatgcaaaagaataaaattggaccttttcctcactccatatgcaaaaaggaactcaaaatggactaaagacctaaacacaggagctaaaatgataaaacttagaagaaatcataagtatatatcttcatga

SEQ ID NO: 4254 - protein, 58 aa, Homo sapiens
MNCYFNKWCQGNWISTCKRIKLDLFLTPYAKRNSKWTKDLNTGAKMIKLRRNHKYISS

SEQ ID NO: 4255 - DNA, 432 bp, Homo sapiens
  misc_feature (432)..(432): Wherein n may be a, c, g or t
agatctttagcaagtggagttgcgacaaggtgctgcgggcagatggaaggctaagcggaggcgggacgaataagatgtatattccacgtgtaaaatatctggaagcttagcatgactggaatgttccggagagacctaagggatgtatgcccccctagggagtgtcaccttgattccacagccagtggagtaccagggacatcttcagttttgtttcttaattgacacagagcatggtggacctgttagcatcttgttcaaagattgccagttacatgttgactcttgctcaaagaggaacgcacacaggcacatgtactgcacaccccagaatcttcagcatagtgtgaatcctgtgaagtgaagctctctgtctttgggttaaatatctgcctttaggagatttaaatgctgagtcacagtcgtgaaatn

SEQ ID NO: 4256 - protein, 73 aa, Homo sapiens [sequence omitted]

SEQ ID NO: 4257 - DNA, 374 bp, Homo sapiens
  misc_feature (1)..(1): Wherein n may be a, c, g or t
  misc_feature (299)..(299): Wherein n may be a, c, g or t
nttatgcttttgttttatgatggtccttgttctctgcaaacagcatgtttttaaaaggcaagaggctgaagcaaaggaataaaagaagagaagtggtaagggagaaagaagataaaagggaccatgatcaaagaagaaagtaggaagaggaagaaggcagctgaggctaaaatttagtaggagatcccatggtctcatatttttagcactttccggttttgattctatttccattatttgctgggtttagtatagaaaatcttagcatttgcagggttagcctggaaggagggaggctntggatgagcagatacaggccacatggagtttagtcttctctcatccacagccaagagggagttggacaagaattc

SEQ ID NO: 4258 - protein, 78 aa, Homo sapiens
  misc_feature (78)..(78): Wherein Xaa may be any naturally occuring amino acid
MEIESKPESAKNMRPWDLLLNFSLSCLLPLPTFFFDHGPFYLLSPLPLLFFYSFASASCLLKTCCLQRTRTIIKQKHX

SEQ ID NO: 4259 - DNA, 297 bp, Homo sapiens
  misc_feature (1)..(1): Wherein n may be a, c, g or t
ncaatccagccacatttattgtatccaccactgttttgaataactgcatggaggcaggcaccccagcacctgctggccccctgccatagccaacaagtgtacatgctgctgcattgccactgctgctggcacatgcgaatgaggacggatcccactgtcactacagtatgaaatcctttggctgacactacccatcagaacataggggccagcagtctaggagactctcagtcccaaaccttccaacagtgcagtggattcctaacctcaatgatccagtgaacaaagtcagggccc

SEQ ID NO: 4260 - protein, 59 aa, Homo sapiens
MGSVSQRISYCSDSGIRPHSHVPAAVAMQQHVHLLAMAGGQQVLGCLPPCSYSKQWWIQ

SEQ ID NO: 4261 - DNA, 366 bp, Homo sapiens
  misc_feature (1)..(1): Wherein n may be a, c, g or t
  misc_feature (2)..(2): Wherein n may be a, c, g or t
nnacgcgtcgaggaagtggagtgccgtggtgctttagcctggatgatgggcgaggaagggcgcggcgtaccgaccattatcgagatggtggcgatgacccgtttcgattgcatggtcggctccagtgccttgatgcgccaggcctcgacccaggccagccatcattgtgcccatcggttggtcggcggtcgcgtgctcagcgagcagccgctgatgcagaacgtgctcgccgacctggcgctggagagcgaggcggcgctggccttgagcctgcgcatgggccgggcgctggatcatctgggggatgagcatgaggcgaagttcgcccggctggtgacggcggtgggcaaatactggatctgcaag

SEQ ID NO: 4262 - protein, 122 aa, Homo sapiens
  misc_feature (1)..(1): Wherein Xaa may be any naturally occuring amino acid
XRVEEVECRGALAWMMGEEGRGVPTIIEMVAMTRFDCMVGSSALMRQASTQASHHCAHRLVGGRVLSEQPLMQNVLADLALESEAALALSLRMGRALDHLGDEHEAKFARLVTAVGKYWICK

SEQ ID NO: 4263 - DNA, 327 bp, Homo sapiens
  misc_feature (327)..(327): Wherein n may be a, c, g or t
ggatcctagaccatgacctccaggtgaagtgtcacaactctgacatggagagccatattctggatggaaggcaagatgggctccttaaaaaaccgtacacattgctgggcttcagatgcttggctgctgggcacatatgcaggtttataaagcaagtatctgggctgacttccacaggcaaccctcacagtgtgtgagatgccatggtcaagcatcagagagcactggcttggagggagggtatcagtttctcttttctttatagtagtgtataagttccagtttccctctgtccaaatatggagtgagtattttcagttcagaatn

SEQ ID NO: 4264 - protein, 69 aa, Homo sapiens [sequence omitted]

SEQ ID NO: 4265 - DNA, 433 bp, Homo sapiens
tgatcacaattgacataaagtccatatatgattattccaacatctgcatgtcctaaagatctacttatattgtgctattttttgccttttagtttccagtcacttgattttgtcttctggtgtatttaataatttttttgttaagtgtaagatatgcacaaaaaattgcagaaactctgaatgacaataactccttcccaagaggatttaatttccttttggcaggcagttggatgcaatcagtgattgagatagttcaagactggactttttgcctttaaaaaaaacctccccttttttttatttttatggggtaacccttttaggtgtctcaactgaatgcctcgggtggttacaaagatcttgtcctcccttgttgcccctgaacaccaagtttcattttcaccttttctccacttccccatccactagt

SEQ ID NO: 4266 - protein, 61 aa, Homo sapiens [sequence omitted]

SEQ ID NO: 4267 - DNA, 403 bp, Homo sapiens
agtactgttctgttttctgcagttgtggaaggatcctggatttggaggccatacaggtcgtgttatttgcttatccagaaaataaacatcatcattgaggcttcttctggtgatgaagcattctatgtccattgagaaatatgccatatttctatagctcatgtagctgtttgtcttcatactaattattttaatgctttatcttcttcaaaaatctagaaatatttttactaaagctgagaaaaaagttgctttcacatgagccactagatattgctactgatcatttgtattcatttccttgcatactatagaacacttactggttatcttagggctccttctctctcatcatctctgtacagaagataggagtttatttgcgaatcatcttgtgtggggt

SEQ ID NO: 4268 - protein, 60 aa, Homo sapiens
MKTNSYMSYRNMAYFSMDIECFITRRSLNDDVYFLDKQITRPVWPPNPGSFHNCRKQNST

SEQ ID NO: 4269 - DNA, 300 bp, Homo sapiens
  misc_feature (1)..(1): Wherein n may be a, c, g or t
  misc_feature (2)..(2): Wherein n may be a, c, g or t
nntccggattgtttacctgatggccagcatcatcggcagaagcagcagatagaggaagatgaggtggatgaggcctattggtcatctgtgagcatgctgtatgagaagatccccagctgtacgcggcccaggccgcccaaacccaagcatgccatcaccattgctgtctcttcccgggcacttttcaatatgggggatgacagaaaaatctacgaagaagagggtctggaaaagtacatggagtatcagctcactaacgagaacgtcattctgacccccagaccagcatttcggtttgtc

SEQ ID NO: 4270 - protein, 100 aa, Homo sapiens
  misc_feature (1)..(1): Wherein Xaa may be any naturally occuring amino acid
XPDCLPDGQHHRQKQQIEEDEVDEAYWSSVSMLYEKIPSCTRPRPPKPKHAITIAVSSRALFNMGDDRKIYEEEGLEKYMEYQLTNENVILTPRPAFRFV

SEQ ID NO: 4271 - DNA, 392 bp, Homo sapiens
tgatcattcgactccatgccaggattggctgaaaattgtctaacacctaaccaaatggctaccaatgcaaggggccaacaacgtaacaattctgaaagctaagttaggctaatcatcttctcttagtagatcaaactataaagcagaaaggaaagaggccatagaaattgaagttgaaaggagctgatgttgggacaggccagacgaatcaaactgagccatgataaaaaccaaagttttgagggagtagaaattacaagtgaggaaagacagacggctggcaaagaacaaagaatgtgcagactttgtattaaaaatggaaccagtcattagagcagcctctagtgcctactagcagctttttagtacagtcttcatgtaaccttattatg

SEQ ID NO: 4272 - protein, 64 aa, Homo sapiens [sequence omitted]

SEQ ID NO: 4273 - DNA, 271 bp, Homo sapiens
agatctgcgaatggctttgccacttgcaggttgtaaggcatggtgggggctgggatcaaatcacctccccagctctctgtttctttgtctatacaatggtgatcaaactggatatctccactgagcaccaggtgtcctgaagagatgggcgggggtggaggcagcatgagtgggaggtgagcatgttggcaggggccccagggcccgggcagctctctagagaaaggatttcatggctttaaaaccacaggactctgtcacctccaaggtc

SEQ ID NO: 4274 - protein, 55 aa, Homo sapiens
MLPPPPPISSGHLVLSGDIQFDHHCIDKETESWGGDLIPAPTMPYNLQVAKPFAD

SEQ ID NO: 4275 - DNA, 326 bp, Homo sapiens
tgcggattcttataaaagtttggggaggtattctctataaaggcaggggttgcagaatgagagactccctgaatcactcatgcccttgaggccagctttgaccaagacgcttgaagatactcttagtccctgggttccttcatgtcagaaactagcaaatccccaaatcccaggatggagctgggggagctggggcaggagggctttgccgacagaaccatatctccagcatgccctagcaacaagcatccattccaatctctcagatatccagaactcgagactgcagccccacttagtacccactgatgagaccagcgagaccc

SEQ ID NO: 4276 - protein, 82 aa, Homo sapiens [sequence omitted]

SEQ ID NO: 4277 - DNA, 211 bp, Homo sapiens
gaattcgaaggcacaacatgaattgcacaacgtcctcgtctttccacctttaagaccagatgctgagattccgaggcaggcctgtgagcctgtcactgatgtgatgcaggagattccgctggtgcccccggaaattggcttggtctttccggccgggggcagaatgatcgccacttccgttggtaacagcattgcttcttgctgacatatg

SEQ ID NO: 4278 - protein, 64 aa, Homo sapiens
MLLPTEVAIILPPAGKTKPISGGTSGISCITSVTGSQACLGISASGLKGGKTRTLCNSCCAFEF

SEQ ID NO: 4279 - DNA, 423 bp, Homo sapiens
acgcgtgttggcctacaccactagcctacattgacagaaataatcaaataaacactagaaaacctgttactggttacttcaaggcgactacttagtatgtatatgtcacacagtctcctcctgagttctctaaattatgtttggtgactgaagcaaaaattagaacactgtctaacatggtctcaatgcatgtagttattctatataattttataaatgagagatggtcaaggagagcaaatgggcacaaagtttctacactttgctcaaactggtaaaatgctgacaccaacagactgtgataagttatgtatttataatgtttatacacacacacacacatatatatataaaacccagaataatcactaaaaaagttttaagaagagatatactcaaaaatggaaactgactttctatctg

SEQ ID NO: 4280 - protein, 83 aa, Homo sapiens [sequence omitted]

SEQ ID NO: 4281 - DNA, 406 bp, Homo sapiens
gtggttatccagcctctacttcaatgtcacaattctctccaaagcatctctctcaagtggttatccagcctctacttcaatacccgcagtgatgggaaacttatcatttgaggcagtacattccattctggcagttctgatagttagaaaagtttccccttatactgagttccttgaaatttcttttcatttgtttctagttcttcccactgaagccactcctcaccttcaaatgtgtcaagacagttactctaccctctccccctctccctacagaaacacacacacacgcacacagacatacagtctattttcatggactcggtttttttttttgtttgattggtttttgttgttgtttgttgttgttttgagacaatgtctcactctgttgcccaagctggag

SEQ ID NO: 4282 - protein, 105 aa, Homo sapiens [sequence omitted]

SEQ ID NO: 4283 - DNA, 655 bp, Homo sapiens
tcatgatgctctgccaacatacgccataacaaagaaaccttttgccaaccggtaccctgaccgcctgccgaaaagtccatattctcacgggccgtagctggtcctaaaattcgtttacaaaccgtagcagccactgcatagacaggcttttcagggtactccagcgctgtccacagtggatctgaggcaccgccctcgttatcatcaagcggcggcagggcagagcccgaaaccgtctctaaatacccagcccaaggcttcggaagcaccagaatctcagtctcatagacatagatagataacgtaccgtcatcgctatgctcgtaaagcgaagactcaggatcctgcacagaggcaaactgtccgcctgcctcaggggcgattttcacattaaaaggcgcaataacctccggctggtcaaccgaatacccattgtttgcaccagagcttgggcaacacatggataaccagagtatgcacggcacccggctgaggatgcgtgtgttttaggatcgtaacgccgacaccgttaccgcgcgcgctcgcttgaaagtagcgaacttcactcaccactcgttacttccaaccagggaatttgacctgcgggcttaggagcagaaggcagaccgggaccgctccatgaaccaaccacgat

SEQ ID NO: 4284 - protein, 153 aa, Homo sapiens
MCCPSSGANNGYSVDQPEVIAPFNVKIAPEAGGQFASVQDPESSLYEHSDDGTLSIYVYETEILVLPKPWAGYLETVSGSALPPLDDNEGGASDPLWTALEYPEKPVYAVAATVCKRILGPATARENMDFSAGGQGTGWQKVSLLWRMLAEHH

SEQ ID NO: 4285 - DNA, 390 bp, Homo sapiens
  misc_feature (390)..(390): Wherein n may be a, c, g or t
gcgcgccagggccagttaggtattgggtaaatgggaccatgcagactattaaaaattgaagtgcacatgaagcagccagtcataagcagctccagccactgtgtgggaatatagtttatgttgccagatcatctgatttctttcccctaagtgggaaatccagatcaatgtacatctcttgatttgcaagtgttggtgaacaaaattcatattttaagatgctgtattcagcacaaattaaatacacttatttgctgaatactgccagtttgtccctctgcagtagtaccatttgaagtacagtgttttcataatgattctgtgaaatggacgggtctgtgaatgtacataatttagcagataacattgttaaattattaggtttgtatn

SEQ ID NO: 4286 - protein, 53 aa, Homo sapiens
MNFVHQHLQIKRCTLIWISHLGERNQMIWQHKLYSHTVAGAAYDWLLHVHFNF

SEQ ID NO: 4287 - DNA, 174 bp, Homo sapiens
  misc_feature (76)..(76): Wherein n may be a, c, g or t
  misc_feature (109)..(109): Wherein n may be a, c, g or t
atccatccccccagctgtcaatccatctacctacacatctgtccatctacccatctacccacccatccacccaccnatccatctatccatgcatccacccatccacccnatcatccatccatccatccacgcacctacccaccctgtcagccacctacccattcattcatccat

SEQ ID NO: 4288 - protein, 58 aa, Homo sapiens
  misc_feature (26)..(26): Wherein Xaa may be any naturally occuring amino acid
  misc_feature (37)..(37): Wherein Xaa may be any naturally occuring amino acid
IHPPSCQSIYLHICPSTHLPTHPPTXPSIHASTHPPXHPSIHPRTYPPCQPPTHSFIH

SEQ ID NO: 4289 - DNA, 285 bp, Homo sapiens
  misc_feature (1)..(1): Wherein n may be a, c, g or t
  misc_feature (31)..(31): Wherein n may be a, c, g or t
nggtacctgatcctggtggagagccttcagngttgaaaaaacgaccttaatgaggaaaccgcggtcagccaactgaagatggtaagaaaacttcgtcgcgagctggatcggattgtggcgattgatttctttcttggtgaagcgcaggcgcaggccatttttgccttgtcagaactggaagctggcattaacaggttcatctctcccggagagcctcatgccgtcagtggcttgctgacacggctgaagcctgaggattttcataacaggatctgggctacgcgt

SEQ ID NO: 4290 - protein, 83 aa, Homo sapiens
KNDLNEETAVSQLKMVRKLRRELDRIVAIDFFLGEAQAQAIFALSELEAGINRFISPGEPHAVSGLLTRLKPEDFHNRIWATR

SEQ ID NO: 4291 - DNA, 354 bp, Homo sapiens
acgcgtcttatacttcacccatacataacattggaatctcattaatttttgcaaagatatggtgaacaagtttcaaaataagaatgtatgtgtaccgaatcgtagctcgaggtaataatgaaaaaaaaaatcggacatctggaaagttacgaatatagaagcagatacccctcttgacggcaaacattgtgtgctcgaccttctatcccgttaaaatatcataataaacaaacccctcccgcgaaaacaaaaaaagagagctaaaaaaagtacttcttcgcgttatagatggtgccgcaccgtacgtcataactaaaaatagcgttaccacagctccctgaacgaaaagggccc

SEQ ID NO: 4292 - protein, 59 aa, Homo sapiens
MFAVKRGICFYIRNFPDVRFFFSLLPRATIRYTYILILKLVHHIFAKINEIPMLCMGEV

SEQ ID NO: 4293 - DNA, 343 bp, Homo sapiens
ccgcgtgtgtgcgcacatgtatgtgtgcaggcgtgtgtgcgcatgactgtgtgcctgatgcatgatgttggcgtcgtgtgctactccagtcgtgtgtgtctgtcttgcttccctcctgggtggtaagcacctgtgacctggatgtcctttctcggggtccttctcaatggggctccatgtgacttttcctgtcatcactgtctggggaggggctgtctggacagatgtcagaagtgagccatggggttggggcaggtcagccagctctggcctcagtactccagtgtgattgtaaattaagaggaaatgttagccagttgctttagcagcaaaaaaaaaattt

SEQ ID NO: 4294 - protein, 65 aa, Homo sapiens
MTGKVTWSPIEKDPEKGHPGHRCLPPRREARQTHTTGVAHDANIMHQAHSHAHTRLHTYMCAHTR

SEQ ID NO: 4295 - DNA, 207 bp, Homo sapiens
aattctgccaataaaactgcacatcataggcctatccaacgcacgagagatcggaaattcaatgaggataaaccctggaaatcacatacagatataactttcgtaacagacaacgaaaggaagcgttacgaaagcatgtgggtaagcaacagacaccgtcatttgaacctgttgagctggtggccctctataacgggtgattccgga

SEQ ID NO: 4296 - protein, 69 aa, Homo sapiens
NSANKTAHHRPIQRTRDRKFNEDKPWKSHTDITFVTDNERKRYESMWVSNRHRHLNLLSWWPSITGDSG

SEQ ID NO: 4297 - DNA, 335 bp, Homo sapiens
tattacgctgaagtgcccggtggcctgaggttcgcgtccaccctgcctgcgctgttggcgggcggcggcatcgacacctccatcgaccctgtgggccttcaccaatacctgtcgtttcatgcggtggtgcccgcgccatacacgatgctgcgcggcgtgcgcaagctcgcaccgggcacgctcatgcacattgcacccgacggccagcgcacggaaaccgcctactggtcgctgaactacgcgcgcaatgccgaggcagaaaaccgctcgtttgacgactggaaggacatcctgctggatggcttgcgcctggctgtgcgcccccgcctggtggg

SEQ ID NO: 4298 - protein, 111 aa, Homo sapiens
YYAEVPGGLRFASTLPALLAGGGIDTSIDPVGLHQYLSFHAVVPAPYTMLRGVRKLAPGTLMHIAPDGQRTETAYWSLNYARNAEAENRSFDDWKDILLDGLRLAVRPRLV

SEQ ID NO: 4299 - DNA, 316 bp, Homo sapiens
  misc_feature (158)..(158): Wherein n may be a, c, g or t
  misc_feature (297)..(297): Wherein n may be a, c, g or t
  misc_feature (298)..(298): Wherein n may be a, c, g or t
  misc_feature (311)..(311): Wherein n may be a, c, g or t
cctaggtactaaattataaatggcaatggcaaactgacagttcacagacatattttgtttgagccaagcagtacttctttcaacattaagccaaagcttaaatttttgctctaaattgtaatatcttgtttttgaaaaaaatgcgtgacaaatagtanataaatatctgaccatcagtaagtatttgttgactgaatctcatttagatggcgaatgcacaaatgtgctttccgattcacaatagtctgaataccaacatgtacttgcaccccaaccactatagctctgggggtttgnngtgcacactctgnaagtg

SEQ ID NO: 4300 - protein, 58 aa, Homo sapiens
  misc_feature (6)..(6): Wherein Xaa may be any naturally occuring amino acid
MVRYLXTICHAFFSKTRYYNLEQKFKLWLNVERSTAWLKQNMSVNCQFAIAIYNLVPR

SEQ ID NO: 4301 - DNA, 276 bp, Homo sapiens
tgtacatcccagcctgactgatgattttattccttttctcctggcacgtctgatgcttctaatgaggaaggcaaggactgtatagaatactttcctcatctcccttctctctctaggagctttgcagcaggatctggggacatctgagcaccagatgtttttcttggccattgccactgttttgtagagaatggataggcttagtggaacattcctcattgttctcactttaagaaactgaacagtgctcttaagaagactgaaggtaaggtatga

SEQ ID NO: 4302 - protein, 73 aa, Homo sapiens
MRNVPLSLSILYKTVAMAKKNIWCSDVPRSCCKAPRERREMRKVFYTVLAFLIRSIRRARRKGIKSSVRLGCT

SEQ ID NO: 4303 - DNA, 398 bp, Homo sapiens
actagtggacgttactgttcctatcgcatttgcatgtaacacatagaaaactgttccagtacaaaaaaatgatacgtcgtcaggagaagtagatctttggtacacctgtcacgctcgctcatttcccactcagcgatagcgtcaatgcgagcaaatcatgtccattcgtacgccttcgcaaaacgaatacgcacggaaatcaataaagcaaaaaagttcgacccatactggattcgaaccagtgaccttagagtttgtaagtcgtaatcgaccagttgtaacagctccacgtgctaaccactgtaccaatgggtcttcgctgaagaaataggttgtaattaacatatatgatcacccaataatggaaaataacttatcattgcttagtaccaacgcgt

SEQ ID NO: 4304 - protein, 67 aa, Homo sapiens
MLITTYFFSEDPLVQWLARGAVTTGRLRLTNSKVTGSNPVWVELFCFIDFRAYSFCEGVRMDMICSH

SEQ ID NO: 4305 - DNA, 294 bp, Homo sapiens
aaatttaccatcagtgcaactctaaaagttatatggttaactctcgcagttgtatgggccatttgttttggtgctatcaatgatagatctaagagtgcttgtttcgaatggttgctagcattttggtttggtatcatatttatgattctttccgccgacttttatttaggtggaagatacagacaatcccgctatttcaaccacgtggaatcattttcgggttattacaagtatgacaaggcgctaggcctctaccacagtgaagacgttttgccttcggacgataacgccggc

SEQ ID NO: 4306 - protein, 98 aa, Homo sapiens
KFTISATLKVIWLTLAVVWAICFGAINDRSKSACFEWLLAFWFGIIFMILSADFYLGGRYRQSRYFNHVESFSGYYKYDKALGLYHSEDVLPSDDNAG

SEQ ID NO: 4307 - DNA, 405 bp, Homo sapiens
  misc_feature (405)..(405): Wherein n may be a, c, g or t
gggcccaatgcttgcacctcctgtgtggctccgcccaagaaagtctcctggccctgcagacgaggagcccccttcggctcagtcaggggcctgagtgcatttgtttaggcgacactggtgaggaagaacctcagaaaggcaggtgtccaggtctcggccacctgcaaggccccctcggaggtgaggccaagggggacagtgtgggcagccagacacccagaccctcttccatctgtctgtgaggagcccgaaccccaaatccagaatccgcaggacagtggccggtcatgggaaggcatgcatcggaagcctgaggcagagtcccatcctgccccagcctggtggccaaggccctcttgaccccagctggcaatacaaaatgacctgctaggaaagccctggggn

SEQ ID NO: 4308 - protein, 64 aa, Homo sapiens [sequence omitted]

SEQ ID NO: 4309 - DNA, 260 bp, Homo sapiens
gtgcacgccatggacctcgtggctatctcgggggtgacggtatcgtcaacccgggtacgcgaggtcgtcgctgcaggcaaggtcaccgaggcagcagaactgctgggcaggcccttcgaggttggtggggttgtcgtcatgggtgaccagcgtggacgtgaactcggattcccgacggccaacctcgtagtgccccaggaccgcgctgttcccgccgacggtgtatacgccggatggttggagcccaccagcggtccgga

SEQ ID NO: 4310 - protein, 86 aa, Homo sapiens
VHAMDLVAISGVTVSSTRVREVVAAGKVTEAAELLGRPFEVGGVVVMGDQRGRELGFPTANLVVPQDRAVPADGVYAGWLEPTSGP

SEQ ID NO: 4311 - DNA, 382 bp, Homo sapiens
tctagacacaaagtggtatctaagactgaaaaaggactaagagactgaactcttcctccactcagtgttacaaataatgagggactctgacatatctgagaaataataatacaattattattatttacaaaacaataaaaattacacaatctttccagaatttttctacacagtaaaacaggccaccaaaagaaacctatataaataaaaaacattgcaaatgacatacattagcatttgctgatccaattgcagaaacctggcctgtaaggtttcagcaatgaatgagcaattgaaagttgaaaattcaaattacaataccatttattttatcaccccctaacattaaatatttaagtagaaatctaacaaaatctgtaca

SEQ ID NO: 4312 - protein, 75 aa, Homo sapiens
MSFAMFFIYIGFFWWPVLLCRKILERLCNFYCFVNNNNCIIISQICQSPSLFVTLSGGRVQSLSPFSVLDTTLCL

SEQ ID NO: 4313 - DNA, 337 bp, Homo sapiens
aaatttggaatggctggagtgaagtattcatgggggagatgttttaaaggaatgaaactggagaagtgcaggggccacgtgagaagtctgacattcctggctaatattctttctaccacaccaaacaacaataatatcgaaggcctctggatattttcatgggtgagctgttacagatgtgtcccgtcagcacttgggaatcaccctgattgctggcagtgacttgagtcctagaaccttgttgctcagtgtggtctcagaccagcagcttgttagaaatgcagtctcagaccccacccagacttgctgcatcagagtctgcattttaacaggatcc

SEQ ID NO: 4314 - protein, 70 aa, Homo sapiens
MAGVKYSWGRCFKGMKLEKCRGHVRSLTFLANILSTTPNNNNIEGLWIFSWVSCYRCVPSALGNHPDCWQ

SEQ ID NO: 4315 - DNA, 280 bp, Homo sapiens
accggtggctgaggtgctgctagagccacgttagccctgaggatgctagctggggctccatacgagaaagaactaaacttcacatgtcagaaaccatcaagcctgaacatgctcattagtatccctgaggaagcctctgttcacatcctcccgctccagtgcatcaggcacattctgacactgccagacctttctggaaagcctcacacttctttgagtctggcttcttggagtgaccttaccatctctctgaggggcagaggaggctaacatctgatca

SEQ ID NO: 4316 - protein, 75 aa, Homo sapiens
MLAGAPYEKELNFTCQKPSSLNMLISIPEEASVHILPLQCIRHILTLPDLSGKPHTSLSLASWSDLTISLRGRGG

SEQ ID NO: 4317 - DNA, 391 bp, Homo sapiens
gtaccgagagacaccgggaagttcgatttgaacacaagttctgcctcggacgagactgtgttctcgttagataaccctcaagaaaacaactacaaacaccaagccatgaattccggccaggattggcgattggccgtcggggccaaaactacccagtcgtgtgataaattgaccgatctttatgccaatgccgcccaacaaaactacagattgtggctgtcttcattttagaataacgattaaggaatgataatcaaaagaaaaaaacaatctacctacatatatatgcactcaacatacataaatacacacgcattattgtttctataaacttccaacagacaatattcccatacaaacatcaactaactgatttcctcttcatacgcgt

SEQ ID NO: 4318 - protein, 76 aa, Homo sapiens
VPRDTGKFDLNTSSASDETVFSLDNPQENNYKHQAMNSGQDWRLAVGAKTTQSCDKLTDLYANAAQQNYRLWLSSF

SEQ ID NO: 4319 - DNA, 344 bp, Homo sapiens
gagctctgagtgagacagctactccttggccctttgtcaccactgtatgctaaccactcaatttgacctgtatttagttcaccttgaaagccagtgctatgtggtggatggagcaggatatcagagcttccatacatgcatgggggcctccacacctggattcgaattccagccctatcactttttcgggaaagttgcttgatttcttcgcactttagttttcttgcatgttaaggggtataataatgcacacacacttgctgtaaggactggataaattgatgactgtaaactatctggctcaaactaggcagtcaacaatcttattcttcctttcttaaccc

SEQ ID NO: 4320 - protein, 51 aa, Homo sapiens [sequence omitted]

SEQ ID NO: 4321 - DNA, 270 bp, Homo sapiens
gatcctgaagtttgctgccaatttatgagtgacgtctttgtttcattatcaactatgatttctgacataccgtccaaatattctatcacttggttacaaagactaggagacttatcaagaatggctatagcactatatccctcgagttttatcgattggaaactgagtgctgagcattggtatactgaggcgatgaaatacatatacaatcatggaaagctatattatcatatgtctaccgtacagcaaaacactcttgaagctcccccc

SEQ ID NO: 4322 - protein, 90 aa, Homo sapiens
DPEVCCQFMSDVFVSLSTMISDIPSKYSITWLQRLGDLSRMAIALYPSSFIDWKLSAEHWYTEAMKYIYNHGKLYYHMSTVQQNTLEAPP

SEQ ID NO: 4323 - DNA, 352 bp, Homo sapiens
ctgatcagcactgcatgaatctcacggctcagcaccaaagaatagagcacaaaaataaagttatttttttaaaagctgctacaatatacaaatattacatcttgattataattttattcttatttccctggggctgtcttatgatgatgtatccttattatcctctaagtgcatattcaccttagacacagtagcacagaagacagtatgaagatgaatgaatatggctgtcttccagtaaaactcaatggccactgtcatttgaatttcatataattttcatgcatcttgaaatattattatttttttattttttagctactttacaaatgttaaatgtgtgacgcctagg

SEQ ID NO: 4324 - protein, 56 aa, Homo sapiens
MNLTAQHQRIEHKNKVIFLKAATIYKYYILIIILFLFPWGCLMMMYPYYPLSAYSP

SEQ ID NO: 4325 - DNA, 372 bp, Homo sapiens
gcggagccgggtgactgtatcttctttgcgccaggcgatgttaaatcttcgcgtgctctgctgggtgcagcacgtaatgagattgcaaagaagctgggtcttatcaaggacggagattgggcctttacctgggtagtagacgcacctctctttgagccttctgcagacgctactgcctcgggtgacgttgctctcggtaattctgcatggacggctgtgcatcacgctttcacgtctccaaagcctgaatctatggatacgtttgataccgatccaggtagtgctcttgcttatgcctatgacattgtctgtaatggcaatgaaatcggtggcggttccattcgtattcaccgtcgcgatgtacaggcacgc

SEQ ID NO: 4326 - protein, 124 aa, Homo sapiens
AEPGDCIFFAPGDVKSSRALLGAARNEIAKKLGLIKDGDWAFTWVVDAPLFEPSADATASGDVALGNSAWTAVHHAFTSPKPESMDTFDTDPGSALAYAYDIVCNGNEIGGGSIRIHRRDVQAR

SEQ ID NO: 4327 - DNA, 243 bp, Homo sapiens
gcgtcggtgaagcgtctgaaagggcccacccgcccgctgcaggacgaagacgcccgagccgccgttatggcgagcattaagggcgtggcgatggtcacgtttttcgacgaagatacgccgatcgagctcctgcgcgcgctctcgccggacgtgatcgtcaagggagccgactatcgagaagaccaagtggtcggcgccgaccttgtgaagaaacacggaggcagggtgctacttgtgaagctt

SEQ ID NO: 4328 - protein, 81 aa, Homo sapiens
ASVKRLKGPTRPLQDEDARAAVMASIKGVAMVTFFDEDTPIELLRALSPDVIVKGADYREDQVVGADLVKKHGGRVLLVKL

SEQ ID NO: 4329 - DNA, 571 bp, Homo sapiens
atgcatcctctaaggactatttctcagaaatggcatataatggagggcaaatttggtgcttccaagtttgatgatatggctttacagagtgtctctttgggaatctgggtttgggcattgatgaatgtcatcaacggcgtggaatttatcgttaagcaataggtgttgactcccaaaatggaagcacctgcatctgtggagactcaagaggagaaagccttggatgctgtcgacgatgccattattttagattagtgttattacattatgtacgtatatataatatgtttatgtattggagtatacaatagaaagaaaatgaaatataaatgtcaacattcctatttgttttatttataaagttttagtaaatctccagtattcttaatgtcctccgtctccaatcttttgaataactgcccccctcttttatgaactgccaagttcatttccaaatggtttatcacccttgccattttatccctgtttgcatcattcttaccaagcttcctgtcaccaaactttagtaaaacgcggctgcatggatattcaacctcggtaaaccaaattt

SEQ ID NO: 4330 - protein, 53 aa, Homo sapiens
MHPLRTISQKWHIMEGKFGASKFDDMALQSVSLGIWVWALMNVINGVEFIVKQ

SEQ ID NO: 4331 - DNA, 258 bp, Homo sapiens
  misc_feature (52)..(52): Wherein n may be a, c, g or t
cgcgttgtccgccgctacaccacaacacgcccccgcaccgatgccgcaaggnccatctatgcactagcgctgaaactgaccacgatcaccaccgtggaccaagcccgggaatggacgctgcgtctacacgacttcgcagtggtctacaaggccttcctcaacgagaaaacactcttacccaaagagcgccgcaccctcaaccaccaatgggaatggacccatatccgtgtgcgtagggcttacaactcgcttgtgcac

SEQ ID NO: 4332 - protein, 86 aa, Homo sapiens
  misc_feature (18)..(18): Wherein Xaa may be any naturally occuring amino acid
RVVRRYTTTRPRTDAARXIYALALKLTTITTVDQAREWTLRLHDFAVVYKAFLNEKTLLPKERRTLNHQWEWTHIRVRRAYNSLVH

SEQ ID NO: 4333 - DNA, 303 bp, Homo sapiens
gcgtacgacccaaatctacctggaacgggtgtatttgatctgaagacaagagcagtttctgccataagatacgatttatcacatgtagagagtaataacaaccaaactggatatgagatagataaagtttatggggaatttgagtctttggaaagagaatattttgaactaatcaggtctgcccttctaaagtattctttgcaagctagaattggcaaaatggacggtattttcgttgcataccacaatatttctaagatgtttggattccaatatctacctttggacgaattagatttatat

SEQ ID NO: 4334 - protein, 101 aa, Homo sapiens
AYDPNLPGTGVFDLKTRAVSAIRYDLSHVESNNNQTGYEIDKVYGEFESLEREYFELIRSALLKYSLQARIGKMDGIFVAYHNISKMFGFQYLPLDELDLY

SEQ ID NO: 4335 - DNA, 302 bp, Homo sapiens
gtcgacgccgttgccgatctcgaaagcgccatgggtgatccggaccgacgcattgggaatggcatcggccacctccccggcaagaccggtatcgcgcgaactctccctgatcgacacttcgggcccctggccctcgaatgccagcggcgcggcgttccccccactgctggaccccgcccgccgtggtggaggcgggaccgtgcagcgagttgtcgagctgccctggaatagtcacgcccagttcttcacggaccgaagccaccttgcgctccataaactcgccaagaagaatatcgcggacc

SEQ ID NO: 4336 - protein, 91 aa, Homo sapiens
MERKVASVREELGVTIPGQLDNSLHGPASTTAGGVQQWGERRAAGIRGPGARSVDQGEFARYRSCRGGGRCHSQCVGPDHPWRFRDRQRRR

SEQ ID NO: 4337 - DNA, 177 bp, Homo sapiens
gaattctgttctgcttgcaaagcccgctggcaccctggccaaggctgcccagagaccatgcccatcagcttccttcccggggagaccagctctgctttcaaggtggaagagggcgacgcgcccatcaaacgctgccccaagtgcagggtgtacatcgagcgggacgagggctgtgca

SEQ ID NO: 4338 - protein, 59 aa, Homo sapiens
EFCSACKARWHPGQGCPETMPISFLPGETSSAFKVEEGDAPIKRCPKCRVYIERDEGCA

SEQ ID NO: 4339 - DNA, 333 bp, Homo sapiens
ggatccttcccggttattggatcactgcatccaaggtggcggcggcgactcttccgacgctttgctcggtggagcatcatcggccgcacggatcgcctggcgacgctcttcatcgagccgcgccgcttcgatctcgcggataacaccgcccacgtcagccagctcttccggctcgtcgaactcgccggtcaagacactggccgggtgcagagtgccggcttcgtacagcgcccacatctccttggcgtacttggtcttcttcaactccggggcaaagcgcccgaagtagggaagccatgttgcccacatcccgttccagcatggtgaacgcgt

SEQ ID NO: 4340 - protein, 95 aa, Homo sapiens
MWATWLPYFGRFAPELKKTKYAKEMWALYEAGTLHPASVLTGEFDEPEELADVGGVIREIEAARLDEERRQAIRAADDAPPSKASEESPPPPWMQ

SEQ ID NO: 4341 - DNA, 296 bp, Homo sapiens
cggccgttacctccgcgagctcctctagaggctgcgcggatcggcagcggcgccgctcgagggatcacgtcaactgcggcggacgcctcggttctccagcgagttcgtcggcctgagcccgacaaacgagtgtcagaaagtcctcatgcggttctgtgtggacgcggttgcgcctggcgcaaccgctcgggctgagccctcgctgcgctatctcctgttgcggaggcgcttgctgagctcgttgaggcggcgcttctcctcggcggacaggccgtccatcccgttggccgagatct

SEQ ID NO: 4342 - protein, 50 aa, Homo sapiens
MRFCVDAVAPGATARAEPSLRYLLLRRRLLSSLRRRFSSADRPSIPLAEI

SEQ ID NO: 4343 - DNA, 417 bp, Homo sapiens
  misc_feature (1)..(1): Wherein n may be a, c, g or t
  misc_feature (2)..(2): Wherein n may be a, c, g or t
nngcccacgctgaccaggacccgccccggggagttcgcgtcgcacaccgtgcacggcgagtcgacgacaacccgcgacaccaaggtggagttcgttactaccggggtgttgctgcgccgtctactcagcgaccccgacctgactggggtggatgctgtcgtcctcgatgaggtccacgaacgtcacctcgacgctgacctcgtcgtggcaatggtgtgtgaagttgctcaattgcgcgatgatctgaccattgtcgcgatgtcggcgactgttgatagttccgggtgggcagcttttctcggcggtgttgaaccggcgccggtcgtcgaggtggcctccgctctgcatgaactcgaggcggagtgggcaccggcagctggtgctgctgtggaatctcggggagtgagtcgcgaattc

SEQ ID NO: 4344 - protein, 139 aa, Homo sapiens
  misc_feature (1)..(1): Wherein Xaa may be any naturally occuring amino acid
XPTLTRTRPGEFASHTVHGESTTTRDTKVEFVTTGVLLRRLLSDPDLTGVDAVVLDEVHERHLDADLVVAMVCEVAQLRDDLTIVAMSATVDSSGWAAFLGGVEPAPVVEVASALHELEAEWAPAAGAAVESRGVSREF

SEQ ID NO: 4345 - DNA, 210 bp, Homo sapiens
  misc_feature (124)..(124): Wherein n may be a, c, g or t
acgcgtaaaatcgcgcgttccacagctgatgtcaaaatcatcatgcttaccgtccatacagaaaaccctttaccagcgaaagtcatgcaggccggtgctgcgggctacctcagcaaaggcgcgngtccgcaggaagtcgtgagtgcgattcgttctgtctattcagggcagcgttacattgcttctgacatcgctcaacaaatggcgtta

SEQ ID NO: 4346 - protein, 70 aa, Homo sapiens
  misc_feature (42)..(42): Wherein Xaa may be any naturally occuring amino acid
TRKIARSTADVKIIMLTVHTENPLPAKVMQAGAAGYLSKGAXPQEVVSAIRSVYSGQRYIASDIAQQMAL

SEQ ID NO: 4347 - DNA, 240 bp, Homo sapiens
gccgcaatatcgtcgcgccgcgcctccatatcgtcgtccgggccaatggcgacggtggcaacagctcctgcttgcccacgacgtgttccatcgcggtcacaaattcagtcgccaatcggccatgagtcacgagaacaagcccgatcatccgtccgcccagctcatgcaacacgcgccccattattttgcgtctcgtccggcgcgccttccagcgagtcctggggcgcagcgtcaagatct

SEQ ID NO: 4348 - protein, 80 aa, Homo sapiens
AAISSRRASISSSGPMATVATAPACPRRVPSRSQIQSPIGHESREQARSSVRPAHATRAPLFCVSSGAPSSESWGAASRS

SEQ ID NO: 4349 - DNA, 337 bp, Homo sapiens
aagctttggaatattataaggctgcgggaggaaaaatataattagaattttaatcttgagtgaagccttattaaatttttagtaaatttggtaaggcttttttatgtaaccacctaaacacaatattatgaagagtttatcaattaccggacttatactgttagctgtttttgctttgcttttttatcttacaactgattttgccgtagagcaaattaaaatttctcatatcatgggaatgatggcaggagttgggatagggcttatcatcggtggcctggttggctatgtcagcaaaggaagtgctatgaaagctgaacaaaagaaaaaagaattc

SEQ ID NO: 4350 - protein, 70 aa, Homo sapiens
MKSLSITGLILLAVFALLFYLTTDFAVEQIKISHIMGMMAGVGIGLIIGGLVGYVSKGSAMKAEQKKKEF

SEQ ID NO: 4351 - DNA, 333 bp, Homo sapiens
gtgcacctgttgtatgaaatggagtgcaaaattaaagacatttttaaaagcacacattcgttgagaggacgtcaacgaatctatttgttgggctgaatccttccccagcatccctggggcagccgtgatccacacagggcactaagccctggggcaagggaggtggcaggacagactgacccacatatggacgtgcagagaagcagcctgccccatgcacttgaaggaggaaaaggcaacgcatatttgccacaaatgtttactagcagcccatcctctcacaccgaggcattttaaaattattgagtaaactcattctcaactcaatgatca

SEQ ID NO: 4352 - protein, 66 aa, Homo sapiens [sequence omitted]

SEQ ID NO: 4353 - DNA, 416 bp, Homo sapiens
  misc_feature (353)..(353): Wherein n may be a, c, g or t
  misc_feature (360)..(360): Wherein n may be a, c, g or t
  misc_feature (398)..(398): Wherein n may be a, c, g or t
ggatcctacagattgtttatcccaaggctgtctgggcctgggctctgtgaacagtgtcactctaaaaataacaggctgtgccgagaatagcagactttctcctttttcctgcagaagacgacttctcagctccttggaggggtcagtacgaggtgagagccatagaaagatggcaacgaaaaagaaagagacattctgcaatgggttgaatggggtctccctgacatttacatcacccagaacctcaaaatatgaccttatctggaaacagggtcttttgagatgtcatggattctgctgccatcagcagagagacagaaaggtctgccctctggaagtcagctgaagcccangtgcaanagttttttgggcagctgggtcaagacattgtggttctncatcaggaaccctttgca

SEQ ID NO: 4354 - protein, 58 aa, Homo sapiens
MATKKKETFCNGLNGVSLTFTSPRTSKYDLIWKQGLLRCHGFCCHQQRDRKVCPLEVS

SEQ ID NO: 4355 - DNA, 432 bp, Homo sapiens
accggtctgctcaggatttctaattcttgtgttgttctggttatttacatatgtaatgttttcatattccaatatacagactcaacacgtaacactactacataaatgagaccttgccttttctgaaatgcagtcttttctttctttggctccatcactaaccaccacccctccttcactttagcacttaccctacaagcctagtatgtatttctctgtatttttctctgtgttcacatagtcctatatacatacactcatatacatattaattatgctttacaaaatgggactttgtaaacactttcctccattttgcttttcttgctcaaggggatggggagaaggtacaaaaattgtgtttttcagtattttatatccatacttttatcaggttacggccacaaataaagtaagctttcctaaatgatc

SEQ ID NO: 4356 - protein, 51 aa, Homo sapiens [sequence omitted]

SEQ ID NO: 4357 - DNA, 430 bp, Homo sapiens
acgcgtgttctcctggtgcaccgtgcgctgtggctcctcctgagcggggcaagcgctcccgcacgcagtagccctgggcctggccattgccgaggacgcgcatgtgcacacggccgaactcttggctgccgggcagctctggccagtcccggaaacacttgttccgaggggagcgctttgcatcagccttgctggcagcacctcggcaccccgcccctgcgacctgcagagacgcaggtgtgtacgtgcagccacggggctctgtgggagcctccccactcccacggcgtcccacagcctccttggcctggtcgggaagggccttgggcagccgaagatgcacggggtgggatgggcactgggagcactggcaccgcacccctacccggccccgctccatctccctggtggtcatgacgatgacacgcgt

SEQ ID NO: 4358 - protein, 138 aa, Homo sapiens [sequence omitted]

SEQ ID NO: 4359 - DNA, 231 bp, Homo sapiens
gtacgcccgacccaatggctggtgatgctgctcggtgaccacgtcatcgactgcaccatcctcgcccaaaaggccggtcgtgattcccgtggtcatcgcttccaccatccacacgccgtgcgcatcacctcgcccgccaactatgccgccgatctgcgcgccgcttatgtactggccgatgccaatgagcgtcgtgagctgatcagcaagcgcaccgaagaactggcgcgc

SEQ ID NO: 4360 - protein, 77 aa, Homo sapiens
VRPTQWLVMLLGDHVIDCTILAQKAGRDSRGHRFHHPHAVRITSPANYAADLRAAYVLADANERRELISKRTEELAR

SEQ ID NO: 4361 - DNA, 393 bp, Homo sapiens
  misc_feature (1)..(1): Wherein n may be a, c, g or t
ncaaatggcaattcatagcccgccagatcggacacggagctggtggtatccacggattcgggcgcggaggcgtcgggctcaagctccgcttcggcaccggtcggcactgaggaatctccgtcggcctccgcttcggccgcagcctgggctgcgccagactctgcgggaggcaccttctcccgggttcgccagccaaatggcgttgcaggctccagcatccagtccggtgccttcggcacccccgcactgcgcagagaggccgccagaaacgatggcaccggcggcgcgggaggtgatacaggcgcttcggccggagcgctcacggactccggcactacaggtgcagcttgcgcttcctgcggcggagcaacagggtcacttcgaggcggggat

SEQ ID NO: 4362 - protein, 125 aa, Homo sapiens
PARSDTELVVSTDSGAEASGSSSASAPVGTEESPSASASAAAWAAPDSAGGTFSRVRQPNGVAGSSIQSGAFGTPALRREAARNDGTGGAGGDTGASAGALTDSGTTGAACASCGGATGSLRGGD

SEQ ID NO: 4363 - DNA, 313 bp, Homo sapiens
accgtcacgctctctgatgcctcgttggcggatgccccgtctaaagtgatcgcccagcgtgcggttcgcaccgagggcaagcaggcgccgtttaattttgtcctgccgtataatccggccgatattcagcctaatgcacgcattatcctgagtgcggcaattacggtaaatggtcagatgacctttattaccgacactattcaggaagtggtgaaccgtaacggtacccgtgccgatctggtgatggttccggtgcagggtgttgccgttcaggccgccccggcgaccatgccgtaagccggtaatccttaag

SEQ ID NO: 4364 - protein, 98 aa, Homo sapiens
TVTLSDASLADAPSKVIAQRAVRTEGKQAPFNFVLPYNPADIQPNARIILSAAITVNGQMTFITDTIQEVVNRNGTRADLVMVPVQGVAVQAAPATMP

SEQ ID NO: 4365 - DNA, 211 bp, Homo sapiens
  misc_feature (211)..(211): Wherein n may be a, c, g or t
accggtggaaggtccatgtccagtaggtgatttgatgtattataggtctgaagatggggtctgaagatgagaactgcatttgggcttggaggtaaacatttggatacgttatccaggctgagaccaaaccttccatgtaaacacaaactgtgcttcatccttatctaccatgaacataagggaggagaaacacatgaaatgtttcttagcn

SEQ ID NO: 4366 - protein, 52 aa, Homo sapiens
MKHSLCLHGRFGLSLDNVSKCLPPSPNAVLIFRPHLQTYNTSNHLLDMDLPP

SEQ ID NO: 4367 - DNA, 153 bp, Homo sapiens
gatcaccagacaagcgatttggaaaacaataataatgataaagtcgaaggcctagccccaaaagaccaaacaacatcatacgagcctgtggatgaggtacctgaatttattgatgatgccgatagcgtaaacgaagaagaacagaccgtcgac

SEQ ID NO: 4368 - protein, 51 aa, Homo sapiens
DHQTSDLENNNNDKVEGLAPKDQTTSYEPVDEVPEFIDDADSVNEEEQTVD

SEQ ID NO: 4369 - DNA, 441 bp, Homo sapiens
acgcgttgtcttcctgcacgcgttgtcttctctccggtgctgctgtatgtctgcctcaaggcttcgcagcagccacctggccacctgttcctcattcctcgcaggtaaacatggaccaagccacttttcgatgccaggcccctggcctgccctccagagcccacagccccctggagaaggacaccaaaaggaggtgcatagagcacagtttgatccgatcaacctgcgaaaggaggtgcatagagcacggtttgatccgatcaacctgcgaaagcaaaaaaggtagatgcacactgccttgtatcctggcagccagccaggtctacggagccacaccgcaccccacctattgattttccaattagaggcaaagtcttgctgtgttgcccagcctggccttgaactcaagcaatcctctcacctcagcctcccaagcaattg

SEQ ID NO: 4370 - protein, 80 aa, Homo sapiens
MDQATFRCQAPGLPSRAHSPLEKDTKRRCIEHSLIRSTCERRCIEHGLIRSTCESKKGRCTLPCILAASQVYGATPHPTY

SEQ ID NO: 4371 - DNA, 274 bp, Homo sapiens
  misc_feature (269)..(269): Wherein n may be a, c, g or t
  misc_feature (270)..(270): Wherein n may be a, c, g or t
gcgtcggagcgcatcctgtcgggccagacggtcacggcgttctggcactcggtgcggcacgctcagccgctggccatcggactgaactgcgcgctgggcgcggcgctgatgcggccctacatcgaggaactctcgaaggccgcgggcgatacgccgatctcctgctatcccaacgcgggcctgcccaacccgatgagcgacaccggcttcgacgagacgccggacgtcacgggccggctggtcggcgagttcgccgcggcgggcccccnncccc

SEQ ID NO: 4372 - protein, 91 aa, Homo sapiens
  misc_feature (90)..(90): Wherein Xaa may be any naturally occuring amino acid
ASERILSGQTVTAFWHSVRHAQPLAIGLNCALGAALMRPYIEELSKAAGDTPISCYPNAGLPNPMSDTGFDETPDVTGRLVGEFAAAGPXP

SEQ ID NO: 4373 - DNA, 165 bp, Homo sapiens
ggtaccctggggcgcgcgatcttcacggtgggcaagtggatccggggcacggggcgggccatggaccgcctcggatccaccatccagggcggcctccgcgtcgaggaacaggtttcaaggcatcgtacaatcatgtcttcatggatagtcgatgcacccaagggc

SEQ ID NO: 4374 - protein, 55 aa, Homo sapiens
GTLGRAIFTVGKWIRGTGRAMDRLGSTIQGGLRVEEQVSRHRTIMSSWIVDAPKG

SEQ ID NO: 4375 - DNA, 475 bp, Homo sapiens
ccatggaaacttcctgccaaggcaggagcaatgacagcagtcccggccagtcccacagagcgtgcacagatcctgtctgcagaaggcccaggggaaagcaggcagccccggtccctcagcagcccagtgacgggctgccatgtgcagcaggagcccggggcctgcctccctgaccaggccctgccgactcacagctcccacatagctgcttcacccgcacactctctgacgcccaagaccccaacacgccaactctgggtacaagcctggggctgtcagagggcatttcctctttcccagcttcggcctccttgactgcaaagcgggaaaatcccatgacctcccacggtccacgggatggtggacgacagcctccagcagcaccgtctgaaaggctcccccgccaggatggggctcacggcaacatgggaaagtggcattctcggccctctatcctggatccttgtgaacgcgt

SEQ ID NO: 4376 - protein, 94 aa, Homo sapiens
MTAVPASPTERAQILSAEGPGESRQPRSLSSPVTGCHVQQEPGACLPDQALPTHSSHIAASPAHSLTPKTPTRQLWVQAWGCQRAFPLSQLRPP

SEQ ID NO: 4377 - DNA, 285 bp, Homo sapiens
  misc_feature (1)..(1): Wherein n may be a, c, g or t
  misc_feature (2)..(2): Wherein n may be a, c, g or t
nnaagctttgataactatgatttggtgaaatatgcacaagaaattaaacaaaaaatatataccattaccaaaatccctgtttgtattggtattgctcctacaaaggctttagctaaagtggcgaatcgaatagcaaagaaatttcctaaacatcataatggagtttatatgattgattcgaaagagaaaataaacaaagccttaaaatggttaaaatgtgaggatatctggggaattgggcgacgtttagctaaacgtttagcttttattggttgtaaaaacgcg

SEQ ID NO: 4378 - protein, 95 aa, Homo sapiens
  misc_feature (1)..(1): Wherein Xaa may be any naturally occuring amino acid
XSFDNYDLVKYAQEIKQKIYTITKIPVCIGIAPTKALAKVANRIAKKFPKHHNGVYMIDSKEKINKALKWLKCEDIWGIGRRLAKRLAFIGCKNA

SEQ ID NO: 4379 - DNA, 333 bp, Homo sapiens
ctcgtccttccggatcttcagcttcaccaggtcctcatgctggcctcctacctccagaggcccaccctttgactagcgggttcccagcttgcaattcagggctccctccagccgaggaagggagggtggtgggcgctgctgaaggctggctggaatgaacaaatgaaggagggggcaacaccacagatttctcactgtccccggcgtctggggccctccagagcctctgtgaggtggacaggagtttgagactctcccgtagtctccacatctagcaccaagcctggcagaggagacctactgggtgcagctggtgcagctggtggaaagatg

SEQ ID NO: 4380 - protein, 78 aa, Homo sapiens
MWRLRESLKLLSTSQRLWRAPDAGDSEKSVVLPPPSFVHSSQPSAAPTTLPSSAGGSPELQAGNPLVKGWASGGRRPA

SEQ ID NO: 4381 - DNA, 431 bp, Homo sapiens
ggatccagtgacattacccaatcatctgttcattcactctatcagtcaaaattgattgagcaatctctgtgtgccaagtagagtattagttgctaaaggctggacttacctgctaattagatgtcatgtctgaaacaggagtgtatcttattgcctttaggataatggcagaaagagtcaagtgggaaagtccaacctttgcattcaaaattctacataaaaacaaagcatatgatatggttggttcagatattaatgccactgtgttcacccaggaagcaagtaaacaacgcttgaatgcacatggccaggtctggaaacctcctgatgtcagcaacatggaaaagagaattggctcagaagccacaggcatctccccaacatcactgtagcttctgtcagccttggtggtggtgccaattccggctagc

SEQ ID NO: 4382 - protein, 88 aa, Homo sapiens [sequence omitted]

SEQ ID NO: 4383 - DNA, 236 bp, Homo sapiens
  misc_feature (236)..(236): Wherein n may be a, c, g or t
cacatgaaggtccagagggaccatggtgtccccagcacattgaggtcagaccacgggtcctcgacggctctgtgcggcagagccccagatggcagccacatggagtccagagggacccaggccctggaggaagcactgcctgaggcctggtgttgagaaaagtgtctgcatgtctgggtctgtgtgtgtatcactggatgtggctgtgtctctggggatgtgtgtctatttctgcn

SEQ ID NO: 4384 - protein, 50 aa, Homo sapiens [sequence omitted]

SEQ ID NO: 4385 - DNA, 219 bp, Homo sapiens
tgggggatcatacgggaatgctttgatattgaaactggtggtggtagagtgataaaatttgtgaagttcaaagggccccaaaatatcaagaaacatgtgctgagagaagtagccatatggaggactttgaagcataacagaatactcccccttttagattggaagcttgatgacaactatgcaatgtattgtttaacggaaagaattaacgatggtacc

SEQ ID NO: 4386 - protein, 73 aa, Homo sapiens
WGIIRECFDIETGGGRVIKFVKFKGPQNIKKHVLREVAIWRTLKHNRILPLLDWKLDDNYAMYCLTERINDGT

SEQ ID NO: 4387 - DNA, 370 bp, Homo sapiens
agcttcttatcactatcctttagtgctttttggtctaccttagcggtaatgctccatcaagaatatggttttggtagtgcaactgcgggattttttggcctcgctggtgccgccggagctttagcagcaccactgtccggtaaactaacagataaacaaggaccgacacgggtcacgcagctgggtgctgccttagttgtcgtctctttcgcatctatgttgttattgccttacttcagtatcagtacccaagttataatgattattgttgctaccatagtgtttgactttggtgttcaggcggcacttattgctcatcaaaccttagtgtataacattgactctaccgctcgtggacgccttaacgcgt

SEQ ID NO: 4388 - protein, 123 aa, Homo sapiens
SFLSLSFSAFWSTLAVMLHQEYGFGSATAGFFGLAGAAGALAAPLSGKLTDKQGPTRVTQLGAALVVVSFASMLLLPYFSISTQVIMIIVATIVFDFGVQAALIAHQTLVYNIDSTARGRLNA

SEQ ID NO: 4389 - DNA, 444 bp, Homo sapiens
acgcgtcgtatcctcgcagaggcgaccggcgcgagcatcgatcgacaaaatcagcgcaccgcaaccgttggcgggcttctttcgaatgtcggtgtgacgatcatcatcatcgtcgccctgctttcgggattcagcaccatcggcttcaagatcacccccatcctcacctccgccggaattgttggcgtggcgctagcctttggcgcacagacgctcgtcaaagacgtcctggcgggacttttcatcatcttcgaggaccagtacggcgtcggtgacgcggtgaaaatcaatgaagtggaggggctcgttgaagatgtcggcctacgtgtgacgcggatccgggattggaatggcgcagcctggtatctacgcaacggtgagatcaccaaggtgggcaatgtcactcagggctggacgacctcgtttactgacatcaacgtgcac

SEQ ID NO: 4390 - protein, 148 aa, Homo sapiens
TRRILAEATGASIDRQNQRTATVGGLLSNVGVTIIIIVALLSGFSTIGFKITPILTSAGIVGVALAFGAQTLVKDVLAGLFIIFEDQYGVGDAVKINEVEGLVEDVGLRVTRIRDWNGAAWYLRNGEITKVGNVTQGWTTSFTDINVH

SEQ ID NO: 4391 - DNA, 244 bp, Homo sapiens
tcatgagttaatgtttgaaaggtgtagtggtctttccctcagttcttcagctgctgcctgggacgcaggatttacttcagtggagtcagttatgagatgcggcaagaagagaaagtgctctccaagtgcgtgtttatttttactgcaaatttcattttcagatgcatgtttgggtaaaatgcctgtacatttcctttggaccatctgctgtggaagtaataggtcagattcaagggtgctcttt

SEQ ID NO: 4392 - protein, 78 aa, Homo sapiens [sequence omitted]

SEQ ID NO: 4393 - DNA, 265 bp, Homo sapiens
gcgttgagcgccgggtttctggataaggtggtcgcgccggaagaattgcaggccgcggcgctggaagcagctcgccaactgaagaagatcaatatgaacgctcacaagcacaccaagctgaaggtgcgtaaggcgctgctggaaacgctggatgacgcgatcattcaggatcaggggcacttgggttaatcaaacctacgcctgctgaatcgaagcccgaccttgagtcgggctttttcttacaaagaattccggattgcctaca

SEQ ID NO: 4394 - protein, 62 aa, Homo sapiens
ALSAGFLDKVVAPEELQAAALEAARQLKKINMNAHKHTKLKVRKALLETLDDAIIQDQGHLG

SEQ ID NO: 4395 - DNA, 352 bp, Homo sapiens
tccggacacagacgagaccctcctgagatcggcacggccgggcaagacgaaacgccatggggctgcccctgaggaggggcccggatgggggcaggggctgtgctgcccacagacaggccccttggtgacagtgggatccatcgtgaccacgtgtggcctcatttaatcctcactgtggtcctagctgccatgaccacctacaaaacagagaggtcaagtccctgcccccaacggcggttacagctggcacttcagaagccgggctcacggccctacagccgtctcaaaaccgccagctagtgtccggctctgcccagagagggggtgggcagcccttgtaatgcagccgggt

SEQ ID NO: 4396 - protein, 71 aa, Homo sapiens [sequence omitted]

SEQ ID NO: 4397 - DNA, 221 bp, Homo sapiens
  misc_feature (135)..(135): Wherein n may be a, c, g or t
  misc_feature (162)..(162): Wherein n may be a, c, g or t
acgcgtcgagttcttcggcgatcacgcggattttttccaggttttcatcgcacacggtgtatggcgcgtgggggccgaagtgatcttgatgcgcgggtggtgcttgaggtcgccgaacagttccacgccctgggnaatggcctcatcggcgctgctggcggngacatcgggaagtcgaggatcggaattgcgatttgcgcgcgcataccgctgttgtgcac

SEQ ID NO: 4398 - protein, 53 aa, Homo sapiens
MARGGRSDLDARVVLEVAEQFHALGNGLIGAAGGDIGKSRIGIAICARIPLLC

SEQ ID NO: 4399 - DNA, 414 bp, Homo sapiens
  misc_feature (290)..(290): Wherein n may be a, c, g or t
  misc_feature (373)..(373): Wherein n may be a, c, g or t
tgatcattcagggtcacacgactggaaagggctgaccccagatgtaaagccaggctccccgctccttgttcttccactgtgttctatactccttcccagcttgcgcttgacacagccttgtcttctctccctccgtgcctcgcagtggtagggttccatggaacacgcaggtgaacagtttgacctatggatgagccgatctggagagcctgcctggtgggagcaggttggtccctgcagtccagagtctgcacacagtccttccagtgagtgtctctggaggctgtatntcctgattacaactctatagttttgtctactagagctgacagcgtttgtttctgtcacttctcaggccgagaagtaacttttntaggagaatatctttttcagtatagatgtctttcatctctc

SEQ ID NO: 4400 - protein, 51 aa, Homo sapiens [sequence omitted]

SEQ ID NO: 4401 - DNA, 510 bp, Homo sapiens
atggcttcgaactttgaagagttcgttctcgtcgacaatggcggaacgggagatgtaaaagtcgctccgagcaacttcgctaacggggttgcagaatggatcagctcgaactcacgttctcaggcttacaaagtgacctgtagcgtgcgtcagagctctgcgaacaatcggaaatacaccgtcaaggtcgaggtcccgaaagtggcaactcaggtccaaggcggcgttgagcttcctgttgcggcgtggcgctcgtacatgaatatggaattaactattccggtattcgcgacgaacgacgactgtgccttaatcgttaaggcattgcaaggcacctttaaaactggtaacccaattgcaacagccatcgcagccaactcgggaatctacatcgataaatctctgcgtcgttcttcttgcttcggtggtcgtatggaccgtatcggtgctcagtctggtctgggttgcaactctttccgttactgatagatatcgatgtatgattcggga

SEQ ID NO: 4402 - protein, 161 aa, Homo sapiens
MASNFEEFVLVDNGGTGDVKVAPSNFANGVAEWISSNSRSQAYKVTCSVRQSSANNRKYTVKVEVPKVATQVQGGVELPVAAWRSYMNMELTIPVFATNDDCALIVKALQGTFKTGNPIATAIAANSGIYIDKSLRRSSCFGGRMDRIGAQSGLGCNSFRY

SEQ ID NO: 4403 - DNA, 231 bp, Homo sapiens
cggatcaaacagaagaaagccaaggggtcaacatcttccacacggttgcacgagcccgagaagaacgccagggaaataacccaggtacagtctttgatccaggacacaaatgacatcaacgacatcacatacgcagacctgaatctgcccaaagagaagaagcccgcaccccgggcccctgagcctaacaaccacacagaatatgcaagcattgagacaggcaaagtgcct

SEQ ID NO: 4404 - protein, 77 aa, Homo sapiens
RIKQKKAKGSTSSTRLHEPEKNAREITQVQSLIQDTNDINDITYADLNLPKEKKPAPRAPEPNNHTEYASIETGKVP

SEQ ID NO: 4405 - DNA, 546 bp, Homo sapiens
gcgttaagtaaccgtctcgatcttcactttaaaaaatatgatgtagtggtaaactcccaacagcaacaaatcaacgaactgaccgcgtttttatcaacattgctgaatgaccaacaacgccacgctgaaattctcagtgaaaaattaagcggaacgttgcatggggtgtcagctacgtcaatatccttaagccaaactcttgacccacaaggcttcactgatggaactacggcaccaggagctcctaggaattatacttcagtgcctatgaataatgatcaaactgctcatccgcaaaatgaaggagctgttagtaatgaaacactttttgaggacattttgaatggaaattcccaagaaaatgataagggccaccaccaaactaacaggtcaatttctataagccaagaaaataatagcaccaacccttcagtggacactcggttcaacaagccgcaaaattataattccaatttagtcccatccttggaagagtattcagcaaatccacctaacaatgatggtggccaaagtcaaggactgtac

SEQ ID NO: 4406 - protein, 182 aa, Homo sapiens
ALSNRLDLHFKKYDVVVNSQQQQINELTAFLSTLLNDQQRHAEILSEKLSGTLHGVSATSISLSQTLDPQGFTDGTTAPGAPRNYTSVPMNNDQTAHPQNEGAVSNETLFEDILNGNSQENDKGHHQTNRSISISQENNSTNPSVDTRFNKPQNYNSNLVPSLEEYSANPPNNDGGQSQGLY

SEQ ID NO: 4407 - DNA, 309 bp, Homo sapiens
  misc_feature (1)..(1): Wherein n may be a, c, g or t
  misc_feature (2)..(2): Wherein n may be a, c, g or t
  misc_feature (303)..(303): Wherein n may be a, c, g or t
  misc_feature (309)..(309): Wherein n may be a, c, g or t
nncaattgagtcatgagtatatctgtgtggagtgtaggaagcatcctaagatctagtctgaaatccttagagaaaccgatcatgagcgacaaccgccaatgggcccgcgaagccattcgtattattgaagcggacttccagcgcagtgccgacacccacctgatccccttgccgttgccgggtttgccggatatcgagttgtatttcaaggataagtccagccatcccaccggcagcctgaaacatcggttggggcgctcgttgttcctctatgcgttgtgtaacgggtggctcaagcccggngcaccn

SEQ ID NO: 4408 - protein, 63 aa, Homo sapiens
IIEADFQRSADTHLIPLPLPGLPDIELYFKDKSSHPTGSLKHRLGRSLFLYALCNGWLKPGAP

SEQ ID NO: 4409 - DNA, 677 bp, Homo sapiens
gcgttctcctactggcaaggtcaaaccatgcaaaatgcctcttactcattctttgatgatattatgcaagctctacaggttatccaatctactaaaggttctaccgatattaccttctgggttggtgagaccggttggccaactgatggtaccaactttgaaagttcttacccatctgttgacaacgccaaacaattctggaaagaaggtatctgttccatgagagcttggggtgttaacgttattgtttttgaagcctttgatgaagattggaagccaaacacctctggtacctctgatgtcgagaagcactggggtgttttcacttcaagtgacaatttgaaatactccttggactgtgacttttcatgaacgctttaaaaatactctttaaacaagaatggctttttccttctgtttaagtgaggaattaagcaaaaggtaaccaaaaaaattgtattcccttcttttcttccttatttagggctttattttatctttcacttcttttacgtatttgaaatatccttcggttttaggattttcacttctaagttttctattttatgccttccattttaaattcgtattttgtgtatactttattcagtaaacagacatcccaataagttctttgaatatcttctgaaaatgatgtataaatatatatttctaga

SEQ ID NO: 4410 - protein, 123 aa, Homo sapiens
AFSYWQGQTMQNASYSFFDDIMQALQVIQSTKGSTDITFWVGETGWPTDGTNFESSYPSVDNAKQFWKEGICSMRAWGVNVIVFEAFDEDWKPNTSGTSDVEKHWGVFTSSDNLKYSLDCDFS

SEQ ID NO: 4411 - DNA, 231 bp, Homo sapiens
gatccaatcgcagatatgttgactcgtattcgtaacggtcaagctgcgaacaaagttgcaatcaatatgccttcttccaagctaaaagtggcaattgccaacgtattagctgctgaagggtatatcgaaagcgttaaagttttagaaggtgcaaaacctgaattggaaattactttaaaatatttccaaggcaaaccggttgtagaaagcattcaacgtgtaagccgtccc

SEQ ID NO: 4412 - protein, 77 aa, Homo sapiens
DPIADMLTRIRNGQAANKVAINMPSSKLKVAIANVLAAEGYIESVKVLEGAKPELEITLKYFQGKPVVESIQRVSRP

SEQ ID NO: 4413 - DNA, 273 bp, Homo sapiens
  misc_feature (1)..(1): Wherein n may be a, c, g or t
  misc_feature (157)..(157): Wherein n may be a, c, g or t
nacgcgtcggagcacaaggagatggcccaaggcagccacgatgcgagtgcaaagcccggcgcggtctgggccatcgataccgcgactaacgcagtcgtcgccaaggtgccggttggcatgcacccggcccatgtggtggtgtcgcccgacggcactntcgcctacatcaccaacggcggcgacaacacggtcagtgtgatcgacacagcggcgcggagcctcgtggcgacgattccggtcggcaagtttccccacggtcttcgcatcagtccg

SEQ ID NO: 4414 - protein, 91 aa, Homo sapiens
  misc_feature (1)..(1): Wherein Xaa may be any naturally occuring amino acid
  misc_feature (53)..(53): Wherein Xaa may be any naturally occuring amino acid
XASEHKEMAQGSHDASAKPGAVWAIDTATNAVVAKVPVGMHPAHVVVSPDGTXAYITNGGDNTVSVIDTAARSLVATIPVGKFPHGLRISP

SEQ ID NO: 4415 - DNA, 166 bp, Homo sapiens
atcccctgtaagatctttggatataaattttgcgaccattggatcggctgggtgcgccagacgtccggtaaaggcctggagtggctgggagtcatcgatcccagtgactctgagaccagatacagtccggccttccggggccaggtcaccatctcagccgacgcgt

SEQ ID NO: 4416 - protein, 55 aa, Homo sapiens
IPCKIFGYKFCDHWIGWVRQTSGKGLEWLGVIDPSDSETRYSPAFRGQVTISADA

SEQ ID NO: 4417 - DNA, 300 bp, Homo sapiens
gcattaaaagagagattggcatcatttaaaagcaatgcttacattctatagtaaaccttttgtgtatatttccttgttccaaaggatggaaaattactgaagtcatggggactttttttcccccttggtctgactggtgttgggaacataatgttgtctttgttaatcaacagacataagagaaaaagggatgtggcccttcttctggagttgtcaaatgacttgttacaaattaggggcttctttatgtgtaggcagtgtggggaaagggaaagcagttacaaagatgctttagatggg

SEQ ID NO: 4418 - protein, 50 aa, Homo sapiens [sequence omitted]

SEQ ID NO: 4419 - DNA, 267 bp, Homo sapiens
  misc_feature (1)..(1): Wherein n may be a, c, g or t
  misc_feature (38)..(38): Wherein n may be a, c, g or t
  misc_feature (41)..(41): Wherein n may be a, c, g or t
  misc_feature (267)..(267): Wherein n may be a, c, g or t
ncaagccccccagtcaacacaacccctaccccggcccnaanacgagagagcccaccacgacggagtacgccccgggaccgcccgcctaccccagcacgcggcagccgggggccgactaccccgactaccgccccgagccgggccgagcccccccggagccgaacaccgagcggatacccccgaacaccgagcagaaagccccgaaggcgccgcggacccgcgagaagcggcagacgaccgaacaagttaaaagaacccgtaagaccn

SEQ ID NO: 4420 - protein, 89 aa, Homo sapiens
  misc_feature (1)..(1): Wherein Xaa may be any naturally occuring amino acid
  misc_feature (13)..(13): Wherein Xaa may be any naturally occuring amino acid
  misc_feature (14)..(14): Wherein Xaa may be any naturally occuring amino acid
XSPPVNTTPTPAXXRESPPRRSTPRDRPPTPARGSRGPTTPTTAPSRAEPPRSRTPSGYPRTPSRKPRRRRGPARSGRRPNKLKEPVRP

SEQ ID NO: 4421 - DNA, 231 bp, Homo sapiens
  misc_feature (202)..(202): Wherein n may be a, c, g or t
  misc_feature (203)..(203): Wherein n may be a, c, g or t
  misc_feature (214)..(214): Wherein n may be a, c, g or t
ctggcccgggaggagatggctgtcgctgtggctaagggaaaaactctgtgtgtaatcgatgctgctatgctgcttgtatcttgctggcagattatggtacacgaggtgtggaccgtcgtcatccctgagactgaggctgttcgacgcattgttgagagggatggactaagtgaggcagccgctcagagccggctcagagcanngatgagcggcncacagctggtagagcag

SEQ ID NO: 4422 - protein, 77 aa, Homo sapiens
  misc_feature (68)..(68): Wherein Xaa may be any naturally occuring amino acid
  misc_feature (72)..(72): Wherein Xaa may be any naturally occuring amino acid
LAREEMAVAVAKGKTLCVIDAAMLLVSCWQIMVHEVWTVVIPETEAVRRIVERDGLSEAAAQSRLRAXMSGXQLVEQ

SEQ ID NO: 4423 - DNA, 301 bp, Homo sapiens
gggcccgcgagcgcctcgccgccgtcccactccctgcttgccgcttcccgctctcccgcgaccgcgcgatgcggactaggcacgctaactgcacctggaccccgcggtggagcgttctctcggggcgctccggctgccgcggcaggggcgcaggggcatacgatgcacggagtgtcgccgcgctgctgccgggtagtgttctcggctgtcccggagtcgcgctgctttgtgagagtcgatggctgattttgcggacccggcctagcttctttcccggggcgggctcttctccagacctagg

SEQ ID NO: 4424 - protein, 77 aa, Homo sapiens
MRTRHANCTWTPRWSVLSGRSGCRGRGAGAYDARSVAALLPGSVLGCPGVALLCESRWLILRTRPSFFPGAGSSPDL

SEQ ID NO: 4425 - DNA, 387 bp, Homo sapiens
  misc_feature (387)..(387): Wherein n may be a, c, g or t
gcggacgtattcgaaatggaggattgggccctcgacgatcgcccgcgaagcatcgagccgaggcttctatccgatcatgacaggactctatttacgcctcatctcggttccggtgtcgttgcggtgcgtctcgaaatcgaggcagcggcggctcgcaacttgttgggtgtccttcagggcaaagagccggcggacgcgataaattggccatcgcatccgcgcacgcagcgcaaggggcacgctccgtcattgtgaaatcatacttgtgctgaaccttcaccacgtcgagacatggctttccgttctcgcgacaggcagttttcaagaagctattcgtcgcctctgatttggccagtccacggtttcgcagcaagtgcaaaaactctn

SEQ ID NO: 4426 - protein, 84 aa, Homo sapiens
ADVFEMEDWALDDRPRSIEPRLLSDHDRTLFTPHLGSGVVAVRLEIEAAAARNLLGVLQGKEPADAINWPSHPRTQRKGHAPSL

SEQ ID NO: 4427 - DNA, 200 bp, Homo sapiens
aagcttcctgccaggcttggggccacagtggttctgcttcagatgcgggtgccagaaggtaacatgcctccagctgacacaagcatggtgctgctctcgcttctgcagacaccagcagttctgcaggatgatttggtgctgtgcagacatccccagtatattgttaagtcctaagttcctgtgggatccagatttgatca

SEQ ID NO: 4428 - protein, 50 aa, Homo sapiens
MSAQHQIILQNCWCLQKREQHHACVSWRHVTFWHPHLKQNHCGPKPGRKL

SEQ ID NO: 4429 - DNA, 333 bp, Homo sapiens
tctcatattcttgaccaagctgccacttttgaagactcctctttaagaatgctatatgtagctgcctttactgcatcaatgtacgcatctaccactaacagagtgtctaaaccattcaaccccttactcggtgaaacttttgaatatgccagaactgatggtcagtaccgattcttcaccgaacaagtctctcaccacccacctatctctgctacttggacagaatcgcccaaatgggatttttacggtgaatgtaatgttgattcgtcattcaatgggcgcacgttcgccgtgcaacatttaggattatggtacattactatccggcctgat

SEQ ID NO: 4430 - protein, 111 aa, Homo sapiens
SHILDQAATFEDSSLRMLYVAAFTASMYASTTNRVSKPFNPLLGETFEYARTDGQYRFFTEQVSHHPPISATWTESPKWDFYGECNVDSSFNGRTFAVQHLGLWYITIRPD

SEQ ID NO: 4431 - DNA, 441 bp, Homo sapiens
  misc_feature (1)..(1): Wherein n may be a, c, g or t
  misc_feature (2)..(2): Wherein n may be a, c, g or t
nnggcgccggccgggaacgcgccctcatccaggccgcccatcactggaggctcctcgagggcctgggcctggtcgccacccctgacgagtgccccagccatcgacgtctcgtggggctggtcggccacgacgagattgggatcctcgacgacaacttggccgtctcctggctcgatctcgaccacaagttcattcgcaccttcttgcgctcgtccgcctcgggatggcgtcgccgcagcgtgctggaccgatacgaccacgagcacaccttccgggtgtcggtggccgagcacgccatcgccggcggcgagccgatggtcgccccgatcgtcgtgcgtgagtgcgagtcctgtcagtggtgggccatctgtgagccacgtctcgacgatgccgatctctccctgcgcatctccaaggctcccctggacgtccgggagatct

SEQ ID NO: 4432 - protein, 147 aa, Homo sapiens
  misc_feature (1)..(1): Wherein Xaa may be any naturally occuring amino acid
XAPAGNAPSSRPPITGGSSRAWAWSPPLTSAPAIDVSWGWSATTRLGSSTTTWPSPGSISTTSSFAPSCARPPRDGVAAACWTDTTTSTPSGCRWPSTPSPAASRWSPRSSCVSASPVSGGPSVSHVSTMPISPCASPRLPWTSGRS

SEQ ID NO: 4433 - DNA, 359 bp, Homo sapiens
  misc_feature (216)..(216): Wherein n may be a, c, g or t
  misc_feature (347)..(347): Wherein n may be a, c, g or t
tgatcagctcgtgtcctcacctgcccagagcaggacggtgctcaggagcccccggccgaaagtcctgcggagacctgtctgtcccgcccggcgcctcctccctgcacatcttgcgccactgtcccacaccttccctagactacaggggagagagccgagtgcaaggcgcaaagccagcgctcacgggctctcccacgcaggagccccagtgagatnggagccactgagttgccctcggcggtcccctgaggggtcctatggcgtcgtaacgtgtctgttttctcttttggtggctttctgaaaggaaaaagcatttcattttgactttaccctagggtacgggtctntgtgtctgcctc

SEQ ID NO: 4434 - protein, 59 aa, Homo sapiens [sequence omitted]

SEQ ID NO: 4435 - DNA, 245 bp, Homo sapiens
aagcttctggagaattttgagtgaaaaggaatgatctaatttacaattaccagcctgctctagtttctgtgatgagaatagattgtgtatattgtggggggaggaaagggaggaggtagaggactatttggaaaattgttgctatagtgacgatgaacaatgatggggctttggatgactgcagtattagtggagttgggagatgctaatgggtttagcatatattttagaagtagacagaattc

SEQ ID NO: 4436 - protein, 53 aa, Homo sapiens
MLNPLASPNSTNTAVIQSPIIVHRHYSNNFPNSPLPPPFPPPTIYTIYSHHRN

SEQ ID NO: 4437 - DNA, 354 bp, Homo sapiens
  misc_feature (354)..(354): Wherein n may be a, c, g or t
gccggctctatcgcgttagtccttatgattgccttggtgattttgggctgggagatggcgcattgcttatttactcgtctcaccaaagcagaacgcagtaatggcaaacgaaaagggtttacagatgtctttttatggagtggcacaatagtaggactcattacactgttaagcgcctttatctctcttattattctgcctatctggtccttaacacgacgctggcgttttcctgactcgctgccttcttcatggactttcgacaacatagaacgcgcctatccactgttactggagctatcgaccaatacacttattattgccttaaccgcgactttaattgcctgctccatn

SEQ ID NO: 4438 - protein, 110 aa, Homo sapiens
  misc_feature (110)..(110): Wherein Xaa may be any naturally occuring amino acid
MIALVILGWEMAHCLFTRLTKAERSNGKRKGFTDVFLWSGTIVGLITLLSAFISLIILPIWSLTRRWRFPDSLPSSWTFDNIERAYPLLLELSTNTLIIALTATLIACSX

SEQ ID NO: 4439 - DNA, 289 bp, Homo sapiens
  misc_feature (1)..(1): Wherein n may be a, c, g or t
  misc_feature (278)..(278): Wherein n may be a, c, g or t
  misc_feature (279)..(279): Wherein n may be a, c, g or t
  misc_feature (281)..(281): Wherein n may be a, c, g or t
  misc_feature (282)..(282): Wherein n may be a, c, g or t
  misc_feature (283)..(283): Wherein n may be a, c, g or t
  misc_feature (284)..(284): Wherein n may be a, c, g or t
  misc_feature (285)..(285): Wherein n may be a, c, g or t
  misc_feature (286)..(286): Wherein n may be a, c, g or t
  misc_feature (289)..(289): Wherein n may be a, c, g or t
ncaaacttgttgagagggtataaagaagattaagtgtctaaaataatttatgtttaagggagtaggagaaaggtggtacctttgaacaggataaggagcagagagaaaactgagttgggacagatgattttagattcaaaaaaaaatttgaagtgatagtgggttatccacatggagacagagtagtataatactctgaacaaaatctggcttccattactagttttgtcacttaacatttacgttaagattatgccatgttatatcacctatatatnncnnnnnnccn

SEQ ID NO: 4440 - protein, 61 aa, Homo sapiens
MLSDKTSNGSQILFRVLYYSVSMWITHYHFKFFFESKIICPNSVFSLLLILFKGTTFLLLP

SEQ ID NO: 4441 - DNA, 180 bp, Homo sapiens
tccggaagacatgccatgatcattgttggaatacttgtgtttttttcgttcttcttctttagacgacattattacgaattgtttgttattacgcacattatcttagcaataggatttttccatgcgtgctggaaacattgctataaacttggatggggtgaatggataatggcgtgtgca

SEQ ID NO: 4442 - protein, 60 aa, Homo sapiens
SGRHAMIIVGILVFFSFFFFRRHYYELFVITHIILAIGFFHACWKHCYKLGWGEWIMACA

SEQ ID NO: 4443 - DNA, 366 bp, Homo sapiens
actagtgctactaccactgctagcaccaactccagcactaatgccactaccactgctagcaccaactccagcactaatgccactaccactgaaagtaccaacgctagtgccaaggaggacgccaataaagatggcaatgctgaggataatagattccatccagtcaccgacattaacaaagagtcgtataagcggaaagggagtcaaatggttttgctagagagaaagaaactgaaagcacaatttcccaatacttccgagaatatgaatgtcttacagtttcttggatttcggtctgacgaaattaaacatcttttcctctatggtattgacgtatacttctgcccagagggagtattcacacaa

SEQ ID NO: 4444 - protein, 122 aa, Homo sapiens
TSATTTASTNSSTNATTTASTNSSTNATTTESTNASAKEDANKDGNAEDNRFHPVTDINKESYKRKGSQMVLLERKKLKAQFPNTSENMNVLQFLGFRSDEIKHLFLYGIDVYFCPEGVFTQ

SEQ ID NO: 4445 - DNA, 344 bp, Homo sapiens
  misc_feature (332)..(332): Wherein n may be a, c, g or t
  misc_feature (333)..(333): Wherein n may be a, c, g or t
  misc_feature (338)..(338): Wherein n may be a, c, g or t
  misc_feature (339)..(339): Wherein n may be a, c, g or t
  misc_feature (340)..(340): Wherein n may be a, c, g or t
  misc_feature (341)..(341): Wherein n may be a, c, g or t
  misc_feature (342)..(342): Wherein n may be a, c, g or t
  misc_feature (343)..(343): Wherein n may be a, c, g or t
accggtgttgcgtgtgtgcagggtaatgagcccgccatcggcaatctccgcatacgcgatataggtaccgatggaagcggcggggttgtagtgcaggtcagtggagtgaatctccgccagcccgccatgcaccgtggccgcctcaagcaccacgtccttcagggcgtcggcatccttcagggccgccgcgatgtgctgcctggggccaaagccgcgccagacaagcaccgtcacggtgacgatcaccatgacgctcatcatcgcaatcagcacgttgagcatggacagtcgacgtagcttgaacatgatctgcgccctcattcgataacgcnnccccnnnnnnc

SEQ ID NO: 4446 - protein, 107 aa, Homo sapiens
MRAQIMFKLRRLSMLNVLIAMMSVMVIVTVTVLVWRGFGPRQHIAAALKDADALKDVVLEAATVHGGLAEIHSTDLHYNPAASIGTYIAYAEIADGGLITLHTRNTG

SEQ ID NO: 4447 - DNA, 306 bp, Homo sapiens
  misc_feature (1)..(1): Wherein n may be a, c, g or t
ntcttccatcatgggccccctctgacgctatcggacccacgcatcgtggccgcgtgaagcttcgcgtatatgctgccaccaaaggtcgaagcacgtgacgcttccgcgggcgaaggcccggtctggttcggcgacatgcgaatgctgctgtggagcgacattccgaataacgccatcatgcgctgggatgaagtcagcggagaaaccagcatctttcgctacccggccaattatagcaatggtcacgcccgcgacagacaggggcgcttaatcagttgcgagcacgacacccgccgcattacgcgt

SEQ ID NO: 4448 - protein, 79 aa, Homo sapiens
MLPPKVEARDASAGEGPVWFGDMRMLLWSDIPNNAIMRWDEVSGETSIFRYPANYSNGHARDRQGRLISCEHDTRRITR

SEQ ID NO: 4449 - DNA, 321 bp, Homo sapiens
acgcgtggcgacgaccacgttgccgaggtggccggttgcagcccggccctgggcgctcctattgacgagaaggattacgaggctctcgtcgctcccaagcagcagcgcggcaagaaggctcgtgacggaaagcctcgtcgtggcaagggcggacgcaaccgcggtggacgtggattcgacgggggccgtcatcgcggtcacgactcccgtgatcaccatgatcgtgggcatgactcgcgcggacacaatttccgtggccgcgatcgtcgcgacattgaggctaaatacggccgttccggaaacgacacctggtgagtcgac

SEQ ID NO: 4450 - protein, 77 aa, Homo sapiens
MPTIMVITGVVTAMTAPVESTSTAVASALATTRLSVTSLLAALLLGSDESLVILLVNRSAQGRAATGHLGNVVVATR

SEQ ID NO: 4451 - DNA, 596 bp, Homo sapiens
  misc_feature (578)..(578): Wherein n may be a, c, g or t
gggagggctaagctttggacatctgcacttcccatagcagcttctgggccagagctcacccgctgtgggcaggtgatcagggtgatcaggtcccacgggtcccctcctctgcacctggagccttctgggtgtagaacagaaaaataggagggggcaacccagaggcctcctgctttccaggaaggaatggatgctggacaggtccagggtggaggcagagggagtgaggggcccttgggggaacatctgtcctagagggcttgatttccaggctgcccaccccactcctacccctaatctggtgttcctcacctgcctccaggaagtcctcacctgaggtctgcagcgggtgtgccaagcgccagccccacatcacctgctcccaggcctgcccaggggatgggtcctgtggccagtaccctcggggtcagcttgacccagacccagcccagaacctgtcccatgggcccaggaggacaggatggtcagggaagcccaagggataagcccttttgtccacaagcttccctcttacatggcaggctgcttgtgcgaccccgcagcccccacctctcatnaacaatgggaatggggca

SEQ ID NO: 4452 - protein, 95 aa, Homo sapiens [sequence omitted]

SEQ ID NO: 4453 - DNA, 294 bp, Homo sapiens
gaaatcgcaaacgtgaaggcgcagggctatgagctgtgcatcgtcgtcggcggggccaacatctcccgcggcatttccggtgcggcgcgcggcatggaacgcgcaacgggcgattatatgggcatgctcccgaccgtcatgaacgcgctcgcggtgcagaacgcgctggagcagatcggcgtcgaaacgcgcgtgcagtcggcgatcccgatgtcgtcggtgtgcgaacccttcatccgccgtcgcgcgatgcgacacctggaaaagggacggatcgtgatcttcgcccccggg

SEQ ID NO: 4454 - protein, 98 aa, Homo sapiens
EIANVKAQGYELCIVVGGANISRGISGAARGMERATGDYMGMLPTVMNALAVQNALEQIGVETRVQSAIPMSSVCEPFIRRRAMRHLEKGRIVIFAPG

SEQ ID NO: 4455 - DNA, 450 bp, Homo sapiens
  misc_feature (1)..(1): Wherein n may be a, c, g or t
ngcgcgccgggcaccacatacgacgacgggacgttattcacctctaacgtgtagccgccgtcgcggtccggatccgcgatgatggccgcgtggcctgaagcaatggggtaggtgcccgtgatgcgtcgctttggcgcacgaggtttacgccgtggggagttcataagggaaataccagcacagggtcggaccagttgttacgatcgctgcatgatctacttgtcgcaggattatatcggtgagctacccaagcaacatatctcgctgggaaagtttgatcccgacaatattcctgcggacccgaacgaactgtttgccacgtggtttaaagaagccgttgagaacgaagtcggcgaccctactgcggtcaccgtggccacggtggacgacaacggtcagcccgatgcgcgagtcgtcgaccttctgtacctcaactccgacggcttccac

SEQ ID NO: 4456 - protein, 110 aa, Homo sapiens
MRRFGARGLRRGEFIREIPAQGRTSCYDRCMIYLSQDYIGELPKQHISLGKFDPDNIPADPNELFATWFKEAVENEVGDPTAVTVATVDDNGQPDARVVDLLYLNSDGFH

SEQ ID NO: 4457 - DNA, 317 bp, Homo sapiens
  misc_feature (1)..(1): Wherein n may be a, c, g or t
natggtttggctatggagattgacgacgagatctctactgatgataatgataaggaggctttacaagaaatagtaaataatactaagttgagtgagggatatcttactcttgctcgcgatattgaggtcatggagcctaaatccccagaggatatatacaaggtccatttgattgatggccgtggtgccagctccagtcttgattccgcaagacagaatttagctgcaacatttgtaaatgcatttgtgaatgctgggtttggcaaggacaagttgatgaccgctccatctgattcacccagcagcggtcttccgga

SEQ ID NO: 4458 - protein, 105 aa, Homo sapiens
  misc_feature (1)..(1): Wherein Xaa may be any naturally occuring amino acid
XGLAMEIDDEISTDDNDKEALQEIVNNTKLSEGYLTLARDIEVMEPKSPEDIYKVHLIDGRGASSSLDSARQNLAATFVNAFVNAGFGKDKLMTAPSDSPSSGLP

SEQ ID NO: 4459 - DNA, 179 bp, Homo sapiens
  misc_feature (1)..(1): Wherein n may be a, c, g or t
naggttagttggtgatggattttttttataagctgttttagactttgcttcctttgcacacggcacagacacaatcagaaatggctcagtgggggctctcctcatgcaggtagatgttcttttatcgtctcccattagtggctcactcttgctgctgaagagcattcttccctggatcc

SEQ ID NO: 4460 - protein, 55 aa, Homo sapiens
MLFSSKSEPLMGDDKRTSTCMRRAPTEPFLIVSVPCAKEAKSKTAYKKNPSPTNL

SEQ ID NO: 4461 - DNA, 393 bp, Homo sapiens
tgatcatcccctttgctttgtgcctttcacttcaatccagtggagaggggcttcggtgcctttctttttctttttctttttcttttttctacctagaggtacttttttgaggctcgagactgagaacgtaacacatctcttgcacttttgctttatgtgtatgtgtacacacacaccctcagttctttgctgtacttgctcgccgtcttgctcttcaggtttccttttctttaaaagcccaagtagtttccttcccatattgttctcagtgaaagaaaaaggagcgtctcttctctcctaaatcctaattccttccttccatccatcctatcgtttaaccttttcttccagagccaggactttgtgtctgctcctaacattcacatcccttcc

SEQ ID NO: 4462 - protein, 84 aa, Homo sapiens
MGRKLLGLLKKRKPEEQDGEQVQQRTEGVCVHIHIKQKCKRCVTFSVSSLKKVPLGRKKKKKKKKKGTEAPLHWIEVKGTKQRG

SEQ ID NO: 4463 - DNA, 717 bp, Homo sapiens
actagtgttagcagtgaggaatgggtatcctgagtcaggcagatctgctcttatgagctgcatgaccttgggtgagtcactgtctgtctgcggcttacctattaaatgcagaaggtaaacatacccacctcgaggggttgtgaggattaaagaagaaaacatatccatgtactcagcacagtgtctggcccatggcaactactcaacagatttagccattatatagtggtggtgctgttgttgttgtggggaggctggaaggagcagccagggaggcttcagaactgagggagcattcaagtagggttttgcaggttgaataggagtccataagtagccctggcatttgaaacagagaaaaacagcccgggccgggcaccaggtagggacacaggagaaacctgaatttgagagatttagtccctgtcctctaagagacaggatatagaccccaaatggccgtgacagcacatgcagggccaagagcactgtgtaatgagtgagtggaaactgggagctgtggatccccggcaggctccctccctcactcactcaacaacaggaagagagatgtgaatagacagtcacttgccaatggatgagggcccccgaagagcaccactcgggggctgggggacaaggggttggacccaaagggctgagtgacattacctgtgtgtaaagaatctatttggagagtgatccatggggaagctg

SEQ ID NO: 4464 - protein, 56 aa, Homo sapiens
MDMFSSLILTTPRGGYVYLLHLIGKPQTDSDSPKVMQLIRADLPDSGYPFLTANTS

SEQ ID NO: 4465 - DNA, 273 bp, Homo sapiens
  misc_feature (1)..(1): Wherein n may be a, c, g or t
  misc_feature (2)..(2): Wherein n may be a, c, g or t
nntcatgacctgattgaatctgagttatttggccatgaaaaaggggcattcacgggagcaaatacacaacgcagaggtcgttttgaacaagccaatggcggtactctctttttagatgaaataggcgatatgccagccgaaacacaaacccgactattgcgcgttttagccgatggtgagttttatcgagttggcggtcatactccggttaaagtagacgtacgtattattgctgctacacatcaaaatctcgaaaatctcgtcaaagccggc

SEQ ID NO: 4466 - protein, 91 aa, Homo sapiens
  misc_feature (1)..(1): Wherein Xaa may be any naturally occuring amino acid
XHDLIESELFGHEKGAFTGANTQRRGRFEQANGGTLFLDEIGDMPAETQTRLLRVLADGEFYRVGGHTPVKVDVRIIAATHQNLENLVKAG

SEQ ID NO: 4467 - DNA, 400 bp, Homo sapiens
  misc_feature (1)..(1): Wherein n may be a, c, g or t
  misc_feature (2)..(2): Wherein n may be a, c, g or t
  misc_feature (3)..(3): Wherein n may be a, c, g or t
  misc_feature (400)..(400): Wherein n may be a, c, g or t
nnncgaccgatgagcgatcgcgaacccgtcaacctgggatacccctacgtcgagtctttccactcggacttctcggggaccggcggagtcgatcagaccgaccgttctaccaatatcgacgagcacaccatcgaggagatgcatcagatcgcctcgcgttaccccgactcccgttcggcgttgctgccgatcctgcacctggttcagtcggtggacggacgcatctcgccggtcggtattgagactgcggctgaagtgctcggcattaccaccgcccaggtatccggggtggcgaccttctacaccatgtataagaagcaccctgcgggccagcatcacatcggtgtctgcaccacggcgctgtgcgccgtcatgggtggcgaggaggtgcttgcccgtn

SEQ ID NO: 4468 - protein, 133 aa, Homo sapiens
  misc_feature (1)..(1): Wherein Xaa may be any naturally occuring amino acid
XRPMSDREPVNLGYPYVESFHSDFSGTGGVDQTDRSTNIDEHTIEEMHQIASRYPDSRSALLPILHLVQSVDGRISPVGIETAAEVLGITTAQVSGVATFYTMYKKHPAGQHHIGVCTTALCAVMGGEEVLAR

SEQ ID NO: 4469 - DNA, 344 bp, Homo sapiens
  misc_feature (1)..(1): Wherein n may be a, c, g or t
ncccctatgctcaggcccacattgtggagtgtacttttgttttcaataaaacccttcattcctttaaaaaaaaaaaaaaaaataaataataaactttgggctaaaatatggttgataccctctaaaatctcttcaaaattgggattcttttattcttaatttaatctttaattttactaaagttccaactagaaaaaaaactttgaaaccccagcccatgacatttattacaagcaatttaaacaaaaccaaattctagtacaataaataattggggttttgggagcttggggtttgtttcaaatcccatgaaaaattaattaaaaatgggaaccctaacccct

SEQ ID NO: 4470 - protein, 50 aa, Homo sapiens [sequence omitted]

SEQ ID NO: 4471 - DNA, 216 bp, Homo sapiens
  misc_feature (1)..(1): Wherein n may be a, c, g or t
  misc_feature (41)..(41): Wherein n may be a, c, g or t
ntccggagatgccgctgtctggcttggcagccttgcttctnagctgctcgcttgtggtgcttccgtgggcctgtctgtcctaacacttgcattgtcagaagagtgctcggcagaggagcttttggccgaaggcatgaggactttggttatgggtgttttttttgggcggacagggtctcgctctgtcacccaggctggagtgcaatggtgtgatca

SEQ ID NO: 4472 - protein, 70 aa, Homo sapiens
  misc_feature (1)..(1): Wherein Xaa may be any naturally occuring amino acid
  misc_feature (14)..(14): Wherein Xaa may be any naturally occuring amino acid
XRRCRCLAWQPCFXAARLWCFRGPVCPNTCIVRRVLGRGAFGRRHEDFGYGCFFWADRVSLCHPGWSAMV

SEQ ID NO: 4473 - DNA, 310 bp, Homo sapiens
  misc_feature (251)..(251): Wherein n may be a, c, g or t
  misc_feature (262)..(262): Wherein n may be a, c, g or t
cctaggcggacatgcgttctcagtgctgttgggtgtgcatagtcttggcattgctgggtgacgtggtgagttcgtatttaacccttgagggcctgtcaggcagtccatggtggctgccccatgtcacatccctcccagggttctggtttctgcacctctcagtgttggcgcccctgggctcaggctggccacccttctcccttcctgggacctcatctagacgcacagccataagtgccatctctgtgtgngtgcccactcncagcgagaagcgcacaaccaggatgctagcctgcagtatgtggggccc

SEQ ID NO: 4474 - protein, 99 aa, Homo sapiens
  misc_feature (80)..(80): Wherein Xaa may be any naturally occuring amino acid
  misc_feature (84)..(84): Wherein Xaa may be any naturally occuring amino acid
MRSQCCWVCIVLALLGDVVSSYLTLEGLSGSPWWLPHVTSLPGFWFLHLSVLAPLGSGWPPFSLPGTSSRRTAISAISVXVPTXSEKRTTRMLACSMWG

SEQ ID NO: 4475 - DNA, 312 bp, Homo sapiens
  misc_feature (312)..(312): Wherein n may be a, c, g or t
tcatgagcacgtggagagagaggtgggacgggaatggggagagaaaggggaagggaagcagggaaagagcaagggaggagcaagagaccaagagggcaagaactaaaataagtctttttaaagaaagaattcattcaaaaaagaaaaagaaaaaggggctagaatatggctcagtgttacagttacagcatagtgttatttagcatatataaggtcctaagtaccattcccataaatgggggaaaaaaaatctgagcacacacccttttatactaagcattacacttgtctaagtcatctgtgataaagcgn

SEQ ID NO: 4476 - protein, 66 aa, Homo sapiens
MSTWRERWDGNGERKGKGSRERAREEQETKRARTKISLFKERIHSKKKKKKGLEYGSVLQLQHSVI

SEQ ID NO: 4477 - DNA, 375 bp, Homo sapiens
  misc_feature (280)..(280): Wherein n may be a, c, g or t
tgatcagaagcattaaacatcagttctatatgtctttgattaatacaaattagaaaattatgtaataataagtgtggcaagtttgatagaaaacaatctttcaaaacatgaggttcattaataaaagaatccttgatggtgaaaaggctgagaagaacttgattacataatttcaaagattaaaatgcattgtactagtgaagaggtatggatataggtgattctgtacagtgtgctaattactgtcatggcgttatgtataacagcagaagtacctatntcagggaaagcttctagtatgagatggcctttgatctgtgatttaaaggatgatgaggaactggctttaggtaacatcctagagagcacttcgga

SEQ ID NO: 4478 - protein, 64 aa, Homo sapiens
  misc_feature (26)..(26): Wherein Xaa may be any naturally occuring amino acid
MLPKASSSSSFKSQIKGHLILEAFPXIGTSAVIHNAMTVISTLYRITYIHTSSLVQCILIFEIM

SEQ ID NO: 4479 - DNA, 306 bp, Homo sapiens
agccgactctggtcctacagatagtggttacaagcccagctcaagagccatacagctctgcttttgagtttggcttcaccacttagtaacttgcgtggcttttgacaaattcctttaagtttgataagccttgggttttctaactgggggaaaaaaaaataataataaggcatagctcaaaaatatattacgagaataagataattcatgtaaatgcttagcacggtgcctgggaagtagcatgtacccattattcactttttaaattactaaattaaatgaattatttgcagttctttaaggcga

SEQ ID NO: 4480 - protein, 52 aa, Homo sapiens [sequence omitted]

SEQ ID NO: 4481 - DNA, 404 bp, Homo sapiens
  misc_feature (338)..(338): Wherein n may be a, c, g or t
agatctgccctgggtatgggtgggcccatccaatatgctgggggtccagagagaacaatgaagagaaggggcgagggcatggagccgctgggctggacacactcatcctctcttgtctttggacaactccaaagcctttggacttcaggacttgaccagcggccagtaagatgtaaaagatgtcaccaattttcaactttggctgagtccctgtttcacttgggggcattttaagctgaatgatccccagatccccaggcagccgcttcccctcgggtgctctggcctttggcttcagagtgacttacgccatcaccttctctggttctgaggcttangacctggattgagtctcgctctcagcctaaagggactccagcctgcagacagcccgtcgcaggtct

SEQ ID NO: 4482 - protein, 76 aa, Homo sapiens
MPPSETGTQPKLKIGDIFYILLAAGQVLKSKGFGVVQRQERMSVSSPAAPCPRPFSSLFSLDPQHIGWAHPYPGQI

SEQ ID NO: 4483 - DNA, 270 bp, Homo sapiens
tgatcaggaaagatactttgtatgattttaatctttataatttattaaaacttgttttgtagtctaacatatggtatatcctggagaatattccatatgtacttgagaaaaaaaaaacacacgtattctgcctttgttgggtggagtgcctatcaggtccaattgatctatagggttgttctactattactgtaaagccatctatttctcccttcaattctgtccatttttgcttcatttatttcagagctctaatatttggtgtgtaca

SEQ ID NO: 4484 - protein, 67 aa, Homo sapiens [sequence omitted]

SEQ ID NO: 4485 - DNA, 379 bp, Homo sapiens
tctagagcagccggttacgcgagggtagggcgtggagagcagccggttacgcgagggtagggcgtggagagcagccggttacgcgagggtagggcgtggagagcagccggttacgcgagggtagggcgtggagagcagccggttacgcggttacacgagggcggagggcgtgtgccgggagcacaatccgggccgaggctcctggtaagggagcagagcgggaagctgatcccccacggattcttagggggccgacttcccctgtgttgaagattcatcaaagactgattcgagtctgtgttcatgtgtgttttagattagaacagtgttgagaatttttatatggggcccagttttagcaggacatcatttaggatcc

SEQ ID NO: 4486 - protein, 64 aa, Homo sapiens
MNTDSNQSLMNLQHRGSRPPKNPWGISFPLCSLTRSLGPDCAPGTRPPPSCNRVTGCSPRPTLA

SEQ ID NO: 4487 - DNA, 299 bp, Homo sapiens
tccggacaaatgttgtgttttccttgctatattcgggggttctcctcttgcgatgtgacccatgttgggcgtttttgtatcatcgataacaactacatcttttgccaaatgcatgcctgccttttcttttccaatatgtggtgataaagaccaaaaccggctagatttttgcatgaaaacggttctgaaagataagaaaacagactttgaaagttgtttagagtaaatatgtggcagatagactcaactctctcatgcacaaaggacttccgcttttcattttctcatataattgtaca

SEQ ID NO: 4488 - protein, 58 aa, Homo sapiens
MQKSSRFWSLSPHIGKEKAGMHLAKDVVVIDDTKTPNMGHIARGEPPNIARKTQHLSG

SEQ ID NO: 4489 - DNA, 243 bp, Homo sapiens
  misc_feature (243)..(243): Wherein n may be a, c, g or t
aagctttattttacattgtctctagttatctagtggaaatggtatgcatgaccgtaggcatcttcatggtagattttcctgccacttcttttctgtctattctatgcagctgcctaataagtcacttcaatttccacttcatattccccaagaggccattccatttatttatcccaatatactaccatgcatgaaaaaacacataaggttcttgttcaagaatgctttagattagtaggtggn

SEQ ID NO: 4490 - protein, 63 aa, Homo sapiens [sequence omitted]

SEQ ID NO: 4491 - DNA, 375 bp, Homo sapiens
tacgacttgacgacaggcttcacccagaaccgcgccgtcgccggtccgatccgcccggaacggtcgcgcgacaaggaactgggtatccgcagccagcttttcgaccggcggttgacgctgaacctgacgctgttcgacaccagctaccgcgacctccaggcacagacgatcgagacgctggcggacggcacgtccaacttccgcctgaccaacgtcggacgccttcgtacccggggcatcgagctcgaaagctcgctgcgggtggtgcaagacctcagcctgaacggcgcggtcacctatctcgatgcgacctacaccgacttccccgtcgcgcaatgctatccgctgcagaccgcggcgctgggatgcaccggt

SEQ ID NO: 4492 - protein, 125 aa, Homo sapiens
YDLTTGFTQNRAVAGPIRPERSRDKELGIRSQLFDRRLTLNLTLFDTSYRDLQAQTIETLADGTSNFRLTNVGRLRTRGIELESSLRVVQDLSLNGAVTYLDATYTDFPVAQCYPLQTAALGCTG

SEQ ID NO: 4493 - DNA, 303 bp, Homo sapiens
  misc_feature (1)..(1): Wherein n may be a, c, g or t
nggatcccgtccctggctgagctggggaccatcgagcaggaggaggccagctcccggccgaagtgggacaacaaggcgcagtacatgctcacctgcctgggcttctgcgtgggcctcggcaacgtgtggcgcttcccctacctgtgtcagagccacggaggaggagccttcatgatcccgttcctcatcctgctggtcctggagggcatccccctgctgtacctggagttcgccatcgggcagcggctgcggcggggcagcctgggcgtgtggagctccatccacccggccctgaagggccta

SEQ ID NO: 4494 - protein, 101 aa, Homo sapiens
  misc_feature (1)..(1): Wherein Xaa may be any naturally occuring amino acid
XIPSLAELGTIEQEEASSRPKWDNKAQYMLTCLGFCVGLGNVWRFPYLCQSHGGGAFMIPFLILLVLEGIPLLYLEFAIGQRLRRGSLGVWSSIHPALKGL

SEQ ID NO: 4495 - DNA, 381 bp, Homo sapiens
gcaccatcctatttcatctcatttactgatgagacaacaaaattccgttgggtttatccattacacgaccgtcgcgaggactctatcctcgatgtttttactacgatactagcttttattaaaaaccagtttcaggccagtgtcttggttatacaaatggaccgtggttctgagtattctaacagaactctccataaattccttgaaaaaaatggtataactccatgctatacaaccacagcggattcccgagcacatggagtcgctgaacggctaaaccgtaccttattagatgactgccgtactcaactgcaatgtagtggtttaccgaaccatttatggttctctgcaatcgaattttctactattgtgagaaattca

SEQ ID NO: 4496 - protein, 127 aa, Homo sapiens
APSYFISFTDETTKFRWVYPLHDRREDSILDVFTTILAFIKNQFQASVLVIQMDRGSEYSNRTLHKFLEKNGITPCYTTTADSRAHGVAERLNRTLLDDCRTQLQCSGLPNHLWFSAIEFSTIVRNS

SEQ ID NO: 4497 - DNA, 327 bp, Homo sapiens
  misc_feature (281)..(281): Wherein n may be a, c, g or t
  misc_feature (327)..(327): Wherein n may be a, c, g or t
ggatcctagcacgcccctcctgagaagtaactcatattctgacttctgtcactgcttaatggaaatggaatcctttattacatactctctgtgtctggcttctttcactcaacgtgatgtctgtgagattcatccctgttgtgtatattattagtttgttctttttaactgatgtgaattgtccactgaaggaagatacctggtgtttttcttctcctgttcctgggtatttggattgcttccagtttttggctgttgtgactaatgctgctatgaacgtntgtgtgcgtgtctttgtatggacctgtgcattcagaaggtggaatn

SEQ ID NO: 4498 - protein, 70 aa, Homo sapiens
MSVRFIPVVYIISLFFLTDVNCPLKEDTWCFSSPVPGYLDCFQFLAVVTNAAMNVCVRVFVWTCAFRRWN

SEQ ID NO: 4499 - DNA, 309 bp, Homo sapiens
cgttcccccgccctgcacgatcatgccggttccttgggcgcgctcacagtgctctcgggtgcactccgcgaataccgatggaccggtggcgagttggcgctgcgagtcctagaggcgggcgctcaggcatcgttcccgctcggctgggtgcatgatgtgcagcatcacgccagcactccgccggatcagccggtactcgacgacgcggtgtccactcgatctgcagcgaccagccaatctgtgacgaccactcgttctgcgccgccgaacaccgcccctttgacggcccgaccctgagcgcccacgcgt

SEQ ID NO: 4500 - protein, 98 aa, Homo sapiens
RSPALHDHAGSLGALTVLSGALREYRWTGGELALRVLEAGAQASFPLGWVHDVQHHASTPPDQPVLDDAVSTRSAATSQSVTTTRSAPPNTAPLTARP

SEQ ID NO: 4501 - DNA, 445 bp, Homo sapiens
  misc_feature (1)..(1): Wherein n may be a, c, g or t
nggatcctgacattgacctctgagcgttgctcagaacctggcgatcacgttttcgccggtgagccagcccgggaccttccctccggttcgcgggacgacatacatgaacgaatggagctatccatgcccaagatgaagagccactccgggacgaagaagcgtttcaaggtgaccggctcgggcaaggtcaccgctcgcaaggccggcaaacgccacctcaacgagcacaagtcctcgcgcgttactcgccgtctgaccggggagaccgtgctgtccaagggcgaggctgccaaggttaagaagctgctcgctggtcatcctggccgttgatgacagccgacgtcgcggctgacgacgtcccccccaaatccgttgggcgatacccgcctcgaaccaacccgggattgaccccgggagatccaaggagaatcactatggcacgcgt

SEQ ID NO: 4502 - protein, 68 aa, Homo sapiens
MPKMKSHSGTKKRFKVTGSGKVTARKAGKRHLNEHKSSRVTRRLTGETVLSKGEAAKVKKLLAGHPGR

SEQ ID NO: 4503 - DNA, 363 bp, Homo sapiens
gccggcgtaaggggaataacccagccgcgccggggatccttgatggttagagcctccttgttagtggcggcaaaatgagccgtggcagtgggagagaccaaggtagcggattcacgggcgcgggctacctcgcagagcacttccgcgccgggctgattggtgaccacaatgataagcgggccagcggtgtggatctccagtttttccacccgtgcggtgggggcggtggaatcggggcgcgctaagcgaggtgtccgcgcgccggtaagccgggcgagtgcgtgttttaatcccataagcccttagtctaatgagccggaacggcgatggtgcggcagcgttctagatcgaagaacgcctgct

SEQ ID NO: 4504 - protein, 98 aa, Homo sapiens
MGLKHALARLTGARTPRLARPDSTAPTARVEKLEIHTAGPLIIVVTNQPGAEVLCEVARARESATLVSPTATAHFAATNKEALTIKDPRRGWVIPLTP

SEQ ID NO: 4505 - DNA, 387 bp, Homo sapiens
aaccccactattaccgatcccgccattagagaacatctgcacgacgtacgtatccaagaaatggcagcatccgcctctattcttggtgttcaccatcggtggctaggattcgttgactctgggctaccagagggcgatccactccttaatctgcccgaaggatcattgttccccttggacccttacacggctgccgaaccattggtgcggcttattcgcgagttccgcccgcacgtcattattacgtatgacgaaaatggtggatacccgcatcctgaccatattcaggcacatcgagtatccatgattgcgtggcatgaagccggtaatccggcagcattcccagattctggacgcccgtggcaagcattcaaaatatattttgat

SEQ ID NO: 4506 - protein, 129 aa, Homo sapiens
NPTITDPAIREHLHDVRIQEMAASASILGVHHRWLGFVDSGLPEGDPLLNLPEGSLFPLDPYTAAEPLVRLIREFRPHVIITYDENGGYPHPDHIQAHRVSMIAWHEAGNPAAFPDSGRPWQAFKIYFD

SEQ ID NO: 4507 - DNA, 439 bp, Homo sapiens
  misc_feature (1)..(1): Wherein n may be a, c, g or t
ngaattccctttagctaccctagagccacgagcgcacgtggccacgagaacgactcctatgcgggccgtgacccgcccaaagattgctgcggtttggggatcgtcggaccaacccgcaacaatgagggagtgctcatgattcgtattcagctgccagacacgccgggttccctgggctcggtggctaccgctatgggcactgccaatgctgacatctctgctatcgagatcgttgaaaaaggccccgactacgtcatcgatgacttcatcttgaccttaccacccaccacgatgcctgacaccctggtgtcggcctgcggcatgcttgacgaagtgcacgtcctatggcttagccggtatccagagaattggagcattgagtccgatatcgcagcccttaataggatgtcggaggaccccgagcattccgcggagatct

SEQ ID NO: 4508 - protein, 146 aa, Homo sapiens
  misc_feature (1)..(1): Wherein Xaa may be any naturally occuring amino acid
XIPFSYPRATSARGHENDSYAGRDPPKDCCGLGIVGPTRNNEGVLMIRIQLPDTPGSLGSVATAMGTANADISAIEIVEKGPDYVIDDFILTLPPTTMPDTLVSACGMLDEVHVLWLSRYPENWSIESDIAALNRMSEDPEHSAEI

SEQ ID NO: 4509 - DNA, 460 bp, Homo sapiens
gtcgacaagtaccggggcattgtggttatggggacggtagatctgggccgtctcgtcagggccggatccataccggaccgtttcgtcagggtggtcggacatcgacgacaccgcagatgccgagacgacgttgatacgtccaccggcgcggtccgtgatccacgccgtcgtcgccgttgccgccactggcacgatgagggccatcaccgagaagagaacggccaccactcgcagaccacctcgtcccagaagagcgaggacgaaggcgatgacggcgatgaccagagccggtacagccaacgatcccaccagaacggaggagatgaaggtgagggcattgtgtgaggggaggatcgcggccactgaccacgccagtaccggcagggtcaggatcagcccgacgagaccggaagtgatgcgtagccaggaatgacgggaggttttcgtgtcagccacgcgt

SEQ ID NO: 4510 - protein, 105 aa, Homo sapiens
MGTVDLGRLVRAGSIPDRFVRVVGHRRHRRCRDDVDTSTGAVRDPRRRRRCRHWHDEGHHREENGHHSQTTSSQKSEDEGDDGDDQSRYSQRSHQNGGDEGEGIV

SEQ ID NO: 4511 - DNA, 573 bp, Homo sapiens
tgatcaatagctgacactataaggcaagtacacgattgcaacactgcagggtacggtacccgcacgttggacggcgggccccaggcgcaaagacaacgcgtctaccgcctcatcgcaaaaacccaaaagtaaaaaaagcacgtcccactcgccggccgctgcacttgatataaaagcttatgatttccaccaattccgttcccttggcggtttgcgcgccattttctattgcgctcagaaaaaaaccaccattctgctattatagctctgaacacacagctcggcggttattttgatttgcttttagagtccttcagaacataaaatataagtagcgatcgtattccaatattaacgaacaaaagtatcacaacacacacagcacctcaaatgacgtcacgagtttcgaggctggaccggcaggtaatattaatagagaccggttccacccaagtagtccggaacatggctgccgatcaaatgggagacttggccaaacagcaccccgaagacattctttcgttgctgtccagagtttacccctttttactagtgaagaaatgggaaacgcgt

SEQ ID NO: 4512 - protein, 61 aa, Homo sapiens
MTSRVSRLDRQVILIETGSTQVVRNMAADQMGDLAKQHPEDILSLLSRVYPFLLVKKWETR

SEQ ID NO: 4513 - DNA, 357 bp, Homo sapiens
  misc_feature (352)..(352): Wherein n may be a, c, g or t
  misc_feature (353)..(353): Wherein n may be a, c, g or t
cctaggcaagggaggatgatgttaaggtatgtgtgtgtgtggactggaatgataccacagggagggaggatttgataatgcaggagagtggatctttgtaggggccgtgtacctcattatgggagaggggccggatctctatctcaaggagaatattgactttaggtagaattgaggttccttcttttcctgtaacaggaggaaaggcagagtatgtagaatagatgtacccatattgaaagaggcaaaaatggaagccttaccttcatgttgacagtgcttgtgccttggtgggtctttgtggtatatcatggcctcgagctctgtttttgcaggtccactgagtttattnntgct

SEQ ID NO: 4514 - protein, 57 aa, Homo sapiens [sequence omitted]

SEQ ID NO: 4515 - DNA, 351 bp, Homo sapiens
gatcctgcatggaatatccatatgaacctaccatacggtacttgcaacgatattgaactattaggtttgcctttgcacgaactacaagatgaaggtattatttttctttgggtgacgggtagagctatagaattgggtaaagagtctttgaataactggggttacaacgtgataaatgaagtttcatggataaagacaaaccaactgggtagaacaattgttacaggtcgtacgggtcattggttaaatcattctaaggagcatttattggtgggcctaaagggtaatccaaagtggatcaacaaacatattgacgtcgatttgatcgtatcaatgaccagagagactagt

SEQ ID NO: 4516 - protein, 117 aa, Homo sapiens
DPAWNIHMNLPYGTCNDIELLGLPLHELQDEGIIFLWVTGRAIELGKESLNNWGYNVINEVSWIKTNQLGRTIVTGRTGHWLNHSKEHLLVGLKGNPKWINKHIDVDLIVSMTRETS

SEQ ID NO: 4517 - DNA, 333 bp, Homo sapiens
  misc_feature (1)..(1): Wherein n may be a, c, g or t
ncctcgttgttctcatagagggctacggcatcgcgtttgaactgttcggagtacctggacatgggggtagattacctttcttcccagctcgactgggctggatatcaggtgtccaccacatgggggtcaggtcccactcccaaaggagtagccatcacccacgagtcggcggtcaatacgattgtcgatgtcaacgaacgcctcggggtgactccgaccgaccggatattggggatttcagagctaaacttcgatctatcggtatacgacatcttcgggatgttcgcgcggggtgctaccttggtgttgccatctccagcagacaaacgtgat

SEQ ID NO: 4518 - protein, 91 aa, Homo sapiens
MGVDYLSSQLDWAGYQVSTTWGSGPTPKGVAITHESAVNTIVDVNERLGVTPTDRILGISELNFDLSVYDIFGMFARGATLVLPSPADKRD

SEQ ID NO: 4519 - DNA, 152 bp, Homo sapiens
  misc_feature (1)..(1): Wherein n may be a, c, g or t
  misc_feature (34)..(34): Wherein n may be a, c, g or t
  misc_feature (64)..(64): Wherein n may be a, c, g or t
  misc_feature (88)..(88): Wherein n may be a, c, g or t
  misc_feature (152)..(152): Wherein n may be a, c, g or t
ntctctgtgtgtgtatgtgtgtgtatgtgtgtgncaggggcagtctgtgtgtgtgcaggcgctnagctctgtgtgtgtgtgtgcaggnggctagctctgtgtgtgtgcacggtagtctgtgtgtgtgtccacaggccggagtgtgctcccgn

SEQ ID NO: 4520 - protein, 50 aa, Homo sapiens
  misc_feature (1)..(1): Wherein Xaa may be any naturally occuring amino acid
  misc_feature (12)..(12): Wherein Xaa may be any naturally occuring amino acid
  misc_feature (22)..(22): Wherein Xaa may be any naturally occuring amino acid
  misc_feature (30)..(30): Wherein Xaa may be any naturally occuring amino acid
XSVCVCVCMCVXGAVCVCAGAXLCVCVCRXLALCVCTVVCVCVHRPECAP

SEQ ID NO: 4521 - DNA, 212 bp, Homo sapiens
tgtacacatgacatacaactcagacttaagcagaagtagttacatttccttttccccttctttaagaaaaagaacacatcacctgtttccaagtgttggcactttgtgcctgctccttaagttggtagaaatgaaacttattgtgaaagtaattatttgggccatttcttttctaccttaagaaaaatcagtatcagatgtttggtttcagt

SEQ ID NO: 4522 - protein, 57 aa, Homo sapiens
MTYNSDLSRSSYISFSPSLRKRTHHLFPSVGTLCLLLKLVEMKLIVKVIIWAISFLP

SEQ ID NO: 4523 - DNA, 171 bp, Homo sapiens
ctagtaccattcttagcgattgttttagacctaacttctgaaacgaacacctttccagttggtttcaacgaccttatcacccaaagttttaaactgccagataggcaagtaagatttcttttactaatatacctacccaaattaataggtccattgagcaaatcagagatc

SEQ ID NO: 4524 - protein, 57 aa, Homo sapiens
LVPFLAIVLDLTSETNTFPVGFNDLITQSFKLPDRQVRFLLLIYLPKLIGPLSKSEI

SEQ ID NO: 4525 - DNA, 354 bp, Homo sapiens
tgtacacatatgaagaggatgaaggtgctgtttggaaggctgagcttctaaaaccttcattggtgtttaaaaagaaataataatcatttcttagcagtaagtaaggtggactgttgccctctgcgtggccatcagaattctgctcctctgggagaattttgctgaagaattggtgagtatgcatcctgagtgtctttcctttttttttttttttttttactccaaggaccatatttgcaaaaatcaatggcccccccgttttttggtaccgggaccctctccattttgtcacaagcttgaaaaaattaatttttttcttcccgccccccggatgggtccccagcggggacttgg

SEQ ID NO: 4526 - protein, 77 aa, Homo sapiens
MVLGVKKKKKKGKTLRMHTHQFFSKILPEEQNSDGHAEGNSPPYLLLRNDYYFFLNTNEGFRSSAFQTAPSSSSYVY

SEQ ID NO: 4527 - DNA, 370 bp, Homo sapiens
agatcttattgttcatcagacattgagtattaatatgtgcagccttctgctggtcagtggctttgtggaaagccattctctgtactgaaagtatcaggaaggcagttaacataaaccttagtgcctgacattctgggagtgatgggaaggccaaggtggaaacaagagagcagacgaagctgataaccagatacatgctagcccttatgcacacttctaaatagacaggctgtagtcattcaaaaatggaagcatctgaataagaatgacaacacaccaattcttcaggcgtgagtcagtatagagaggttgggaagacacgtaatacatggcccaactcaatacattttttgttaatttacccttctct

SEQ ID NO: 4528 - protein, 65 aa, Homo sapiens [sequence omitted]

SEQ ID NO: 4529 - DNA, 268 bp, Homo sapiens
gtcgaccaactcgtggctgggtggacccgctccgagggaactcctcgacgatgaagcggccgtcctcgacgccgcggcgcatgagagcgacgagatcggcgggtgacagcgctggcgccgaccggcattgtccccaaaccgccgaccgcctttgcgacccacgtcaccgatctgcccgtaggcgccgttctctggcgcattcacgccgaaaagcttgccggcaatgcgttcaatccgggctttggctcctcgcgattcgcgccgatcg

SEQ ID NO: 4530 - protein, 72 aa, Homo sapiens
MKRPSSTPRRMRATRSAGDSAGADRHCPQTADRLCDPRHRSARRRRSLAHSRRKACRQCVQSGLWLLAIRAD

SEQ ID NO: 4531 - DNA, 330 bp, Homo sapiens
cctaggcagtctgtgataggattcagcatcaagtggtaggaatttacacataggcatataaaatgaataagtcttctaagaaaatgtaaatgagacccaaggttacaactatatatgtttatggccttcaggaaggttagcataatgctgtagtattttctcatgtgaataatgaaactaacttacccacaattgagtaagcctaaaaaaaattcaggcaacagctattctgcaaagttaccattattattaaaataaaatcttattaacctcatgccaactcatttcagatagttctaatttaagaaaactgttaccctgcaggcaacc

SEQ ID NO: 4532 - protein, 54 aa, Homo sapiens
MRKYYSIMLTFLKAINIYSCNLGSHLHFLRRLIHFICLCVNSYHLMLNPITDCL

SEQ ID NO: 4533 - DNA, 207 bp, Homo sapiens
ctagaatactgccaatggacaatggtttttatcaatcatttatgctcttgctctgataacataaatcaaaaaatgctatttaagacgaaactagaaaattgtggaattttacgaattatgaacaaaataaaactgcttgattacgacaagattattgacccaattgagttatttggacattattaacttgacgattttaacgtttaa

SEQ ID NO: 4534 - protein, 61 aa, Homo sapiens
LEYCQWTMVFINHLCSCSDNINQKMLFKTKLENCGILRIMNKIKLLDYDKIIDPIELFGHY

SEQ ID NO: 4535 - DNA, 309 bp, Homo sapiens
acgcgttgtcttctctccgtaatcagtgtaactcattgtaaaaacaagaaagaaaaatcctatgattatctcaacaaatacagaaacagtatttgaaaatacaaaatacatgcctgacaaaaactggcggaaaacagagaacagaagagaacttccttatattgataaacagtatatgtgaaaaatctacagttaacatcacacttacgatcaggaacaaggaaaggatatcgatcttaccacttctaatcagcattgtagtagtggttctagccagtgaagtcatgcaagaaaaataaaatctccatt

SEQ ID NO: 4536 - protein, 71 aa, Homo sapiens [sequence omitted]

SEQ ID NO: 4537 - DNA, 297 bp, Homo sapiens
  misc_feature (1)..(1): Wherein n may be a, c, g or t
  misc_feature (2)..(2): Wherein n may be a, c, g or t
nnctccccctcccagaaaagacccctcgaaaaacggcggcgctgcgacatgacggaggtcgaggctccagctactgcggtcgaggctccagctgctgcggtcgcgacgacgacccctgaggtggcggcgcccgaggccggagccgctacggaggcgaagggtccgcacaagcttcaccggcagtggaccttctggtacgacatccagacgaagaccaagtccggggctgcgtggggcacctccctcaaaaaggcctacaccttcgacaccgttgaggagttctgtatcatgtatgat

SEQ ID NO: 4538 - protein, 83 aa, Homo sapiens
MTEVEAPATAVEAPAAAVATTTPEVAAPEAGAATEAKGPHKLHRQWTFWYDIQTKTKSGAAWGTSLKKAYTFDTVEEFCIMYD

SEQ ID NO: 4539 - DNA, 496 bp, Homo sapiens
  misc_feature (413)..(413): Wherein n may be a, c, g or t
  misc_feature (474)..(474): Wherein n may be a, c, g or t
gcgcgccaggggtgtatttgtgtcagagataagattcaaaccccagccctctgagctcagagcctcccctttgtaccattgcccttctctttctttttctgtagttattaaaacccgttgtcctggttgtccaactcatggacatacaaattagctttggtgcataccttagctgtatagacatcttctaagacataaattctattgtttcaacatgtatataaaagatacgcatttactgatgagtcaggcagtaagatgtctgcattgtcttctgcagtaaagaatgctttatttaccataaaatttgatgttttgttgaggaattttaagtgatgctttttatattcatatttttcattgatgatatgcagaactggttaccctaaggtattgacaaaagtgggtgattntactatcttcaaaagttgtcaagtatgttttctagtataacacttctggctctcagattanggacctccccatcacagtgggc

SEQ ID NO: 4540 - protein, 53 aa, Homo sapiens [sequence omitted]

SEQ ID NO: 4541 - DNA, 250 bp, Homo sapiens
acgcgtggaaccaggggcacactactttacctctctgtgctttagtttccttaactacctcatcgggttggagttaagaagactaaatgaatgaatgtgtttcggggaaaaggaacccaaaaaccccggcacatggcacatgcaaaattaatgccattattatttattattagcgttattatttatttacacacagaagttgcacacctgcctactgactggaaaagaaaaaagccacagatgggaaatt

SEQ ID NO: 4542 - protein, 53 aa, Homo sapiens
MNVFRGKGTQKPRHMAHAKLMPLLFIISVIIYLHTEVAHLPTDWKRKKPQMGN

SEQ ID NO: 4543 - DNA, 345 bp, Homo sapiens
catattcacaaaagagccggtgtcttgggtataaaagttctcattgataatgttaagtcgtcctcagttttcctaaaaaagtatcagtataacctagccaatggtctattatttgtgctgaaggacactcagagcgaggccccatctgctataacagatagcgctgagaaattactaatagatctattaagtattacgttcgcggatgtaaaagaagaggatttgggtaccaaagtcttggagaacacactgccggacatagtatgcgaattaagtaatgcaaatcctaaggtaagaaatgcctgccagaagtccttacatacaaattcaaacctcactggaatt

SEQ ID NO: 4544 - protein, 115 aa, Homo sapiens
HIHKRAGVLGIKVLIDNVKSSSVFLKKYQYNLANGLLFVLKDTQSEAPSAITDSAEKLLIDLLSITFADVKEEDLGTKVLENTLPDIVCELSNANPKVRNACQKSLHTNSNLTGI

SEQ ID NO: 4545 - DNA, 384 bp, Homo sapiens
  misc_feature (333)..(333): Wherein n may be a, c, g or t
  misc_feature (384)..(384): Wherein n may be a, c, g or t
ggtaccacccagtttaaatcctgtcttcatagctcaatgtgttttcatgccgatttcttaactccctccaagccttatttacctcaactgtcaaatagaaattattttatgacatcgttgggaagatttgcaaggcctgatacctctaatcaaagaataatgcttagaataatctctaagcaatttctttctgacatttttaataggctgttcttcttcctcatactttacatatgtcataaagactacaacatatagtactatccagtgcccaattttcctcaattgagttgcggctctgagtgctcttatgctactgacccagactagctnaccaaagaatggcctggagggactgtgatatagcatcgtatttttcagatn

SEQ ID NO: 4546 - protein, 92 aa, Homo sapiens
  misc_feature (13)..(13): Wherein Xaa may be any naturally occuring amino acid
MLYHSPSRPFFGXLVWVSSIRALRAATQLRKIGHWIVLYVVVFMTYVKYEEEEQPIKNVRKKLLRDYSKHYSLIRGIRPCKSSQRCHKIISI

SEQ ID NO: 4547 - DNA, 277 bp, Homo sapiens
actagtgactctggtcatatggtaccacatggagaagtaagaggaggtcaccagacagactggagagggaaggggaaggccttccaggaaaagctcacttgtgcaaaagccctgtggcacctgatagcttcttgtgttgtcaagggaacatggaggataggcagtgagaccctccgtaagtacatattccatttccaaggattctgatgtgagtctaggggtggcctgggagccatgaattctacacattcctcaggagatgctgattgcaggatcc

SEQ ID NO: 4548 - protein, 83 aa, Homo sapiens
MCRIHGSQATPRLTSESLEMEYVLTEGLTAYPPCSLDNTRSYQVPQGFCTSELFLEGLPLPSPVCLVTSSYFSMWYHMTRVTS

SEQ ID NO: 4549 - DNA, 416 bp, Homo sapiens
  misc_feature (1)..(1): Wherein n may be a, c, g or t
  misc_feature (416)..(416): Wherein n may be a, c, g or t
nggatcctcagcatcacggaccagccggccctggtccaggccatctttagccgagatgtggaggaagtgcgttccctactctcgcagaaggagaacatcaatgtgctggtgagttgggagcagggaggatggcgagaccggaatcctggctcccgtgttctggacccctccccaccggtggggcggctccgtgtctcctctgctcagatgaggccgcagttctttccatcctggagtgaaagcctactctgcatttggggattgagagcaggtcaggcttgaagcccagatcacttgggctgggaatgcccaggaacgttgttctcttctcagcctccggagtctgcagcgcccccacccctcctggaaaaaaggagcggcttctcagcccattggccctgactccaccctcctan

SEQ ID NO: 4550 - protein, 93 aa, Homo sapiens
  misc_feature (1)..(1): Wherein Xaa may be any naturally occuring amino acid
XILSITDQPALVQAIFSRDVEEVRSLLSQKENINVLVSWEQGGWRDRNPGSRVLDPSPPVGRLRVSSAQMRPQFFPSWSESLLCIWGLRAGQA

SEQ ID NO: 4551 - DNA, 416 bp, Homo sapiens
  misc_feature (282)..(282): Wherein n may be a, c, g or t
  misc_feature (390)..(390): Wherein n may be a, c, g or t
cctaggtgggctggcaatgggagctgggccccagtggctcagagtgactgagcactggtcttgtgtacttctgattaaggacaaatccacaagctccagaaacccaacaagcaaatagtaataagtctggcagaacgctgaaaagcttaaccattatgtttttgctgaacaaaagaacccccagatctcatgaagaaaagccagaaaaccgtgcttttcctcagaaggtagatccgaatttttccagccgttggttatgtgtgcagcttggggccaggcgtntgtccactgcaaccacaacctcagacattcttctgtgggggtctgagcctggacagcagtgttctcagagcactttccaggacatgcgagctataagatgaacccatnagcagatacgcttgatcctgcaggct

SEQ ID NO: 4552 - protein, 75 aa, Homo sapiens
  misc_feature (43)..(43): Wherein Xaa may be any naturally occuring amino acid
MFLLNKRTPRSHEEKPENRAFPQKVDPNFSSRWLCVQLGARRXSTATTTSDILLWGSEPGQQCSQSTFQDMRAIR

SEQ ID NO: 4553 - DNA, 417 bp, Homo sapiens
  misc_feature (1)..(1): Wherein n may be a, c, g or t
nacgcgtaacatcgcgcaaatgaaggttttgatgtattataatgaggtattcttccttatatacatcgatgaaaagcgttgacagcatacattggaaagaaataggaaacggacaccggaagaaaaaatatgggtattaaaggtttgaatgcaattatatcggaacatgttccctctgctatcaggaaaagcgatatcaagagcttttttggcagaaaggttgccatcgatgcctctatgtctctatatcagtttttaattgctgtaagacagcaagacggtgggcagttgaccaatgaagccggtgaaacaacgtcacacttgatgggtatgttttataggacactgagaatgattgataacggtatcaagccttgttatgtcttcgacggcaaacctccagatttgaaatctcat

SEQ ID NO: 4554 - protein, 96 aa, Homo sapiens
MGIKGLNAIISEHVPSAIRKSDIKSFFGRKVAIDASMSLYQFLIAVRQQDGGQLTNEAGETTSHLMGMFYRTLRMIDNGIKPCYVFDGKPPDLKSH

SEQ ID NO: 4555 - DNA, 190 bp, Homo sapiens
acgcgttggcagacagcgtgatgctggccgtcggcaaccgcctgtctacccgtttcgttgccacgccgggagcggcgaccggtctgacccttcaggtccagggcgcgacactggcacgctatgccgagttgcaacgcctgctcgatccgttcggcgcgcgcctggtaggcgtgcggggcgaccgcctcga

SEQ ID NO: 4556 - protein, 56 aa, Homo sapiens
MLAVGNRLSTRFVATPGAATGLTLQVQGATLARYAELQRLLDPFGARLVGVRGDRL

SEQ ID NO: 4557 - DNA, 219 bp, Homo sapiens
gaattcagccaggagctctcctcccgccacgaagacattggagtcatgggacctctcagcagccctgtccgtcctgatccagcggtaatgggaacacgcctggagctgtcctgtgattcattgcccccctccattactgctctgagcccattcatgtcagcaccatctgtctaaaatcactacccaggaatgctttttaacgtcatgatcacatctaga

SEQ ID NO: 4558 - protein, 51 aa, Homo sapiens
MNGLRAVMEGGNESQDSSRRVPITAGSGRTGLLRGPMTPMSSWREESSWLN

SEQ ID NO: 4559 - DNA, 293 bp, Homo sapiens
tcatgattcaggcattatatgatctatgctttagaggagtcgtgacttaaagtcatgcttctgtcttcttcaggttttgaatccaaaagcacaatgaacgcatatcatatacaaaatcttcgggagaaaccatgatgagtaaggacaaggctttcctgctcagctggtgaatcttagagtgagtggtgagacaacctttgggctggtcaccaaagcagaagtaatgcactgtgttattaagcatcggcggccatggagacacgtgcctctttctagaatccctgtcctaggtc

SEQ ID NO: 4560 - protein, 63 aa, Homo sapiens
MLNNTVHYFCFGDQPKGCLTTHSKIHQLSRKALSLLIMVSPEDFVYDMRSLCFWIQNLKKTEA

SEQ ID NO: 4561 - DNA, 216 bp, Homo sapiens
  misc_feature (1)..(1): Wherein n may be a, c, g or t
  misc_feature (2)..(2): Wherein n may be a, c, g or t
nnggcgcgccaggggggcgccaaggatggcggagaagatcctgggtgtccagtgagtgaagggcctgagggcggacgggggcccagggatccaaacgggcttggtggggtcctgggggatccaggaaagggagaccctaaggaagggcctggggacccagggaggcgcctgggtaggcggtgagagcccatggcaagggacctggagggtccagat

SEQ ID NO: 4562 - protein, 60 aa, Homo sapiens
  misc_feature (1)..(1): Wherein Xaa may be any naturally occuring amino acid
XARQGGAKDGGEDPGCPVSEGPEGGRGPRDPNGLGGVLGDPGKGDPKEGPGDPGRRLGRR

SEQ ID NO: 4563 - DNA, 413 bp, Homo sapiens
gtgcacggacgaccgcgcacagggactcgtgtgccgcgcatgggacgacggcgatgcgtgtgcgtgcataccgctgctctggcaggtcgtgcgtgcgattgtcgccgacacatcggcggcttggcacgtcgtgattgggcgcctaggcaccatgtcgcaggccgacatggacatgtgggcgtcgtgcctcgatacgcgcgacccttcctgctctcggtgggccttgtgtgcctggagcgcgatgcctggcctacgggcacgcgatgcatcggtggtctacctgtcggacatgccgctgggtctggcctcaggtgcgtggccgatccgcgtgcctcgctcggcgttatgtgtctgccggcgcctatgccattcatctcgtgcagctacgtcacctggctgatctcgacgcggct

SEQ ID NO: 4564 - protein, 124 aa, Homo sapiens
MGRRRCVCVHTAALAGRACDCRRHIGGLARRDWAPRHHVAGRHGHVGVVPRYARPFLLSVGLVCLERDAWPTGTRCIGGLPVGHAAGSGLRCVADPRASLGVMCLPAPMPFISCSYVTWLISTR

SEQ ID NO: 4565 - DNA, 410 bp, Homo sapiens
  misc_feature (148)..(148): Wherein n may be a, c, g or t
  misc_feature (169)..(169): Wherein n may be a, c, g or t
  misc_feature (410)..(410): Wherein n may be a, c, g or t
atcaacccatcccgcgacaacgcccgtgagatcatcaacggcctcaccgacagctacggctgcgacgtgtacatcgaaaccaccggcgtaccggccggcgtgacccagggcctggacctgatccgcaaactcgggcgctttggccagnttccagcgtattcggcgccgnaaaccagcgtcgactggtcgatcatcggcgaccgtaaagagctcgacgtacgcggcgcgcacctgggcccgtattgctacccgattgccatcgacctgttcgagcgcggcctggtcacctccaaaggcatcgtcactcacgacttcccgctggatcactttgccgaagcgttcgagttggccaactcgacgaagtcgatcaaggtgctgttgaaaccggtgctttgagatgaactatgtcn

SEQ ID NO: 4566 - protein, 131 aa, Homo sapiens
  misc_feature (50)..(50): Wherein Xaa may be any naturally occuring amino acid
  misc_feature (57)..(57): Wherein Xaa may be any naturally occuring amino acid
INPSRDNAREIINGLTDSYGCDVYIETTGVPAGVTQGLDLIRKLGRFGQXPAYSAPXTSVDWSIIGDRKELDVRGAHLGPYCYPIAIDLFERGLVTSKGIVTHDFPLDHFAEAFELANSTKSIKVLLKPVL

SEQ ID NO: 4567 - DNA, 231 bp, Homo sapiens
ctaaaagctgcattagtttttgttgaaggcttaaccaaaaatgatttttcaaatgagctacaagataaattgactgtaaatgaaagtaaaattttagaaaattcaatcagcagtagagtctcattgccatcaaaaactgctataatgcataaaaacaacggtaataacggcagtaacctaggtgacatcgtgactcctactatccaaaggccagatgttacaagatcgaat

SEQ ID NO: 4568 - protein, 77 aa, Homo sapiens
LKAALVFVEGLTKNDFSNELQDKLTVNESKILENSISSRVSLPSKTAIMHKNNGNNGSNLGDIVTPTIQRPDVTRSN

SEQ ID NO: 4569 - DNA, 351 bp, Homo sapiens
tgatcacacttgttacacattcacacacccacttcatgaggttgtcagcttttgtaaggtaggggaatgacttggtgtttcctcgtcattgtatcaaaatctccagcacaatgcctgatacataaatggtgcctgctaatactgaaaaatggatggagggagtccatgctccttggttactcacatagccattgtttactcactggttcacctccgtgagtgagaatgctctttgagtctctgtgttaacttcaacttgcccctctttttcctcagaacagaaggcccggcgattccccgaccaagcccaggctctattcccactttgtgcactggagcaccagggctagc

SEQ ID NO: 4570 - protein, 50 aa, Homo sapiens
MTWCFLVIVSKSPAQCLIHKWCLLILKNGWRESMLLGYSHSHCLLTGSPP

SEQ ID NO: 4571 - DNA, 249 bp, Homo sapiens
  misc_feature (1)..(1): Wherein n may be a, c, g or t
ncgcttgcgataattacttactctacctacgggcacatagacgttttagcccaagctgttaagaaaggtgtggaggcagctggtggtaaagctgatatatacagggtcgaggaaactttacctgatgaagtcctcaccaagatgaacgctcctcagaaacctgaagatattcctgttgccactgagaaaacgttgctcgaatatgacgcctttttgttcggtgttccaactaggtttggtaatttgccg

SEQ ID NO: 4572 - protein, 83 aa, Homo sapiens
  misc_feature (1)..(1): Wherein Xaa may be any naturally occuring amino acid
XLAIITYSTYGHIDVLAQAVKKGVEAAGGKADIYRVEETLPDEVLTKMNAPQKPEDIPVATEKTLLEYDAFLFGVPTRFGNLP

SEQ ID NO: 4573 - DNA, 205 bp, Homo sapiens
acgcgtcgggaaccgcgctcgggatgatggccgtcacgacggcgtgggcggagcaggtgccgctcgtgtacacgacgactacttcgagccgcgatctcgccggccgtgaccagtacgcggcggtgccgcgtgccgtgacggagatgagcgcgcaatttgtgaaggggagttgcgaggggccgaacgcggggcgcattctcgagat

SEQ ID NO: 4574 - protein, 65 aa, Homo sapiens
MRPAFGPSQLPFTNCALISVTARGTAAYWSRPARSRLEVVVVYTSGTCSAHAVVTAIIPSAVPDA

SEQ ID NO: 4575 - DNA, 246 bp, Homo sapiens
acgcgtgaagggagaagatgaccatgtgacaacaggggcagagatcacagggatgcctctactagacaaggcacaccagaaattgcttgccaacaaacaccagaaattagaagaagcaagaaacaactccccacacacaacccacccctgccaggttcaaaagaagcatgggtctgccaacaccttgattttggatttccagcttccacaactatgaaacaataaggttctggtgtttgaaaccac

SEQ ID NO: 4576 - protein, 54 aa, Homo sapiens
MPLLDKAHQKLLANKHQKLEEARNNSPHTTHPCQVQKKHGSANTLILDFQLPQL

SEQ ID NO: 4577 - DNA, 343 bp, Homo sapiens
  misc_feature (63)..(63): Wherein n may be a, c, g or t
  misc_feature (141)..(141): Wherein n may be a, c, g or t
tgatcatgccctgtctcagaaagataagaacgagggaagagatcataatgggctacaagaatntgaagggctgtcaggtagaagagtgagcagactttgcctttggagttacagaggagagcatttggaatgaagagtganagttcaagaggcaattgaacctggatatggggctgccagcctcattcgatggtgagtactctgtgactagagatatccagggaaaatcagatggctccttctctgggatggagtggaggggaattgtgttggataggaactggtctataggacatttaagtatcttcccaagaattcttagggggcagggacaagttccgga

SEQ ID NO: 4578 - protein, 58 aa, Homo sapiens [sequence omitted]

SEQ ID NO: 4579 - DNA, 270 bp, Homo sapiens
gatcaattagttgacctgttttatgcattgaatgacgatgacgttaacctcagtaaactaattagcattttcacgaagatatgctcattgcccggttttgaaaaccttacaattaatatcatatttcacccgaacttttatgaaaagattgtttctttctttgatacctatttcaacagtttacttattcaaatcgatctattgaaattcataaagctaatattctcaaaatcgttattgaagctatatgactacacaggacagccggat

SEQ ID NO: 4580 - protein, 90 aa, Homo sapiens
DQLVDLFYALNDDDVNLSKLISIFTKICSLPGFENLTINIIFHPNFYEKIVSFFDTYFNSLLIQIDLLKFIKLIFSKSLLKLYDYTGQPD

SEQ ID NO: 4581 - DNA, 351 bp, Homo sapiens
  misc_feature (1)..(1): Wherein n may be a, c, g or t
  misc_feature (2)..(2): Wherein n may be a, c, g or t
nnaccggtgcgcgtgcgcttctctggcgattacgtcgcagagctgtcgtcgcttaatggttcaaagttgcctgtagttcggcttgaacccttgatgatcggcgggatttacccgaagaacttagaagatcgcatcctgatcaagcttgatcaggtgccgccctacctgttggaaaccttggttgcggtagaagatcgcgacttttacagccattggggtgtgtcaccgaagtcgattgctcgcgcgatctgggtgaacacctccggtgggaagatgacacagggtggcagcacgctgacgcaacaattggtcaagaacttctacttgaccaacgagcgcagcctgacgcgt

SEQ ID NO: 4582 - protein, 117 aa, Homo sapiens
  misc_feature (1)..(1): Wherein Xaa may be any naturally occuring amino acid
XPVRVRFSGDYVAELSSLNGSKLPVVRLEPLMIGGIYPKNLEDRILIKLDQVPPYLLETLVAVEDRDFYSHWGVSPKSIARAIWVNTSGGKMTQGGSTLTQQLVKNFYLTNERSLTR

SEQ ID NO: 4583 - DNA, 232 bp, Homo sapiens
cggccgggtccttcaccgtgaccggcctgccctgggacacgcgctcctactccctggtggagaagcgggctcccacgagataccggcttgacacgacgagccgcagcttcgccatcaagcccaatgccctccagtactccttctcgaaggccttcaccaacgagaagggcggccaccccccgcctgcccctgacaggcggacgcggggcgcacattttcctgatcgcaggag

SEQ ID NO: 4584 - protein, 71 aa, Homo sapiens
MCAPRPPVRGRRGVAALLVGEGLREGVLEGIGLDGEAAARRVKPVSRGSPLLHQGVGARVPGQAGHGEGPG

SEQ ID NO: 4585 - DNA, 313 bp, Homo sapiens
aagcttatattacaatgggaaaatgacccccaagtatatttgaaggtgataagtgccacaggaagaaaactgagcaaggaagaggaacagggagctggcctcagtcttccctgatgagcatctataagaagaggcctgggtaccttcctctcagccccatattgacagcacctgcaccaatctatcatgaagaagggactatcccttacctggttgttaccccacgtcacctcccccgagcccattttttgtgaaaaggtgctggcagctccaaggcaccattcattaggaggtcagggcgaggaaaatgcaa

SEQ ID NO: 4586 - protein, 81 aa, Homo sapiens [sequence omitted]

SEQ ID NO: 4587 - DNA, 199 bp, Homo sapiens
  misc_feature (97)..(97): Wherein n may be a, c, g or t
tacatgtgggttgggactcagacaagccaagtggagatcaaactgagtctgaaggcttgccaggtatacatccagcacacacgctctaaagaacatnggaggccacgccgcctgcgcctggtccgcaaaggtaacgaacaacgtgccttcacccgcggcttccatgccgggagcacgttccgtcaagccccagcctagg

SEQ ID NO: 4588 - protein, 65 aa, Homo sapiens
  misc_feature (33)..(33): Wherein Xaa may be any naturally occuring amino acid
YMWVGTQTSQVEIKLSLKACQVYIQHTRSKEHXRPRRLRLVRKGNEQRAFTRGFHAGSTFRQAPA

SEQ ID NO: 4589 - DNA, 267 bp, Homo sapiens
  misc_feature (13)..(13): Wherein n may be a, c, g or t
gatcaggatatanacgatggaaaaggttatatatcgttaccgaatgtctcgaattatatattcttccttggtggcaggttcaggacagtaaagggcgccaaaccgttgtgggtaggtgttctccttgctattgtatgtcccatggttctcttctccatatttgaggctcacaaattgtggcatacccaaaatggttataaagggctggtcattttcttctattatttttgggtcataacgctagcatcctttatcagaacagccact

SEQ ID NO: 4590 - protein, 89 aa, Homo sapiens
  misc_feature (5)..(5): Wherein Xaa may be any naturally occuring amino acid
DQDIXDGKGYISLPNVSNYIFFLGGRFRTVKGAKPLWVGVLLAIVCPMVLFSIFEAHKLWHTQNGYKGLVIFFYYFWVITLASFIRTAT

SEQ ID NO: 4591 - DNA, 331 bp, Homo sapiens
atcagagctacgttcgagagtctcgctatcgcgcgtgagtccttttaccatctgtcgctgatgccatgttttgacaagaaactagaagcgtcaaggccagaatcgcttgacgatgggattgactgtgtcattacgccacgtgaaatagtgacaatgttacaagagttgaatttagacttcaagtcgtttcttactgaggacacaagtttatatgggcggctatcaccgccgggatgggacccgcgagtccactgggcgtcgaatctgggaggcacttgtggtggctatgcctaccagtacgtaacggctggccaacgactacacccaagat

SEQ ID NO: 4592 - protein, 110 aa, Homo sapiens
IRATFESLAIARESFYHLSLMPCFDKKLEASRPESLDDGIDCVITPREIVTMLQELNLDFKSFLTEDTSLYGRLSPPGWDPRVHWASNLGGTCGGYAYQYVTAGQRLHPR

SEQ ID NO: 4593 - DNA, 290 bp, Homo sapiens
acgcgttggctgctggaggacacgacaaccactgaggcgccagcggccagcgccgcctttgccgtggcaaggccaatacccgacgtgccgcccaacaggacgacgcgctggttctgcagattcgttgcgcttggtgtgatggtcatgaaagcctccgggcagctgatcagtaaaacgaagcacgactatcattcatcaggcgtgcctgataaacaggctaattcttcgatcactccttagtggggcttgtgaatggaccgcttcaccagcatggcgatgtttgtacgcgt

SEQ ID NO: 4594 - protein, 64 aa, Homo sapiens
MIVVLRFTDQLPGGFHDHHTKRNESAEPARRPVGRHVGYWPCHGKGGAGRWRLSGCRVLQQPTR

SEQ ID NO: 4595 - DNA, 292 bp, Homo sapiens
acgcgtatcgcgcgcgaaagcgatctggtcatgaaggtctgcctttgtctggagaaagtgctcagaagctcttgcggacgttgatcccgatcgtgcgcggggctgccgaggtggccgagtaggagttcgcggttgaggattgcgacgcgcgattgatcgccaccgcgtcgaacagattgttgacgaagaggtagacccctgcatcattgtgcttgaggtcgatgccgacccgcaggttggtcagcgaataggcaccgatcttgacgcggtagacgttggttggccggaattc

SEQ ID NO: 4596 - protein, 69 aa, Homo sapiens
MMQGSTSSSTICSTRWRSIARRNPQPRTPTRPPRQPRARSGSTSARASEHFLQTKADLHDQIAFARDTR

SEQ ID NO: 4597 - DNA, 219 bp, Homo sapiens
  misc_feature (1)..(1): Wherein n may be a, c, g or t
  misc_feature (3)..(3): Wherein n may be a, c, g or t
  misc_feature (4)..(4): Wherein n may be a, c, g or t
  misc_feature (5)..(5): Wherein n may be a, c, g or t
  misc_feature (16)..(16): Wherein n may be a, c, g or t
  misc_feature (17)..(17): Wherein n may be a, c, g or t
  misc_feature (20)..(20): Wherein n may be a, c, g or t
  misc_feature (21)..(21): Wherein n may be a, c, g or t
  misc_feature (22)..(22): Wherein n may be a, c, g or t
  misc_feature (23)..(23): Wherein n may be a, c, g or t
  misc_feature (24)..(24): Wherein n may be a, c, g or t
  misc_feature (25)..(25): Wherein n may be a, c, g or t
ngnnnggggggggggnnggnnnnnnccccgtggtccaatggttcaggtaaatcgaatttcttcgctgcgattagatttgttcttagtgccgattactctaatcttaagagggaagaaaggcaagggcttatccaccaaggttttggtggttcagtgatgagtgcctcggtagaaattgtgttccacgatccagatcattctatgatattgccctccgga

SEQ ID NO: 4598 - protein, 73 aa, Homo sapiens
  misc_feature (1)..(1): Wherein Xaa may be any naturally occuring amino acid
  misc_feature (2)..(2): Wherein Xaa may be any naturally occuring amino acid
  misc_feature (6)..(6): Wherein Xaa may be any naturally occuring amino acid
  misc_feature (7)..(7): Wherein Xaa may be any naturally occuring amino acid
  misc_feature (8)..(8): Wherein Xaa may be any naturally occuring amino acid
  misc_feature (9)..(9): Wherein Xaa may be any naturally occuring amino acid
XXGGGXXXXPWSNGSGKSNFFAAIRFVLSADYSNLKREERQGLIHQGFGGSVMSASVEIVFHDPDHSMILPSG

SEQ ID NO: 4599 - DNA, 177 bp, Homo sapiens
agatcttttatctactcacaacatttgtcacaaaagcgcttctccttacttccccagtagtgtaatgggtaacagaaatatctcaacttcaggaggaaattttcagaaggcttcactttttgtggcttggcgaagaagagctgccggctgagaacgtagccctctcccatatctaga

SEQ ID NO: 4600 - protein, 52 aa, Homo sapiens
MGEGYVLSRQLFFAKPQKVKPSENFLLKLRYFCYPLHYWGSKEKRFCDKCCE

SEQ ID NO: 4601 - DNA, 330 bp, Homo sapiens
cctagggtttcccttgtatctagaaccaaacaatacttctgtcctatatgagtcttagaactcacggcatactcggtcaggttgtttcacattgtcaggcatgtgctcatgctgctcctctgcttaggagaccctttgccacttcaccagcctggcaaacatctatcagtctctcaggatgacttcctgagtgaggcctaacctgatagccctctgcacaacttctgtactcacaaatgagcactctgccctctgcacagcttctgtactctacagtattgctatcagtatgccccgaacacttcattacacttatttatgtgaggatcc

SEQ ID NO: 4602 - protein, 66 aa, Homo sapiens [sequence omitted]

SEQ ID NO: 4603 - DNA, 293 bp, Homo sapiens
ggatccactggcggtcacagcctcgctgtcgcagggtgtgaaccagagctgttgcggctcacaaccagctgagaagtttccattacggcgacactgagcagtggcctcagcggccctgaaggccccggctgacttgctgctctcgggacaaccccgacccatggggagggccgccaacccacgccctggggggccccaggagaacctgggcctcctcagtctcccagcaccttaatagtttggccacaggcctaacccaatggccctggggctgcagagccacctgcacgcgt

SEQ ID NO: 4604 - protein, 54 aa, Homo sapiens [sequence omitted]

SEQ ID NO: 4605 - DNA, 318 bp, Homo sapiens
  misc_feature (1)..(1): Wherein n may be a, c, g or t
ncccagtgatgcctcattcccagtgattccatttctctagtggccaaagaccagaaaacaattcggcgtagcattcctaagcaggattccaccagaactcctgatggagctgaaaaaacattgatccattatagtgcctgtaagttgcctaggagtggattcaaaacatctgagaaggatagggagtaggaaagagtacatgagaagagttgacactgtgtaaaattaagagaacaatccatgtgggttggggtgagggaaaagggattccttgttctgctaagttgagctgggtcttaaagaacatgatcatcatga

SEQ ID NO: 4606 - protein, 54 aa, Homo sapiens
MYSFLLPILLRCFESTPRQLTGTIMDQCFFSSIRSSGGILLRNATPNCFLVFGH

SEQ ID NO: 4607 - DNA, 319 bp, Homo sapiens
  misc_feature (1)..(1): Wherein n may be a, c, g or t
  misc_feature (2)..(2): Wherein n may be a, c, g or t
nncagcaacctggatgaaaccaagagcctgctgcgcgatgccatgggtatcgcccccgtgagtttttgcagcgccatgcttaccgcccgcagcttcgccgcacggcacggctatgcgatcaacgccaaccatgagttcgtcgccctgggcgtgagtaacctggccgccggcatctcccagggttttgccatcagcggtgccgattcgcgcacggcggtcaatgacatggtcggcggcaagagccagctggtcggcatcatcgcggcactggtcatcgccctgattttgttgttcttcaccgcaccaatggcgtggatcc

SEQ ID NO: 4608 - protein, 106 aa, Homo sapiens
  misc_feature (1)..(1): Wherein Xaa may be any naturally occuring amino acid
XSNLDETKSLLRDAMGIAPVSFCSAMLTARSFAARHGYAINANHEFVALGVSNLAAGISQGFAISGADSRTAVNDMVGGKSQLVGIIAALVIALILLFFTAPMAWI

SEQ ID NO: 4609 - DNA, 342 bp, Homo sapiens
  misc_feature (274)..(274): Wherein n may be a, c, g or t
  misc_feature (275)..(275): Wherein n may be a, c, g or t
  misc_feature (310)..(310): Wherein n may be a, c, g or t
agatctgtattctgctttgggattagatgttttgttcttttagttcatggatggactccatggaaaccaaatgcactactgaggcttatgaaaacatggcaatagcacaggcaacagtgagtacaaaggtgatcagaacaacacctgcctttcagcaatgtgccctcagtctaaaacttactatcagacatggcgtggtctcatttgttatgttctgccggatgttgtgtttcaccagaggtgattaagacagttacaaatttccatagctctnnattctgtcctgctactttctggggcagcagcatcnaattatcccccttgtgtttttctgcctctaga

SEQ ID NO: 4610 - protein, 73 aa, Homo sapiens
MFCSFSSWMDSMETKCTTEAYENMAIAQATVSTKVIRTTPAFQQCALSLKLTIRHGVVSFVMFCRMLCFTRGD

SEQ ID NO: 4611 - DNA, 246 bp, Homo sapiens
gaattcataatgagttctgaactctataatagtcaaattgaatcgaaaataacgtacaaaaggtctcgtgatatgtgtgaaatttccaggctggtcgaagtaccgcaaggagttaatccaccatctcccttggatgcattcagatctactcaacagtgggacgttatgcattgttcgttgcgtgatattattataggctccgaaaggctgaaagaagattcatcgtcaatttatgccaaaattcta

SEQ ID NO: 4612 - protein, 82 aa, Homo sapiens
EFIMSSELYNSQIESKITYKRSRDMCEISRLVEVPQGVNPPSPLDAFRSTQQWDVMHCSLRDIIIGSERLKEDSSSIYAKIL

SEQ ID NO: 4613 - DNA, 277 bp, Homo sapiens
cccaccctcccctgcgcagcccggcaggggcccatgccccctcctctgcagaaacacacgcacatttatgcttctcacccctttccatgtccctcatttggtgtcgttcccggcccaggacgaggaaaggagaggtcagaggtggtcactctggtcccggggaggtctctacctgctctgcgagtccccggtggcccgttaacccttctgcgcccaggctcctctccaggcaacctcgctccgggcggccactggggcccctgagccgcgctccgga

SEQ ID NO: 4614 - protein, 76 aa, Homo sapiens
MPPPLQKHTHIYASHPFPCPSFGVVPGPGRGKERSEVVTLVPGRSLPALRVPGGPLTLLRPGSSPGNLAPGGHWGP

SEQ ID NO: 4615 - DNA, 318 bp, Homo sapiens
acgcgttcgccgatgccgatgcggcggacggctcgccgtttcgtccgttgtataacgaccgcgtgctctacagtggccagccattggcactggtggtcgccgacaaccttgaattggcacggcattcccggttgcttggggcaaatcaagtacgcaagcgaagcctttgaaaccgacttgctggccatgcaggaacaggcgtacccatcaccgcaaacgccgcccgggccccgcggtaacttccaggctgaatgggccgcagctgccgtcaacctcgatgtgcactacagcacgcccatcgaacaccacaacccgatg

SEQ ID NO: 4616 - protein, 102 aa, Homo sapiens
MPMRRTARRFVRCITTACSTVASHWHWWSPTTLNWHGIPGCLGQIKYASEAFETDLLAMQEQAYPSPQTPPGPRGNFQAEWAAAAVNLDVHYSTPIEHHNPM

SEQ ID NO: 4617 - DNA, 360 bp, Homo sapiens
  misc_feature (1)..(1): Wherein n may be a, c, g or t
  misc_feature (2)..(2): Wherein n may be a, c, g or t
nntgatcaatggcataattgaggacgcagtatggccttattacctattttaagttttcctgatccccgtcttcgtaccattgcagaacccgtcgaagaagttactgatgaaattcgtcagctggctgcagatatgtttgaaaccatgtataagcgccagggcattggacttgccgcgacacaagttgatcgtcatattcagttgattgtcatggacttatctgaaacataaagatccaccctttgggtattccattaacccccaaagttacccccattgactgaagaaacgcagcccctatgaagaaggctgcctatcagttccccaaatatacgacaaagttgagcgcccgtcacgcgt

SEQ ID NO: 4618 - protein, 66 aa, Homo sapiens
MALLPILSFPDPRLRTIAEPVEEVTDEIRQLAADMFETMYKRQGIGLAATQVDRHIQLIVMDLSET

SEQ ID NO: 4619 - DNA, 352 bp, Homo sapiens
gcgttcaaggacgccggggccgacgtggccctggcctcgccagccggtggtcagccgccgttggatccggtcagcgacctgccggattcgcaaaccgaccagacccgtcgcttcgccaccgacccggcggcacagcaggccctggccaccacgctgaagctggactcgggcaacgtcgacgacttcgataccgtcttctacccaggcggccacggcccgctgtgggacctggcagagtcaaaaacctccatcgccctgatcgaagcctttcagcgtgccggcaagccgattggctttgggtgccatgccccgggcgccttgcgtcacgtcaaggccgtccacggcgaaccgc

SEQ ID NO: 4620 - protein, 117 aa, Homo sapiens
AFKDAGADVALASPAGGQPPLDPVSDLPDSQTDQTRRFATDPAAQQALATTLKLDSGNVDDFDTVFYPGGHGPLWDLAESKTSIALIEAFQRAGKPIGFGCHAPGALRHVKAVHGEP

SEQ ID NO: 4621 - DNA, 186 bp, Homo sapiens
gtgcactctgactccaagtaccatctgaagaagagaatcagctctctgactttgccaatcgttccatcttctgaggccagcaaagtcctcagtagaacgcccatcttaccatcaacgccggtcactcccccattgctcttaccagccattggcggcaccagcaaaatagatcaatattctcgaatt

SEQ ID NO: 4622 - protein, 62 aa, Homo sapiens
VHSDSKYHLKKRISSLTLPIVPSSEASKVLSRTPILPSTPVTPPLLLPAIGGTSKIDQYSRI

SEQ ID NO: 4623 - DNA, 345 bp, Homo sapiens
  misc_feature (289)..(289): Wherein n may be a, c, g or t
gaattcgaagccggtatctctaaggatggtcaaaccagagaacatgctttgttggctttcaccttgggtgttagacaattgattgttgctgtcaacaagatggactccgtcaaatgggacgaatccagattccaagaaattgtcaaggaaacctccaactttatcaagaaggttggttacaacccaaagactgttccattcgccccaatctctggttggaacggtgacaacatgattgaagctaccaccaacgctccatggtacaagggttgggaaaaggaaaccaagnccggtgtcgtcaagggtaagactttgttggaagccattgacgccattgaacaacca

SEQ ID NO: 4624 - protein, 115 aa, Homo sapiens
  misc_feature (97)..(97): Wherein Xaa may be any naturally occuring amino acid
EFEAGISKDGQTREHALLAFTLGVRQLIVAVNKMDSVKWDESRFQEIVKETSNFIKKVGYNPKTVPFAPISGWNGDNMIEATTNAPWYKGWEKETKXGVVKGKTLLEAIDAIEQP

SEQ ID NO: 4625 - DNA, 412 bp, Homo sapiens
aagtctgcagagcaggctgtaaaggcgatcaagggcaaagagtccggtgaaccagttccggagtatgactacctgccatacttctactcccgatcattcgacctggcgtggcaattctacggcgacaacgtgggcgaaaccatcctgtttggcgacagtgaccccacctccagcaagcccaagttcggctcgtactggatcaaggacggcaaggtcttgggcgccttcctggagggcgggtcaccggacgagaacaaggccattgccaaggtggcgaaaacccagccgccggtcgctaacctcgaggagctcaagaaggatggcctccagttcgccagcaagatctgagacgctcccgttccatgtaaaattccgtgtcatcgtgaaggttcttctggagctctggtcatga

SEQ ID NO: 4626 - protein, 115 aa, Homo sapiens
KSAEQAVKAIKGKESGEPVPEYDYLPYFYSRSFDLAWQFYGDNVGETILFGDSDPTSSKPKFGSYWIKDGKVLGAFLEGGSPDENKAIAKVAKTQPPVANLEELKKDGLQFASKI

SEQ ID NO: 4627 - DNA, 282 bp, Homo sapiens
tccggaaaattgcggggcaagcaactgatgaacgctcgccgcgtcatcgagcgcagaaaaacactcgggcgaagcgcagcccgcaatatgacgcacaagtccgccgcggtcacgacatcgagtctcgtgcggacgtacgaacgcgaggtggaacggcagaaggccatggtgagaaaagccgagttcacgcaacagcggttgctatttgtggtcggcgccttgcgacaactgtttgccgataagaacttcgtcaatctgctgcgtgccgagggcttggctagc

SEQ ID NO: 4628 - protein, 85 aa, Homo sapiens
MNARRVIERRKTLGRSAARNMTHKSAAVTTSSLVRTYEREVERQKAMVRKAEFTQQRLLFVVGALRQLFADKNFVNLLRAEGLAS

SEQ ID NO: 4629 - DNA, 416 bp, Homo sapiens
  misc_feature (1)..(1): Wherein n may be a, c, g or t
ncgcaagtgaacaccacttcggtagaagaaaaattcgtagccatacttgagagcttttacgttcccgaggacgtagatcaggtgggtgtgttcgaaaaaaatagcgtgctgtttggtcagcacgacaaagcagacaacatctcgcccgaggaatatcatctttaccatttgaccaccccacaggatccgagattacagtatttgtatagtgtgtttcaatctgttcatattttcgatccggctttacctggcatggtaacggggccatttccctctctaatgaggcgttacaagtacatgtatgtggaaagaaaagcgggatgtatatgtattctggtcaacacgctgtcgctacgtaatacaagagaaactatcaacgagctggtcaagcttatcaaaactcgtgtgagccacca

SEQ ID NO: 4630 - protein, 138 aa, Homo sapiens
  misc_feature (1)..(1): Wherein Xaa may be any naturally occuring amino acid
XQVNTTSVEEKFVAILESFYVPEDVDQVGVFEKNSVLFGQHDKADNISPEEYHLYHLTTPQDPRLQYLYSVFQSVHIFDPALPGMVTGPFPSLMRRYKYMYVERKAGCICILVNTLSLRNTRETINELVKLIKTRVSH

SEQ ID NO: 4631 - DNA, 171 bp, Homo sapiens
  misc_feature (1)..(1): Wherein n may be a, c, g or t
  misc_feature (2)..(2): Wherein n may be a, c, g or t
nngcgcgccccggatggcacgctgagcaaaatcgacgcgccgaactcggccgacaagtcggtgcacaaagactggttgctcctgcaattgcgtgatgattgggcagtgggtgatggctatgtggctggctcgttgctggcgatcaactttgcacgcttcactggcggcgcg

SEQ ID NO: 4632 - protein, 57 aa, Homo sapiens
  misc_feature (1)..(1): Wherein Xaa may be any naturally occuring amino acid
XRAPDGTLSKIDAPNSADKSVHKDWLLLQLRDDWAVGDGYVAGSLLAINFARFTGGA

SEQ ID NO: 4633 - DNA, 297 bp, Homo sapiens
  misc_feature (1)..(1): Wherein n may be a, c, g or t
  misc_feature (2)..(2): Wherein n may be a, c, g or t
nncggtatcaccggcacctcgatcatccagctcagtggcggcaccccgcagagcccggagctcaagggcaaggacggtaacctgccggaaatcatcgcatcgccatcgcctatcgcgcgtctgctcaataacagcaacgacctgatgaccagcgtcaacctgctgctgcacaacgccaaccacctgttctcgcgggaaaacgtcgaacgcctgagcaacaccctggacaacctgcaacaaaccaccggcgccattgccgaacaacgcggcgacatcaaggtggtgatgcagcaattg

SEQ ID NO: 4634 - protein, 99 aa, Homo sapiens
  misc_feature (1)..(1): Wherein Xaa may be any naturally occuring amino acid
XGITGTSIIQLSGGTPQSPELKGKDGNLPEIIASPSPIARLLNNSNDLMTSVNLLLHNANHLFSRENVERLSNTLDNLQQTTGAIAEQRGDIKVVMQQL

SEQ ID NO: 4635 - DNA, 313 bp, Homo sapiens
  misc_feature (245)..(245): Wherein n may be a, c, g or t
  misc_feature (261)..(261): Wherein n may be a, c, g or t
  misc_feature (284)..(284): Wherein n may be a, c, g or t
  misc_feature (292)..(292): Wherein n may be a, c, g or t
  misc_feature (293)..(293): Wherein n may be a, c, g or t
ggatcctgtgtcagggcagcaggtggctggcagtgcagtcaggtggcttctcagcagcgggaaggggagggttagaggccaggtgggcagcacagccagcatgtagtgtatctggtggtgcaggccaccgcacaggtccctgcggcagccagctcctcacagttgctcagaccccctgcgcaggataccctcttggccctcgtcccacaccagcatcgctgtccagagggcaggaggcatctctngctccagaacagctcnctctgtgctgggcactgcattgngttcctgnngcttgctgctcccaccacag

SEQ ID NO: 4636 - protein, 69 aa, Homo sapiens
  misc_feature (7)..(7): Wherein Xaa may be any naturally occuring amino acid
  misc_feature (13)..(13): Wherein Xaa may be any naturally occuring amino acid
MQCPAQXELFWSXRCLLPSGQRCWCGTRAKRVSCAGGLSNCEELAAAGTCAVACTTRYTTCWLCCPPGL

SEQ ID NO: 4637 - DNA, 237 bp, Homo sapiens
agtacttatgcagcacccccccagccttgaggctctcataggcagggggtctcttgagcccagctgcaggagcaagggaccgatgggggtgcttttgccagcatctcctgtgcccacgtcatcgccagcgcagggacaccagaggaggaagaagaggaggtgggcgccgcgacatttggggcaggctgggccctgcagaggaaggtcctctatgggaggagaaaagcaaaggaattt

SEQ ID NO: 4638 - protein, 76 aa, Homo sapiens [sequence omitted]

SEQ ID NO: 4639 - DNA, 288 bp, Homo sapiens
gatctggccataagggacacctatgtgaatgcatctcagagcctgtatggaagcagccccagagtcctgggcccagacagtgctgctaacttaaaacttatcaccccctggggggctgagaacaccaaccataagatccgcaagctgctggacagcctgccttctgacacctgcctcgtccttctcaatgctgtctacttgagtgccaagtggaagataacatttgaaccaaaaaagatgatggggcctttcttctacaaaaactctatgcttaaagggcccatgatg

SEQ ID NO: 4640 - protein, 96 aa, Homo sapiens
DLAIRDTYVNASQSLYGSSPRVLGPDSAANLKLITPWGAENTNHKIRKLLDSLPSDTCLVLLNAVYLSAKWKITFEPKKMMGPFFYKNSMLKGPMM

SEQ ID NO: 4641 - DNA, 300 bp, Homo sapiens
acgcgtatttagttctatgtgttcttatcacatgtgcagactccagtgatcacaaccagtccatgctgagctgcctcgtcacaaaaggccctggggctgacttttgttcttaacctctcccccgggaccttttctccaccgggtgaggaaaatcgagtccctgaggactttggcaaaggtcaggggcagccacgacacagctctgtggccaacccaagtggacaccaaggccctgggggtgacaaggggacatggatgagaacccccccgccttcggagccattctcgagttcccagaga

SEQ ID NO: 4642 - protein, 57 aa, Homo sapiens [sequence omitted]

SEQ ID NO: 4643 - DNA, 289 bp, Homo sapiens
accggtcgccagcatcgtgggccggccttgcaactgaccctctacgcggtcgcggccggcttgatcgtgatgctcggcctgtcggtgccccaggcgaaaaaagcccgctatatcctgccgatggtaccgatggcggcgatcattgccgcctatccgttccaggtcgggaaaggccgtctgtttgcctggctgcgtgggctgatccagggtctctggttgatcctgccgggcctgctgattgtcgggatgttcatgttgcaccggcgcttcccttgagaactggcaaccc

SEQ ID NO: 4644 - protein, 68 aa, Homo sapiens
MLGLSVPQAKKARYILPMVPMAAIIAAYPFQVGKGRLFAWLRGLIQGLWLILPGLLIVGMFMLHRRFP

SEQ ID NO: 4645 - DNA, 174 bp, Homo sapiens
aattccggaatggttccatcaagttcaacttcatctttgaatagtgatcaggcaactttgacagggtcgaggctacatatgagtagttcattgtcccagcaaaagaaccctgcagccattcataacgtcaatggggtgtttacattactggcggaatgctattcccctacgtgc

SEQ ID NO: 4646 - protein, 58 aa, Homo sapiens
NSGMVPSSSTSSLNSDQATLTGSRLHMSSSLSQQKNPAAIHNVNGVFTLLAECYSPTC

SEQ ID NO: 4647 - DNA, 363 bp, Homo sapiens
  misc_feature (1)..(1): Wherein n may be a, c, g or t
ngccgtgccccgccgccgccttcttctgccgcctcctccacgccagcacttttgcatgcagtactcccttcagtcgtcacagccacctgcaaggaggggaacactgcccttcatctggctgctggtcggggccatatggctgtgctgcagcgacttgtggacatcgggctggacctggaggagcagaatgcggaaggtctgactgccctgcattcggctgctggaggatcccaccctgactgtgtgcagctcctcctcagggctgggagcaccgtgaatgccctcacccaggtagccaggccctcccaagactgcggtcggctcttggctgctgagccatagccatgtcggcagtaacggccg

SEQ ID NO: 4648 - protein, 113 aa, Homo sapiens
  misc_feature (1)..(1): Wherein Xaa may be any naturally occuring amino acid
XRAPPPPSSAASSTPALLHAVLPSVVTATCKEGNTALHLAAGRGHMAVLQRLVDIGLDLEEQNAEGLTALHSAAGGSHPDCVQLLLRAGSTVNALTQVARPSQDCGRLLAAEP

SEQ ID NO: 4649 - DNA, 285 bp, Homo sapiens
  misc_feature (1)..(1): Wherein n may be a, c, g or t
  misc_feature (2)..(2): Wherein n may be a, c, g or t
nncctaggtggtggccctccgaccgggataggtaacctgtggcgacacggaggattctttccaaccggcatcagcggaatgctgtgcggttttgtcgtggtgatgttcagctttggaggggtcgagctcatcgggattacggcaggggaggctgacgatccgcgtcggtctattccgcgagcgatcaatcaagtcgtgtatcggatcctcatcttctacgtcggtgtaatttcggtcatgctgtgtctttttccatgggaccagatcggcaaggcaggcagcccc

SEQ ID NO: 4650 - protein, 95 aa, Homo sapiens
  misc_feature (1)..(1): Wherein Xaa may be any naturally occuring amino acid
XLGGGPPTGIGNLWRHGGFFPTGISGMLCGFVVVMFSFGGVELIGITAGEADDPRRSIPRAINQVVYRILIFYVGVISVMLCLFPWDQIGKAGSP

SEQ ID NO: 4651 - DNA, 362 bp, Homo sapiens
accggtctgtgtggggccaggcattccctttcctaaccagtcatttttttgatgcggagaaatccagaactaacactagatcttggggtgtggtcaagtcctcaaaaagaaaagcatacataagactcagaggagataattcacttgaaaggaaacaggaaaactgaaattggatgctgtggaagaaacccacaaacatccaggagacaaggaggaaccagggaggcatcttgcatggggcttgacctagagggaaggggaggaagagagatgggagaggctgcaccaagtttaagtgattatataagaaaagtaaaaggccagtgaaaggcggggtaagacaggggagaattaacagagcc

SEQ ID NO: 4652 - protein, 62 aa, Homo sapiens
MPPWFLLVSWMFVGFFHSIQFQFSCFLSSELSPLSLMYAFLFEDLTTPQDLVLVLDFSASKK

SEQ ID NO: 4653 - DNA, 288 bp, Homo sapiens
aagcttgtctacgacctcctcgagcagacctactccggatgggagaataaccagggcgcctacggtgactttctgttcgacgtcgccgagcgaacgatcacgctcaacttcaatgagcggatcgaaacctcccaatacacccagcatgtcttctgaagggaagaagcaatggcggcatccctatcatcattcgctctcctcgctgaagaagtggggcggggcagtcgatgactatctgccaatccataactggttcgatgccggcaagcagatcacggcggattttcg

SEQ ID NO: 4654 - protein, 58 aa, Homo sapiens
MSGSKPPNTPSMSSEGKKQWRHPYHHSLSSLKKWGGAVDDYLPIHNWFDAGKQITADF

SEQ ID NO: 4655 - DNA, 348 bp, Homo sapiens
  misc_feature (1)..(1): Wherein n may be a, c, g or t
  misc_feature (89)..(89): Wherein n may be a, c, g or t
  misc_feature (90)..(90): Wherein n may be a, c, g or t
  misc_feature (173)..(173): Wherein n may be a, c, g or t
  misc_feature (199)..(199): Wherein n may be a, c, g or t
  misc_feature (217)..(217): Wherein n may be a, c, g or t
  misc_feature (218)..(218): Wherein n may be a, c, g or t
  misc_feature (319)..(319): Wherein n may be a, c, g or t
natgctattataaatggtgttttttacaaaaataatcaccttctaactgtagctgcaatacagaaatacagctgattttatatttattnnatatcagggaacaataaaaactatgtgggaaataatgaacagaaaatagaaaaaatcaacaaaactaaagttgggttcttganagaggtcaacaaaactgacacatttnggctagacagaccaaaannaaagagaaagaaaacccaaactactaaaatcaggaataaaagagggaacattattaccaaccttatagaaataaaaaggagtataaaggaatactatgaanaagtgtatgccaacaaattagataaccta

SEQ ID NO: 4656 - protein, 91 aa, Homo sapiens
  misc_feature (5)..(5): Wherein Xaa may be any naturally occuring amino acid
  misc_feature (33)..(33): Wherein Xaa may be any naturally occuring amino acid
  misc_feature (42)..(42): Wherein Xaa may be any naturally occuring amino acid
  misc_feature (48)..(48): Wherein Xaa may be any naturally occuring amino acid
  misc_feature (82)..(82): Wherein Xaa may be any naturally occuring amino acid
FYIYXISGNNKNYVGNNEQKIEKINKTKVGFLXEVNKTDTFXLDRPKXKRKKTQTTKIRNKRGNIITNLIEIKRSIKEYYEXVYANKLDNL

SEQ ID NO: 4657 - DNA, 427 bp, Homo sapiens
caattgaaaatgagtgaaggcacacatatggaatgttgaggaggcagagtaatgtggaaagggtttttctgaggaatgggaaagtcatggactcaggacaagtcatggggttgccagacatggctaagggcttagttgaaatgatcataagctggagccagagagcatggttatgtgtttttctgtaccacactgggccttttggatacaacgcagagtaggaagagattggattttaccagaattggggttttgctaggagagtcccacagacagcagaaggggagagtatttgaggataattgattttgattggtgttacattgaaccatatatcaatttgaggaagacttgacatatttatccagttttccagtccatgaagatggtatatcatctcataaggaagtaaccataatcccgtacg

SEQ ID NO: 4658 - protein, 62 aa, Homo sapiens [sequence omitted]

SEQ ID NO: 4659 - DNA, 279 bp, Homo sapiens
agatcttctaaggattactgtgcataactcatgtgtggcagggccactgcagtctcagagcctcattccgcacgggaagatttaccctccctgggcggcaggcacatctttctctctcattcagtgtaaagaggctcagggtgatgatggaggcacacactggtagaacagaatgacaccccatccatttccacagttacattattagacaagagaaaatgaaaaaatgccacaatgtttggagctatttaggttgttttgggttcttttctcccatgg

SEQ ID NO: 4660 - protein, 51 aa, Homo sapiens
MGCHSVLPVCASIITLSLFTLNERERCACRPGRVNLPVRNEALRLQWPCHT

SEQ ID NO: 4661 - DNA, 250 bp, Homo sapiens
  misc_feature (1)..(1): Wherein n may be a, c, g or t
nggatccctacggagcgcttgaccctggatgaatcactgaaagcgcacacgatgtctgctgcctacgcctgcttcctggaccacgccgtgggcagcctttctgaagggaaatacgccgattttgtggtggtaccttctacatcggggacgaattctccagcgatttgccggggcatgtcctggcgacgtacgtgagcggcaggcaagctgtcggagagaagggccctttttggggggggggggggggcag

SEQ ID NO: 4662 - protein, 64 aa, Homo sapiens
  misc_feature (1)..(1): Wherein Xaa may be any naturally occuring amino acid
XIPTERLTLDESLKAHTMSAAYACFLDHAVGSLSEGKYADFVVVPSTSGTNSPAICRGMSWRRT

SEQ ID NO: 4663 - DNA, 273 bp, Homo sapiens
ccatggtgggcactgagtccccgaatggacatcagttcaagttgacaaccgaggacatgacacgcccctcagtggttgctcacctgggtctcctccgagggaactgctatgagctagtatccactgtggatgctgtaccagtgcaaccggccatgctttgtaaccgctcctccttcccttaccagaaaatggcggccatagtgattgatactggcacaggatttaccaaatgtggactgggcttcaagagaaccatgtcctcagtgtggtacc

SEQ ID NO: 4664 - protein, 90 aa, Homo sapiens
MVGTESPNGHQFKLTTEDMTRPSVVAHLGLLRGNCYELVSTVDAVPVQPAMLCNRSSFPYQKMAAIVIDTGTGFTKCGLGFKRTMSSVWY

SEQ ID NO: 4665 - DNA, 339 bp, Homo sapiens; identical to SEQ ID NO: 3083

SEQ ID NO: 4666 - protein, 113 aa, Homo sapiens; identical to SEQ ID NO: 3084

SEQ ID NO: 4667 - DNA, 629 bp, Homo sapiens
  misc_feature (1)..(1): Wherein n may be a, c, g or t
naccggtgttcgtcccaactccggtgtctacgcccgcacgaaccagattggtgctccggctctgttgcctgacggcacggtggctcaggactcgatctcgggaaccttggcgactcgcggtgccattatcgacgctggtgagttgaaggctccgacgcatcgggcgtttgcgtcaatcagtgccgcccgccacgaggtccaaggagaactcgaatgaatccgaatgactacctggtgctctcggcgatcttgttcgctatcggcatcgtgggcttcctgacgaggcgtaatgccctggtggcctttatgtcggtggagttgatgctcaacgccgcgaacctggcgctggtgactttcgctcacgtacacggctctctcgacggacaggtcggggttttcttcgtgatgatcgtggcagccgctgaggtggttgtcggtttggcgatcatcgtcactattttccgttcccgtcgcaccacttcggtggacgacaccaacctgctgaagttctgagggaggtaccgtgactgtcttggaaaccggcttgttcaacgtggcctggctcatgattgcggtgccactggtggttgccgcgctgctattggtgctgggacgccgcagcgacgcgt

SEQ ID NO: 4668 - protein, 99 aa, Homo sapiens
MNPNDYLVLSAILFAIGIVGFLTRRNALVAFMSVELMLNAANLALVTFAHVHGSLDGQVGVFFVMIVAAAEVVVGLAIIVTIFRSRRTTSVDDTNLLKF

SEQ ID NO: 4669 - DNA, 294 bp, Homo sapiens
  misc_feature (1)..(1): Wherein n may be a, c, g or t
  misc_feature (2)..(2): Wherein n may be a, c, g or t
nngggcccgcaataactgtaataggcggtttattattgtatcaggaaagtcgaaagaagtgacttgaagatcatgaaaacggcctacttggcgtcattggtgctcatcgtatcgacagcatatgttattaggttgatagcgattctgccttttttccacactcaagcaggtacagaaaaggatacgaaagatggagttaacctactgaaaatacgaaaatcgtcaaagaaaccgctcaagatttttgtattcttaggatcgggaggtcatactggtgaaatgatccgtcttcta

SEQ ID NO: 4670 - protein, 74 aa, Homo sapiens
MKTAYLASLVLIVSTAYVIRLIAILPFFHTQAGTEKDTKDGVNLLKIRKSSKKPLKIFVFLGSGGHTGEMIRLL

SEQ ID NO: 4671 - DNA, 366 bp, Homo sapiens
  misc_feature (366)..(366): Wherein n may be a, c, g or t
gaattcacccccgtgcgcttcaactactacgaccagctcaacggctaccgctacctcaaatcactgggcattggccaccacttctaccagggcgcctacaccgactcgatcggcgaagtgctcaacctcgaccgcaaaaccatcatccacattccgtcggtcaattcctcggactccacgaaagacaaatacgaagaagtcgggcgcatcatggacgtcatcggcacccccgtaagcaccgatgagcacggcattttccaagtacgccgccacgataacggcgagctggtgcgcgtagccgatttggtgacggacaccgacgtgaagcagcgcgcccgggtgctgacgtatctttccgacgtcgcn

SEQ ID NO: 4672 - protein, 122 aa, Homo sapiens
EFTPVRFNYYDQLNGYRYLKSLGIGHHFYQGAYTDSIGEVLNLDRKTIIHIPSVNSSDSTKDKYEEVGRIMDVIGTPVSTDEHGIFQVRRHDNGELVRVADLVTDTDVKQRARVLTYLSDVA

SEQ ID NO: 4673 - DNA, 199 bp, Homo sapiens
  misc_feature (1)..(1): Wherein n may be a, c, g or t
nggaaaggtgaagttccaacagcgatttgtgtttccagtacagtttggtggcccaatgatagagcactggtggaattccaacctccctttccaaatttatgtaaagaaaactccccaaaaaaacgccagaagtcattggatctgtatccctttctttgcgagctgtcattcaatcagagctgctttctttcagtgatca

SEQ ID NO: 4674 - protein, 56 aa, Homo sapiens [sequence omitted]

SEQ ID NO: 4675 - DNA, 290 bp, Homo sapiens
tgatcatttcctttcttttccattctccacgggtaaataaaagatccacgctcacaaatactttaaagtatttgagtagatgttgtcatgtgtgtctccagttggctgttgtctttttgaacaaaatttcctggaaggtgttggtcctgtgtttttgtcatacatcgataatagattaagaagaagtatcttattttctggactggctctaactttattatccgcatgtggtctagttatttggacacagtttcacaatgctttggagttgccaagaaaaagggataagt

SEQ ID NO: 4676 - protein, 70 aa, Homo sapiens
MLSCVSPVGCCLFEQNFLEGVGPVFLSYIDNRLRRSILFSGLALTLLSACGLVIWTQFHNALELPRKRDK

SEQ ID NO: 4677 - DNA, 412 bp, Homo sapiens
  misc_feature (1)..(1): Wherein n may be a, c, g or t
  misc_feature (2)..(2): Wherein n may be a, c, g or t
nnacgcgtgaccgaccaactgcgagccaccctgctcgccatggctgctatggggttgcacgacggcatcgatattccgtctggggcgattattgaaagctgccgcaccttatcagccgttctcgatgaaacccacggtggtcgcacgatcgagcttcgggtaccacctgcgtgcgcggttcaattggcggccattgagtcgggccccaaccaccaccggggcactccgcccaatgtggccgagaccgaccctgtcaccttcctgcagttggcaactggcttctcacactggccagaaatgcgctcagcaggacgggttcaggcgtctggatcccacgtcgacgacgttgctggcgtgttcccagtcgttgatatggccggggttttccgcgacatttttgccgacgactaga

SEQ ID NO: 4678 - protein, 136 aa, Homo sapiens
  misc_feature (1)..(1): Wherein Xaa may be any naturally occuring amino acid
XRVTDQLRATLLAMAAMGLHDGIDIPSGAIIESCRTLSAVLDETHGGRTIELRVPPACAVQLAAIESGPNHHRGTPPNVAETDPVTFLQLATGFSHWPEMRSAGRVQASGSHVDDVAGVFPVVDMAGVFRDIFADD

SEQ ID NO: 4679 - DNA, 241 bp, Homo sapiens
  misc_feature (234)..(234): Wherein n may be a, c, g or t
ccggccatggccccaggcgtcacgggcctgcgcaacctgggcaacacctgctacatgaactccatcctccaggtgctcagccacctccagaagttccgagaatgtttcctcaaccttgacccttccaaaacggaacatctgtttcccaaagccaccaacgggaagactcagctttctggcaagccaaccaacagctcggccacggagctgtccttgagaaatgacagggccgangcatgcg

SEQ ID NO: 4680 - protein, 80 aa, Homo sapiens
  misc_feature (78)..(78): Wherein Xaa may be any naturally occuring amino acid
PAMAPGVTGLRNLGNTCYMNSILQVLSHLQKFRECFLNLDPSKTEHLFPKATNGKTQLSGKPTNSSATELSLRNDRAXAC

SEQ ID NO: 4681 - DNA, 276 bp, Homo sapiens
gccggcgctgggatgatggcatctccaggcgggtcgtgcgggtcgagttgcacggagagaagcgcatcttccgtgacagcgatcccgaggtgatcgagacgacgctccggggcgccaagctgctcggctcggaggctcgcgggaagcagatcgcttttcgcttctccaaggcgcgtggctcggcgttcatctggggatgtccggcaaattgcgctgggaaccgcagacttgtgccgcaaaacacgaccatctgcgctttccaaaacagcggacgct

SEQ ID NO: 4682 - protein, 83 aa, Homo sapiens
MVVFCGTSLRFPAQFAGHPQMNAEPRALEKRKAICFPRASEPSSLAPRSVVSITSGSLSRKMRFSPCNSTRTTRLEMPSSQRR

SEQ ID NO: 4683 - DNA, 315 bp, Homo sapiens
ccggattgacatcccgatgctcgcgaggatcagccccgcgaggttggtcgctagaaagagggcaatacgggtgaacatggcaaattccggctcgaaaggggtcgatatcgtccaatttccggtgcggtcagcttgaattcaagcgccaacctgaccgacgattcagcctgcatgacctccaaccttccctgcggccgtttagcgccttcgcccaccggcctgctgcatcccggccccctgctcgccgccttcggcagctggctgctcgcgcgccaccatggcggcctgtggcggttgcgcatcgaggatgtcgac

SEQ ID NO: 4684 - protein, 87 aa, Homo sapiens
KEGNTGEHGKFRLERGRYRPISGAVSLNSSANLTDDSACMTSNLPCGRLAPSPTGLLHPGPLLAAFGSWLLARHHGGLWRLRIEDVD

SEQ ID NO: 4685 - DNA, 315 bp, Homo sapiens
  misc_feature (1)..(1): Wherein n may be a, c, g or t
  misc_feature (2)..(2): Wherein n may be a, c, g or t
nnacgcgtcgcctggacggcactgaaagccctggcggcccagttgcatcaggcggacgtattggtgttctcggtaccgctgtggaatttcgcgatcccttacaagctcaaacactttatcgacgtggtgtcgcagaaggatgtcttatttgagttcagcccggaacacggtttgcgaggcctgctgcacaacaagacggcggtaaatgtgtacgcgcgagggatggatttttccgcacccggcgcgcaggcgatggactttcagaaaccctatctggacgcctggctcggatttatcggtgtgacggatgtgcac

SEQ ID NO: 4686 - protein, 105 aa, Homo sapiens
  misc_feature (1)..(1): Wherein Xaa may be any naturally occuring amino acid
XRVAWTALKALAAQLHQADVLVFSVPLWNFAIPYKLKHFIDVVSQKDVLFEFSPEHGLRGLLHNKTAVNVYARGMDFSAPGAQAMDFQKPYLDAWLGFIGVTDVH

SEQ ID NO: 4687 - DNA, 225 bp, Homo sapiens
catgaaccaatagagggcaaatctacaagattgtaccgctattcgtataatatctttaggcctttttattattcaaaggaagatgcgatttgcattatgttttgtggcccggctaaaactgcagcactgggtgtatcactaattacttcacaatacggcgataaaaaagaacacctgggtaagttgttggttcccttggttttatatcaagttgagcaagtcatg

SEQ ID NO: 4688 - protein, 75 aa, Homo sapiens
HEPIEGKSTRLYRYSYNIFRPFYYSKEDAICIMFCGPAKTAALGVSLITSQYGDKKEHLGKLLVPLVLYQVEQVM

SEQ ID NO: 4689 - DNA, 264 bp, Homo sapiens
cctttcgcctgcgaaattatttcgtgggaagcgctgttgcgtacaccggacgggcaatcccccggcgcctattttgccgggctgaccggggacgatatttatctcgctgacctgcacagtaaacgggtggcgttgtcgctggcggggaaattaggtttacgtaataaggcgttaagcattaatttactgccgatgaccgtggtcaaagcgccgaatgcggtggctttcctgctcgacgaaattagtcgcaatgaccccattccg

SEQ ID NO: 4690 - protein, 88 aa, Homo sapiens
PFACEIISWEALLRTPDGQSPGAYFAGLTGDDIYLADLHSKRVALSLAGKLGLRNKALSINLLPMTVVKAPNAVAFLLDEISRNDPIP

SEQ ID NO: 4691 - DNA, 444 bp, Homo sapiens
  misc_feature (1)..(1): Wherein n may be a, c, g or t
  misc_feature (2)..(2): Wherein n may be a, c, g or t
  misc_feature (220)..(220): Wherein n may be a, c, g or t
  misc_feature (307)..(307): Wherein n may be a, c, g or t
  misc_feature (432)..(432): Wherein n may be a, c, g or t
  misc_feature (434)..(434): Wherein n may be a, c, g or t
nnctggtttcgccaccagcggcgaagggatggacagatggctggactggctggagacccaacgatgtgcataggcgttccgggacaaattagcgccattgatggtaatcaggcaaaagtcgatgtctgcggcatacagcgcgatgtcgacttaacgctggtgggcagcacggatgaagcgggcattttcgtttttgggcagtgggtgctggtgcacgtgncgttcgccatgagcgtgataaacgaagacgaggctcgcgaaacgctggcggcactgcaaaatatgtacgatgtcgagccggatgtgngggcgctgctgtttggtgaggagagataatgcgttttgtggatgaataccgcgcgccggaacaggtcatgcagcttatcgcgcacctgcgtgagcggggcgcactgctcagttatactcgcgtanangggcacgcgt

SEQ ID NO: 4692 - protein, 90 aa, Homo sapiens
  misc_feature (53)..(53): Wherein Xaa may be any naturally occuring amino acid
  misc_feature (82)..(82): Wherein Xaa may be any naturally occuring amino acid
MCIGVPGQISAIDGNQAKVDVCGIQRDVDLTLVGSTDEAGIFVFGQWVLVHVXFAMSVINEDEARETLAALQNMYDVEPDVXALLFGEER

SEQ ID NO: 4693 - DNA, 198 bp, Homo sapiens
atcccgatggaacccaaagaccgctacaaaaccgcctttgtcaccccatccggtaagtatgaatataccgtcatgccatttggcttagtaaatgcacctagtacattcgcaagatacatggctgatacatttagagacctgagattcgtcaatgtttaccttgatgatatattaatctttctcgaatctccagaagaa

SEQ ID NO: 4694 - protein, 66 aa, Homo sapiens
IPMEPKDRYKTAFVTPSGKYEYTVMPFGLVNAPSTFARYMADTFRDLRFVNVYLDDILIFLESPEE

SEQ ID NO: 4695 - DNA, 528 bp, Homo sapiens
  misc_feature (1)..(1): Wherein n may be a, c, g or t
  misc_feature (2)..(2): Wherein n may be a, c, g or t
nncgctagcacactccagcctctattcttgatgaaaattcttaatttgatccagggaacgataggaagacaagagaagaggttgtaaacgtgaattttgtaaaagtccccaatcaaagaaacacttttggttgcccacttaagaaagctatttaatattaaatctttccgtacacatcaatttttcgacatatatacaaacacaagcgctatgtcatattacaacaggtataggaacaaaagaagaagcgataatggtggaggaaacttaagtaacagtaacaataacaatggtggtatgccatctggactatccgcatcagatgcaatttttgatctgggtaaaaataagagggtcccggtaagccaatttagaaacataaatttaattgatatccgtgagtactatctggactcatctacaggcgaaatgaaacctgggaagaaaggtatttcgttgacagaagatctatacgccgaattgcttaagcacagattgaatattgatgaagccttgagaaggtgagga

SEQ ID NO: 4696 - protein, 104 aa, Homo sapiens
MSYYNRYRNKRRSDNGGGNLSNSNNNNGGMPSGLSASDAIFDLGKNKRVPVSQFRNINLIDIREYYLDSSTGEMKPGKKGISLTEDLYAELLKHRLNIDEALRR

SEQ ID NO: 4697 - DNA, 284 bp, Homo sapiens
caattgacgccaaaccaaatgctgagttgtcaggtttggaccaaaacccaggtaaataagaaactgaaaaactggaggacatgtaaacgaatgaggaacatcagggggttcatagatgaccaggtctctcccatggggtatggtaacacataacgacccttcacaaacaatggatatgacacgcagcaaaattacgactctttcttctcttccggttccgcttcaggcacctccttcacctccgcagcctcctcaaatgtctctcctgggacaagctcagggac

SEQ ID NO: 4698 - protein, 56 aa, Homo sapiens
MTRSLPWGMVTHNDPSQTMDMTRSKITTLSSLPVPLQAPPSPPQPPQMSLLGQAQG

SEQ ID NO: 4699 - DNA, 294 bp, Homo sapiens
tcatcgctaataaaattcgagcaaagactgccaattattaacatccatggctttttgggctcacacgtgatgtttcattctctcaataagcttctttcaaggaagcttgacgcggatattttttctgttgatgtaagaaatcatggcatttcaccaaaagcaataccttatgactacactacactgaccaatgatttgatttattttattgaaactcatattggcttggagagacctatttatttactgggattctctatgggtggtaaaattgcattattaaccacattgtac

SEQ ID NO: 4700 - protein, 98 aa, Homo sapiens
SSLIKFEQRLPIINIHGFLGSHVMFHSLNKLLSRKLDADIFSVDVRNHGISPKAIPYDYTTLTNDLIYFIETHIGLERPIYLLGFSMGGKIALLTTLY

SEQ ID NO: 4701 - DNA, 150 bp, Homo sapiens
cctaggactttggttccgatagtttatgcatgtgctctgctcttagcaacaatgccatctattaccggctacttgaggaggtcattggagtggcagacaccaaaggtggttggctttgagctcatctcctctcttgttatggctttgatc

SEQ ID NO: 4702 - protein, 50 aa, Homo sapiens
PRTLVPIVYACALLLATMPSITGYLRRSLEWQTPKVVGFELISSLVMALI

SEQ ID NO: 4703 - DNA, 376 bp, Homo sapiens
acgcgtgagaggacggtcggtgaccaggagagcgatgacgaggttaaccaacctctccgaacgctgtgcagccatcggcaccctccttccagcgtcccagcctacccatctgacgggggcatgcccgccgcgtcaccccaattgttgcctacactgccgctcgtgaccgatttcgccaccactcactccggtcttcgacacgcagctggtcgtttcgccccctccccaacctcggcactgcatctggggaacctccgcaccgcattagcggcctggcttttggcacgctcgacaggtcgtcggttcgtggtacgcatcgaggatttagatcgtgcgcgggtggccgcggccggaaaaattgcctcgactcaactac

SEQ ID NO: 4704 - protein, 125 aa, Homo sapiens
TRERTVGDQESDDEVNQPLRTLCSHRHPPSSVPAYPSDGGMPAASPQLLPTLPLVTDFATTHSGLRHAAGRFAPSPTSALHLGNLRTALAAWLLARSTGRRFVVRIEDLDRARVAAAGKIASTQL

SEQ ID NO: 4705 - DNA, 430 bp, Homo sapiens
cgagactgctgagaactcaaaaagtgtcaagccaaacacagaggtcctgacagcaggggcaatctcactccattgggcaacaggcgcctttctctccacaacaacgcaaatctcaatcactctggacaaatgcagatggtgaaagtgacaagctgagctgttaacagctttccagggtctttgcatgggacagcaacccattttcacttccctttatataggcacccacttcccttttatttcttaattctgtgctttctgctctgcttcttacaagagatgatgaacacaaagtccttatttcaccagggaaggatgtgaactcttgtgtgccacaagacccctttccaggatgcgggctggtggaagaacagctgcgagcagatgtcatctctagaccttggtctgctgtgctgcttaagcagacctg

SEQ ID NO: 4706 - protein, 76 aa, Homo sapiens
MTSARSCSSTSPHPGKGSCGTQEFTSFPGEIRTLCSSSLVRSRAESTELRNKREVGAYIKGSENGLLSHAKTLESC

SEQ ID NO: 4707 - DNA, 236 bp, Homo sapiens
  misc_feature (1)..(1): Wherein n may be a, c, g or t
  misc_feature (236)..(236): Wherein n may be a, c, g or t
ngcccttgggtgcatccgcctctcaccgactcgacgacaacgacgtcgtgcccgccggccgcgaactggtgcagctcgacgaccgcgaccagctcgcctccgtgcatctcgccgaggcacagctcgcccgcgacaccgcccagctcgccgaccggctggccaatgtcgatcgccagccctcgatcatcgaccagcaggacagccagatcgcggccatcaaggcccggacgatcacn

SEQ ID NO: 4708 - protein, 78 aa, Homo sapiens
  misc_feature (1)..(1): Wherein Xaa may be any naturally occuring amino acid
XPWVHPPLTDSTTTTSCPPAANWCSSTTATSSPPCISPRHSSPATPPSSPTGWPMSIASPRSSTSRTARSRPSRPGRS

SEQ ID NO: 4709 - DNA, 387 bp, Homo sapiens
acgcgtgagtcacagactccagacatgctgttcccccctgagcaccgtggtctaggtgctgcccctaagaaggccattgctagcccctgttgtgatggggggaggcagcccctgacttcctatggctcctgtcttctactgtggctccaaacacaatcagcttgtgctcatgttcaaggacaggtgtagctctcattttcatttcatcctcagtctggatgaaaatgaggagagattgaggttttctactcatcaaaacccatttctggtgcacttcttgaagatccatggcacacagtatttagggaggactcctgtctgacctggacaagaagggggcctcccacaggttactacaagcagcatgtccaacattctacacctcca

SEQ ID NO: 4710 - protein, 69 aa, Homo sapiens [sequence omitted]

SEQ ID NO: 4711 - DNA, 253 bp, Homo sapiens
  misc_feature (1)..(1): Wherein n may be a, c, g or t
nacgcgttcctcaaaccacagacagtcgtgtttccagagacggctgccgccgggtccccacgtactcctccaaacctcagaacccgggacctgcacccctccccacatctggagatggcccctgccctggctcgaagctgggtgggctgtggctcacctgtaaccaagaatccttctcactcgcgaggatggggtgggctgttactaagttccaggtggctcgttaggcatccgggagccgggacactcggat

SEQ ID NO: 4712 - protein, 84 aa, Homo sapiens
  misc_feature (1)..(1): Wherein Xaa may be any naturally occuring amino acid
XAFLKPQTVVFPETAAAGSPRTPPNLRTRDLHPSPHLEMAPALARSWVGCGSPVTKNPSHSRGWGGLLLSSRWLVRHPGAGTLG

SEQ ID NO: 4713 - DNA, 369 bp, Homo sapiens
acgcgttgtcttctctccgtaccccttcttgtcgtccctgaaagtgtattcctgagagaagagcgagggcacaacaagcaggccaccacaaggctgtcctcaggtcacctgtgacagacttgctcgatgccacatgctctgagtgcacacctccctccaaccccactacctgtcccatgcaggcactattaggagccctgtcagcaggtaaggacgctgacgctccagcagggtaaatgactcatccaaggccacaggaagcaggagggccaggctcctgtatttcccatggcgcctgcctggtttcccctctgggctcacatgagcatctggaatgcaagagctgtgtcctcacagtcgttcccgctg

SEQ ID NO: 4714 - protein, 59 aa, Homo sapiens [sequence omitted]

SEQ ID NO: 4715 - DNA, 208 bp, Homo sapiens
acgcgtcactgcccagaagatggggcctggctcgactgcgggccactgtgcctgtcggccccctctccagagctgtcacaggcagtcacaaaagcctagggctcaacaaaaggtcaagaggcctaaaaatcgcactgtagatgacaaatctttaaaatatttccaacacatgatggataaaaggctaacttaacctcagccaatccat

SEQ ID NO: 4716 - protein, 57 aa, Homo sapiens
MGPGSTAGHCACRPPLQSCHRQSQKPRAQQKVKRPKNRTVDDKSLKYFQHMMDKRLT

SEQ ID NO: 4717 - DNA, 486 bp, Homo sapiens
atccaattgattgcgggcggtctaatcttgccatttattgcgctcatgccagagacccataaaggtattattttaagaaagcgtgccaagaagagaaatatagccttgaagaagttcagcagggaagctcagaaagaatttttaaaaacccctgtcactattacaatcttaaggcctttaaaaatgcttgtcgttgaacctattgtatttgttttcagtgtttatgtcgcttttatattccccattttatttggatttttcgaagcatacgctgtcatttatcgtggtgtttaccacatgtctatggggatatctggcttgccatttattggtattggtgtcgggttatggataggtgctttcttttacctttacatcgacagaaaatatctcttccctaaacccccagctggcactcaaccactcaccgaaaaagagagaacttctaaaaggactaccccttacacggctggagtgtgttcgcga

SEQ ID NO: 4718 - protein, 162 aa, Homo sapiens
IQLIAGGLILPFIALMPETHKGIILRKRAKKRNIALKKFSREAQKEFLKTPVTITILRPLKMLVVEPIVFVFSVYVAFIFPILFGFFEAYAVIYRGVYHMSMGISGLPFIGIGVGLWIGAFFYLYIDRKYLFPKPPAGTQPLTEKERTSKRTTPYTAGVCSR

SEQ ID NO: 4719 - DNA, 260 bp, Homo sapiens
cggatcaaggccaacccgctgaccgcgcatgtcccggtgatcttcatgaccggcctgaccgaaagcgagcatgtgatcgaaggcttcgaggtcggcggcgtcgactatgtgcgcaagccggtcaacgtgcatgaactgctggcgcgggtacgggtccacatggtccacgcacgggctgtgcaggccagcacggcgagccttgatgccaccggccgactgatgatggccaccgatacccgtggctttctgctgtggtgcac

SEQ ID NO: 4720 - protein, 86 aa, Homo sapiens
RIKANPLTAHVPVIFMTGLTESEHVIEGFEVGGVDYVRKPVNVHELLARVRVHMVHARAVQASTASLDATGRLMMATDTRGFLLWC

SEQ ID NO: 4721 - DNA, 161 bp, Homo sapiens
cctaggatgcacatgggagagtccactggacttgacgtgcaccagctcccttgtattctcaggctgtttcttcctgctcttctcattcattcttgtgacataacccccctaccaggtggtaggtattggtacgtcggtagaggctggatgcacccaagggc

SEQ ID NO: 4722 - protein, 51 aa, Homo sapiens [sequence omitted]

SEQ ID NO: 4723 - DNA, 380 bp, Homo sapiens
tgatcatcagggccagacccctcacctcggagtagatgagaaactccagaggaaggggaatctatctgaatgactcatcttttcctcccctgggactccagaaaggatctgcactattccatttcagtggcaagatatctccgtcctcttctctctgccatttccagagagctcatttgagacacactaatcaaaaccaaccgggtcatgttacagaggggaaaactgaggcccagagagaggaaatcctggccacagtctgttccttgagtctccttgttgagcttacagagggtcaacgctgtggggtcaatgcttgtgttacaaaaaagtcacatcctaccttcatttgaaaaccatgttgttatccattcacaacc

SEQ ID NO: 4724 - protein, 105 aa, Homo sapiens [sequence omitted]

SEQ ID NO: 4725 - DNA, 428 bp, Homo sapiens
cctaggcaataagcagacgtgagtgccctgaatgggacttactgtgcagtgatcatgggccctgcctctggaaccttcagacctgatccttactagctgggtgaccttgaacaaggcatttaatctctaagagcctcagctgattcatctatataacagggatgataatcgtggagttattatgagggtgaaatgccatatgaatctgcagcatcgagctctgaggaagcattggtaagtgttagccaccaccatcatcatcatcactatcatcatcatcatcaaaatggaaatgcttttcccagccttctttttttccttgttaagcaaagtttcatattcatgttaaggtgctatgagtctccccatcactttaagacattaaccccaagcttgcttagaactgcttgatgtagagcagcctggta

SEQ ID NO: 4726 - protein, 72 aa, Homo sapiens [sequence omitted]

SEQ ID NO: 4727 - DNA, 273 bp, Homo sapiens
gatcctttgacaggtaaaaacaaggaagttgaaaaatggcaagctgctttcttcaaagtgggtgatgactgtaggcaagatgttctagcgttacaattgatctcgctatttagaaccatttggtctagtattggcttggatgtctacgtttttccctacagagttactgcgacggcaccgggttgtggtgtcatcgatgtgctacccaattcggtatcccgtgatatgttaggacgtgaagctgttaatggattatatgaatatttcactagt

SEQ ID NO: 4728 - protein, 91 aa, Homo sapiens
DPLTGKNKEVEKWQAAFFKVGDDCRQDVLALQLISLFRTIWSSIGLDVYVFPYRVTATAPGCGVIDVLPNSVSRDMLGREAVNGLYEYFTS

SEQ ID NO: 4729 - DNA, 451 bp, Homo sapiens
ggtaccaagaagaaaaggaaggatttggggttggtggcacacaatctgttctatgatgaaactgagtttcacacagcaaatcctacttcccaaaagaagctccagccagccctgctttgacactgaggagacactgctggcaagggcgttctcttccctcttaaactcccggcgacagtgcaacagcagcaatgatcagagcagaaacccacacacacaggaggaagacacgaaagggtgaagccataagaaaaaatgccagagcatgagggaatagaaagcaaaaccataatagcaacagcaaaacccaaagccagacgaggttgtatctacttgggaaagaaaggattcagtgttcccaatggcagcaggttctgctcttctggacatgtgaactactgagtcactttgagcattccaggataggagttagaaagctttaagctgatca

SEQ ID NO: 4730 - protein, 73 aa, Homo sapiens [sequence omitted]

SEQ ID NO: 4731 - DNA, 378 bp, Homo sapiens
  misc_feature (1)..(1): Wherein n may be a, c, g or t
  misc_feature (214)..(214): Wherein n may be a, c, g or t
nacgcgtttgtacttctacctcaacacaaacgataaacgttaaaaacttctcttcagtaagtagtggtaataatcctaaacagagagaaaatactgttttctttttcggtttgctatttttacctttcctttcctttctctttggtgaaaaaccggatcggatgtaaacgtaaatgccaattcaagggacctgtaagacaagagaatgcgaagngtaatagtggcagttgtaaccattttctagtctttctccgtaaagtagttacttgccacaatgccgccatagtgcggaaaacaacgaaatataattccttgaagcacaaaacgccaccccttccccttgcccttgcccttgcggacgccctttcccctcaaaat

SEQ ID NO: 4732 - protein, 106 aa, Homo sapiens
  misc_feature (52)..(52): Wherein Xaa may be any naturally occuring amino acid
VVVIILNREKILFSFSVCYFYLSFPFSLVKNRIGCKRKCQFKGPVRQENAKXNSGSCNHFLVFLRKVVTCHNAAIVRKTTKYNSLKHKTPPLPLALALADALSPQN

SEQ ID NO: 4733 - DNA, 361 bp, Homo sapiens
gggagcccaggtggaaggatggctttgggatccaataagcctgaatctgagtgtcagctttgtcactacctgtgaccttgggcaaggcattcaccaaagttaatctgctcttgtctagaatgggggcagcagtgcacccaaggcattatttcagtgtaatgggttgtgattaaattccagctgagatgacagaagtcccagccatcaagaggaagcagcaggagccgctcagcccctttcaccaatcaggctataaggacaaagatactgggttccaaaacctttcagaggtcctgcccaccccagacagcagggctttctgttggatccttcccaaggtcaaaagcaggaagcgtctggg

SEQ ID NO: 4734 - protein, 58 aa, Homo sapiens
MTEVPAIKRKQQEPLSPFHQSGYKDKDTGFQNLSEVLPTPDSRAFCWILPKVKSRKRL

SEQ ID NO: 4735 - DNA, 204 bp, Homo sapiens
tccggagcatttgcttacaaatgctcctatgaaaggctctggtttaaagtagggtctttgtttgacattatatcaacttcctcgaagaaaaatgtcattccgttggcaagcaaaatggaagttggctcgaatgaggatgtgtctagtatgggtaatttcataaataaattctacacagagtattctttaccctcacataaggta

SEQ ID NO: 4736 - protein, 68 aa, Homo sapiens
SGAFAYKCSYERLWFKVGSLFDIISTSSKKNVIPLASKMEVGSNEDVSSMGNFINKFYTEYSLPSHKV

SEQ ID NO: 4737 - DNA, 571 bp, Homo sapiens
ctgcagggctgccgtgagactgcccgtttcacaaatgcatgaagccagccctaagtctttagtgagtggagcctcttttgataagagcccaacacctggctagcagactccagttttggagcccaagtctgcccagatttgaaagccccagctctgcagcttctgagctgggtgactctgggcaagtcactcaacctctctgggcctcagcttccccatctgcaaaacagggataataagtatggacttcataagtcatggtgaggaccccatgagtgataaacatgatcacgacagagctgctgctgtctttgccaaggcaaaggataacggaaacgtgggtgtctcacaccaggaccccagtgtccgcccgatgtggtggcgctcaccacttcgagacaggcggcgagtgatgtcctgttttgtcccctccctatacacacatacacacataccagccactctttcccatcaggccccagcccagccctgtccccttagggtctggaggcgccaactgggagcaggcgaggccccgcagggcggccagcctccctgggccgcctccgga

SEQ ID NO: 4738 - protein, 110 aa, Homo sapiens
MDFISHGEDPMSDKHDHDRAAAVFAKAKDNGNVGVSHQDPSVRPMWWRSPLRDRRRVMSCFVPSLYTHTHIPATLSHQAPAQPCPLRVWRRQLGAGEAPQGGQPPWAASG

SEQ ID NO: 4739 - DNA, 255 bp, Homo sapiens
  misc_feature (1)..(1): Wherein n may be a, c, g or t
nacgcgtttgtgttccccgacaaggccatggatctggcatcggtcggcgcactgtccatcgtgactggcggcgagacattcttccaccccaggttcgaagtggtccgcgacagaaaaaataatcgggacaaaatcaagcgcgtcgttgtccgtgaaacgccatacaacgcgactgtccgcgttcgctgctcgaacggtgtgcgcatcagcgagcacacgggtaacttctaccagcgctccatgaccgacctcgag

SEQ ID NO: 4740 - protein, 85 aa, Homo sapiens
  misc_feature (1)..(1): Wherein Xaa may be any naturally occuring amino acid
XAFVFPDKAMDLASVGALSIVTGGETFFHPRFEVVRDRKNNRDKIKRVVVRETPYNATVRVRCSNGVRISEHTGNFYQRSMTDLE

SEQ ID NO: 4741 - DNA, 350 bp, Homo sapiens
gaattctcaacctcagcactagtggattgacattttgggccaggcaattctttcttctggggcctgtcctatgcattataagattggagcagcatccctggcctctacccattagatgccagaaacatactccacccccaagctttgacaaccaaaaatgtttccagaaatttccaatatctcctggggcttaaatcaagaaccactggcataagccaaggaagaactaaccatttaccatggtacaggatgagtatcccatatcttgggaccagaagtgtgttggatttcacatcttttaatattcgcattatgtgcttactggttgagcatctgaaatccaaaatgca

SEQ ID NO: 4742 - protein, 68 aa, Homo sapiens [sequence omitted]

SEQ ID NO: 4743 - DNA, 222 bp, Homo sapiens
tgcttaaagtcctgccgttcacgtgcactctacgaaggctcaaaggtgactgcaaccccagatctaatgctagggtatttagatttcttccttgggggagatgaaaaaagggctgatcttccacctcgtcttcgtcaaaggtttccaatgtccctgatctttggaggtgatggaagttacatggctccgttttcacttaatagtggcagtgtgcttactagt

SEQ ID NO: 4744 - protein, 74 aa, Homo sapiens
CLKSCRSRALYEGSKVTATPDLMLGYLDFFLGGDEKRADLPPRLRQRFPMSLIFGGDGSYMAPFSLNSGSVLTS

SEQ ID NO: 4745 - DNA, 183 bp, Homo sapiens
acgcgtgacctgtcgtggcggaccgaacagttgcgcggcatcgagcggctctgcgacgaatgcgagcagcagatcatcgaagccatcaccgccgacctcggtcgccccgcattcgacggatggttggcggatatcgcctcaaccaaagccgaggcgacgtacgcccgcaagcacctcaagaaa

SEQ ID NO: 4746 - protein, 61 aa, Homo sapiens
TRDLSWRTEQLRGIERLCDECEQQIIEAITADLGRPAFDGWLADIASTKAEATYARKHLKK

SEQ ID NO: 4747 - DNA, 343 bp, Homo sapiens
  misc_feature (1)..(1): Wherein n may be a, c, g or t
nagggaccgcctgccaccctcccctctctggggcacagcagctgcgtctgggaagggtgtgagactgtcctatgccagctgccaccaacaacggcagtgcaggctgaggcagttccccatggccagcggctccccgggatcaaggctggggggtccccaaatgtcttgcagagctctctgacttaagcagctgccttaagtgttgtttttcaagctgtaagtagccaagcgctagtgggtggtgaggtctgttgagtgggtcacgaccagcctcaaagacacctggtggcattctgtgtgggaggagtgagtgctgttctgccgcgcagtattctaatgtaca

SEQ ID NO: 4748 - protein, 50 aa, Homo sapiens
MPPGVFEAGRDPLNRPHHPLALGYLQLEKQHLRQLLKSESSARHLGTPQP

SEQ ID NO: 4749 - DNA, 291 bp, Homo sapiens
  misc_feature (1)..(1): Wherein n may be a, c, g or t
  misc_feature (109)..(109): Wherein n may be a, c, g or t
  misc_feature (110)..(110): Wherein n may be a, c, g or t
ntcatgatcatcggcccgaacaccgggttggggcacaactcgatgatcctgatgatcgaggcccaggtcacctatatccttcaggcccttgcgcaaatgcagccagtgnngatcgagaccctggagatcaggcccgaagtggaaagtcgctacaacgagcggcttcagcagcagctccagcgcgctatctggtcaaccggcggctgtcgcagttggtacctggacccgcgcaccggcaagaacaccaccctctggcccggctcgacctggcgtttccgtcaggtcacgcgt

SEQ ID NO: 4750 - protein, 97 aa, Homo sapiens
  misc_feature (1)..(1): Wherein Xaa may be any naturally occuring amino acid
  misc_feature (37)..(37): Wherein Xaa may be any naturally occuring amino acid
XMIIGPNTGLGHNSMILMIEAQVTYILQALAQMQPVXIETLEIRPEVESRYNERLQQQLQRAIWSTGGCRSWYLDPRTGKNTTLWPGSTWRFRQVTR

SEQ ID NO: 4751 - DNA, 313 bp, Homo sapiens
aaattttcttataataaaccttaacatggagtttccgctaacacactatatggaagcgaaacgtgtgaatcaacagaatcaaccacagcatatcataaacctgaacatagacacgactgaaaaactcaaacgtgctataccgccaagcagaaaatccatttgctcctactttattttctacgtctccttgcaatctccgttccattttatcatcctccctcaaactgaacacacccctccaccaggattaattcatagcttccgtcatgctacctgaatattttagggtccggtcacttaaaaatgaacgcgt

SEQ ID NO: 4752 - protein, 83 aa, Homo sapiens
MEFPLTHYMEAKRVNQQNQPQHIINLNIDTTEKLKRAIPPSRKSICSYFIFYVSLQSPFHFIILPQTEHTPPPGLIHSFRHAT

SEQ ID NO: 4753 - DNA, 212 bp, Homo sapiens
actagtgtcagcagctaagccatgccattgcaagtcaccagccctttaaaaggggaatcatcacagatagttgtcttgttctttctctctgtcttctggtgtctctgtctgtcgggctgtctgtctgtttccctagctcatgttcccattccaagaaggccttttgccattactacccccacccctactaataaatctcttgtgtgagatct

SEQ ID NO: 4754 - protein, 61 aa, Homo sapiens
MPLQVTSPLKGESSQIVVLFFLSVFWCLCLSGCLSVSLAHVPIPRRPFAITTPTPTNKSLV

SEQ ID NO: 4755 - DNA, 541 bp, Homo sapiens
ccggagctgttcttagacactaaaaaagcactctttccactcctactgcaactacgaaggaaccagcttgccccggatttacttatttcccttgcgaccgttctctatcatttacaacaacctaaagaaataaatttagccgttcagtcctatatgaaactcagtatcggcaatgtggcctggcctattggtgttactagcgtaggcattcatgctcgtagtgcacattcgaaaattcaaggaggccggaatgctgctaacataatgattgatgaaagaacgcgattatggattaccagtattaaaagattaataacttttgaagaatggtataccagcaaccacgatagcttagcctaattgttgaactattgttttcgttatcgcgtggcacgatatcatgcggccaaaataagaagcaagaatgcagatgttgatagcctttgttcaattttccagagacaaatgctttacaggatcgggacttgaaatatactgactggatgacggtaaacttagatccgggctgcatggatattcg

SEQ ID NO: 4756 - protein, 119 aa, Homo sapiens
PELFLDTKKALFPLLLQLRRNQLAPDLLISLATVLYHLQQPKEINLAVQSYMKLSIGNVAWPIGVTSVGIHARSAHSKIQGGRNAANIMIDERTRLWITSIKRLITFEEWYTSNHDSLA

SEQ ID NO: 4757 - DNA, 496 bp, Homo sapiens
  misc_feature (1)..(1): Wherein n may be a, c, g or t
ncaattggttattcacagtgagggagctatgggcaccaggagcacaggggctcaaatgcccagtgggccaggcagagcccagtgggggcataggggcaggaagtgtgcaaggtaactagactggggggtgtggtgtctgcgcacagatgcagaacctcatggtggcagggccaggacttcttcgtttcagtaacctggagaatgttggcagatagatcagaggtggtgattggaatatgaagccccccatatgctgtagcggtcctgctgtttaagaagggagggaattgtgcataaaaaatgtggcattaccctttcccccccgcccctccacatcagttcattaggcatcctttatgtcaggggaagcctccacccacaaatgcccattcccttcccccccaccccccacacccagtcactgagcatcttcatgtcagggaagccacattccttctaaaagatgtttgggccccatgtgctgtcagagaagctt

SEQ ID NO: 4758 - protein, 65 aa, Homo sapiens
MWHYPFPPAPPHQFIRHPLCQGKPPPTNAHSLPPHPPHPVTEHLHVREATFLLKDVWAPCAVREA

SEQ ID NO: 4759 - DNA, 233 bp, Homo sapiens
tcatgacagggacaggaaggacaggaatggatgccggtgtgtcctgacatattccgtgctctgaaaagcgcttgggaggcctcaccaggtggctgccatggctgtgtgatctttgcttcccctcctcctgccacgcctatccttccttcctgtttcaccctcaggctactgaggcaagtcatgtgtctttgggggctggtgccccttactctcagggtgttgggcattgaatg

SEQ ID NO: 4760 - protein, 75 aa, Homo sapiens [sequence omitted]

SEQ ID NO: 4761 - DNA, 510 bp, Homo sapiens
  misc_feature (1)..(1): Wherein n may be a, c, g or t
  misc_feature (2)..(2): Wherein n may be a, c, g or t
nnggatcctatccctgaatctaaggttggtgacacatgtgtttgggatagcaaggtagagaagtcacagaaaaagcctgtggaaaacaggatgaaggaggacaaaagcagcatcagggaagcaatcagcaaagccaagagtacagcaaatataaagacagaacaggaaggtgaggcatctgagaagagcttgcatctgagcccacagcatatcacacaccagactatgcctataggacagagaggcagtgagcaaggcaaacgtgtggagaacattaatggaacctcctaccctagtctacagcagaaaaccaatgctgttaagaaattacataaatgtgatgaatgtgggaaatccttcaaatataattcccgccttgttcaacataaaattatgcacactggggaaaagcgctatgaatgtgatgactgtggagggactttccggagcagctcgagccttcgggtccacaaacggatccacactgggtacggagagaagacaacgcgt

SEQ ID NO: 4762 - protein, 170 aa, Homo sapiens
  misc_feature (1)..(1): Wherein Xaa may be any naturally occuring amino acid
XDPIPESKVGDTCVWDSKVEKSQKKPVENRMKEDKSSIREAISKAKSTANIKTEQEGEASEKSLHLSPQHITHQTMPIGQRGSEQGKRVENINGTSYPSLQQKTNAVKKLHKCDECGKSFKYNSRLVQHKIMHTGEKRYECDDCGGTFRSSSSLRVHKRIHTGYGEKTTR

SEQ ID NO: 4763 - DNA, 431 bp, Homo sapiens
caaggtggtcagatcctttaactccctttctaataccttggcctgacacagcagatcctgtagttctgccaggtttagctccaaaggttgaatctgtttggtcctcatttcaatgttccgtaacagagacagataggatactagcttttcatcatgttctaaacagagttgccgggtaaatacattctgagttgctctgaagggctctgggtttacacctccatttccctttccttcaggtgcagtcatgaagggagtttgttcactgcccgggctttctctgagcttttcctgtggtgtcttctctgtcttcactgcagagcatactgttagggacactgtcttttcttcactggtctctagaacagtaggactaatgatggcattctgttgccctgtattctctttttgatacactcctttgaacagat

SEQ ID NO: 4764 - protein, 83 aa, Homo sapiens
MTAPEGKGNGGVNPEPFRATQNVFTRQLCLEHDEKLVSYLSLLRNIEMRTKQIQPLELNLAELQDLLCQAKVLERELKDLTTL

SEQ ID NO: 4765 - DNA, 397 bp, Homo sapiens
  misc_feature (136)..(136): Wherein n may be a, c, g or t
  misc_feature (137)..(137): Wherein n may be a, c, g or t
  misc_feature (148)..(148): Wherein n may be a, c, g or t
gtgcactttggctccatcagatcaggcagctattctagcaggatttcagatgataagaggaatgggtccatagatgttggggacctgtatgctgaagaagaaagggattttcttgtgtctgtaaacgtcccaccannggctacggggnaaacagcactcctcaaggttggctgcgtccacaaagacccactgatgaaggagaccgtgaatatggctgatgtgcaggtgaagatctccaggccagcattcgtctcggtacaaagcgtgtcgatcgaggtggaccgccagaagaaccgcctccatgcagccgaggtgatggctgaagcaaggttttctgcagagcgcggtgacctgaccaccgctgtttctctactcgaggactgccggaggatgatca

SEQ ID NO: 4766 - protein, 132 aa, Homo sapiens
  misc_feature (46)..(46): Wherein Xaa may be any naturally occuring amino acid
  misc_feature (50)..(50): Wherein Xaa may be any naturally occuring amino acid
VHFGSIRSGSYSSRISDDKRNGSIDVGDLYAEEERDFLVSVNVPPXATGXTALLKVGCVHKDPLMKETVNMADVQVKISRPAFVSVQSVSIEVDRQKNRLHAAEVMAEARFSAERGDLTTAVSLLEDCRRMI

SEQ ID NO: 4767 - DNA, 243 bp, Homo sapiens
  misc_feature (243)..(243): Wherein n may be a, c, g or t
accggttccggcgtaaacattaccaatgacaaaaccttactgcataattacgaagacagtaatcgcagtacacgattttttggtattgggaaaaacagttcagtgtctttaaaagggtttggctatataaaaatcaagaatggtcacaacaatactgacaataagtgtctattaacttactatgtaccggaagaagaatccactataatcagctgttatgacttagccaagaaaaccaaaatn

SEQ ID NO: 4768 - protein, 81 aa, Homo sapiens
  misc_feature (81)..(81): Wherein Xaa may be any naturally occuring amino acid
TGSGVNITNDKTLLHNYEDSNRSTRFFGIGKNSSVSLKGFGYIKIKNGHNNTDNKCLLTYYVPEEESTIISCYDLAKKTKX

SEQ ID NO: 4769 - DNA, 436 bp, Homo sapiens
  misc_feature (10)..(10): Wherein n may be a, c, g or t
gtgcaccccnagagaggaagctgtgctcctgctgagtcatggccttggatgtcccctcactgttgcccacccgggtcttcacatgttacaagtctaggccgcccatccacccaaggaactagaaaacacagcccaagaataagcagctcttagaccacttttggccgagcctcaggatggacacagtgtccatctggactgcatctgctaaactgtctgacgctggcagtgttgacaggacagcttagttctttggtgattgactctggtaaaacaaaagctgcttttcaaagaatgaaaaccatcctctgtgagactgcacggtgcccactggtcaacggacatgatcactccaagtatcatgcatgtgcgtgcttgcccagagagaaatgctggtggaatgagatctggctctcactccacagcgcattacgcg

SEQ ID NO: 4770 - protein, 51 aa, Homo sapiens
MILGVIMSVDQWAPCSLTEDGFHSLKSSFCFTRVNHQRTKLSCQHCQRQTV

SEQ ID NO: 4771 - DNA, 315 bp, Homo sapiens
catggccagtgtgcgatcatcatgtttgatgtaacctcaaggcttacttacaagaatgttcctacgtggcatagggacctgtgcagggtctgtgaaaacatccccattgtcctctgcggtaataaggttgatgtgaagaacaggcaggtcaaagccaagcaggttactttccacaggaagaagaatctgcagtactatgaaatttctgccaagagcaactacaactttgagaaacctttcctgtaccttgcaaggaagctggctggtgatccgaaccttcactttgttgaagctgttgctcttaagcctccggag

SEQ ID NO: 4772 - protein, 105 aa, Homo sapiens
HGQCAIIMFDVTSRLTYKNVPTWHRDLCRVCENIPIVLCGNKVDVKNRQVKAKQVTFHRKKNLQYYEISAKSNYNFEKPFLYLARKLAGDPNLHFVEAVALKPPE

SEQ ID NO: 4773 - DNA, 458 bp, Homo sapiens
  misc_feature (34)..(34): Wherein n may be a, c, g or t
  misc_feature (250)..(250): Wherein n may be a, c, g or t
  misc_feature (346)..(346): Wherein n may be a, c, g or t
accggttatcacagcaggggctggagcatagcanaatgaccaatggtctcaaagtcaggcagagcccagaggctctgaggcagtggagggagaggtggcatctgccacagcgagggggttaagccacaagactccatatctcttccttctgccattccaccatggctgaacaccccccagccccacccaggttttcccagacccagcattacttaagcagctgcagcttagcccacttcctttccaaatntgctctgctgtgcacatcatcagcctccatggcaggctgacttggtgccctctgctgaccactcagctcccactttatgcctgaaatcactctttntgttcacttgccccaggggagctgacccacaagttcctatctcacagctcacactcgtactctgaattctccaatgtcctttctgtaaggattgataatcgtcgaagagctg

SEQ ID NO: 4774 - protein, 71 aa, Homo sapiens
  misc_feature (7)..(7): Wherein Xaa may be any naturally occuring amino acid
MMCTAEXIWKGSGLSCSCLSNAGSGKTWVGLGGVQPWWNGRRKRYGVLWLNPLAVADATSPSTASEPLGSA

SEQ ID NO: 4775 - DNA, 571 bp, Homo sapiens
ctcctggaggtcaagcccttcccttcactgctcctgccttttggcaccatctgctggccatttcgaaattgttacctcctcattgcgccctttaagaaaaacatacatatcatttgtatggaagtacctaactgctctcaaaagtgagcatttgttggtttggggacagggatggaattgctttagcataaatgccgcacttcccctgggaatttcacaggcgttagaggtgaatttgataccaaggctctcttgatgtctgtagctacagcgtcaccccatcagtggctggcgtagtttggtcctctggccggctgggagggatctctcacacttgtctcgccttgcaacccttgaactgtgcagctttgtgaaaaagagcagttttctttaacaaagaaggtctttggtcaaggtctaggaatgctgtgttaccacacaagtttctttattgctccacaactactcaacttttctggctttctgggaataaagaacagtgagcaaatgtgcttttgagcctgggaagttgggcagttctaaagcgcacactcgcatggaataataagca

SEQ ID NO: 4776 - protein, 54 aa, Homo sapiens
MLKQFHPCPQTNKCSLLRAVRYFHTNDMYVFLKGRNEEVTISKWPADGAKRQEQ

SEQ ID NO: 4777 - DNA, 936 bp, Homo sapiens
  misc_feature (1)..(1): Wherein n may be a, c, g or t
nacgcgtatcaccggtcacggccaagaccagcagcagcgcagaaggcgtggtcgtagcaagtgagtctcctgtaatcgcgccgcacggatcgagccattcgcggtcgctgagtaagcgacggtcatcgggcgcgctcgtggacgatgacaagcgcgaatcacacaagcatgcagagcaagcacggcgtaatcgattagcggtcgcgctgcacgaactggcgtctttaatccccgcggagtggaaacagcaaaatgtgtcggccgcgccgtccaaagcgaccaccgtggaggcggcctgccggtacatccgtcacctacagcagaacgtgagcacgtgaccgtgcaccaatgggaagcacgttccgggcatatcggactggggcgcgcctcccctgcgcggtgcttgttataagaggcgctttgctggaaagtggcccacaccgggttttcgagattaggacctactcagtcttaagggcagtattggttggcgcttatttgcacatattgtatacacgcactcacattaacagaagcacacatatacacttacacctacacacacggataaagaaaaagaaatagaaaatgggcatgttggaactagttggtgagtactgggaacaactaaagataaccgttgtgcctgttgtggccgcggccgaagatgacgataacgagcagcatgaagaaaaggcagcagaaggagaagaaaaagaagaagaaaatggggatgaagatgaggatgaagacgaagacgaagatgatgatgatgatgacgacgaagatgaggaagaagaggaagaagtcactgatcagttggaagatttgagagaacatttcaagaacacggaggagggtaaggcccttgtgcaccactacgaggagtgtgctgagagagtcaagatacagcaacaacaacccggctacgcggat

SEQ ID NO: 4778 - protein, 116 aa, Homo sapiens
MGMLELVGEYWEQLKITVVPVVAAAEDDDNEQHEEKAAEGEEKEEENGDEDEDEDEDEDDDDDDDEDEEEEEEVTDQLEDLREHFKNTEEGKALVHHYEECAERVKIQQQQPGYAD

SEQ ID NO: 4779 - DNA, 186 bp, Homo sapiens
caattgccggcgcaaccgctgttcctcggcaacgccggcaccgcgatgcgctttctcaccgccgccgtggccaccgtgcaaggcaccgtggtgctggacggcgacgcctacatgcaaaaacgcccgatcggcccgctgctggcgaccctcggccagaatggcatccaggtcgatagccctaccggt

SEQ ID NO: 4780 - protein, 62 aa, Homo sapiens
QLPAQPLFLGNAGTAMRFLTAAVATVQGTVVLDGDAYMQKRPIGPLLATLGQNGIQVDSPTG

SEQ ID NO: 4781 - DNA, 339 bp, Homo sapiens
  misc_feature (1)..(1): Wherein n may be a, c, g or t
  misc_feature (2)..(2): Wherein n may be a, c, g or t
nncccctcaggagagcagcccatggaaggtcccccccaaggggcccctgagagccctgacagtctgcaaagaaaccagaaagagctccagggcctcctgacccaggtgcaagccctggagaaggaggccgcaagcagtgtggacgtgcaggccctgcggaggctctttgaggccgtgccccagctgggaggggctgctcctcaggctcctgctgcccaccaaaagcccgaggcctcagtggagcaggcctttggggagctgacacgggtcagcacggaagttgctcaactgaaggaacagaccttggtaaggctgctggacattgaagaggctgtgcac

SEQ ID NO: 4782 - protein, 113 aa, Homo sapiens
  misc_feature (1)..(1): Wherein Xaa may be any naturally occuring amino acid
XPSGEQPMEGPPQGAPESPDSLQRNQKELQGLLTQVQALEKEAASSVDVQALRRLFEAVPQLGGAAPQAPAAHQKPEASVEQAFGELTRVSTEVAQLKEQTLVRLLDIEEAVH

SEQ ID NO: 4783 - DNA, 392 bp, Homo sapiens
  misc_feature (330)..(330): Wherein n may be a, c, g or t
  misc_feature (392)..(392): Wherein n may be a, c, g or t
gccggcggacctttggccgccggaccctccccgggatatctcccggggccgctgacgggagcggatggctctcgtcgacagagaggtgatccgatgagtgctcagacgtacgagtggtatatcgagacgacgtccagtcgccgaggtgacctggtcgtcggaccgtggcaggatgagttggccgaaccggtggtcgttatcgatcgacgggaattgatggcgggacgccctagcgctactgcgcgccgtaagtcccttcacaaccggttctgggatgccgctgtgctggcaactatcgctgtcatgatcgtcggggtgattctcgccctnaggcgcatcggccagatgtggcaagggggatcctgccagtgggcatgaggatcatatgggcn

SEQ ID NO: 4784 - protein, 94 aa, Homo sapiens
MSAQTYEWYIETTSSRRGDLVVGPWQDELAEPVVVIDRRELMAGRPSATARRKSLHNRFWDAAVLATIAVMIVGVILALRRIGQMWQGGSCQWA

SEQ ID NO: 4785 - DNA, 227 bp, Homo sapiens
tcatgagatgaagaagcttccggagggagatggccctagtgcccagtttcgggtgccaggcgggggcttcctgtgacctgcgggaagggggtggggggcccaagcggccccttttggtccaaggcacaggggctttgcggcttcaggcctgggtgggcaaccccgtttgggtttggctggatacccaccccctccagagacggggctcactgcccccacggcaggtc

SEQ ID NO: 4786 - protein, 66 aa, Homo sapiens [sequence omitted]

SEQ ID NO: 4787 - DNA, 276 bp, Homo sapiens
tcgcccccaggactttctccctcccatgcctctgcacccacagcagatgcgggtgctgcctctgcccatgagaagagcctcatgaccaaggggagccgggatctagtcaagcacctggggctaatggcccagggccaggaaggatgggcacagagaagcagtcccagtgccagcatcaggaagcagacacacaaatgcagaatggggacactggggcttgctgcaggagaggcgacaccactgctcaacaagtcaaaggccagagagtgatgggat

SEQ ID NO: 4788 - protein, 62 aa, Homo sapiens [sequence omitted]

SEQ ID NO: 4789 - DNA, 345 bp, Homo sapiens
  misc_feature (1)..(1): Wherein n may be a, c, g or t
ngccggcgcatcgacgagctgactcgcagcactggtctgcacccgttcctggcgcgtccggccggcaagctatccggcggcatgaagcagaagctgggactgtgttgcgcgctgatccacgacccggacttcctcctgctggacgagccgactaccggcgtcgaccccctcgcccgtgcccagttctgggatctgatcgaccgcattcgcatcgaccgccccggcatgagcgtgatcgtggcgaccgcctacatggacgaaacacagcgtttcgactggctggtggcaatggacgacggccatgttctgggcaccggcacaccgctggaactactcgaccgcacg

SEQ ID NO: 4790 - protein, 115 aa, Homo sapiens
  misc_feature (1)..(1): Wherein Xaa may be any naturally occuring amino acid
XRRIDELTRSTGLHPFLARPAGKLSGGMKQKLGLCCALIHDPDFLLLDEPTTGVDPLARAQFWDLIDRIRIDRPGMSVIVATAYMDETQRFDWLVAMDDGHVLGTGTPLELLDRT

SEQ ID NO: 4791 - DNA, 290 bp, Homo sapiens
  misc_feature (1)..(1): Wherein n may be a, c, g or t
nggggaaagaatgagctgcaaggaagaccctctgggcgtgtgcctggtcacgtatgtcctggtgcatgtgtgcatatgcatgtggaagccagaggaaattttcagttctctcgtcctgccccaggggctccagggatcaaactcaggtcgttagactttcctgcaggcacctttacctgctagccacctttacagggcaagcacttcatagacagacctttcttcttaggccctccttcactccagtctctctttcggtgtttggttggttggttggttggttggtttgt

SEQ ID NO: 4792 - protein, 79 aa, Homo sapiens
MSWCMCAYACGSQRKFSVLSSCPRGSRDQTQVVRLSCRHLYLLATFTGQALHRQTFLLRPSFTPVSLSVFGWLVGWLVC

SEQ ID NO: 4793 - DNA, 475 bp, Homo sapiens
  misc_feature (325)..(325): Wherein n may be a, c, g or t
  misc_feature (368)..(368): Wherein n may be a, c, g or t
  misc_feature (410)..(410): Wherein n may be a, c, g or t
  misc_feature (454)..(454): Wherein n may be a, c, g or t
  misc_feature (455)..(455): Wherein n may be a, c, g or t
  misc_feature (460)..(460): Wherein n may be a, c, g or t
  misc_feature (467)..(467): Wherein n may be a, c, g or t
  misc_feature (474)..(474): Wherein n may be a, c, g or t
gaattctcctccaggcgaatgcctgtgccctaccccactctgcccattttgtgatggcagtacatgggtcaaggcaagggggtaagcatatcatctttctagtccttgtgggcaaagaagaactacataggtacatcataattcatttttgctcttcttcaaacaaaaataagactggctgggccctaaagtccttcacaattaatcttgacttgttttcaggttttaatccattgcaggcaaaaggctttatcatattggcttgaaccacttacgtaagtggatagttaattcaattatttgtgatctttgtatccaccccttnaaatttgataaagaatgaccaagttgcctttattttgtctgtntttttagtcagtatttataagtaggggattcatttggatganaacaatgccactggagaaaacttgcacatgttcataattttgtnntcttntcttgtnttagatnt

SEQ ID NO: 4794 - protein, 70 aa, Homo sapiens
MAVHGSRQGGKHIIFLVLVGKEELHRYIIIHFCSSSNKNKTGWALKSFTINLDLFSGFNPLQAKGFIILA

SEQ ID NO: 4795 - DNA, 387 bp, Homo sapiens
cctaggggaaacttgtggcagcatcgaatcaacaagcgggttcacaaaaagggatctgacggaatggattacggcggcgaaactagcggtcctctgaaggcatttgacccccgcggaccagaatctcttgcggactcagatgaaaatcttgaaactcgcctcattgacgctggataccatattttctgcgaccgccagctcctgtacaaaaacaccccataattcatctcatgaaaatacttccttagcgatatatgatcttgccggaaggccgataattgacgtcggaataaggatcgagaaagatacttctctctacatacaagacgcttctccgatcgtcggaatgaaaccttcatatagcgcatctcagcagtcttcggatcc

SEQ ID NO: 4796 - protein, 99 aa, Homo sapiens
MRYMKVSFRRSEKRLVCREKYLSRSLFRRQLSAFRQDHISLRKYFHEMNYGVFLYRSWRSQKIWYPASMRRVSRFSSESARDSGPRGSNAFRGPLVSPP

SEQ ID NO: 4797 - DNA, 379 bp, Homo sapiens
  misc_feature (1)..(1): Wherein n may be a, c, g or t
  misc_feature (2)..(2): Wherein n may be a, c, g or t
  misc_feature (82)..(82): Wherein n may be a, c, g or t
nngcctgctcgacaagcagcctcgtcgggtgttcgtcgttttgtgttcatcagttcgatcaaggtgaatggcgaaggtacgnccgcttcaacccttaacgtcgccgatgcgactcccgcgcctggggatccgtatggcatttcgaaaatggaggccgaggcgggattgcgcgaaattgcgagcgtctccgggatggaggtggtgatcatccgtccggtgttggtttacggtccgggtgtgagagccaactttctgaacatgatgcgttgggtggacaagggcatacccttgccattcggtgctatccataatcggcgtagcctggtcgcgctcgaaaatctttcggacttgatcgtggcctgcatccgtcatccggccg

SEQ ID NO: 4798 - protein, 126 aa, Homo sapiens
  misc_feature (1)..(1): Wherein Xaa may be any naturally occuring amino acid
  misc_feature (28)..(28): Wherein Xaa may be any naturally occuring amino acid
XPARQAASSGVRRFVFISSIKVNGEGTXASTLNVADATPAPGDPYGISKMEAEAGLREIASVSGMEVVIIRPVLVYGPGVRANFLNMMRWVDKGIPLPFGAIHNRRSLVALENLSDLIVACIRHPA

SEQ ID NO: 4799 - DNA, 196 bp, Homo sapiens
aagcttgacgaaaaagagcaatcccgacatcaccgcgagggtccaggtaagccatttcagggcagtcacctgccgccctcgtcgacctgcccattgccccacgacaggtgccagcaaggcaatggtcaggcccgccaaagtcatggtccatgacagcgcagtgacagtgcggtctttggacccgaaagcgtcgccg

SEQ ID NO: 4800 - protein, 50 aa, Homo sapiens
MDHDFGGPDHCLAGTCRGAMGRSTRAAGDCPEMAYLDPRGDVGIALFRQA

SEQ ID NO: 4801 - DNA, 388 bp, Homo sapiens
taattatttggtttgctagcaaggattgtagaaaagaatattatcactgatttaggaaaccagttgctatcatcttaagttaaatgtactagtatgtgtttaacttattatcttcagtcccattccccaatattaggccatttaaaacttctcattcttgtcctgggaactctgttctctccacctattcttgaccatgccagaggttatcggttattcatcaccctcttcctttgtgataaggatgttttattttccctttagttgttctacttattttagagtagtgacagtagagaacaatgcaactacctgatgagggagaaaaaggaagtagtaacaagaaatgccaaattccttgccgaattattggaaagcaaaatactgg

SEQ ID NO: 4802 - protein, 56 aa, Homo sapiens [sequence omitted]

SEQ ID NO: 4803 - DNA, 321 bp, Homo sapiens
ggatcctgaatagttgctgacaaaggcctgtttaaggaggtgaaaacaggctgaccaccctgcctcctgcaccctgtccctcttggctgttggtacgaggtgctattccctattttttgccactgctaaggggcagcctgctgtccgggtgatggtgagtgtccctagatgcttcactggcagcctcagctcccacctgactgcctggcccatctccccaggtatagcactctccctgggcgcagggccctgaagaactcccgcctagtgagccagaaggatgacgtccacgtctgtatcctttgtctcagagccatcatg

SEQ ID NO: 4804 - protein, 51 aa, Homo sapiens
MLHWQPQLPPDCLAHLPRYSTLPGRRALKNSRLVSQKDDVHVCILCLRAIM

SEQ ID NO: 4805 - DNA, 430 bp, Homo sapiens
  misc_feature (357)..(357): Wherein n may be a, c, g or t
  misc_feature (430)..(430): Wherein n may be a, c, g or t
gaattcctagcctagtagctttttcgggtggtttctctgctcccaagaaggatgtccaggaggtccatgggcccccagtccccctacttcttgcagggtgctgccctgtggcagagccacctctaccttcatgcctgctgcagggattcacccatccttaagtcctccagcccgttgctggtttgctccattctagaatttgcttcctactgcgcgcaaatgtttcatgttagagaatggtaactgccatctctataatggttaatgccgaacatgactgcagatgaaagtaacagtgtgatcacatcctttctcttcctgttctgtggcatgagtcagtctctttgccttaatgtntatacagatccttaatacaaatacagctgatggcgactgctgagacatgtacataaggaaagaaataatcgtn

SEQ ID NO: 4806 - protein, 63 aa, Homo sapiens
MSRRSMGPQSPYFLQGAALWQSHLYLHACCRDSPILKSSSPLLVCSILEFASYCAQMFHVREW

SEQ ID NO: 4807 - DNA, 206 bp, Homo sapiens
gcgtccctggccgctcacgacaatgccggcaacgttggcaccgtgaccgctcaacacaactacgcggcacagacaggtggtgttaccacctccttgtccatcggtgcgattgccggcgacaacatcgtcaacagtgccgagtcccaggcaggcgttacttttagtggtgtggccaacggcaccttccccccccccacctggggacc

SEQ ID NO: 4808 - protein, 68 aa, Homo sapiens
ASLAAHDNAGNVGTVTAQHNYAAQTGGVTTSLSIGAIAGDNIVNSAESQAGVTFSGVANGTFPPPTWG

SEQ ID NO: 4809 - DNA, 792 bp, Homo sapiens
  misc_feature (1)..(1): Wherein n may be a, c, g or t
nggatcctcacgcccgccatcatacgtgggatatcgttgagcaaatgcgtcatgacggggtctccgtcgtgctcactacccacaacatggatgaggctcaacggctggctgatcacgtctggatcgtcgatcgcggcagggtcgcaactcatggaactgtgccagagctcaccgctgagtcgagtttggaagatgtgttcctcactcacactagtgaccgcgcagcagggaggaattgacatgacgacactcgatctccgccccgcacctcaggccgcaccggctgctgcacgcgtgcgtaaccacgctctcaccgaggtgcgtctggtgatgcgcaacggtgagcagctgctactagctctcgtcattcccatcgggatcatcgtcgccgggcgcttcctgggcggccgggtcggactgacgatggacgtcttagcaccctcagtgctggcgctcgccatctggtcgacatgtttcacttcccaagcgatcatgaccggttttgaacgccgttacggggtgctcgaacgattgtccgcaaccccgttaggtcggtcgggtctgctagctggcaaggcgatggcttattccgttatcagtctcgctcaggtgatactgcttgtcatcatctctttagcgctgggctggcacccccacggttccggcctggcctggctcccaaccctggtgagcgttgtgctcgccatgatgacattcgggctcgcagcactggcaatggccggcgctggcaaagctgaagtcactctcggactggccaacttggtatacatc

SEQ ID NO: 4810 - protein, 264 aa, Homo sapiens
  misc_feature (1)..(1): Wherein Xaa may be any naturally occuring amino acid
XILTPAIIRGISLSKCVMTGSPSCSLPTTWMRLNGWLITSGSSIAAGSQLMELCQSSPLSRVWKMCSSLTLVTAQQGGIDMTTLDLRPAPQAAPAAARVRNHALTEVRLVMRNGEQLLLALVIPIGIIVAGRFLGGRVGLTMDVLAPSVLALAIWSTCFTSQAIMTGFERRYGVLERLSATPLGRSGLLAGKAMAYSVISLAQVILLVIISLALGWHPHGSGLAWLPTLVSVVLAMMTFGLAALAMAGAGKAEVTLGLANLVYI

SEQ ID NO: 4811 - DNA, 445 bp, Homo sapiens
gctagcccttgggcctcggagatgatcagaggtgaagaaccgcctggaagaggaaggccagggtttggccaggagaactaagaaggtctcaactccaggctttgttgtgtttaagctattgagagccccaggccacaccaggacttgcagtggtgggaatccattcctcttctgccctgtgttgcagggaactaggaggtaagggtggagggcgaccatctcgctcttgctggcggtggagcagccatccctgcctttctgttgggaaaaactgttgtgccaaactcttgtgtggaacacagctgggtcttcagcaggcatctgtcactgccgtgaggtcagcgcttctcacctaactgcctcctggattgtcatcttcccagatgtgtcccatagtgtccaggtgtcacagagacggcctgaggccctaagatctggttgtaca

SEQ ID NO: 4812 - protein, 107 aa, Homo sapiens
MPAEDPAVFHTRVWHNSFSQQKGRDGCSTASKSEMVALHPYLLVPCNTGQKRNGFPPLQVLVWPGALNSLNTTKPGVETFLVLLAKPWPSSSRRFFTSDHLRGPRAS

SEQ ID NO: 4813 - DNA, 679 bp, Homo sapiens
tgatcactcagtgtctgaggagagagactgggtgggtcggggagagaggccgattctcagactccaagagagtcagttatgtgcactcccgagaggtagatgcaatcccctcactttcccgaggaataactcattcaaaagatgcactaatcctcaggggaatccagggagatccttcagagcgcctgcctatcgtagagcacctgaggaacccagggtgggaggagcgtgctctgttactccagggccagagctgggggcgtccgttccctgctttaataaagcctctgatctcacccgcatgacccggtctgacttttctcctcttcttttctacttccctgaagggattactgggaaaactagaagtgacagctattatccagcttttctatattacattttaagatttacaaccttctcacatccgcagaggatttgaggatgttcatggcaacctctgatgattcctgactcttctcctggcgtcacagttcctccagctgtgtttcccttttggccatgcggcagggtctggagagacctgtcatccctggggagaggcaatcaagaaggccgaccatgtctccttgagcagaggtcactgtggccagtctttggctcaggtattctacctttggaagaggggttttggatacatcagaggagcagtgatttc

SEQ ID NO: 4814 - protein, 72 aa, Homo sapiens
MIPDSSPGVTVPPAVFPFWPCGRVWRDLSSLGRGNQEGRPCLLEQRSLWPVFGSGILPLEEGFWIHQRSSDF

SEQ ID NO: 4815 - DNA, 307 bp, Homo sapiens
ggcgccggtcttgccctggctggaagtggcatgcagaccttggtgcggaacccgctggctgacccctacctgctaggtgtatcggctggcgcaagtgtgggagcaaccgcagtcatcgctttggggatgttcacttcgtggggaactcaccgactcactcttggtgcccttgtaggggccttggcggcagctgcattggtctatctcatttccatggcgcaaggaggcatgacgccgcttcggttggtgctgtcgggcgtggtgttgtcctcggcgttctcgcgttggcgagtttcctcgtctttcg

SEQ ID NO: 4816 - protein, 102 aa, Homo sapiens
GAGLALAGSGMQTLVRNPLADPYLLGVSAGASVGATAVIALGMFTSWGTHRLTLGALVGALAAAALVYLISMAQGGMTPLRLVLSGVVLSSAFSRWRVSSSF

SEQ ID NO: 4817 - DNA, 240 bp, Homo sapiens
  misc_feature (1)..(1): Wherein n may be a, c, g or t
  misc_feature (2)..(2): Wherein n may be a, c, g or t
nnacgcgtgaaggaatccaacttgagcgaacttctcaaccgccgcctggctctgctcggcgagcgcgaccacctctctctgctcgaacagtgcctgcacggcatcgagcgtgaatgcctgcgcgtcacagatgagggtcgcctggcacaaacgccgcaccctgaagccctgggcgctgcgttgaccaacgaattgatcaccaccgactactcggagtcgctgctggagttcatcactccc

SEQ ID NO: 4818 - protein, 80 aa, Homo sapiens
  misc_feature (1)..(1): Wherein Xaa may be any naturally occuring amino acid
XRVKESNLSELLNRRLALLGERDHLSLLEQCLHGIERECLRVTDEGRLAQTPHPEALGAALTNELITTDYSESLLEFITP

SEQ ID NO: 4819 - DNA, 423 bp, Homo sapiens
  misc_feature (1)..(1): Wherein n may be a, c, g or t
  misc_feature (2)..(2): Wherein n may be a, c, g or t
  misc_feature (15)..(15): Wherein n may be a, c, g or t
  misc_feature (31)..(31): Wherein n may be a, c, g or t
  misc_feature (36)..(36): Wherein n may be a, c, g or t
  misc_feature (37)..(37): Wherein n may be a, c, g or t
  misc_feature (52)..(52): Wherein n may be a, c, g or t
  misc_feature (350)..(350): Wherein n may be a, c, g or t
  misc_feature (406)..(406): Wherein n may be a, c, g or t
nncgcacgtcagccncggcacagctttaacnactgnngcatccagtgtgtanggaagaaggaaatcgaagctgccattgagcgtaagatccagctgggaattgacccctacaatgctggctccctgaagaaccatcaggaggtcgacatgaatgttgtcaggatctgcttccaggcctcctatcgcgaccagcagggacatttgcaccgcatggaccccattctctctgagcctgtctacgacaagaagtccaccaatacttctgagctgcggatttgccgaatcaacaaggagagcgggccatgcacaggtggtgaggagctgtacttgctatgtgacaaggtgcaaanagaggacatatccgtggtgttcagcacagcttcctgggaaggtcgtgctgactttnctcaagctgacgtgcac

SEQ ID NO: 4820 - protein, 141 aa, Homo sapiens
  misc_feature (1)..(1): Wherein Xaa may be any naturally occuring amino acid
  misc_feature (11)..(11): Wherein Xaa may be any naturally occuring amino acid
  misc_feature (12)..(12): Wherein Xaa may be any naturally occuring amino acid
  misc_feature (13)..(13): Wherein Xaa may be any naturally occuring amino acid
  misc_feature (18)..(18): Wherein Xaa may be any naturally occuring amino acid
  misc_feature (117)..(117): Wherein Xaa may be any naturally occuring amino acid
  misc_feature (136)..(136): Wherein Xaa may be any naturally occuring amino acid
XARQPRHSFNXXXIQCVXKKEIEAAIERKIQLGIDPYNAGSLKNHQEVDMNVVRICFQASYRDQQGHLHRMDPILSEPVYDKKSTNTSELRICRINKESGPCTGGEELYLLCDKVQXEDISVVFSTASWEGRADFXQADVH

SEQ ID NO: 4821 - DNA, 251 bp, Homo sapiens
tgatcacttcatgtacctttcctaccaggaattcacggttgatggcgagacgatgactccggtcgcaggtactcatcttggcatcgctgaggaggggcagcgatttgacgccgttccgcataatgacgataaggcgaccgttatcgtcaccaaggattcggtgcgctcggcagtacaacgcaatggttaccgcgattacatcggggtaaggattcgtgacgagcacggcgccgtcgttgctgagcaccggt

SEQ ID NO: 4822 - protein, 80 aa, Homo sapiens
MYLSYQEFTVDGETMTPVAGTHLGIAEEGQRFDAVPHNDDKATVIVTKDSVRSAVQRNGYRDYIGVRIRDEHGAVVAEHR

SEQ ID NO: 4823 - DNA, 357 bp, Homo sapiens
aagcttctccttcctctcatacatcaacagccgtacttgccaacaccaaatactctaaacctcaacctcacagtaaattctagttcatccttctgaaataccttcttgatgaagattttcttggacccccttttttaaaattatttcccatcactttgttcctcttttttgcttgcaattcccaaatgttattccattggttcctttggggaagaactgttcccttatcctctcttttttccccttttccccttttaattggcccccttgttgattggaaattattccacaaaattattttgtttaaaaaaaatgggttagaagtgaaaaaccgccgaaaaaaggtggagatgtgtt

SEQ ID NO: 4824 - protein, 57 aa, Homo sapiens
MLFHWFLWGRTVPLSSLFSPFPLLIGPLVDWKLFHKIILFKKNGLEVKNRRKKVEMC

SEQ ID NO: 4825 - DNA, 408 bp, Homo sapiens
  misc_feature (1)..(1): Wherein n may be a, c, g or t
ncccttaatatttcaatgtatatttcttaaggacacggacaccgttctatcgggaagttaactttgatccatattaccatttaatccacagactccatttcagatttcactaatcatcccaaacctttacagctccaggagctaatcaagaccatgtgttacatgtacttaacatttctcttcattccacttcaatctgtaacaaacagttcctcagtctttcttaccttttatgaccataatatttatgaagagtatgggaccacagagtttttagaatgcccctcaattgagtttgtctggtgtttcctcatgatttatgcattttagcatgaataccagaaaaatgacttggacttaccttagtgctttctatgaggagacgcctgagattgacttgccccatcc

SEQ ID NO: 4826 - protein, 58 aa, Homo sapiens
MCYMYLTFLFIPLQSVTNSSSVFLTFYDHNIYEEYGTTEFLECPSIEFVWCFLMIYAF

SEQ ID NO: 4827 - DNA, 558 bp, Homo sapiens
  misc_feature (1)..(1): Wherein n may be a, c, g or t
nacgcgtatatgaaatagtgaatatatacatgccgaacggttccgttttttttttggctcgttgatttttcctatccctttgaacttttctatcttttaagggatagaggggctgttcagggaaggaaagatctcaattggtatataaaaagggggcagcaagaaacgaattgcagtgctccttttccctaccagtgcatcaatacaagaacaagagaacaagcaaaaaacatgaaccaagcaatagacttcgcacaagcaagcattgactcctacaagaagcacggcattctggaggatgtaattcatgacacaagctttcaaccctccgggatacttgccgtagagtactcatcaagtgcacctgttgccatgggtaacacgctgcccactgagaaggcacgttccaagccccaattccagttcacgttcaataagcaaatgcaaaaaagcgtaccacaggcgaatgcgtacgttccccaagacgacgatttgttcacactggtaatgaccgatccggatgctccctctaagacagatcacaagtggtctgaattc

SEQ ID NO: 4828 - protein, 109 aa, Homo sapiens
MNQAIDFAQASIDSYKKHGILEDVIHDTSFQPSGILAVEYSSSAPVAMGNTLPTEKARSKPQFQFTFNKQMQKSVPQANAYVPQDDDLFTLVMTDPDAPSKTDHKWSEF

SEQ ID NO: 4829 - DNA, 304 bp, Homo sapiens
gtgcactaagcagtggaagaggcagaaaataaacaaataagcaaaagtaagcaaaaaattacaaattgtggtatactactgtgaaagaaaataaaaaaatgaagaatagataatactgtgggatgccaggacttactttaaatctggtggtcagggatacattttctgagtaactagcagtaaactgagacctgaaggatgagaaggggctggctatgcaaaaggtggagggaaaaggcattcagtagatgaaagaacatattcaaattctgagttggggatgaactctcttagagaattttaa

SEQ ID NO: 4830 - protein, 60 aa, Homo sapiens
MPFPSTFCIASPFSSFRSQFTASYSENVSLTTRFKVSPGIPQYYLFFIFLFSFTVVYHNL

SEQ ID NO: 4831 - DNA, 370 bp, Homo sapiens
ggatccccaagcaggattcctcagcatctccccttgccctctgcacagagttcatcagtatgctctcagcatctcctctgcagtgtctttgtacactcttgtattattgcactcatcatattacattgcgatctcttcatttacatctctttgttaacaactcactgagcaccttcaggaaagaatggtcttttattcatttctgcatgtccagctcctgacacatagtaagcactacaatgtttataagttgaattgaactgtcttctgagttgagtttggatgtgatagtgccatgatggcacgcttctgcatttctccccgactccagtaagaaacccatgccctatgttaatattatttgaaattt

SEQ ID NO: 4832 - protein, 53 aa, Homo sapiens [sequence omitted]

SEQ ID NO: 4833 - DNA, 373 bp, Homo sapiens
  misc_feature (325)..(325): Wherein n may be a, c, g or t
  misc_feature (373)..(373): Wherein n may be a, c, g or t
actagtaccacaaaacattgtgctgtcattaatggctataaaatggcaactctctgagacagaacatgggacacaataagctgtttctaaactcagctgccccttgatacatgcaggggactggggattgttcccaggaacaccctcagatcctgaatccatgcatattcaaatcctgcagtcagccctggggagctcgtggatacaaatatctgccctctgcacacgtggttttcacatcccgaatgctgtattttctatcctcatctggttgaaaaaaaatctgtgtatcagtggacgtgcacagttcaaaccatgttgttcnaaggtcagctgtatgcaaaaactaatgggggctgggcgactggggatn

SEQ ID NO: 4834 - protein, 71 aa, Homo sapiens
  misc_feature (71)..(71): Wherein Xaa may be any naturally occuring amino acid
MHIQILQSALGSSWIQISALCTRGFHIPNAVFSILIWLKKNLCISGRAQFKPCCSKVSCMQKLMGAGRLGX

SEQ ID NO: 4835 - DNA, 312 bp, Homo sapiens
acgcgtgaagggggtgagaggggaggccaggaggccagtgaacaggaagctgggactgtcccccagagagcaataatggggccagaccaaagtggtggcaggggctggaaatgcagggagaaaatcttaaaaatgtcaggaacagagcattggcaggactccacagccaattctagatactggtggggaggaatagatttctccaaagtccatggtcctaagcaccagttaggaatcccttcctcctggactggagaagatgcctcacccaacctcccgtacatattgccaacccttgagtctggcttacat

SEQ ID NO: 4836 - protein, 94 aa, Homo sapiens [sequence omitted]

SEQ ID NO: 4837 - DNA, 323 bp, Homo sapiens
gtcgacaaatacagagaaggcttccattaacataggcagggacagagtctagacaacattctcatttatcttatcctaaaaactgtcaatcatgttaaaggtggtattagaatctggcccaagcaaagaaactgccatggtcgctcctattcatgtcctttctacagctttcaacctgattttccactcaaaccataaagccacacccaatctaaccagtacaagatcagctaacccactctccctaatgccacaggtggtaacacgtcattttcagcaactgtctacagagacatccatgacacctcccctccctcacgcgt

SEQ ID NO: 4838 - protein, 77 aa, Homo sapiens [sequence omitted]

SEQ ID NO: 4839 - DNA, 195 bp, Homo sapiens
gcttatgattctgcgttcagaaaactatctacaccgcagctgactcgtttattgcacatggcaattgaaaaacaagcaccgcctcaaaaggctggttttcgacctaagatgcgttatgcacatcaaggaggaaataaccctcctactataatcattcatggtaactcattggataaagtatcagaaaactacacg

SEQ ID NO: 4840 - protein, 65 aa, Homo sapiens
AYDSAFRKLSTPQLTRLLHMAIEKQAPPQKAGFRPKMRYAHQGGNNPPTIIIHGNSLDKVSENYT

SEQ ID NO: 4841 - DNA, 313 bp, Homo sapiens
aaatttccggtgtgctgccctgacgtgagtccttgtcctggttttaggaaaccaaagtgcatgacgtggtcacgggtacagcacaggaacagaaacccccaccgtccccgccagttaccgttttcggtaactgaatgtcaaggctctgagtagaccccacgcagtggtggggacacagactccaggaccagaatgcctgggttcaagtccccgcctgccccttattagccaggtgaccccgggtaaagtcactgtgcctccctttgtgaagatcactgattgcctcactattctgcatgacatccagcatgtg

SEQ ID NO: 4842 - protein, 62 aa, Homo sapiens [sequence omitted]

SEQ ID NO: 4843 - DNA, 306 bp, Homo sapiens
gtcagcggttgatcgtggcacgatggcgaggttatcgaccgagaccccttaaccatgccgcaatcccaagccaagaatctgtccctgatcgccgccatcgacctgggctccaacagctttcacatggtcgtggccaaggcccagaacggcgaaatccgcatccttgagcggctcggcgaaaaagtacaactggctgccgggatcgacgacgagcgtcagctcaatgaagaatccatgcagcgcgggctcgattgcctgaagcgctttgcccagctgatcaacggcatgccccctggcgccgtgcgg

SEQ ID NO: 4844 - protein, 98 aa, Homo sapiens
SWHDGEVIDRDPLTMPQSQAKNLSLIAAIDLGSNSFHMVVAKAQNGEIRILERLGEKVQLAAGIDDERQLNEESMQRGLDCLKRFAQLINGMPPGAVR

SEQ ID NO: 4845 - DNA, 290 bp, Homo sapiens
tctaaacagagagcatgccctgttaccataagtagccccttccaccacttctttcccatctgtttcctgcatgctgggtattattgggaaacaatgatgtcaactcttccatataaatctacacctccctgccagcccctcccctacaatgcatatttttgttcctctttctggcttttgtcttgctgttctgctaaggactcatacttttggcgacaattgttggctttctttttaacaagttttaactatttaagctttattggggccttcaaagggcacatgctttt

SEQ ID NO: 4846 - protein, 65 aa, Homo sapiens [sequence omitted]

SEQ ID NO: 4847 - DNA, 396 bp, Homo sapiens
agcttatcattagaacaaataatacaagccattgatcaacatgactttcagcctgaaggcatcaaattaagggagaaatcccatttgagatttaaaatagttaatgaggaccgcagaggaaggagacagagcttgattaataacattaccacacaattaaagattctcgatgacaaagagaaacaaatggctccattaatgaggcctagttgggatagctattttatgaagttagccacactagcagcatctcgttccaattgcatgaaacgtagagttggttgcgtgattgtgagagaatgcagagtgattgctactggctataatgggactcctcgacatttaacaaattgtttcaatggcggttgcccacgttgcaatgacggtgattctaga

SEQ ID NO: 4848 - protein, 132 aa, Homo sapiens
SLSLEQIIQAIDQHDFQPEGIKLREKSHLRFKIVNEDRRGRRQSLINNITTQLKILDDKEKQMAPLMRPSWDSYFMKLATLAASRSNCMKRRVGCVIVRECRVIATGYNGTPRHLTNCFNGGCPRCNDGDSR

SEQ ID NO: 4849 - DNA, 636 bp, Homo sapiens
  misc_feature (1)..(1): Wherein n may be a, c, g or t
  misc_feature (2)..(2): Wherein n may be a, c, g or t
nngtgcaccacgagacttggcgtgatcaaagtgcaaaagaaagcagaataacaaattactcccgcaaagtactagctatatcagggaacgactttattggcatcttgttgtagcaaggttttcatgattctcatccttgcgcttgtcgcgcggcacgatgccagtgcggagtttccgcgatatgatgtaactgcagctgttggtggcgaactttgcataagatcgacctcctactgatgagaaagataggatggattatatagaagagcacaagcaacgatgaatgggttggtattaggcgctacaggtttatgcggaggcgggtttctgaggcacgcacaggaggcaccccagttctctaaggtatacgcgatcttgagaagggaattgccctttccggccactgataaagttgtggccatagtagaaagggataattcaaagtggtcacaattgatcaccaatgaaatgaatccgcaggtgctattcaccgcactggcaacgacaagggcagctgcaggcggtttggacaagcaatacaagatcgatcatgatttaaacttacaattggcccaggctgccaaggaaaaaggatgtgaaacgatcgttctcgtttcttccgctggtgctcatccg

SEQ ID NO: 4850 - protein, 119 aa, Homo sapiens
MNGLVLGATGLCGGGFLRHAQEAPQFSKVYAILRRELPFPATDKVVAIVERDNSKWSQLITNEMNPQVLFTALATTRAAAGGLDKQYKIDHDLNLQLAQAAKEKGCETIVLVSSAGAHP

SEQ ID NO: 4851 - DNA, 342 bp, Homo sapiens
gccgccgcgatcgacggcgactcctcgaccagctgggtgtccagctcgctgcaaaccgctgtggggcaatggcttcaggtggacttcgaccatccggtgaccaacgcgaccatcaccctgacgcccagcgccaccgctgtcggagctcaggtgcgccgcgtcgaggtggcaacagccaacggcaccagcacaattcgcttcgaccagcccggcaagccgctgacggcggcgctgccctacggcgagacctcatgggtccggttcaccgcgaccggcaccgacgacggctcccccggcgtgcagttcggcatcaccgacttctccgtgacgcagtacgacgcg

SEQ ID NO: 4852 - protein, 114 aa, Homo sapiens
AAAIDGDSSTSWVSSSLQTAVGQWLQVDFDHPVTNATITLTPSATAVGAQVRRVEVATANGTSTIRFDQPGKPLTAALPYGETSWVRFTATGTDDGSPGVQFGITDFSVTQYDA

SEQ ID NO: 4853 - DNA, 205 bp, Homo sapiens
ggatcctctttatgaagacacaccagagagatgcctattgggcatcagcaccaaaaaaaggccatgatcctcctgagcaaccagttcatgtttgtcttacggattccaggaatcatttaattaacactattttccaggtttgtagtagctgctgcaaagctcaagatcaaagtcatggtgcatctttatcacctacaaagaattc

SEQ ID NO: 4854 - protein, 64 aa, Homo sapiens
MKTHQRDAYWASAPKKGHDPPEQPVHVCLTDSRNHLINTIFQVCSSCCKAQDQSHGASLSPTKN

SEQ ID NO: 4855 - DNA, 252 bp, Homo sapiens
aatgcaattagagaggaaaacgtcgaggtatttgaagaatggggtgatatcattgtaaatgaatggtccaaaagaatggcttatgtggatgttatcaacgctcacatgggtgcagatgatgacactacgcttgatgaagagaaagcaaagtcttctgttaactggaagaagtttttgaagggcaagaaacagatcatagaatctagggacaagctggctcaccattccgctgacttatcccgtgttaacgcg

SEQ ID NO: 4856 - protein, 84 aa, Homo sapiens
NAIREENVEVFEEWGDIIVNEWSKRMAYVDVINAHMGADDDTTLDEEKAKSSVNWKKFLKGKKQIIESRDKLAHHSADLSRVNA

SEQ ID NO: 4857 - DNA, 443 bp, Homo sapiens
acgcgtccatcagcatcacagccgggaagttggcatcggtgcgctgtgtgtggttccgtcatctcatcccgtgtggctctgcgaccgccacctcggtcaccacgcagagccatccccaccgtggcggccacgcagccattgtaaccctggaaaccagtaaatgcgtctccatggctgcaggcctgtcgttatgagaaggtttcagaagcgggctcgtccgcagctcagggccgtctttctgagttgtgggcctcaggagtggattcctttttattgctgagatgccactgggtggaggttcccctgtttgtttgaccccctgtctactgaagtacattagtttttccatttttcggcctactacaaatacaatagctgctgtgagcaaccatgcttaggttttgagcggacctaggtttccctcgtcagggtgagtacccggg

SEQ ID NO: 4858 - protein, 96 aa, Homo sapiens [sequence omitted]

SEQ ID NO: 4859 - DNA, 422 bp, Homo sapiens
gcgcgccgatctcccttggcacgacctccgtcaccaactacatggcgacaggcctggccgatccattccaggtcatcctgccgattggccatccggacaacccgctgacgaatgctcgcgcatcggtcgcctaccgctttgaaaacctgcgcggcggctcggaaacggtcaaccagaacatgcgcctgctgacgggcctgcaaggcgaccacttcggctggagctgggatacgggcctgctgtggaaccgctcggaacgcgatgaaacgcaatatggccgcctgtacctgccaaccttgcgcaagctcaacaccggcacgtcgctggcacagctggcagccgatccgaccatcagctacgatccgaaaagcgaaggtttggcggaaatagtccagctggacggcaaggccagcacggaattc

SEQ ID NO: 4860 - protein, 127 aa, Homo sapiens
MATGLADPFQVILPIGHPDNPLTNARASVAYRFENLRGGSETVNQNMRLLTGLQGDHFGWSWDTGLLWNRSERDETQYGRLYLPTLRKLNTGTSLAQLAADPTISYDPKSEGLAEIVQLDGKASTEF

SEQ ID NO: 4861 - DNA, 390 bp, Homo sapiens
  misc_feature (376)..(376): Wherein n may be a, c, g or t
cccggggggcttgtacttgaaaagacgtgagttccacatctgcctgacagactcttagttgactgtcccgtttcctaaagctctgcacactcttcagtagcgactcttacaaatatcctatcatttcttacttagaagctgctaagcctgaccccaggcctggggctcaacagttgaggtcacctgtacttaaacagtccttcttctgcaaatacttccttttttgacgggaaacatttgttctcaaaaaaaaaaaaaaaaaaaaaaaaccccggaccccaaaaattaagtcttccttcttacatatagcatgactcattgacatgtctctgctactttttttttcttttaaaaaggaaaatgggctgggcatggnggctcatgcctgta

SEQ ID NO: 4862 - protein, 68 aa, Homo sapiens [sequence omitted]

SEQ ID NO: 4863 - DNA, 374 bp, Homo sapiens
agatctactccagggaggatagtaaataaaaaattaaatgtggagaatcgacagtgttttgggtcacaggtttctaaaactggtaatcaaaccaaataaaggtgcttatatgtcagtcgtggtttctcctggtaatcggcagcagctaacttagttcagttcttcaaacactgcaagttgtgaagtttagcaacaatgatttacaaaagctgcattgtttttattataccaccattttacctaattatttctggtataaaccccagtggaaacaatgcatgttttgttataaaattccagccagaaactttggacctcagacaagaaggaaattttggcaacgcttccagggtaaaactctggtatgcaaattt

SEQ ID NO: 4864 - protein, 59 aa, Homo sapiens
MIYKSCIVFIIPPFYLIISGINPSGNNACFVIKFQPETLDLRQEGNFGNASRVKLWYAN

SEQ ID NO: 4865 - DNA, 352 bp, Homo sapiens
  misc_feature (1)..(1): Wherein n may be a, c, g or t
  misc_feature (2)..(2): Wherein n may be a, c, g or t
nntcggctcagtgcgcagccaagaagcaccgggcagctctcgggcggccagcagcagcgcgtggcgatcgcccgcgcgctggccatggacccgatcgtcatgctgttcgacgaaccgacctcggcgctggacccggaaatggtcagcgaagtactggatgtgatggtgcaactggccaacgaaggcatgaccatgatgtgcgtgacccacgaaatgggcttcgcccgcaaggtcgccaaccgggtcattttcatggacaagggcagcatcatcgaagactgcaccaaggaagagttcttcggcgaccagagtgcccgtgaccaacgcacgcagcacttcctcagcaagatct

SEQ ID NO: 4866 - protein, 117 aa, Homo sapiens
  misc_feature (1)..(1): Wherein Xaa may be any naturally occuring amino acid
XRLSAQPRSTGQLSGGQQQRVAIARALAMDPIVMLFDEPTSALDPEMVSEVLDVMVQLANEGMTMMCVTHEMGFARKVANRVIFMDKGSIIEDCTKEEFFGDQSARDQRTQHFLSKI

SEQ ID NO: 4867 - DNA, 292 bp, Homo sapiens
  misc_feature (1)..(1): Wherein n may be a, c, g or t
nccgcggcgaaacgcaagaccgagcattcgggaatcaaggaatctaacttgcatttgtcccgggtcctactaagctctttctgccgtgcaaaaggacgtttcgtttcgtttttcatatgctatccatttccttttgggctaactaggtttccgcgggttttgtggtcaataggactcgacaaatcattatttacgcgcgtgcatttttcgccatcattcttttcccttcttgcaccactacaattttccgggattgtacgatcgtaggaaactacttaccgccagcgttgct

SEQ ID NO: 4868 - protein, 88 aa, Homo sapiens
  misc_feature (1)..(1): Wherein Xaa may be any naturally occuring amino acid
XAAKRKTEHSGIKESNLHLSRVLLSSFCRAKGRFVSFFICYPFPFGLTRFPRVLWSIGLDKSLFTRVHFSPSFFSLLAPLQFSGIVRS

SEQ ID NO: 4869 - DNA, 189 bp, Homo sapiens
ggtacccagctgaccatgcgtaccttccaccagggtggtgtcgcaggagatgacattaccggcggtctgccgcgtgtccaggagctgttcgaggcacgtgttcccaagggcaaggctcctatcgcggacgtcaccggtcgggtacagctcgaagacggcgatcgtttctacaagatcaccatcgttccg

SEQ ID NO: 4870 - protein, 63 aa, Homo sapiens
GTQLTMRTFHQGGVAGDDITGGLPRVQELFEARVPKGKAPIADVTGRVQLEDGDRFYKITIVP

SEQ ID NO: 4871 - DNA, 279 bp, Homo sapiens
acgcgttactcctcggtggataccgctttttccatctccacggccaatctttttatgcaactcgtggatcttaaagaccacaagccagaactgcatcttcccgattatgaaagcatgagcatagctttgatgaatgccgtggatgctgcccaccgtgatggctcgcttaagggccacgtgcgccaaaatcttgccaagtatattgtgaaagatgaagaggttgtgcgcgggctcgagcgctccaaaaagcacgataaaaagctcttcgtgctcacaaat

SEQ ID NO: 4872 - protein, 93 aa, Homo sapiens
TRYSSVDTAFSISTANLFMQLVDLKDHKPELHLPDYESMSIALMNAVDAAHRDGSLKGHVRQNLAKYIVKDEEVVRGLERSKKHDKKLFVLTN

SEQ ID NO: 4873 - DNA, 344 bp, Homo sapiens
accggttgcgcggtcgggggttcgacaggcggctcgtccgggtcgactactggcggatttgccggaatgggcgctacgggcacagcgggcggcacgggcggcgtcggcgtcacaacggctggcggttgcaccgctaccaccgaggaacgcaggtactagttgtgttccgtgccagcgacagtgccgccatggaaaaggaaatactgataggccccggcggataccgggtacttcaaagcgaacgcatcaggggggctgacggcaccgttaagcgcctggaccacctcgataccgtcgttgcgggtaagcccaccggcaccgccgaggttgctgacggccaattg

SEQ ID NO: 4874 - protein, 52 aa, Homo sapiens
TGCAVGGSTGGSSGSTTGGFAGMGATGTAGGTGGVGVTTAGGCTATTEERRY

SEQ ID NO: 4875 - DNA, 563 bp, Homo sapiens
accggtgggcgcatcaagcacatgagccggtccatgaatgacgtcgccgcccgctggtttaacgaggtccacgccagcctcggggtgcgcaaagcccgtgtgctgcacttctcgtcaccccggcagcgccccgccatcaccggtacatggccgcgcaccaacaccggcaacggattgacgatccgagcccacggaggcgttttccacaccgccggagtcgacgccggaacctccctgctgctcgactacctcgacgccatcgcagccgacgtccactccgacgccgccgatctggggtgcgggaatggtgtcatctccgcccatctggcgcgactgcttccccaggccacaattcacgccaccgacgtgtcatggcaggccgttgattccacccgtctcaccgctcaggcgaaccagctcaatatcgtcactcattggtgcgacggtctagtcgacgtgcctcatgagagcgtcgacgtcgttgtcaccaatccgcccttccaccgtggcaccgcccaggaccacgccccgaccctggccatgctggctgacgctgcacgcgt

SEQ ID NO: 4876 - protein, 187 aa, Homo sapiens
TGGRIKHMSRSMNDVAARWFNEVHASLGVRKARVLHFSSPRQRPAITGTWPRTNTGNGLTIRAHGGVFHTAGVDAGTSLLLDYLDAIAADVHSDAADLGCGNGVISAHLARLLPQATIHATDVSWQAVDSTRLTAQANQLNIVTHWCDGLVDVPHESVDVVVTNPPFHRGTAQDHAPTLAMLADAAR

SEQ ID NO: 4877 - DNA, 465 bp, Homo sapiens
  misc_feature (1)..(1): Wherein n may be a, c, g or t
ntgatcaggaaggaatctccaagatcatctggaaccggactgcatcccccacctgcggcccggtaccccagcaacctggcaccgccggtagctccaaaggttgcgcctacgactacaaccctgcgaaagctgagaagctcctcaaagaccacggttggaatgtcactaaggacggaatcaccacctgtcaacaagccggggagggcgaaggccaatgcggcaaaggaatcaagcagggggccaagctttccttcaccgtgatctcccaatccggtttcacctcgaccacccacatgttcgccgaactcaagtcgagtttttccaacgtcggtatcaacttggagattcgagaggttcctgactcggtggctgagtcccaagcctgtaagcccaacgacacgaactgcaagtgggacctgtcattctttggttcgcagtcatcgtggtactacccggtctacgcgt

SEQ ID NO: 4878 - protein, 86 aa, Homo sapiens
  misc_feature (1)..(1): Wherein Xaa may be any naturally occuring amino acid
XIRKESPRSSGTGLHPPPAARYPSNLAPPVAPKVAPTTTTLRKLRSSSKTTVGMSLRTESPPVNKPGRAKANAAKESSRGPSFPSP

SEQ ID NO: 4879 - DNA, 225 bp, Homo sapiens
gttcaagctcagggaggagaggcagtggggaggagtaaagaacacgatgctattcttgaagctggagaacagtagagcgattgctgaagccaagagcgctgaggggaaagagcgccagaccacagagccagcacaagtaaccactggggcttcgagaatatgcagcaaaagactaccacagcaggacacaacactgaaggctgtcacctcacagtcacccgcggg

SEQ ID NO: 4880 - protein, 59 aa, Homo sapiens
MLFLKLENSRAIAEAKSAEGKERQTTEPAQVTTGASRICSKRLPQQDTTLKAVTSQSPA

SEQ ID NO: 4881 - DNA, 365 bp, Homo sapiens
  misc_feature (356)..(356): Wherein n may be a, c, g or t
tggccagctgggtcacctggccagagagggaaggaggtgattgctccctggagtctgacatggaaaacaggagaagccggctccttccactcatcttcctcacctctggctggtcctgtccatcctaccaacctccctaccctgtcaagatgcccacaatatccaagagcaggtacataagcaaggggcttctagcttctctcaagcaggcaggacaggagaggccactggactcctgctcttcctgggccatcgggctggcaggcggagctcacttggagggtgggagcagcctgtcctagaaggacaagggaggggccgggaggacactggtgaggggctggccaaggaccgangacgtgcac

SEQ ID NO: 4882 - protein, 80 aa, Homo sapiens
MENRRSRLLPLIFLTSGWSCPSYQPPYPVKMPTISKSRYISKGLLASLKQAGQERPLDSCSSWAIGLAGGAHLEGGSSLS

SEQ ID NO: 4883 - DNA, 207 bp, Homo sapiens
gccggcaatcctgatatccaagacaatgtcgacattgtaattgggcctggtaccgaagtcattgcaggggaaggctccatccttacggcaggtgggatcgatgcgcacattcattttatttgcccgcaacaaattgaagaagcactcacctctggtatcaccaccatgattggtggcggtactggccccgcgacaagaacgaaagcg

SEQ ID NO: 4884 - protein, 69 aa, Homo sapiens
AGNPDIQDNVDIVIGPGTEVIAGEGSILTAGGIDAHIHFICPQQIEEALTSGITTMIGGGTGPATRTKA

SEQ ID NO: 4885 - DNA, 169 bp, Homo sapiens
agatctgttcctggccagctgtgaggccgcggtgacaccacctccctgcagtcagtttctgcaaccatgagacggggagaaggacagccctgcctcacaggctctgaaggagggtgacctaagatcaagcacgcagagcaccgcacagcgcccagcatgcatgtgtaca

SEQ ID NO: 4886 - protein, 52 aa, Homo sapiens [sequence omitted]

SEQ ID NO: 4887 - DNA, 384 bp, Homo sapiens
ctagaaactccgaacttgaatggcttgctgggcattcattcacgctcaagctcaagaaacggctccaatgaatcactgacgcctggccaaagaactcccgacaatagatctcaagagaatttacttacttcctttagtagcggtagaaggctatcctcgagctctatggagcctgcaactaataaagacagcaacaaagctctgcccaaacgcaggccgtctcctcccttgcaatcatcacttgtcggcagtggtcagcttcatgaaaatgaaaacctatcatcaattagcatcgattccagacatagtctcattccggacacttcagacgttatttctaataggtcacaaacaagtctatctcaaacaattaatcaactctcg

SEQ ID NO: 4888 - protein, 128 aa, Homo sapiens
LETPNLNGLLGIHSRSSSRNGSNESLTPGQRTPDNRSQENLLTSFSSGRRLSSSSMEPATNKDSNKALPKRRPSPPLQSSLVGSGQLHENENLSSISIDSRHSLIPDTSDVISNRSQTSLSQTINQLS

SEQ ID NO: 4889 - DNA, 306 bp, Homo sapiens
acgcgtcggcctgtcgatgcgcatgagcgacacaccgggcgagaaaatcgacggtgcccgcggcgcacgcccaggctcggcgccacgccagtcccaaggcactgcgccccgcaaggaaaccgccgcgccagccccggccaataacgccatggcttcgctgttcgccaacgccaaacaactgaagaaacgttaatggaactgccagccggcttgactcacagcgctttcagcgaactcattggctgccgcctgcaacgcctggaaaccggggttgcagaggtggccatgaccctggagccgcagttg

SEQ ID NO: 4890 - protein, 58 aa, Homo sapiens
MRMSDTPGEKIDGARGARPGSAPRQSQGTAPRKETAAPAPANNAMASLFANAKQLKKR

SEQ ID NO: 4891 - DNA, 363 bp, Homo sapiens
  misc_feature (363)..(363): Wherein n may be a, c, g or t
aagcttccaccacggaatccactctgcctgtgtctgtcatcctggttcttactgggcatgggttgtaaaacgtcgccaagagtttaatgccctccactccagaagtatttttcctaatatgagctcttaagcaaaggatttttttaatgtattctttgtgaaactaaaatgaataattctttgttaattcctcatctaattactgccccgggggaagacgaaggggtgtccctattgcctcccttctggatgaggaagtttgtttcagacaggcggaggcgcctccagccccatcctaccacagtcagccatgccgcccatgtgaggcctcgcctgctcactgggatgccctcaccctctggn

SEQ ID NO: 4892 - protein, 65 aa, Homo sapiens [sequence omitted]

SEQ ID NO: 4893 - DNA, 282 bp, Homo sapiens
atcaagcaaaaatctggtattttgtctatgcaaatattggaagggactttgagcccatcctctgcttacctagaaatcttagcggatgacatttcgtaccctgtattcatttgcatgaaaccatctcaaggtaaactaaactcggagatggcaaatattttcattagagatttgaattacagtaaactacattttagagtatcgaagaaacatattgccaaagattcagatgatgtcatatccgaaacttcctatagtacattgaagctactaaagcaagct

SEQ ID NO: 4894 - protein, 94 aa, Homo sapiens
IKQKSGILSMQILEGTLSPSSAYLEILADDISYPVFICMKPSQGKLNSEMANIFIRDLNYSKLHFRVSKKHIAKDSDDVISETSYSTLKLLKQA

SEQ ID NO: 4895 - DNA, 278 bp, Homo sapiens
  misc_feature (1)..(1): Wherein n may be a, c, g or t
nggggggccagggagattttcctactctgtgccctctccccatcctgcgcattcaaagcactgacagcttcacctgagactcttcagcgggcttcccttcttgcaccttgggtcagatggaccacagtggaccctccagccctgacataaaactacatgaggccatgatgaggagagggcacagagtaggaaaatctccctggcaagtcgctatgcagcaggaagaagggcaatccctgtcaaaattccctcccagaggactcctgtcaaaccctagg

SEQ ID NO: 4896 - protein, 54 aa, Homo sapiens [sequence omitted]

SEQ ID NO: 4897 - DNA, 353 bp, Homo sapiens
ttgcaagtttaatgtggatttctaaatattttcatttatctactgtgcactccaggaaagagagcaggactggaataattgaagtccaatgaatacaattttgtgtttcttcctccatggtgcagatgccttaccaacagggtattagtaatagatttgactaaggcttcttttcccctggaagtagttgggatggatgctgtgcactttctttgtttctttgttagcatggtttcttcaaccatccttctgagccacatgtcctttctttgaataggtgggttctgtcagcttataatctagtcttatatgtctaacaatcatagtgatcatagtgatttttttgaaaattt

SEQ ID NO: 4898 - protein, 74 aa, Homo sapiens
MWLRRMVEETMLTKKQRKCTASIPTTSRGKEALVKSITNTLLVRHLHHGGRNTKLYSLDFNYSSPALFPGVHSR

SEQ ID NO: 4899 - DNA, 385 bp, Homo sapiens
  misc_feature (1)..(1): Wherein n may be a, c, g or t
  misc_feature (2)..(2): Wherein n may be a, c, g or t
nnacgcgtcgccccggtgcgcctggcagtgggagaagagcatgaccttaccgagctcgcgactgaactcgtcaacgccgcctatagccgggttgacatggtggaacgccgtggcgaattcgcagtacgtggcggcatcgtcgacgtcttcccaccggtgctagaacacccggtccgtatcgatttttttggtgacgagatcgaggaaatgacctccttcgcggtagccgaccagcgatccaccgacgagactcaccaagaactgatctgcgctccttgccgtgagctcatcctcaccgacgaggtacgttcccgagccaaggctttgctgaccgaccatcccgaattagctgacatgttggagcggatcggcaacggtcaagctt

SEQ ID NO: 4900 - protein, 128 aa, Homo sapiens
  misc_feature (1)..(1): Wherein Xaa may be any naturally occuring amino acid
XRVAPVRLAVGEEHDLTELATELVNAAYSRVDMVERRGEFAVRGGIVDVFPPVLEHPVRIDFFGDEIEEMTSFAVADQRSTDETHQELICAPCRELILTDEVRSRAKALLTDHPELADMLERIGNGQA

SEQ ID NO: 4901 - DNA, 211 bp, Homo sapiens
  misc_feature (1)..(1): Wherein n may be a, c, g or t
  misc_feature (2)..(2): Wherein n may be a, c, g or t
nngtgcaccacagaggatagcgtctatgacgctgtcaaatctatgactcagcacaacgtgggagctttggtggttgtcaaacctggacagaataaatcaatcgctggcattgtcactgagagagattatctccggaaaatcatagtgcagggaaggtcttccaagtcaactaaggttggcgacatcatgactgaagagaacaaactgatca

SEQ ID NO: 4902 - protein, 70 aa, Homo sapiens
  misc_feature (1)..(1): Wherein Xaa may be any naturally occuring amino acid
XCTTEDSVYDAVKSMTQHNVGALVVVKPGQNKSIAGIVTERDYLRKIIVQGRSSKSTKVGDIMTEENKLI

SEQ ID NO: 4903 - DNA, 398 bp, Homo sapiens
  misc_feature (386)..(386): Wherein n may be a, c, g or t
  misc_feature (387)..(387): Wherein n may be a, c, g or t
  misc_feature (388)..(388): Wherein n may be a, c, g or t
  misc_feature (389)..(389): Wherein n may be a, c, g or t
  misc_feature (390)..(390): Wherein n may be a, c, g or t
  misc_feature (391)..(391): Wherein n may be a, c, g or t
  misc_feature (392)..(392): Wherein n may be a, c, g or t
  misc_feature (393)..(393): Wherein n may be a, c, g or t
  misc_feature (395)..(395): Wherein n may be a, c, g or t
  misc_feature (396)..(396): Wherein n may be a, c, g or t
  misc_feature (397)..(397): Wherein n may be a, c, g or t
accggtttaccaaaatacaggattatttgtgggggcctatccagtacaggatgatagtagagaggaatgctatgttactttgctctgtctttaaggcctgcttcttttcatccatggcttctctatctataccaagggcttgctgtcttctgctggctcctctgctaccagctcggagataagggagagagtaagtgtggagaacagtggagaactctgatatgcagccatttccgaaatgtcaagttggctgacaccttgttcttgaccttcttcaccttcagaatgatgagaaataaatttgtttaagtcgctcaatctataatatatcatagcagcctgagcagactaagatagtcataaacccttctgtctgctttctattnnnnnnnncnnnc

SEQ ID NO: 4904 - protein, 80 aa, Homo sapiens
MLCYFALSLRPASFHPWLLYLYQGLAVFCWLLCYQLGDKGESKCGEQWRTLICSHFRNVKLADTLFLTFFTFRMMRNKFV

SEQ ID NO: 4905 - DNA, 378 bp, Homo sapiens
  misc_feature (336)..(336): Wherein n may be a, c, g or t
  misc_feature (378)..(378): Wherein n may be a, c, g or t
tgatcagccccacctaaccacatacactgggtcagagtgggagcagttccctaaagtaaaatcaaagtgtcatttccagatgaagagtgaatgaatgatgggcaacagatgtccaactcaggtgcatcttctgatatccatggagttaagaaatcccaggaatccctactatccaaagccctccctctcactgtcaactctcctctttcccaggcaatcctgccagctctagttgcaaaatggaatgcatttccccatataaacagagttataaatgctggctaagcatagctaacatggtactatcggtagtacatatttcaaatacattaactntaaagagccttttgtgggaaagttttgagatttaaccataan

SEQ ID NO: 4906 - protein, 64 aa, Homo sapiens [sequence omitted]

SEQ ID NO: 4907 - DNA, 420 bp, Homo sapiens
ttaggtaaaattggtactaaaacatcttatcaaacaattcaagatgcagacttactaattatggctggtacaaactatccgtatgttaactatttacctaagaaaaacattaaagctattcaaatcgatacgaacgaagaaaatattggtgcacgctttaaaattaatgtaggtattttaggcgatagtaaagttgctttccatcaactaactgaaaacattaagcatgttgcaaaacgtccattcttagataagacattagaacgtaaagcagtttgggataaatggatgaaacaagatttgaataatgacaattcaccattacgtccagaacgtttaatgaaagcaatcaatgctaacttaaaagatgatgcaattatctcagcagatgttggtacatctacagtatggtctacgcgt

SEQ ID NO: 4908 - protein, 140 aa, Homo sapiens
LGKIGTKTSYQTIQDADLLIMAGTNYPYVNYLPKKNIKAIQIDTNEENIGARFKINVGILGDSKVAFHQLTENIKHVAKRPFLDKTLERKAVWDKWMKQDLNNDNSPLRPERLMKAINANLKDDAIISADVGTSTVWSTR

SEQ ID NO: 4909 - DNA, 221 bp, Homo sapiens
gacagcggcgcgccgaccggcatgtggcatatccgcgcgaacacaggcgataaccagagccggatgtgggacttccacgtggaagattttatgccggaacgaatggcgctgaacctcagagggcagaaaacgccattagcgcctgcggacaaggtcaatttctcggttaccggctattacctgtatggcgcgcgccacctgcacgcgttgtcttctctcct

SEQ ID NO: 4910 - protein, 73 aa, Homo sapiens
DSGAPTGMWHIRANTGDNQSRMWDFHVEDFMPERMALNLRGQKTPLAPADKVNFSVTGYYLYGARHLHALSSL

SEQ ID NO: 4911 - DNA, 434 bp, Homo sapiens
gctagctgtttaaaaaaattcaacacgaactagaacaactataaaggaaaacctaacagctaacattaaactctgctttaatcgggcaaatgtgggcagaaataaaaactagttcatatattatagtaagctttgaggaagtaaacaacaattgggggacatgttttctccaattaaaaaaaacaacgaaaattgctaaaaccaactgctttactttgaagtattttaaactttgttttcagggtgctagtttactgtcaacatagtttatcaaatgtttgagtaacattctaagtgaattgggaagatacttactgtgctgccctttccttaagaaaatgttattatttagtagttaccgaacgttctttaataatttatttaattccccttggggttgcttaattattaatttaacaagtattcgttacttc

SEQ ID NO: 4912 - protein, 58 aa, Homo sapiens
MWAEIKTSSYIIVSFEEVNNNWGTCFLQLKKTTKIAKTNCFTLKYFKLCFQGASLLST

SEQ ID NO: 4913 - DNA, 336 bp, Homo sapiens
tctagacaaggtaaccatatggcaaggaccgtcaaaagatgggtaaataaagaacgtgccaccacagccgatctgaaaaatgttaatattgatggagttcatggaccggtaaataccgaaagttatatatcaccaggacagctttactccactgactcgggcaatttatttcatgctggaagaatccttgtcgttctagtcgggcttccagcaacatcaaagacactgttgtcagtagcgattacaagatatacaagatgggtaggagttaggacgaaatcgttccatttttcagagtataaagaatcagctagaaatataccctcagactatttt

SEQ ID NO: 4914 - protein, 112 aa, Homo sapiens
SRQGNHMARTVKRWVNKERATTADLKNVNIDGVHGPVNTESYISPGQLYSTDSGNLFHAGRILVVLVGLPATSKTLLSVAITRYTRWVGVRTKSFHFSEYKESARNIPSDYF

SEQ ID NO: 4915 - DNA, 470 bp, Homo sapiens
tccggacacagcatctcaaggcctctgtcatatccaaatcctaccattccttcaagatctcttccatgaggcctttccaaaggacttcttctccttcctgatccattttggctcttatatatactgttaggtgggttcctctttgttttatcatctttgctgggttttttactagttactgaaagcattcactttctcaggtaccatacaacactcagcacagaacgcgcagtatcactgagcagcaaatacctatatacgaacccaatttctctatgtcataacccagtatattacaaattcggaaggaaacattccagaaggaaattcctggttaacccaatatatccatacttatgtatgtggcacatatacatgcacacacctaattaaaacaaaagttttgtaaaatactacttatctttactacacacaatgtaactgtatttacagctacctaattttctgga

SEQ ID NO: 4916 - protein, 62 aa, Homo sapiens
MLSVTSKKPSKDDKTKRNPPNSIYKSQNGSGRRRSPLERPHGRDLEGMVGFGYDRGLEMLCP

SEQ ID NO: 4917 - DNA, 312 bp, Homo sapiens
acgcgtgcagggtggaatagaacttcacctgcccgggggttgggggaggtgcatttgtcctgagactcacacctgcagcccctcacgtgggcgtaggtctggttactgcaacccacactcatgtcacgggctccactgggctgcagggttgagctcacagatcggcagtccacgtgcgtccggcatttcagaaggcgccggataccccagaccgtggaggcagaagacaccagcatgctcagtgtaaacagtttgaaaatgccacaacctgggctcagtgtaaacagtttgaaaatgccacagcctgggctt

SEQ ID NO: 4918 - protein, 78 aa, Homo sapiens [sequence omitted]

SEQ ID NO: 4919 - DNA, 392 bp, Homo sapiens
  misc_feature (335)..(335): Wherein n may be a, c, g or t
  misc_feature (392)..(392): Wherein n may be a, c, g or t
agatctggtaacccaatggtggtcacaggatagagactctgaagatactgagctggcttacacacttgctttgttgtctcgaacctctgttaaagctgaaagaagaagtcagtcttctgctgggcacactgttagtgtgtaattgtgaagagcttagctggagcttgctcttcacaacagtctctgatctcatcagccccattctgttttcaggggtggtacagaaggagcacctcaggagcctccaaagatagtagtagaatataaccaccaagacaagactgtgactgtggttttgaatcagatagaatcaccacctcctgcaaattttgttnttgctcagaacagtggttcttaaaatgtggtcctgaccaacatatcagcattactan

SEQ ID NO: 4920 - protein, 59 aa, Homo sapiens
MGLMRSETVVKSKLQLSSSQLHTNSVPSRRLTSSFSFNRGSRQQSKCVSQLSIFRVSIL

SEQ ID NO: 4921 - DNA, 305 bp, Homo sapiens
acgcgtgagggggtatgtgtgcaattatgtgtacatgtgtgtttttgtgcatttttgtgaagaaagtaaaatatatctttgaactatatgatgatttctgagtacttggccttcttttatgtaatgcaggagcttaaaggtgacaccataaacggggctaagatgattaacggaaaattgcattaagatgatttaagtctatcagaatttggttattggttatagaatattagtagcatttgattcaatacatattagtgtagttattgtacactggatttgggtggttgactcttacgatgaac

SEQ ID NO: 4922 - protein, 52 aa, Homo sapiens
MQFSVNHLSPVYGVTFKLLHYIKEGQVLRNHHIVQRYILLSSQKCTKTHMYT

SEQ ID NO: 4923 - DNA, 384 bp, Homo sapiens
ccatgagcacacttccacctctggccagaccgaatttactaagaaactgttggatgttgggtcaaactcgcgccagacgcagttacccgccaaaaaggacagctaaagtagccaatcagagggcagccttagataacgtacattttcttgccaccacaacatacagtcctgggcgaggtaaacatcagttttaaattaaggtgtttatgttgcggcactgtatggaatttgctttgttgttggtgtagtttgatgcaacgctgcgcacaaattgaatatccgcactctattggacacagccctgtcaatcagcatttctctacgagtagtagcatttcattggctctcttggtatctaatacagcgtgtttccttatacaattg

SEQ ID NO: 4924 - protein, 63 aa, Homo sapiens
MSTLPPLARPNLLRNCWMLGQTRARRSYPPKRTAKVANQRAALDNVHFLATTTYSPGRGKHQF

SEQ ID NO: 4925 - DNA, 260 bp, Homo sapiens
ccggaagcgcattttgactgggttcgtccaggcatcgtgctgtatggcgcgtcgccttccgggcagtggcaggacatcgccaacaccgggctgaagccggtcatgacgctgcgcagcgaaatcatcggcgtgcagaacctgcgccccggcgaggcgattggctatggcggcctgtaccgcaccacccaggagcagcggatcggcatcgtcgcctgcggctatgccgatggctatccgcgggtggcgccgagcgcacgccg

SEQ ID NO: 4926 - protein, 86 aa, Homo sapiens
PEAHFDWVRPGIVLYGASPSGQWQDIANTGLKPVMTLRSEIIGVQNLRPGEAIGYGGLYRTTQEQRIGIVACGYADGYPRVAPSAR

SEQ ID NO: 4927 - DNA, 281 bp, Homo sapiens
  misc_feature (244)..(244): Wherein n may be a, c, g or t
tgatcaagctgcatttttataagaaattctatgatctcatttcctgcatatgaatatttttatacttctcttcaagcagctaatgggattgacgttctgtaacatttacagaagatatgccatttgaatacttatcagccaccggtggttttcatctcatagatggaacctcttactcattccacaaatatttattaagcatagggtatggttcagatcctggggcaagagtacagggggcagnggagagccagatggactcccttctagcctggtgtaca

SEQ ID NO: 4928 - protein, 55 aa, Homo sapiens
  misc_feature (43)..(43): Wherein Xaa may be any naturally occuring amino acid
MPFEYLSATGGFHLIDGTSYSFHKYLLSIGYGSDPGARVQGAXESQMDSLLAWCT

SEQ ID NO: 4929 - DNA, 510 bp, Homo sapiens
  misc_feature (1)..(1): Wherein n may be a, c, g or t
  misc_feature (2)..(2): Wherein n may be a, c, g or t
nntccggactgcgaggcggagatccagcaggccctggccgcactggcccgaggccgaaccgtgctcgccatcggtcaccacgccgagtcggtggccggagccgacgtcatctgcgtcatggagaacggtggcatcgcagcttgcggttcgtccgaggaattggccgatcagccctattgggcgcgtctgtcggcagggcgagcgatggaaggagccacccgatgaccacgaccatgaactcccgcctttcctgggcgggcgacatcctgctcctgaacaccttcaggccccttctcaccgaggaaggggctgccaagttccgtcgctccctgtggctggcaggtcttcagggaaccctcgagggggttggcctgtttgccgtcatcccgacgatcacggcattcgtcgagggtggatcctcgatgggactgacctggcagggctgggtgtgggtgctcgccgccttggccgttgccggggccgtcgtgacgtacttccagtcgacgatcg

SEQ ID NO: 4930 - protein, 74 aa, Homo sapiens
  misc_feature (1)..(1): Wherein Xaa may be any naturally occuring amino acid
XPDCEAEIQQALAALARGRTVLAIGHHAESVAGADVICVMENGGIAACGSSEELADQPYWARLSAGRAMEGATR

SEQ ID NO: 4931 - DNA, 339 bp, Homo sapiens
acgcgtcacagcaggcacgcaatcaaacagcaaaccccgctgatcaaacttcgcattctcaaactggttcaccgaaacagtcatccgagcccacgacaacaccggcaacaacttatcggcaaacacgtgaaaccgcacctgaaaatccttaatatagcggccacgaccctcatcatcggtcataaacaaaccaggcggaaaccgccaagcattatcccccaacacctgcttagcaaccgactccgccgcacccgaatagtgggcataatccctgtcggcacgccactccataccaaccaaaccaggacgataattcacaggccacatcagcatacgcca

SEQ ID NO: 4932 - protein, 111 aa, Homo sapiens
MLMWPVNYRPGLVGMEWRADRDYAHYSGAAESVAKQVLGDNAWRFPPGLFMTDDEGRGRYIKDFQVRFHVFADKLLPVLSWARMTVSVNQFENAKFDQRGLLFDCVPAVTR

SEQ ID NO: 4933 - DNA, 279 bp, Homo sapiens
  misc_feature (1)..(1): Wherein n may be a, c, g or t
  misc_feature (2)..(2): Wherein n may be a, c, g or t
nntccggatgagcacctcgtagtgcggtacctggactttttgttgtctgtcaatgacgatgccaatgctcgtgcagtcttggagcggacggtgagcagtttgccgcctgagcgagcgcgaattgtgtgggatcgctgggcaacgtacgaatacaactatggtgatgctagtggtatagcgcgtctcgagactcgcatgtctgacctgtaccctggtcgcccagcggtccaaagcgcggctcacaaattgcagtatcgcactctggactgggtcccggca

SEQ ID NO: 4934 - protein, 93 aa, Homo sapiens
  misc_feature (1)..(1): Wherein Xaa may be any naturally occuring amino acid
XPDEHLVVRYLDFLLSVNDDANARAVLERTVSSLPPERARIVWDRWATYEYNYGDASGIARLETRMSDLYPGRPAVQSAAHKLQYRTLDWVPA

SEQ ID NO: 4935 - DNA, 267 bp, Homo sapiens
gctagccggagtaaattcacaagccgtgtcgtcgactatttgtctcgaaatcccgcacccatgcggcaccgtcaaagtgagctggccaaccgaaaacgccgcaacctgtgccaccttttttgcaagatctgctgcgatgatccgcatcaataccatctggctcgccaccgagccgatggacatgcgcgccggcaccgacaccgccatggcccgcgtgatttcagtgttcggtgcggcgcagccgcactgcgcttatctgttcgccaa

SEQ ID NO: 4936 - protein, 69 aa, Homo sapiens
MRHRQSELANRKRRNLCHLFCKICCDDPHQYHLARHRADGHARRHRHRHGPRDFSVRCGAAALRLSVRQ

SEQ ID NO: 4937 - DNA, 376 bp, Homo sapiens
  misc_feature (1)..(1): Wherein n may be a, c, g or t
  misc_feature (288)..(288): Wherein n may be a, c, g or t
nctgtgtttgtgtacctgtcattttccctaaggcaaaagctaagtttgattgctttgaatctgcttcagtagctagcattctgtcttaagttgagtctagtgggatcactgccttcatcaccatcacagcagctactatttactaagtacctcatataggtaaagaatggtctaacgtccaacatatacaatgggatgcctgatgaaaaatatttcctttcaaaacatgttcacctcttctctgactagagctggagagtcagcagatacctggctctggtgcagatnttgtttttgtatttttggcccatttgttttttccttttgttttttttttttttttggagggggaaggggaaataattcaattgctttt

SEQ ID NO: 4938 - protein, 62 aa, Homo sapiens
  misc_feature (33)..(33): Wherein Xaa may be any naturally occuring amino acid
MGCLMKNISFQNMFTSSLTRAGESADTWLWCRXCFCIFGPFVFSFCFFFFFGGGRGNNSIAF

SEQ ID NO: 4939 - DNA, 303 bp, Homo sapiens
  misc_feature (1)..(1): Wherein n may be a, c, g or t
  misc_feature (235)..(235): Wherein n may be a, c, g or t
ncccgtgaagaatggtctttttctcgtctggtttattgatgtgtgcggtgatggcgtctacgagttcctggggaagacgcatcgccggtcgagcatgggatttgagatagactggagctgaaatgagctctgagtatagtcgctagggtgtcttgcttaggaaacctacattcagagagcccggaggagggacagcctcccgcgtgaagtggacgcaagtgccagagatgaagtnggttaccgaacaccgaccgccggtgtatgcccgtattgaccatcaacgccacgctctgccgtaagctt

SEQ ID NO: 4940 - protein, 81 aa, Homo sapiens
  misc_feature (15)..(15): Wherein Xaa may be any naturally occuring amino acid
MVNTGIHRRSVFGNXLHLWHLRPLHAGGCPSSGLSECRFPKQDTLATILRAHFSSSLSQIPCSTGDASSPGTRRRHHRTHQ

SEQ ID NO: 4941 - DNA, 387 bp, Homo sapiens
gtgcacatttatggtatcagtcaacctatatatttattcttcaacctatgactgaataactacatgctactaccataccaacaatggaagaaagaaatgaaagatggaaatgttgcctccgaagagtcagtctaggaaaggatagtgatgagtcaagtgttatgttatacttctacagtattatgacagaagtatatacagaatttaaggaggcagaggacagacatccagcccagactgcagagtgggaagaaggcatgaaggtactgagagaacgaggtacaagttgctatgatggagcacagggtacatccagtggaagcatggtgggaaataagattggtagagaaagccatgactggattacagaagatcgctgcatggatt

SEQ ID NO: 4942 - protein, 101 aa, Homo sapiens [sequence omitted]

SEQ ID NO: 4943 - DNA, 517 bp, Homo sapiens
gctagcacgcacacctgggcaatcctcttcttcttcgccctcatcgtcgttatacggcatagcgccttgggtgcgctcctcagcttggtgctggtcatgacgatcatcatgtgggtcgttcaaagacagaaggcccaggccaaacgagtcaaaaacggcgagcaccacgagtccacctcggacaagcaaaatctggggaacctgaaccccaaccccacagacgacaagaaggtcattgaacgtagacctcgatcatcagcaaacagggccgacagcttctccgcctctccggacaagggccctgttcgggggttcctttcgctgctttgaaccgatgcgttgcccaagcaacgttaatgaagcccggtaagcacattgaaccccgcgcaacctcagcaacatcacccatccccggaactagggtcttcgcagcatcatgcttatgcaccgcgcccctcccatcagcctccggattccgtgagttttcacgaccccgaatccctccggcctgagatct

SEQ ID NO: 4944 - protein, 77 aa, Homo sapiens
MTIIMWVVQRQKAQAKRVKNGEHHESTSDKQNLGNLNPNPTDDKKVIERRPRSSANRADSFSASPDKGPVRGFLSLL

SEQ ID NO: 4945 - DNA, 323 bp, Homo sapiens
gtcgacgatttctcgcgcaggctgatggacgccaccgccgacgagctgcgcggcgagcgcgatgcggtgaaggccctgctgggctgatcgtcttccccgggcgcatcgccgcccggggatcgtttccgggctgcgcccggggggtcgcttccgggccgccagccgctgcgctagactgggcgcaaagcatcaggatgcggaccgccatgaccctcgttgccggctcggacgcccacaaggcgctgttctgccgccagttcatcgacacccatgagctgtacgaccccgacaccctgccctggccgggagctgaccggcggagg

SEQ ID NO: 4946 - protein, 87 aa, Homo sapiens
MNWRQNSALWASEPATRVMAVRILMLCAQSSAAAGGPEATPRAQPGNDPRAAMRPGKTISPAGPSPHRARRAARRRWRPSACARNRR

SEQ ID NO: 4947 - DNA, 441 bp, Homo sapiens
cctagggacactggcaaaaactaatgtgcaaagaaatgagtcatataggggaaatcaatttctctgggctacaacttccaactccctttactccagtacccagaatcctctcccaggtggtgcttcaagctgctcaggagtgctttagggttcatcgcaaaacaaaagggagtgatgaacacaggctctataaagttcatcagaaggaacagaactgtgggaagatgagacttgagaaacgtgagacagcagaaaatactttaagccacatgagttcagaggaaaggttggagtaacagtttatagttacttcaacagatgatgtgaacctcactttcacaggaccaaagaattagtccagcactcggagagtggtcaggtcagtggttctgagccctggctgtgcactggaatggctagcgaaatggatcctgggccttg

SEQ ID NO: 4948 - protein, 90 aa, Homo sapiens [sequence omitted]

SEQ ID NO: 4949 - DNA, 404 bp, Homo sapiens
  misc_feature (1)..(1): Wherein n may be a, c, g or t
nacgcgtacgcggactcgacggcagtggtcggcccgcttgcgcccgcgcccgacccccacgcctgggacttgtgcgagcgccactccgcccacatcacagcgccggtggggtgggagctggttcgcgtcgagcacgtcgagcttgacgacgaagacgtggacgacgagaacaccgacatcaccgcactcgcggaggcgggtgcgcgaggcggggcgggtaaccaccggtttggtggagaccggccaggatccgatcgagtactcggcagacaaagacttcaacaacccagacacctccaaccatccggtgcaccggaccaagcgtgtggaggaacagctagcggcgcacaaggcggcgcgccgctcccacctgcgcattgtcccggatccgaaccgggacgcgt

SEQ ID NO: 4950 - protein, 134 aa, Homo sapiens
  misc_feature (1)..(1): Wherein Xaa may be any naturally occuring amino acid
XAYADSTAVVGPLAPAPDPHAWDLCERHSAHITAPVGWELVRVEHVELDDEDVDDENTDITALAEAGARGGAGNHRFGGDRPGSDRVLGRQRLQQPRHLQPSGAPDQACGGTASGAQGGAPLPPAHCPGSEPGR

SEQ ID NO: 4951 - DNA, 256 bp, Homo sapiens
  misc_feature (256)..(256): Wherein n may be a, c, g or t
acgcgtgactacaaagaggccatcgccaatttcaagacgctgttgagcgtggcttccgactctccacgtgcgcctgaggccgcgttgtcgattgccaactgccagaccgagttgaaggacaccaaggccgcccgcaagacgctggaagacctggtcaaggtgtacccgcagtccgaggccgcgaccgcggcacgcgaccgcattgcccgcatgaagtgaccctgtgacggatgtgctggtgggcctggagcccgan

SEQ ID NO: 4952 - protein, 67 aa, Homo sapiens
MRAMRSRAAVAASDCGYTLTRSSSVLRAALVSFNSVWQLAIDNAASGARGESEATLNSVLKLAMASL

SEQ ID NO: 4953 - DNA, 252 bp, Homo sapiens
attcacgctgttctatccgcagatgccaacattacttcaaacgaaaaggctaaacaaggtttggatgatattgctactttgatgaagtataccgaagcatttgacattgactcattcatctcttttgatctttctcttgcaagaggtttggattactatacaggtttgatctatgaagttgttacttctgcatctgctccaccagagaatgcttcagaattgaagaagaaggccaaatctgcagaagacgcg

SEQ ID NO: 4954 - protein, 84 aa, Homo sapiens
IHAVLSADANITSNEKAKQGLDDIATLMKYTEAFDIDSFISFDLSLARGLDYYTGLIYEVVTSASAPPENASELKKKAKSAEDA

SEQ ID NO: 4955 - DNA, 254 bp, Homo sapiens
tgtacaaatagacatttaatatgggaattccattttcccttaaaatgaagaaaacttacaagtgcaatagcctattaattgcttacacgcatactttcaatgaacaaacacgaacaatttttgtatcttttttcctataccccagtaatttttgcaatataacttcctgtttgctaaaaattacaacttttattttatatgtctttttcaaaaattgcatttttctggtaattcacttttattaatttttacga

SEQ ID NO: 4956 - protein, 74 aa, Homo sapiens [sequence omitted]

SEQ ID NO: 4957 - DNA, 465 bp, Homo sapiens
  misc_feature (1)..(1): Wherein n may be a, c, g or t
nggctttcgacaaatcttaaattgtgactttgtgcatgaaatttttatatgaacgttttaaataagtggacatagtccttcattcggtatatgcagatccggcatcaaacactttttcaagaaagtttgagtcaaaaggattaaaggataaagtaaaacaacaataacatctccgtgaagcattgagggaagggtttaactccaacaatgtcactgaacaacataacattctgtgtctcacaggatctggatgttcccctgaaagtgaaaatcaagtcattggaaggacataagccactgttgaagccatctcaaaaaatcctgaaccctgaattaatgctgatagggtcaaatgtattcccttctagtgatctaattgtatccttacaggtatttgataaagagagaaacagaaatttaactcttccgatatacacgccgtatattcctttcagaaactctaga

SEQ ID NO: 4958 - protein, 86 aa, Homo sapiens
MSLNNITFCVSQDLDVPLKVKIKSLEGHKPLLKPSQKILNPELMLIGSNVFPSSDLIVSLQVFDKERNRNLTLPIYTPYIPFRNSR

SEQ ID NO: 4959 - DNA, 248 bp, Homo sapiens
tccggaggggaggcagacaggaacacaggctcaaagtgatgcaatgtgagaagtattgggacagggctgaaaacctaacccagcacgaagggctcaggagcgcttccaggaggaagtgacccaccagctgagctctgaaaaatgactgatagtcactgtgtcttgtggaagtttgaaaaccaaagacacttctgctaggtaacatccactcagcattgtagagacccagccgtttaactttccaggtt

SEQ ID NO: 4960 - protein, 68 aa, Homo sapiens
MLPSRSVFGFQTSTRHSDYQSFFRAQLVGHFLLEALLSPSCWVRFSALSQYFSHCITLSLCSCLPPLR

SEQ ID NO: 4961 - DNA, 425 bp, Homo sapiens
aaatttcagcagccgggcctgaaccgccgccgggttggccttgaggtcgcgcgaacaccaccacttcgcagcggtctcggccgatcacattgaagaagcgctggacatgttttccgagccgagcagcttcgtcgtagatgagctggcgtgaatcaacacaggtacgcggcaccttccgtccgacgcgccgctgctcgatcagcttccacgcgacttccggatcctgaaccgtctcgtcgccttggtagagcaggcgctggtggagagacgggatcaactccaggggatcgcgcacggcgatgatgaacttggcatccggccacaggcgaacagtcgggaagcatccgcttcgggggcgtaaagataggataccgaggcttccgccatcaccgtcgtgttcggatcaatctcggggaagtagcgtt

SEQ ID NO: 4962 - protein, 63 aa, Homo sapiens
MLPDCSPVAGCQVHHRRARSPGVDPVSPPAPALPRRRDGSGSGSRVEADRAAARRTEGAAYLC

SEQ ID NO: 4963 - DNA, 259 bp, Homo sapiens
gtgcactttggtccccagcagaagtagtggcatttgagttgggtgacagtagagcctgtcctcagagtgtgtgtgcagcatcactgctgctggggtgggtttggattgctttctgtggtagtaatcccaggtgggtggttctctgagtccaggaagtatgtgatttggctccctttgtcccagaggtagcctcccagcacactgtaccatccattccccatggtgcaggacactgtgtttgctagagtcctggggatcc

SEQ ID NO: 4964 - protein, 70 aa, Homo sapiens
MVQCAGRLPLGQREPNHILPGLREPPTWDYYHRKQSKPTPAAVMLHTHSEDRLYCHPTQMPLLLLGTKVH

SEQ ID NO: 4965 - DNA, 247 bp, Homo sapiens
tccggatcttcccgcagcaggcgcaatgcttcagcgatctggtcgaacttcttgtggtagaccgctaccttttcggtctcagtagccgggtcgatcagattgcccatgaacgcataaccgcgctccagcaggataccagaggttaccccatcctcgatcgggaccatccgcgtgtcttcccagaaacgccactgcaccccatacaccgggcccaggtcagcatcttccagcaactgggtaggtgcac

SEQ ID NO: 4966 - protein, 55 aa, Homo sapiens
MVPIEDGVTSGILLERGYAFMGNLIDPATETEKVAVYHKKFDQIAEALRLLREDP

SEQ ID NO: 4967 - DNA, 291 bp, Homo sapiens
  misc_feature (1)..(1): Wherein n may be a, c, g or t
nttttcaacattcttctcagcctggccatgcatattgcaggcttcatcctggttcagaggcagccttggtattccggggagatacacaatggccgcaccaaccaaaagaaaaccatctcaaagttaaccatgtctccaactgctccagaaaaaatggaaagtaatagcaccttcacaagttttgagaacactacagtctggttcttgggaacaatcaactgtatcactgtggctcttgtgttctctaaaggaaaaccatttagacagccaacttatacaaactatatattt

SEQ ID NO: 4968 - protein, 88 aa, Homo sapiens
MHIAGFILVQRQPWYSGEIHNGRTNQKKTISKLTMSPTAPEKMESNSTFTSFENTTVWFLGTINCITVALVFSKGKPFRQPTYTNYIF

SEQ ID NO: 4969 - DNA, 275 bp, Homo sapiens
ctggcgcagatcgatgcgcagttcgcagcgctggcaggcgagctcggtgtgcagatcgagacgatccagtcgaaccacgaaggcgcgctggtggacttcctgcaccagcatatcgacgatgcgcagggggccctggtcaacccggcagggctcacccagcacggcgtgccgctgcacgatgccatcaaggcgatgccgttcccggtcatcgaggtgcacatgtccaacatcgccgcgcgcgagagctggcgcgtgcattcgatcatttcgccggc

SEQ ID NO: 4970 - protein, 91 aa, Homo sapiens
LAQIDAQFAALAGELGVQIETIQSNHEGALVDFLHQHIDDAQGALVNPAGLTQHGVPLHDAIKAMPFPVIEVHMSNIAARESWRVHSIISP

SEQ ID NO: 4971 - DNA, 288 bp, Homo sapiens
gaattcgtcgttgaacagacgaagaagtccattgagggcatcaagaatatcgaagatgctgtcattgcctacgagcccgtgtgggctattggtaccggcaaggttgcgacgccggaggatgctcaggaagtgtgcgccgcgatccgtgaggtcgtaggcgagaacgtccgcattctctacggcggctccatgaaggctgagacggccgcagacctcatcgcgcagaaggatgtcgacggcggtctcgtcggcggcgcttccgtccacggtgaggactttgcaaagctt

SEQ ID NO: 4972 - protein, 96 aa, Homo sapiens
EFVVEQTKKSIEGIKNIEDAVIAYEPVWAIGTGKVATPEDAQEVCAAIREVVGENVRILYGGSMKAETAADLIAQKDVDGGLVGGASVHGEDFAKL

SEQ ID NO: 4973 - DNA, 281 bp, Homo sapiens
  misc_feature (1)..(1): Wherein n may be a, c, g or t
naagcttacgaagttggagatactattcgctgtgaagtgacccctaaggacttcggccgtattgctacgcagacagccaaacacgtgattcttcaaagactgagagaagctgaacgtaatatagtatatgacgagtacattcaatatgaggatgaaatccttactggaacagttgtacgtcaagataaccgcttcacctatattaatctagggaaggtagaagcagtaatgcctattcgtgaacagattcccaatgaagaattagcgatggatcaacgcgt

SEQ ID NO: 4974 - protein, 93 aa, Homo sapiens
  misc_feature (1)..(1): Wherein Xaa may be any naturally occuring amino acid
XAYEVGDTIRCEVTPKDFGRIATQTAKHVILQRLREAERNIVYDEYIQYEDEILTGTVVRQDNRFTYINLGKVEAVMPIREQIPNEELAMDQR

SEQ ID NO: 4975 - DNA, 229 bp, Homo sapiens
  misc_feature (1)..(1): Wherein n may be a, c, g or t
  misc_feature (2)..(2): Wherein n may be a, c, g or t
nnacgcgttgcccgcatcgacgaccaggacggtcgcgccgaagtcagcggattcgcgccgctggcgcagctggtcgggtatacgacttcgctgcgctcgctgacccagggacgggccagcagcgaatcgcacctgcatggctacgagccggtgcgtgcagcgtaaggtggatgcagggagcccgttcgcgggctcccttttttgtgttggcgaggggtcatccacgcgt

SEQ ID NO: 4976 - protein, 54 aa, Homo sapiens
  misc_feature (1)..(1): Wherein Xaa may be any naturally occuring amino acid
XRVARIDDQDGRAEVSGFAPLAQLVGYTTSLRSLTQGRASSESHLHGYEPVRAA

SEQ ID NO: 4977 - DNA, 438 bp, Homo sapiens
  misc_feature (37)..(37): Wherein n may be a, c, g or t
  misc_feature (113)..(113): Wherein n may be a, c, g or t
  misc_feature (280)..(280): Wherein n may be a, c, g or t
  misc_feature (287)..(287): Wherein n may be a, c, g or t
  misc_feature (288)..(288): Wherein n may be a, c, g or t
  misc_feature (300)..(300): Wherein n may be a, c, g or t
  misc_feature (307)..(307): Wherein n may be a, c, g or t
  misc_feature (316)..(316): Wherein n may be a, c, g or t
  misc_feature (323)..(323): Wherein n may be a, c, g or t
  misc_feature (332)..(332): Wherein n may be a, c, g or t
  misc_feature (335)..(335): Wherein n may be a, c, g or t
  misc_feature (345)..(345): Wherein n may be a, c, g or t
  misc_feature (362)..(362): Wherein n may be a, c, g or t
  misc_feature (363)..(363): Wherein n may be a, c, g or t
  misc_feature (423)..(423): Wherein n may be a, c, g or t
  misc_feature (424)..(424): Wherein n may be a, c, g or t
  misc_feature (437)..(437): Wherein n may be a, c, g or t
agatcttgaatttatgaccaggcctgtctcactctanagtccttgtatgctctaccatgagacttccctcgggcggagcaggaatctgaaccctgcagggctcattattttanagtcctggagttttttttcccctattgtgtcaatgcctgcaagtttctgtcacttgctggagttggagaatgggaagtgctggttagtcaagtagttccgtttctaaagggtctcatgatatgcgaatgaatggttttcagataatttgaatgaaataatatacatntgacatnntaattggcatgntacacanacttatgtntgagatnttgaagganatntcacatcttnaatgcccacaatcactnnattataatatagtctcacgatggagactgagtacagtctagtgttatggggcacccttgnntgggactctctgna

SEQ ID NO: 4978 - protein, 64 aa, Homo sapiens
  misc_feature (8)..(8): Wherein Xaa may be any naturally occuring amino acid
  misc_feature (34)..(34): Wherein Xaa may be any naturally occuring amino acid
MTRPVSLXSPCMLYHETSLGRSRNLNPAGLIILXSWSFFSPIVSMPASFCHLLELENGKCWLVK

SEQ ID NO: 4979 - DNA, 388 bp, Homo sapiens
ggatccaggtatgctaaatattggatgctgataccagtactatttatttcctcttctcttgtctatttctctctgtgtatcaactccattcacttctattcgaaatctcctttgtccattctggtgtttctaggcttatatcttcacagattgaaggcaatgcatgacaagggccttccttgctagctctggttacttggtagaaaaagtccctaagaaatactccaatgggctcagaatgagtgtttcattctgaggagctaccctttaatggtaaaaccagaacttaagtacaggatactgaagagtagacaacactaaaagaaactgcataaaaactccagttagcttaaacagctttcacttaagtatttcctttaacaagctt

SEQ ID NO: 4980 - protein, 53 aa, Homo sapiens
MLIPVLFISSSLVYFSLCINSIHFYSKSPLSILVFLGLYLHRLKAMHDKGLPC

SEQ ID NO: 4981 - DNA, 171 bp, Homo sapiens
ccggataacagtgccaatagggtgtttttccatcgtggggagctgtgtattattcctgtgccgaggaaatccgaaaggataccctggttacccacgacgcccccaacgatccagcaagcgttgagtataatctcagcacacccagaagctattctggcttcagaatctgta

SEQ ID NO: 4982 - protein, 57 aa, Homo sapiens
PDNSANRVFFHRGELCIIPVPRKSERIPWLPTTPPTIQQALSIISAHPEAILASESV

SEQ ID NO: 4983 - DNA, 264 bp, Homo sapiens
  misc_feature (1)..(1): Wherein n may be a, c, g or t
nagatctgcgcggtcgaggggctggagccgtggcacgaccccagcaacgacgatccgggtttcacccggtcccggatccggcatcgggtgttgccgttcttggaggccgagctcggcccgggaatcgcccagtcgctctaccggtcggcgagcatcctggcccaggacgcggatttcctcgaccagttggccggccgggaatttacccggatcgccgaagtcggcaccgaccgggtactgctcgcggaggccgagctgaacgcg

SEQ ID NO: 4984 - protein, 88 aa, Homo sapiens
  misc_feature (1)..(1): Wherein Xaa may be any naturally occuring amino acid
XICAVEGLEPWHDPSNDDPGFTRSRIRHRVLPFLEAELGPGIAQSLYRSASILAQDADFLDQLAGREFTRIAEVGTDRVLLAEAELNA

SEQ ID NO: 4985 - DNA, 361 bp, Homo sapiens
  misc_feature (1)..(1): Wherein n may be a, c, g or t
  misc_feature (114)..(114): Wherein n may be a, c, g or t
  misc_feature (203)..(203): Wherein n may be a, c, g or t
  misc_feature (206)..(206): Wherein n may be a, c, g or t
  misc_feature (333)..(333): Wherein n may be a, c, g or t
  misc_feature (357)..(357): Wherein n may be a, c, g or t
  misc_feature (361)..(361): Wherein n may be a, c, g or t
ntcgcgccatcctcgctgattcgggtaagtatggtcgagtcgcgaaacggaaccagaaacgcacgattactgccgcgactgaggctgcgctggcacaacaccgtattgccgctngagaagggggtcctgagctcgtcaagcgtcgcgaccagctttctgaatggctgcgatcgcgacccgacaagctaggacaactaccgttnatnccgcaattcccgccgatacaaccaccggcaacatggtaagccccgacgggtgtgggctccgacgatccttacagtgataatccttgtagcgccgggattccgttttctgattaataataatctcgancatcaacccctaggcccaatcctntacn

SEQ ID NO: 4986 - protein, 66 aa, Homo sapiens
  misc_feature (2)..(2): Wherein Xaa may be any naturally occuring amino acid
  misc_feature (44)..(44): Wherein Xaa may be any naturally occuring amino acid
  misc_feature (45)..(45): Wherein Xaa may be any naturally occuring amino acid
MXEIIINQKTESRRYKDYHCKDRRSPHPSGLTMLPVVVSAGIAXXTVVVLACRVAIAAIQKAGRDA

SEQ ID NO: 4987 - DNA, 327 bp, Homo sapiens
ccggactcaacaagtacaatattaatatctgaagacccccttgtaacaggctcgtccccaacctcatctacaacatcaggtataataagttcaaatgatttccctttgttcaacaaaaataggaaagacgccaagagcagcatatcctaccaatggaaaaatccttcagaattagagtttgaccctttcaataaatcgcatgcctcagcagtaacctcgatgacaagaactagagacgttatgcaattatggtctctgttagaagcatgcttgcaatcgaatctaatgaaaagagcgttctctatattggagtcactgtacctggta

SEQ ID NO: 4988 - protein, 109 aa, Homo sapiens
PDSTSTILISEDPLVTGSSPTSSTTSGIISSNDFPLFNKNRKDAKSSISYQWKNPSELEFDPFNKSHASAVTSMTRTRDVMQLWSLLEACLQSNLMKRAFSILESLYLV

SEQ ID NO: 4989 - DNA, 357 bp, Homo sapiens
gatcataagcctgacaggaaggatgaacgagcgaggattgaggccctggggggaaaggtcatccaatggaatggctaccgggtctccggtatacttgctatgtcaagatcgattggggaccggtatctgaagccgttcgtcgttccaaaaccagaggtcacggtggttcccagggcgaaagatgacgactgtctcatcctcgcaagcgatgggctgtgggatgtggtgacgaacgaggaggcgtgcaaagctgcgcgccggcaaatccaagtgtggcacaagaacaacggtgccgctggcgcatcgtggtcgttgtgcgacgagggtgatggatccaccaccgaccccggtgcccaa

SEQ ID NO: 4990 - protein, 119 aa, Homo sapiens
DHKPDRKDERARIEALGGKVIQWNGYRVSGILAMSRSIGDRYLKPFVVPKPEVTVVPRAKDDDCLILASDGLWDVVTNEEACKAARRQIQVWHKNNGAAGASWSLCDEGDGSTTDPGAQ

SEQ ID NO: 4991 - DNA, 279 bp, Homo sapiens
  misc_feature (1)..(1): Wherein n may be a, c, g or t
  misc_feature (2)..(2): Wherein n may be a, c, g or t
nnacgcgttgggatatatgttccaggtggtaaagcaagctatccttctactgttctaatgacggctacacttgcacaagtcgcgaacgttgaagagattgttgttgtgacacctccaaaaacaaatggcgtttctaaagaagttttagctgcctgtcacttaactggcgtaaatcatgtctatcaagttggaggtgcacaaagtatagcggcgcttacatatggtacagaaactattaaacctgttgataaaatagttgggccagggaatcagtttgat

SEQ ID NO: 4992 - protein, 93 aa, Homo sapiens
  misc_feature (1)..(1): Wherein Xaa may be any naturally occuring amino acid
XRVGIYVPGGKASYPSTVLMTATLAQVANVEEIVVVTPPKTNGVSKEVLAACHLTGVNHVYQVGGAQSIAALTYGTETIKPVDKIVGPGNQFD

SEQ ID NO: 4993 - DNA, 350 bp, Homo sapiens
gctagcaagcggtgcctctaagctcagcactgcactgatgattttattagctcacaaactccccaaggtaatacagccagtttatagatgagaaaatcaagggtcagatgggaaagtcacagactccaagatcacgcaggtagcagtgtctgcacccaaggcctgagcactttgttctcagagaacaaaggaggtctcccctctgtcctgaagcctcctgaggacaaggaggttggctgtggccccactggaggctggacccacctgggcagaatcgtggtgcggaggcgccctctgctggcagcagggaaaagaccagcaaaaggagccttcctttcctccctttgctt

SEQ ID NO: 4994 - protein, 87 aa, Homo sapiens
MRKSRVRWESHRLQDHAGSSVCTQGLSTLFSENKGGLPSVLKPPEDKEVGCGPTGGWTHLGRIVVRRRPLLAAGKRPAKGAFLSSLC

SEQ ID NO: 4995 - DNA, 320 bp, Homo sapiens
ctcgagtaatggactgctgtgattggtcagccttgggtcgcctgcccatttggagccagggagggaagtagttcttgcccacagagactcaggtaggagtagggtggttcccaaaaggcaaaaaggaggggctgttgtcgggggaagaggcggccataggcagcaaaaatggggctgagcccctttgcccccaagtagcttcccacttcgtccccacattgcctttcactgtctctggctgttacagtattagagattattttgtttggctgactattctgtttaccaaggcctcttggagaggtaatagctttaccacc

SEQ ID NO: 4996 - protein, 73 aa, Homo sapiens [sequence omitted]

SEQ ID NO: 4997 - DNA, 264 bp, Homo sapiens
  misc_feature (264)..(264): Wherein n may be a, c, g or t
caattggtctggattttgctaatcaccagcccagtggattcacctttatctcattctgtcttggtgaggaaagatggttgtgagaagaaagcccgacattctgtttcactagctaacccctcatctttcttttcctcgttaaaccacaaagaccccgaccttccagcccccttgataggggctttatattgcctactgtgaactctaagaggtggagttttgttatccctatctgatgacatgggaactcttcatttctagagn

SEQ ID NO: 4998 - protein, 63 aa, Homo sapiens
MSSDRDNKTPPLRVHSRQYKAPIKGAGRSGSLWFNEEKKDEGLASETECRAFFSQPSFLTKTE

SEQ ID NO: 4999 - DNA, 333 bp, Homo sapiens
atttcgcaagagacgcaaaaggttgatttggaagatttaccgttacctgctactagggcattcattcatccaagttcagtcttattttcaaccaattcagtaaacttggaagacgctaagttactctctgaggtggatggtccaatatcccgtcaatccaaaataccaaccgttgtaaaatacccatttgttttgtttaccacgtctcaagttactaataagttgtatttgagggacttaaccccaactactacattatcattactattattcggaggggcaatctcttatgacattggaggtactattcattcaccgggcatcgttgtcgac

SEQ ID NO: 5000 - protein, 111 aa, Homo sapiens
ISQETQKVDLEDLPLPATRAFIHPSSVLFSTNSVNLEDAKLLSEVDGPISRQSKIPTVVKYPFVLFTTSQVTNKLYLRDLTPTTTLSLLLFGGAISYDIGGTIHSPGIVVD

SEQ ID NO: 5001 - DNA, 327 bp, Homo sapiens
gcgttctttaaggacctgggcgtcaccgtccaggccgtcatgaccgataacggggcctgctaccgctcacggacctttaaccaggtcctgtccgcagccggcgtcaaggaccgctacacccgcccctaccggccccagaccaacggcaaggtcgagcgctttaaccgcacactctggcccgagtgggcctacgcccacacctacaccagccagacccagcgcgaggccgcctaccagacctggctccaccactacaaccaccaccgaccccacaccgccctggacgggcaaacccccgccaaccgcattcacaaccttccagggagg

SEQ ID NO: 5002 - protein, 109 aa, Homo sapiens
AFFKDLGVTVQAVMTDNGACYRSRTFNQVLSAAGVKDRYTRPYRPQTNGKVERFNRTLWPEWAYAHTYTSQTQREAAYQTWLHHYNHHRPHTALDGQTPANRIHNLPGR

SEQ ID NO: 5003 - DNA, 308 bp, Homo sapiens
acgcgtgcagttgatgcatctggcgaatccacggcaggcgtgccaccgggtggtgagcgggcaggtgttcgcaggcatggaacacttcatagagcaggtagccgaggatcatgcagccggcaaacagcccggccacattcgggctcaactgcttgagcagccaccacgccggggaggctgatgatcaggctgtgcagcacgatcaaccaggcgggaaacagaattacgcgccagtccttggggctgtcgtaggtcatgtggccgggggtgaagaagctgtgatgatcaccggtgtggcgtgcgttaaa

SEQ ID NO: 5004 - protein, 66 aa, Homo sapiens
MQPANSPATFGLNCLSSHHAGEADDQAVQHDQPGGKQNYAPVLGAVVGHVAGGEEAVMITGVACVK

SEQ ID NO: 5005 - DNA, 195 bp, Homo sapiens
gctttgaaagaagcgattaaagatgcgcactttattggtattcgttcgcgtactcaattgactgaagaaatctttgaagcagcgaataaattgattgcggtaggttgtttctgtattggtactaaccaagttgatttaaaagcagcaatgtctcggggtattcctgttttcaacgcaccgtattcgaatacgcgt

SEQ ID NO: 5006 - protein, 65 aa, Homo sapiens
ALKEAIKDAHFIGIRSRTQLTEEIFEAANKLIAVGCFCIGTNQVDLKAAMSRGIPVFNAPYSNTR

SEQ ID NO: 5007 - DNA, 398 bp, Homo sapiens
  misc_feature (1)..(1): Wherein n may be a, c, g or t
ntgacgggcaaggggcttgtgggacatgtgccggaagtcggcccgatctcatcgaaggtccagctcattctcgatgtccgttcctcggtggggacgctcattcagcgtccggagtctcgtgtggcgggaatcgttacgggaacgatggacaatccgtatatgccgcagatggttaatatcccacgcaatgcggatgtagaggacggtgacgtcattgttacatccggcttcggcggaatctatcccaaagggattgtcgtggggcgtgtctcctcacagcacggcgatgacagcggattgctcaaagtagccgtggtcgagactgctgtggacttccagcgtctcgaggatgtagcgatcattacggcgtcacgtgaagcaccgccggatcctgtaca

SEQ ID NO: 5008 - protein, 132 aa, Homo sapiens
  misc_feature (1)..(1): Wherein Xaa may be any naturally occuring amino acid
XTGKGLVGHVPEVGPISSKVQLILDVRSSVGTLIQRPESRVAGIVTGTMDNPYMPQMVNIPRNADVEDGDVIVTSGFGGIYPKGIVVGRVSSQHGDDSGLLKVAVVETAVDFQRLEDVAIITASREAPPDPV

SEQ ID NO: 5009 - DNA, 515 bp, Homo sapiens
gaattcaaaccacacctactgttttgttgggacatgtctaaatgcacattcaccggacataaaacactggagaataagcacaagccattagtgctgaaggaattgagaaaactatggaactggaagaacaagatcttccatgggaagtggggggactattcaccttcgaatacattactagtggatgattccccttacaaagctctgcgcaatcctccgcatactgccatttttcctcactcctacagttacttaaactggaatgacgattcgctgggtcccaatggagaccttcgtgtgtatctgcagaacctagccgctgcagataatgttcagcattttgttcgtgataatccgtttggtcaacctttcattactgagagcgatccgcattggaacttctatgctcagattgctgatagagggcgtgcacccttgacatgttgcgcttgaactcccaagggtcgtgcttttttctgggagttctgtggttatccatgatcaaaagatcatga

SEQ ID NO: 5010 - protein, 150 aa, Homo sapiens
EFKPHLLFCWDMSKCTFTGHKTLENKHKPLVLKELRKLWNWKNKIFHGKWGDYSPSNTLLVDDSPYKALRNPPHTAIFPHSYSYLNWNDDSLGPNGDLRVYLQNLAAADNVQHFVRDNPFGQPFITESDPHWNFYAQIADRGRAPLTCCA

SEQ ID NO: 5011 - DNA, 234 bp, Homo sapiens
gcgcagacagcctctctgttttacagctttggagggaaacagtaccttttaaacctcatcgacacaccaggccacgttgattttagttatgaagtgtccaggtcactgtctgcatgccaaggtgttttactggtagtggatgcaaatgagggtattcaagctcaaactgtggccaacttcttccttgcttttgaagcacagctgtcagtaattccagttatcaataagatagat

SEQ ID NO: 5012 - protein, 78 aa, Homo sapiens
AQTASLFYSFGGKQYLLNLIDTPGHVDFSYEVSRSLSACQGVLLVVDANEGIQAQTVANFFLAFEAQLSVIPVINKID

SEQ ID NO: 5013 - DNA, 385 bp, Homo sapiens
ggatccacaaggtcaaaattattcttatcatcatgctaagatatatttccctgttcactcttattctctcatgggtgcaggtgaagttttctggaagctacacggagtgtgatgacatccacacttcattgcttgatggaatgattgtgtgttcgggtttttttaatttctcagttttaatttttaatctggtaaatatcaaacaaaagctcattggggtcctcaataatttttgggtgcaaagaggtcccgaggtcaaaaagtctgagaactgctgctcaaggccatgcttgtgagacccatggaaacaaatgagcggaaaaatctcaacacactgaagaacagaacttaagaatgaaaagtgttgcttttgcacagctgatta

SEQ ID NO: 5014 - protein, 87 aa, Homo sapiens [sequence omitted]

SEQ ID NO: 5015 - DNA, 288 bp, Homo sapiens
cggattgacgataaatgcaagcacctgcggaacatttctcagggcgtcagctacttccgcggggtggagaatgtcgatgcaacggtatcggtgcccgagtcatgggccaagtttacggatgacaatgttctccgctcgcagagtgaaagggcagcttctgctaagctaagagaggacaccgagaaccttctgattgtgatagccaatgagatgtggaatcagttcaacaaagtgaacgtggctttcaccaatcgcattgccgagactgttgatgccaagaacaagatc

SEQ ID NO: 5016 - protein, 96 aa, Homo sapiens
RIDDKCKHLRNISQGVSYFRGVENVDATVSVPESWAKFTDDNVLRSQSERAASAKLREDTENLLIVIANEMWNQFNKVNVAFTNRIAETVDAKNKI

SEQ ID NO: 5017 - DNA, 666 bp, Homo sapiens
gcgtatattgacgaaattgcagagttctggaaaattgtgctttcacaacacgttagttttgcgaattacataagggcttcagattttaaatacattgacactatagataagatcaaagtagaatggctggcattggagtctgaaatgtacgacactagagattttagtataacattccatttccatggaattgagggagacttcaaagagcagcaagtcaccaaggtgttccaaatcaaaaaaggcaaagatgaccaagaagacgggatactgactagtgagcccgttccaattgagtggccccagagttacgactcgataaacccggacttgatcaaagacaaacgcagtccagagggtaaaaaaaagtacagacagggaatgaaaaccatatttggctggttcagatggaccggcctaaaacccgggaaggagttcccgcacggcgactcattggcgtcattgttcagtgaagagatctcccctttttgtgtgaagtactatgctgaggcccagagggacttggaagacgaagaaggagaatccgggttaagcgcagatggcgacagcgaggatgacgatggcagtctcggtgaggtggacttgccactatccgacgaggaaccaagctctaagaaaaggaaagtttagtagtctaggtccgga

SEQ ID NO: 5018 - protein, 216 aa, Homo sapiens
AYIDEIAEFWKIVLSQHVSFANYIRASDFKYIDTIDKIKVEWLALESEMYDTRDFSITFHFHGIEGDFKEQQVTKVFQIKKGKDDQEDGILTSEPVPIEWPQSYDSINPDLIKDKRSPEGKKKYRQGMKTIFGWFRWTGLKPGKEFPHGDSLASLFSEEISPFCVKYYAEAQRDLEDEEGESGLSADGDSEDDDGSLGEVDLPLSDEEPSSKKRKV

SEQ ID NO: 5019 - DNA, 202 bp, Homo sapiens
  misc_feature (1)..(1): Wherein n may be a, c, g or t
  misc_feature (26)..(26): Wherein n may be a, c, g or t
  misc_feature (27)..(27): Wherein n may be a, c, g or t
  misc_feature (93)..(93): Wherein n may be a, c, g or t
  misc_feature (122)..(122): Wherein n may be a, c, g or t
naatgaacctggtcaccaagacaaanngatgcctccactcctcaccactttcttattaatacacaaagtgctggaagtttcctagccagaggncatttaggcccaagaagaaaaaaacaaangggcacccaatttggaaaggaggaaataaaattttccctctttgcagatgacacgatctcatatattaaaaaaccctagg

SEQ ID NO: 5020 - protein, 64 aa, Homo sapiens
  misc_feature (7)..(7): Wherein Xaa may be any naturally occuring amino acid
  misc_feature (39)..(39): Wherein Xaa may be any naturally occuring amino acid
TWSPRQXDASTPHHFLINTQSAGSFLARGHLGPRRKKQXGTQFGKEEIKFSLFADDTISYIKKP

SEQ ID NO: 5021 - DNA, 371 bp, Homo sapiens
gggcccactcaagggctttgggcaaggcaatgtcaagctgaggtctgtattttgtactgaaagagtaagtctggaggctgccacactaacctaagctagagatgagagtaacccacaataggatctggggggtgatgtatttgcaacactgtaaggaggcaaaaccaatagatgctgtacagatgacctgtgcaacacgttataatttggaaagcactttcacatatgaaaagctattggactcaatagctcagtgggcaaaacacactgtaattcagatttcatggaaggggagaccaaggggcagagatagaaagtgatctgtccagcataacccagcatgtcagtggcacagagcaaggaagcctagg

SEQ ID NO: 5022 - protein, 72 aa, Homo sapiens
MRVTHNRIWGVMYLQHCKEAKPIDAVQMTCATRYNLESTFTYEKLLDSIAQWAKHTVIQISWKGRPRGRDRK

SEQ ID NO: 5023 - DNA, 310 bp, Homo sapiens
  misc_feature (1)..(1): Wherein n may be a, c, g or t
  misc_feature (2)..(2): Wherein n may be a, c, g or t
  misc_feature (112)..(112): Wherein n may be a, c, g or t
nnaagcgaaatgcttgaaaagactaatggtgattgggggatctgtgaaataagccttttgggaggagcgccattaattgctgatttaggtaaacaaaatcccctttatacgntgacagaaaaaggggctgtggaaacagcaataaaagtggttggttcagtaaaggaatctttacatcctacgcttgacggcgttaatgctgtggttgaaaaaatggctgagccacaagttgctattgtatcgatgaccatcactgaaaaaggctattgtacagaccattcaacaggaaagtttgatgaaaagaacgcgt

SEQ ID NO: 5024 - protein, 103 aa, Homo sapiens
  misc_feature (1)..(1): Wherein Xaa may be any naturally occuring amino acid
  misc_feature (38)..(38): Wherein Xaa may be any naturally occuring amino acid
XSEMLEKTNGDWGICEISLLGGAPLIADLGKQNPLYTXTEKGAVETAIKVVGSVKESLHPTLDGVNAVVEKMAEPQVAIVSMTITEKGYCTDHSTGKFDEKNA

SEQ ID NO: 5025 - DNA, 375 bp, Homo sapiens
  misc_feature (210)..(210): Wherein n may be a, c, g or t
  misc_feature (294)..(294): Wherein n may be a, c, g or t
  misc_feature (297)..(297): Wherein n may be a, c, g or t
  misc_feature (347)..(347): Wherein n may be a, c, g or t
tgtacacctcaaaagaaaactgaaaatgcttccccatctgctccttttgctaatgactaccgattatgggatatgagtcactacagtgaaatgtgaggcttgagctgcagagtgacagaaaacaccacagtcaggcttcagtaggcctttgcagcagtttctttccaggggtgtgctggagacgggacctgacaccctgaggtggacctnaaaccagacaagctgtagctgctctacactggccatgggttccagggggctcggtggccaggaggagtgagaagcctggcgctngtnacattcattagatcatagtcattgtttggctcttgctgtcccaccatatngccaggggggtgggggcggggcgcaggt

SEQ ID NO: 5026 - protein, 60 aa, Homo sapiens
  misc_feature (13)..(13): Wherein Xaa may be any naturally occuring amino acid
MASVEQLQLVWFXVHLRVSGPVSSTPLERNCCKGLLKPDCGVFCHSAAQASHFTVVTHIP

SEQ ID NO: 5027 - DNA, 187 bp, Homo sapiens
ggcgggcagttcatcggcaagttcatgtcgcgccagttcgagctcggcacgaacggcatcggcttctacgtgttcgacgagatcgccgacccggccgctttcaaggacgtctaccgcgagcagctggatgccgcaccgtgggatgccgccgaggccgagcgcgtcatcgacgaggtcctgcacgcgt

SEQ ID NO: 5028 - protein, 62 aa, Homo sapiens
GGQFIGKFMSRQFELGTNGIGFYVFDEIADPAAFKDVYREQLDAAPWDAAEAERVIDEVLHA

SEQ ID NO: 5029 - DNA, 478 bp, Homo sapiens
ggatccctcagcaagctccaggtgcccaccagcgtggggaagggagccccaggagatttgtggggaccccacctgctcagcagtagacagcttgtgggaccagctcccatctattcaactcagcagtgataagctacacactgcagggcacagagtgaagaaccctctgccagggaatcccaaggacagccctgctcagcatgggatgtgggacaacactgtcacagcagctgaaggtctcagagttggaagggacttctgggtcatctgttctaccctcagtttctttccagaaggctgtctcagccttcttagggagcctgaagtgggtttacattccctgcatcttctggaatggcaaaggagtctccaacagccctcgcttgactcacgccttcatggcctccacacgtaggcagtcaggaagcatctaggggtatatccttccctctcttgcctgtgcctgccctagtctgca

SEQ ID NO: 5030 - protein, 77 aa, Homo sapiens [sequence omitted]

SEQ ID NO: 5031 - DNA, 338 bp, Homo sapiens
gccggcccgaccgacaaccagaacacccacgccccggcgacgggccagacccgctgacgcgaccgccttccagggggctcccgattccctgatcccgtccggcccgcaaattgcagaattgaaggggacgggagcgttcgaaggggaaaggcgatgcgcatcggatgcgtgctggtactgaccgggctggcagttccgtccggggccggggcgctcgacgcaccggcggatgtcggcgccttcgccggagccgcccgtcaccatatcggtgagcgcgtcaccctcgatcactgccatctcgcctacgccaacgaggacgagatcacctgcatcggcct

SEQ ID NO: 5032 - protein, 99 aa, Homo sapiens
MAVIEGDALTDMVTGGSGEGADIRRCVERPGPGRNCQPGQYQHASDAHRLSPSNAPVPFNSAICGPDGIRESGAPWKAVASAGLARRRGVGVLVVGRAG

SEQ ID NO: 5033 - DNA, 321 bp, Homo sapiens
  misc_feature (1)..(1): Wherein n may be a, c, g or t
  misc_feature (274)..(274): Wherein n may be a, c, g or t
ngcatatgcggtttgggttgaattcttccaaactggtaagattatcatcgcccgtaactaccaaagtttcaagatgtatgcaatccttgctatcttctatcttgtaattatcacacttttgactagactagcgaaacgcttagaaaagaggattcgttaatggcaaaactaaaaattgatgtaaatgatttacacaaacactatggaaaaaatgaagttttaaaaggaattacgactaagttctatgaaggagatgtcgtttgtatcattggtncttcaggttctggtaagtcaactttcctccgtagcctcaatcttcta

SEQ ID NO: 5034 - protein, 54 aa, Homo sapiens
  misc_feature (39)..(39): Wherein Xaa may be any naturally occuring amino acid
MAKLKIDVNDLHKHYGKNEVLKGITTKFYEGDVVCIIGXSGSGKSTFLRSLNLL

SEQ ID NO: 5035 - DNA, 372 bp, Homo sapiens
  misc_feature (25)..(25): Wherein n may be a, c, g or t
  misc_feature (122)..(122): Wherein n may be a, c, g or t
gtgcaccagaagcaggtgctcactntcggcgatatgcccaacgacattgagatgctcgctggggccggcatgggagtggccatggcggatgcggccccgatcgttcacgatgctgctgactntgttaccacatcgaacgatgacttcggggtggcccgggtgctggagcggtggttctagctcgctgcagcccggccggcatcgacctgcccgcccgctcgctggcgcttgccttgctgggccctgccttgctggccctgccttgctggccctgccttgctggccctgccttgctggcccggaatactactcgagcatataagcttttttgcacgcttttgacctggtgttgtctacgagcagtattccgga

SEQ ID NO: 5036 - protein, 59 aa, Homo sapiens
  misc_feature (9)..(9): Wherein Xaa may be any naturally occuring amino acid
  misc_feature (41)..(41): Wherein Xaa may be any naturally occuring amino acid
VHQKQVLTXGDMPNDIEMLAGAGMGVAMADAAPIVHDAADXVTTSNDDFGVARVLERWF

SEQ ID NO: 5037 - DNA, 330 bp, Homo sapiens
attgaactttcttcactcatgcgtacgttaggacaattagaatcacaaggtttaatagaacgccgcgtttgtacaaaggataaacgagcaagaatggtcatcttaacgtcagcaggtgatagtttactaactaaaataggagcaaggatcattaaaatacgggtagagctactcgacggtgttagcactaatgaactcattgaacttgaacgtgtgctgagcatcattggtaataatgtcaataaaaaattaaccaccctagataaatcaacaacagacattacgtgagaaacaaaatgacaccagatcaacaattttcccgactagtaa

SEQ ID NO: 5038 - protein, 95 aa, Homo sapiens
IELSSLMRTLGQLESQGLIERRVCTKDKRARMVILTSAGDSLLTKIGARIIKIRVELLDGVSTNELIELERVLSIIGNNVNKKLTTLDKSTTDIT

SEQ ID NO: 5039 - DNA, 265 bp, Homo sapiens
caattgcaaggctcctgcctctaccactagtagagcaggaacaacaacaacaaaggcacgatgaacgcttcacctgcgtcttcctccgtttcaagaaagacgagatgtgtcacgggtaggtacacagctactactaacacaccacagcaaaaagaacgcatgatcagtcttctactcctactctctctacagctccatccctggacccagctgggcgctttgaacagctcatggagacgtaggagagcaccaatcctaatccgga

SEQ ID NO: 5040 - protein, 68 aa, Homo sapiens
MNASPASSSVSRKTRCVTGRYTATTNTPQQKERMISLLLLLSLQLHPWTQLGALNSSWRRRRAPILIR

SEQ ID NO: 5041 - DNA, 426 bp, Homo sapiens
ccatggctgtcttatccaccactgtatctccagatgcctggtacatcacgtaggcactcaatgaatacttgctggatggatgaatagatgaatgcactagctcccatcctcggcctaagaacatgcatgcttaagcatctcccaactaacagaagtctttcttcaactctctctccttttgctaaagctcttgttctcttttccttcattgatgaggatctgggaaaagcagtctcacttaccatctggatttcactttataatccctcattcaatgctctataatgtctcccagtcccaccactccactgattgtccgagacaagcaatggacgaatccagtgctaggtccaatgaacacctcaaagtttattcttctaattgatctctgcaacatgtgacgctgtcagttagaaactcctgctt

SEQ ID NO: 5042 - protein, 77 aa, Homo sapiens [sequence omitted]

SEQ ID NO: 5043 - DNA, 186 bp, Homo sapiens
  misc_feature (1)..(1): Wherein n may be a, c, g or t
  misc_feature (28)..(28): Wherein n may be a, c, g or t
nctcgacatcaccacagtgagcgcatcnaacacgtggtccagctcccaactgagcccgtgcaggtccttcatcgacagcagtcccagccaactaaggagagctcccctcccagagaagaagcacccccaccacctcctccaacagaaggcagttgtgccaaaaaacctcggtctcgcacaaagatc

SEQ ID NO: 5044 - protein, 62 aa, Homo sapiens
  misc_feature (1)..(1): Wherein Xaa may be any naturally occuring amino acid
  misc_feature (10)..(10): Wherein Xaa may be any naturally occuring amino acid
XRHHHSERIXHVVQLPTEPVQVLHRQQSQPTKESSPPREEAPPPPPPTEGSCAKKPRSRTKI

SEQ ID NO: 5045 - DNA, 224 bp, Homo sapiens
tgatcacagccagcacctgaaccccatggacctgaagacaagtctgctgattgtgtcccagtccagttccttcaggacttgtatatgccatctggagggcagtctaggggactggagactggggggattgcctagccctgtccattaccactggcaactgacacttccccctgggatctgaggtcagcctgacccaaccagccgacaccaccacagctggtacc

SEQ ID NO: 5046 - protein, 51 aa, Homo sapiens
MDLKTSLLIVSQSSSFRTCICHLEGSLGDWRLGGLPSPVHYHWQLTLPPGI

SEQ ID NO: 5047 - DNA, 266 bp, Homo sapiens
  misc_feature (266)..(266): Wherein n may be a, c, g or t
gcgttgtcggaaatcaacatcacctcgaacaaaaacccgattccgttcgacagcgccaagccatcagagtggaaaggcctgcgcctgggttcgtcagcgggtactactcgaggttttggtgccaaagagttcgaagtcatcggcaacctgatcgcagatatcttcgatgcacaagttgctgacgaaactacccgtgccgccgtcatcgcgaagagccgcgcagtagttgccaaactggttgccgacttcccaatctatgcctaagn

SEQ ID NO: 5048 - protein, 87 aa, Homo sapiens
ALSEINITSNKNPIPFDSAKPSEWKGLRLGSSAGTTRGFGAKEFEVIGNLIADIFDAQVADETTRAAVIAKSRAVVAKLVADFPIYA

SEQ ID NO: 5049 - DNA, 438 bp, Homo sapiens
aaaaataaaaagctgggcatcattggttttgggaatattggctctagggtgggcattagagcaaaagcctttgaaatggaagttctagcctatgatccttatatcccttcttcaaaagccactgatttaggggtcatttacacaaaaaattttgaagacattttgcaatgcgacatgatcactatccacacccctaaaaataaagaaacgattaacatgataggcgctaaagagattgaacgcatgaaaaaaggggttattttaattaattgcgctaggggtgggctttataatgaagacgctctttatgaagctttagaaaccaaaaaagtgcgttggcttggcattgatgtcttttctaaagagcctggcattcacaacaagcttttagacttgcccaatgtttatgcgaccccccatattggtgcgaacacttta

SEQ ID NO: 5050 - protein, 146 aa, Homo sapiens
KNKKLGIIGFGNIGSRVGIRAKAFEMEVLAYDPYIPSSKATDLGVIYTKNFEDILQCDMITIHTPKNKETINMIGAKEIERMKKGVILINCARGGLYNEDALYEALETKKVRWLGIDVFSKEPGIHNKLLDLPNVYATPHIGANTL

SEQ ID NO: 5051 - DNA, 411 bp, Homo sapiens
  misc_feature (34)..(34): Wherein n may be a, c, g or t
  misc_feature (45)..(45): Wherein n may be a, c, g or t
  misc_feature (87)..(87): Wherein n may be a, c, g or t
gatgcagggcatgtgccacacaccccggctaatnttgtaattttnagtagagacgaggtttctccatgtaactcaggctggtatcanactccctccctctgcccccgaccaacactggtgcttccccgtgtggcccgtgttagtgtgcggtgccgcctgtttctagggaactgtgagtataagcttcttcccaccatggcagtcacttctgtgtctgtaacatcatatctaaggacaacaaatccaaggtgtccttacaacaactggcgcagtgagcagggtggtttgatgccagatggagatggtatgtcctcaaactgctcttggcttactaactggatccaccaggcagtggccattgcctggaaggcagccctggtcatttgtgcgcccccctgatggctggtgcac

SEQ ID NO: 5052 - protein, 132 aa, Homo sapiens
  misc_feature (12)..(12): Wherein Xaa may be any naturally occuring amino acid
  misc_feature (15)..(15): Wherein Xaa may be any naturally occuring amino acid
  misc_feature (29)..(29): Wherein Xaa may be any naturally occuring amino acid
DAGHVPHTPANXVIXSRDEVSPCNSGWYXTPSLCPRPTLVLPRVARVSVRCRLFLGNCEYKLLPTMAVTSVSVTSYLRTTNPRCPYNNWRSEQGGLMPDGDGMSSNCSWLTNWIHQAVAIAWKAALVICAPP

SEQ ID NO: 5053 - DNA, 243 bp, Homo sapiens
aaatggttgaatcgggtcttgcacacgtcgctaaagatggtatggtacgtgtaccgtggattcaacaactcccttggcgtctgtatcatctgcttgccctgtaatgtcctttcgtcttctcaatcacacttactcatcgccaaagagtctgctcttcccgttagtgattctcgatgttattatattctttaatctgttaagaaaagacggaaaatatagcggcgggcgggttacgcgaccggt

SEQ ID NO: 5054 - protein, 63 aa, Homo sapiens
KWLNRVLHTSLKMVWYVYRGFNNSLGVCIICLPCNVLSSSQSHLLIAKESALPVSDSRCYYIL

SEQ ID NO: 5055 - DNA, 299 bp, Homo sapiens
  misc_feature (1)..(1): Wherein n may be a, c, g or t
ncgatcctggactgtcgatcaggccgcttgcgataaccatcagatttcaggtggcatgaccctctggctggtctcgcctcacagggcactgcaccatcagcccttctgttgcttgacttttgctcttcccatgctcttctctcatcagaggattttttcttaaatacacactttgcttcctgaggagggcatgcgtgctcatttcggggctttgctggccgaaagcctgggtgacactgtgcttggctgtaatcgtactgcagggttggcactgagcaaacactctgtgtggactcgag

SEQ ID NO: 5056 - protein, 51 aa, Homo sapiens
MSTHALLRKQSVYLRKNPLMREEHGKSKSQATEGLMVQCPVRRDQPEGHAT

SEQ ID NO: 5057 - DNA, 358 bp, Homo sapiens
ttccggaagggaaataggctccatctcttgatgagaggaacaaaggattatggtaattattgaatctcaaataatttattaataataaagtgattttccattactggcaagacttattactgaatactaatatgtacgttggaggcaaaaaagatactaaaatactgtcttttctcctaattctcactttgccagctttttgttcgttggatgaatggcagctgcatagaatgcccacctcagaagggggaggaagaggaagttgttataataaacttttacaatgatatctctctgaaccctcagataattgaacaagctgttatgatcccccaaaatgtccacaggattctgatca

SEQ ID NO: 5058 - protein, 51 aa, Homo sapiens [sequence omitted]

SEQ ID NO: 5059 - DNA, 338 bp, Homo sapiens
gtgcacttcaacagcgagactgtcctatgaccaccaaagaaccccaaccgcaccgcggcgagatgcaaccgtttgtcaaggaggccgtcctcggcctggaggcgttggtcaccgcactcgaggtaaatggcggtatgaaacctggaggggatcgcccaacacctgaacgggatcgccgacggattatccaatccgggccgactgcccgtggagggtgcggtcattaccaaaacgccccgagtgtcggtggaagattggctgaaggccaacacccacagcgagactaccatgcagttggctgatcgcctgctggcagaataccccggactgacgtatgt

SEQ ID NO: 5060 - protein, 96 aa, Homo sapiens
MVVSLWVLAFSQSSTDTRGVLVMTAPSTGSRPGLDNPSAIPFRCWAIPSRFHTAIYLECGDQRLQAEDGLLDKRLHLAAVRLGFFGGHRTVSLLKC

SEQ ID NO: 5061 - DNA, 361 bp, Homo sapiens
  misc_feature (36)..(36): Wherein n may be a, c, g or t
tccggaccctgctgtctcccccaccccatcgatccncccccgcagattcagaatgtcttctctgaaatcttgagggagccatggctgacgccggcctatcattacacacgccacttgatgtacactttgtcgtttcacttatatttttcattatagcagattcattcaccggcttaagttacccgctatgtccattaccagttgagagagggaggaggggacagagagaaggctgctttttatgaagcctgagtatgtgtgcttctctgtatgcattttatctggttcaacaaaaacttttcttcgaaaatactacattgcgctgaatcgaatgttatgcatctattgacacagaccatgg

SEQ ID NO: 5062 - protein, 54 aa, Homo sapiens
MADAGLSLHTPLDVHFVVSLIFFIIADSFTGLSYPLCPLPVERGRRGQREGCFL

SEQ ID NO: 5063 - DNA, 256 bp, Homo sapiens
  misc_feature (1)..(1): Wherein n may be a, c, g or t
  misc_feature (2)..(2): Wherein n may be a, c, g or t
nntgacgccccgacggccctcgtggactttgcgcacactccgcaagcgattgcatcagctcttgatgccgctcggtcgtcagtcgatggcggccgtcttatcgccgtgctcggtgctgggggagaccgtgacgtggccaagcgcggtccaatgggccagattgccgctgagcgtgccgatatcgtcatcggtactgatgacaacccgcgtaccgaagatcctgcggtgatccgtgcagccgtgctggagggggccc

SEQ ID NO: 5064 - protein, 85 aa, Homo sapiens
  misc_feature (1)..(1): Wherein Xaa may be any naturally occuring amino acid
XDAPTALVDFAHTPQAIASALDAARSSVDGGRLIAVLGAGGDRDVAKRGPMGQIAAERADIVIGTDDNPRTEDPAVIRAAVLEGA

SEQ ID NO: 5065 - DNA, 318 bp, Homo sapiens
acgcgtccatgcccatctactgggtggcccacgtgggtggtgcactgctggtgctcgccatcggcaagatggtggctgccaagcagaagaagtctgaagcggcccactaagccctgtgatcggccggcagccccgtgtgcgggctgctgggcagatccccgcagccctgctggtggcggcaaatggaacctgaggcccatttgtgagtcccagcagggttgttttttctttacgaagtcaccagggaggggtgcatggacaccatcatcgtctacgtagatgacgcagagtacgccaaaccattgctgcaggccatgg

SEQ ID NO: 5066 - protein, 66 aa, Homo sapiens
MGLRFHLPPPAGLRGSAQQPAHGAAGRSQGLVGRFRLLLLGSHHLADGEHQQCTTHVGHPVDGHGR

SEQ ID NO: 5067 - DNA, 186 bp, Homo sapiens
atctgcgattttggtctcgctaggggtattcatgccggatttttcaagtgtcattccactgtgcagccccatataaccaactacgttgctacaagatggtatagggcgcctgagctgcttctttccaaccaaccgtatagtaagtccgtagacatatgggctgtagggtgcattcttgcagaattc

SEQ ID NO: 5068 - protein, 62 aa, Homo sapiens
ICDFGLARGIHAGFFKCHSTVQPHITNYVATRWYRAPELLLSNQPYSKSVDIWAVGCILAEF

SEQ ID NO: 5069 - DNA, 252 bp, Homo sapiens
  misc_feature (1)..(1): Wherein n may be a, c, g or t
  misc_feature (2)..(2): Wherein n may be a, c, g or t
  misc_feature (118)..(118): Wherein n may be a, c, g or t
  misc_feature (151)..(151): Wherein n may be a, c, g or t
  misc_feature (152)..(152): Wherein n may be a, c, g or t
nnctacacgcagttccacttgggtggcagctgccgcgtgagcaagcagttcaccatcaacgcggccatctacaacctgttcaacaagggtttcgtggactaccagccttacaacgtanccgggccaggtccagggagccctgctgtttggnncaaccgctacgcgaacagccaggaaggccgccgcctgtgggtgtccgccaactacgagttctgaggcgggttccggggcgcctggctggcctgcacgcgt

SEQ ID NO: 5070 - protein, 71 aa, Homo sapiens
  misc_feature (1)..(1): Wherein Xaa may be any naturally occuring amino acid
  misc_feature (40)..(40): Wherein Xaa may be any naturally occuring amino acid
  misc_feature (51)..(51): Wherein Xaa may be any naturally occuring amino acid
XYTQFHLGGSCRVSKQFTINAAIYNLFNKGFVDYQPYNVXGPGPGSPAVWXNRYANSQEGRRLWVSANYEF

SEQ ID NO: 5071 - DNA, 360 bp, Homo sapiens
gctagccgtaaggcggcggccagagcgacgagttcgtctccgacgatatggaccgttcccatcgtatctgtgcctcctgcaacgatccgattgaaccaacgactgacggtatcgtgccagaggtgaacacggatcttcctgttgtcgccatccatggaatcaccagctcgccaacgacctggggcgggctcgtactggcgttcaatattgaaggtgtcatcgtccatcagctctctttactcggacacggcccaattggcatccgtcggggggcggggaccgactatccccttgaggcttttgcgactgatgtcatcgagcagatggatgctttgaaagtcgacaagtgcgccttagtag

SEQ ID NO: 5072 - protein, 104 aa, Homo sapiens
MDRSHRICASCNDPIEPTTDGIVPEVNTDLPVVAIHGITSSPTTWGGLVLAFNIEGVIVHQLSLLGHGPIGIRRGAGTDYPLEAFATDVIEQMDALKVDKCALV

SEQ ID NO: 5073 - DNA, 313 bp, Homo sapiens
gaattcaggatcaagcaggagtttctttatgtcgttagacaatgcatgcaactgttcctgaaggagagtctttatttcttcattttctggataatcaatgtgagaaatgtccagagaatatcttccattccaaggctggtgtagtaggaaggctttcaaggcaagggcggcccttggaacaaggaggtatgggcaccacactggctctactaactcctgctcatccatcctgaaacacgtagacttcatggacatctccaggactcggatgcacccgtcatcagatgccaagatcaccttgtctgacgtgcac

SEQ ID NO: 5074 - protein, 85 aa, Homo sapiens
MSMKSTCFRMDEQELVEPVWCPYLLVPRAALALKAFLLHQPWNGRYSLDISHIDYPENEEIKTLLQEQLHALSNDIKKLLLDPEF

SEQ ID NO: 5075 - DNA, 324 bp, Homo sapiens
gatcttattacttcctccaattgggatacgagaggttatacccgtgaagaagccgcttacccattaccctttttgagatacaataaattctggcctactgtcgctagactggatgacacttatggtgacatgaatttaatatgtacatgcccttctgtagaagaaattgcgaacgaaactgaatgagtacatacccattatgttgtatatgtatattagttgacgcatttatgcacatatgtagataatataaaatattcaggtcaaagaaaagttaaaagtttacgagagaaaattcgaagttgataactgagcaatgtgcac

SEQ ID NO: 5076 - protein, 61 aa, Homo sapiens
DLITSSNWDTRGYTREEAAYPLPFLRYNKFWPTVARLDDTYGDMNLICTCPSVEEIANETE

SEQ ID NO: 5077 - DNA, 357 bp, Homo sapiens
gacagggaaacaatgcataccgaagagccagaagcaagttctggtaacaatatcacattaacgaataatgttgaagaattgcacacaatggacgttctttcacaaacagcaaacactccgagtgcttccccgatgcttgacgcagcaccgccgacaacgaaacctggaacaaatagtaaggaacaaactgttgatttaactgcagatgccatagacttagacgctgaagagcaacaagtgttgcaaatatcagatgacgactttcaggaggaaaccaaagaagcacccaaagagtatggtgcagccaagcactatcgctgcccaatttgttttgaacctccagagacagccctcatg

SEQ ID NO: 5078 - protein, 119 aa, Homo sapiens
DRETMHTEEPEASSGNNITLTNNVEELHTMDVLSQTANTPSASPMLDAAPPTTKPGTNSKEQTVDLTADAIDLDAEEQQVLQISDDDFQEETKEAPKEYGAAKHYRCPICFEPPETALM

SEQ ID NO: 5079 - DNA, 259 bp, Homo sapiens
  misc_feature (1)..(1): Wherein n may be a, c, g or t
  misc_feature (2)..(2): Wherein n may be a, c, g or t
nnacgcgtgctgggcgatgcgccccgcttcggcatcgaggcggcttccggtttcggctgggagcgctggctcggcaccgggggcgtgttcatcggcatggatgggttcggcgcttccgcccccgcggccgacctctatcgacatttcggcatcacgccggatgctgtggccgattgcgtgcgccgcacgctcggttgaacgtctttttacatcacgaggaaacatcgacatgccggtcaagggtcgccatcaacgggtt

SEQ ID NO: 5080 - protein, 65 aa, Homo sapiens
  misc_feature (1)..(1): Wherein Xaa may be any naturally occuring amino acid
XRVLGDAPRFGIEAASGFGWERWLGTGGVFIGMDGFGASAPAADLYRHFGITPDAVADCVRRTLG

SEQ ID NO: 5081 - DNA, 352 bp, Homo sapiens
gggagaactaagctgcctccgggtgtggaccgcatgaggcttgagaggcatttgtcagcagaggacttctctagggtcttcgccatgtctcccgaggagtttggcaagctggccctgtggaagcggaacgaacttaagaagaaagcttccctcttctgacatccctgccggctcggctcgattcggctcgccctgtccgtgacagtaccttccttctggtgcttcgaggccctgaagctggggctgtgagacccttccctacagtgtcctcttcctctgctggctgggagcagcgggaggcagggcagaaacgttgggctccattcctcacggagagagccaagaagtgcac

SEQ ID NO: 5082 - protein, 52 aa, Homo sapiens
GRTKLPPGVDRMRLERHLSAEDFSRVFAMSPEEFGKLALWKRNELKKKASLF

SEQ ID NO: 5083 - DNA, 237 bp, Homo sapiens
  misc_feature (1)..(1): Wherein n may be a, c, g or t
  misc_feature (2)..(2): Wherein n may be a, c, g or t
nngcgaggctactgcgggctccccccagcgaagctattcgtatatgatttcgttgagctgggcagcttggattgctactttcatggagatgaacaagaggagcagccattgaactggaacgcgcggatgaaaatcgcgcttggctcggctcgaggcctggcatatctgcaccacgattgctcgcccgggatcgtgcatagggacatcaaagccagtaacatcctgctggatagaagc

SEQ ID NO: 5084 - protein, 79 aa, Homo sapiens
  misc_feature (1)..(1): Wherein Xaa may be any naturally occuring amino acid
XRGYCGLPPAKLFVYDFVELGSLDCYFHGDEQEEQPLNWNARMKIALGSARGLAYLHHDCSPGIVHRDIKASNILLDRS

SEQ ID NO: 5085 - DNA, 281 bp, Homo sapiens
  misc_feature (1)..(1): Wherein n may be a, c, g or t
  misc_feature (281)..(281): Wherein n may be a, c, g or t
natctccgtaccgaattccgtatttcttatactggtgtactgcagctcaaattgccccctactcacctcccgatagtcccggggtcgctgtaaggatcttcggaacccccggtcagcgattaacgtctccgacgtatcgaccaggtgcaaacaatacaacctatcgtccccggctcgcctgaacagcagtttggtgcctgacacctccattagctctccatgggcaaccttggccatgacttcggtcatcaatgcccgcagcgtcaccggccccggacgcn

SEQ ID NO: 5086 - protein, 83 aa, Homo sapiens
  misc_feature (83)..(83): Wherein Xaa may be any naturally occuring amino acid
MTEVMAKVAHGELMEVSGTKLLFRRAGDDRLYCLHLVDTSETLIADRGFRRSLQRPRDYREVSRGQFELQYTSIRNTEFGTEX

SEQ ID NO: 5087 - DNA, 181 bp, Homo sapiens
cccaaaggccccccccggtgccctgtggcccccccgcaccagggcctgcaccccatccaccagcgccacatcactatgcccacaagcgtcccccagcagcaggtctttggcctggcggaacccaagaggaagtcctcgctcttctggcacaccttcaacaggctcaccccccccacgcgcg

SEQ ID NO: 5088 - protein, 60 aa, Homo sapiens
PKGPPRCPVAPPHQGLHPIHQRHITMPTSVPQQQVFGLAEPKRKSSLFWHTFNRLTPPTR

SEQ ID NO: 5089 - DNA, 324 bp, Homo sapiens
cggccgccattagctgggtgcacacgcaggcccgaggaagcccaggctcccttttctaacaggctccgctttggatgtctgagtttgggctgcacacttcctaacgtggagcggaatagggccccctgtcttttggccgggcttttgaaagggcctttgcccatggggacgatcccgttttttccatgtcttgaaggagcctcaagcccgcagaggtgtcggggcctttgccatccctggagtgattctttgggcaactttcttctgtttctgccctgattcgagatctggttttgtttctacttattgggtgaatgctgacag

SEQ ID NO: 5090 - protein, 54 aa, Homo sapiens [sequence omitted]

SEQ ID NO: 5091 - DNA, 487 bp, Homo sapiens
gatcaaacacgtatgtggaaggtgggtgaaagggtccgttcaaccaggccacaaggtgatcttggcccactgcatcccttcactgctggagtgtatgttgcactaatgatggctcagattgaggtccttaggaagaagggccactcttactcagagataattaatgagagcctgatcgagtccgtggactcgttgaacccgttcatgcatgctcgcggtgtggccttcatggtcgataactgctccacaactgctcgtttgggatctaggaagtgggcaccacgcttcgattacatcttgacccaacaggcgtttgtgactgttgacaagaaagcaccgatcaaccaagacctcatcagcaacttcatgtctgaccctgtccacggtgccatcgaagtctgcgctcagctgaggcccactgttgacatctcagtgaccgctgatgctgatttcgtgcgtccagagcttcgacagtcttcataagctg

SEQ ID NO: 5092 - protein, 160 aa, Homo sapiens
DQTRMWKVGERVRSTRPQGDLGPLHPFTAGVYVALMMAQIEVLRKKGHSYSEIINESLIESVDSLNPFMHARGVAFMVDNCSTTARLGSRKWAPRFDYILTQQAFVTVDKKAPINQDLISNFMSDPVHGAIEVCAQLRPTVDISVTADADFVRPELRQSS

SEQ ID NO: 5093 - DNA, 283 bp, Homo sapiens
ggatcctggagcagcattaatgacgcagaactctgtgggagcagaaagacgtctagccattctcagttcttcggtgtgggtccccaaacttaggggctcgggtggtttcccctgaatgagcaagcgcatgattgattgtggaaaagtgctaggtcctcatggctctgccaccccagtaagggtctggggaattctccagactatttggtggcctccacatttccttgggaaatgtaaagtaggatttgagatggctggaccccgcaccaccagaaacttccta

SEQ ID NO: 5094 - protein, 56 aa, Homo sapiens [sequence omitted]

SEQ ID NO: 5095 - DNA, 263 bp, Homo sapiens
attctcgctcttgacctctacggcaccttgtcacgcaccctcattggacttggattgggcgacaagatcgtcgggcgcactgtttcctccactgaaaagcagctgcatgaccgccccgtggtgacagaaaacggacacgttcttaacgtcgaggccgtcgcaggtctgaaaccgtcggtcatcatcgccgaccgcagcgtgggtccgaaggaggccctcgatcagctccgtaaatccgggattccggtggtgctcgtagatct

SEQ ID NO: 5096 - protein, 87 aa, Homo sapiens
ILALDLYGTLSRTLIGLGLGDKIVGRTVSSTEKQLHDRPVVTENGHVLNVEAVAGLKPSVIIADRSVGPKEALDQLRKSGIPVVLVD

SEQ ID NO: 5097 - DNA, 322 bp, Homo sapiens
  misc_feature (1)..(1): Wherein n may be a, c, g or t
  misc_feature (322)..(322): Wherein n may be a, c, g or t
nactagaaattccaaaacagaaaagcaaagacagaaaagattaaggagaaaaataaacaggatatctaagaactgttgggacaactaaaaattgtgtaactatgttaagtggagattccagaaaaagaagaaagagaaaaagaaaaaaaaacatttgaagcagtaacaactgagaatttccccaaagtaacatcagataccaaacttcagggtcaggaagctcatagaataccaagcaggataaatgcccccaaaactacacctaggcatatcatattcaaacttcaaaaagtcaaagataaggaaaaagtcttgaaagaan

SEQ ID NO: 5098 - protein, 71 aa, Homo sapiens
VEIPEKEEREKEKKTFEAVTTENFPKVTSDTKLQGQEAHRIPSRINAPKTTPRHIIFKLQKVKDKEKVLKE

SEQ ID NO: 5099 - DNA, 581 bp, Homo sapiens
gggcccagggtggtttagggaatggcagtgtcctgggtagaataggaaggcctgagactgtgactgagctgacagtggggcaaagtgaaggagcccagtattggaagatcggctccacatgtatctctgcgaggagactgcaagcgagctcgtgtggaccaggcagaggcgagggctgagtgaggccagcagtggcctgggcacaggaagacggtgagtgagaagccactggagctcctgtgcaggagcgcaacacctttactgcttcattcagtttggcttcacctgcttaaaactgtaactctctagaaggctgaacagcaaaagcctccctcctgtccagccgctcagcatccccaggcaccagcactgctcccagtctccaacgtcctccagggctcttcgcttctgggctagaagcagggaaaccagagtgtgctggggaagaagaggaggaggtggaggagggctgatgatggggccacatgctgctgggatgccagctgagagcagcggagcactgttaagctaaggggctgagtgggtgcagatggagccctccgtgggctccttcaggtacc

SEQ ID NO: 5100 - protein, 65 aa, Homo sapiens [sequence omitted]

SEQ ID NO: 5101 - DNA, 306 bp, Homo sapiens
gaattcatgtctgacacgtggaaggagtaaggaagttagtgtagctgaaagggaggaaaggcaggaaaaagtaatagaaaaattattaaaactatggatggaattactaggaatattgatagactttattacgtccagatgctcaggaaactctatatggctgtgaaaaataaaaacattaatgcatatttgaatagaggacattaattaagttattattttgcattaccacccattactgtactaactctttttttttttttttcttggaaagggcctttgtctcttttcccccgggggggatgg

SEQ ID NO: 5102 - protein, 68 aa, Homo sapiens
MSSIQICINVFIFHSHIEFPEHLDVIKSINIPSNSIHSFNNFSITFSCLSSLSATLTSLLLPRVRHEF

SEQ ID NO: 5103 - DNA, 188 bp, Homo sapiens
tgatcataaccccctgcagccttaatctcccaagctcaagcaatcctcccatctcagcctcccaagtagctaaagttgttgatatgcagtcggaaaaatactggattgtactacgccgccttccttcacactgtcggccgttactattttttccgagttcggtactcatcttggcgtaattctggtcc

SEQ ID NO: 5104 - protein, 56 aa, Homo sapiens
MSTELGKNSNGRQCEGRRRSTIQYFSDCISTTLATWEAEMGGLLELGRLRLQGVMI

SEQ ID NO: 5105 - DNA, 419 bp, Homo sapiens
  misc_feature (1)..(1): Wherein n may be a, c, g or t
naacttagtgttggacagttttagcattctgtataatattaaggacacactatatttaatgattattttctaccttaaagttttagaaagttactcaaactaaacacttctgtaggaattgtgaacactcttgattcacaaatatctttatcttcctaaattcgtccacttatgtatgatacttactttaaatgggaaagcagagagacattccctagtttctttaaaaataatttttcggaaactatgaagtttcttttgtgaataaaaaacgtatttacgcttttttcctcccccaggactattttaaaacccgggggggtattccttttatcacagtgtttatactgcatgattttgtttatttagatggttgtacagtgtaaaattacaggtttggtggtttgtaaccagaattc

SEQ ID NO: 5106 - protein, 56 aa, Homo sapiens [sequence omitted]

SEQ ID NO: 5107 - DNA, 517 bp, Homo sapiens
acgcgtgaagggtacgtttcttgggccaatttagtcaaagtgtctctgttacctgagggctgcttaatggccttagggaacgagctttggaagcacctgttaaagacaggcagaacgctgcagggaggatgccctgtcattccacggtgtctgcccacgctgtgctggtccatcctaatgagcacgggcattagaactcaagacggcacaagccccaggcagcggagtgagcggcctccaacctcatgtgtgctgctgtgcacagacaggatttccagatacatcctgcttttcagcccctgcctcagatgaaaagctggcagctgcatacattttgaatagagaacaagggaaaatgattttaagcgatgcctttcggctcagggaatgatgttgttccttcctactgggagtctttctcgagtttgtcttccaggaggcaggtgaaggtgagaattctatactgaacatttgaggcagtcactgagagcttaaaagtctccagggaatacggccg

SEQ ID NO: 5108 - protein, 81 aa, Homo sapiens
MALGNELWKHLLKTGRTLQGGCPVIPRCLPTLCWSILMSTGIRTQDGTSPRQRSERPPTSCVLLCTDRISRYILLFSPCLR

SEQ ID NO: 5109 - DNA, 177 bp, Homo sapiens
  misc_feature (28)..(28): Wherein n may be a, c, g or t
  misc_feature (29)..(29): Wherein n may be a, c, g or t
ccggcctacaccccacaggctgccgaanngcactacactgtttcctacgggacagactctggggagttttcatcggtgggagaagacttctataggaaccgttcccagccgccccctcttgagaccttggggctcgatgcagatgagctgatcttgatcccaaatggagtgcagatc

SEQ ID NO: 5110 - protein, 59 aa, Homo sapiens
  misc_feature (10)..(10): Wherein Xaa may be any naturally occuring amino acid
PAYTPQAAEXHYTVSYGTDSGEFSSVGEDFYRNRSQPPPLETLGLDADELILIPNGVQI

SEQ ID NO: 5111 - DNA, 356 bp, Homo sapiens
  misc_feature (1)..(1): Wherein n may be a, c, g or t
  misc_feature (356)..(356): Wherein n may be a, c, g or t
ncgcagcgccctgggttccatcattgaccaggtctttgacagcggcgaacgtgaccgcttccgtacccgctttgagcgcgtcggcaacaagaccgaaatctatgtgtcccaccagcacatggaagaaacaccgacggcagacggagccgcctttaaatgggtgttcgccaaagaagatccaggtctgaatgcagccatgctggctcgcatgatggtcttcctgggctcggatattgaaaccgcacgtgaacaagtggccaatgccaccaaagatcctgctggtgttcaagtccaggcttcggacaagggcgatcaggccgagttgatgctgaacgagtcctttgaccgtgcatggn

SEQ ID NO: 5112 - protein, 79 aa, Homo sapiens
MEETPTADGAAFKWVFAKEDPGLNAAMLARMMVFLGSDIETAREQVANATKDPAGVQVQASDKGDQAELMLNESFDRAW

SEQ ID NO: 5113 - DNA, 336 bp, Homo sapiens
  misc_feature (1)..(1): Wherein n may be a, c, g or t
ngaacaaaggttctaaagttttacagattcctccttcagaggtgaaaactgtttatgtgctcctgtaaggaaatgctgattctcttaatttgaaagacattggcacatttggaatctgatttttgaagaaatttagcttctggtgatgggccataaggaactctggtgtggctccagtggactgactcaccatctgtcttcatttttctcagcctcatgctttttttctttaaatatggaaacttgagagatgattttatagagttgaagtacttcatagttagcaatgattgtccattggcgtgctagatgatttatgagccatggagtgctagc

SEQ ID NO: 5114 - protein, 80 aa, Homo sapiens
MKYFNSIKSSLKFPYLKKKSMRLRKMKTDGESVHWSHTRVPYGPSPEAKFLQKSDSKCANVFQIKRISISLQEHINSFHL

SEQ ID NO: 5115 - DNA, 341 bp, Homo sapiens
tgcacggcgctgagcatcctcatggacggcgcgatcccgccgggcccggacgcgcagctggagggccgcctagaggacctgccgggctgcccgcgggaggtgcagaggggattcgccgccaccctcgtcacggaggccgagtgcaacctggccaccatcagcggcgtcgccgaatgcccctggattctcggcggcggaacgatgccctccaagtaactgcgaagagcatagtgcatgaggaatgagcttgtagctagctcatatgtctgaataataagcacagcaagaagatgaatgcatttctcggatcgttcatccggaacaataattaaaggggatcc

SEQ ID NO: 5116 - protein, 71 aa, Homo sapiens
CTALSILMDGAIPPGPDAQLEGRLEDLPGCPREVQRGFAATLVTEAECNLATISGVAECPWILGGGTMPSK

SEQ ID NO: 5117 - DNA, 628 bp, Homo sapiens
gtcgacgacatattcgaggttgactttcctgaaggatttcaatttggcactatggctttgtatgatgttttacatggtgagaggcacgtaaatcgttacagcgaaggcatacggtcggataatgacgaagcagaggttgccctaaggcagcgtagaaatttactactcttttggcgaaaccactcttctacaccaaaaccttcactacgccgagccgccactatagtatatgaggatcatgtatcatcccgttattttgaggatataagttctatattaggaagcactgcaatgagaactaaaagactatctccctataatgcggtagcattggacaagcctattcaagatattagttacgatcccgcagtacaaactttatatgtgctaatggcagatcaaacaattcacaaattcggcaaggacaggttgccttgccaggacgaatacgaaccaagatggaattctggctatttggtttcaagaaggtcaatagttaaatctgacctcatctgtgaggttgggttatggaaccttagcgataactgcaagaacacagtataattccctcatttccaataacattgtcgctgataaaatcgtgattctcgatcaatgtgctacgcgt

SEQ ID NO: 5118 - protein, 187 aa, Homo sapiens
VDDIFEVDFPEGFQFGTMALYDVLHGERHVNRYSEGIRSDNDEAEVALRQRRNLLLFWRNHSSTPKPSLRRAATIVYEDHVSSRYFEDISSILGSTAMRTKRLSPYNAVALDKPIQDISYDPAVQTLYVLMADQTIHKFGKDRLPCQDEYEPRWNSGYLVSRRSIVKSDLICEVGLWNLSDNCKNTV

SEQ ID NO: 5119 - DNA, 219 bp, Homo sapiens
ctagtccgcgatgcttttgcactggccaaggaaaaggcaccaactattattttcattgacgaattggatgccattggtactaagagatttgattctgaaaaatccggtgatagggaagtgcaaagaaccatgctggaattattgaatcaattggatggctttagctccgatgatcgtgtcaaagtcttggcggctaccaatagagttgatgttttagat

SEQ ID NO: 5120 - protein, 73 aa, Homo sapiens
LVRDAFALAKEKAPTIIFIDELDAIGTKRFDSEKSGDREVQRTMLELLNQLDGFSSDDRVKVLAATNRVDVLD

SEQ ID NO: 5121 - DNA, 408 bp, Homo sapiens
ccatgggctggtaggagttgagtctggagaagtacgataagatgtttgataagttcttaatctgggaagtgatgtgattggttatatctttttggataataactgtttggaaggaaggaggaagtgcctgaaatgggttgaaactggccacagaaatcaagtttaggagactttatttttattttaatcttttccaccctcctccccaaatttagaagactttaaagtatgagatgattgaggcttagtgacactgtgtgcaaagttagtgattttggtgactgttgacagcgaaatttgtaattgaaaatattgactttcaggaagctgattgtggctgttcattctctgttatagaaaggcagtttttgtttgtttgtttttcagaaggagtctcactctgttggg

SEQ ID NO: 5122 - protein, 53 aa, Homo sapiens [sequence omitted]

SEQ ID NO: 5123 - DNA, 321 bp, Homo sapiens
ctaggtgtgattttgccaggagcttcggcagctatcaagtccagtcaaggtgggaaaatcggagtgattggaacacccatgacggtacaatcagacatctaccgtcagaaaatccatgatttggatccggacttacaggtggagagtttggcctgtcccaagtttgctcccttggtggagtctggtgctctgtcaaccagtgtcaccaagaaagtggtctatgaaaccctgcgtcccttggttggaaaggtggatagcctgattttgggctgtacccattatccacttctcagacctattattcaaaatgttatggggccc

SEQ ID NO: 5124 - protein, 107 aa, Homo sapiens
LGVILPGASAAIKSSQGGKIGVIGTPMTVQSDIYRQKIHDLDPDLQVESLACPKFAPLVESGALSTSVTKKVVYETLRPLVGKVDSLILGCTHYPLLRPIIQNVMGP

SEQ ID NO: 5125 - DNA, 286 bp, Homo sapiens
gctagcttgccgtcggccgagaacgcggccggtccgacgttcgcccccgggttggcgcgggccagggccgatggtcggctctcccccagcgtgcggagcgtcggtaagggagcaagccaccgatcttaacctgatagctcacgctcccgtcggggtcgagcgccaggggtggcatgcccgggaactcggggctggccttcccggcggcgagatcccaggccggcacctccttcgcgtgccgatcccggatcctggtatacgccaacgatgacccgtcggccgagag

SEQ ID NO: 5126 - protein, 66 aa, Homo sapiens
MVGSPPACGASVREQATDLNLIAHAPVGVERQGWHARELGAGLPGGEIPGRHLLRVPIPDPGIRQR

SEQ ID NO: 5127 - DNA, 465 bp, Homo sapiens
  misc_feature (1)..(1): Wherein n may be a, c, g or t
  misc_feature (2)..(2): Wherein n may be a, c, g or t
nnacgcgtgaccacaattgcacaacagaatccggtaatcgacagaggcacagtctttttcatgtcgctagcggccgccctgggcactgcgacgatctacccccttcagccggcgatcgccgatctcgcccggtctctggagaccagccccgccgccgtcggcaccgcgctggcctgcggcccgatcggctacatactgggtctggccctgctggttccactggttgacaggttctctccgcggcgggtgctggcactggaattcttggcgctcggcggtgcgctggcactgaccgccgcggccgtcacagcctggctgatcggcgtcggattactgctgacgggagccttctcgtctgtgggggcgggcttgagctccgtggtcggacgcttcgcgcccgcacatcgtcgctcgaccgttctgggtatcgtcactgccggcatctccgcgggcatcctcgccggc

SEQ ID NO: 5128 - protein, 155 aa, Homo sapiens
  misc_feature (1)..(1): Wherein Xaa may be any naturally occuring amino acid
XRVTTIAQQNPVIDRGTVFFMSLAAALGTATIYPLQPAIADLARSLETSPAAVGTALACGPIGYILGLALLVPLVDRFSPRRVLALEFLALGGALALTAAAVTAWLIGVGLLLTGAFSSVGAGLSSVVGRFAPAHRRSTVLGIVTAGISAGILAG

SEQ ID NO: 5129 - DNA, 432 bp, Homo sapiens
  misc_feature (1)..(1): Wherein n may be a, c, g or t
  misc_feature (2)..(2): Wherein n may be a, c, g or t
nntgatcagtaccgctccggtggagccgctgctatcagcgttctgactgaggagcgccgatttccagggtccctggccgaccttgacgcggtgcgtgcgaaggttgagatcccagtactccgcaaggatttcgttatcgcgaaataccaggtgctcgaagcccgcgcacacggggcagaccttatcctcctcatcgttgccgcgttatctgacgacgacttgcaacgcctatatgaccttgccatcgagctgggcatgaccccgctagttgaagttcatacccctgaagaggtaagtcgagctacagcccttggtgcccgtgtggtgggtgtgaatgcgcgcaacctcaagaccctcgaagtcgataagaccattttcagggaactccttggtgagctgcctgaaaacgtcgttaaggtggcggaatccgga

SEQ ID NO: 5130 - protein, 144 aa, Homo sapiens
  misc_feature (1)..(1): Wherein Xaa may be any naturally occuring amino acid
XDQYRSGGAAAISVLTEERRFPGSLADLDAVRAKVEIPVLRKDFVIAKYQVLEARAHGADLILLIVAALSDDDLQRLYDLAIELGMTPLVEVHTPEEVSRATALGARVVGVNARNLKTLEVDKTIFRELLGELPENVVKVAESG

SEQ ID NO: 5131 - DNA, 220 bp, Homo sapiens
  misc_feature (1)..(1): Wherein n may be a, c, g or t
ntaggaactcaaggcttcagtgagccgagctcgcatcactgtactccggccagggcaacagagcaagaccctgtctcaagaaagaaaattaaaattccaacaaagaatttcataatctctgaccacactgcccaggtttgcaggccaggttgtaacacgcttttgaatttttgccagtctgaaaagtgaaacaaaacatctcatcctcccttaatgtaca

SEQ ID NO: 5132 - protein, 62 aa, Homo sapiens
  misc_feature (1)..(1): Wherein Xaa may be any naturally occuring amino acid
XGTQGFSEPSSHHCTPARATEQDPVSRKKIKIPTKNFIISDHTAQVCRPGCNTLLNFCQSEK

SEQ ID NO: 5133 - DNA, 298 bp, Homo sapiens
  misc_feature (1)..(1): Wherein n may be a, c, g or t
ncagcagaagaagtgattcttttataaatgaaagttggatcatatcacttatctcctgaaaatcctacaatgtctccactccctgtgtcagcgtaaaaaccaacgtgtcttcaatgacttatgaggttctacatgatatatctgtttgtctctactctccatttgttttctgactatatctcctccttgcttattttgctttagccacgtgtacttctcgatttttgaacaagctaacatgcttcttccaagatctttctcctagttgtttccgctgcctatatttcttggctcatga

SEQ ID NO: 5134 - protein, 50 aa, Homo sapiens [sequence omitted]

SEQ ID NO: 5135 - DNA, 317 bp, Homo sapiens
acgcgtgagggagtgcatcgggcggatttctggaggaacagcatccaggctgaacgagcagcaggtgcaagagtcctgaggtggaagtgtgctgagggagggaggtgagatgggcagggaaggggaactcttaaaacccccaggggtcttcccaagggcctggtggagcacacggagggaggcattagatgggcttctaaccccatgctactggagggctgggagctgaaaactagctcagctttcagatttgaaagaatctgtgtgaagatgccagaggacaagtgtgggagcatggaaggcaagtggggaagctc

SEQ ID NO: 5136 - protein, 98 aa, Homo sapiens [sequence omitted]

SEQ ID NO: 5137 - DNA, 293 bp, Homo sapiens
  misc_feature (1)..(1): Wherein n may be a, c, g or t
  misc_feature (106)..(106): Wherein n may be a, c, g or t
  misc_feature (107)..(107): Wherein n may be a, c, g or t
  misc_feature (136)..(136): Wherein n may be a, c, g or t
nacgcgtgtccacatgcacccgtctctgcacacatgcatggagtcacgcgcacccgtctctgcacacacaagtgtccacacacccgtctctgcacacacgcacgtnnccacacgcacacgtctctacacacgcacngtgtccacacgcacccgtctctgcacacccgcgtgtccacacgcacccgtctctgcacacacgcatggagtcacgcgcacccgtctgcacaaagtgtccacacacacccgtctctgcacatgcgtgtccacacacacccgtctctgcacacacgcgt

SEQ ID NO: 5138 - protein, 97 aa, Homo sapiens
  misc_feature (1)..(1): Wherein Xaa may be any naturally occuring amino acid
  misc_feature (36)..(36): Wherein Xaa may be any naturally occuring amino acid
  misc_feature (46)..(46): Wherein Xaa may be any naturally occuring amino acid
XACPHAPVSAHMHGVTRTRLCTHKCPHTRLCTHARXHTHTSLHTHXVHTHPSLHTRVSTRTRLCTHAWSHAHPSAQSVHTHPSLHMRVHTHPSLHTR

SEQ ID NO: 5139 - DNA, 363 bp, Homo sapiens
gtcttgaaagaggggactcagagatcctttgtgccattcatgggggctgagctgccaccccagggtggtagaagtgggaagctgagtccaggtgatgaatacagcagcaaatgtttattcctcactcgcctactatacaaggcaccattttgcacttatgaacttcttccatatatcagcccaatggtactcttaactcaatttttctggtaaataggggcagccacatacctcaggctacggccagctgggccctgacagctgagacgtgcggcagtgtcaggggactgaggtccctggttgctcccacctctgcacttgtggcatccgacatccaagtgtttcgtaaaagcagtccctagc

SEQ ID NO: 5140 - protein, 57 aa, Homo sapiens [sequence omitted]

SEQ ID NO: 5141 - DNA, 436 bp, Homo sapiens
ggtacgttacttataggtgagtgctgagtggaggccctcgtgatgatgatccggcgcgcagcaggtgggccatgggcgtgcaacgtacagatcttccggaatgacctaagtttgagtcgacaattgggaagtctaggtaacccaccatgagaccttgaccgccttttccccgattcggaatctccttctcatcgttctccttctcatcgtaaaaaagggaagaaggagaagtactacaagcgggggacggacggttagtgcgacgagccgacaaatgacaccacagactgatccccagcattcgcaggtcatcccctgaattccgagccttcgcgggcacaacacccggggggcaagcgaaagtcttcgacggagacgaggacgggaccgaaaacctcagccaaaccatagcccacagtttacgcggagcccccgg

SEQ ID NO: 5142 - protein, 132 aa, Homo sapiens
MVWLRFSVPSSSPSKTFACPPGVVPAKARNSGDDLRMLGISLWCHLSARRTNRPSPACSTSPSSLFYDEKENDEKEIPNRGKGGQGLMVGYLDFPIVDSNLGHSGRSVRCTPMAHLLRAGSSSRGPPLSTHL

SEQ ID NO: 5143 - DNA, 326 bp, Homo sapiens
cggccgcgcggccccacgtgcaccgcgtgcatggtccctcgaggacgcgcatctgcagcccccgctccccgcaaacctccaggccggagagctccggccaaggccgctgcatcacatgatacaggaggggcatgcacacgctcacgtgcacacagcctcaaacacgctcatccgtacatacaggagtgtgtgaacgcactgaggtgcacaggacaaagacacagacacctgtttgcacaccgactcgcctatagaaatgtgcaaaccacccgtgcgcacaggcccctccacccatgcaggcgtgtgcacatcacccacacggacac

SEQ ID NO: 5144 - protein, 98 aa, Homo sapiens
MVPRGRASAAPAPRKPPGRRAPAKAAASHDTGGACTRSRAHSLKHAHPYIQECVNALRCTGQRHRHLFAHRLAYRNVQTTRAHRPLHPCRRVHITHTD

SEQ ID NO: 5145 - DNA, 282 bp, Homo sapiens
  misc_feature (282)..(282): Wherein n may be a, c, g or t
gccggccattcccgggaggcctgagtgtgacctggaagctctgtgggtcaccaagactggcattttccttgtatttttgtgcagggctgaagtgagcgttcctcctctgaattggtgaggctttggaaattttttgtttcttctactcatcctaatggctggttttggctgcccggagtatcagagaatatcactaacagggcagtcagtttatttttaggcatctttctttctgtccagggagaaacccctcggaagaatcttagtcactctttgcacgcn

SEQ ID NO: 5146 - protein, 50 aa, Homo sapiens
MSRRNKKFPKPHQFRGGTLTSALHKNTRKMPVLVTHRASRSHSGLPGMAG

SEQ ID NO: 5147 - DNA, 365 bp, Homo sapiens
  misc_feature (1)..(1): Wherein n may be a, c, g or t
  misc_feature (162)..(162): Wherein n may be a, c, g or t
  misc_feature (210)..(210): Wherein n may be a, c, g or t
  misc_feature (284)..(284): Wherein n may be a, c, g or t
  misc_feature (294)..(294): Wherein n may be a, c, g or t
  misc_feature (302)..(302): Wherein n may be a, c, g or t
  misc_feature (318)..(318): Wherein n may be a, c, g or t
  misc_feature (346)..(346): Wherein n may be a, c, g or t
  misc_feature (356)..(356): Wherein n may be a, c, g or t
  misc_feature (357)..(357): Wherein n may be a, c, g or t
  misc_feature (363)..(363): Wherein n may be a, c, g or t
  misc_feature (364)..(364): Wherein n may be a, c, g or t
natcaccaacctgacccggttagataatcggatattttttaaacttttcctcataagtaagacagaggaactgaacaaacagtagatgaagttcttctcctctgttggggtcttagaagaaataagccgctgagatagaaaccccctccccttctgaggtanaatccttgggcgagagggctcctttctctgatgggctggaggtagtgnggccaataatagaaatgtgagtctctgccggctccaaccagaagctccactgcacagcccccagcatgggctanatgaaaaatntgcaccangtattggtgaggatgntgagaatacattcttggtgtgagtgtanaatggaacanncacttnng

SEQ ID NO: 5148 - protein, 92 aa, Homo sapiens
  misc_feature (4)..(4): Wherein Xaa may be any naturally occuring amino acid
  misc_feature (10)..(10): Wherein Xaa may be any naturally occuring amino acid
  misc_feature (12)..(12): Wherein Xaa may be any naturally occuring amino acid
  misc_feature (16)..(16): Wherein Xaa may be any naturally occuring amino acid
  misc_feature (56)..(56): Wherein Xaa may be any naturally occuring amino acid
MYSXHPHQYXVXIFHXAHAGGCAVELLVGAGRDSHFYYWPHYLQPIRERSPLAQGXYLRRGGGFYLSGLFLLRPQQRRRTSSTVCSVPLSYL

SEQ ID NO: 5149 - DNA, 293 bp, Homo sapiens
  misc_feature (1)..(1): Wherein n may be a, c, g or t
  misc_feature (2)..(2): Wherein n may be a, c, g or t
nnaccacgctgcacggtcgcctcgacctgccggagctcaagccggtgttccaggcattcagcaccgtgccggtgatctcgatctccgacagccagcgccgtccgctgcccgaagccaacttcgtgcgcaccgtcctgcacggcctgccggccgacctgctcacgccgcaggagaccggcccgcgtgactacctcgccttcctgggccgcatctgccccgagaagggcttcgacaaggcgatccgcatcgccaaggccgccggcatgaagctcaaggtcgccgccaaggtcgac

SEQ ID NO: 5150 - protein, 63 aa, Homo sapiens
SRSPTASAVRCPKPTSCAPSCTACRPTCSRRRRPARVTTSPSWAASAPRRASTRRSASPRPPA

SEQ ID NO: 5151 - DNA, 336 bp, Homo sapiens
cctaggaaacaagagagaaatagtgagcacatggcatatgtgctaccttttctatctccctcacccatgaccaaaatcactaattaacagagtagctttttctgctgagcctatatacagcctctgaacatttaaaaacagtattccatgcaagcatttccaaaaaaaaaaacactcaatttcagaaatattttgaggaggggtgaaatttcccaaccaagggaacctttgattaccccggttctattggatctcccagctaccacggattcattgaacactgatgcatttgggatagctcaaatcctcggaaaaagggtggagtttgctaagccg

SEQ ID NO: 5152 - protein, 63 aa, Homo sapiens
MQAFPKKKTLNFRNILRRGEISQPREPLITPVLLDLPATTDSLNTDAFGIAQILGKRVEFAKP

SEQ ID NO: 5153 - DNA, 171 bp, Homo sapiens
  misc_feature (1)..(1): Wherein n may be a, c, g or t
nctgtgggcttgagggggttcgggggggttgtcccccccgctgtaacagagcgtcacgtgttggatcgttggctcgtcagtgccaccaatgtgctggtacgcgacgttactgaggcgctgaacaacttcgacacccagcgcgtcggcaaccttattgctcagttcgtcgac

SEQ ID NO: 5154 - protein, 57 aa, Homo sapiens
  misc_feature (1)..(1): Wherein Xaa may be any naturally occuring amino acid
XVGLRGFGGVVPPAVTERHVLDRWLVSATNVLVRDVTEALNNFDTQRVGNLIAQFVD

SEQ ID NO: 5155 - DNA, 302 bp, Homo sapiens
acgcgtgatgagtttctgaataatcgagagctacagatgaaaattattcagcacaagttgagtgagtactggcaagaggctcaggcgaatagcggtggagatgaagcgatcgctgtgttaagggttgcaagccattggtacagcggcagccccaaccgctacgcttcgacgctaccgcaatcgtaccatggaaaaaatgggaaattgcatcgctacccatctgttgctgagtacagcaactcaattctgaaaaagtatagacactacagaaaaagcgaaagctgagacaaggtattggaaag

SEQ ID NO: 5156 - protein, 82 aa, Homo sapiens
MKIIQHKLSEYWQEAQANSGGDEAIAVLRVASHWYSGSPNRYASTLPQSYHGKNGKLHRYPSVAEYSNSILKKYRHYRKSES

SEQ ID NO: 5157 - DNA, 322 bp, Homo sapiens
ccatggtttcaagcccccattgtgtcagcccagagagcaactggagaccctctgacaccacctcccggcccaacaggaggggaagccgaaattcagattgtggaaactgcctacaattttcttccggccaaatgaccctccctaggctaccaagaccctggcctaaggggagccgaggtctcggcccgactgcagacgcccgcaccctgactccagatgcctccgaggcatccaggtgggccctgaggggcctgctgtggctttgttcttgttggctgggctgggggtctgacctggtgagggacatgagtgtcagtgtggg

SEQ ID NO: 5158 - protein, 106 aa, Homo sapiens
MVSSPHCVSPESNWRPSDTTSRPNRRGSRNSDCGNCLQFSSGQMTLPRLPRPWPKGSRGLGPTADARTLTPDASEASRWALRGLLWLCSCWLGWGSDLVRDMSVSV

SEQ ID NO: 5159 - DNA, 287 bp, Homo sapiens
tgatcacatgcacacacacacacacacacacacgaggacatgacctgtctcttctaaacccacacatgcactctccagcccaccccaaaccaacagtgtgcttgggtgtatctgtttccacttgcatcatgggtcaccagccaggaagcacatggttggccagtgagggttacctttggcttttaaagatgatactgtcaaaaccaggtctctcaacagatgcacagtatccacgcacaatgaaagaaaaaccccacaccagtgtgtgctttgatgttctgtgctgc

SEQ ID NO: 5160 - protein, 74 aa, Homo sapiens [sequence omitted]

SEQ ID NO: 5161 - DNA, 226 bp, Homo sapiens
gccggcttcgccgacgtcaagggcggcaccctgtaccccctgctcaaacgtctggaaggtgccggtctggttgacatcgagtggcgacccggcgaggccgggccgggccaaaagttttacctcatcaacactgccggaagacaacgcctaatggcgctcaccgcaagctggcaacgctactccaccaccgtcacccgactgctcgacgaaggatcaccatcatgat

SEQ ID NO: 5162 - protein, 74 aa, Homo sapiens
AGFADVKGGTLYPLLKRLEGAGLVDIEWRPGEAGPGQKFYLINTAGRQRLMALTASWQRYSTTVTRLLDEGSPS

SEQ ID NO: 5163 - DNA, 342 bp, Homo sapiens
aaatttgcattacggaatcaagagctgtaatgtttagcaacgtgcacagcgcaatgcgcccgtggctcaacggatagagcatctgactacggatcagaaggttgggggttcgaatccctccgggcgcgcagatggaaaccccgcctttgtggtggggtttcgtcgtcttgaggaggctctttccggaagcaggcaggaatatccgcgtctcaattcagcgctgtgctcttacctgcgataaaccacacaatcggtccgacaagtgggaagcagaagcagacgacgatccaggtcacccttcccgcgcccgtcacgtagtccgatctgagaatcgacaaaaga

SEQ ID NO: 5164 - protein, 70 aa, Homo sapiens
METPPLWWGFVVLRRLFPEAGRNIRVSIQRCALTCDKPHNRSDKWEAEADDDPGHPSRARHVVRSENRQK

SEQ ID NO: 5165 - DNA, 545 bp, Homo sapiens
gccggcattacttcccctccccagaggcaatcagtgttaagtctcctgaattctagtgctttcctccagagataggatatatatgtatatgtttgtatgtatagagattaattttctaaacataatcttttcacagtttatcttggagatggtttcacttcttgcttgtagagctgccacattgtttttaatctactgcatagttgtatattgtttggctgtactatatagtttatttccccattatttatttgcacgttttaaactacacttgtctattggtagacatgtcagttgtttatcatttttgctagtacatgtaatattacatttagcatcttgcatgactcattttgcaagtaagccaatctgcccataaaaataatttttacaaaaagtggaattgctgggccacttgcaaagtcatttcgacagtgttccaaattgcactgtaagatattgaatccgtttctgcctccaggagccgtgcattcctgcacacctttcgccagtttagtatgttgttaaattctttgattttgcaa

SEQ ID NO: 5166 - protein, 98 aa, Homo sapiens [sequence omitted]

SEQ ID NO: 5167 - DNA, 363 bp, Homo sapiens
tccggaggaaggctccagactccacctcacccacagatttcagccttaaaaattcatttaattttttctttagcaaaaggacagcttttttctaatatagaccaggctggctttgaacctgtgatcctcctgcccctcctcctgagtgccgggatgacaggcgcactaccaagcctggccttcaaaaagggaatttccaaaggggtgaaggggatccaaacactgctacactgtactcttcctatcctatgctcaccatggccccagtcttggccatgaggccagggctggggcccaaagacaaatctcattgatgattgtttaagaaaataaaacaaaaataaaaaacacaagacaaaccaa

SEQ ID NO: 5168 - protein, 85 aa, Homo sapiens
MRFVFGPQPWPHGQDWGHGEHRIGRVQCSSVWIPFTPLEIPFLKARLGSAPVIPALRRRGRRITGSKPAWSILEKSCPFAKEKIK

SEQ ID NO: 5169 - DNA, 375 bp, Homo sapiens
  misc_feature (375)..(375): Wherein n may be a, c, g or t
tgatcagcagtcaagtctattgagccagtctagttccagagccaggttccttccctgggggagcacacatctccagtggaggggcttatagtcacagagggaagataatggctcagtgaagtctgatgaatccagaggatatccagagttcacccccagcttggcaaatggatgctgactgaacactgatttgatctcaaggcaactttccagaatgttcgttgctctccccattctcattcaattgcactcatcatgtcctgcctggatgctcaggactctcccaaatgcactgaatgaactgcaaggtacctgggctaagcccagtttagcctttcagagtagaatgactagacttgtggacaactagactan

SEQ ID NO: 5170 - protein, 78 aa, Homo sapiens [sequence omitted]

SEQ ID NO: 5171 - DNA, 385 bp, Homo sapiens
gaattccctcggaactctgggactcatctcgtcaggacccaaagactcctggatgtttgggtcctcaggtgatccagaacctgatctcccatcagtgcgggatgggaagggatctgtgggtctggcattgcttcctcaatccccacctaccaaaccaaaggtgagggcagtgcataatgagcagttatcagagaagatggaagcaaaaatgttgttgggtacctgagccttctctggtggtaagcagcgtcatgcacagagtgcagccatgtgctccgagcaaggagcacaggtttgtgcaagaggcccggatgcagggcagtgccttcattactgtgttgtgtccaacgagtggcagcagagctgcggtgctcccgagtgccgt

SEQ ID NO: 5172 - protein, 69 aa, Homo sapiens
MSSYQRRWKQKCCWVPEPSLVVSSVMHRVQPCAPSKEHRFVQEARMQGSAFITVLCPTSGSRAAVLPSA

SEQ ID NO: 5173 - DNA, 281 bp, Homo sapiens
gaattcgtgagtggacagcgggaggcagcacgtgtgagaagagcccgtcgcaaaggccatctaggacagcggcccccaaccttttggcacaagggaccggtttcatggaagctaatttttcttttttttttttttttttgggaacggagccccccccgggggcccagggggaagggaagggggccaacccgggccaacggaaacccccccccccctggcccggttgcaggaattttcaaccccggaaacccaaattccacccccactggcgccgttacata

SEQ ID NO: 5174 - protein, 93 aa, Homo sapiens
EFVSGQREAARVRRARRKGHLGQRPPTFWHKGPVSWKLIFLFFFFFWERSPPRGPRGKGRGPTRANGNPPPPGPVAGIFNPGNPNSTPTGAVT

SEQ ID NO: 5175 - DNA, 270 bp, Homo sapiens
atttttcaaacgttagtcaagctctttaagcagatcagaatgatttaccacaccagatctccgttactgtctgttcacgacgtggcgcctggtttatggtttcccaactcccctcccccccttatattgagaggccacgaagcgtttattattactgccataagaaaggcgaatctgctaacatttctattgacgtcgctgaactgccttaattacgggtttgagctgctacagtcgatatttctcgatattttctgtccaaatacaaac

SEQ ID NO: 5176 - protein, 90 aa, Homo sapiens
IFQTLVKLFKQIRMIYHTRSPLLSVHDVAPGLWFPNSPPPLILRGHEAFIITAIRKANLLTFLLTSLNCLNYGFELLQSIFLDIFCPNTN

SEQ ID NO: 5177 - DNA, 366 bp, Homo sapiens
gcttccgttcaagttagagaaatcagatttcaaaaaggtcttatagatagcactgaggattacatatctgagactttgctacctttggaactaaactttgatttttttccaaacactataagcacaaacaagggatgttatgtaggacaagagctgacagccaggacatatgctacaggcattctacggaaacgtttggtcccagttaagctggataattatcaacttttagatacagacccagaaagaaagtacgcagaattccatatcgacaacgttgtagaaaagagccttgcagagaacgagccaaccctcaatccatttaccaataaaccgcccgaacgaaccaagagaaagcaaaggccg

SEQ ID NO: 5178 - protein, 122 aa, Homo sapiens; identical to SEQ ID NO: 602

SEQ ID NO: 5179 - DNA, 544 bp, Homo sapiens
ggatccatgcgctgttttccaattaatgacactaggttcggcagagaattaataaactccatatgtgaatttacagtatgtattttgacatgccattctctatcaatgaagcgcaatcgttgctctaaatcaaatttttttatccctaattttccaacttggcttgattttttacttctcggtcttaaagcttcttctgttcctgacaatcgttgttctacccagcctttgtacttttcattttctaattggaaaatagctcttttgagtttatttatatcgcttagtataagaatcacatgttttccattctttgagaaaaatcgtatcttcctatataattctttcttttgtgaagtgtattgttcaaaaaattcttgcgcatcataatatagaatcaaaacgttttcttcaactattttgggatcacaggggtaatagaaatcgttactaaagtcgtaaatactgtcacattttcgaagaaatcttaaaagcggcatagaatcgttatagcttgattgcacaactgctggtgccaattgtt

SEQ ID NO: 5180 - protein, 127 aa, Homo sapiens
MRCFPINDTRFGRELINSICEFTVCILTCHSLSMKRNRCSKSNFFIPNFPTWLDFLLLGLKASSVPDNRCSTQPLYFSFSNWKIALLSLFISLSIRITCFPFFEKNRIFLYNSFFCEVYCSKNSCAS

SEQ ID NO: 5181 - DNA, 297 bp, Homo sapiens
ccatggggaaggaacagtctgttcaacaaattgtactagacattcacatacaaaagaatgaagttggacccttacttcataccatatacaaaatttaccacggaaattattgaagactaagtttttcaactccaaaacataaaattttagaataaaactgttgttggttgaattatgtcccccaaaagatatgttgaagttgacacccccagtagtcataaatgggacattttagaaataggctatttgcagatgtaatcaagttaagatgaagatgttagggtggggccttgtccc

SEQ ID NO: 5182 - protein, 73 aa, Homo sapiens [sequence omitted]

SEQ ID NO: 5183 - DNA, 368 bp, Homo sapiens
  misc_feature (1)..(1): Wherein n may be a, c, g or t
naggcgatgagcagccttttacccgcgaattgaaacagagatattggcaaggtgccggcggcattcaatgcgcgtgagtatttctgagaaagcgataaatacctaaggcgtcaccgcaagtgccattcgataggctggttttttcaaacccgtcacggatggcccgatatgtcagaacaacccgttacctcaacccccgaaggcaccttcaacgctgaccttcggggcgtgcattacgacttcctcaaggaacgtgtacccgcgtggttcacccagggttccacccagcgccaggaagaactcgccaaccatgatacggaactgcccagctggtacctgaccgccacggctcagcaaaagctgagctg

SEQ ID NO: 5184 - protein, 66 aa, Homo sapiens
MSEQPVTSTPEGTFNADLRGVHYDFLKERVPAWFTQGSTQRQEELANHDTELPSWYLTATAQQKLS

SEQ ID NO: 5185 - DNA, 491 bp, Homo sapiens
acgcgtgaagggagcacactgcgcaaggccctggggtgtctcaggagaggggttcaggaaggacctgctcacttgggctgcattaggggatttggaagaggttttaaggatgcggagctttcctccttggattggattctatcggaaagcagggctaattctgtgaattgtggtcttaaatcttttccagaaggagagaggaatgaagtgaagctagagctattcttggtgaataaactgcagtccctcatagtagccaggccagggagtgtttgaaacagcaggagggacgcctgaactcttaggggaagaaagcaggagatagtgggtgcggtgacgggagggagtggaggttggcctttctgtagggaaggagggggctggcttgggaggagcagagaagttaggacgatccttctgtgacccacacagacaaagagctcccggtcatggctttttgatataaaatctcagccgctgagctcgctagc

SEQ ID NO: 5186 - protein, 60 aa, Homo sapiens
MRDCSLFTKNSSSFTSFLSPSGKDLRPQFTELALLSDRIQSKEESSASLKPLPNPLMQPK

SEQ ID NO: 5187 - DNA, 380 bp, Homo sapiens
  misc_feature (17)..(17): Wherein n may be a, c, g or t
  misc_feature (29)..(29): Wherein n may be a, c, g or t
  misc_feature (36)..(36): Wherein n may be a, c, g or t
  misc_feature (38)..(38): Wherein n may be a, c, g or t
  misc_feature (57)..(57): Wherein n may be a, c, g or t
  misc_feature (58)..(58): Wherein n may be a, c, g or t
  misc_feature (62)..(62): Wherein n may be a, c, g or t
  misc_feature (64)..(64): Wherein n may be a, c, g or t
  misc_feature (65)..(65): Wherein n may be a, c, g or t
  misc_feature (71)..(71): Wherein n may be a, c, g or t
  misc_feature (76)..(76): Wherein n may be a, c, g or t
  misc_feature (78)..(78): Wherein n may be a, c, g or t
  misc_feature (94)..(94): Wherein n may be a, c, g or t
  misc_feature (106)..(106): Wherein n may be a, c, g or t
  misc_feature (109)..(109): Wherein n may be a, c, g or t
  misc_feature (123)..(123): Wherein n may be a, c, g or t
  misc_feature (131)..(131): Wherein n may be a, c, g or t
  misc_feature (138)..(138): Wherein n may be a, c, g or t
  misc_feature (146)..(146): Wherein n may be a, c, g or t
  misc_feature (149)..(149): Wherein n may be a, c, g or t
  misc_feature (156)..(156): Wherein n may be a, c, g or t
  misc_feature (160)..(160): Wherein n may be a, c, g or t
  misc_feature (191)..(191): Wherein n may be a, c, g or t
  misc_feature (192)..(192): Wherein n may be a, c, g or t
  misc_feature (194)..(194): Wherein n may be a, c, g or t
  misc_feature (202)..(202): Wherein n may be a, c, g or t
  misc_feature (206)..(206): Wherein n may be a, c, g or t
tccggatgggggcgggngggcagggaacncaaccangngaaaagaaggggagaaccnnaagncnnaccccnagccncngaggagggcaagagcnagagaaagagcnaancaacaagggccagngaaaaaancaagcanaccgaagnaanaaagccnccanaaaaacccgaaagaaagggttttaaagagcnncnagaccgcnccgnatttttaggtacctggagggtggcatgcccagagagggcatgcaagctccatgccccttccccatcccttgtcctaggtagctcttacctggttgttcatttgtatcctttacaataaactgataaacataaggtatttccctgagtggtgtgagccactgttgcaaatgatca

SEQ ID NO: 5188 - protein, 59 aa, Homo sapiens
  misc_feature (11)..(11): Wherein Xaa may be any naturally occuring amino acid
  misc_feature (18)..(18): Wherein Xaa may be any naturally occuring amino acid
  misc_feature (19)..(19): Wherein Xaa may be any naturally occuring amino acid
  misc_feature (20)..(20): Wherein Xaa may be any naturally occuring amino acid
  misc_feature (24)..(24): Wherein Xaa may be any naturally occuring amino acid
  misc_feature (25)..(25): Wherein Xaa may be any naturally occuring amino acid
  misc_feature (30)..(30): Wherein Xaa may be any naturally occuring amino acid
  misc_feature (34)..(34): Wherein Xaa may be any naturally occuring amino acid
  misc_feature (35)..(35): Wherein Xaa may be any naturally occuring amino acid
  misc_feature (40)..(40): Wherein Xaa may be any naturally occuring amino acid
  misc_feature (42)..(42): Wherein Xaa may be any naturally occuring amino acid
  misc_feature (45)..(45): Wherein Xaa may be any naturally occuring amino acid
  misc_feature (47)..(47): Wherein Xaa may be any naturally occuring amino acid
  misc_feature (48)..(48): Wherein Xaa may be any naturally occuring amino acid
  misc_feature (51)..(51): Wherein Xaa may be any naturally occuring amino acid
  misc_feature (52)..(52): Wherein Xaa may be any naturally occuring amino acid
MGAGGQGTQPXEKKGRTXXXTPSXXGGQEXEKEXXNKGQXKXQAXRXXKAXXKTRKKGF

SEQ ID NO: 5189 - DNA, 228 bp, Homo sapiens
cccgccgtaatgtacggccacgatcccgatccgatccacgtgacccttgacggccacgccacgttgctggctctgcgtcccgagaatccgctgctctcgattgagatcgagggccagaaacctatgctcgctctgccgaaggacgttcagcgcgacgtccttaagggatttgtccgccacgtcgacctgctgactgtgcgtcgtggcgagaaggttgacgtgaatgtc

SEQ ID NO: 5190 - protein, 76 aa, Homo sapiens
PAVMYGHDPDPIHVTLDGHATLLALRPENPLLSIEIEGQKPMLALPKDVQRDVLKGFVRHVDLLTVRRGEKVDVNV

SEQ ID NO: 5191 - DNA, 284 bp, Homo sapiens
agatctctctctgtcttcgagcatgcacacagatgaggccatgtgaggacacggagagaaggcagccatatgcaaggcaggaagagagccctcaccaggaaccaaatcactgggaccttgatcttagacttcccagcctccagactatgagaaataaatttaagccacctagtatgtggtaagaacaaatatatttggtctttgtccctagttcctgacacacaaacctaaaacttgaagaatcacaggagtaatgtgtgtctttcatatgctaatgggatgac

SEQ ID NO: 5192 - protein, 53 aa, Homo sapiens
MKDTHYSCDSSSFRFVCQELGTKTKYICSYHILGGLNLFLIVWRLGSLRSRSQ

SEQ ID NO: 5193 - DNA, 253 bp, Homo sapiens
tccggacgtgccgccggatttgctcgacgccaccgggtcagtgaggctctcgacatcgacgccgtgctggcacaagctgatcttgtcgtcacctgccgtgggtcgggggttcctgcgttgtcggctgaggctgctcggcgcgcggtcgatgctcgaaggggccgagatctcatggtgctcgatttagcaatcagtggggacgttgaggagcctgtccccgctggggtagaggtcatcgaccttgacccgatcg

SEQ ID NO: 5194 - protein, 84 aa, Homo sapiens
SGRAAGFARRHRVSEALDIDAVLAQADLVVTCRGSGVPALSAEAARRAVDARRGRDLMVLDLAISGDVEEPVPAGVEVIDLDPI

SEQ ID NO: 5195 - DNA, 344 bp, Homo sapiens
  misc_feature (344)..(344): Wherein n may be a, c, g or t
tgtacaatgggatgaccctcgagctccatatcatctcttctctgtcctatgctaagctattaccccaccccagctccaaaaaggcctgcacagtaagagccaccactatccccccacctcatggtgcaaaaggctgctcagaaatgtggctgtccagctgcagaacagggtgaacacagggccaggacagggactgggggcaggtctgtttccctagggagcagccttgtcatgggaggtgggggcttctggctgtgtgaccttggactagttactccacctctctgatccttgagtttctcatctcttagcaggaaggaagccccctgtgggatggtgatgan

SEQ ID NO: 5196 - protein, 55 aa, Homo sapiens [sequence omitted]

SEQ ID NO: 5197 - DNA, 260 bp, Homo sapiens
aaatttgagcagagagggagtggaagtcttggcagccaccacctaccagagctcactggtggagggaaaagaaacaggcccaacgatgggtagtgttttaacttcactgtcccctgcaccacagcctggatcgctgggttccagagagtctccaaagaataagagatcccctctcctgcccacatccctgcatcacagcccagccagaaagcctcacagctagcattggcctgtatctcttgcacactgcttccagcttt

SEQ ID NO: 5198 - protein, 61 aa, Homo sapiens
MWAGEGISYSLETLWNPAIQAVVQGTVKLKHYPSLGLFLFPPPVSSGRWWLPRLPLPLCSN

SEQ ID NO: 5199 - DNA, 434 bp, Homo sapiens
actatagaatcaccatcctcaccaagtgattccagtcatacctctgcatccagcagcgctatctctttgcctttcagcaatgctccttctcagctcgccgtggccaaagaacttgagtccgtctatttagattccaatagatacaccaccaagactaggagggaaagagcaaaattcgaaattcctgaagaacaagaagaagataccaataacagcagcagtggtagtaatgaggaggagcacgagtcgctagatcatgaatctagcaaaagccgaaagaaattgtcaggcgtaaaattgccgcctgtacgtaacctactgaaacaaattgatgttttcaacggtcccaaaagagtttaacctttacggcccctttttatctcaccatttttcctctaacgaactgtcatgaaacaacttagcatataacgcgt

SEQ ID NO: 5200 - protein, 119 aa, Homo sapiens
TIESPSSPSDSSHTSASSSAISLPFSNAPSQLAVAKELESVYLDSNRYTTKTRRERAKFEIPEEQEEDTNNSSSGSNEEEHESLDHESSKSRKKLSGVKLPPVRNLLKQIDVFNGPKRV

SEQ ID NO: 5201 - DNA, 265 bp, Homo sapiens
tccggactcactacgagggcgacctagggatggttagtgtttgtccaaacaagcgccaacaagtttattacatagaaaagccttatggtctacagatcacgcaaaaggttagcacttcaaccagcattaatcattcttcgccttgataaactttttaataatgcccatcatctcactcccagggaatcgtccaaggcagcccctcgcagtggcaatctcgttgaactcacacacagtgtcaccactgaaagctttaagttgatca

SEQ ID NO: 5202 - protein, 60 aa, Homo sapiens
MVYRSRKRLALQPALIILRLDKLFNNAHHLTPRESSKAAPRSGNLVELTHSVTTESFKLI

SEQ ID NO: 5203 - DNA, 536 bp, Homo sapiens
  misc_feature (1)..(1): Wherein n may be a, c, g or t
  misc_feature (2)..(2): Wherein n may be a, c, g or t
nnacgcgtagagcgaaaaacctcgcaagggtggactatcccatgtgtagccttgcaagagtcatccccgagagggggaaaactcccgaaaggagatcacatgggactcttcgataaggccaaggacgccatcagcgaccaccaggacgacatcaagaatcaggccagccagcacagcgatcaggtcgagcagggcatcgacaaggctggcaacactgtcgacgacaagaccggcggcaagttctccgatcagatcgacaagggccaggacgccctcaaagacaagcttggcgacctctgagtcgtccacaacataacgcagtctgtcccagggacccgctccggatgggagcggaagtgctgcaacacgaggggtggtgctccattgagcgccatccctcgtctatcttccccactgtcagtaaaatgccatacctgtaagacccatcgatcagtgtctcggcactcccacggtgggaagtccgagcaccgtaggagtaccccggggcacctgcccctgacgggcgtgccacgcgt

SEQ ID NO: 5204 - protein, 66 aa, Homo sapiens
MGLFDKAKDAISDHQDDIKNQASQHSDQVEQGIDKAGNTVDDKTGGKFSDQIDKGQDALKDKLGDL

SEQ ID NO: 5205 - DNA, 264 bp, Homo sapiens
tctagaaaagactaccaaaggctttttcaacctcaaagcacagacaacacctttaataacaatgacccgttgattcaagagtggataccaaaaagcaaaacattattcactagtttatcctttggttcaagtgcacctacttatcaagaagcgtcaactgagatacaggcatgccatgactgggtaagcatatccaaggagcaatggaaacagttactctaccatgtattacagtacattgtagacgaggcagtgaaggtgaat

SEQ ID NO: 5206 - protein, 88 aa, Homo sapiens
SRKDYQRLFQPQSTDNTFNNNDPLIQEWIPKSKTLFTSLSFGSSAPTYQEASTEIQACHDWVSISKEQWKQLLYHVLQYIVDEAVKVN

SEQ ID NO: 5207 - DNA, 262 bp, Homo sapiens
ggatccctttcctatctaagcgacacaactcaaatgtcccttcttggctcttgtatcatccaagattcttgccagttatgcaggctgctgctaaggagtgatggagatgcacccaggtcagaggcatcttcctggctgtggtggcaggcactgccaatgcccagatcatggatcttcctggtagctgacctcctgacaacctctgggtctgaccagcatcccccaggggaggtaatcaaaccaaggcccagggctgcctagg

SEQ ID NO: 5208 - protein, 75 aa, Homo sapiens
MSLLGSCIIQDSCQLCRLLLRSDGDAPRSEASSWLWWQALPMPRSWIFLVADLLTTSGSDQHPPGEVIKPRPRAA

SEQ ID NO: 5209 - DNA, 372 bp, Homo sapiens
agggagagggactgaaagttgacttgatctgcagtggcagtgacttaattgatcatgcctgcgtaatgaagcttccataaaaaccctgaaggactgggtttggggagcttctggatggctgcacacgtggaggttcttggaggatggcaccctcagagagggcttggaggctctgtgccccttctcacatgcctcgccctacgtctcttcatttgtatccttcataatatcctttataataaatcagtaaatgcaaataaagtgtttccttgagtcctgtaagttgctctagcaaatttatcaatcctaagaacctcgatttatagccggttggtcagaagcacgggtaaaacaacctggagcttgcaattg

SEQ ID NO: 5210 - protein, 52 aa, Homo sapiens
MAAHVEVLGGWHPQRGLGGSVPLLTCLALRLFICILHNILYNKSVNANKVFP

SEQ ID NO: 5211 - DNA, 343 bp, Homo sapiens
  misc_feature (1)..(1): Wherein n may be a, c, g or t
nccccgaataaggaactcactagaaactactgtatatcttttcctgttagcggcaaacgctaatagtttatcccattgttcgttaaacttttcctgtgagaaattaggatgattagaagcaagatgattatgcgcaccaccaaaaataccataaggagaaaaacaaggtttttccgtaatatcacaaggtaactgaagaccgacatgttgtatcgcactggttgcagttttaccaataccagggtggaatatcatggtattaggttgatttatatatatgctcattttattaaattactcgcctaagaatgggaagcgaccaaattgactgatcaatgggccc

SEQ ID NO: 5212 - protein, 95 aa, Homo sapiens
MSIYINQPNTMIFHPGIGKTATSAIQHVGLQLPCDITEKPCFSPYGIFGGAHNHLASNHPNFSQEKFNEQWDKLLAFAANRKRYTVVSSEFLIRG

SEQ ID NO: 5213 - DNA, 269 bp, Homo sapiens
acgcgttggcggcacagggggccatcgcccgatcaacagtaagcaccacgggagcgtcattaatcgtaagagtgacggtggtggaaccagtcttttcgatattgtcagaaggcggcatatcaactgggcgagcagccttgcccgcgacggcataaccgcacggaccgctggccgctgcgggcgctggagtggtcgtcgctgatgccgtaccggcagcgtgcgtagccgccctggagttggcagactcactcgtcgcagacggtaagctt

SEQ ID NO: 5214 - protein, 51 aa, Homo sapiens
MPSRARLLAQLICRLLTISKRLVPPPSLLRLMTLPWCLLLIGRWPPVPPTR

SEQ ID NO: 5215 - DNA, 344 bp, Homo sapiens
gatcagccgatgttgtcgctcctgaatgtcgcagctgcgacgatctttgtaccgcttacagtgggcggtggcatccgtgattttaccgacccagatggcacctttcaccctgcgcttgaagttgcacatgcatacttccgggccggggctgacaaagtgagcatcggaagtgaggctgtgtatgccgtagagcagctattgcagcgagcgacagagttgggcgactctaccggcgatccatgcgcggcacccgccatggcccttcgcggcgatacgggcatcgaacagattgcacacaaatatggcgtacaggcggtcgttgtgagtgtggacccgaaacgcgt

SEQ ID NO: 5216 - protein, 114 aa, Homo sapiens
DQPMLSLLNVAAATIFVPLTVGGGIRDFTDPDGTFHPALEVAHAYFRAGADKVSIGSEAVYAVEQLLQRATELGDSTGDPCAAPAMALRGDTGIEQIAHKYGVQAVVVSVDPKR

SEQ ID NO: 5217 - DNA, 279 bp, Homo sapiens
acgcgttgtcttctctccctgtggtctcaggaatcatgcctgcaaggcaaaccataaaacacccttctccactacaactctgtgtgaacggtggcattgggatgggggggatgggtagggagggaaggtttcgggaaacaaattcccaaggcttgaaatacagccatgctcacttgctgactgttgtgtgtccttccacacatttctcatctcatcatagtaataacatctacctcctatttgttgcgtggagtaagggcaatcatgcatgcaaaggta

SEQ ID NO: 5218 - protein, 81 aa, Homo sapiens [sequence omitted]

SEQ ID NO: 5219 - DNA, 369 bp, Homo sapiens
  misc_feature (1)..(1): Wherein n may be a, c, g or t
  misc_feature (337)..(337): Wherein n may be a, c, g or t
ngaagcatcttcttacccactggcttttcctgccactcctaagccttaccttttgcaggttcctggagatcctcgcttctcgtagtctttgcaaggatgagccatgttcagaagctctccggtcagtctgcagggatttcaaccttggctgcagattccatcacatggggagctttgccaaagtgctggtgtcctgtctgtatcccagaccagttgaatcaatctgatttaaagtttccgtatcactacaacttagaaccaatgctgaacaccattggttgcagggatatccacatcccaaactaacttctgatgtgatactctgaggcagagatgngaaaatgctaatttctgttgtgtgatttcact

SEQ ID NO: 5220 - protein, 69 aa, Homo sapiens
MSHVQKLSGQSAGISTLAADSITWGALPKCWCPVCIPDQLNQSDLKFPYHYNLEPMLNTIGCRDIHIPN

SEQ ID NO: 5221 - DNA, 372 bp, Homo sapiens
tcatgaaagatacatactctcctctggatgaattccatagtactcagcacacagatggccacattgggacagaaacctgtcatacatacagttctgaagagaaaagtttattcttcaagtgagaaaatgagaagggggacctggcgtattgtagtaccaatgacaaaagatgatgcactaaaggagattagaggaaaccaagttacttttcaggattgctttattgcagattttcttattctgttgacttttcctttgttgaccatacctgaaattcctggttatttaccaatctcctcaccacgtggtagtcaattaatggcttcctgggatgcttgtgtagtcgcatctgctgttttggtgacagatatg

SEQ ID NO: 5222 - protein, 115 aa, Homo sapiens
MNSIVLSTQMATLGQKPVIHTVLKRKVYSSSEKMRRGTWRIVVPMTKDDALKEIRGNQVTFQDCFIADFLILLTFPLLTIPEIPGYLPISSPRGSQLMASWDACVVASAVLVTDM

SEQ ID NO: 5223 - DNA, 321 bp, Homo sapiens
gctaaggccgacgttgtacttatctcgggccatgacggtggaaccggtgcggctccgttaacctcgatcaagcatgctggtgggccctgggaactaggcctggccgaggctcaacagaccttgcttcttaatggtcttcgtgaccgcatcgtggtgcaatgcgacggtcagctcaagaccggacacgacgtcgtcgtagctgccttgcttggcgcgaagaagttcgggttcgcaactcccgcgctcattgtcgaggggtgtgtcatgatgcgtaagtgccataccgacacctgcccggtaggtgtggctactcagaatccg

SEQ ID NO: 5224 - protein, 107 aa, Homo sapiens
AKADVVLISGHDGGTGAAPLTSIKHAGGPWELGLAEAQQTLLLNGLRDRIVVQCDGQLKTGHDVVVAALLGAKKFGFATPALIVEGCVMMRKCHTDTCPVGVATQNP

SEQ ID NO: 5225 - DNA, 234 bp, Homo sapiens
  misc_feature (1)..(1): Wherein n may be a, c, g or t
nctgagctttcttcttatacccatgtagctcccggcaaggtccgcgatatttacgatgtggatgacaccaccctgctgatggtggtctctgaccgcatctccgcctacgactttgccttggaaccggccatcccggacaagggccgggttctcacggccacctcgaagttcttcttcgatgccatcgattttcccaaccacctcgccggaccgctcgatgatgagcgcattccg

SEQ ID NO: 5226 - protein, 78 aa, Homo sapiens
  misc_feature (1)..(1): Wherein Xaa may be any naturally occuring amino acid
XELSSYTHVAPGKVRDIYDVDDTTLLMVVSDRISAYDFALEPAIPDKGRVLTATSKFFFDAIDFPNHLAGPLDDERIP

SEQ ID NO: 5227 - DNA, 276 bp, Homo sapiens
gaattcttcagggacactacccagacctgccagtagttctgtatacatgtctgggctcagccctattcacggctgttttatttcctgtgatgtataaattagccagcttaggtctgtaatgtgaatgaaaggaaaacatctcagggtcagaacactctgccctttaagtttggcccatcagggaaaggataaatgggaaggcatagaagagctccatggaatggattctgaagtagatgaacaaggcagtgaagctgcctgtattcattgtctaga

SEQ ID NO: 5228 - protein, 50 aa, Homo sapiens
MKGKHLRVRTLCPLSLAHQGKDKWEGIEELHGMDSEVDEQGSEAACIHCL

SEQ ID NO: 5229 - DNA, 343 bp, Homo sapiens
  misc_feature (343)..(343): Wherein n may be a, c, g or t
cccgggtgacagagtgagactttgtctcaaaaaaataataaaataggtgaaaatttttttaaatatttaaaaagaaagaaagggaggaagagaggaagggcctgcaattcagagggaaacgtactcgtggttgccaggactacaggaaggggatggggagtcaccacttattggctacagggtttccctttgggataaaaaagtgtggaaccagatactggctgtggtcctaccatgttgtatatggactaaatgctactggatcattcactgtaaaacaaagtagtaatttttatattatgtgcaatttaccacaagaatggatgaatgaatgacgtgggtn

SEQ ID NO: 5230 - protein, 60 aa, Homo sapiens [sequence omitted]

SEQ ID NO: 5231 - DNA, 224 bp, Homo sapiens
  misc_feature (1)..(1): Wherein n may be a, c, g or t
  misc_feature (2)..(2): Wherein n may be a, c, g or t
  misc_feature (148)..(148): Wherein n may be a, c, g or t
  misc_feature (212)..(212): Wherein n may be a, c, g or t
  misc_feature (224)..(224): Wherein n may be a, c, g or t
nntgatcagtcggccactgactcgcaggcccccgaggagctatctcgcgaatcccaactagaggccctgctggctgagcgcaccgaggatctgcagcgtctacaagccgaatacgtcaattacaagaggcgcgttgactgtgaccggncgttgtcgcgtcagtccggcgtggacaaggtcatcaccgacctcatgccagtgctcgaataaantgccatggttgn

SEQ ID NO: 5232 - protein, 69 aa, Homo sapiens
  misc_feature (1)..(1): Wherein Xaa may be any naturally occuring amino acid
  misc_feature (50)..(50): Wherein Xaa may be any naturally occuring amino acid
XDQSATDSQAPEELSRESQLEALLAERTEDLQRLQAEYVNYKRRVDCDRXLSRQSGVDKVITDLMPVLE

SEQ ID NO: 5233 - DNA, 430 bp, Homo sapiens
  misc_feature (1)..(1): Wherein n may be a, c, g or t
  misc_feature (2)..(2): Wherein n may be a, c, g or t
nnagatctacctgccattgacgctggcagatggttctcgccccagtttatcggggagccgctgccgcggttagcggacctcgttgacttcatgaatgagactggtgtcaacgccaatattgaaatcaagtcgaacgaggagggagctcgcagttcgcttcagttacgcgattccgtgatcgcagagcttgaaagactcgagcctggacgccaggtgattgtgagctcgttcaaccatgtgctgttatccaagttcaaggaagcggctccgcaatgggacgtggcatgtctttatgagacggcggcgctctatgacgattggcgttccatgctggagcttgtgggagccacttacatccaccccgaggattctgcacttaccgagcggagtgttgcgcagttcaaggacgctggttttcgagtcaacgcgt

SEQ ID NO: 5234 - protein, 143 aa, Homo sapiens
  misc_feature (1)..(1): Wherein Xaa may be any naturally occuring amino acid
XDLPAIDAGRWFSPQFIGEPLPRLADLVDFMNETGVNANIEIKSNEEGARSSLQLRDSVIAELERLEPGRQVIVSSFNHVLLSKFKEAAPQWDVACLYETAALYDDWRSMLELVGATYIHPEDSALTERSVAQFKDAGFRVNA

SEQ ID NO: 5235 - DNA, 201 bp, Homo sapiens
  misc_feature (97)..(97): Wherein n may be a, c, g or t
  misc_feature (109)..(109): Wherein n may be a, c, g or t
  misc_feature (201)..(201): Wherein n may be a, c, g or t
gggcccgccatcgggggtctgctggcggagccggccggcgcgctggcggaggaggagagcccgtggatctgctcggactgcggcaagacgtttgggngccgggccgccntggccaagcaccagcgctaccacgcgggcgagcggccgcatacgtgcgccgactgcggcaagagcttagtgtacggctgggacgtgacgggn

SEQ ID NO: 5236 - protein, 67 aa, Homo sapiens
  misc_feature (33)..(33): Wherein Xaa may be any naturally occuring amino acid
  misc_feature (37)..(37): Wherein Xaa may be any naturally occuring amino acid
GPAIGGLLAEPAGALAEEESPWICSDCGKTFGXRAAXAKHQRYHAGERPHTCADCGKSLVYGWDVTG

SEQ ID NO: 5237 - DNA, 222 bp, Homo sapiens
cggctggctgtggacaccgataccttcagctttggggtggtaatactggagacccttgctggtcagagggctgtgaggacacaaggtgcaaaaaccaaatatctgaaagacctgattgaagatgaggctgaagaggtgggagtgaccttaaaaagcacccagcctactttgtggatgggtgtagccacggatgcttggactgctccaattgctgcccagatc

SEQ ID NO: 5238 - protein, 74 aa, Homo sapiens
RLAVDTDTFSFGVVILETLAGQRAVRTQGAKTKYLKDLIEDEAEEVGVTLKSTQPTLWMGVATDAWTAPIAAQI

SEQ ID NO: 5239 - DNA, 368 bp, Homo sapiens
  misc_feature (1)..(1): Wherein n may be a, c, g or t
  misc_feature (2)..(2): Wherein n may be a, c, g or t
nnaagctttctcaacacccaactttttgtccgaaaaaagaatggccttgagctgacacaaaaaggcaaagtgtatttagaaaccgtcagccctactctattaacactggctgaagcctcacaaaaaatgaacgacaagctcactccatgcgctctagatttagaaataggcacctgcttttcgcacttctggctcatccctcaccttgatgattttcgagacaaacaccccgacatcaaccttaatatcaacatcaacaatcagagaaacatcaacaatgaaagccatgcagattatcatgtggcgttttattacggcccaatagaagcactaaacaatcaccaagagttactattcaaagaacgcgt

SEQ ID NO: 5240 - protein, 122 aa, Homo sapiens
  misc_feature (1)..(1): Wherein Xaa may be any naturally occuring amino acid
XSFLNTQLFVRKKNGLELTQKGKVYLETVSPTLLTLAEASQKMNDKLTPCALDLEIGTCFSHFWLIPHLDDFRDKHPDINLNININNQRNINNESHADYHVAFYYGPIEALNNHQELLFKER

SEQ ID NO: 5241 - DNA, 231 bp, Homo sapiens
  misc_feature (85)..(85): Wherein n may be a, c, g or t
aaatttagagatacttacaatccagctgcttctgattttcatcttcaagcaatgatccagtctgctggtaaattggtccttattnataaattgcttcccaaaatgaaagccggaggtcataaagtgctcatcttctctcaaatggttcgttgccttgacattctggaggactatctcatacataaaagatacttatatgagcgaattgatggcagagtcagaagaaatctt

SEQ ID NO: 5242 - protein, 77 aa, Homo sapiens
  misc_feature (29)..(29): Wherein Xaa may be any naturally occuring amino acid
KFRDTYNPAASDFHLQAMIQSAGKLVLIXKLLPKMKAGGHKVLIFSQMVRCLDILEDYLIHKRYLYERIDGRVRRNL

SEQ ID NO: 5243 - DNA, 333 bp, Homo sapiens
  misc_feature (1)..(1): Wherein n may be a, c, g or t
  misc_feature (2)..(2): Wherein n may be a, c, g or t
nnacgcgtgcctcctcacaggaactctctccgaagtaccaatggacatttgcctaaccctaaacctcaatctgttgatgatggaaagcctacccctgtaaattctgtaaattcaaatacagctgggccttcagagaagaagagtaaattttttaaaagttttagcgcgaaacatgtacaagacaataataaaaaggaaggaagtcctgctatattaaccactggaaaaccctcttctcgtcctcaagacgcacctccattgatagtcgaaacacctaatgagcctggtgctccgagcagattgagtttcgagaacgtcacagatagacctccg

SEQ ID NO: 5244 - protein, 111 aa, Homo sapiens
  misc_feature (1)..(1): Wherein Xaa may be any naturally occuring amino acid
XRVPPHRNSLRSTNGHLPNPKPQSVDDGKPTPVNSVNSNTAGPSEKKSKFFKSFSAKHVQDNNKKEGSPAILTTGKPSSRPQDAPPLIVETPNEPGAPSRLSFENVTDRPP

SEQ ID NO: 5245 - DNA, 481 bp, Homo sapiens
agatcttttctgggtctctaagtgcctcagcgatgatttgagcagtagtcatgcatctgttgcaagcttttctttgttaagatcccaattttaagagaatcaacagtataaaatatcacacttggagtgggaagctgattttaaaatggcagatgagataataagatcagattgatgttaattcccttactgcgaatcccacagacttttgtgagaatggagaccagacttattctaaggcatctgcttcttcccacgttcctcccacttgagactgaggaggcaaattgcttggggaaacccccatttccgccgtggttgcctttctagagatggataaagcagcatgtaggtgaatggtattaggaagcaagtgagtcactgcattttggcatcataactcaccactgtctgtggcacagcagcaatagccattttccttaagcaacatctggacgtgactgcatgaagttacccatgg

SEQ ID NO: 5246 - protein, 51 aa, Homo sapiens [sequence omitted]

SEQ ID NO: 5247 - DNA, 279 bp, Homo sapiens
  misc_feature (1)..(1): Wherein n may be a, c, g or t
  misc_feature (2)..(2): Wherein n may be a, c, g or t
  misc_feature (3)..(3): Wherein n may be a, c, g or t
  misc_feature (4)..(4): Wherein n may be a, c, g or t
  misc_feature (5)..(5): Wherein n may be a, c, g or t
  misc_feature (6)..(6): Wherein n may be a, c, g or t
nnnnnngccaaaccttctagggatatgattaacagagaattcgctatggcgttcaggtcaggtgcttacaaaaggtataattcttttaactctgtgcaagatttcaaagcacaaatagaaaaagccaacccagacagatttgaaatcggtgccatatataacaaaccgccaagagaacgtgatactctattaaaaagcgaattgaaagctttagagaaggagttggtgtttgatattgatatggatgattacgatgccttcagaacgtgttgctctaga

SEQ ID NO: 5248 - protein, 93 aa, Homo sapiens
  misc_feature (1)..(1): Wherein Xaa may be any naturally occuring amino acid
  misc_feature (2)..(2): Wherein Xaa may be any naturally occuring amino acid
XXAKPSRDMINREFAMAFRSGAYKRYNSFNSVQDFKAQIEKANPDRFEIGAIYNKPPRERDTLLKSELKALEKELVFDIDMDDYDAFRTCCSR

SEQ ID NO: 5249 - DNA, 567 bp, Homo sapiens
  misc_feature (1)..(1): Wherein n may be a, c, g or t
  misc_feature (2)..(2): Wherein n may be a, c, g or t
nnacgcgtcatagaacttttggcaattcgcgtcacaaataaattttggcaacttatgtttcctcttcgagcagtactcgagccctgtctcaagaatgtaataatacccatcgtaggtatggttaaagatagcatctccacaacctcaaagctccttgccgagagtcgccctcctttgtcgagtaattttcacttttcatatgagaacttattttcttattctttactctcacatcctgtagtgattgacactgcaacagccaccatcactagaagaacagaacaattacttaatagaaaaattatatcttcctcgaaacgatttcctgcttccaacatctacgtatatcaagaagcattcacttaccatgacacagcttcagatttcattattgctgacagctactatatcactactccatctagtagtggccacgccctatgaggcatatcctatcggaaaacaataccccccagtggcaagagtcaatgaatcgtttacatttcaaatttccaatgatacctataaatcgtctgtagacaagacagctcaaataacatacaattg

SEQ ID NO: 5250 - protein, 129 aa, Homo sapiens
MFPLRAVLEPCLKNVIIPIVGMVKDSISTTSKLLAESRPPLSSNFHFSYENLFSYSLLSHPVVIDTATATITRRTEQLLNRKIISSSKRFPASNIYVYQEAFTYHDTASDFIIADSYYITTPSSSGHAL

SEQ ID NO: 5251 - DNA, 468 bp, Homo sapiens
  misc_feature (1)..(1): Wherein n may be a, c, g or t
  misc_feature (2)..(2): Wherein n may be a, c, g or t
nntcatgaaacaacactccatcttcactaaagaagcccttaaagaatggagcgacaacgatattgaacacgccgcacacctactagaacgcctcagtatagatatacgtaacaaactcctccaccaacccaccctacgagccgacgaaggaagaaaagaacagtagtaaacaccaccactaaagaagataaaaaagcacgccgccgcgaagtgctccaagcactcatcggtgtgatggtcggcgttttcgtcgccatgacatccctcaccattgtgggaacatcactccccaccatgattaaggaactacacggttcccaaaccatgtacacgtgggtcattaccgccagcatgctctcctccaccatcgccaccatcatcgccggcaaactcgctgaccaattccacaaaaaacacctcctggtggctggcttcgccctcttcgccttcggctccctcctctccgga

SEQ ID NO: 5252 - protein, 119 aa, Homo sapiens
QTPPPTHPTSRRRKKRTVVNTTTKEDKKARRREVLQALIGVMVGVFVAMTSLTIVGTSLPTMIKELHGSQTMYTWVITASMLSSTIATIIAGKLADQFHKKHLLVAGFALFAFGSLLSG

SEQ ID NO: 5253 - DNA, 262 bp, Homo sapiens
  misc_feature (262)..(262): Wherein n may be a, c, g or t
gtgcacatgcccagaaacatgtaaatattagtacatgttgtagaaaagctgttgtcaggaagatatttgtacactctggctttccactatgatagtcaccaggcacatgtgggtactgagcactggaaatgtggattgtccagattggaatgtactaattgtaaaatacgcactggattgcacaggcttggggcagtacaaacaaaagaatgaagatatctcattaatagttgttatgattattacacattaaaatgatcgn

SEQ ID NO: 5254 - protein, 54 aa, Homo sapiens [sequence omitted]

SEQ ID NO: 5255 - DNA, 359 bp, Homo sapiens
acgcgtcctggagatccagggccagcagggtcgatcctgaggggcctgggggattccccagacctacgcctgggagacccatgaagggcttgtgtttttggtgcggcctcccgtctctcttcctagtcagagtcctccaaggagccccatctcagatcccagtcccgggttcctgctgaaagttccttttcggtctgggccaggaagagagtcatggaactaccaagtcttaggttagaactagccctgaaagatcgtctaggcttggcttgaaatagctccatggatggggagctcaccccagtcaatcagcaagcagttattgagcatctactggctgctaggcactacacactagt

SEQ ID NO: 5256 - protein, 53 aa, Homo sapiens [sequence omitted]

SEQ ID NO: 5257 - DNA, 453 bp, Homo sapiens
  misc_feature (349)..(349): Wherein n may be a, c, g or t
aaattttctttcaagtgggagataaaggctctacgaagccatcttacagaaaactgggccaagtgccaccaagagcctctgtcctatttggggaagtgtcagtgggggaactctgaggctccaagaggttccacagcttgggagtgacagagctgggattctctgagggtgtataaagggggactaaggccagaaaaggcctccctgactgatcaacaggctgcgacctggagataagggatctgtggccgggcaggttctccaggcacagagaacagcacgtgtgaaggcacttaggttcttgaagctttgggtttctacagggctggttataatgaatgtaacattntgctgggtacctggcacacggcagcccctcaaaaaaggttgcatggcctcacttattctttgtggaaggagctttgttcctcttgggcattggccttctgacag

SEQ ID NO: 5258 - protein, 69 aa, Homo sapiens
  misc_feature (15)..(15): Wherein Xaa may be any naturally occuring amino acid
MQPFLRGCRVPGTQXNVTFIITSPVETQSFKNLSAFTRAVLCAWRTCPATDPLSPGRSLLISQGGLFWP

SEQ ID NO: 5259 - DNA, 324 bp, Homo sapiens
gtacacagccgtgctgtgcggaactgcccatggacagttgccctgtggagtcggtaccttctggccatggagcgacatggactggaccatcaaacgatttctgcgaccttcgagaacgctctgagtgccggcttcatccaggccactgactatgtggagatctggcaggtgtacctcgactacctgaggagaagggttgacttcagacaggactctagcaaggagctggaagagctgcggtccatgttcacgcgagctctggagtacctgcagcaggaggttgaggagcgtttcagcgagagtggggatccaagctgcctgatc

SEQ ID NO: 5260 - protein, 108 aa, Homo sapiens
VHSRAVRNCPWTVALWSRYLLAMERHGLDHQTISATFENALSAGFIQATDYVEIWQVYLDYLRRRVDFRQDSSKELEELRSMFTRALEYLQQEVEERFSESGDPSCLI

SEQ ID NO: 5261 - DNA, 295 bp, Homo sapiens
  misc_feature (1)..(1): Wherein n may be a, c, g or t
  misc_feature (2)..(2): Wherein n may be a, c, g or t
  misc_feature (295)..(295): Wherein n may be a, c, g or t
nngaattctaccagacactcaaaagggaaccagtgtttctgacactattccatgagataggaaagggagagtacaatctcaaaggacacaataagatcctcaaccaaatacttgacaaacggaattgaggaacagatcaacagatcttgcaaaccagtacagccactatggaaatcagtacagagggttctccaaaacaaactgacaagcttatcttatgacctgctgattataccactcctgggtacttaaccgaaggacttcaagtcgccacacagacacttgacatccctgn

SEQ ID NO: 5262 - protein, 63 aa, Homo sapiens
ERESTISKDTIRSSTKYLTNGIEEQINRSCKPVQPLWKSVQRVLQNKLTSLSYDLLIIPLLGT

SEQ ID NO: 5263 - DNA, 537 bp, Homo sapiens
accggtagtgcattgccttctaaatatagaaacgttgtctccacacttgttaaagttccttttactgacgccgatggaaataccataaatagaaacattatgctagatgctggtgaaaatactttaggtaccatacacaggatgttttctcagctagcagtcaagtcaatatttcaggatttgaaaatgatatatctgagtcacttgcatgcagaccaccatttgggaataatcagcgggctaaatgaatggtacaaatataacaaggatgatgaaacgagttatatatatgtggttactccatggcaatatcacaaatttgttaatgaatggttagttctagaaaataaagagattttaaagagaatcaaatacataagttgtgagcatttcatcaatgattcgtttgtaagaatgcagacacaatctgttcctttggcagagttcaatgaaatattgaaagaaaatagcaatcaagaatcaaacagaaaactggaactggatagagattcttcatatagggatgttggcttgatc

SEQ ID NO: 5264 - protein, 179 aa, Homo sapiens
TGSALPSKYRNVVSTLVKVPFTDADGNTINRNIMLDAGENTLGTIHRMFSQLAVKSIFQDLKMIYLSHLHADHHLGIISGLNEWYKYNKDDETSYIYVVTPWQYHKFVNEWLVLENKEILKRIKYISCEHFINDSFVRMQTQSVPLAEFNEILKENSNQESNRKLELDRDSSYRDVGLI

SEQ ID NO: 5265 - DNA, 316 bp, Homo sapiens
cagctggcgccgttcttcgccgccggtgaggagtctttccgcgtggtcgacctgacccgcgccgagacccttgaacgcgataccgtgattttctccctgggtgtgggtcgggccccccttggtcaagcgttctacgatttgggtcacctgcctgctgagcatggccgccagggctttgtgggggcgttgactcctgcacgccgggccctgcgcatggtctcgtgcattgacccctccgacctggacccgcagaagctgcatcatggcgcggtggatttctaccacctgctgcgtgaacacgcgggacgtcgggcgc

SEQ ID NO: 5266 - protein, 105 aa, Homo sapiens
QLAPFFAAGEESFRVVDLTRAETLERDTVIFSLGVGRAPLGQAFYDLGHLPAEHGRQGFVGALTPARRALRMVSCIDPSDLDPQKLHHGAVDFYHLLREHAGRRA

SEQ ID NO: 5267 - DNA, 273 bp, Homo sapiens
cggtatcaacccaagaagatgccaagcgtcaataaatggagcaagccagatcaaataactcattcagacgtgtccatggttggcctagatgaatcaaacgatggcggtaatgaaaatgtccacccaaccttggctgaagtagacgctcaagaagctcgtgaaactgctcagttagccatagacaagatcaattcttataagaggtccattgatgacaagaatggtgatggccataacaattcgtcgagaaacgtggtagatgaaaacttgatc

SEQ ID NO: 5268 - protein, 91 aa, Homo sapiens
RYQPKKMPSVNKWSKPDQITHSDVSMVGLDESNDGGNENVHPTLAEVDAQEARETAQLAIDKINSYKRSIDDKNGDGHNNSSRNVVDENLI

SEQ ID NO: 5269 - DNA, 291 bp, Homo sapiens
gatcagcaggcttggtttggatttgctggtactccaggctatctgtctccagaggtgttgaggaaagatccttatggcaaaccggtggacatgtgggcttgcggtgtgatcttctacattctgctggttggatatccgccattttgggatgaagaccagcatcgcctctatcagcagatcaaggctggtgcctatgattttccttctcccgagtgggacaccgtgacccctgaagttaaagatctgattaataagatgttgactatcaatccctctaaacgtatcacagct

SEQ ID NO: 5270 - protein, 97 aa, Homo sapiens
DQQAWFGFAGTPGYLSPEVLRKDPYGKPVDMWACGVIFYILLVGYPPFWDEDQHRLYQQIKAGAYDFPSPEWDTVTPEVKDLINKMLTINPSKRITA

SEQ ID NO: 5271 - DNA, 396 bp, Homo sapiens
cgatctcaagagatcattctcttcattcaggctgtttccaagacatctggtgcccaggcatgtatgtcatgcttttaaagaaactagcaaaattcacatttttttctttaaactttttattttacccttaccatttctgtgcttctgtcatctaccttggcccccagcagtgctttaaattttctaaagagcctttggaatgtctttcacttattacatagatttttatcttggttttttttttggttttttttttttaatttttttccatttcaggtttttcattaatttacccaccttggcttgaaggtttggggacacctgggtcaatattattttgccacaaactgggccgtaaacacaagaaaagaccattacattgaatttaagaaggaa

SEQ ID NO: 5272 - protein, 53 aa, Homo sapiens
MYVMLLKKLAKFTFFSLNFLFYPYHFCASVIYLGPQQCFKFSKEPLECLSLIT

SEQ ID NO: 5273 - DNA, 339 bp, Homo sapiens
gatcctttaaagacatttttagttggcatcgttggtgttgatgttgatgcagcgcaaccgattttagctgcaaagcacccagaggtgaaaacgtggactaaggaagtgctagtagaaaacttaaatcgtaataaaaagctaaggaaggaatttttaaacaaaattaataaatgcaccgatgggctacaaggattcgaaaaattgcataacatcaaagtcggacttgagcctttaactctcgaggatgatgttgtgacgccaacttttaaaataaagcgtgccaaagcctcaaaattcttcaaagatacattagaccaactatacgccgaaggttcacta

SEQ ID NO: 5274 - protein, 113 aa, Homo sapiens
DPLKTFLVGIVGVDVDAAQPILAAKHPEVKTWTKEVLVENLNRNKKLRKEFLNKINKCTDGLQGFEKLHNIKVGLEPLTLEDDVVTPTFKIKRAKASKFFKDTLDQLYAEGSL

SEQ ID NO: 5275 - DNA, 207 bp, Homo sapiens
  misc_feature (207)..(207): Wherein n may be a, c, g or t
cgcgtggtcgactataacgtcaaagtccgcgtcaagagtgacggcactggcgtcgataccgccaacgtcaaaatgtcgatgaaccctttcgatgagatcgcgctggaagaagcgatgcgcctgaaagaagccggcaaggtcacggaagtggttgccatctcctgcggcgtgacgcagtgccaggaaaccctgcgcaccgccatggcn

SEQ ID NO: 5276 - protein, 69 aa, Homo sapiens
RVVDYNVKVRVKSDGTGVDTANVKMSMNPFDEIALEEAMRLKEAGKVTEVVAISCGVTQCQETLRTAMA

SEQ ID NO: 5277 - DNA, 339 bp, Homo sapiens
cggccggctgtgcagagacgccatgtaccggctcgtgtcagcagtgactgctccaggtgcttcgccagagccatcgagagcagccgcgacctgctgcacaggatcaaggatgaggtgggcgcaccgggcatagtggttggagtttctgtagattgaaaagaagtctggtcagaaggtttaggttatgctgatgttgagaaccgtgtaccatgtaaaccagagacagttatgcgaattgctagcatcagcaaaagtctcaccatggttgctcttgccaaattgtgggaagcagggaaactggatcttgatattccagtacaacattatgttcccgaattc

SEQ ID NO: 5278 - protein, 51 aa, Homo sapiens
RPAVQRRHVPARVSSDCSRCFARAIESSRDLLHRIKDEVGAPGIVVGVSVD

SEQ ID NO: 5279 - DNA, 276 bp, Homo sapiens
cctagggacgccatgattgtgttcaccggtctgtcgggatcgggcaagtcctcccttgctttcgacactatcttcgccgagggccagcgtcggtatgtggagtcgctttcctcctatgcccgccagtttctgggtcagatggataagcccgacgtcgactttatcgagggcctcagcccggcagtttccatcgatcagaagtccacatcccgcaaccctcggtcgaccgttggcaccatcacagagatccatgattatctgcgcctgctctgggcc

SEQ ID NO: 5280 - protein, 92 aa, Homo sapiens
PRDAMIVFTGLSGSGKSSLAFDTIFAEGQRRYVESLSSYARQFLGQMDKPDVDFIEGLSPAVSIDQKSTSRNPRSTVGTITEIHDYLRLLWA

SEQ ID NO: 5281 - DNA, 269 bp, Homo sapiens
acgcgtcggtgccaggatggaacgaggtgcagctgaagaggtcgtagatgaaatcggaaggtttggcataatcggcataccagtcgctgagcgccacctgaaccttgttgttggtgttctggatgtaggtgaactgcacgtcctgggtgatcgccttgagcgacgccttgtagccgagttcgggcagcatgctctgcagatacgcacccatcggctgctcggcggcgcggttggacatcaccaacgtcacccgctggcccttggtgccg

SEQ ID NO: 5282 - protein, 84 aa, Homo sapiens
MERGAAEEVVDEIGRFGIIGIPVAERHLNLVVGVLDVGELHVLGDRLERRLVAEFGQHALQIRTHRLLGGAVGHHQRHPLALGA

SEQ ID NO: 5283 - DNA, 344 bp, Homo sapiens
gagaaaagaaaagaaattacctatggcatacctaattactaaaaccaaaaagatattgacaaaaattttcaacaagaatgaaacaaaaagcactctctggttaacctttgataaaccagaatatctaaataagcacatatcagattttatcaatgcatttagacattacagaactagagacgattataggtccagttctgttcttggcttattaaatgacttcaggatcgtttaactacactggatctgtttactcattcataaaatgagttcacattctagatctctaaattcttttccagctctaaaattctgtggttctgtgaaatatttagttgcctagg

SEQ ID NO: 5284 - protein, 70 aa, Homo sapiens [sequence omitted]

SEQ ID NO: 5285 - DNA, 238 bp, Homo sapiens
gtcgacggtgtctttgacgaagtctccttggacaaatacaagggtaagtacgttgtcctagcctttattccattggccttcactttcgtctgtccaaccgaaatcattgctttctcagaggctgctaagaaattcgaagaacaaggcgctcaagttcttttcgcctccactgactccgaatactcccttttggcatggaccaatatcccaagaaaggaaggggggtttggggccccaa

SEQ ID NO: 5286 - protein, 79 aa, Homo sapiens
VDGVFDEVSLDKYKGKYVVLAFIPLAFTFVCPTEIIAFSEAAKKFEEQGAQVLFASTDSEYSLLAWTNIPRKEGGFGAP

SEQ ID NO: 5287 - DNA, 177 bp, Homo sapiens
  misc_feature (177)..(177): Wherein n may be a, c, g or t
atcagcgggatcatctacgtcatccgctacggtttgcagtggaaagacgctccctccggctatgggccgcataagacgctctacaaccgcttcgtgcgctggagccgccagggcgtgtttgctcggatcttcgccgccttgtccggtcagtcgggcgtgccggaggaactgatgatn

SEQ ID NO: 5288 - protein, 59 aa, Homo sapiens
  misc_feature (59)..(59): Wherein Xaa may be any naturally occuring amino acid
ISGIIYVIRYGLQWKDAPSGYGPHKTLYNRFVRWSRQGVFARIFAALSGQSGVPEELMX

SEQ ID NO: 5289 - DNA, 405 bp, Homo sapiens
  misc_feature (312)..(312): Wherein n may be a, c, g or t
  misc_feature (399)..(399): Wherein n may be a, c, g or t
acgcgtgggtgcggatgtgagtgctttcccccggagatgagagtgggaacgagaaaaatatatccaagtgtttttccccagatccctgtcaagattcgagtatgacgtcgccagcgaatggtccagagccggtgacagaggcgaacttggccaagcttaatggcagctcaccaacgtcaagtgatcaaggctcacaggatatgcaagcggagaaacaaagccaagcacactcagcaaaaacgagtatgaccttttcccaacgcacaatggaatcgatgaattcaatactggttcgctcacttgtcgccgtcnatgccgaaccagagcgattacccacacagaaacgaaaaatgccgctatcgctcccaacaacggcactcaacttccgtggcttcgtgncaaatc

SEQ ID NO: 5290 - protein, 101 aa, Homo sapiens
  misc_feature (71)..(71): Wherein Xaa may be any naturally occuring amino acid
  misc_feature (100)..(100): Wherein Xaa may be any naturally occuring amino acid
MTSPANGPEPVTEANLAKLNGSSPTSSDQGSQDMQAEKQSQAHSAKTSMTFSQRTMESMNSILVRSLVAVXAEPERLPTQKRKMPLSLPTTALNFRGFVXN

SEQ ID NO: 5291 - DNA, 317 bp, Homo sapiens
  misc_feature (302)..(302): Wherein n may be a, c, g or t
cgatcgatacatttaattggcttgctgatccgatagattgcagggccaggggtggatttggagtatgagaacctcagtggggcctggctccaggaggaggtagaaagcgctcacacctggcctcattgtctgcattcaggaggctgatctttgtcctgtgggtattgggagccccgaagggtttcaggcagggactgggtattggggtggagatgacagaatcagatctgcgtttttgagccatcactcttggtgttgactataaggtagattggagttgcttccaccagctgccatatctnaggttaaaaaccggt

SEQ ID NO: 5292 - protein, 56 aa, Homo sapiens [sequence omitted]

SEQ ID NO: 5293 - DNA, 228 bp, Homo sapiens
ggatccagcgcatccgcggggtgggcgggtcctggcggctctttgccctcttccaacatggccgccgctgcctctgtgacaggcagggtcacgtgggcagcctcgcctatgaggtcgctgaggctcggccggcgattgtcccttcccggaccccgtctcgatgcggtgactgccgctgtcaacccgagcctgagcgatcatggcaacgggctcgggcggggaacgcgt

SEQ ID NO: 5294 - protein, 67 aa, Homo sapiens
MIAQARVDSGSHRIETGSGKGQSPAEPQRPHRRGCPRDPACHRGSGGHVGRGQRAARTRPPRGCAGS

SEQ ID NO: 5295 - DNA, 455 bp, Homo sapiens
  misc_feature (455)..(455): Wherein n may be a, c, g or t
gggccccagcttctcagtggaggggactttgaggacttcctgggactggtgcgagtcagaagtgtttcggggagactccgagagtctggcaggcagggcctggcaatgctgctgcttcctgggaggtgcctgaaccaatgctggcccggcagagctgtctgatgggtggcatcccaggaaaacagtcagtttcagaaaatgtggtggaatgtctggcccctggtctgtttgtgtcatctcttttcccttttcctgctttggggaccaatttgggggctttccctttttttaatttgcgtggattgctcccccttaaacaccaggttggtgcacagaactttcttctccagcttgcttcatcctcccccttgttccgcattatcggtgttcacttgcggctgcagatccgaaatgcctgagggggtttaaaaatgcgtggggttctcccctaactn

SEQ ID NO: 5296 - protein, 107 aa, Homo sapiens
MRNKGEDEASWRRKFCAPTWCLRGSNPRKLKKGKAPKLVPKAGKGKRDDTNRPGARHSTTFSETDCFPGMPPIRQLCRASIGSGTSQEAAALPGPACQTLGVSPKHF

SEQ ID NO: 5297 - DNA, 260 bp, Homo sapiens
tgctcggggatggccccggccaggcccggcaccccagggaggcctatgagggctgctgtgaggcctgtgagctgggggtctgcttcctccagaaggccccagaccccgcctggagcgccaacgccacaaaaggcaacttccccgccacggcctggggtggcactggcaccgtctccaggggcaaaccgctgtccacccctggcgacgaccttggcaagggtggcgttgtcatcgccatccccttctcccttgtgggtacc

SEQ ID NO: 5298 - protein, 86 aa, Homo sapiens [sequence omitted]

SEQ ID NO: 5299 - DNA, 503 bp, Homo sapiens
ctcgagaacctctttgtgcacgcagctgccatggaaggaaatcctggggcttctttagagcagaaggccagcagattcaggtgggggcgtgggggccatgctcccgtcatccaactgttgccattgctgttggtgacagattcgcccctgagtcggaaatacagccattgacctttttttgacttttaaatgtcggacttgctgttttaagcatctgtacatattagaggtctcaggggcagtgagttgcttaacagacatttctcctctggccttagtgcccttagcttctgtcccctgttaacactagcaaggaaagcgcttgtcacatggaggagcccttagccaggccttgggttctgtcattaagcacctcatctctgacctcaccttcagtcctccatggctgccctccagtatttagtgtcagccgggggagcattctccagtacctttcatctgggttttaaaggacttctctctgcctggaccacctaggatcc

SEQ ID NO: 5300 - protein, 68 aa, Homo sapiens
MSVKQLTAPETSNMYRCLKQQVRHLKVKKRSMAVFPTQGRICHQQQWQQLDDGSMAPTPPPESAGLLL

SEQ ID NO: 5301 - DNA, 265 bp, Homo sapiens
agatcttcagcttcatcgccttcagaacaggaggcgtcctgggacagagtgaagctgtcctcactccttgttagcttttgcttggatgttgggcccacgaggcactctcgtgagggtgacatgttgggttcagagaaccgcctgtcttgttggacaatggagtttttcagcctgactaccatgctaacgctggactctgagcttgactcacaggtgtcccgggggccccgggtatccaaaccaaccattgtgggagtgggaccct

SEQ ID NO: 5302 - protein, 82 aa, Homo sapiens
MVGLDTRGPRDTCESSSESSVSMVVRLKNSIVQQDRRFSEPNMSPSRECLVGPTSKQKLTRSEDSFTLSQDASCSEGDEAED

SEQ ID NO: 5303 - DNA, 401 bp, Homo sapiens
  misc_feature (1)..(1): Wherein n may be a, c, g or t
  misc_feature (2)..(2): Wherein n may be a, c, g or t
nnacgcgttggaagagttgatgtctatcaccaactgaatatcagtccttgggaagccgctttggggcaaagcatcaccgccgcgctacccaatggtcggacattgcaaattcaaattccgaaaaatgccaaaacggggcagcaactccgtttaaaagatcaggggattccagccaaaacggcaggacatttatatttaattttaaacattgttcaacctcctgcgcagagtgagcaagaacagcaagcctaccaagcctttgctgaagcctttcctcactttaagccgcgtcagtcttaaggagaaaattatgacgactattcaatatcgtgaaattattttagacggatgtcgacacgctgaaattgttgatgaacaacatagctttgatttaaagcatt

SEQ ID NO: 5304 - protein, 99 aa, Homo sapiens
  misc_feature (1)..(1): Wherein Xaa may be any naturally occuring amino acid
XRVGRVDVYHQLNISPWEAALGQSITAALPNGRTLQIQIPKNAKTGQQLRLKDQGIPAKTAGHLYLILNIVQPPAQSEQEQQAYQAFAEAFPHFKPRQS

SEQ ID NO: 5305 - DNA, 257 bp, Homo sapiens
tggccagtatttacactgaacttctatctcaaatcacattctttaaaattatccattcagaagtgtgctaagtaaaaacagggtcgtttggatagaattctcctgccttggggaggacatttatgagccacatgacattttgggcaaccacacaccacatatacaatgttggtcccatacattataatactgtttttttctgtatgttttctagggttagacatgtttagatacccaaatagcactttggtacaatt

SEQ ID NO: 5306 - protein, 55 aa, Homo sapiens [sequence omitted]

SEQ ID NO: 5307 - DNA, 384 bp, Homo sapiens
  misc_feature (1)..(1): Wherein n may be a, c, g or t
ncatttattcctgtgccagaatttgatgcccgcctgggaaattggggactgtataacgaaaaaagtattcaagggccatatatttcaaggtttggtttgtactctgcatttttaaacggtaaggggaagttaataacagatacaattatttaccccactcctgtgaccgtaagcgaacaaatttcaaattatcctgagtatctgttagagcttcacgggaatgtagtggacaaaattttgcccgttttacaaactcacaagttggccaataagattaaattcgaaaaaattgatcattcctccttgaaaacctgggatgttgaggttcaattccctaatttgcccaaagatattgaaaacccgtggtttcataatctactggat

SEQ ID NO: 5308 - protein, 128 aa, Homo sapiens
  misc_feature (1)..(1): Wherein Xaa may be any naturally occuring amino acid
XFIPVPEFDARLGNWGLYNEKSIQGPYISRFGLYSAFLNGKGKLITDTIIYPTPVTVSEQISNYPEYLLELHGNVVDKILPVLQTHKLANKIKFEKIDHSSLKTWDVEVQFPNLPKDIENPWFHNLLD

SEQ ID NO: 5309 - DNA, 267 bp, Homo sapiens
  misc_feature (1)..(1): Wherein n may be a, c, g or t
  misc_feature (2)..(2): Wherein n may be a, c, g or t
nncgatcgggagttgtccacgctgaagaagcagcatgcgtctgagctcgccactcgcgccaaggagcatgacgacgctgttaccaagctcaagacacagcaagaagacacgctcgtacttcgtaacaagagccatgaggaagttgttgggctaaaggacgagcatgacagggccatatccaagctgaaggaagagcatgcatctgtgttggcctcccgtggcaaggagcacgacaaggcgcttgccaacttgaaggaagagcacgcg

SEQ ID NO: 5310 - protein, 89 aa, Homo sapiens
  misc_feature (1)..(1): Wherein Xaa may be any naturally occuring amino acid
XDRELSTLKKQHASELATRAKEHDDAVTKLKTQQEDTLVLRNKSHEEVVGLKDEHDRAISKLKEEHASVLASRGKEHDKALANLKEEHA

SEQ ID NO: 5311 - DNA, 415 bp, Homo sapiens
acgcgttcattcggcatctgcttccatggatttcctgcggggaggcgcggccgagagtgcgggtgtcgaacacgacacttcagtgatcgtttcaaccaccggccgagatgggtcctgacgctgggcttcaagccgcttgcgctcgcgctcctgatctcgggcagcgcgattccggtggtttatgctgccggcagacgactgcgcacgcccctcacgaggtatctgcacatgcttaaagggagaggcctcacccgacagctgggcatcggatttacgaagcccacgacgaatcttcctcgcctcctcaaagccgatcatcggcatgccaggtttgtggttgaatgcttcgatcaacacactaggatcgttggggtccaccacatacaccgagcggcaatcgagcggatacgacctc

SEQ ID NO: 5312 - protein, 105 aa, Homo sapiens
MPMIGFEEARKIRRGLRKSDAQLSGEASPFKHVQIPREGRAQSSAGSINHRNRAARDQERERKRLEAQRQDPSRPVVETITEVSCSTPALSAAPPRRKSMEADAE

SEQ ID NO: 5313 - DNA, 303 bp, Homo sapiens
agatctcagttcttaattgtgtgtaaatgacccagggcagaggcagagttcagtgggaagctgcggagcaacagctttgtatatgtagctgttgtccagagatgtctctctcttggcttcatgtggcgtctgtatagggcagctcacaacatagcagcagtcatcatcagagtaagcaatcaggacaatagatagaagaggacaagcaagatggaaatcacagcttttgtaacatcttgaaaggaacatcccatgacttgtcttatgttatttcttagaggcatgtcataggcgggatagaag

SEQ ID NO: 5314 - protein, 78 aa, Homo sapiens
MFLSRCYKSCDFHLACPLLSIVLIAYSDDDCCYVVSCPIQTPHEAKRETSLDNSYIYKAVAPQLPTELCLCPGSFTHN

SEQ ID NO: 5315 - DNA, 384 bp, Homo sapiens
  misc_feature (1)..(1): Wherein n may be a, c, g or t
nctggcacctccatgctgtaagaaccacttccacattcagattgtctctcactgtttttaaaaggcatactctccttctctgttccacattgtcactcacacatgtgtacacactgcctgtctcactcgctgctctcactctgtctctgcttctctctttttctctttctgtgtctttctatcccctttttattcctaccttcctccctccatcagtcttcacttttacttatttttctcattttcccttctttcctctgagcttgagctctgaggtggtttgtcattaataaacatccataccctgattttacccctaagcaacactgcagagtgggagtctgggaatattttatttcctatgaaaatataaatggatgatca

SEQ ID NO: 5316 - protein, 52 aa, Homo sapiens
MCTHCLSHSLLSLCLCFSLFLFLCLSIPFLFLPSSLHQSSLLLIFLIFPSFL

SEQ ID NO: 5317 - DNA, 269 bp, Homo sapiens
gctagcaatgggaagacaaccataacaacatgaactgaattaatcagtgcgcacgactagttaaaaacaaacatcctttgacaagaagtttctaattaaatcatggctgcgtctaggcagcattattataagagtgaaggtggatgtgctgctacttcccactccccttgatgagcaacaagcacctgcattgagtaatgcaagagtgagatgaaacatctcagcaagcgaattattttgacgagatatttaaaccacaaattgaattc

SEQ ID NO: 5318 - protein, 52 aa, Homo sapiens
MFHLTLALLNAGACCSSRGVGSSSTSTFTLIIMLPRRSHDLIRNFLSKDVCF

SEQ ID NO: 5319 - DNA, 384 bp, Homo sapiens
  misc_feature (1)..(1): Wherein n may be a, c, g or t
ngtaggttggggtatggggtgtattagattcctgtcattaagtaaatatgaaaatatattgattcagccccaagtggggcggagagtgaagcaaaaagaaggtagggttattggaagcgttgatgtcatttgttgatgagtatgataccaacagaggcactgccgcccaggctccaactccgggtctttccaaggggcgtgaggaccagcctaaactcctgggcatcctcctctctgtgaagttgagaaacgttctccagctcatttaattgttcattatgccttgattggccttgcttttatctaaacttgtgtcgtcatccactactacctattggatgaatcgattgagtgaggaggatgtccttgtacctattcacgcgt

SEQ ID NO: 5320 - protein, 75 aa, Homo sapiens
MSWRTFLNFTERRMPRSLGWSSRPLERPGVGAWAAVPLLVSYSSTNDINASNNPTFFLLHSPPHLGLNQYIFIFT

SEQ ID NO: 5321 - DNA, 517 bp, Homo sapiens
gcacgtaatcagctgaagtcctctatccaactccaccttgatggttcaactgctgttgttgaggacattggccgccagctgctgacctatggacgaagaattcctacccccgagctttttgcaagaatagatgctgttgatgcaagcactgtgaagcgtgttgcaaaccgcttcatctttgatcaggatgttgctattgctgcgatggggccgatccaaggacttccagactacaactggttcagacgccggacctacatgctccgttactagattaatcagccggtgtacccatgtttaccgtctgcaaaagacaagataaaatttgcctcttttagcgtcagtatattaaggcctcagcactgcacattacgtgctgcgatggaggaattttttgagaatttgttttatttcttgtcgtgtccaaaatccacaaatctgtcaataatgataggcaggttcgactgacgtggctgacttggttggccaccggatgttttcttacaacgagtcatga

SEQ ID NO: 5322 - protein, 90 aa, Homo sapiens
ARNQLKSSIQLHLDGSTAVVEDIGRQLLTYGRRIPTPELFARIDAVDASTVKRVANRFIFDQDVAIAAMGPIQGLPDYNWFRRRTYMLRY

SEQ ID NO: 5323 - DNA, 300 bp, Homo sapiens
atcccttctcatgctgttgtggctcgaaatggagatggcaaagaggacttgatctgggagatcctcaaagtggctcaggaacactttggcaaaggcaaatcaaaagacttccaactgttcggctctcctcttgggaaagacctgctgtttaaggattctgcctttgggctgttacgggtgcccccaaggatggactacaggctgtacctcggccacagctatgtcactgccattcgaaatcagcgggaaggcgtgtgcccggagggctccatcgacagcgcgccagtgaaatggtgtgca

SEQ ID NO: 5324 - protein, 100 aa, Homo sapiens
IPSHAVVARNGDGKEDLIWEILKVAQEHFGKGKSKDFQLFGSPLGKDLLFKDSAFGLLRVPPRMDYRLYLGHSYVTAIRNQREGVCPEGSIDSAPVKWCA

SEQ ID NO: 5325 - DNA, 357 bp, Homo sapiens
gccggcgacgatttttgctttgataatgagcaaggacgccacaaggtgtatttacaagattttcaaatttcagtgtctttagtgaccaatggggaatacctagagtttatcgaaaaaaggggttatgacacctttagttattggcttgatgaagggtgggcgtggcgccctaagcaccacatcagcagtcctttgtattggaccaaaatagaaggtcaatggccctactatacattggccgggctaaagccacttgaccaaaatgcgcaggtgtctcatgtttcttattatgaagcgaatgcgtttgcttgctggaaagagagccgtttgccgacggagtttgaatgggagatcgcg

SEQ ID NO: 5326 - protein, 119 aa, Homo sapiens
AGDDFCFDNEQGRHKVYLQDFQISVSLVTNGEYLEFIEKRGYDTFSYWLDEGWAWRPKHHISSPLYWTKIEGQWPYYTLAGLKPLDQNAQVSHVSYYEANAFACWKESRLPTEFEWEIA

SEQ ID NO: 5327 - DNA, 270 bp, Homo sapiens
ggttctgtcgatgccacccgtggcgatccgcagttgggctgggatactgaccagttcccaatcagtgtcgaagaaaatgcgctggtgatgtacgaaattatcaaagctggcggctttaccactggcggcctgaactttgacgccaaagtacgccgccaaagtaccgataaatacgatctgttctatggacatattggcgcaatggacaccatggcgctggcgctgaaagtggcagcccgcatgattgaagatggcgagctggataaacgc

SEQ ID NO: 5328 - protein, 90 aa, Homo sapiens
GSVDATRGDPQLGWDTDQFPISVEENALVMYEIIKAGGFTTGGLNFDAKVRRQSTDKYDLFYGHIGAMDTMALALKVAARMIEDGELDKR

SEQ ID NO: 5329 - DNA, 255 bp, Homo sapiens
acgcgtcaggcaggctcctggattctggagagacccagatatggcccaggtgtctccacctgctcagcctctcccagaaacccagaagctcttttcttgggaataatgaggaaggggctggagaaggaggatggaggtcttccccaccaggaaatctctctattctcacgtccactttcaccagctgtctggataaaggaaaactctagatttaggacaactgaaagtgcaaaaataatttcccatctgcggccg

SEQ ID NO: 5330 - protein, 50 aa, Homo sapiens
MRKGLEKEDGGLPHQEISLFSRPLSPAVWIKENSRFRTTESAKIISHLRP

SEQ ID NO: 5331 - DNA, 192 bp, Homo sapiens
  misc_feature (1)..(1): Wherein n may be a, c, g or t
  misc_feature (2)..(2): Wherein n may be a, c, g or t
nnacgcgtgaagggccgcttcaccatttccagagacttttccaggaccccgctggatctgcaaatgaatagcttgagacccgccgacccggccatgtattactgtgcgaggggggaccaatattatgataacagtgattattacctgggtcgctttgcggactactggggccagggaacccccttcacgcgt

SEQ ID NO: 5332 - protein, 64 aa, Homo sapiens
  misc_feature (1)..(1): Wherein Xaa may be any naturally occuring amino acid
XRVKGRFTISRDFSRTPLDLQMNSLRPADPAMYYCARGDQYYDNSDYYLGRFADYWGQGTPFTR

SEQ ID NO: 5333 - DNA, 259 bp, Homo sapiens
cctaggtgggaggtcaggcccccgcttacgcaagaccagttttgccctgatcgcttcgctcatggtacggcaagagatgacatcgccacaaatcggggctaaacgtagcgagaggacgacaccggcgaaactgacagggtcatcccaaccccccgctgcgcgcccatccccaaccatcatcgagtttcacgagtcgcccgccatcctcgattggcttgaggacatcagtcccgatgacgaggggcgctggaccagccac

SEQ ID NO: 5334 - protein, 66 aa, Homo sapiens
MVRQEMTSPQIGAKRSERTTPAKLTGSSQPPAARPSPTIIEFHESPAILDWLEDISPDDEGRWTSH

SEQ ID NO: 5335 - DNA, 186 bp, Homo sapiens
acgcgtgaagggggctgtgactcagtttctctaccttgttggagggtagtcagaggcctttatgtcactcatattcctgtggatgctctttgggagggaagggcccatccagctgggctgtgtgtgtgtgtgtgtgtgtgtgtgtgtgtgtgtgatatatacccccggggttttttattgggggaa

SEQ ID NO: 5336 - protein, 62 aa, Homo sapiens
TREGGCDSVSLPCWRVVRGLYVTHIPVDALWEGRAHPAGLCVCVCVCVCVCDIYPRGFLLGE

SEQ ID NO: 5337 - DNA, 317 bp, Homo sapiens
accggtcactttgctctgacaaatgctctctccgtggccaccgcctcactgcctgtccccagagccctctgagctgactcatcctccctgcctagcaggcttcacttcacttcctcaatctccctgttctggccaagttgagaggactcccttcctgcaaaaatgtgttctaaggttagctcatggtttttgccgtattaatctctatgccagaactgttatttattaattttttctttaagtttcctcactttttaacttaaattatttaggaaggaaactttgtccttaccatgaatggaaaacaatatcaattg

SEQ ID NO: 5338 - protein, 68 aa, Homo sapiens [sequence omitted]

SEQ ID NO: 5339 - DNA, 392 bp, Homo sapiens
  misc_feature (1)..(1): Wherein n may be a, c, g or t
  misc_feature (2)..(2): Wherein n may be a, c, g or t
  misc_feature (3)..(3): Wherein n may be a, c, g or t
  misc_feature (367)..(367): Wherein n may be a, c, g or t
nnncgttttgctggtggagcccttatggacttggggatttatcctctctacgctgccgttcgcctctttggaaaagctcaagacgcgacttatcaggctcaacagcttgacaatagcattgacctaaatggtgatggtatcctcttctacccagaatttcaagttcatatcaaggctgggaaaaacatcacttccaatctcccttgcgagatttacacagcagatggaaccttgactctcaacacgattgagcatgttcgctcggctatttttaccgaccatcaaggcaatcaagtccaactccctatccaacaggctcctcacacgatgactgaggaagtcgctgcatttgcacacatgatccagncaccagatttgaatctctaccagac

SEQ ID NO: 5340 - protein, 130 aa, Homo sapiens
  misc_feature (1)..(1): Wherein Xaa may be any naturally occuring amino acid
  misc_feature (123)..(123): Wherein Xaa may be any naturally occuring amino acid
XRFAGGALMDLGIYPLYAAVRLFGKAQDATYQAQQLDNSIDLNGDGILFYPEFQVHIKAGKNITSNLPCEIYTADGTLTLNTIEHVRSAIFTDHQGNQVQLPIQQAPHTMTEEVAAFAHMIQXPDLNLYQ

SEQ ID NO: 5341 - DNA, 425 bp, Homo sapiens
cctaggagtagtattaacaatagtagcagcagtagtagtagcagcaacaagtgctaaataagcgtcagcagaagcagctgctgctgttaccaccatgactattactactactgtaaaacttaatcttttgtagaaatccgcctctcctacagatttaaccacaggcttcgatcctaggctgatgactcctgaaagatgttccaatttcttatttccaaattcctgcaactcaattccatttgaaaagctcatgactgggtcaaattcagtgtatctaaaaaacccatcatttcactccaattctcaacttccccatttagatttcctattctaattccacactactattcattaagtgtcctaagcttaaaactttggagtcaatttagagtccttacttttcttctgcctccctgagttgatca

SEQ ID NO: 5342 - protein, 84 aa, Homo sapiens [sequence omitted]

SEQ ID NO: 5343 - DNA, 424 bp, Homo sapiens
  misc_feature (1)..(1): Wherein n may be a, c, g or t
  misc_feature (2)..(2): Wherein n may be a, c, g or t
  misc_feature (424)..(424): Wherein n may be a, c, g or t
nntcatgaatcgttataaacacaatggttagtgtatatcatatctataggagatactatgtatcaaattaatcagctgtctttttcttatgaaacaaaagaagtgttaaagaatatttctgtaacatttcctaccaataaaataacagccataattggaccgaatggatgtggtaagtctaccctacttagccatctatatcgacttcattcaacaaaaaacaaaatcacattaaacggaaaacctttagagtcttataaaggtcgcgaatttgctcaattggtagcagtcttaacacaatctagagacgctatgattgatgattttctcgtaaaagatatcgttctcatgggacgggatccgtacaaacaacactttggcacctatagttctgaagatgttaaaattgcagagcattatatgn

SEQ ID NO: 5344 - protein, 122 aa, Homo sapiens
MYQINQLSFSYETKEVLKNISVTFPTNKITAIIGPNGCGKSTLLSHLYRLHSTKNKITLNGKPLESYKGREFAQLVAVLTQSRDAMIDDFLVKDIVLMGRDPYKQHFGTYSSEDVKIAEHYM

SEQ ID NO: 5345 - DNA, 378 bp, Homo sapiens
  misc_feature (1)..(1): Wherein n may be a, c, g or t
  misc_feature (2)..(2): Wherein n may be a, c, g or t
nnacgcgtgcctgggccgcgtgttgaaaaccgccaaccgtcaggtaggggcgggtgacctgttcggtttgctcggtcgttggctgccggcgttgatgatggccctgaacaatggttcggcccatgtatcgccggtttcccgtcgtaaacctcttgctcgcactgctgataaggctgattgaatatggaacttgatctctggacccagagcctggtcaccgcaatgaccgcattgtggaccaaggtggcgaatttcattcccaacctgtttggggctctggtcctggtattgctgggttttgtcgtggccaagttgctcgacaccttgctgtccaaattactggccaagcttgagctggatcgcttgatggcgggcacc

SEQ ID NO: 5346 - protein, 65 aa, Homo sapiens
MELDLWTQSLVTAMTALWTKVANFIPNLFGALVLVLLGFVVAKLLDTLLSKLLAKLELDRLMAGT

SEQ ID NO: 5347 - DNA, 803 bp, Homo sapiens
  misc_feature (648)..(648): Wherein n may be a, c, g or t
  misc_feature (660)..(660): Wherein n may be a, c, g or t
cctaggttccccgtttctgctcgtggaaattccttctttccaagattggctcaaaacgggtttcttatggaactttgccaaatagctgaggatcccgcagtcctctctgcagccgctcagcacttggctcacgctggcttttcctttcccttctggtgatgtacacaagcccgtggcccccagggaagggctgggaggccctgaggcggcatcctgctcccccgctgaggcccctggcacagctgagcctccaagagatgcttaccagatctgcagacatttttcggggtcccatgggtgttaggcctggggaggcagtgacccaccggtggaactgaggcagtgggtggggagggcctgtggcctatgtgggaggagcaggacctcaccatgggcccctacacagttgcagattcttgcaaggggtaccccatcaccccgcggggctgattcaggtatccagacattaccaggatgctgttctatgacccttgctgccctggagcagctggaaagtaataggtctcgcagggacacccctcactgctttcgtctgatgcaggacgtttaagggggtgctggatcagtgggcccaaactgcagggtcttggcctgcgcagtggaggttggggaatgggacttccccgntggattgtcctnactggtgcccgcccagggtggacgcggtgctgccattctgccttctctcccctccagcacgctccggtctcctgtcacatccccagggcaggcagctaatctgcagagctctggcagcgcagtggccactttccctggcgcgc

SEQ ID NO: 5348 - protein, 87 aa, Homo sapiens
MVRSCSSHIGHRPSPPTASVPPVGHCLPRPNTHGTPKNVCRSGKHLLEAQLCQGPQRGSRMPPQGLPALPWGPRACVHHQKGKEKPA

SEQ ID NO: 5349 - DNA, 342 bp, Homo sapiens
  misc_feature (1)..(1): Wherein n may be a, c, g or t
  misc_feature (2)..(2): Wherein n may be a, c, g or t
nnaaataatataattggataatttatatttggaactaacttagagtctgagtttagacactcctcgaaggggttttattggatcaaagacttaaacacaggtaatattgaaccgatattacctcccgaaaaatcagatgataattatgaacttggattatcaaaactttcctatgcgcatttttctcctgcatacaattatatctattttgtttacgagaacaatctgtttctgcaacaagtaaatagcggagttgccaagaaggtaacggaagatggctccaaggatatattcaatgccaaaccagactggatatatgaagaagaggtccttgcttctgat

SEQ ID NO: 5350 - protein, 107 aa, Homo sapiens
FIFGTNLESEFRHSSKGFYWIKDLNTGNIEPILPPEKSDDNYELGLSKLSYAHFSPAYNYIYFVYENNLFLQQVNSGVAKKVTEDGSKDIFNAKPDWIYEEEVLASD

SEQ ID NO: 5351 - DNA, 480 bp, Homo sapiens
  misc_feature (1)..(1): Wherein n may be a, c, g or t
  misc_feature (2)..(2): Wherein n may be a, c, g or t
  misc_feature (3)..(3): Wherein n may be a, c, g or t
nnntgacagacaacttctgattctagcatgtcaggcatgtcaggtatgtcatcgtctgataacagtagctcttcagggatggatatggacatgagtatgggaatgaactattatctgactcccacatataaaaactatccagttttgtttcaccatttgcatgcaaacaatagtggtaaggctttcggtattttcttattatttgttgtggctgctttcgtctacaaactactgcttttcgttagttggtgccttgaagttcactggtttaaaaaatgggacaagcaaaataaatattccactttaccttcagcaaactccaaagacgaaggaaaacattatgacacagagaataattttgaaattcaaggtttacctaagctgccaaatttattaagcgatatatttgttccatctttaatggatctctttcatgacattataacggcgttcttagtatttacctctaccatgattatg

SEQ ID NO: 5352 - protein, 158 aa, Homo sapiens
QTTSDSSMSGMSGMSSSDNSSSSGMDMDMSMGMNYYLTPTYKNYPVLFHHLHANNSGKAFGIFLLFVVAAFVYKLLLFVSWCLEVHWFKKWDKQNKYSTLPSANSKDEGKHYDTENNFEIQGLPKLPNLLSDIFVPSLMDLFHDIITAFLVFTSTMIM

SEQ ID NO: 5353 - DNA, 411 bp, Homo sapiens
  misc_feature (232)..(232): Wherein n may be a, c, g or t
ccggataacttcctcacgcctaacctgagttgcgatgcagccaaaaacggcgaaaactacgcccgctggtgtaacaaagagtttcaagacttgatcgacaaggcccgcgctgacgctgaacccacacagcgcgctgcactctatgaacaagccctggacgttttcgccaaggaccaaccgtggattcccatggcttacccgaaaatgttcaccgccatgcgtaaaaacgtcngaagttttacccaaagccctctgacgacaaataacttcgccaccacccaggtgaagtaataagagaagacgctcggcaccggcgccattgacggtgccgaacctgcctaaccggctgattgaggtcacaacaagatgtttagttttattgcccgccgattggggttattgatccccacg

SEQ ID NO: 5354 - protein, 96 aa, Homo sapiens
  misc_feature (78)..(78): Wherein Xaa may be any naturally occuring amino acid
PDNFLTPNLSCDAAKNGENYARWCNKEFQDLIDKARADAEPTQRAALYEQALDVFAKDQPWIPMAYPKMFTAMRKNVXSFTQSPLTTNNFATTQVK

SEQ ID NO: 5355 - DNA, 388 bp, Homo sapiens
gtgcaccctctctactgaatgttattgtgttttggcttcctcgaatccattctacccgcctaatttccttatgtggattctccgctcccatccgggtccctgtggtatgggaaggatttcatatctggttcctgggatgaagcctgtgatcgggcataaaccaaccaatgagttccattctctgattacagggattggctcagggatggacatgtgacataggacagccaatcaggctcaagcacagctaatcctaaggtttgaccttacacaaccagcaagagatgttctctttttcctgcggcactaaaattggagaggccattaggctatccctgttgctgccactttgcccttttgtaaacggttaattaaagccattcatttt

SEQ ID NO: 5356 - protein, 53 aa, Homo sapiens [sequence omitted]

SEQ ID NO: 5357 - DNA, 345 bp, Homo sapiens
  misc_feature (1)..(1): Wherein n may be a, c, g or t
  misc_feature (2)..(2): Wherein n may be a, c, g or t
nngaattccacgggcgatcgcttgtgcgtcgccccggcggcggaatacgctgcgttggctgtacaaacggcccatcaatcgaacgcatcgcacgataggccgcacagataaagcaggagacaaccatgaccgcagcccctgcccacgagcccttgggcaagcaccagtcgaagaaagccgccgcccacaggttggatgggctcggcgctcgagtactacgacttcttgatctacgccaccgcagcggcgctgatctttccgcaaatcttcttccccaagggcgaccccaagacggccatcatcgcctcgctggccacgtacggcgtgggttacatcgcgcggccg

SEQ ID NO: 5358 - protein, 72 aa, Homo sapiens
PQPLPTSPWASTSRRKPPPTGWMGSALEYYDFLIYATAAALIFPQIFFPKGDPKTAIIASLATYGVGYIARP

SEQ ID NO: 5359 - DNA, 275 bp, Homo sapiens
  misc_feature (268)..(268): Wherein n may be a, c, g or t
  misc_feature (270)..(270): Wherein n may be a, c, g or t
  misc_feature (271)..(271): Wherein n may be a, c, g or t
  misc_feature (272)..(272): Wherein n may be a, c, g or t
  misc_feature (273)..(273): Wherein n may be a, c, g or t
  misc_feature (274)..(274): Wherein n may be a, c, g or t
  misc_feature (275)..(275): Wherein n may be a, c, g or t
tccggagcaaactctatcttagcagacacctctgtagcgttgtcagctaatgattctatttctgctgtttccaattcggtaagagcaaaggatgacgaaaccaaaacaacgttgccgctgttaaggtcatattttattcaaattcttttgaacaatttccaggaagaattgcaggattggagaatagacggggactatggattactaaggttggtagacaaattgatgatttccaaagatggtcagagatatatacaatgctggtgtncnnnnnn

SEQ ID NO: 5360 - protein, 91 aa, Homo sapiens
  misc_feature (90)..(90): Wherein Xaa may be any naturally occuring amino acid
  misc_feature (91)..(91): Wherein Xaa may be any naturally occuring amino acid
SGANSILADTSVALSANDSISAVSNSVRAKDDETKTTLPLLRSYFIQILLNNFQEELQDWRIDGDYGLLRLVDKLMISKDGQRYIQCWCXX

SEQ ID NO: 5361 - DNA, 341 bp, Homo sapiens
cagctgcagtacatgccaccaggatcagcaggaatccggccgccgcgtacgcacgattccctgctgttggataaacgcctgtagagtgtcgggattttcggccccggcgtaggccgcataggacggcgcagctccgtggagttgatccacaagccgatcgaggtcgccagttgtggagtctgcggtgaactccaggatgtctggtgtgagacctgccagtctcggatcgttgcgagcgaggagggcgtcatcgtcataggtgacgggtaggcggctgacgggcttgatggtacgaaccgtggtgtgtttatcgtggccaaaggtccatgtcgatgacgcgt

SEQ ID NO: 5362 - protein, 85 aa, Homo sapiens
MTMTPSSLATIRDWQVSHQTSWSSPQTPQLATSIGLWINSTELRRPMRPTPGPKIPTLYRRLSNSRESCVRGGRIPADPGGMYCS

SEQ ID NO: 5363 - DNA, 433 bp, Homo sapiens
acgcgtaaaggacagccgttctgagaagacaaccagctcccctgagatgggaggcgggctgcacgctggtaaagaggatttttcaattcaaggactttgaggagattccgcccagataagctggaggggagcgaatgcacgtccatccagcaggggcagggcaccgggaaagaccgcaaagaagaaagtgtccggtttaaggtcaacagtcctcgagggacgccccaggtggattccccgggtgggctccccgggtgggtggaggcctgcaacgcccccccgcgattagggagtgggcccagggcgcgggaggggccgggccggccttttgcgcgcacacacacacacacacacacacccgccttttgcagacacacgcgcgcgcacacacccgccttttgcacatagacacgcacacacccgccttgtgcac

SEQ ID NO: 5364 - protein, 67 aa, Homo sapiens [sequence omitted]

SEQ ID NO: 5365 - DNA, 410 bp, Homo sapiens
tcatgatgactgattgattttaaggatactcggggaacacatggacaaagctcgtatggcaaaatgttaattagtaaattcatgcaataggtagatgaggatgcattatattaatatttctcagttctttgtatgtttgaacattttcataataaacttttttaagttctgggcccctggtaaggcaccttacatggccacctcctcctcttccacctccattctacagatgagagaaacagggctcagaggttagctctttcatctaacgtcacaggactttgactgtagaactggcatttcaacccaggtatcttgagaccaaggtgcccactctcgacctcagagctgtgccctaagttctaagcactgcttgagggggtgactcgcgagcgtacacccactccgga

SEQ ID NO: 5366 - protein, 53 aa, Homo sapiens
MRMHYINISQFFVCLNIFIINFFKFWAPGKAPYMATSSSSTSILQMRETGLRG

SEQ ID NO: 5367 - DNA, 308 bp, Homo sapiens
  misc_feature (235)..(235): Wherein n may be a, c, g or t
  misc_feature (306)..(306): Wherein n may be a, c, g or t
cggccgagcctggattgaactcagcatccagggccaagggggaagcactggcttggccattgatgctcagttcctccttcttgctggtcctgcctttggggaagtttacaaaaactgctgaacacatcatttgcccaaaccccacaacagacaggagggttgccgcttggtgctgtgtcatacggactgtcgcgacaggaggcagccatgctcctcagcgtgctctgcaaaactnacagtggctggagggcactgggggtggctgtggtgggcccaaggggcaggaccccctcctcattcaccttnct

SEQ ID NO: 5368 - protein, 82 aa, Homo sapiens
  misc_feature (58)..(58): Wherein Xaa may be any naturally occuring amino acid
  misc_feature (82)..(82): Wherein Xaa may be any naturally occuring amino acid
MLSSSFLLVLPLGKFTKTAEHIICPNPTTDRRVAAWCCVIRTVATGGSHAPQRALQNXQWLEGTGGGCGGPKGQDPLLIHLX

SEQ ID NO: 5369 - DNA, 153 bp, Homo sapiens
gcgtttgtggaggccattcccgagctgcagggacacgtgttcgtggagactgtcccccaggagaaggggcacgcccaccagaatatatatccttcggagcatgtacaggtgcatggggaagtcatccctgagtggcatggtcatgggggatcc

SEQ ID NO: 5370 - protein, 51 aa, Homo sapiens
AFVEAIPELQGHVFVETVPQEKGHAHQNIYPSEHVQVHGEVIPEWHGHGGS

SEQ ID NO: 5371 - DNA, 309 bp, Homo sapiens
ccggaagaggaagacgaacacttgccagaggacgaaagtgaagatgaggagagtggggaaggcttgccatcaggacagggtcagggcagctcatctctctctgctgaaaacctcggtgagagccttcgtcaggaaggcctctctgctcccctcctgtggctccagagctccctgatccgagcagcaaatgaccgagaagaggatggctgctcccaggcaatccctctggtgcctctgacagaggaaaatgaggaagcaatggagaacgaacagtttcagcatctgctacgcaagctagggatccggccg

SEQ ID NO: 5372 - protein, 103 aa, Homo sapiens
PEEEDEHLPEDESEDEESGEGLPSGQGQGSSSLSAENLGESLRQEGLSAPLLWLQSSLIRAANDREEDGCSQAIPLVPLTEENEEAMENEQFQHLLRKLGIRP

SEQ ID NO: 5373 - DNA, 326 bp, Homo sapiens
gcaatggaaagaggtttagacattggctcttcattgagcttagaacccttttgggcagaaagatatccgtcgaacaacgttctattaggaatggcggataaattatttaaattatatcacactaattttcctcctgtggtagccctaagaacttttggtttgaatctgacgaataagatcggtccagttaagaatatgatcattgacacattaggaggaaatgagaaatgagaggtatgtaaatagaaatagactagctccacttttaagaattatttatgcaattaaatacatgggtgaccaaaagagcgggcggatacacgcgt

SEQ ID NO: 5374 - protein, 76 aa, Homo sapiens
AMERGLDIGSSLSLEPFWAERYPSNNVLLGMADKLFKLYHTNFPPVVALRTFGLNLTNKIGPVKNMIIDTLGGNEK

SEQ ID NO: 5375 - DNA, 458 bp, Homo sapiens
  misc_feature (388)..(388): Wherein n may be a, c, g or t
  misc_feature (395)..(395): Wherein n may be a, c, g or t
  misc_feature (398)..(398): Wherein n may be a, c, g or t
  misc_feature (401)..(401): Wherein n may be a, c, g or t
  misc_feature (458)..(458): Wherein n may be a, c, g or t
atgcatggaataatgaatgtgaaatatattttaacatgaattatcttcaatttaattcatctattttggaaatgccttatgtgtgcatattgagcttcctgaaaacaaagcacaatcatatacagagtgattaagaagaagatattaagatacatatgtaatcacagtgttatattaagatatatgtgtaatcaggtatacatatgttaaacattaaaactcccaattgatggctaacattttatttaagttctataattattatctccataaatgttaccattatccattgttatgtataaacaatgaacataagaatatttaaggtaaaacttaggaatatgcttctgaaaaaaagctagcccacttaaggttcttttctctctcntgtgttnatnttngtgccatgaagttttaagaaacatatgcgagaaaatataccagaaaaagtgcgaatn

SEQ ID NO: 5376 - protein, 59 aa, Homo sapiens
  misc_feature (9)..(9): Wherein Xaa may be any naturally occuring amino acid
  misc_feature (10)..(10): Wherein Xaa may be any naturally occuring amino acid
  misc_feature (11)..(11): Wherein Xaa may be any naturally occuring amino acid
  misc_feature (13)..(13): Wherein Xaa may be any naturally occuring amino acid
MFLKTSWHXXXHXREKRTLSGLAFFQKHIPKFYLKYSYVHCLYITMDNGNIYGDNNYRT

SEQ ID NO: 5377 - DNA, 255 bp, Homo sapiens
  misc_feature (255)..(255): Wherein n may be a, c, g or t
acgcgtgatgaggcgtagcgcggcgtcatacgacgcaacctggcgacgcgggcgcggcgccctgaggcccgcccgcgtagcgtcggtggcacgtcggacccgctgtgtgccggttctgtccccgcacctgtccccgcacctgtccccgtcccttgaggagaactccatgaccgatcacgcatcgaccgccgccgaccccgggtacgacgcgccgctgatcacggcggaggaggcggcgggccgcgtcgccgccgn

SEQ ID NO: 5378 - protein, 82 aa, Homo sapiens
MRRSAASYDATWRRGRGALRPARVASVARRTRCVPVLSPHLSPHLSPSLEENSMTDHASTAADPGYDAPLITAEEAAGRVAA

SEQ ID NO: 5379 - DNA, 252 bp, Homo sapiens
  misc_feature (1)..(1): Wherein n may be a, c, g or t
ntccggaatggctctgagcgagacatgattttggaggcactccgccattcacaaactcgtgctagagaagctgatatggcggctaagaaggcgtacaatgagaaggacgacgtcatcaagcttttgctccgacaggcctcacatctctttgcgtgcaaccagtggctgaaaataatgcagctggagaatattgtcctgcagctcaagaacaaagagcatcagatagcagccatcatacctgaacttccatgg

SEQ ID NO: 5380 - protein, 84 aa, Homo sapiens
  misc_feature (1)..(1): Wherein Xaa may be any naturally occuring amino acid
XRNGSERDMILEALRHSQTRAREADMAAKKAYNEKDDVIKLLLRQASHLFACNQWLKIMQLENIVLQLKNKEHQIAAIIPELPW

SEQ ID NO: 5381 - DNA, 245 bp, Homo sapiens
cgcgttgaaattccaacacaaacagtgcaagttgaaaaaaatggaaagagaaaagaagtagaagaaaatcgctttccaggttatgttcttgtggaaatggtgatgacagatgaagcttggtttgttgttcgaaatacaccaaacgttacaggatttgtcggatcacacgggaacagatcaaaaccaacaccattattggaacaagaaattcgtgatatcttggtttctatgggacaaactgtaca

SEQ ID NO: 5382 - protein, 81 aa, Homo sapiens
RVEIPTQTVQVEKNGKRKEVEENRFPGYVLVEMVMTDEAWFVVRNTPNVTGFVGSHGNRSKPTPLLEQEIRDILVSMGQTV

SEQ ID NO: 5383 - DNA, 199 bp, Homo sapiens
cctaggaaaagagcgcccgacatagattggaacggatgtggaagattaatgctgaccctttacctccgcccagaaggaagccttcaggttacaaccccacgcatagaacttgacgtagtaacgaagggtctcctccaccgtttcaaccagttcttgggcgtgttcagcgctcataaccgattccttagccggtgggccc

SEQ ID NO: 5384 - protein, 50 aa, Homo sapiens
MLTLYLRPEGSLQVTTPRIELDVVTKGLLHRFNQFLGVFSAHNRFLSRWA

SEQ ID NO: 5385 - DNA, 321 bp, Homo sapiens
  misc_feature (13)..(13): Wherein n may be a, c, g or t
  misc_feature (121)..(121): Wherein n may be a, c, g or t
atcaaagctgctngcggtactactaaatactgttcttcttatttaagaggattgccatgcccaaatcccaactgtatgtttttgcatgaacctggtgaagaagctgattcttttaataaangagaactccacaataaacaacaagcgcaacagcaaagtggcggaactgcattcactaggactggaatacacaacaatatatctaccagtaccgctggttcaaataccaatttactaagtgaaaatttcacaggcacaccttcaccggcggcgatgagggcacagttacatcatgacagccatacaaacgctggaacaccg

SEQ ID NO: 5386 - protein, 107 aa, Homo sapiens
  misc_feature (5)..(5): Wherein Xaa may be any naturally occuring amino acid
  misc_feature (41)..(41): Wherein Xaa may be any naturally occuring amino acid
IKAAXGTTKYCSSYLRGLPCPNPNCMFLHEPGEEADSFNKXELHNKQQAQQQSGGTAFTRTGIHNNISTSTAGSNTNLLSENFTGTPSPAAMRAQLHHDSHTNAGTP

SEQ ID NO: 5387 - DNA, 357 bp, Homo sapiens
  misc_feature (357)..(357): Wherein n may be a, c, g or t
actagtcatcactgtgttcttcacccctgtgctcacacaaaaagaaaaaaaatgctgttttacagaagaatggccttgatgaagcagtgaaaaatatctgatgtgaagacatgggaagggcatgttagccctgctgctgcacacctagacacgatgtcttatcttgaggaaagcactatacagttgagttgcaaagctggactaaacactttttttcatggaagaccagctttacttgaaagaacagctggcagacatactgttcagagttgcatatttggtagacattttctcaaaagagaaagaggtgaggctgtgactttgaagaaaacaactgtttgttaccggtataaaatn

SEQ ID NO: 5388 - protein, 68 aa, Homo sapiens
  misc_feature (68)..(68): Wherein Xaa may be any naturally occuring amino acid
MSYLEESTIQLSCKAGLNTFFHGRPALLERTAGRHTVQSCIFGRHFLKRERGEAVTLKKTTVCYRYKX

SEQ ID NO: 5389 - DNA, 323 bp, Homo sapiens
  misc_feature (1)..(1): Wherein n may be a, c, g or t
ncgagtatgtatcagttatccattgctgtgtaacaagttactgcaaaccttatcagcttcatacaacgaaactgtattatctcacagtttctgaaggtgctaagtccagagcaccttcgctgagtgggtctaactcagagcctctcatgaggttgcagtcaagccatctaggatgtctctactggggaggatctgcttctgagagggctcctgcacttggctattgcctgaagtcttcagttcctccctgcatgggcctctctgttaggccgcctgaatgtgctcatgaagtagcagctggcttctcccagagcaagggatcc

SEQ ID NO: 5390 - protein, 59 aa, Homo sapiens
MRLQSSHLGCLYWGGSASERAPALGYCLKSSVPPCMGLSVRPPECAHEVAAGFSQSKGS

SEQ ID NO: 5391 - DNA, 414 bp, Homo sapiens
gcccagctggcccaggggctcgcagaattgtcgacctcaacagtcaccggcagcgagattggcctacaggtgttatctgtaccccaagtcgtcatcctccccaccaatatcgccgccgcgtggaacgacctagacctcgatccgagggacgttgagctctacctcgtactgcgtgaatccgctcgccaacgcctattcaacgcggtgagctggctcggcccgcaactgctagccctggtcgagcattatgctcgcgagatccgcatcgattcctcggctattgaagatgccatcgacattgacgacctctcccagctgacgccagaaaaagcccaggaaatgtcggagcgtttacggggacgcctcttcgagccaacccgcacaccagagcaggatggcgtgcttcagcggcta

SEQ ID NO: 5392 - protein, 138 aa, Homo sapiens
AQLAQGLAELSTSTVTGSEIGLQVLSVPQVVILPTNIAAAWNDLDLDPRDVELYLVLRESARQRLFNAVSWLGPQLLALVEHYAREIRIDSSAIEDAIDIDDLSQLTPEKAQEMSERLRGRLFEPTRTPEQDGVLQRL

SEQ ID NO: 5393 - DNA, 251 bp, Homo sapiens
gtgcacactcacacccgcactgaccagaactctgctcctctgtctgagaagatcttgctcagtcttacagacatgaaaggaaagtttggtttttgttataaaactcctcatcctttgtcatttgatggtagtgaacggtttgtccagaaacactttaaccctctttataacttctcctgtagacgagacagagtttgctatctctgtcacctcgtgttcctttctttaagaaaagcaactgagcagaattc

SEQ ID NO: 5394 - protein, 59 aa, Homo sapiens
MKGKFGFCYKTPHPLSFDGSERFVQKHFNPLYNFSCRRDRVCYLCHLVFLSLRKATEQN

SEQ ID NO: 5395 - DNA, 237 bp, Homo sapiens
  misc_feature (1)..(1): Wherein n may be a, c, g or t
  misc_feature (2)..(2): Wherein n may be a, c, g or t
nntccggaccggctgatcgaggtgaaggtcacggcggacaacagcagctgcatccgctccatctccttcatctacatcggagccgatggcaaaccgtacgaggaggggccatggggtttcggccatgcttcacggagtacaagattgatctgtgcaggttcggagagcttgacggagatctccgggaccacgggcccagcctacaacattgacaatctggtcaagtctctcaaattt

SEQ ID NO: 5396 - protein, 79 aa, Homo sapiens
  misc_feature (1)..(1): Wherein Xaa may be any naturally occuring amino acid
XPDRLIEVKVTADNSSCIRSISFIYIGADGKPYEEGPWGFGHASRSTRLICAGSESLTEISGTTGPAYNIDNLVKSLKF

SEQ ID NO: 5397 - DNA, 391 bp, Homo sapiens
  misc_feature (391)..(391): Wherein n may be a, c, g or t
tgtacaagagcaaccatgtctaattttaagattgatccaaatgaagcaaatgcatttcaaatttacagaataccatagaatactaatgggtagttcaaagtatcactaaatgtgtttggagggttttgagttttttcaaaacatacaatgttccacacaggaaacatcagtgccaacttcaccctatcactctttctgtccactcaggagtctcctttggaaatatatctctctggagggtcttccaaacaaatcctttgaatactcccatcttgtttagcagagtattctaaaatatttgtcaaaatctgtgataataggttctggagatcatgtttcttattcttctaaatgctggtatttcaaatgaacaaataggatattaaagatn

SEQ ID NO: 5398 - protein, 56 aa, Homo sapiens [sequence omitted]

SEQ ID NO: 5399 - DNA, 300 bp, Homo sapiens
  misc_feature (127)..(127): Wherein n may be a, c, g or t
  misc_feature (128)..(128): Wherein n may be a, c, g or t
accggtggcgtgtccaagcaaaataacttcggcggcctgacgctctacgaatacagcgtgcgcggcttcaccacgtcagagttctatcaggacggtttcagcgccaaccgcggctacccgagcacgnnccggatggcggccaatatcgaacgcattgaagtactcaaaggccccgccgccagcctgtatggccgcggcgatcccggcggcaccgtgaatatcgtcaccaagaaaccgcagccgcaagccttcaccacgctgcaaaccagcgccggcagttgggaccgttatcgcacggca

SEQ ID NO: 5400 - protein, 100 aa, Homo sapiens
  misc_feature (43)..(43): Wherein Xaa may be any naturally occuring amino acid
TGGVSKQNNFGGLTLYEYSVRGFTTSEFYQDGFSANRGYPSTXRMAANIERIEVLKGPAASLYGRGDPGGTVNIVTKKPQPQAFTTLQTSAGSWDRYRTA

SEQ ID NO: 5401 - DNA, 332 bp, Homo sapiens
  misc_feature (229)..(229): Wherein n may be a, c, g or t
  misc_feature (248)..(248): Wherein n may be a, c, g or t
  misc_feature (253)..(253): Wherein n may be a, c, g or t
  misc_feature (269)..(269): Wherein n may be a, c, g or t
  misc_feature (293)..(293): Wherein n may be a, c, g or t
  misc_feature (302)..(302): Wherein n may be a, c, g or t
  misc_feature (310)..(310): Wherein n may be a, c, g or t
  misc_feature (331)..(331): Wherein n may be a, c, g or t
  misc_feature (332)..(332): Wherein n may be a, c, g or t
tcatgaatgacaccaggtgagcctgaatatcttaatatacttcatcctcagtcatattcacaggcaaggaaataccttcccactgtcagagaaaggcagcctcttctggagaagggcagatactcagcggatgcaaagcccagttgcgcagcaccaggaaaatggacaccccagtaattcaagtaacactctttccaatcctcaaattctgaacggacagtctactctntttgagtgtccctagcatntaatntataatcataattttnaaaagatgatttctgaaccatganaattcactncatagctnaagacagattgaggtagaatnn

SEQ ID NO: 5402 - protein, 56 aa, Homo sapiens [sequence omitted]

SEQ ID NO: 5403 - DNA, 411 bp, Homo sapiens
  misc_feature (301)..(301): Wherein n may be a, c, g or t
  misc_feature (321)..(321): Wherein n may be a, c, g or t
aagctttgagtcttggccaatcccctggttctgtggaggaggtgggactctgagaaactccctgagacagcaggatttggggatcgcctggggcctttagccaccaagtaggcaggagactctgggtcagggcctgccactgtgaaaaactcttctgagaggtggggacactgccagtgggtgagcaggggcgccactgtgggaagaagccagcgcaggagtgggagagtgtcccatggcacagaggaatggccaagaagctccagctggtgccgggtagagggccaagaccaaggccggngcaggcgttgtgcagctggnggcagcgagtcctccctgctgcctggtcagaaacagagactcagggctcctgctgcagccctcaagcgctgcgagggtctgacatgatca

SEQ ID NO: 5404 - protein, 54 aa, Homo sapiens
  misc_feature (18)..(18): Wherein Xaa may be any naturally occuring amino acid
  misc_feature (25)..(25): Wherein Xaa may be any naturally occuring amino acid
MAKKLQLVPGRGPRPRPXQALCSWXQRVLPAAWSETETQGSCCSPQALRGSDMI

SEQ ID NO: 5405 - DNA, 265 bp, Homo sapiens
gcgttgcgcgcccggctcacgcccgactacccgatcggctgcaagcgcctcctgctgtcgagcgaatacctcgcgacgatgagccgcgacaacgtcgcgctcgtcacgcaacgcatccggcgcgtgaccaaggccggcatcgaaaccgtcgacggcgtccagcatccggtcgacgcgatcgtctacggcacggggttcgcggcaaccgaattcctgtcgccgatgcgcatcacgggccgcgacgggctcgacctgaacgacgcgt

SEQ ID NO: 5406 - protein, 88 aa, Homo sapiens
ALRARLTPDYPIGCKRLLLSSEYLATMSRDNVALVTQRIRRVTKAGIETVDGVQHPVDAIVYGTGFAATEFLSPMRITGRDGLDLNDA

SEQ ID NO: 5407 - DNA, 228 bp, Homo sapiens
gcgtacgaaaagagccaaccagaggagaatgagcttcttcggagcagaagtgagaaactgacagataacaacattggcaatgaaacgcaacctgattatacttccttatcgcaaacagtatttgcaaaattgcaggaaagagacaaaggcttgaaaagtaggaagattgacccgataataatacaagatgttcccacgacaggacacaaggatgaattgacagtgcac

SEQ ID NO: 5408 - protein, 76 aa, Homo sapiens
AYEKSQPEENELLRSRSEKLTDNNIGNETQPDYTSLSQTVFAKLQERDKGLKSRKIDPIIIQDVPTTGHKDELTVH

SEQ ID NO: 5409 - DNA, 394 bp, Homo sapiens
  misc_feature (364)..(364): Wherein n may be a, c, g or t
  misc_feature (391)..(391): Wherein n may be a, c, g or t
gctagctcaggtctgattgattggggttctatgtttgccaaaagccacctactattttcagttgttggtttctgctattgtaatgaaataggtcccaggctattttgacagctgccctgggtctttcctttgtaaaatgtgacagttctagcaccgagtgtggaccagccccgagcttgttcctcccaatacctattttgtagttttgccaggtgctgcctgctaggttgggtggggaaggggtggagagaagttggtgggggcttaggaaggacggtgaccattttctcgcctactaagagaaggcagtcagctaggattcactgtgcaacacagctgggcaggaagaagagaatcccctgtntgtaagagaacagtcacatactaaatnctg

SEQ ID NO: 5410 - protein, 69 aa, Homo sapiens [sequence omitted]

SEQ ID NO: 5411 - DNA, 431 bp, Homo sapiens
acgcgtgagaggcactacagggtgagcggttaaatgaatagtatgtcctaggcggaccagtgccatattaaaagaagacactaagaagggcatgtcttccgttaaaatttcgataacggtatgggtcgagtgccaactatgttcttcatagtttgggttgtaaacacgaactttaggttgagccctgaagcgttgctgtaaaaaatcccataaacacacaatagtaccgtagaggttttcaatggactcgttagccatatcttccgttaaggcatcttggaagtatagatgcgttaaatggacaaggtttttcgcctcgctggcactgaaattatcgcttatttctgcttcaatgcgttcaatcaattcatgttttttattatcagtcattagaactcttcctcatgagtggtgttctttatcaaactagt

SEQ ID NO: 5412 - protein, 130 aa, Homo sapiens
MTDNKKHELIERIEAEISDNFSASEAKNLVHLTHLYFQDALTEDMANESIENLYGTIVCLWDFLQQRFRAQPKVRVYNPNYEEHSWHSTHTVIEILTEDMPFLVSSFNMALVRLGHTIHLTAHPVVPLTR

SEQ ID NO: 5413 - DNA, 153 bp, Homo sapiens
tacatcgtggagggtgactccgcgggcggttccgccaagcagggccgcaatcgccggacccaggcgatcctgccgctcaagggcaagatcctcaacgtcgaaaaggcgcgcttcgacaagatgctctcctcccaggaggtcggtacgctgatc

SEQ ID NO: 5414 - protein, 51 aa, Homo sapiens
YIVEGDSAGGSAKQGRNRRTQAILPLKGKILNVEKARFDKMLSSQEVGTLI

SEQ ID NO: 5415 - DNA, 401 bp, Homo sapiens
tcgcgagcacactccagcctctggggcgtctgccagggcctctgtgttttgatatactctgacctggcagtgaagctgctgatgaatgcacgacaaagaccagtttgctccgtaaccccaggctcccagcgtcttttccatgagccaaaggcctggtcctggaggggggtgccctgcagctctgctggccttcttccaggggagttcattgctgggggtggccctgcagggacctccactgtgctggggaggggaagaagaaggatgcaacagggggaggggagaatttgagaaaataggatgcaaattctccacttgtgaataaagaaatagagagccattgctaagaactatgtttacgcagggttagtgctgggacccagaaccagtcaactggtttt

SEQ ID NO: 5416 - protein, 113 aa, Homo sapiens [sequence omitted]

SEQ ID NO: 5417 - DNA, 361 bp, Homo sapiens
tctagacagcttcacccacacaaagaaagccagtggcacccagccaggacagagagccaggccccacaaaacagggggcacagcccgagagcccagcacggccaccatcacagtggctcatggcccagctagtgcgcagggatggaggcccttgccctgggaaacccccaagggagcccctgaagggatctgcctggacttttctgaccccgattccccaacactctgagttcagcctgttcagtgcctcaaactcaccagtcagacaccgggcctggcacggtgagaaggaagcttccctggacgtcctggggactctgcccgctggggtagggggtgctgcccacacagacccccactg

SEQ ID NO: 5418 - protein, 80 aa, Homo sapiens [sequence omitted]

SEQ ID NO: 5419 - DNA, 418 bp, Homo sapiens
  misc_feature (418)..(418): Wherein n may be a, c, g or t
aggcttggtgttacatggagaaggtctcagcaagcaatggggcaggggactgggggcaatagctcgacagagcatgttaagcagagcaggagagctggcagtgccaagcagggaaccagtgcacggggacaggtgcatggcatccaggtgggacaggcaagggtgcagggcagccacatagggggctgaaggatgcgggaccctgggtaaggaggggagaagggaggcagcgtggatgaagtcatgggcttcctgggcctgcccaccctatgtccaccccaccaggaaaagtcaggctgaaggtccctaacccacccttccacaagccacctgctcctccagcctgcccactgggcttctgttctgtccacaccccaccggagagtgttcctaccattcactgctgggtctgggcctn

SEQ ID NO: 5420 - protein, 72 aa, Homo sapiens
MTSSTLPPFSPPYPGSRILQPPMWLPCTLACPTWMPCTCPRALVPCLALPALLLCLTCSVELLPPVPCPIAC

SEQ ID NO: 5421 - DNA, 403 bp, Homo sapiens
tgtacaatttgaacccaattagtttggcttcataatctttgcaattaattaaccactatgctgctacatatatgtatatccttaaatattatagtaataataatagtcttatttcataagaaatcaaacttttacataaactgtatatttagaaaattttctgcaattatcttttttccattcagcattatacttctgaagtttatccatattgatgtttgtaggtctaattcattattttctcacctgtatataattcaatcatgtaaatttacctctacttatttattcattttcatttccatggctacttagattgcttccaattttttgctactacaaataattttgcaaagaacattttaaatacctatctcctagtagacaaatgagttttcctagg

SEQ ID NO: 5422 - protein, 85 aa, Homo sapiens [sequence omitted]

SEQ ID NO: 5423 - DNA, 424 bp, Homo sapiens
  misc_feature (1)..(1): Wherein n may be a, c, g or t
ncgcccattggcgggtaataatacgcataagagtgatctaatccaagtagtacctccttaccgctttttttattatcactataggtcatttggctattagagcgaacagcagaatttgtccttggttttcagagtttgaaaatgctatttggtattaaactggctaacgacgtatatcctccctggaaagattcatatatcgactatgaaaggttgaagaaattactaaaggaaagcgtcatacatgatggccgtagttccgtggatagttggtccgaaaggaatgaatctgattttgtggaggccttggataaagaactagaaaagggttacacatttcaaatttccaaatataatgctgccttgcgaaaactagatgatttagaggaaaacccttaaccccccccccccccccccccccccc

SEQ ID NO: 5424 - protein, 85 aa, Homo sapiens
MLFGIKLANDVYPPWKDSYIDYERLKKLLKESVIHDGRSSVDSWSERNESDFVEALDKELEKGYTFQISKYNAALRKLDDLEENP

SEQ ID NO: 5425 - DNA, 442 bp, Homo sapiens
tctagatcttgtaaatgaaagaagtcaagagttttgcgtttcccttcttacactttatgtcaagggatacttgagaaattatggtgggtcttattctttgctctcccagtgttctcatacttaggtatttacagagctaaaggattgaaagcgatatccaaaggcccatgagtttattcctttcttttgagctactcagctctctgtaagatatgaatcattatatcatcacctccatctcaggaaaaaccaattttagattctctattaagcaaagagggacaaaaagtgtgttcagtatcttactggataactcaccttatggtaagaataaggaatgtggtttggttcattggataagcacaaagcaggaggaaaaaagtatcacgttagattcacaggttataagcttgaatctcagttcacacagttttttagatct

SEQ ID NO: 5426 - protein, 76 aa, Homo sapiens [sequence omitted]

SEQ ID NO: 5427 - DNA, 364 bp, Homo sapiens
  misc_feature (19)..(19): Wherein n may be a, c, g or t
  misc_feature (20)..(20): Wherein n may be a, c, g or t
  misc_feature (185)..(185): Wherein n may be a, c, g or t
catatgatcggcggcgacnngtcagaccgtgcagcgcctcgaccgattttcgccagcctggcaccgggcctgggcagcatcccgcgcaccaaggaccgttcggcctctgccgacagccgtgccgaacacggttacatccatgcaggcccagccggttccgggcacttcgtgaagatgatccacancggcatcgagtacgggatgatgcaggcctttgctgaaggcttcgacatcctcaagaccaaaaactcggagaacctgctggagcacgagcgcttcgacctcaatgttgccgatatcgccgaagtaagagttcatgacagcgtggtctcgtcctggttgctggacctgaccgccgacgcgt

SEQ ID NO: 5428 - protein, 121 aa, Homo sapiens
  misc_feature (7)..(7): Wherein Xaa may be any naturally occuring amino acid
  misc_feature (62)..(62): Wherein Xaa may be any naturally occuring amino acid
HMIGGDXSDRAAPRPIFASLAPGLGSIPRTKDRSASADSRAEHGYIHAGPAGSGHFVKMIHXGIEYGMMQAFAEGFDILKTKNSENLLEHERFDLNVADIAEVRVHDSVVSSWLLDLTADA

SEQ ID NO: 5429 - DNA, 476 bp, Homo sapiens
cggccgtcgtcgttgacaggagacaatcggcaagtgcagtccgccgctcggatcctgcctccagccgcgtgtcacgccgcgaaagacaccaaccttgcacgatgaccacgcacaggggaaccacggcggcgttagaaacgtcaacacctctgcctgtcaaaaacggggggatcgcgattatgacttcggaagtgagtccgatgaggacacaacaaaccacagtcgctgcaagcaaagataacagggatcgatttcgagcccaggccctccagcccagcagcacattaccgctcaacatgtccgaagccgggctcgatcatgttcaataatgctggcctgcttctcgatcggcagtcgatcgacggatttcaaccactcacgagtctctggggataatgccgtgtctcgcacctcgatgcctgaatgttccaccaaccaagcgacaacacgatcctgaacattttgcacccagatct

SEQ ID NO: 5430 - protein, 99 aa, Homo sapiens
MLSGNVLLGWRAWARNRSLLSLLAATVVCCVLIGLTSEVIIAIPPFLTGRGVDVSNAAVVPLCVVIVQGWCLSRRDTRLEAGSERRTALADCLLSTTTA

SEQ ID NO: 5431 - DNA, 381 bp, Homo sapiens
gtgcactttacacgggcagattattgtatatcaattatattccaataaggctgggggaaagttaaaaacaaacaaatagagtagctatcccttgaacagagtgtccagagaagcgaatatagagaccattctgaagggtatgcgtggtggaaacagtttagaaacggataaaagggagagatggggattgatttgggtgtatccaagtctaatgtttatagtgactgataaatacaaattcatgataccaacatttccactctctcacttcatgcttcacttttacatttgggtcttggtcttggcaaacattcattcttcttctcaaggggcacaaatgggaagagaaagagcctaaactctattttgagataatgatca

SEQ ID NO: 5432 - protein, 72 aa, Homo sapiens [sequence omitted]

SEQ ID NO: 5433 - DNA, 366 bp, Homo sapiens
ccggtgatccagtgcgtgtggttggcccgtacgctgtatacgaacaagctgggggagaccattcctcgtgaaaccctgcaggccgtggcattgatctaccgcaccctgcgcgagcttgatgatgaggccaagcgtgaaaccctggaattgccggagcttgatctgcgttgatcagcgccgggtacgcgcatccagggtttcaaggttggccaacgacaacattcggctgaggagcctgttgagcaggttgcgctgtgggggcagtgcatgccagatcaccagggcgtcctgtgcgtcaatgtagataaagcagccatcgaatgccacggcttgctcgaaacgccgctccagcacgttctgcaattg

SEQ ID NO: 5434 - protein, 56 aa, Homo sapiens
PVIQCVWLARTLYTNKLGETIPRETLQAVALIYRTLRELDDEAKRETLELPELDLR

SEQ ID NO: 5435 - DNA, 509 bp, Homo sapiens
tgatcagtttccatcactgaatccaaggttattccctacagtcaccgtaattcactcacctaggccctggctggtgaccacacaggctgcttctaacactctgtactccatgtgacaaacgtggctgcagggagcacctgtgttttcggtatgcatgtatttgcagatgagagtcctatctgtgagctgctacgtcaaagctacgtcaaagcggcagatgcctaaaatgctgctgcgctgagtctattttgtagacagagctgacctcaggctgattcctttctagacttggctgacagatgagaagtgtggggagggggatgccagactttcgagtggtgaaatagatttcattcagtaactgcaggcgggacgggaaacagctgagctccatttctgtttgcactgaggtgagggagtgttttaggggagaacccgggctaggggagctcaagtgaaaaattacaaaggctggtcagtgtgagattaagctcgctgtgtctgctagc

SEQ ID NO: 5436 - protein, 62 aa, Homo sapiens
MELSCFPSRLQLLNEIYFTTRKSGIPLPTLLICQPSLERNQPEVSSVYKIDSAQQHFRHLPL

SEQ ID NO: 5437 - DNA, 270 bp, Homo sapiens
  misc_feature (1)..(1): Wherein n may be a, c, g or t
  misc_feature (2)..(2): Wherein n may be a, c, g or t
  misc_feature (3)..(3): Wherein n may be a, c, g or t
nnncacccaacctgatcgggttgtcaaggatctcgacggggcatggcaccaggcattgcggaaactgcgatgatggctgcggcgattccctcacggcacccgaacgacgacggtggcgtatgggcaacggtgcggcgttttcgtccccttacctggctagctattggatttgtcaaagggtggcgagccctcatcacgccgctctgcggggatgtctgtaagtaccaacccagttgttcgacgtacggtctgcgggcgttacaggtgcac

SEQ ID NO: 5438 - protein, 76 aa, Homo sapiens
MAPGIAETAMMAAAIPSRHPNDDGGVWATVRRFRPLTWLAIGFVKGWRALITPLCGDVCKYQPSCSTYGLRALQVH

SEQ ID NO: 5439 - DNA, 323 bp, Homo sapiens
aattatggtgacaccacctccatgtactctctaaaagccaacacgggtgaacacacgtgtgagtgttgccaggagctgcagacctcgcagagaagtgtgactctgcactgtgatgacggctccagtcggaccttcagctacacccaggttgagaagtgtggctgcctgggccagcggtgccatgctccaggtgacacaagccactcagagtcctcagaacaagagttcaagtccaaggaaagtgaggaacctggccagcagtcagcatccagggtcagcgaggacacccttgggcctttccagtaaaccaagcagcacggccg

SEQ ID NO: 5440 - protein, 101 aa, Homo sapiens
NYGDTTSMYSLKANTGEHTCECCQELQTSQRSVTLHCDDGSSRTFSYTQVEKCGCLGQRCHAPGDTSHSESSEQEFKSKESEEPGQQSASRVSEDTLGPFQ

SEQ ID NO: 5441 - DNA, 351 bp, Homo sapiens
tcatgatgaccaacaggatcagccagtgggagaggaagaggagatttgttgcaaccttgaggtgggttcactgtggacacaaatcagaggcaggacagccacagagaggaccaactattggccacgtgtgggtaagaggaaagaattgtgaccgggttcacagtgcagggggcatggattgaaaagcaggacacatcttcctctcttctggtttcattgagcctttgctaaatagaagctagaatctcatagacctggtggcagctgtcttactcccttggggttgatatggcagaatgccatagactgcatggcatagaaacaataagacatttactgctcacagctgta

SEQ ID NO: 5442 - protein, 59 aa, Homo sapiens [sequence omitted]

SEQ ID NO: 5443 - DNA, 285 bp, Homo sapiens
gtcgactctttgctgtgttggatgcattgcatgtgtaggttactttctagccataccaacgggatctcgacgtcgatgcctgcgatttgcgtgttgggattcattgcttcccccacgttgtagagctcgatcaacgcacgccacgttggcatgtctagctcaataaccagttgccgccgcgtcagacccgcagcacggtcctcttcagtgggttcttcagagcgcatgagcagtggatcgccggcgtctgtctcgataatagcagctttgccatcacggatcaga

SEQ ID NO: 5444 - protein, 75 aa, Homo sapiens
MRSEEPTEEDRAAGLTRRQLVIELDMPTWRALIELYNVGEAMNPNTQIAGIDVEIPLVWLESNLHMQCIQHSKES

SEQ ID NO: 5445 - DNA, 412 bp, Homo sapiens
atttacggtctgggagtcatcccgatcccgacgaaccgtccgatgatccgcaaagatcagaaggacctcatttaccgcaccgaggatgccaagttcgacgccatcatcgccgatgttgttgagcgtcacgaggcgggccagccgatccttatcggcactgcgtcggtggccaagtcggagctgctttccgaaaagctcaagcgtgccggtgttccgcacaaggtgctgaacgccaagcaccatgagtctgaagccgcgattgtcgccctggctggccgtaagggggccgtgacggtgtcgacgaatatggctggccgtggtaccgacattatcctcggcggcaaccccgagttcctcactgagcttgacctacgggaaaagggcttggaccccctcgaggaccaggacgcgt

SEQ ID NO: 5446 - protein, 137 aa, Homo sapiens
IYGLGVIPIPTNRPMIRKDQKDLIYRTEDAKFDAIIADVVERHEAGQPILIGTASVAKSELLSEKLKRAGVPHKVLNAKHHESEAAIVALAGRKGAVTVSTNMAGRGTDIILGGNPEFLTELDLREKGLDPLEDQDA

SEQ ID NO: 5447 - DNA, 266 bp, Homo sapiens
  misc_feature (1)..(1): Wherein n may be a, c, g or t
  misc_feature (2)..(2): Wherein n may be a, c, g or t
nncggccgccgcgatcgattacgaacgccattgcgcagttctcggtcgatcgtcctgaccatgacgcgaaccggacagatcctgatcgttggcgccggattcgcaggtgccgtacatgcgcgaattcttgccgaggctggctacgacgtcgacgtgatcgaccagcgtccccacattgccggcaacgccttcgacaccgtcgacgagaatggcgtgcgggtgcatcgttacggcccgcatctgtttcataccaataacgaacgcgt

SEQ ID NO: 5448 - protein, 88 aa, Homo sapiens
  misc_feature (1)..(1): Wherein Xaa may be any naturally occuring amino acid
XGRRDRLRTPLRSSRSIVLTMTRTGQILIVGAGFAGAVHARILAEAGYDVDVIDQRPHIAGNAFDTVDENGVRVHRYGPHLFHTNNER

SEQ ID NO: 5449 - DNA, 439 bp, Homo sapiens
cctagggtgactgctgtgtaattgggcaactgaggccatttaagctggggacaattgggtgtagacatctggtccagtgccccagcagtgccccctatcccccctgcaagttctgcatcttaaagggctggccctggaaggcgggcagtggcgtaagacctcgctctcagcccagcaccgggttcattccaggggctccttgctgtcgggccaggagctccacagtggcttctcacctgctctccagggccccttcttaccctggaggccagggtccgcgtcctctggctctgcattgtccttcccacctcccaccctgccttaggctcagctctcctccttcttcagggcccagcccagacagcccctgtgttccaggaggggcctgccccttccacctgggcagtcaggttctttggggctcctccctcttggatcc

SEQ ID NO: 5450 - protein, 58 aa, Homo sapiens [sequence omitted]

SEQ ID NO: 5451 - DNA, 319 bp, Homo sapiens
  misc_feature (43)..(43): Wherein n may be a, c, g or t
agatctgctacacagagccacggcagctcagcatgtactgcanagctggggccttgtgcaggacggagcagggcagtgcctctgggcagcttcctgtcccaccccatcacccgtccagttcagctcaaccccagagatttcctaacaagggtgatgacatcctacaactcaaccgcagtctgctggaaggcaacgtatcagtggttggccatacatgagaaggttgcagagaccacgatacccatcttcaccttttctaagcttagacacgtgagtgctctcgtggtggtcccctcactgcctgcagtgtgcagtgcac

SEQ ID NO: 5452 - protein, 61 aa, Homo sapiens
  misc_feature (4)..(4): Wherein Xaa may be any naturally occuring amino acid
MYCXAGALCRTEQGSASGQLPVPPHHPSSSAQPQRFPNKGDDILQLNRSLLEGNVSVVGHT

SEQ ID NO: 5453 - DNA, 318 bp, Homo sapiens
cgcgtgggcccgtaccgtgtaacgcggaccatgggcagcaccgtttcggcctgcctggccacaccgttccagatcaagggtgtgaactactcgatctcctccgcctgcgccaccagtgctcactgcatcggtactgcggttgagcagatccaactgggcaaacaagacatcgtgttcgccggtggtggtgaagaagagcattggagccagtcgttcctgttcgacgccatgggcgccctgtccacccagtacaacgaaaccccggaaaaggcctcccgcgcctacgacgccaagcgtgacggtttcgtcatcgccggc

SEQ ID NO: 5454 - protein, 106 aa, Homo sapiens
RVGPYRVTRTMGSTVSACLATPFQIKGVNYSISSACATSAHCIGTAVEQIQLGKQDIVFAGGGEEEHWSQSFLFDAMGALSTQYNETPEKASRAYDAKRDGFVIAG

SEQ ID NO: 5455 - DNA, 339 bp, Homo sapiens
tgccctggtgtgaaaaacttgaaagtgggagacaaggtagttgtcgagcccacaggtacatgcagagaccggtatcgttggcccctgtcgccaaacgttgacaaggaatggtgcgctgcttgcaaaaagggctactataacatttgttcatatttggggctttgtggtgcgggtgtgcagagcggtggatttgcagaacgtgttgtgatgaacgaatctcactgctacaaagtaccggacttcgtgcccttagacgttgcagctttgattcaaccgttggctgtgtgctggcatgcaattagagtctgcgagttcaaagcaggctctacggctttgatc

SEQ ID NO: 5456 - protein, 113 aa, Homo sapiens
CPGVKNLKVGDKVVVEPTGTCRDRYRWPLSPNVDKEWCAACKKGYYNICSYLGLCGAGVQSGGFAERVVMNESHCYKVPDFVPLDVAALIQPLAVCWHAIRVCEFKAGSTALI

SEQ ID NO: 5457 - DNA, 318 bp, Homo sapiens
  misc_feature (1)..(1): Wherein n may be a, c, g or t
  misc_feature (2)..(2): Wherein n may be a, c, g or t
nncaccgtccccgtactggatccgcgcgaggatttcgccgactgcatgcacattgacgtactggatcccttccacactgacaacaccagtgagcacagtgacctggccacagatggccagactaacggcccggctgatagcgggactggcacccactctgagcagggaaactccgacatatctagccccgtcagctctagtgacgctgctaacaccaccgacagcactgctggcaataccggtgaaggtactgccgcgaatatgcctggtgacatggctcattcttcgacggctacccacccctatgcaagcaccggt

SEQ ID NO: 5458 - protein, 106 aa, Homo sapiens
  misc_feature (1)..(1): Wherein Xaa may be any naturally occuring amino acid
XTVPVLDPREDFADCMHIDVLDPFHTDNTSEHSDLATDGQTNGPADSGTGTHSEQGNSDISSPVSSSDAANTTDSTAGNTGEGTAANMPGDMAHSSTATHPYASTG

SEQ ID NO: 5459 - DNA, 299 bp, Homo sapiens
gtgcacgtgtgtgggggatctctgatttctgaggactgggtgttgactgctgcccactgctttaaccaggaccagcatctgtctgcctacacagtactgctgggtaccatctcctcctaccctgaggacaatgagccgagggagctgagagctgtggcccagtatatcaagtacccaagctattcagcagaggagcacagtagtggagacattgccctgttgcagctggcttcacccatctccttcaatgactacatgcttccagtctgcctcccgaaacctggagaccccctggatcc

SEQ ID NO: 5460 - protein, 99 aa, Homo sapiens
VHVCGGSLISEDWVLTAAHCFNQDQHLSAYTVLLGTISSYPEDNEPRELRAVAQYIKYPSYSAEEHSSGDIALLQLASPISFNDYMLPVCLPKPGDPLD

SEQ ID NO: 5461 - DNA, 357 bp, Homo sapiens
  misc_feature (38)..(38): Wherein n may be a, c, g or t
  misc_feature (82)..(82): Wherein n may be a, c, g or t
tgatcaaacacaaagagaagtatctcgacggcagcaanggcgtaggcgcccgctgatctcccctcccctatgatccgactgnagcaaatcctgacccccggccgttccctcgtgaacgtgccgggcggcagcaagaaacgcgtactcgaacaaatcgccaacctggtagccagggagctgccggagttcgacgcccagaccatcttcgaaaacctggtggcccgggaaaaactcggttccaccggcttcggcaatggcatcgccattccgcactgccgcctgtctggctgccagagccccatcagcgccgtgctgcacctggatgctcccgtggacttcgacgcgctggacggcgcg

SEQ ID NO: 5462 - protein, 96 aa, Homo sapiens
  misc_feature (5)..(5): Wherein Xaa may be any naturally occuring amino acid
MIRLXQILTPGRSLVNVPGGSKKRVLEQIANLVARELPEFDAQTIFENLVAREKLGSTGFGNGIAIPHCRLSGCQSPISAVLHLDAPVDFDALDGA

SEQ ID NO: 5463 - DNA, 300 bp, Homo sapiens
  misc_feature (1)..(1): Wherein n may be a, c, g or t
  misc_feature (132)..(132): Wherein n may be a, c, g or t
ngccggcctttacattatgaggtcatcataaaccaaggtgtctgtctgaggatgatggccatgtcgtggctcagtggggtgatctgtggattcatgcatgtgatagcaacattctcattaccattctgtggntgcaatagaatacgtcaatttttctgtaatattccacagctcctaagcctcttagaccccaaagtaattaccattgagattggagtcatggtttttggtacaagtcttgtgataatctcctttgttgtaattactctctcctacatgtacattttttctgtcatcatg

SEQ ID NO: 5464 - protein, 100 aa, Homo sapiens
  misc_feature (1)..(1): Wherein Xaa may be any naturally occuring amino acid
XRPLHYEVIINQGVCLRMMAMSWLSGVICGFMHVIATFSLPFCGCNRIRQFFCNIPQLLSLLDPKVITIEIGVMVFGTSLVIISFVVITLSYMYIFSVIM

SEQ ID NO: 5465 - DNA, 428 bp, Homo sapiens
acgcgtaccggcgacagcccggtgcgcatcgctgcggtgatctccaaccgcagcgacgcctacggcctgcaacgcgccagggacgcgggtatcgacacccgctccctggatcacaaggccttcgaaggtcgcgaggccttcgacagcgccttgatcgaactgatcgacgccttcaatcccaagctcgtggtactggccggcttcatgcgcattctcagcgctgacttgggcccccattacaacgggcaactgctgaatatccacccgtccctgctgcccaaatacaaagggttacacacccaccagcgtgccctggaggccggcgacaccgagcacggctgcagcgtgcactttgttaccgaggaactcgatggcgggcctctggtcgtacaggcagtagttccggtagagtctgaggactctgcgca

SEQ ID NO: 5466 - protein, 142 aa, Homo sapiens
TRTGDSPVRIAAVISNRSDAYGLQRARDAGIDTRSLDHKAFEGREAFDSALIELIDAFNPKLVVLAGFMRILSADLGPHYNGQLLNIHPSLLPKYKGLHTHQRALEAGDTEHGCSVHFVTEELDGGPLVVQAVVPVESEDSA

SEQ ID NO: 5467 - DNA, 366 bp, Homo sapiens
ggcggggcataaataaggtctggggggcacgtgccactgaccggaggtgcaggaaaagctccccctggtcctcggcctccataggccctctcttggtgaggccctgtaacaaaactcacaggcagacacccctgtgaggctgccctcatgggaggacgccaggggtgcccacccaaggagcctcttcacctgctcttccagggtgggcactgctggctgtcactgggtgacgtccttccaaaagaaagacaaaaagagttgctgctcccagtgcttcagtgggttccttctcttccacaaatagaataaaggcccacagatctcccaggccagggtggcccccagatctcccaggccctcacagcc

SEQ ID NO: 5468 - protein, 53 aa, Homo sapiens [sequence omitted]

SEQ ID NO: 5469 - DNA, 256 bp, Homo sapiens
  misc_feature (253)..(253): Wherein n may be a, c, g or t
  misc_feature (254)..(254): Wherein n may be a, c, g or t
  misc_feature (255)..(255): Wherein n may be a, c, g or t
  misc_feature (256)..(256): Wherein n may be a, c, g or t
gtgcacgtgacttctcagagatctgagtgccagagaaacctggatagttggctgtagggtctgtggctgaaccagtccatgctgtggcctcttacaagatgtaggggtagggaggcaagcagggaagatgcagatcacacagatgggggcagcctcttcaggagttctgagtcttatcccaagaaacaggggggaagccatgggaggtcctgaagcagggaggttagtatttcagaaaatgagtggggctgtnnnn

SEQ ID NO: 5470 - protein, 67 aa, Homo sapiens [sequence omitted]

SEQ ID NO: 5471 - DNA, 279 bp, Homo sapiens
  misc_feature (1)..(1): Wherein n may be a, c, g or t
ngaattcctggagtccccaagctcagtcctcatatgtatgacgcacacccgatgaggaccatgatgttcagttctcactacccgctgcaaggattgttgtattcggcagccttgcatcgattcctggcatcaagtctgcctggatacgaccccgcaacccatctcggccccatcggctacctttttgttcgaggtatggctgatcgtccagtacccgacggtgacatgcctgacggagtttttacctggcatccgaggcctgaactcattgaggcgatc

SEQ ID NO: 5472 - protein, 93 aa, Homo sapiens
  misc_feature (1)..(1): Wherein Xaa may be any naturally occuring amino acid
XIPGVPKLSPHMYDAHPMRTMMFSSHYPLQGLLYSAALHRFLASSLPGYDPATHLGPIGYLFVRGMADRPVPDGDMPDGVFTWHPRPELIEAI

SEQ ID NO: 5473 - DNA, 291 bp, Homo sapiens
atcaaactgttgctaggcctgtactcaccgcaggccggcgagatccgcctcaacggcgaggccgtgaccgaccccgagcgcgatgattatcgccaactgttcacgacgattttttccgactattacctgttcgatgacctggtgcagggcagcgccacttcgtcattggacagcgccgccaaatacctcgaacgcctggagatcgcgcacaaggtcagcgtcaaggatggcgtattcagcaccaccgacctgtccaccggccaacgcaagcgcctggcgttggtcaacgcg

SEQ ID NO: 5474 - protein, 97 aa, Homo sapiens
IKLLLGLYSPQAGEIRLNGEAVTDPERDDYRQLFTTIFSDYYLFDDLVQGSATSSLDSAAKYLERLEIAHKVSVKDGVFSTTDLSTGQRKRLALVNA

SEQ ID NO: 5475 - DNA, 483 bp, Homo sapiens
ctagaactacttcacctgggtggacgctccttgccccatgccgttcttatgatgatcccggaggcatggcaagagaacaccgagatgtctcaggaactgcgcgacttctacgagttccactctttcctcatggagccatgggatggtccggcttgtgtcatttttactgacggtaaccagatcggtgcggtgctggaccgcaacggtctgcgcccggcgcgctactgggtgaccgacgacggccttgttgtctttgcctccgagtcgggggtgcttgacttgccggacgcccatgtcgtcgagaaaggacgacttaagcctgggcggatgttcctggtcgacctgacagagcatcgggttgttgacgatcttgagattaaggctcgactggcctctgctaagccttatggggaatggcttgaccagggccgcatcgacctcgacgacctgccagagcgaacccacatcattcactctcacgcg

SEQ ID NO: 5476 - protein, 161 aa, Homo sapiens
LELLHLGGRSLPHAVLMMIPEAWQENTEMSQELRDFYEFHSFLMEPWDGPACVIFTDGNQIGAVLDRNGLRPARYWVTDDGLVVFASESGVLDLPDAHVVEKGRLKPGRMFLVDLTEHRVVDDLEIKARLASAKPYGEWLDQGRIDLDDLPERTHIIHSHA

SEQ ID NO: 5477 - DNA, 312 bp, Homo sapiens
ggtaccaaacaagaggatttagatgaaaactcaaaacaagaacttccgatggaggttccaaaggaacctgcccctgctcctcctccagagcccgatatgaataatctccctcagaatccaataccaaagcaccagcagaaacatgcattgcttgcgattaaagctgtcaaacgcttgaaggatgcgagaccctttctacaacctgttgacccagtgaaattggatattcccttttactttaactacataaagaggccaatggacttgtctactatagagaggaagttgaacgtaggcgcttatgaagttccg

SEQ ID NO: 5478 - protein, 104 aa, Homo sapiens
GTKQEDLDENSKQELPMEVPKEPAPAPPPEPDMNNLPQNPIPKHQQKHALLAIKAVKRLKDARPFLQPVDPVKLDIPFYFNYIKRPMDLSTIERKLNVGAYEVP

SEQ ID NO: 5479 - DNA, 392 bp, Homo sapiens
acgcgttccatgaatgctggtgcggctgccgcgattgctatgtacgcctggacgacgcagtggtgtccaaagccacgcactagctgatcggggagaaccgtcaccctctaggctcgtgtcatgagcacgcaacccactgaggaaccactccgactagttgtggcattcaatccagtgcctagtgcctcccgggttgctcatcatcatgcgacgagatttcgcctggcggtgcaggccttcattgtcgtcgtcattggtggtttgttgtgggcgttgacggccgacgccttccagttatcgacggtgatgtggatgctcggggcatgggtggtgctattcctcgtgcttttcgtcatccagaatctgcggctgcacgccgctcgcaaggatcc

SEQ ID NO: 5480 - protein, 90 aa, Homo sapiens
MSTQPTEEPLRLVVAFNPVPSASRVAHHHATRFRLAVQAFIVVVIGGLLWALTADAFQLSTVMWMLGAWVVLFLVLFVIQNLRLHAARKD

SEQ ID NO: 5481 - DNA, 304 bp, Homo sapiens
aaaagtgcactagtccaataaaaaggcatttgctttgaaacttttcttgaacctcaaactagctagtaaaacttgacaaagtggagccgtgtgtggtggctcaggcctgtaagtccagtactctgggaggccaaagtgggaggatccctcaagcccaggatcagcttgggcaacatagagagaccctgcctctacaggcgtggtggtacgtgcctgtggaaaaaagtgccagtttttccaaggggttgtatgaacttgcactcttaccagcaccccaggagagttcaagttgctctttgctagc

SEQ ID NO: 5482 - protein, 77 aa, Homo sapiens [sequence omitted]

SEQ ID NO: 5483 - DNA, 338 bp, Homo sapiens
  misc_feature (247)..(247): Wherein n may be a, c, g or t
acgcgtacactcacacacacacacacacatctctgtgcggtcagatacctatttaccaaatcgtgccaagaacaaagatcagaaacgccaaggaaatccaccaggatggcagggggagttcagaacacaagtttacacgaagaaggattccagtctctcttttccagtaagggaaaaaaaaacgaaaaaggagccacttgctggtctctggaatcccgtgcgcaggggggacacagacatggcttanaagccccacttgcttgctttaagctgaaacttcacaggtgatcgaagcagccgatctgtacttggcactcactcactgtgtgtcttgcact

SEQ ID NO: 5484 - protein, 60 aa, Homo sapiens
  misc_feature (48)..(48): Wherein Xaa may be any naturally occuring amino acid
MAGGVQNTSLHEEGFQSLFSSKGKKNEKGATCWSLESRAQGGHRHGLXAPLACFKLKLHR

SEQ ID NO: 5485 - DNA, 258 bp, Homo sapiens
  misc_feature (1)..(1): Wherein n may be a, c, g or t
  misc_feature (2)..(2): Wherein n may be a, c, g or t
  misc_feature (3)..(3): Wherein n may be a, c, g or t
nnnggcaagggtgacaacaagggcaaggactccaacgtcgcggccgaggccgaggtcgtcgagaaggtcatcgagaaggtcgtctacgccccgacgcgcaagcgcctcccgaagtcgcgcgtctcgcgcaccacgtcgttcaccgtcggcggtgccgagggctacatgacctcgggtgcccacgacgacggcgagctcggcgaggtcttcctcaagctcggcaagcagggctcgaccctggccggcgtgatggacgcg

SEQ ID NO: 5486 - protein, 86 aa, Homo sapiens
  misc_feature (1)..(1): Wherein Xaa may be any naturally occuring amino acid
XGKGDNKGKDSNVAAEAEVVEKVIEKVVYAPTRKRLPKSRVSRTTSFTVGGAEGYMTSGAHDDGELGEVFLKLGKQGSTLAGVMDA

SEQ ID NO: 5487 - DNA, 259 bp, Homo sapiens
tccggagtctcatgttggagatgaagcacgtcaaaaaaggaaaggccagcagagctgcgtgggcggcctggagaagctggttcaggaccagctcccaagccaccttccaagggccaggggaacgaggacaggctcacccaagagctcagcatgagaggctgcaacacggggaagccacagagccgtgaccaaggcaaactgagatgaagggtaggtcacggtggcaacctcacaatggtttaccaggaaaatgaaattt

SEQ ID NO: 5488 - protein, 58 aa, Homo sapiens [sequence omitted]

SEQ ID NO: 5489 - DNA, 346 bp, Homo sapiens
gacttcaccgtcaatatcttcgaaatcggcacccgtctgctggtcaagaaagacaaggatggcaagccgtcctacagcgatttcgctgacctcaaaggcaagaacgtcgtgaccaccgccggcaccacgtccgagcgcatcatcaaggcgatgaacgccgacaagcagatgggcatgaacgtcatctccgccaaggaccatggtgaatccttccagatgctggaaagcggccgcgccgtcgccttcatgatggacgacgccctgctggccggtgaagaagccaaggccaagaagcctgatgactgggtcatcaccggtactccgcagtccttcgaagcctacgcgt

SEQ ID NO: 5490 - protein, 115 aa, Homo sapiens
DFTVNIFEIGTRLLVKKDKDGKPSYSDFADLKGKNVVTTAGTTSERIIKAMNADKQMGMNVISAKDHGESFQMLESGRAVAFMMDDALLAGEEAKAKKPDDWVITGTPQSFEAYA

SEQ ID NO: 5491 - DNA, 183 bp, Homo sapiens
  misc_feature (1)..(1): Wherein n may be a, c, g or t
nacgacaacgccgtgtactcggccaacaagccggtactcgaccgcttgacggccaccgtacccaacggcttgatctccggctccggtatggatgtgggcttgccggacggccagatgggcaactcggaagtcggccacatgaacctcggcgccggacgagtggtataccaagacttcacacgc

SEQ ID NO: 5492 - protein, 61 aa, Homo sapiens
  misc_feature (1)..(1): Wherein Xaa may be any naturally occuring amino acid
XDNAVYSANKPVLDRLTATVPNGLISGSGMDVGLPDGQMGNSEVGHMNLGAGRVVYQDFTR

SEQ ID NO: 5493 - DNA, 215 bp, Homo sapiens
  misc_feature (1)..(1): Wherein n may be a, c, g or t
  misc_feature (215)..(215): Wherein n may be a, c, g or t
ngggctggttttgaactccctcctgagttaaagcagtttggttgtttttgtttgccagagtgctggcattataggcatgagcccccctgggtaacagaacaagagcctatttcaaaaccaaccaaccaaccaaaaccaaaaaaaaaggaaagtgagaaaaaggagagaaagaggagaagaggagaggagagaatgaggggaggggagaggctggn

SEQ ID NO: 5494 - protein, 71 aa, Homo sapiens
  misc_feature (1)..(1): Wherein Xaa may be any naturally occuring amino acid
XAGFELPPELKQFGCFCLPECWHYRHEPPWVTEQEPISKPTNQPKPKKKESEKKERKRRRGEERMRGGERL

SEQ ID NO: 5495 - DNA, 396 bp, Homo sapiens
caattgccctctactagtgagcagatcttggaaaggtccacaacaggagctaccttcctcatgatgggccaacttttcaccaaactggtaacgttcatactaaataatttgttgatcaggtttctgtcgcccagaattttcggtatcacggcctttctagaatttatacagggcacagtgttattttttagcagagatgcgattcgtctgtcgacgttgagaatctcagactccggtaatggaataatcgatgatgacgacgaggaggagtaccaggaaactcattacaagtctaaagttttgcaaaccgcagtcaattttgcttacattccgttttggatcgggtttccactgtccattggtcttatcgcctggcagtacagaaacatcaacgcg

SEQ ID NO: 5496 - protein, 132 aa, Homo sapiens
QLPSTSEQILERSTTGATFLMMGQLFTKLVTFILNNLLIRFLSPRIFGITAFLEFIQGTVLFFSRDAIRLSTLRISDSGNGIIDDDDEEEYQETHYKSKVLQTAVNFAYIPFWIGFPLSIGLIAWQYRNINA

SEQ ID NO: 5497 - DNA, 361 bp, Homo sapiens
  misc_feature (361)..(361): Wherein n may be a, c, g or t
tgatcaaggagtttgtttgaacatggtcagagagctttcaaagtcatttcagaaagtgccccacaccatcctcaacagatggtttgatggaagagaagtagccagctctgctcaggaaatccattagtaaggtgcagataccaccaaagagatgtcccacatgttgcagaatgtacctttttccttattttctttaaaatctccatataaaaagggaagatggatgcatgagggcctagaaaatgtttatccctctggatcaatcttaggaatctatcctaagaatcagaaatacagaaaatagtacaaaactcgaggccatctaaaaattcaaacacaggataatgattaaattatgtan

SEQ ID NO: 5498 - protein, 50 aa, Homo sapiens [sequence omitted]

SEQ ID NO: 5499 - DNA, 351 bp, Homo sapiens
  misc_feature (351)..(351): Wherein n may be a, c, g or t
gtgcacactcatacagaggaccctgctgggctggccaactactgagccacttgactgagctttggcttgtgcaacctcggcacgccaagttctgctaggttcctggacggtaggtccctccggctcctaatccccacagtggctcgaacagaagccgtgactccttccttgtgcttaccgtttggcgaatgccccttgtccctctgcatatatccccacgtacctcagctggtccacacctagggggttggctgtaccagcttgtccagtatctgtggtcctgctctggcctgggcaagccagcaaacttctctccagtgggctgcaaccacaccttctccagtgaattgn

SEQ ID NO: 5500 - protein, 56 aa, Homo sapiens
MQRDKGHSPNGKHKEGVTASVRATVGIRSRRDLPSRNLAELGVPRLHKPKLSQVAQ

SEQ ID NO: 5501 - DNA, 438 bp, Homo sapiens
  misc_feature (1)..(1): Wherein n may be a, c, g or t
ntgatcagccataatcagcgccctacgcgcagtgctggtgtaatgattgattccggaagcccggaagaacaagctcgcaaaattgctgattacctggcagaaaacaacctcatttaacttcgcgaattagggagcaatactgatatggcacacgtatacgtgctgatagaacatgaaaacgggcaactgaatccggttagtaaggaattgattgctgcagcacggcctttggggtcggtgcatgctgtcgtcgtcagcgcacctggtggttgtgaacaactgcccgccgagcttgccagtgctggagtggacaagatttattctgcggaggttgcggattatgagcagcgtttagtgctgccagaagtcgatgcgctgtctacagttgctgcgtcgaatcccggtgcgattatggttgccgcgggcaccgcgggtatc

SEQ ID NO: 5502 - protein, 98 aa, Homo sapiens
MAHVYVLIEHENGQLNPVSKELIAAARPLGSVHAVVVSAPGGCEQLPAELASAGVDKIYSAEVADYEQRLVLPEVDALSTVAASNPGAIMVAAGTAGI

SEQ ID NO: 5503 - DNA, 165 bp, Homo sapiens
gaattcgtgcttcccagatttggtgtcgatgtgaaggtcccaaacgccatctctgtgtatgatgagataatcagtgtgactgcctgtgcgacatatacctatgggaaacctgtcccgggacgtgtaaagataagtctttgccatggaaatccttcctttagatct

SEQ ID NO: 5504 - protein, 55 aa, Homo sapiens
EFVLPRFGVDVKVPNAISVYDEIISVTACATYTYGKPVPGRVKISLCHGNPSFRS

SEQ ID NO: 5505 - DNA, 270 bp, Homo sapiens
  misc_feature (1)..(1): Wherein n may be a, c, g or t
nccgcggacctactcaccgtccatgcagccggtggtaggagcatgatggaagcttcgcttgagggcttgggagatgccgccgagaccactcgtgtcatcgccattactcaactcacctccacctccccggaggcggtgaaaactgagcagctagtggatgtgccgcttgtcgagtcggtgcgcaactacgccaagctcgcccaggctgctggactggccggagtcgtctgttcggctcacgaggcccccgatatcgcctcggtaaccggt

SEQ ID NO: 5506 - protein, 90 aa, Homo sapiens
  misc_feature (1)..(1): Wherein Xaa may be any naturally occuring amino acid
XADLLTVHAAGGRSMMEASLEGLGDAAETTRVIAITQLTSTSPEAVKTEQLVDVPLVESVRNYAKLAQAAGLAGVVCSAHEAPDIASVTG

SEQ ID NO: 5507 - DNA, 339 bp, Homo sapiens
cgcttcatggcgtggttcaggcgtacggttccggctactggtgactaccgtggcacgaaatttttcgttcgcgagaacggtaaaaccctcgcaacctcgatgttcatggtttgtgtcgccctgggcgccacggacctgcttttcgccctcgactcgattccggcgtcctatggtttcaccaacgaggggtaccttatccttaccgctaacgtctttgctctcatgggcttgcgtcagttgtatttccttattggaagcctgttggaacgtctggtgtacttgtcgctgggactggtcgtgattttgggctttatcgccctcaagctcattggccacgcg

SEQ ID NO: 5508 - protein, 113 aa, Homo sapiens
RFMAWFRRTVPATGDYRGTKFFVRENGKTLATSMFMVCVALGATDLLFALDSIPASYGFTNEGYLILTANVFALMGLRQLYFLIGSLLERLVYLSLGLVVILGFIALKLIGHA

SEQ ID NO: 5509 - DNA, 411 bp, Homo sapiens
  misc_feature (411)..(411): Wherein n may be a, c, g or t
gtgcacggtgccggggcacattgacagaacctacctgcaggtgggcacggctttgtagagagggtaggcacagccgccgtgggatgaagcctgctcccagcactgttagcggttgacagtgttgtcggggatctgggcagccatgtgggccaggccccagtttggccagcgctgcagcttcctctctctgattcatcgagttcccagatctgtttcttacagaagaagaaacacctgctgccgaaatacagtttgaaaaaccctgatctcagaaataggattcctgatgacagaccttagcaaatattccaataattataccaactgtactaaagatcccagtactcgagtaattcaccataaatgagtgaaaatttattcactggattagaaattgccagccttggatcn

SEQ ID NO: 5510 - protein, 65 aa, Homo sapiens
MNQREEAAALAKLGPGPHGCPDPRQHCQPLTVLGAGFIPRRLCLPSLQSRAHLQVGSVNVPRHRA

SEQ ID NO: 5511 - DNA, 285 bp, Homo sapiens
gaattctgtgctgaagggtctaaaaactctttttaatttggatctgggagaatgtctgagcaaggaggactgactccgaccatactggaagaagggcagacggagccagagtctgccccagaaaatggcatcctcaagtcagaaagtctggatgaggaggagaagctggaactgcagcggcgactggcggctcagaaccaagagaggagaaaatccaagtcaggagcaggcaaagggaagctgaccagaagtcttgctgtctgtgaagagtcttcagctagatct

SEQ ID NO: 5512 - protein, 78 aa, Homo sapiens
MSEQGGLTPTILEEGQTEPESAPENGILKSESLDEEEKLELQRRLAAQNQERRKSKSGAGKGKLTRSLAVCEESSARS

SEQ ID NO: 5513 - DNA, 395 bp, Homo sapiens
aggcctctggctgcaggagtccggcgacggcaccgagcccctggtggacggtgccatggtccacacctccgcaggcagctgggaattcgtgcagtgcgacgacctggaatccacgcgggaaagcagcttcgacccgcgtgcgcccaagccgccggaggtgtcctttcgcctcaccgtcagttagaacgaagagcacgccagcctgaccgttatgagcgacggcaagcccattgcgctgggcgaacgcatacaccactacaccctggtcaccctggcccgcgtgcgccagcaggacgcagaaaaaggcctggcccccgcaagccagggctggatagaactggatgcactctcacgcatgctgggcgtggagccctcgtacgtgaacatccagatct

SEQ ID NO: 5514 - protein, 61 aa, Homo sapiens
MSDGKPIALGERIHHYTLVTLARVRQQDAEKGLAPASQGWIELDALSRMLGVEPSYVNIQI

SEQ ID NO: 5515 - DNA, 391 bp, Homo sapiens
  misc_feature (56)..(56): Wherein n may be a, c, g or t
cgtgctgcccagatggtcgtccttgacatcgatcatcccgatatcgaagagttatncgagaccaaggcgcgcgaggaggacaagattcgtgctctgcgcgatgccgggttcgacatggacctgggcgggcgcgacatcgtcagcgttcagtatcagaacgccaacaactcggtgcgtgtctccgacgccttcatggccgctgttgagcagggtaagcccttcggtctgatgtcccgcaccgagcctgacaaggtgcttgacaccgttgacgccaaggaactttttggcaagattgctcaggctgcttgggagtgcgccgatcccggcttgcaatatgacgacaccatcaatgcctggcataccaccccgaattccggacggatcaacgcgt

SEQ ID NO: 5516 - protein, 130 aa, Homo sapiens
  misc_feature (19)..(19): Wherein Xaa may be any naturally occuring amino acid
RAAQMVVLDIDHPDIEELXETKAREEDKIRALRDAGFDMDLGGRDIVSVQYQNANNSVRVSDAFMAAVEQGKPFGLMSRTEPDKVLDTVDAKELFGKIAQAAWECADPGLQYDDTINAWHTTPNSGRINA

SEQ ID NO: 5517 - DNA, 235 bp, Homo sapiens
  misc_feature (1)..(1): Wherein n may be a, c, g or t
  misc_feature (2)..(2): Wherein n may be a, c, g or t
  misc_feature (3)..(3): Wherein n may be a, c, g or t
nnncgtgtcttttgtgacctgaaagaggcgggtctcgcatgcagcgagacccgtgtcgcgagattgatgaaggctgccggattgaaggcacggcataagcgacggcgcatgccgtccattgtcgcaggtgtcatgcactcgatcgcaccaaatctgctgggtcgtcaatttgaagccacggctccgaactagaaatgggccgccgactttacctatgtgtggactggggaagctt

SEQ ID NO: 5518 - protein, 63 aa, Homo sapiens
  misc_feature (1)..(1): Wherein Xaa may be any naturally occuring amino acid
XRVFCDLKEAGLACSETRVARLMKAAGLKARHKRRRMPSIVAGVMHSIAPNLLGRQFEATAPN

SEQ ID NO: 5519 - DNA, 432 bp, Homo sapiens
  misc_feature (156)..(156): Wherein n may be a, c, g or t
gtcgacgccatagaatttgccttgaccgggaacttatcccgcatgtcagggtctggcacagggggcataaatacaattgatcatggccctcatgtagataaaaaaaattcccctgagcaagccgctgtcactttggatatcaatgtgctctcagcnacaggccccaaaaacgcccaaatcatacgttctgctaaaactctaacagcccccacaatcatacctaataacgatccagaaattaccgccgccttcgatgccgtcaaggctcacccagaaattgtactctcgcggcgagagttgatcagatacatactatcgacaccgggagatcgagcaaaggcggttcaagcgctttagcgccttgatcagctagaagtattgcgcggaagttaaaaggaaaatgttcaatgactgcaaaaaagagcatgatca

SEQ ID NO: 5520 - protein, 104 aa, Homo sapiens
MSGSGTGGINTIDHGPHVDKKNSPEQAAVTLDINVLSATGPKNAQIIRSAKTLTAPTIIPNNDPEITAAFDAVKAHPEIVLSRRELIRYILSTPGDRAKAVQAL

SEQ ID NO: 5521 - DNA, 370 bp, Homo sapiens
  misc_feature (19)..(19): Wherein n may be a, c, g or t
  misc_feature (111)..(111): Wherein n may be a, c, g or t
  misc_feature (132)..(132): Wherein n may be a, c, g or t
  misc_feature (201)..(201): Wherein n may be a, c, g or t
  misc_feature (204)..(204): Wherein n may be a, c, g or t
gataaacgcctgggcgaanccgccgtggatgtgttcgccgaactgctgtcgacccgcccaccgaaacatgacctggtggtgaccacgggcgatgcctgcctgccaaacttnatggctgagggcgatcacttnagtggtttcattgactgcggtcgcctgggaatcagtgaccgttatcaggaccttgcactcgcggcccgnagnatcgagcgcaatctcggagcggcctgggtggcgccgttcttcgagcaatacggcgtcgaacccgatgagcagcgcatcgcgttctactgtttgctggacgagttcttctaaacccaaaccccagacagcaaaaagcccgctcaatgagcgggctttccgtggtacc

SEQ ID NO: 5522 - protein, 104 aa, Homo sapiens
  misc_feature (7)..(7): Wherein Xaa may be any naturally occuring amino acid
  misc_feature (37)..(37): Wherein Xaa may be any naturally occuring amino acid
  misc_feature (44)..(44): Wherein Xaa may be any naturally occuring amino acid
  misc_feature (68)..(68): Wherein Xaa may be any naturally occuring amino acid
DKRLGEXAVDVFAELLSTRPPKHDLVVTTGDACLPNXMAEGDHXSGFIDCGRLGISDRYQDLALAARXIERNLGAAWVAPFFEQYGVEPDEQRIAFYCLLDEFF

SEQ ID NO: 5523 - DNA, 375 bp, Homo sapiens
acgcgttggacgtattgcgcccggcggctccagcagcatcgcctgcaactctcgccagcgccggtcgcgcacagcggtgatgacggcgcacgttacatcgcagcgcggacagcgcaattcacacgcgggcgacgcccgatacacggttccagtcattggtcttgctcccggcctggccgtcgaggctacttcgacggcgtcaggtcgagacacttgctgcgcggacgatagttactgggttctttaggaaagctacggcgcggcaagatatcgtattgcaatcactatagggtttctgtcgggggaagcagtgatgagcgtgagatcggagacttttgctccgggcggggcaactcggtgccaaacggcaagctt

SEQ ID NO: 5524 - protein, 55 aa, Homo sapiens
MTAHVTSQRGQRNSHAGDARYTVPVIGLAPGLAVEATSTASGRDTCCADDSYWVL

SEQ ID NO: 5525 - DNA, 222 bp, Homo sapiens
atgagcatactatttattacaagtgcggaattaagtagcgacgtaagctccagagaagtatatatgccgatattcaataataagctgtcgttcaaagtgccgcctattaaacgctcgttgctgctaggagcagccctgtacgaagatttcgaatatagctctaacaacagtgcttctgacggagcgttctgtaccgtgtttaatgcaggcatgaatgacgcg

SEQ ID NO: 5526 - protein, 74 aa, Homo sapiens
MSILFITSAELSSDVSSREVYMPIFNNKLSFKVPPIKRSLLLGAALYEDFEYSSNNSASDGAFCTVFNAGMNDA

SEQ ID NO: 5527 - DNA, 233 bp, Homo sapiens
cgcgttaatcacacacactcacattcacacatgggcccatgcgttcacacacacagtcacacatgttcacacaagttcacactcattcacacgcgggcccacacgttcacacacgcacacaaggtcacacatgttcacacaatcacacacattcattcagtgacatacacaatgtcacacacattcactcacacgctcacaatcacagggtcatgatcacacacgttcaattg

SEQ ID NO: 5528 - protein, 71 aa, Homo sapiens
RVNHTHSHSHMGPCVHTHSHTCSHKFTLIHTRAHTFTHAHKVTHVHTITHIHSVTYTMSHTFTHTLTITGS

SEQ ID NO: 5529 - DNA, 261 bp, Homo sapiens
  misc_feature (118)..(118): Wherein n may be a, c, g or t
  misc_feature (166)..(166): Wherein n may be a, c, g or t
  misc_feature (167)..(167): Wherein n may be a, c, g or t
gatcagtatatccagcctaccatgcggctggcagatattgtggtgcccagagggagcgggaacacagtagccattgacctgattgtgcagcatgttcacagccagctggaagagcgcngaactcagcgtcagggccgcgttggcctccgctcaccagtgccatccnncctcccccagacactgagtgtcctcaagagtacaccgcaggtccgaggcatgcacaccatcatcagggacaaggagactagccgggatgaattc

SEQ ID NO: 5530 - protein, 87 aa, Homo sapiens
  misc_feature (40)..(40): Wherein Xaa may be any naturally occuring amino acid
  misc_feature (56)..(56): Wherein Xaa may be any naturally occuring amino acid
DQYIQPTMRLADIVVPRGSGNTVAIDLIVQHVHSQLEERXTQRQGRVGLRSPVPSXLPQTLSVLKSTPQVRGMHTIIRDKETSRDEF

SEQ ID NO: 5531 - DNA, 195 bp, Homo sapiens
ggatccgtattgtgcgatctgtattcgtagctcgcccggctactttgcagtaatgaccaattccctccactgcccactacctattacccttgtagtgtgcatatttggcaaggtgtagaaaactatccgagtgatcggggacacagtgttgtcaccattggtgtctttgatggagtgcataggggacatgctcaa

SEQ ID NO: 5532 - protein, 55 aa, Homo sapiens
LARLLCSNDQFPPLPTTYYPCSVHIWQGVENYPSDRGHSVVTIGVFDGVHRGHAQ

SEQ ID NO: 5533 - DNA, 339 bp, Homo sapiens
cgcgacagcgaattcagccagttccatgacccgcggtacgccgacatcccggagtccgagcgtccggtcgccgagtgtctcaaagacgtcgtggcccgcatggtgccgtacttcacctctgatattgctgccgaccttaaggacggcaagacggtgctcgtggctgctcacggtaactccctgcgcgccctcgtcaagcacctcgacgagatcagtgacgaggacatcgccggcctcaacatcccgaccggtatcccgctgttctacgagcttgacgacaacctcaagcccgtgactaaggggggccgctacctcgaccctgaggccgctgccgccggc

SEQ ID NO: 5534 - protein, 113 aa, Homo sapiens
RDSEFSQFHDPRYADIPESERPVAECLKDVVARMVPYFTSDIAADLKDGKTVLVAAHGNSLRALVKHLDEISDEDIAGLNIPTGIPLFYELDDNLKPVTKGGRYLDPEAAAAG

SEQ ID NO: 5535 - DNA, 391 bp, Homo sapiens
taacaagttggatagtctttcttgaagaactgtagaaacattcattaaaaacaaaataattttatagttaagcaagaaagtgattgtactataacaagggagacttatttcaccataggaaaaaaatcataacattctaagaatagaaggaaaaaataacaattacccaagcctgcaacaacctgtaagaccagatcagcttttaagaggaaagttaattagataacaggaagaggtaaaaatgagatcatcagagatgggggaaaaggcaaatttagaaattctgaatttaataggggagacaagtatgtaggaatataaacacattgtgctttctctgcacaaacacattcacatgaggatgtatacacaacccttgcaggcacaggta

SEQ ID NO: 5536 - protein, 51 aa, Homo sapiens
MCLCRESTMCLYSYILVSPIKFRISKFAFSPISDDLIFTSSCYLINFPLKS

SEQ ID NO: 5537 - DNA, 231 bp, Homo sapiens
aaacgccgtatccgcgactcgcgcgttatccccacccacaaactggccgaacttgccgcccaatcggatactgtaacaacattcatttgcgccagcgccatcggcgtttacggggacaaccgtggtgcggaagtcctcacagaagcctccgttcctggtgacgactacttcgccgacgttgtccaaaaatgggaaggtgcctgccagcccgcccgcgccgccggtaaacgc

SEQ ID NO: 5538 - protein, 77 aa, Homo sapiens
KRRIRDSRVIPTHKLAELAAQSDTVTTFICASAIGVYGDNRGAEVLTEASVPGDDYFADVVQKWEGACQPARAAGKR

SEQ ID NO: 5539 - DNA, 351 bp, Homo sapiens
  misc_feature (351)..(351): Wherein n may be a, c, g or t
tcatgacggcaggtttcagggactgcccacctcctctccatgttttcccagcagcaacagcaggcaaggtgcaggtagtgcagtggccctggccaaccctgcacacatgaacctgacactctcaggactagccccacaagtcccggctgcaccttcagctgggtgctcactggctcctttctgaatatgaaatcttctcctcttccccaaatgaaaacagacgctcttgccaaatgtagtttggacattggacctaaaaatcaaaatctaactctaggaaaagaaggaagaagtgaggtttcatggttcattagtgaaaggcacagaggtcttaaaggggacagaaacgtn

SEQ ID NO: 5540 - protein, 82 aa, Homo sapiens
MSKLHLARASVFIWGRGEDFIFRKEPVSTQLKVQPGLVGLVLRVSGSCVQGWPGPLHYLHLACCCCWENMERRWAVPETCRH

SEQ ID NO: 5541 - DNA, 416 bp, Homo sapiens
  misc_feature (280)..(280): Wherein n may be a, c, g or t
aaatttgctatgttaaaattaattttttttacagaataattatgatgtagatttttttatttgattcctgccgcttttaatttaggcacaaagaatgggtattattctcttgttctccttctatagatataaatgttgaaaaaagaaagaaagaaaataacctcactgaaccagcactacatttagaactaggaccaaagagaaatgtgcaaatatcctactgttaaagcagaaagaaaatctggaaatcatccagttgggcaacttactgctaatatantttataatcccagcattagctatatacaaagttggcatatgttcctacagtttctaaatcaagaattagaactttgtgatgtataagtcacttgcatcgtttgggtttcagccatgcgtttatgaatggactaaaa

SEQ ID NO: 5542 - protein, 53 aa, Homo sapiens
  misc_feature (26)..(26): Wherein Xaa may be any naturally occuring amino acid
MCKYPTVKAERKSGNHPVGQLTANIXYNPSISYIQSWHMFLQFLNQELELCDV

SEQ ID NO: 5543 - DNA, 239 bp, Homo sapiens
  misc_feature (1)..(1): Wherein n may be a, c, g or t
  misc_feature (2)..(2): Wherein n may be a, c, g or t
nntccggaacgtctaggaatcatcgtcgagcagagccccaaccgcactcagatcaagcggctagttgatctgatgaacctcgacccgctgctggctgaagacctcgccgaaggccatcaacgacccaagctggagcgccatggcgaggccctgttcctggtgctgcatccgccgttctacatcgattcgatcgaggacgtcgcctttgttgaggccgaagtcattaagcagcgcaattg

SEQ ID NO: 5544 - protein, 79 aa, Homo sapiens
  misc_feature (1)..(1): Wherein Xaa may be any naturally occuring amino acid
XPERLGIIVEQSPNRTQIKRLVDLMNLDPLLAEDLAEGHQRPKLERHGEALFLVLHPPFYIDSIEDVAFVEAEVIKQRN

SEQ ID NO: 5545 - DNA, 267 bp, Homo sapiens
  misc_feature (1)..(1): Wherein n may be a, c, g or t
naagtcaacaccaactcaaggaatcagatatacaaaaaaatatactcaatgttaatttttctacaaatattcctaatcatgacatttaccatcatagaactaattgtattctgtagtctctttggagcaactctaattcaaactgtaattgttactacccaatgagaaaaccaaacagaatgattaaacacaggacttcatttcctgttgtatacactgattggctctttacccctactcatagaattaatctatatctaaaacacc

SEQ ID NO: 5546 - protein, 54 aa, Homo sapiens
  misc_feature (1)..(1): Wherein Xaa may be any naturally occuring amino acid
XVNTNSRNQIYKKIYSMLIFLQIFLIMTFTIIELIVFCSLFGATLIQTVIVTTQ

SEQ ID NO: 5547 - DNA, 327 bp, Homo sapiens
  misc_feature (21)..(21): Wherein n may be a, c, g or t
gacgagttccttcgggtctgncggcgcgtcctgcagggcgaggcggtggacttccacggcaagcacatccacgtggagaacgccaaggcgctctatccgccgctgcaacggccgtatccgccgctgtacttcggcggttcctcggaggccgcccacgaactggccggcgaacaggtggacgtctacctgacctggggcgagccgttgccggcggtggcggcgaaaatcgccgacgtgcgccagcgagcggctcgccatgggcgtacggtgaagttcggcatccgcctgcatgtgatcgtccgcgaaaccaccgaagaagcctggcgc

SEQ ID NO: 5548 - protein, 109 aa, Homo sapiens
  misc_feature (7)..(7): Wherein Xaa may be any naturally occuring amino acid
DEFLRVXRRVLQGEAVDFHGKHIHVENAKALYPPLQRPYPPLYFGGSSEAAHELAGEQVDVYLTWGEPLPAVAAKIADVRQRAARHGRTVKFGIRLHVIVRETTEEAWR

SEQ ID NO: 5549 - DNA, 393 bp, Homo sapiens
  misc_feature (1)..(1): Wherein n may be a, c, g or t
ngcgcgccactttgccgcgcgctagcggccagccgtataatcagcggttttcgcccgccatgcgaggccgctgtggataagatcctgattcgtggggcgcgtacccacaacctgaagaacgtcgacctcacactgccacgcgacaaactgatcgtgatcaccggtctttccggttccggcaagtcttccctggctttcgacacgctctatgcggaaggccagcggcgctacgtggaatccctctcggcctacgcccggcagttcctgtcgatgatggagaagccggacgtggacaccatcgaagggctgtcgccggcgaattccatcgaacagaaagtcactttcccacaaccacgctccaccgtgggtacgatcaccgagatcgtcggagag

SEQ ID NO: 5550 - protein, 107 aa, Homo sapiens
VDKILIRGARTHNLKNVDLTLPRDKLIVITGLSGSGKSSLAFDTLYAEGQRRYVESLSAYARQFLSMMEKPDVDTIEGLSPANSIEQKVTFPQPRSTVGTITEIVGE

SEQ ID NO: 5551 - DNA, 255 bp, Homo sapiens
  misc_feature (255)..(255): Wherein n may be a, c, g or t
gatctcacccttgacgaggactcccgggaggtacgccgagcaggcgaagaaatccacctgacgaccaccgagtttgagctgctgcgctatttcatgcgcaatcccaagcgagtgctctccaaagcccaaatccttgatcgagtgtggaattacgatttcagaggtcaagccaatgtcgtcgagttgtacatctcttacctgcgcaagaagatcgacaggggacacacaccgatgatccacaccatgcgtggggcn

SEQ ID NO: 5552 - protein, 85 aa, Homo sapiens
DLTLDEDSREVRRAGEEIHLTTTEFELLRYFMRNPKRVLSKAQILDRVWNYDFRGQANVVELYISYLRKKIDRGHTPMIHTMRGA

SEQ ID NO: 5553 - DNA, 441 bp, Homo sapiens
  misc_feature (1)..(1): Wherein n may be a, c, g or t
ncgggaaaactggtcggtggccctcatgacggtctcggatttgccaccaagggtggcctcgtcggggacgctgacgcggcggtcgaatgcatcaaccagctccgaagccgaatacgtcaatccgaaccgcggatcgtgtagacgcgggcccatcacgatcgcatcatcaatcccgctcaccccgaaaaccatcaaacgataaaggagagtaagaccatgccaaagacaccacttcttggaatcacagaaggtgacccagccggaatcggaccggaaatcacggtccaagccatccacaacatggccgacgaccgatccttcatccccatcgtgtacggcgatccagccatcatctctcgggcgtgctccgtcaccggattgagcgagaccgttcgtcgtgtcacctccgaggagcacatcgagcccgaaccgaatgtgatc

SEQ ID NO: 5554 - protein, 75 aa, Homo sapiens
MPKTPLLGITEGDPAGIGPEITVQAIHNMADDRSFIPIVYGDPAIISRACSVTGLSETVRRVTSEEHIEPEPNVI

SEQ ID NO: 5555 - DNA, 594 bp, Homo sapiens
  misc_feature (1)..(1): Wherein n may be a, c, g or t
  misc_feature (2)..(2): Wherein n may be a, c, g or t
nnaccggtcctcaacatttggccctcaccgtagggcgttaacggtagatctgtcaaaccagtatactggcctgacttggaccattcagtttgaccgtgtctgacaatgatacatctgggggttagcgaaggcattgttgcttgcaattaagtgtaggtgtttccctatccacttagctatgaacaaaatgtgcttatctgagctaatattttttcatttttgtcctataaataataatggaaaaaaaaactcatcgcgtggttgaacagaaaaaaaacaataagagtgagtaagcagtgaaaaatgtaagatttacgctttatataagcagattttggtttcctttatatatttttgcatttgtctatccttaacattggatagcaatttggcggtgggtagtttataacgtgtgtgctctctctttaagtaacgatgtcaagagatgtaagggcagagaaactagccatatcactattgattttatcattgtttctaatattccaattagtggctgagatttatctcaataatggtgatcagtaccatacagagactagcccctttacaagaggaagatcacatgtaacgcgt

SEQ ID NO: 5556 - protein, 53 aa, Homo sapiens
MSRDVRAEKLAISLLILSLFLIFQLVAEIYLNNGDQYHTETSPFTRGRSHVTR

SEQ ID NO: 5557 - DNA, 330 bp, Homo sapiens
accggttgctggagaacgagcgtgctgaacaagctgggcatcaaaggccgcgtactgctattgaccatcttgcccgccagcctgatggcggcggtgctgggtggctatttcaccctgatgcaactgtacgagttgcagagccagctgttgcagcgtggcgagatgatcgcgcaggacctggcaccgctgtcggccaatgcgctgggtcgcaaggacaaaatcctgctgacccgcatagcaacccagacccttgaacaatccgatgtgcgcgccgtgtcgtttctggataccgaccgcagcgtacttgcccacgccgggccgaccatgatc

SEQ ID NO: 5558 - protein, 110 aa, Homo sapiens
TGCWRTSVLNKLGIKGRVLLLTILPASLMAAVLGGYFTLMQLYELQSQLLQRGEMIAQDLAPLSANALGRKDKILLTRIATQTLEQSDVRAVSFLDTDRSVLAHAGPTMI

SEQ ID NO: 5559 - DNA, 380 bp, Homo sapiens
  misc_feature (1)..(1): Wherein n may be a, c, g or t
  misc_feature (2)..(2): Wherein n may be a, c, g or t
nncaattgccgccttaaactgctaaagtgccgcccgttaatacttatgaggattgttccaatggcgactaaccgttcccagcgtctgcgcaaaaaactgtgcgttgatgaatttcaagagctgggtttcgaactgaacctggacttcaacgaaggcctgagtgaagaagctatcgacgctttcctcgaagcattcatcaaagaagccatggaagccaacggcctgggctatgttggcggcgatgacttcggtctggtttgcctgcagaagcgtggctcggtctccgaagagcagcgtgctgcggtcgaagcctggctgaaaacccgttccgagctgaccaaggctgaagtcagcccgttgctggacgtgtggtatccgga

SEQ ID NO: 5560 - protein, 126 aa, Homo sapiens
  misc_feature (1)..(1): Wherein Xaa may be any naturally occuring amino acid
XNCRLKLLKCRPLILMRIVPMATNRSQRLRKKLCVDEFQELGFELNLDFNEGLSEEAIDAFLEAFIKEAMEANGLGYVGGDDFGLVCLQKRGSVSEEQRAAVEAWLKTRSELTKAEVSPLLDVWYP

SEQ ID NO: 5561 - DNA, 269 bp, Homo sapiens
  misc_feature (269)..(269): Wherein n may be a, c, g or t
aaatttcgcaatgctgatggtacacgagccctctgcggctctgcacagtaagtcagcaagtgtcgtgaatagcaagcagaaggaagcacacgcacccccatccacacatggggcatgcatggtatatgtagcagccaaaattgtgatcagttccatgtcagtcctagcttcttcctaggcctaccacctgatttcagctagctagcttgtcagcgcatgcacctactccatcccgaagagatagttgtagtagtggggagccgtgccgn

SEQ ID NO: 5562 - protein, 55 aa, Homo sapiens
MLMVHEPSAALHSKSASVVNSKQKEAHAPPSTHGACMVYVAAKIVISSMSVLASS

SEQ ID NO: 5563 - DNA, 357 bp, Homo sapiens
gaattcatctattcagtatcactgccttttccttttgcctcaggctataatatgacagcatggctctaaagctgattctatctttatttaaaattatttttttcatcatgtattcttttcctcgatattgatttttacaaaatattgcattatattgacatgcattttgattgcaagtttttttcggcatcttcataaattatttgcccaagtcaagggcctcccctcatcctatttatgctatttataatgtttttctagcctggctgttggggaaacacaatttatgaccctatgagctttgggcaccactttctctaatagtttcagatcttttcttgtctgatcttggttagc

SEQ ID NO: 5564 - protein, 63 aa, Homo sapiens [sequence omitted]

SEQ ID NO: 5565 - DNA, 270 bp, Homo sapiens
  misc_feature (270)..(270): Wherein n may be a, c, g or t
gcgcgccgccacgggcagagtctcaagcaacagcagtgggcggcacacgaatcctctcctttctttaacccttcttcacaccggagtcccacccctcgccgggaagccgagcgggtttctacatcatggccacttccggtgcggcctgccggcccctggcgggagcgagcacgccagtgcgcggcaactttgttcccgcctctcttgccccggccacctctcatcttcggctttctctgagcgtgaattgcgggcgcgctcccgggggcn

SEQ ID NO: 5566 - protein, 74 aa, Homo sapiens
MRGGRGKRGGNKVAAHWRARSRQGPAGRTGSGHDVETRSASRRGVGLRCEEGLKKGEDSCAAHCCCLRLCPWRR

SEQ ID NO: 5567 - DNA, 174 bp, Homo sapiens
ggtcttctgaatggtgttggtcgtggctataccgatttatgtgccgctttgatagcagttgctgtaaatgctgatgaactacaagtttggaaggaagttgatggtatatttactgctgatcctcgtaaggttcctgaagcacgtttgctagacagtgttactccagaagaagct

SEQ ID NO: 5568 - protein, 58 aa, Homo sapiens
GLLNGVGRGYTDLCAALIAVAVNADELQVWKEVDGIFTADPRKVPEARLLDSVTPEEA

SEQ ID NO: 5569 - DNA, 358 bp, Homo sapiens
  misc_feature (358)..(358): Wherein n may be a, c, g or t
ggatcctctcttctgccaagagctggccacctggcagccaaaccctgcacaagatatgaagagcctgtaaatgcaggacttctgttcctggatctgctcctctgatgaagaggtgcaagtgtctccgtagctacttgaccaccgtaaataccattgtttcctcttcctgggggtcacccagagaaccctcatggaacatggtgtgacaactactgacacatggggttatcataggttttatgccatgaataatacatttaaagtatgttgtaaaagacttactttgcaaggacctaaaaacacttctatgggaagaatcagaaaaaaataattatttttgaattgaaattcaggtgcn

SEQ ID NO: 5570 - protein, 64 aa, Homo sapiens
MRVLWVTPRKRKQWYLRWSSSYGDTCTSSSEEQIQEQKSCIYRLFISCAGFGCQVASSWQKRGS

SEQ ID NO: 5571 - DNA, 552 bp, Homo sapiens
tcatgaattggctgggcgacagcaccccctacaacctgctgcgcatgacgggccccatcctgcgggaccacccgggcttcggcgagggccgcctgccgggcacgccgcctcttttcagtcccccgccgcgccaccacctggacccgcaccggctcagggccgaggagatggggctcgtcgcccagcaccccaatgccttcgaccgagtcatgcacctgaacccacatggccatcgattcgcccgccatggacttctcgcggcgggtccgagagctggcgggcaacagctccacgccgccgcccgtgttcccgggccgcggcaaccctatgcaccggctcctgaacccttccagcccagcccaagtcccgttcctgagcacgccgccgctgccgcccatgccccctggcggcacgccgcccccgcagccgccagccaagagcaagtcgtgcgagttctgcggcaagaccttcaagttccagagcaatctcatcgtgcaccggcgcagtcacacgggcgagaagccctacaagtgccagctgtgcgaccacgcg

SEQ ID NO: 5572 - protein, 109 aa, Homo sapiens
MAIDSPAMDFSRRVRELAGNSSTPPPVFPGRGNPMHRLLNPSSPAQVPFLSTPPLPPMPPGGTPPPQPPAKSKSCEFCGKTFKFQSNLIVHRRSHTGEKPYKCQLCDHA

SEQ ID NO: 5573 - DNA, 428 bp, Homo sapiens
  misc_feature (353)..(353): Wherein n may be a, c, g or t
  misc_feature (373)..(373): Wherein n may be a, c, g or t
aagcttcccgaaagagttgtctgtggtcactgcctccacttcctccccttcctgctctcagtccagctccttgccccagcgctgcactggaactgctattaaggttgccagtgccctccttgttgccagatcttactttatcctctgttacttgctctcccagcaacatttggcacaatggagccccccctccatcctgaaacactgtggcttctgagctaccttccacctcactggacattttgcctgtctcttgtgccaacccctcccctggccagcctcttaacatcagtgtccagtagctcctacttaaactcttctgtcctccatctatcctccgccccttggctctntcgtccagtccctgccactntaaaacaaacagtactatctgatgccgccagatacatagccccagccctgacctt

SEQ ID NO: 5574 - protein, 96 aa, Homo sapiens [sequence omitted]

SEQ ID NO: 5575 - DNA, 392 bp, Homo sapiens
accggtggccaacgtgcttcctgagtgctgcagcatggggaccctgagttttgatcatgggcacattctctgcatggcgatgcattctaaaagaactgttaaccagggctgccatcaaaagggcgaagcctgctaacgggaacccccagttccgttatgccagtatggactacagaagacgagaggaggacaggtttgagggcggttgattcaagatctctctggaagctgggcccagtggagagtgggacagtggagggcatgaaggtggttctagttggctcctagctgccaccacaattggcatcaaggcgttagccagcagaaactggagaatgagtgtgcatttgttttgtgctaatgggagaataggaagcctgcagccctcgcga

SEQ ID NO: 5576 - protein, 54 aa, Homo sapiens
MPSTVPLSTGPSFQRDLESTALKPVLLSSSVVHTGITELGVPVSRLRPFDGSPG

SEQ ID NO: 5577 - DNA, 283 bp, Homo sapiens
gcgtacaactgcggcgtgctgatccgggggccggagaacgcgattcagccgaactggaagcatctgcctgttgcgtaccatggacgcgctagctccgtcgtcgtgtccggcacgccgttccaccgcccaacggggcagatcctcgacaaggtcggcgacaagcagcctatctttgcgccgtgccgtcgtttggactacgagctcgagctggccttcgtgagtggggcgtgtgcagacgtgggtggggtcgctcgctgaatcgcgcttgtgcagatatacagca

SEQ ID NO: 5578 - protein, 85 aa, Homo sapiens
AYNCGVLIRGPENAIQPNWKHLPVAYHGRASSVVVSGTPFHRPTGQILDKVGDKQPIFAPCRRLDYELELAFVSGACADVGGVAR

SEQ ID NO: 5579 - DNA, 464 bp, Homo sapiens
  misc_feature (1)..(1): Wherein n may be a, c, g or t
ncaattgccaccaccctggatggcctgcgcaagcgcgtgggcgacgcgcagatcatcgcgatcgtcgaaccgcgttccaactccatgaagctcggcgcgcaccgtgatggcctgcccgaaagcgtcaacgatgccgaccaggtggtgtggtatgcgccagccaacctcggctgggatttgccgggcattgctgcgctgtgcaccataccttcaacagtttgcgattcgctggaaggcatcattgagcaggtgaagtccttggcccagcccggcactcacgtggtggtcatgagcaacggcggcttcggcggcctgcacggcaagctcgccgaggcgctgcaatgaacactttttcccaggccggcggcccggaacgcatcaccctggcgatgaccggtgcttcgggcgcgcagtacggcttgcgcctgctcgattgcctggtgcgcgaggatcgcgaagtgcac

SEQ ID NO: 5580 - protein, 114 aa, Homo sapiens
  misc_feature (1)..(1): Wherein Xaa may be any naturally occuring amino acid
XIATTLDGLRKRVGDAQIIAIVEPRSNSMKLGAHRDGLPESVNDADQVVWYAPANLGWDLPGIAALCTIPSTVCDSLEGIIEQVKSLAQPGTHVVVMSNGGFGGLHGKLAEALQ

SEQ ID NO: 5581 - DNA, 175 bp, Homo sapiens
cctaggtaataaatatgttctcgggagctgtcagttggaatggtgcatcgatgggcttggctcgtggggacctgctgttccgaatgcaatgatattttactgcctgaatcacgtgcccatccaatttcaaatgcagcctgaatagatcctggcgtggcagcagcataggaaatga

SEQ ID NO: 5582 - protein, 54 aa, Homo sapiens
MLLPRQDLFRLHLKLDGHVIQAVKYHCIRNSRSPRAKPIDAPFQLTAPENIFIT

SEQ ID NO: 5583 - DNA, 304 bp, Homo sapiens
gccggcttctctcactgagcgtgatgtcttaaggtttgtgcccgctgcatccttgtcagagcctcgtcctttttcatggctgtgtaatattccaccgcgtggatggaccacaccttgttgatccctccccccgccaatgtacatggacacgtagtgtgtgaatccatttacaggaaatgcccagaacatgccaatccagagacagaaagaggatttgtggttgccgggggctgcggaggggaaatgaggactgactgcttcatggagacagggtctctccttttggacgatgagaatgttctgc

SEQ ID NO: 5584 - protein, 67 aa, Homo sapiens
MDHTLLIPPPANVHGHVVCESIYRKCPEHANPETERGFVVAGGCGGEMRTDCFMETGSLLLDDENVL

SEQ ID NO: 5585 - DNA, 265 bp, Homo sapiens
gtgcactccttgtcattcttgttgatcgagtaggtcgacggcgcccaggaggtgtcgccgttcttgagccaggcgcgcgcctggtcgagggtgaggtcctggggtgaccacgggtagtcggtgaagtcgtcgggaacgcctacctcgaaggtctccttgaccgagccatcggcgttgaggagggtcacggtatcgggccgccccgaggatgggggctgggagtcgaaaaacatccagccgtccttcaggtccctcggtgtggtgc

SEQ ID NO: 5586 - protein, 77 aa, Homo sapiens
MFFDSQPPSSGRPDTVTLLNADGSVKETFEVGVPDDFTDYPWSPQDLTLDQARAWLKNGDTSWAPSTYSINKNDKEC

SEQ ID NO: 5587 - DNA, 231 bp, Homo sapiens
gagaagtccttgggctccatcgtcaaatccggcagcagcgcgatcaatggcgtgctcggcccgggcgagcggttcaacggcaagggcctgattttttgcgcgacgccagccagtgactttgtgtgcggcaccttgcaactggcggccgggatgaacctgcatgtgttcaccaccgggcgtggtacgccttacgggctggcgatggcacccgtggtgaaggtttcgacgcgt

SEQ ID NO: 5588 - protein, 77 aa, Homo sapiens
EKSLGSIVKSGSSAINGVLGPGERFNGKGLIFCATPASDFVCGTLQLAAGMNLHVFTTGRGTPYGLAMAPVVKVSTR

SEQ ID NO: 5589 - DNA, 312 bp, Homo sapiens
acgcgtcgcccagccgcgccagacgctcgttgtcgccgcgcaggacgtcgtcataatgcagcgggcagatcggcagcttgtgcgcgtcgtaagcccagatcgagagatcaccgcggaccgggtcgaacttcagccggacgtcgccctcggccagtgcctcgccatactggctgccgaggaacggcaccagcagcttgtcgcgcagatagcggcggtcggggtcccagtcgatgtcgaagaaaccggcatggaccgcatgcggaccccattccaggacatcgagccagtaggcattggccgagccgcccacgc

SEQ ID NO: 5590 - protein, 85 aa, Homo sapiens
MQRADRQLVRVVSPDREITADRVELQPDVALGQCLAILAAEERHQQLVAQIAAVGVPVDVEETGMDRMRTPFQDIEPVGIGRAAH

SEQ ID NO: 5591 - DNA, 367 bp, Homo sapiens
atctatggtcccgaatcctctggcaagacgacggtggctttgcacgcaatcgctaatgcccaggctgaaggcggcatctgtgcctttattgacgccgagcacgctctcgacccggaatacgcacgcaaactcggggtcgatacagattccctgctggtgagccagcctgacaatggtgagcaggctctcgagattgctgacaccctcgtccgctcgggtgccttggagctcgtcgttgttgactcggtggccgctctgaccccgaaggctgagatcgagggcgagatgggtgattcccatgttggtttgcaggcccgccttatgagccaggccctgcgcaagatgaccggtgcgttaaatgcggccg

SEQ ID NO: 5592 - protein, 122 aa, Homo sapiens
IYGPESSGKTTVALHAIANAQAEGGICAFIDAEHALDPEYARKLGVDTDSLLVSQPDNGEQALEIADTLVRSGALELVVVDSVAALTPKAEIEGEMGDSHVGLQARLMSQALRKMTGALNAA

SEQ ID NO: 5593 - DNA, 225 bp, Homo sapiens
cgagtcctcctaaagctctccggtgaggtgttcggcggtggcaaggtcggggtcgaccccgacgtcgtccaggcggtggcccacgagatcaaggcggtcgtggacgccggcgtgcagatcgcggtcgtcaccggcggtggcaacttcttccgcggtgccgagctccagcagcgcggcatggaccgggtccgtgccgactacatgggcatgctcggcatcgtcatg

SEQ ID NO: 5594 - protein, 75 aa, Homo sapiens
RVLLKLSGEVFGGGKVGVDPDVVQAVAHEIKAVVDAGVQIAVVTGGGNFFRGAELQQRGMDRVRADYMGMLGIVM

SEQ ID NO: 5595 - DNA, 555 bp, Homo sapiens
  misc_feature (1)..(1): Wherein n may be a, c, g or t
  misc_feature (2)..(2): Wherein n may be a, c, g or t
nnacgcgtcggcaacacgctgctgcttgaggatccgatcccgaaatggatgctgcaggactatgcggacctgcgctggttctcctcgatcccgatcacccagcacgtctcgctgccttatgtctatcagggccagcgcgtccatgacgtgccgaacctgatcgcgcatcgcgccgtcgacggcttcaatttcaacggcgggctggccaggttccagcagatggccgcgatggcgacggcggcgaacctgttctgcttccacggctcggaggtcgatctcggcatcctcgaggcgatgtatctgcatcaggccgcggcggcggaatgctgcgtatggccctctgacatcttcggccggatgatccgcgaacacgatctgctcgcgaccccgctgcgcttcgagccgcccttcgccatcgtccccgaaggaccgggcctcggcatcgtcctcgatcccgacgcgctcgaccgctacgcgctcgagcggcacgtgatcggcgagccctgagcctgtctcaacgtcatccgcccggcggaggacatcctgccaacgcgt

SEQ ID NO: 5596 - protein, 168 aa, Homo sapiens
  misc_feature (1)..(1): Wherein Xaa may be any naturally occuring amino acid
XRVGNTLLLEDPIPKWMLQDYADLRWFSSIPITQHVSLPYVYQGQRVHDVPNLIAHRAVDGFNFNGGLARFQQMAAMATAANLFCFHGSEVDLGILEAMYLHQAAAAECCVWPSDIFGRMIREHDLLATPLRFEPPFAIVPEGPGLGIVLDPDALDRYALERHVIGEP

SEQ ID NO: 5597 - DNA, 435 bp, Homo sapiens
  misc_feature (1)..(1): Wherein n may be a, c, g or t
  misc_feature (2)..(2): Wherein n may be a, c, g or t
nnccagcctctctccgaccgcgtacgtattgaatttgataaagaagccaacacggttgttatcgatgataatggtgtcggcatgtctcgtgaagaagccattacaaacttaggtacgattgctaaatcgggcacctcttctttcttagagcaattgagtggcgatcagaaaaaagacagccaacttattggtcaattcggtgtaggcttttactctgctttcatcgttgctgataaagtaacagtagaaacacgtcgcgcaggtgcgacggaaaatgaagcggttcgctgggtatctgatggttctggtgaatttactattgagacgatcgataaagcgactcgtggtacacgcattactttgcatctgaaagcagatgaaaaagatttcgcagacaacttccgtctacgttcattagtaacaaaatattctgat

SEQ ID NO: 5598 - protein, 145 aa, Homo sapiens
  misc_feature (1)..(1): Wherein Xaa may be any naturally occuring amino acid
XQPLSDRVRIEFDKEANTVVIDDNGVGMSREEAITNLGTIAKSGTSSFLEQLSGDQKKDSQLIGQFGVGFYSAFIVADKVTVETRRAGATENEAVRWVSDGSGEFTIETIDKATRGTRITLHLKADEKDFADNFRLRSLVTKYSD

SEQ ID NO: 5599 - DNA, 387 bp, Homo sapiens
  misc_feature (380)..(380): Wherein n may be a, c, g or t
agatctctattcactgggggaggttccaggtttgcaggcagctcaggcaacgggcttgagatgcttcctgagttcattggaatgtagtcatcagggctgcagtggggtccaagaccagaggcaccagcctgggggctcatgggcacatagctgtcttcgatactggctgaagctgtggggtacatcggggagaacctgcatggcaaattcaaactaagccgcttgtctcggtgtcttaaggattggccttctacatcagctttccaggttctcatgttgtctaaaccagagagggagattcttcttggaaccagagtgcattctggcttcttgctaccactgtgtgtactccactccctctggcgcccgtcagacagatngcttggc

SEQ ID NO: 5600 - protein, 91 aa, Homo sapiens
MRTWKADVEGQSLRHRDKRLSLNLPCRFSPMYPTASASIEDSYVPMSPQAGASGLGPHCSPDDYIPMNSGSISSPLPELPANLEPPPVNRD

SEQ ID NO: 5601 - DNA, 303 bp, Homo sapiens
  misc_feature (39)..(39): Wherein n may be a, c, g or t
  misc_feature (62)..(62): Wherein n may be a, c, g or t
  misc_feature (70)..(70): Wherein n may be a, c, g or t
  misc_feature (202)..(202): Wherein n may be a, c, g or t
agatctggcaggcgattttagatcacgaagaagaattcncagactggaatccatctgtcttnaagctgtntcagtaagcgccaaggcctacttacaagcacaacgcagtggaaggggttttggactggcagtcaggagatccaactccaccattaacatcgtgggtgactctgaacaaaccaccgacctctctgagccattnttttttcttttcattctataaaatgaagagactgaactagattggctcggcatgtttctcagtcctgaacattttctgtgctgggattcttgtaggggcta

SEQ ID NO: 5602 - protein, 55 aa, Homo sapiens
  misc_feature (18)..(18): Wherein Xaa may be any naturally occuring amino acid
MPSQSSSVSSFYRMKRKXNGSERSVVCSESPTMLMVELDLLTASPKPLPLRCACK

SEQ ID NO: 5603 - DNA, 370 bp, Homo sapiens
gaattccatctatgaaagccgaagcgctctctttaccaccaccacctctccttcccacccttgtcttgtttgctgctgatttctcgcctgactcaagaacaaatgtgtttaagccccaagcccctaaaaatgggaagctgtctatttcccttctgtaccagctcccacatgtgtctggacacagactctgccagggaagtcccctcccatagggaccgtgtgcctccagagttgtgtggacaggacttgaagacatccaaagcccccacaagagatgatgacaacaaaactctgtgttaaagagtttccaagatggagaactcctgcctgtcaaatatccttcttagacactgattttgtttgttttctg

SEQ ID NO: 5604 - protein, 85 aa, Homo sapiens [sequence omitted]

SEQ ID NO: 5605 - DNA, 459 bp, Homo sapiens
gaattcatgggtgagaagggcgcctacgccaccggatggttcttcttccttgactggtcggtcacggtgatggctgacatcaccgcagtggcgctgtacctgcattattggacgcccttgcgtgccatcccacaatgggtgttagcgctcatcgccctcggcgtggtgtttaccctcaacatgttgagcgtgaagatgttcggcgaggccgaattttggttcgctgctatcaaggtagccgcgatcatcctgttcatgatcgcggccatctgggccatcgtcacgggtgcgcgggttggcaactacaccgcaggccttcacaacatcgcccagcatggcggattcttccccgctgggctggcgccggtctttgcactcactctgggagtgatcttcgccttcggcggcaccgagatggtcggcgtagcagcaggcgagaccaaggatgcgagcaagatc

SEQ ID NO: 5606 - protein, 153 aa, Homo sapiens
EFMGEKGAYATGWFFFLDWSVTVMADITAVALYLHYWTPLRAIPQWVLALIALGVVFTLNMLSVKMFGEAEFWFAAIKVAAIILFMIAAIWAIVTGARVGNYTAGLHNIAQHGGFFPAGLAPVFALTLGVIFAFGGTEMVGVAAGETKDASKI

SEQ ID NO: 5607 - DNA, 325 bp, Homo sapiens
  misc_feature (325)..(325): Wherein n may be a, c, g or t
accggtgagcatcagggaggcaccatgcagacgactctcccatccagtctcaagccgtccagcctcaagatcgtcgcaccgctggggggcatcctcgtgcccctggatcaggtgcccgatcccgttttcgcccagaagatggtgggagacgggatctccctggaccccatctcaaacgaattgctggcgccggtcgccggcaccgtgacccagctccacaacgcccaccacgcgctcacgatcacgaccccggaaggcatcgaggttctggtccatatcggactggataccgtgatgctgcgcggcgacagctatcccccccccn

SEQ ID NO: 5608 - protein, 108 aa, Homo sapiens
TGEHQGGTMQTTLPSSLKPSSLKIVAPLGGILVPLDQVPDPVFAQKMVGDGISLDPISNELLAPVAGTVTQLHNAHHALTITTPEGIEVLVHIGLDTVMLRGDSYPPP

SEQ ID NO: 5609 - DNA, 201 bp, Homo sapiens
aaatccagccctgtggtctgcggcgtggccaacattcgtggcgccaccataccgattcttgacttggccctggccacgagttccgccggtctgcaggaccgcgagaacccattcgtgatcatcaccgagtacaacaccaagacccagggtttcctggtgcgctcggtggagcgcatcgtcaacatgaactgggaggagatc

SEQ ID NO: 5610 - protein, 67 aa, Homo sapiens
KSSPVVCGVANIRGATIPILDLALATSSAGLQDRENPFVIITEYNTKTQGFLVRSVERIVNMNWEEI

SEQ ID NO: 5611 - DNA, 189 bp, Homo sapiens
  misc_feature (1)..(1): Wherein n may be a, c, g or t
nggcgccagggggcgcgcggggtggttttccctgcgcttgttaaatatagagtgggcatggtgggcgctggctgctcacaggggggccccttccccccacacccaggtcttgggcttctctgcacagggccagaagcacaaacgtgcgtgtgtgtgtgtgtgtgtgtgtgtgtgtgtgtgtgcacgcgt

SEQ ID NO: 5612 - protein, 63 aa, Homo sapiens
  misc_feature (1)..(1): Wherein Xaa may be any naturally occuring amino acid
XRQGARGVVFPALVKYRVGMVGAGCSQGGPFPPHPGLGLLCTGPEAQTCVCVCVCVCVCVCTR

SEQ ID NO: 5613 - DNA, 331 bp, Homo sapiens
gccggcccttattctttacttgatgttcaatcactctacccaccatcttcctccttttccatactttttttttttttttctgaaactgattctcactctgtggccaggggggagggaaggggggcaatctcggctcacggcaacccccgctccccaggttcaagcaattctccctctcagccctcctaattagctgggattatgggcacccgccaccacccccagttattttttgtgtttttattaaaaacttggtttcaccatttgggccgggcaaaaaggtccacacaagcaggaaaggcccacaaggagcagggccagcagggaagtg

SEQ ID NO: 5614 - protein, 62 aa, Homo sapiens
AGPYSLLDVQSLYPPSSSFSILFFFFSETDSHSVARGEGRGAISAHGNPRSPGSSNSPSQPS

SEQ ID NO: 5615 - DNA, 245 bp, Homo sapiens
gcgcgccagattcagacaacattgcgctccgctgatctcgtggcgcgtatcactccggaggcggcagcgcgacttggcggagatgagttcgtcgtgctgctcgatgacatcgtctcggtgaacgacgccacgacagtcgcgggacggctgatcgaggcgctctcgggtcccacgcatgtcatgggccgcgctctgcgattgtcagccagcgtcggcatcggcacgagcgaatgcgaacactcgag

SEQ ID NO: 5616 - protein, 81 aa, Homo sapiens
ARQIQTTLRSADLVARITPEAAARLGGDEFVVLLDDIVSVNDATTVAGRLIEALSGPTHVMGRALRLSASVGIGTSECEHS

SEQ ID NO: 5617 - DNA, 393 bp, Homo sapiens
  misc_feature (23)..(23): Wherein n may be a, c, g or t
  misc_feature (187)..(187): Wherein n may be a, c, g or t
  misc_feature (207)..(207): Wherein n may be a, c, g or t
  misc_feature (299)..(299): Wherein n may be a, c, g or t
tgatcagggctttccctggctanccccaggtctggcctgtgggagcaggagagctggataccgcttgtttcggaatctgttttaatccagagggactccccgcagcctcagtagagtgccacaccatggcttgccttcgtgctatgtcccagtctgctgtgggctccgggtaaacgtctccagcatnttacaggcaagggcccggtngaacttgagcttcttctaattaccaacctcgtcagtggcaacgccatggcaagtagaaggtcccggctatcacgggatgccttctgcagctncgccccgattctgagatcgcccccgaatgttccaccccaggtttcatgtctgctaactggctctgataaagtcataaataagagcgcgaaatgg

SEQ ID NO: 5618 - protein, 88 aa, Homo sapiens
  misc_feature (26)..(26): Wherein Xaa may be any naturally occuring amino acid
  misc_feature (63)..(63): Wherein Xaa may be any naturally occuring amino acid
MTLSEPVSRHETWGGTFGGDLRIGAXLQKASRDSRDLLLAMALPLTRLVIRRSSSSTGPLPVXCWRRLPGAHSRLGHSTKASHGVALY

SEQ ID NO: 5619 - DNA, 377 bp, Homo sapiens
gcgcgccaggaggagggtaagggggaatcattgccgccctgcgtggccagctccctgcgtgggggccttagtggacatcctcccaagcgtttacacttcagctcattccccacagcacggggctggccatttctagctttggaggagcctgaaaaagtacgtgcgtatgtgtgtgtgtatacatacatatagagagagagcacgcgcttgagtgtgggctcattgctgccctaaataaaattaggatgtggttccttttgcctttgtcccttgcctgcctggtttcctttgcagcactcgtcacagtctgacgcggtcgcctgcatctctctgtgctttggttgggcgtctcctttaagacgtctgctctgcgaagg

SEQ ID NO: 5620 - protein, 62 aa, Homo sapiens [sequence omitted]

SEQ ID NO: 5621 - DNA, 315 bp, Homo sapiens
gctagcatcctattcccctataactttccaggctttgtgcagcaaatccttcccatcccagtcccacactcagttttcttgggcctcttagtacagcaggagatccttgtccctggtgccacaagtgaccatgggctcttggctcccctggggctctggccccctcctgactgagcccctctgacctggaagtccttttcaggaaggtaagcccccaagtgccaggctggcccctgctctcatgcaacatgcactcctaggaaagccaacttctgccctggctgctgggacatggtgagccccatctgaagggct

SEQ ID NO: 5622 - protein, 82 aa, Homo sapiens [sequence omitted]

SEQ ID NO: 5623 - DNA, 674 bp, Homo sapiens
ggccgggccccgcgagaaactccagagtggcgtaggccggcttgtttagttgctagcatacttgttcgagctcttgagttctcctggcttttctccacgtgtctgcttgttgcctttgatttcgcgagagactgcggactgccaccccactccgggaaaacctggagtgatggtaaaggccctgcggcgctttctttcggaaaaactaatacgaaagaagcaacaacaaatttttacaacaggctggacgagaaaagtggggaagagcaagcagaaaaaagaaaagagaatagtcgttcttggataatttatttattataacccttttttttcaccccagtactcattaacgaagacaaaggagagtaagaaagcccggtaaagcatttcgaagataagagagccatttattctagctcgcttgtaactacacgagagttgagtatagtggagacgacatactaccatagccatgcaaagcccatatccaatgacacaagtgtctaacgttgatgatgggtcactattgaaggagagtaaaagcaagtccaaagtagctgcgaagtcagaggcgccaagaccacatgcttgtcctatctgtcatagagcttttcacagactggaacatcagacgagacacatgagaattcatacaggtgagaagcctcacgcgt

SEQ ID NO: 5624 - protein, 106 aa, Homo sapiens
GRAPRETPEWRRPACLVASILVRALEFSWLFSTCLLVAFDFARDCGLPPHSGKTWSDGKGPAALSFGKTNTKEATTNFYNRLDEKSGEEQAEKRKENSRSWIIYLL

SEQ ID NO: 5625 - DNA, 357 bp, Homo sapiens
  misc_feature (326)..(326): Wherein n may be a, c, g or t
  misc_feature (357)..(357): Wherein n may be a, c, g or t
tgtacaagaaatccaatccacaatcattgagtcatcatttgctggatgtctgtctctcccaatgtgccgtagggtccatcgagacactgggagccagcctggtatataaaagacatgaaatttatttgtggaattaatgaaagtatttgtaagatattcatgataattgtgaatatcagataacaacagcctttactgatcatttattccataactatcaagcactgtaccgttctaagcagattgcacatactcactcattttgccccccacaggctcacgcagtaggcactattattacacacatgttatggattagaagactngagcacagagaggagaaagaaccttgtcctn

SEQ ID NO: 5626 - protein, 59 aa, Homo sapiens
MISKGCCYLIFTIIMNILQILSLIPQINFMSFIYQAGSQCLDGPYGTLGETDIQQMMTQ

SEQ ID NO: 5627 - DNA, 373 bp, Homo sapiens
ggatccagcctttacatgttcttatctcacacagaaaatccccaaacctcatgtcttggcaagaaggctcaggggatagaaagagaagggagacatcaggttggccctggactgtctgtcacttggttcccttacagtccaggtcccccagccttggtgctcagcactggacagaaggttggactagaagaacttcgggacccttcacaccctgcgttctgtggctctgtgattgatgtagggaactatctcaggagttgatagaggaaatacctgaagctaatacttcctctctttagtagcaacctgtggtcaagatggctccttcttagatagcccactcttgattactcctgggaactgcaggcctctg

SEQ ID NO: 5628 - protein, 81 aa, Homo sapiens
MFLSHTENPQTSCLGKKAQGIEREGRHQVGPGLSVTWFPYSPGPPALVLSTGQKVGLEELRDPSHPAFCGSVIDVGNYLRS

SEQ ID NO: 5629 - DNA, 403 bp, Homo sapiens
  misc_feature (1)..(1): Wherein n may be a, c, g or t
ntcttcatttattctaaggtagataggatgggtattattggcccattttacagatttggaagacaggtgatttgcctaggatcattggtgagctgatgataggaccaggacacgaagctgggtcttctgcctcttcctggtctggcacatgctggatggcaatttctgcctgaacttgataaactgccctgtacagtagccatgaggtgagagaagcagcctgctacgatggcctccctctctgcagcctccgtagagacagggactacccatcagccgtgtttgtgaaagagattaattcaggaaaatctcttgaaagcagaatgtgactcagaaaaagattcttctgacgccaataataagaacccctccctgcacacatacagtgcttgagtattcagac

SEQ ID NO: 5630 - protein, 63 aa, Homo sapiens
MGSPCLYGGCREGGHRSRLLLSPHGYCTGQFIKFRQKLPSSMCQTRKRQKTQLRVLVLSSAHQ

SEQ ID NO: 5631 - DNA, 362 bp, Homo sapiens
tgatcacggcaggggaagactacccacataagcatctgaagtgcttcaggaacttagaaaagatttgtgaaattctgtgtatccacagagaaggcagtggctaattctaggagtccacacggaagagagaacacttttactggatcacagaagataattgtgtgttcagcaggaaggcttttgagggaaatgggtgtttcaggcaacggcagcatcatgagccaagaccgtaagtgaaataggtgggcatgtttacagagctgaggatagctccagaggattcgtgaatacaacaaaagagaagtacaagcttttaaaggtctaagagggctgcgtttcagatgagtgtgggaagggaatcc

SEQ ID NO: 5632 - protein, 54 aa, Homo sapiens
MMLPLPETPISLKSLPAEHTIIFCDPVKVFSLPCGLLELATAFSVDTQNFTNLF

SEQ ID NO: 5633 - DNA, 396 bp, Homo sapiens
gtcgactacagtgaagacttagatgaggacttggacaaaggcgaagatatagcgctttcaagaatcccaaattgatggattattgaagctactcttttttctaatgtctttttgtccggttttgacggaaccgttacagcttcgacgtaccaaacgattggtaacgaatttaatcagatgagtatttcaaattggatcaccactgcgtatttaattacatcaacatcttttcaacctctttatgggtcattttctgatgcacttggtcgaagaaactgccttttctttgctaatggggcttttaccattggatgtctagcctgtggtttctcgaaaaacatctacatgcttagttttatgagagcattgacaggcataggaggtggtggcttgatc

SEQ ID NO: 5634 - protein, 73 aa, Homo sapiens
MSISNWITTAYLITSTSFQPLYGSFSDALGRRNCLFFANGAFTIGCLACGFSKNIYMLSFMRALTGIGGGGLI

SEQ ID NO: 5635 - DNA, 287 bp, Homo sapiens
  misc_feature (1)..(1): Wherein n may be a, c, g or t
  misc_feature (14)..(14): Wherein n may be a, c, g or t
ngaattctacaggngcagtttcttccaaaaataaatggcacttagaaacaaacgtagacatctagcacccagatcttggctattaatacctttttttttttttgggaaagggagtctcgttcggtggcccaggctggatgcaggggggccaacctcggttcacttgcaacccccgcctccaagttaaaccaattctcctgcttaaccctcctgagtagctggaacaacgggcaccccccaccacccccagttaatttttgtattttggggaaaaacggggttccacc

SEQ ID NO: 5636 - protein, 76 aa, Homo sapiens
TSSTQILAINTFFFFWERESRSVAQAGCRGANLGSLATPASKLNQFSCLTLLSSWNNGHPPPPPVNFCILGKNGVP

SEQ ID NO: 5637 - DNA, 375 bp, Homo sapiens
acgcgtccctgcaccgtcctccaggcaaaacaaaacaaactctggagcagacaataaatacaattatttaaaattaatttttaaataacctcatgacactgccggtccccagctcaagacctaatcacaacaaaaacaaaatctctattgccaaaaccttttttggaaagcatggttttctaagagctgctcagctgtttctgtgcctctttgctctccagcccctgttgaaatacttgctaatgcaagaaatggccctgaaactaaaaagccattaggtcaggacttgactaagtcatctgtgtatcggacagcacttacatttatacctccttatctcaaagatgaggacacagagtttgttgtccacctatg

SEQ ID NO: 5638 - protein, 61 aa, Homo sapiens
MTLPVPSSRPNHNKNKISIAKTFFGKHGFLRAAQLFLCLFALQPLLKYLLMQEMALKLKSH

SEQ ID NO: 5639 - DNA, 273 bp, Homo sapiens
gatccgcattacaaacgagaattggaaaaatacggcaatccaatcccgagccttgaatttattttaaccgttattcgagacaataatgcaccgatgaatcgggatgaaattttgaccgcactttccattcgaaatgaagatcaaatagaagcgatgcgtcgccgattacgcgcgatggaaaatgacggacaattagtgttcaccaaacgtaaacgctatgccttaccagaaaaattagatttatttaaaggcacggtcattggtcatcgcgaa

SEQ ID NO: 5640 - protein, 91 aa, Homo sapiens
DPHYKRELEKYGNPIPSLEFILTVIRDNNAPMNRDEILTALSIRNEDQIEAMRRRLRAMENDGQLVFTKRKRYALPEKLDLFKGTVIGHRE

SEQ ID NO: 5641 - DNA, 328 bp, Homo sapiens
cctaggagcctgtctgccttttacatgccatccatagatcccaggctgtcagtgctgagaggtacccacgggtccgccctgaacctccctcagtccccctggacccccttgcatgctcattggtgcccaaagtccggagggggctgaggtggcccgaggccaatgtgtcagcactgcactgagtgtgcgcaaacccggctgggttgcaacagtgcctgggctcggccacaactttgctctgccccacagcaggcaccaggattgaggagaggccagggagcagaattggcactttcaagcctgcagtggcaggggatttcctgggccc

SEQ ID NO: 5642 - protein, 55 aa, Homo sapiens
MCQHCTECAQTRLGCNSAWARPQLCSAPQQAPGLRRGQGAELALSSLQWQGISWA

SEQ ID NO: 5643 - DNA, 301 bp, Homo sapiens
  misc_feature (1)..(1): Wherein n may be a, c, g or t
ntgtatattcacactgaggacagctcagcttggtaacctgtggccaaggagcacctgggagagggaacagctcaggctttgaaggcctcctgcctgtgctgtgcatgcaatcagctgacagagctggggtaattcagatgtggagcttactcagcagcctaatggcctttttggtcactgagcaccaacaaccacccctcccctttccctggttcccaaaagcttccagcttagagagaaagggagcagaagtgcagggagatggtttggttcaaactccaattaggagggaagctgatca

SEQ ID NO: 5644 - protein, 65 aa, Homo sapiens [sequence omitted]

SEQ ID NO: 5645 - DNA, 265 bp, Homo sapiens
  misc_feature (265)..(265): Wherein n may be a, c, g or t
agagcagaaaaaaggctatgctgctggtgctgagggtggaggaaagggacacaaaccaaggaagtggtggcctctggaaaactggaaaagccaagtgatggtttcccccctcgagcctccaacaagaccagccccggcaacaccttgactttgtccccatagaaatcgttttggaactctaacctccagagctgcgggatcatgaatctgtgtcatgttaagccactgagtgtgtgaccactcattgcaacagccacaggaaaan

SEQ ID NO: 5646 - protein, 67 aa, Homo sapiens
MIPQLWRLEFQNDFYGDKVKVLPGLVLLEARGGKPSLGFSSFPEATTSLVCVPFLHPQHQQHSLFSA

SEQ ID NO: 5647 - DNA, 290 bp, Homo sapiens
agcggcccattcgtcgtcgtgttcgagctccacctcgacgttgcccccgagattgacgaccaccaggtccagggcgtcaagctcctgcaaacacgagacgtcgtcgtcacgaacctcgacgcgatgaccgaccgcctccaggatctcgcggattgccgcagatacctcggcgaagggatgccatggatcggtgtatcggccatggccggagagaactctgatggatgccacgatgtctcctcatcgagtgggcggtcagtggatgttgggatcgacccggtgggtcttcc

SEQ ID NO: 5648 - protein, 67 aa, Homo sapiens
MADTPIHGIPSPRYLRQSARSWRRSVIASRFVTTTSRVCRSLTPWTWWSSISGATSRWSSNTTTNGP

SEQ ID NO: 5649 - DNA, 349 bp, Homo sapiens
acgcgtgaagggccaggctagaggaggtgaccagcctaataagtgattggtgagtggcagagtggtgctgtaatctatctgtcctgactccaaaatctttcagaatccccaaatcatggcaaataaccttaaagaccacgagacttccacagaccatgcatgggtcttatattcttggctgagctctctcatttgatcttcactgtagtcctatgaaattggcacctgtactttgatctccgttttctggatgagaaaaatggggactttgccatattaagcaacgtgcccagcagcacgcagccaggagcccagaaagcctgacgctggaggcgcccctgcgtgagct

SEQ ID NO: 5650 - protein, 52 aa, Homo sapiens [sequence omitted]

SEQ ID NO: 5651 - DNA, 291 bp, Homo sapiens
acgcgttccttggagtttttgcacaacttcttcgtagagttagggaaatacgacgaagcattgcacgtgtatgaaagaggaaatttcaaattccctagctacgaattgtcttatcactggtttatgaaagcattggaagattccaattataaccaaatgagcaaagcatctctacagctagctaaatacagtgacagtggaaacctgcctaaaagagcatattatttttggaatgcaatctcgattttagccggatcaaggtttcaggaaaacactctttcagatcccaag

SEQ ID NO: 5652 - protein, 97 aa, Homo sapiens
TRSLEFLHNFFVELGKYDEALHVYERGNFKFPSYELSYHWFMKALEDSNYNQMSKASLQLAKYSDSGNLPKRAYYFWNAISILAGSRFQENTLSDPK

SEQ ID NO: 5653 - DNA, 867 bp, Homo sapiens
gcgtatagcatagccgctttcattaattttgtgctctccatatatgccattccgagtactataccaacaaatattcatcatttttctatggattggattggttctgttttgggcgtgataggtctcattttattaaattttgtgtggaaccaagctcctatatcgggttggaaccaggcttacatcatcgtaattttaatcatttctgtgatttttcttgtcgttttcatcatttatgagattcgatttgccaagactccactattgccgcgcgcagttataaaggatcgtcatatgattcaaattatgctggctttattctttggatggggctcttttggcatctttacgttttattatttccaatttcaattaaatataaggcagtacacggcattatgggctggtggaacttactttatgtttttaatttggggtattattgccgccttactggtaggatttactatcaagaatgtgtctccatcagtgtttttgttcttttctatggtagcattcaatgtgggctcaataatggcaagtgttacaccggttcacgagacatactttcgtactcagttaggaacgatgataattttaagttttgggatggatctttcatttcctgcttcttccattatctttagtgataatttaccgatggagtaccaaggcatggctgggtcattggtgaatactgttgtcaattactccatgtccttgtgtctcggtatgggtgccacagtagagacacaggtcaattcagacggaaagcatcttttgaaaggctatagaggtgctcagtaccttgggataggattggcaagtttagcatgcatgattagcgggctttacatggtcgaaagc

SEQ ID NO: 5654 - protein, 289 aa, Homo sapiens
AYSIAAFINFVLSIYAIPSTIPTNIHHFSMDWIGSVLGVIGLILLNFVWNQAPISGWNQAYIIVILIISVIFLVVFIIYEIRFAKTPLLPRAVIKDRHMIQIMLALFFGWGSFGIFTFYYFQFQLNIRQYTALWAGGTYFMFLIWGIIAALLVGFTIKNVSPSVFLFFSMVAFNVGSIMASVTPVHETYFRTQLGTMIILSFGMDLSFPASSIIFSDNLPMEYQGMAGSLVNTVVNYSMSLCLGMGATVETQVNSDGKHLLKGYRGAQYLGIGLASLACMISGLYMVES

SEQ ID NO: 5655 - DNA, 308 bp, Homo sapiens
caattgcgcgggttactgcaggcgaagatgcagatgatgtcggacaccaatttcctcgacctggcccgcgtcgcgattgccgccactatccattctccggaacgcgcgcaagacatggtcaaccgcttgagcaaacgcgaagaaggcttcacgcaatgggtacgtgccgcacaggacgatggtcgactgtcctgcagcgacccggcgttcgctgcccaccagatacaaagcctgctcaaggcgttcgccttttggccgcaaatcaccctgggccagccggtgctggatgccgccagccaggccaacgt

SEQ ID NO: 5656 - protein, 93 aa, Homo sapiens
MQMMSDTNFLDLARVAIAATIHSPERAQDMVNRLSKREEGFTQWVRAAQDDGRLSCSDPAFAAHQIQSLLKAFAFWPQITLGQPVLDAASQAN

SEQ ID NO: 5657 - DNA, 401 bp, Homo sapiens
  misc_feature (380)..(380): Wherein n may be a, c, g or t
ggatcctctaaccttagtgtaaccggccaatcagcatgtgtttgctttgctcatgcccacctgcttctctggctgtttttacctggctttcttacctactatctgtgcatgtcttctctgtcatgttgtttctacttagtcagaattttggctcactcatagctccttatggcccatccagcttctctcttctttccctgttagccgcaactattgctgctaattgctggattctgtctgtatttcccaatcttaatcccaaagattgagaatctagttttttgtgagtcccttcatataacaccttactgccctaaactcagacaccctccttggagaagggtgtagcttcggaagttcctgcctgggaaggaatcacnagtgtggcaggcaccactagt

SEQ ID NO: 5658 - protein, 77 aa, Homo sapiens [sequence omitted]

SEQ ID NO: 5659 - DNA, 189 bp, Homo sapiens
gaacacgaacaccatataagaaagatcaatacaaatgagactctcccaagttccttaagttctccaaaattacgtaatgatgcatccttcaagaatccatcggggataggaaatgacaattctaaggcttccgaaaggaaagctagtcagtcgtctactgagacgcagggaccgagttcggaatccgga

SEQ ID NO: 5660 - protein, 63 aa, Homo sapiens
EHEHHIRKINTNETLPSSLSSPKLRNDASFKNPSGIGNDNSKASERKASQSSTETQGPSSESG

SEQ ID NO: 5661 - DNA, 239 bp, Homo sapiens
  misc_feature (239)..(239): Wherein n may be a, c, g or t
atccacattgagggccggaatgcatcggaacaggtaaagatgctacagcggatagaacagtacaatgccacgcagcctctgcagcagaaggtccgggtgtccgtggagatagagaagccccgagaggaactcttccagctgttcggctatggagaggtggtaagtgtcctgcagcttcccctgcctatctttagctaactgggctcctagtcctgcctaccagcctccgtgggacaacn

SEQ ID NO: 5662 - protein, 65 aa, Homo sapiens
IHIEGRNASEQVKMLQRIEQYNATQPLQQKVRVSVEIEKPREELFQLFGYGEVVSVLQLPLPIFS

SEQ ID NO: 5663 - DNA, 684 bp, Homo sapiens
atcaacgcacataatgaaagactagaattcctaggcgattcgatcttaaattctgttatgacattaattatttataacaagtttcccgattacagcgagggtcagttatcaacattaaggatgaatttggtaagcaacgaacagatcaaacaatggtcaataatgtacaatttccatgagaaacttaagacaaattttgacttgaaggatgaaaattccaattttcaaaacggcaaactaaaactgtatgcagatgtgttcgaagcttacattggcggcttgatggaagatgatccaaggaataatttgcccaaaataagaaaatggttaagaaagcttgccaaacctgtcattgaggaggctacccgtaatcaagttgccttggagaagacggataaacttgatatgaatgctaaaaggcagctttactctttgattggctatgcttcattacgtctacattatgttaccgtaaaaaaacccactgcagttgatcctaattccatagttgagtgcagagtaggtgatggaacagttttagggaccggtgtgggcagaaatatcaaaattgcgggtattagggctgcagaaaatgctcttcgtgacaaaaaaatgttagatttttacgccaaacaaagagctgccattcctaggagtgaatctggggttaaagatccctcacaa

SEQ ID NO: 5664 - protein, 228 aa, Homo sapiens
INAHNERLEFLGDSILNSVMTLIIYNKFPDYSEGQLSTLRMNLVSNEQIKQWSIMYNFHEKLKTNFDLKDENSNFQNGKLKLYADVFEAYIGGLMEDDPRNNLPKIRKWLRKLAKPVIEEATRNQVALEKTDKLDMNAKRQLYSLIGYASLRLHYVTVKKPTAVDPNSIVECRVGDGTVLGTGVGRNIKIAGIRAAENALRDKKMLDFYAKQRAAIPRSESGVKDPSQ

SEQ ID NO: 5665 - DNA, 377 bp, Homo sapiens
  misc_feature (374)..(374): Wherein n may be a, c, g or t
tgatcacctgaccacacctgcagcaccacaagcaccacgcattccctctctgtggcccaattcttcatgcacctgctatcaccaacctccaatctccagcacctcccacagggtcttgtcctctatcgtccccacttccctgccactaagaccctgaaactcactgtcaccactagcagcccattgagagagagattcagtcacagcccaggagggtgcccagaaatccaccgtgaggttgcagcaacgtgatttggcagaagagcaaggagtgggagagatcggagatgccctcctgggccagtgaggcaactggctagggtgggtgcctttacactgtagagcaggttccctgtgctcaccagacctgggtnccc

SEQ ID NO: 5666 - protein, 61 aa, Homo sapiens
MHLLSPTSNLQHLPQGLVLYRPHFPATKTLKLTVTTSSPLRERFSHSPGGCPEIHREVAAT

SEQ ID NO: 5667 - DNA, 296 bp, Homo sapiens
ggccgcacacatcaaatccgtgtacacatgcagtcccagcaagcacctattgctggagacgagcgttatggaaattttaagattaataaaatattacaaagaaaaggcttaaaacgtatgttcttacatgcatatcaattaagcattaagtaccccaccaatcaagaaagattattattagaggctcctttgccggaagatctccaacattttttaaaacagctgcgcgtggagaaataagttgatacaataagcccagaccgatttatgggacataccatgccaagaagccacag

SEQ ID NO: 5668 - protein, 79 aa, Homo sapiens
GRTHQIRVHMQSQQAPIAGDERYGNFKINKILQRKGLKRMFLHAYQLSIKYPTNQERLLLEAPLPEDLQHFLKQLRVEK

SEQ ID NO: 5669 - DNA, 362 bp, Homo sapiens
  misc_feature (1)..(1): Wherein n may be a, c, g or t
  misc_feature (268)..(268): Wherein n may be a, c, g or t
  misc_feature (362)..(362): Wherein n may be a, c, g or t
ncgggtcggagatttttaaaatattttggacactgcacactctccaagcacaacacccaataaaatcatgtttaaatgaaatccagataatttaggtccaaagtaaagagctttgtatgttagacaaggttcaaggtcctgtagtgatacatgataaattaatccagccctcttgctatgttttcttaatagcgtgttcattagtctgtttacctgagtagatttcaggcacctaattgccacaattggaataggttccttgtagatnatgaaaacgtttgcagttctaggcaaaaggtaatttagtagtgcttagtcagagcctaatgctttcataccatattgtttatgaatgattgatn

SEQ ID NO: 5670 - protein, 61 aa, Homo sapiens
MNTLLRKHSKRAGLIYHVSLQDLEPCLTYKALYFGPKLSGFHLNMILLGVVLGECAVSKIF

SEQ ID NO: 5671 - DNA, 251 bp, Homo sapiens
  misc_feature (121)..(121): Wherein n may be a, c, g or t
acgcgtatccttaccgaggcacagagcgttatgcggaaagctctcgctgtgggcggcacatcgtttgatagtctctacgtcaatactgcaggagaacccggatattttgcgcggtcactcnacacgtacggcaaagctggtacaccctgcgaccgctgtggtacaccgctcacctctgttgttataggtggacgttcccacacattctgcccacattgtcagaaaccacccgcacgaaccaggtagaattc

SEQ ID NO: 5672 - protein, 81 aa, Homo sapiens
  misc_feature (41)..(41): Wherein Xaa may be any naturally occuring amino acid
TRILTEAQSVMRKALAVGGTSFDSLYVNTAGEPGYFARSLXTYGKAGTPCDRCGTPLTSVVIGGRSHTFCPHCQKPPARTR

SEQ ID NO: 5673 - DNA, 403 bp, Homo sapiens
  misc_feature (403)..(403): Wherein n may be a, c, g or t
agatctgttgaatgaagcaggtgccacttagacattcacttcactgactccaaccacaacctccccttcatttgatatcctgctcttggcagaaggatggagaaagagcatcgcacaaagaggaagcatgtttatcctgttcagattactgcttctgccaggctgctgctgctgttgggttctgcacatttgctctttattaagcaaatgtcagagctgggtgctggcaagggaatcccctgtatttacacaggtaaacctgagagccagagggccccaaaccatcctggctgcgagggacaagctattagagttaataacagtgcactggcattccttcaaaatcctaatggaagcataaataaaaagaggaaagtcccctttacccaagaacctgaaaaan

SEQ ID NO: 5674 - protein, 102 aa, Homo sapiens [sequence omitted]

SEQ ID NO: 5675 - DNA, 295 bp, Homo sapiens
cgcgcgctgcatgtttgtgcacgtgtgtatggtatgtgcatacacatgtggtgtgtggtgtgtgctcacgggcatggatgtgtggtatgcacgtggttcctgtgtgccctgaccatgtcccttcccctgggctggcctttttcttagggccatgtctggaaacgtgaccttggccctgaggctggcaacgcgggatcaacctgtgggaccgcagtgcacggctctagggctcacaggccgagaaaaaaaatggagaaacgccccctccctctctgggggacctggcatggcgggg

SEQ ID NO: 5676 - protein, 51 aa, Homo sapiens [sequence omitted]

SEQ ID NO: 5677 - DNA, 377 bp, Homo sapiens
gtgcaccttttctcaggactcgctcagaaggtccttctgggaggacaatggacaagactaaaccatcaaatccattctcaatgggtcaaattccaaattttcctgaagggctggcttctactggtgctccaatcgagttgcagaaaggtatacagggtggagcaagtttatttaatcctggttttggctggaaccaaaatccacaagttcaaaccttgaagaattctcaaggttctattcataatttagtgaggtctggagttactgttgaaaggaaagttaatgtaggggcacaaggagcttttaactctgcccctgcaccacagatggaatttcccacagttcctccatacaacccctcttccttcggagctagc

SEQ ID NO: 5678 - protein, 110 aa, Homo sapiens
MDKTKPSNPFSMGQIPNFPEGLASTGAPIELQKGIQGGASLFNPGFGWNQNPQVQTLKNSQGSIHNLVRSGVTVERKVNVGAQGAFNSAPAPQMEFPTVPPYNPSSFGAS

SEQ ID NO: 5679 - DNA, 183 bp, Homo sapiens
gttcgtgttgaatcgagagttttgttgctggtaaattgtcttgatccattggatttgaaagatgaaacctttatcacagaaattaaagaaacattaaagtgtagtatcgcgggagcagatacgattaaaatatgccaacccggcgtcgattacagacttaattttgaaaacttggcttccgga

SEQ ID NO: 5680 - protein, 61 aa, Homo sapiens
VRVESRVLLLVNCLDPLDLKDETFITEIKETLKCSIAGADTIKICQPGVDYRLNFENLASG

SEQ ID NO: 5681 - DNA, 346 bp, Homo sapiens
gagaactgggcggaaggcatgctgggagacaagatcgggatcttcccgctcctgtacgtggagctcaatgactccgccaagcagctcattgagatggacaagccatgcccagccgctgcatccagctgcaatgcctccctgccctctgactccggcgctgtggccagcgtggccccaagtcccactttaagcagctcaggggcggtcagtgcctttcagcggcgtgtggatggcaagaagaacaccaagaaacgccactccttcaccgcgctcagtgtgacgcacagatcctcccaggctgccagccacaggcattccatggaaattagtgctccagtgttgatca

SEQ ID NO: 5682 - protein, 115 aa, Homo sapiens
ENWAEGMLGDKIGIFPLLYVELNDSAKQLIEMDKPCPAAASSCNASLPSDSGAVASVAPSPTLSSSGAVSAFQRRVDGKKNTKKRHSFTALSVTHRSSQAASHRHSMEISAPVLI

SEQ ID NO: 5683 - DNA, 441 bp, Homo sapiens
  misc_feature (1)..(1): Wherein n may be a, c, g or t
ntgaacagtacaaaactaaagcaacagctgaaagtgaagaaaaaagtactactttgcagaaaaacataatgacatcaaagtatgaagagaagcaaagtgttgttcctaaattagtggtgatcaatataacatctgctattactgtaacattccaaggacagaaaaggtcagacacacctagaatttcaatattgcaaaaggcaacatggaatatcaaatctataagtaatatctccatagtaagaactttacattcaaaagtctaagtccgtagtatgtcaccggtatgaaaattgcattaagtggaataatttgaggttatctaactgaaaccatggcttttatctcagcatcatttttaaagtatgatgtaaataataaaccaatattttagatgataagaggcagacatactgacatataaacctacgatatttgtga

SEQ ID NO: 5684 - protein, 79 aa, Homo sapiens [sequence omitted]

SEQ ID NO: 5685 - DNA, 228 bp, Homo sapiens
agcacagtgttggacgtttgctgtggcactggtaccatagggctagccctggctccgaaggtgaagaaagtaattgggattgaactgtgccaggaggctgtggaggatgcccgtatgaacgccctcaccaatgagctgagcaacgttgagttccactgcggcagggctgaggatctggtgccaggcttggtgagcaaactgtcttcccagcaacttgtagctgttcta

SEQ ID NO: 5686 - protein, 76 aa, Homo sapiens
STVLDVCCGTGTIGLALAPKVKKVIGIELCQEAVEDARMNALTNELSNVEFHCGRAEDLVPGLVSKLSSQQLVAVL

SEQ ID NO: 5687 - DNA, 296 bp, Homo sapiens
  misc_feature (1)..(1): Wherein n may be a, c, g or t
  misc_feature (28)..(28): Wherein n may be a, c, g or t
  misc_feature (139)..(139): Wherein n may be a, c, g or t
ntgatcaggaagaagacaaaaaacgttnatagtgaagaggaggggttgattgctgcattcaaaagtgtcggggataccttatccaatgctactgagaaggttgccacaggggacactgatgtgccagatgatctttttnatagtttgataaacctttcaggttttgagcagacccacatatctctgtatttcaattatctggtggcgcaccctcacattgctagagccttcaacaagttgtcattcgaccacaagttaatctgggctcgcaatttcgtcagtgaaaagttcctagg

SEQ ID NO: 5688 - protein, 98 aa, Homo sapiens
  misc_feature (1)..(1): Wherein Xaa may be any naturally occuring amino acid
  misc_feature (10)..(10): Wherein Xaa may be any naturally occuring amino acid
  misc_feature (47)..(47): Wherein Xaa may be any naturally occuring amino acid
XIRKKTKNVXSEEEGLIAAFKSVGDTLSNATEKVATGDTDVPDDLFXSLINLSGFEQTHISLYFNYLVAHPHIARAFNKLSFDHKLIWARNFVSEKFL

SEQ ID NO: 5689 - DNA, 297 bp, Homo sapiens
acgcgtgccagacccgggcatatcacgtgatagaatcggtggtcatccaaccaccgcgtagcgaagcgtgcctccagggcctgtaagaaaatcggtaggcctgcgcccacgcatctagcgtccacacccaacgactacgctgacgccggtggcaaacgatatggcagctccgaccgtgtcgatgcctttgcccactgtgcggaaggagtcgtctgcgaccatcactacgggttacagtgctgtaagctttgtaccgaccgaacatgtccagacagccggcagtgagatggatgatca

SEQ ID NO: 5690 - protein, 80 aa, Homo sapiens
MFGRYKAYSTVTRSDGRRRLLPHSGQRHRHGRSCHIVCHRRQRSRWVWTLDAWAQAYRFSYRPWRHASLRGGWMTTDSIT

SEQ ID NO: 5691 - DNA, 400 bp, Homo sapiens
gaacgcggtgagttacttgagtatctaaccaactccagcattttcgccaaaatcggtgaactcgcttttcgtaaaacagcagatattgcaaagcagcgtaaacagcttgaagaattcttaggccacattgaaattttgtctgatgaagagattgctgcatttaccgagcaatatcagcaagccgagcaaaaccatcaacagttagaacaacaaaaaaatgtcttagacaaacaacaacaatggtttgaatgtaaagcgaaacttgcgcaagaagttcaagcgaaacagcaacagtttcaaacccagcaaaaccatcatcagcaacttgtgcctgaacgtgagcaattaaaacggcccgaagttctctctgaaatacgcccacaagtttttcagcaagctt

SEQ ID NO: 5692 - protein, 133 aa, Homo sapiens
ERGELLEYLTNSSIFAKIGELAFRKTADIAKQRKQLEEFLGHIEILSDEEIAAFTEQYQQAEQNHQQLEQQKNVLDKQQQWFECKAKLAQEVQAKQQQFQTQQNHHQQLVPEREQLKRPEVLSEIRPQVFQQA

SEQ ID NO: 5693 - DNA, 477 bp, Homo sapiens
  misc_feature (1)..(1): Wherein n may be a, c, g or t
  misc_feature (2)..(2): Wherein n may be a, c, g or t
nnacgcgtcaacatgaggagggtaatgatgtggtagcgccgtgtaaggcgctatcaaagggaaacggggataatagtattaacaccgcagcttttttttcctttctccctctattggtttcaaatttattggagttttactagaaagaagagatataaatagggtatacttttgcatctcagttctattgaaatcgaatggttatttcttgtggctctgagtacagagtgaatataacactacataaaagcaatgcctcaaagactacaaagtatcaaggatcatttggtggagagcgccatgggtaagggtgaatcgaagaggaagaactcgttgctggagaaaagacccgaagatgtagttattgtggccgctaacaggtctgccatcggtaaaggttttaaaggtgccttcaaagatgtaaacacagactacttattatacaactttctcaatgagttcatcgggaggtttccg

SEQ ID NO: 5694 - protein, 75 aa, Homo sapiens
MPQRLQSIKDHLVESAMGKGESKRKNSLLEKRPEDVVIVAANRSAIGKGFKGAFKDVNTDYLLYNFLNEFIGRFP

SEQ ID NO: 5695 - DNA, 343 bp, Homo sapiens
  misc_feature (1)..(1): Wherein n may be a, c, g or t
ngggcaccttttaaacccctttttcccccaaaaacaaaaattaaccggggggggtggcccgggccctgtttttccctccctgggggggccccggccggaaacccgcccccccccccggggggggggtttccgggggccccggcccccccccccccctcccccccgggggccaaacgggggctttgtttccaaaaaaaaaaaaaaaaaagtaaactgacaatgacaatatagcatgtgtacttaataaatgcagtttggcagacttatgctttgaaaacccagagcttgtgggagaagcatactgaaaggattacatgctcactaaagtctaatattcaaattt

SEQ ID NO: 5696 - protein, 76 aa, Homo sapiens
  misc_feature (1)..(1): Wherein Xaa may be any naturally occuring amino acid
XAPFKPLFPPKTKINRGGWPGPCFSLPGGAPAGNPPPPPGGGFPGAPAPPPPSPPGAKRGLCFQKKKKKSKLTMTI

SEQ ID NO: 5697 - DNA, 186 bp, Homo sapiens
  misc_feature (31)..(31): Wherein n may be a, c, g or t
cgcgtctgtatagcaacatctgaaccacccnacgggttacgagatagcgtcccggtaggggcgcaccttcctctctacgtaggcgcatcctctaaagttctggtcgcatgggcagaaatgagtatccaacgatccatactggcggaaggcgaaattacggaaacacaactccgcgatacccgtcga

SEQ ID NO: 5698 - protein, 62 aa, Homo sapiens
  misc_feature (11)..(11): Wherein Xaa may be any naturally occuring amino acid
RVCIATSEPPXGLRDSVPVGAHLPLYVGASSKVLVAWAEMSIQRSILAEGEITETQLRDTRR

SEQ ID NO: 5699 - DNA, 401 bp, Homo sapiens
  misc_feature (1)..(1): Wherein n may be a, c, g or t
ntctagctgggaggtaaacaggtgtttatagtgctgacagaactcacgatagaagagatctgagtgaaatggtggtgtgttgaatttggatttgctattgaacaactgaagcaggggactagaactaaggaaacagagaatgactgaaaacagacattgggaattagtacacatcatcttcctgtcttttcactactataccttaatgcctacagcaggagctgttcattgatttaattaattaatgaaaggtgttgtagcctatcatttaaataacagcttcttagagtgtgattaaagagtatatgtggcattgattctggaaatccagaagcctgtcatattccataatatgaagagaaaaaaggtcagcttttgtaactgtggatttctgatggtaa

SEQ ID NO: 5700 - protein, 59 aa, Homo sapiens
  misc_feature (59)..(59): Wherein Xaa may be any naturally occuring amino acid
MMCTNSQCLFSVILCFLSSSPLLQLFNSKSKFNTPPFHSDLFYREFCQHYKHLFTSQLX

SEQ ID NO: 5701 - DNA, 248 bp, Homo sapiens
  misc_feature (235)..(235): Wherein n may be a, c, g or t
  misc_feature (236)..(236): Wherein n may be a, c, g or t
  misc_feature (237)..(237): Wherein n may be a, c, g or t
  misc_feature (239)..(239): Wherein n may be a, c, g or t
  misc_feature (243)..(243): Wherein n may be a, c, g or t
  misc_feature (244)..(244): Wherein n may be a, c, g or t
  misc_feature (245)..(245): Wherein n may be a, c, g or t
  misc_feature (246)..(246): Wherein n may be a, c, g or t
  misc_feature (247)..(247): Wherein n may be a, c, g or t
  misc_feature (248)..(248): Wherein n may be a, c, g or t
ggtacccggctaaaagccgcaagaatcagagcgggatactcgcagaagcagttgggcatgttggtgggaatggacgagttttccgccagcgcacggatgaaccaatacgaacgcgaacggcactcccccaacatgcggacttccgaacagctggccatggtcctccaggtccccatggcctacctctattgccccgaggacgagctggccgagcttatcctcaaggtgtccaccnnncncccnnnnnn

SEQ ID NO: 5702 - protein, 63 aa, Homo sapiens
  misc_feature (60)..(60): Wherein Xaa may be any naturally occuring amino acid
  misc_feature (61)..(61): Wherein Xaa may be any naturally occuring amino acid
  misc_feature (63)..(63): Wherein Xaa may be any naturally occuring amino acid
MLVGMDEFSASARMNQYERERHSPNMRTSEQLAMVLQVPMAYLYCPEDELAELILKVSTXXPX

SEQ ID NO: 5703 - DNA, 362 bp, Homo sapiens
tctagaaatgcatgccaggcctggaacccaggctctgccacatgccagccatctgggcaaatgactctcctatgcccatgcctcagtttcccctgcacaaaacggggacaaggacacagccacacagggttgaaatgaagatgaactcagacgtcggatgcacacggcctcgttcggtgtccgacacctggtgatttctcactaaaaatgatcaggcagggtactcaattagtgcgtcatcggccacgctatagatacagagagtgacgctgatgagggtccgccccatccctgtccaggcttgctccttccttcgcgtaacactgagaagagggtaccgtgagccctgccatgatgccggc

SEQ ID NO: 5704 - protein, 60 aa, Homo sapiens
MPGLEPRLCHMPAIWANDSPMPMPQFPLHKTGTRTQPHRVEMKMNSDVGCTRPRSVSDTW

SEQ ID NO: 5705 - DNA, 369 bp, Homo sapiens
  misc_feature (1)..(1): Wherein n may be a, c, g or t
  misc_feature (2)..(2): Wherein n may be a, c, g or t
nngaattcgagtggaggcggtactggggtcagcaccttggcatcaggtctggcatgggccgctgcgaggtcggggataaaagttgggctggttgaacttaatcccagtgccggcgggatcgacctgctgctaggcatcgagagaaaagacgggtggcggtggcctgagttggcgtcggcccgcggggtgacgactgatttggggtctcacgtgccttccctcgacggtgttgaggtggtgagtgcaggcagggtgggtgttcacgtgcctccagcagctcgtagagttgtggttgattcctggctggcgatcacgatcttgtcgtcgtggatccgggaggtcttgatattccggagttcacggtgaatt

SEQ ID NO: 5706 - protein, 121 aa, Homo sapiens
  misc_feature (1)..(1): Wherein Xaa may be any naturally occuring amino acid
XNSSGGGTGVSTLASGLAWAAARSGIKVGLVELNPSAGGIDLLLGIERKDGWRWPELASARGVTTDLGSHVPSLDGVEVVSAGRVGVHVPPAARRVVVDSWLAITILSSWIREVLIFRSSR

SEQ ID NO: 5707 - DNA, 279 bp, Homo sapiens
aattctacaagacatccgtcaatagctccaccttcaaagctcaacaatcaaaggtccaattctttgcagtcctcaaccatgacgttaaatcaaaaaatcgtccaagatacagtgcggcatttgatgaacaaaagtgcatctacacccaatccttctgcatcttcatcgttagcgccttcaccaaaagtatccagtataaacaacacctcctcaggaaaatcatcaagtaccctgattgccaatagtagtgatactttggctatagagacattaactcta

SEQ ID NO: 5708 - protein, 93 aa, Homo sapiens
NSTRHPSIAPPSKLNNQRSNSLQSSTMTLNQKIVQDTVRHLMNKSASTPNPSASSSLAPSPKVSSINNTSSGKSSSTLIANSSDTLAIETLTL

SEQ ID NO: 5709 - DNA, 246 bp, Homo sapiens
gatcctgtggattcaggtggcatgaagaacctcggagtgtccccccaagggaggttaggcaccactgggccagaagccctactggagaaacctggtcgacgtcagaagctgctgcggtggctccggggggaaccaggggctccctcacattacctgcaggacccagaggagtatctgcagatctctaccaacttgaccctgcacctgctggagctgcttgcctcagccttgctggctctgtgctcg

SEQ ID NO: 5710 - protein, 82 aa, Homo sapiens
DPVDSGGMKNLGVSPQGRLGTTGPEALLEKPGRRQKLLRWLRGEPGAPSHYLQDPEEYLQISTNLTLHLLELLASALLALCS

SEQ ID NO: 5711 - DNA, 383 bp, Homo sapiens
acgcgtgaaggggggggagtgattaagtcaggaagggcagggaccttgtgaatgggactagggcccttaggaaagtggctgcagcgagccacctcgccccttccaccatgtgaggacacataaaagacaccatccagaagtgtgaccctcactagacagtgaatctattggagccctgataatggacttcctcagcctccaaactgttggcaataaacttctgttgtttataaattatccagtctaagatatcttgcaacaatagcccaaaggaactaagacagaggttaactgaagatgtaagggatttcttcattttaggaggtgtttaattgtattacttgagttgaattagcaagagtaatggtaagctgatttagtac

SEQ ID NO: 5712 - protein, 54 aa, Homo sapiens [sequence omitted]

SEQ ID NO: 5713 - DNA, 225 bp, Homo sapiens
gcgcagtacccgaccaactgggaactgtcgtcggcccgggcgtcgagcatcgtgcgaatgctcgcgatgcagggcataaaccctgggcgcctggcgtcggtgggctatggtgaattccagccggtggccaataaccccaccgccgaaggccgggcgcgcaaccgtcgcgtggtgctggtggtgtcgcgcaacctggatgtacgccgcagcctgaccggcaccggt

SEQ ID NO: 5714 - protein, 75 aa, Homo sapiens
AQYPTNWELSSARASSIVRMLAMQGINPGRLASVGYGEFQPVANNPTAEGRARNRRVVLVVSRNLDVRRSLTGTG

SEQ ID NO: 5715 - DNA, 264 bp, Homo sapiens
  misc_feature (1)..(1): Wherein n may be a, c, g or t
nctggagagatcgttctgatcaccggagctggtcatgggattggaagactgaccgcctacgaatttgccaaactaaacaccaaactggttctgtgggatatcaataagaatggcatcgaggaaacagcggcgaagtgcaggaagctaggtgcccaggtccacccctttgtggtggactgcagccagcgggaagagatttacagcgctgtgagaaaggtaaaggaagaagttggagatgttagcattctggtaaataatgccggc

SEQ ID NO: 5716 - protein, 88 aa, Homo sapiens
  misc_feature (1)..(1): Wherein Xaa may be any naturally occuring amino acid
XGEIVLITGAGHGIGRLTAYEFAKLNTKLVLWDINKNGIEETAAKCRKLGAQVHPFVVDCSQREEIYSAVRKVKEEVGDVSILVNNAG

SEQ ID NO: 5717 - DNA, 231 bp, Homo sapiens
tgatcaatctaccatcagttttccaattaactgaataatgtccaatatagcatttttttcctcctccaggaaagaatctagtctagtatctcatattacatttagttgtcatggctcttcagctggaatattttcacagcctttgtcttttatgacagtgacatctttgaaggatacagcaccccttacctcttttaaaaaacaaaacaaaacgttgctcacttggaattc

SEQ ID NO: 5718 - protein, 64 aa, Homo sapiens
MSNIAFFSSSRKESSLVSHITFSCHGSSAGIFSQPLSFMTVTSLKDTAPLTSFKKQNKTLLTWN

SEQ ID NO: 5719 - DNA, 381 bp, Homo sapiens
  misc_feature (1)..(1): Wherein n may be a, c, g or t
  misc_feature (2)..(2): Wherein n may be a, c, g or t
  misc_feature (286)..(286): Wherein n may be a, c, g or t
nngtgcaccgagatggcagttccggcgtcgtaccaggatctctccactgatcccgccgcccgcgatcacgttggcccagtctggtaccaacgtgaggttcgcattccgcgcggttggaccgatgatcgcgtcgtcgtccatttcgagtctgcgactcatgccgccaccgtctgggtcaacgacgtcgaggtcgtcagacatgttggcgggtacctccctttcgaagccgatatcaccgatcatgtctgcgcgggcaaaaaatgtcggctcacggttcgtgtcgatnatcggttgtccttccagaccattccgccggggattatcgtcgactctcccgagggcccgaagcataagtactggcacgacttcttcaattacgcc

SEQ ID NO: 5720 - protein, 127 aa, Homo sapiens
  misc_feature (1)..(1): Wherein Xaa may be any naturally occuring amino acid
  misc_feature (96)..(96): Wherein Xaa may be any naturally occuring amino acid
XCTEMAVPASYQDLSTDPAARDHVGPVWYQREVRIPRGWTDDRVVVHFESATHAATVWVNDVEVVRHVGGYLPFEADITDHVCAGKKCRLTVRVDXRLSFQTIPPGIIVDSPEGPKHKYWHDFFNYA

SEQ ID NO: 5721 - DNA, 266 bp, Homo sapiens
acgcgtccactcagccccaccgcttcggtcacgctgaccacggcgtgtcgtcatctacgccgcatcgtgcacgccccgcggcattttcgcagacggtgcggctgacgccgatgacaccgcgccgatcacttcgaccttactcagaacaatctgggcagccttggtcgaatacgagccggcaaagcgcgtcggctcagtcacatcgcgtcccggccatgtccattttggaggacgacgtgcctacggcatcatttgcgcgcgatttg

SEQ ID NO: 5722 - protein, 52 aa, Homo sapiens
MTPRRSLRPYSEQSGQPWSNTSRQSASAQSHRVPAMSILEDDVPTASFARDL

SEQ ID NO: 5723 - DNA, 394 bp, Homo sapiens
ggatccctttcccaggatctctagatcttgggaggagacaaaagtaatgatggagacctgcccccatttcctctacctaccacaaagtattgcaaactggatggctcaaaacaatagaagtttattgtttcacagttctgcaggccagaagacaaaaatcagggagtctgtgatggttgcttccttctgaaggctgtgcaggagtctgttctgtgcccatctcccagcttctggtgtctgccgacagtcttttgcattccttagcttgtggatgcatcagcccaatatctgcctcaatcatcgcatggtctcttccctgtgtgtgagtcttcacatcttccctctatgcacatctgtctctgtgtcaaactttccccttctgtaaggacactac

SEQ ID NO: 5724 - protein, 59 aa, Homo sapiens
MIEADIGLMHPQAKECKRLSADTRSWEMGTEQTPAQPSEGSNHHRLPDFCLLACRTVKQ

SEQ ID NO: 5725 - DNA, 201 bp, Homo sapiens
gccatgggactgcaacaaatgtcgatgggcgaaaatcccgaagcggcgctaacattcctcaacatcgacgccaccatctcagacagttacagagaagtcatcagcagcaaagacatcgccgtttatggtgggctctcggctttggcgtccatggaccgtcccgacctccaggcccgagtgctggagaaacacagtttccgg

SEQ ID NO: 5726 - protein, 67 aa, Homo sapiens
AMGLQQMSMGENPEAALTFLNIDATISDSYREVISSKDIAVYGGLSALASMDRPDLQARVLEKHSFR

SEQ ID NO: 5727 - DNA, 440 bp, Homo sapiens
gctagcgtgttttacagtgaagacctcggtgtgatcctgaaggagggtttcatcctcctctcatttcccactggatcggcaggaagcgttagcagggtggacatgccacagagcttccagatctggatcaaaggtggctgttgctgaaatacttatgcagagtcttccctgactgctgctggctaatgtgtgccctctgctccaacacacctcctccgagcctggcctggcacaaagccttctttctccaagttatttcagatcaagcagccaatgtagacagtgtctacactaaagggcgtaagaacagtggggtgcagtggcttcaaacatgctcaggatccagctgagctttcaccaggcttttcttgccatatttacagatgccactctgtgcctttctaaatattttaaatgttgtgtgctcagccgatgcactt

SEQ ID NO: 5728 - protein, 54 aa, Homo sapiens [sequence omitted]

SEQ ID NO: 5729 - DNA, 204 bp, Homo sapiens
cctaggatcctgcttctggacgaagcgactagtgcgctggatgctgagtccgagcggatcgtccaggacgcactggacagggtgatggtgaaccggacaacagtgatcgtcgctcaccgtctgtcaacaatacaaaatgcagatttgattgcggtcgtgaggaatggggttatcatcgagaagggaaagcacgatgccttgatc

SEQ ID NO: 5730 - protein, 68 aa, Homo sapiens
PRILLLDEATSALDAESERIVQDALDRVMVNRTTVIVAHRLSTIQNADLIAVVRNGVIIEKGKHDALI

SEQ ID NO: 5731 - DNA, 294 bp, Homo sapiens
  misc_feature (1)..(1): Wherein n may be a, c, g or t
  misc_feature (2)..(2): Wherein n may be a, c, g or t
  misc_feature (294)..(294): Wherein n may be a, c, g or t
nnccccctattgggtcccaagcacccaatgaataagacagtatggtgcttatgtaagtatagacatccagatcaatggaacagaattgagaatctagatatgagccttcatatttatgatcaaatttactttttaaaaaggtgtcaaggtattttattaaggatataagagtgttgtgctgggagaagtgtctatgcatatgccccaattcacaaaaattaactcaaaatatggatcacagactcttaaaggaagaactaaaactataaagcctttagaataaatcatcatgtn

SEQ ID NO: 5732 - protein, 55 aa, Homo sapiens
  misc_feature (1)..(1): Wherein Xaa may be any naturally occuring amino acid
XPLLGPKHPMNKTVWCLCKYRHPDQWNRIENLDMSLHIYDQIYFLKRCQGILLRI

SEQ ID NO: 5733 - DNA, 302 bp, Homo sapiens
  misc_feature (296)..(296): Wherein n may be a, c, g or t
  misc_feature (300)..(300): Wherein n may be a, c, g or t
  misc_feature (302)..(302): Wherein n may be a, c, g or t
gggccccaccccgtgagaccttggccctccggaagacacgccccgaatcgaatcggggagggggccagggcaagcacagcattggcagtgaacacagcgtgggcagagaggaagcccttagcttgtgctgtgtgtatgggacaaggagaggacggaccaggcttaagtgggcctccctcctccaccctgcccaacactggaaggtggaagggcacaacagaaactagggaaagtagcttgaacagagggcattccatgactggggctggggaaggggcatcaccagcctaaatccncccncn

SEQ ID NO: 5734 - protein, 85 aa, Homo sapiens
MECPLFKLLSLVSVVPFHLPVLGRVEEGGPLKPGPSSPCPIHTAQAKGFLSAHAVFTANAVLALAPSPIRFGACLPEGQGLTGWG

SEQ ID NO: 5735 - DNA, 381 bp, Homo sapiens
acgcgtgcaggtggctatgtgcaaataaaaatatttataaagtcttacttcatgggaatagcttaaaatgtgactcctacttcaaatgtattcttatggaaattttagttttgaatcatgcaaggtcgtcaggaacaaatgcatttcattaaatgtaccactctgagtgggggtgtgaacctgaatggtctactggaaccaggcagtcctcagtctgaatctgagctatgggactcccaagtgggctcgagccacctcctccctgctctgagtttcagttcatccctgagtgtctattttatagccctcgtagggctgcaggggctgagaaggtgcctgttcagaatttagcctggtggctgtcacatgcagtaatcacta

SEQ ID NO: 5736 - protein, 77 aa, Homo sapiens [sequence omitted]

SEQ ID NO: 5737 - DNA, 311 bp, Homo sapiens
gtgcacaaggcgcgactgctaccccctgccaaacaggttcccgtgacggctacgactcgtttcgatatcgcctcgaataccaaaatgtatgcggtcaacctggctttgcagatgcttgtggggcaggggcggatcgacctgtcgcgtcaggtgtgtacctttcccggctgggaggctttccgggacgagtcgacggtctacaccggctcgtggacggtcgggggccccggcggtatcaaaagcccattcactggcaagaagaccatccgactggtcgacctcatgcatcatcgaggtgggctcgttccgga

SEQ ID NO: 5738 - protein, 103 aa, Homo sapiens
VHKARLLPPAKQVPVTATTRFDIASNTKMYAVNLALQMLVGQGRIDLSRQVCTFPGWEAFRDESTVYTGSWTVGGPGGIKSPFTGKKTIRLVDLMHHRGGLVP

SEQ ID NO: 5739 - DNA, 1070 bp, Homo sapiens
tcttaggggaagggaaggcttatctgaagagtagacctctggttttgaatgagggagacagtggggatatgaggggaggaaacctcaaaaagaatatgtatccatcactatgaaaggttaggctatacaggggaagcctccaaagggaaatctggaaaaatgttctgagagggacattaaggatgtactcagaaattaagaaaacatattaggacttgccaaaagtgagagaagcaactgaggagacttatatgcaaaaatcgcaaagaaggagagaacaaaagatggaggttggatgctaaatagggaaagagaacgcgtgaatgaggtagggggcagaacatgcagtgcagaaaaacaacagatatggaagggcattaaagagggctaaatgggaatattaggaaatgagagttgggaatttgtcagagttgtgtattaacaaggagagggtaaggtaagaaggtggcaaagtaagagccagggcataaggttttgctgtccaggaagctttgttggaaaaatgttagaagtaatgggtttggtcagtatggtgagaggtgagagaggctaaatgggatgggcataaagggcaggccagtggcaagaatcctatgaaagtgtaggcagatctgagagcacagacaaatacagtggagaatgtggcacagggcagagggcagtgggctgagcagcgagtgcccatggggaggggagtatccagaagaacccattgagtccctaagaatgacacacaggtgacagctgaaagaaggagggacacagaagatatagcagcatgattctctggggcaaaatgaggaagaaaggaatggaagaagaaagtgaagggttcctgctgatgtgaggggatgactggaggaaaggcaggtattgactggggggtaaaggaaccattcttggatcaaggttatgatggaataagaaggaagagagagctggctagctgagtaaaggaccatcgtataaaacagacaaaagttaagactagatggagtggcaactaggcagatcagatgtatttttaaaaggggaaactgctaagatct

SEQ ID NO: 5740 - protein, 145 aa, Homo sapiens [sequence omitted]

SEQ ID NO: 5741 - DNA, 404 bp, Homo sapiens
tccggaggcatttctgcaaataatatgttttcctgtgccagtgtataaatagctgtagagtaatgagagtaagagaaagttgccaagactattgctacactgacaagagaagcagcagacttggaacttgcaccattatttgctgctagtcctaaagttttaatgagactgcacacaaatgtggttttcacatgaccagataagagggcagatgctgccatctctgatgacatagaaaaggccagaatagggcctttccaatgtacctgccctttgggtgaggtttcccttccacacaagtgctttccttctacaggaaaatattgctttttaaaatgatgatcaaattcaggcctctacagcttttaatgccatagtgtcctggtgatcttcctggactgaat

SEQ ID NO: 5742 - protein, 77 aa, Homo sapiens
MSSEMAASALLSGHVKTTFVCSLIKTLGLAANNGASSKSAASLVSVAIVLATFSYSHYSTAIYTLAQENILFAEMPP

SEQ ID NO: 5743 - DNA, 174 bp, Homo sapiens
ttgcaacaaaagcacgcggaaaaatcatttgccaaatccatgcaaggggtgaatgaacaaattccagcgaatgacgtctgccatcaagcccagaggccaatgcaaggtggtctgtattcatcacagcaaccttcatcgatgtcttcattaaactccgcgtatcagaatgcctcg

SEQ ID NO: 5744 - protein, 58 aa, Homo sapiens
LQQKHAEKSFAKSMQGVNEQIPANDVCHQAQRPMQGGLYSSQQPSSMSSLNSAYQNAS

SEQ ID NO: 5745 - DNA, 165 bp, Homo sapiens
gggccccctcatagtaatcatgaaaacagaatctattccctttctatagattgtggcccaaactatccagattctcccccaaaggtcactttcatttccaagataaatctaccatgcgtcaatccaactacgggggaggtccaaactgacttccacaccttacgc

SEQ ID NO: 5746 - protein, 55 aa, Homo sapiens
GPPHSNHENRIYSLSIDCGPNYPDSPPKVTFISKINLPCVNPTTGEVQTDFHTLR

SEQ ID NO: 5747 - DNA, 366 bp, Homo sapiens
  misc_feature (1)..(1): Wherein n may be a, c, g or t
  misc_feature (2)..(2): Wherein n may be a, c, g or t
nnaccggtatcgatggtaaaagtgcacacactaggcgcagaaggtaacgatgtgggtttaaaggctcatcacggtggtgttgataaagccttgttttttatgtctgatgtgtctttccctgctttaaacgagctacttggtgaaaagtttgattttcacggtagctcgatttacggtgaaaactttgtggtatcaggcttacatgaagataatgtttgcgtaggcgatcgttacaaaattggctctactctgttagaagtgtctcaaccccgcaaaccttgcgagcgtttatctcataataccaagaatgagaatacaagagaggttatccgtcagtcaggctggacaggttggtatgttcgcgtg

SEQ ID NO: 5748 - protein, 122 aa, Homo sapiens
  misc_feature (1)..(1): Wherein Xaa may be any naturally occuring amino acid
XPVSMVKVHTLGAEGNDVGLKAHHGGVDKALFFMSDVSFPALNELLGEKFDFHGSSIYGENFVVSGLHEDNVCVGDRYKIGSTLLEVSQPRKPCERLSHNTKNENTREVIRQSGWTGWYVRV

SEQ ID NO: 5749 - DNA, 180 bp, Homo sapiens
atgaaaatcagagagaatgcagtaagtactttctctaaagaccaacttggttctttccccaaactggagactctggaagcaggcgacaaccactttgtttgctcctgcgaactcctatcctttactatggagacgccagctctggctcaaatcctggttgactggccagacaggttcctg

SEQ ID NO: 5750 - protein, 60 aa, Homo sapiens
MKIRENAVSTFSKDQLGSFPKLETLEAGDNHFVCSCELLSFTMETPALAQILVDWPDRFL

SEQ ID NO: 5751 - DNA, 343 bp, Homo sapiens
acgcgtgaaggcgatctaagctggggcacagtagctgcgaaagatggcgctgtggaccgcgatgaagtcgtcgctccatttgtacgcgtgctgtcgtcgttccgcgatcgcgttcgtcagttggcacgctcgaatgcatcaggtgcagacctgctccaactcgctgataccatccgggacgtggagctggccgatttgggcgtggctctcgatgaccaggaaaatggccaggctctattcaagttcgtgcctgctgagcagctgcgcgcacagcgggccgaaaaggagcgcatgatcgcagaaaaagctgcgcggaaagctgcggctgctgaggctgcgcgag

SEQ ID NO: 5752 - protein, 114 aa, Homo sapiens
TREGDLSWGTVAAKDGAVDRDEVVAPFVRVLSSFRDRVRQLARSNASGADLLQLADTIRDVELADLGVALDDQENGQALFKFVPAEQLRAQRAEKERMIAEKAARKAAAAEAAR

SEQ ID NO: 5753 - DNA, 372 bp, Homo sapiens
acgcgtccggatgacgggcggccatcgtcaatacgcttgtcgatagcctctaccactttcacggtaagaccgcttttgttcagataatggctgttgtaagcatcactgtaacgggcatatacgaccgaagacggggcgatccagttcacatagctgccggtataggtctgcgggatcaggtccagcatggttaaatgtttaaaccagctgatatattccggtgcggcaccggaaatttttccgtccccgttcccgcccggcatacagttatttgtggttgtgcaattcgggataaactggttcggattcggggatattcgcccggcaaggcgctgtaagaatcgaaaaaagaagcaaaggcggcgtcaaaca

SEQ ID NO: 5754 - protein, 87 aa, Homo sapiens
MPGGNGDGKISGAAPEYISWFKHLTMLDLIPQTYTGSYVNWIAPSSVVYARYSDAYNSHYLNKSGLTVKVVEAIDKRIDDGRPSSGR

SEQ ID NO: 5755 - DNA, 531 bp, Homo sapiens
gcgtttgttgctatgcctggtggatacgggacttttgaagaaatcatggaatgtatcacgtggtcgcaactggggattcataataaaccaattatcttgttcaatatcgatgggttctatgacaaattattggagttcctcaaacactctattcaagaacggttcatcagtgtgaagaatggtgaaatcattcaagttgcctccactccgcaggaagttgttgataaaatagagaagtacgtcgttccagagggccgtttcaatttgaattggagcgacgaaggtcacgctcacgaggattgtgctaaataatagaaacgtaagtcatgtatctagtttaaacgatctgtatagataatgtggtgaaaaatccaaattttttaggagctgtctttctaagcccgaaggctggaaaaaatagtactgatggcaaagacatcatagctttaaagtccattgttctcaaaagaagctcaatagaccatgtcttctgaatcaggaaagcctattgctaagcctattaggaagctt

SEQ ID NO: 5756 - protein, 103 aa, Homo sapiens
AFVAMPGGYGTFEEIMECITWSQLGIHNKPIILFNIDGFYDKLLEFLKHSIQERFISVKNGEIIQVASTPQEVVDKIEKYVVPEGRFNLNWSDEGHAHEDCAK

SEQ ID NO: 5757 - DNA, 231 bp, Homo sapiens
agatctttaaggcatggaaatgagccttatgcaagctcctggcaatcagtatgtgagttctgtctccttggcaagatacagtctcttagaccctcagtctggggaaataatgctgatttctcctacgagttacgagaattacgctagaaaactctgtggcgcatacaggcgccctgtagcctgttggttagaagcactgaccctgaagtcaggtcgcccaggttggaattc

SEQ ID NO: 5758 - protein, 72 aa, Homo sapiens [sequence omitted]

SEQ ID NO: 5759 - DNA, 702 bp, Homo sapiens
gcgtacgaagaagagatcaagcacttgaaactagggctggagcaaagagaccatcaaattgcatctttgaccgtccagcaacagcggcaacagcaacagcagcaacaggtccagcagcatttacaacagcaacagcagcagctagccgctgcatctgcatctgttccagttgcgcaacaaccaccggctactacttcggccaccgccactccagcagcaaacacaactactggttcgccatcggccttcccagtacaagctagccgacctaatctggttggctcacagttgcctaccaccactttgcctgtggtgtcctcaaacgcccaacaacaactaccacaacagcaactgcaacagcagcaacttcaacaacagcaaccacctccccaggtttccgtggcaccattgagtaacacagccatcaacggatctcctacttctaaagagatcactactttaccctctgtcaaggcacctgaatctacgttgaaagaaactgaaccggaaaataataatacctcgaagataaatgacaccggatccgccaccacggccaccactaccaccgcaactgaaactgaaatcaaacctaaggaggaagacgccaccccggctagtttgcaccaggatcactacttagtcccttataatcaaagagcaaaccactctaaacctatcccacctttccttttggatcta

SEQ ID NO: 5760 - protein, 234 aa, Homo sapiens
AYEEEIKHLKLGLEQRDHQIASLTVQQQRQQQQQQQVQQHLQQQQQQLAAASASVPVAQQPPATTSATATPAANTTTGSPSAFPVQASRPNLVGSQLPTTTLPVVSSNAQQQLPQQQLQQQQLQQQQPPPQVSVAPLSNTAINGSPTSKEITTLPSVKAPESTLKETEPENNNTSKINDTGSATTATTTTATETEIKPKEEDATPASLHQDHYLVPYNQRANHSKPIPPFLLDL

SEQ ID NO: 5761 - DNA, 291 bp, Homo sapiens
ataaacgtaaacttgaaccttttgggttacaagatcattcggatcaaccacgggattggtagaaacgcagtgactttaaaggccaagcagaattttgagtccttcgaagataatacagcaataagggctcacaataatgattatgcagttttgcaatcgatagtacttccggagagtaacaggtttttcgtatatgttaacttagcatcaacagaagagactaagttagccacaaggtttaaccaaaacgagatcgagtttatgaaatgggccatagaacaattcatgatc

SEQ ID NO: 5762 - protein, 97 aa, Homo sapiens
INVNLNLLGYKIIRINHGIGRNAVTLKAKQNFESFEDNTAIRAHNNDYAVLQSIVLPESNRFFVYVNLASTEETKLATRFNQNEIEFMKWAIEQFMI

SEQ ID NO: 5763 - DNA, 439 bp, Homo sapiens
ccggacattgcttttcctggggagcgggtgtatgaggtggtgcggccccttgtaagactcttggacacacagagggatgggcttcagaactatgaggctctcctaggcctcaccaacctgtctgggcggagtgacaaactccggcagaagatctttaaggagagggccttgccagacatcgagaactacatgtttgagaatcatgatcagctgcggcaggcggccaccgagtgcatgtgcaacatggtgctccacaaggaggtgaggcaggggctcaggatggagacccgggcgtgatcaaggcacgagaggcaggccagggtcagggcctggggtgagatcgggagctcttatgatggcattaaggtagcattttgggcagaaaatccaggaatccctaaatatttcctagattatagccccctccctgtaggggccc

SEQ ID NO: 5764 - protein, 98 aa, Homo sapiens
PDIAFPGERVYEVVRPLVRLLDTQRDGLQNYEALLGLTNLSGRSDKLRQKIFKERALPDIENYMFENHDQLRQAATECMCNMVLHKEVRQGLRMETRA

SEQ ID NO: 5765 - DNA, 273 bp, Homo sapiens
  misc_feature (1)..(1): Wherein n may be a, c, g or t
  misc_feature (3)..(3): Wherein n may be a, c, g or t
  misc_feature (4)..(4): Wherein n may be a, c, g or t
  misc_feature (6)..(6): Wherein n may be a, c, g or t
  misc_feature (7)..(7): Wherein n may be a, c, g or t
  misc_feature (8)..(8): Wherein n may be a, c, g or t
  misc_feature (9)..(9): Wherein n may be a, c, g or t
  misc_feature (11)..(11): Wherein n may be a, c, g or t
  misc_feature (12)..(12): Wherein n may be a, c, g or t
  misc_feature (13)..(13): Wherein n may be a, c, g or t
  misc_feature (14)..(14): Wherein n may be a, c, g or t
ngnngnnnngnnnnccggtctgctcgggactaccagcagctgcgtgcgctggcccagcccggtcaccagttcgtggtcgtcggcggcggatatatcggtgccgagcttgctgcgggcctcgtccagcaaggctgccaggtcgcccctcgtcacccccgatccgacgctgggtggttcgcaattcccggcccagattgcgtctgagtaccagaagcttttcgccgatgctggggtgcacctcgtcactgggaagcgcgtctgttcggtgcgcac

SEQ ID NO: 5766 - protein, 67 aa, Homo sapiens
  misc_feature (1)..(1): Wherein Xaa may be any naturally occuring amino acid
  misc_feature (2)..(2): Wherein Xaa may be any naturally occuring amino acid
  misc_feature (3)..(3): Wherein Xaa may be any naturally occuring amino acid
  misc_feature (4)..(4): Wherein Xaa may be any naturally occuring amino acid
  misc_feature (5)..(5): Wherein Xaa may be any naturally occuring amino acid
XXXXXRSARDYQQLRALAQPGHQFVVVGGGYIGAELAAGLVQQGCQVAPRHPRSDAGWFAIPGPDCV

SEQ ID NO: 5767 - DNA, 238 bp, Homo sapiens
accggtatgtcgccgtatttagcgatcctcattgccgcgcagatgggtttcctcacagccgctgcggtcatcacagcggtcggacaccgagtggcaggaccgaccgcagcggtgctgttggtggcgtgctggggcgctgcgcctcgtgctgtcgttgaatcgatgggatacaccgagggctggttcatcgcccttgttgggctcgggctgcttgccatcctgtcgggacggtggatcc

SEQ ID NO: 5768 - protein, 77 aa, Homo sapiens
MSPYLAILIAAQMGFLTAAAVITAVGHRVAGPTAAVLLVACWGAAPRAVVESMGYTEGWFIALVGLGLLAILSGRWI

SEQ ID NO: 5769 - DNA, 297 bp, Homo sapiens
agcttagtatccctatctaaagtttctccacatttactttcatccacatcaagcaacggtaacacaatatcgtgtcccaatgttgccacaaattcgcaggaattggaaccaaacaatgatatttcaacgaagaaatctctttccaattctactttgagacattcctctgctaatagaaattctaattatggtgacaacaaaaggcctcttagaacaacagtgtcaaagatatttgattcaaaccctaatggagctcctttacggagatactctggggtaccggatcacgttaatcta

SEQ ID NO: 5770 - protein, 99 aa, Homo sapiens
SLVSLSKVSPHLLSSTSSNGNTISCPNVATNSQELEPNNDISTKKSLSNSTLRHSSANRNSNYGDNKRPLRTTVSKIFDSNPNGAPLRRYSGVPDHVNL

SEQ ID NO: 5771 - DNA, 372 bp, Homo sapiens
tgatcagaagagggctcaacaggcaaggggacctggtccttgcaaaaaactcggactgcagtacgggccgtgggatcggcctcgtgtgtggcctgcacccttttccccgtcagggaaggactgtttgtttgttttctgcatcaatctccatcacgcggcatgtcagccctgacagctcaggagggcctttttaacatctctttatctgacagcgttcatgcatcataagacagcaaacagaattagatcaaagtctacggggccgtgtcggctcggtgaggaaggcgagccagcttgtatcttcataagagaggtgacagttggtttgaactggcgttgggccgcagagggctggggagtgcagagaggact

SEQ ID NO: 5772 - protein, 51 aa, Homo sapiens [sequence omitted]

SEQ ID NO: 5773 - DNA, 222 bp, Homo sapiens
  misc_feature (58)..(58): Wherein n may be a, c, g or t
ccggtccctgtgctcgagcccagaacctcccctacgccctccccccaccccgcccccngtcctgggggtgggtcccgggcgctagggtccaaagcaccgggatacagccctgcgctttcccccagcgccagtccgggcgcgcacttccttcgcgggagccggtgaccgatgccctgtaccacgcccaggccgctcacgctgggggtagacacacgggccggc

SEQ ID NO: 5774 - protein, 54 aa, Homo sapiens
  misc_feature (20)..(20): Wherein Xaa may be any naturally occuring amino acid
PVPVLEPRTSPTPSPHPAPXPGGGSRALGSKAPGYSPALSPSASPGAHFLRGSR

SEQ ID NO: 5775 - DNA, 350 bp, Homo sapiens
  misc_feature (350)..(350): Wherein n may be a, c, g or t
gcgcgcgtggccaagctcgtggtgctggaccatcacaagagtgcggccgagaaactcagcggctaccaatgccaatgcggcgtggtgcatttcgatatgagcaagtccggcgcgcgtctggcctgggagtttttccaggccgacaagcccgtgcccggtctgattcgctacatcgaggaccgcgatatctggaaatgggaattccccgaaagcgcggcgtttctagcggctctggacatggagcccgtgcgcagctttgagcgctgggccgagattgcggccttcacgcccgagcaggaaaccgtctacatggcccgtggcggcgccatggacgagaaattccagaagcn

SEQ ID NO: 5776 - protein, 84 aa, Homo sapiens
MSKSGARLAWEFFQADKPVPGLIRYIEDRDIWKWEFPESAAFLAALDMEPVRSFERWAEIAAFTPEQETVYMARGGAMDEKFQK

SEQ ID NO: 5777 - DNA, 387 bp, Homo sapiens
cggccgccaagaacggctcgctccacgtcctcgtctcctgatggactgaacatgttcgtcgccgactggttacgctgcgtcacacgaggccatggcaggagacgaggcttcctgcggacgcgatgcgccggttacggttgatgcgcggttcatgcgcgaacgcaatgtggcacagcacagaacgtcctggcaaatcgtgcgatggccattctgttaataaccggagatatggccgcagaagtggatcggggacgatgtccaacgaagggggaaaaaagttctcttcacgtgcaccaccaacaagtcacaaactcaccagtgtccactgccttctcttcaaagcatcgcgttggatgctggatggagatcgttctcctggcggagatt

SEQ ID NO: 5778 - protein, 88 aa, Homo sapiens
MRRLRLMRGSCANAMWHSTERPGKSCDGHSVNNRRYGRRSGSGTMSNEGGKKFSSRAPPTSHKLTSVHCLLFKASRWMLDGDRSPGGD

SEQ ID NO: 5779 - DNA, 222 bp, Homo sapiens
  misc_feature (1)..(1): Wherein n may be a, c, g or t
  misc_feature (2)..(2): Wherein n may be a, c, g or t
  misc_feature (222)..(222): Wherein n may be a, c, g or t
nnacgcgtcggcgcggcgcgcgtgtcgttcctgccgcgccacggccgggggcatcggatcagccccgacgcgctcaacgcccgtgccaatatcgatgccctgaagcggctgggcgtcaccgacgtgctggcggtgtcgtcggtcggttcgctggtggaggagcggccgccgggcagcttcacgatcgtcgaccagttcatcgatcggacgaaggggcgcgtn

SEQ ID NO: 5780 - protein, 74 aa, Homo sapiens
  misc_feature (1)..(1): Wherein Xaa may be any naturally occuring amino acid
XRVGAARVSFLPRHGRGHRISPDALNARANIDALKRLGVTDVLAVSSVGSLVEERPPGSFTIVDQFIDRTKGRV

SEQ ID NO: 5781 - DNA, 406 bp, Homo sapiens
acgcgtgcgggggagagatcgatccactcgacgcgcagggcaggactgatactgcgctggcgaaccaggggaaggagctcccggacgtggagcgctacttcttcggctcgaaccagagcaacatccacggcaacacgctcaaggtctacaacaccaccggctacggcgagcacctggaggaggccatggatgcgtggatcgacgccaccggcgggctgctgcgcgtggagtacgtggaccaccgcgaccccgaagccgtgatgctggaacttggggacctgcctggaattactgcgggccgccagcaaggcacgcccggcaacaacccccgcgtgacgttaaatcagtcgttgtacgccaacccagcaaacgtccaccatgccagcatggtgatgacgatcgccca

SEQ ID NO: 5782 - protein, 73 aa, Homo sapiens
MDAWIDATGGLLRVEYVDHRDPEAVMLELGDLPGITAGRQQGTPGNNPRVTLNQSLYANPANVHHASMVMTIA

SEQ ID NO: 5783 - DNA, 396 bp, Homo sapiens
acgcgttcacgccctaacacactggctagcttcgtagcgactttcgtagcgacactgcgacgtgacatcacaccatgctagtcatcaaaacgatgacggaagctatcagctaacccactcccagaaccatgtcggcgaggctgctgacgcgcgtcatctgcaagacctttctgcgcggatttcttttgtttcctcgcaggttttcttgtcacctcttgggggccacgatcagaatgctggatcagcatgatgctgcctaaaaacatcatcacgaaaccgaccaatgacagcagggggaatccagcaattttcacaaaaaagccagcaaaaagaagcactacaccaacggcaataagagtccatccccaggccgttgcatgctgtgtgtgatgtgca

SEQ ID NO: 5784 - protein, 63 aa, Homo sapiens
MMFLGSIMLIQHSDRGPQEVTRKPARKQKKSAQKGLADDARQQPRRHGSGSGLADSFRHRFDD

SEQ ID NO: 5785 - DNA, 318 bp, Homo sapiens
agatctgcaatgggacagcgaaacggagattcttaacgcggtcaatcaaactaccatgatgatgaaccgagaaaagaaagtcaaccgctggaaggacgagttcaagctgaagaatctctttagcttcttgtaccgtaagaaagaagtaatctacacacctgttaagaaagagactaaacacaacgaagtacatcgcattgaccttatacccaacacctctgcagttcagtaaaaaaatactcaactgcattatttgatgagacagataagaatcgaacgattcttgtcaaagcaacaccgaattttatacgagctagc

SEQ ID NO: 5786 - protein, 83 aa, Homo sapiens
MQLSIFLLNCRGVGYKVNAMYFVVFSLFLNRCVDYFFLTVQEAKEILQLELVLPAVDFLFSVHHHGSLIDRVKNLRFAVPLQI

SEQ ID NO: 5787 - DNA, 368 bp, Homo sapiens
  misc_feature (1)..(1): Wherein n may be a, c, g or t
  misc_feature (368)..(368): Wherein n may be a, c, g or t
ntccggatggaaaagtaaagaccagcaatagccaataacgccattaacacatacccatatatgttgttaatgctgcccggtagttcggtggcattcttcatgggcaatagtttaatgggagataacgcgaataatggtagtgtcgttctagtgctcacagacctggtcacccaaatagaaggatttatatcctcccatatcctcatttttgtgctcgttggcctcggcattgtctttaccgttgccactcgaggtgtacagttccgcctcttcgggcacatgtggcacctcatgctcgattcacggaagcaaaagggcacctccctctccagctctcaagcattcacagtgggtctcgatcacgcggn

SEQ ID NO: 5788 - protein, 102 aa, Homo sapiens
MLLMLPGSSVAFFMGNSLMGDNANNGSVVLVLTDLVTQIEGFISSHILIFVLVGLGIVFTVATRGVQFRLFGHMWHLMLDSRKQKGTSLSSSQAFTVGLDHA

SEQ ID NO: 5789 - DNA, 461 bp, Homo sapiens
  misc_feature (1)..(1): Wherein n may be a, c, g or t
  misc_feature (308)..(308): Wherein n may be a, c, g or t
  misc_feature (382)..(382): Wherein n may be a, c, g or t
  misc_feature (383)..(383): Wherein n may be a, c, g or t
  misc_feature (435)..(435): Wherein n may be a, c, g or t
  misc_feature (449)..(449): Wherein n may be a, c, g or t
ncttatagtcaattggggaagacacacaaccctgagatgcaattattcatgcctgtcttcagagttccgcttttgtatcacggctgggtattgaatgatttctaagacatgcaggagagggagttgatccgctgtaaactttttctagcactgcatatttcacatacgcacacacccctcatggcaatatattcgatttttcctggtatcttctccccacccctgcatcctagcccttctccagaagtttgaggcttctcagatcttgaggggttgtcacttgaaaaaacaatgtcctcctcacccgncagtgaattactaagaaaaatattcaggatcatgaactgagctctatggtccagttatattggaaccagtggannagaatcccttgggatctccctaatccttcacattctacttcctgggcttggnctactgttcacganattaggatctct

SEQ ID NO: 5790 - protein, 79 aa, Homo sapiens
  misc_feature (12)..(12): Wherein Xaa may be any naturally occuring amino acid
MILNIFLSNSLXGEEDIVFSSDNPSRSEKPQTSGEGLGCRGGEKIPGKIEYIAMRGVCVCEICSARKSLQRINSLSCMS

SEQ ID NO: 5791 - DNA, 426 bp, Homo sapiens
gaattcaacaaggcaagcttatctcagattagttttacaaatacattgaactatgggtctggcttaggtttttcctctaattcacaacctcgactaccattgttagacaggctatcgtccacctctttatctaagagaccggagcgcccacaacaaagcctaccatcactaaggcatctgcaattattacccagtcctcttttacaagaaaacgcagcacgcttccctgatacatcaaaacgtacatctaattggaaaactgatcttacccattggtgtaaggatacaaactatcaagactatgttaaaatacgcgaagaagtggctcatttcaagccattaagtatacccaacttaactaataatcaaaataatgatagtttcaattacggcaagaaattggaatcgactaggtcgtccaaggtc

SEQ ID NO: 5792 - protein, 142 aa, Homo sapiens
EFNKASLSQISFTNTLNYGSGLGFSSNSQPRLPLLDRLSSTSLSKRPERPQQSLPSLRHLQLLPSPLLQENAARFPDTSKRTSNWKTDLTHWCKDTNYQDYVKIREEVAHFKPLSIPNLTNNQNNDSFNYGKKLESTRSSKV

SEQ ID NO: 5793 - DNA, 359 bp, Homo sapiens
acgcgtccggagcctgcgcgcaggccgacagtgacaaggctgcggcagcgaaaacggcgggaatagcgaggtgtaacttcttcacggactgcctcctggagcagacgatgatccaacggtggaaaacccgtggggcatgtgtcgccgatcgggccataaaactgtaaccccttcgtggagaaatcgacaccttaacggtcaaactggccccaagaagcgggagcatatcgcctcgaccttgggtggcgccaacaattcatagggcgagcgggtccatagagcgaaccgggcttcaggccacctgattgaccagcgcttcagccgcgtcaacgattgataaggtttcggcctgccaattg

SEQ ID NO: 5794 - protein, 75 aa, Homo sapiens
MLPLLGASLTVKVSISPRRGYSFMARSATHAPRVFHRWIIVCSRRQSVKKLHLAIPAVFAAAALSLSACAQAPDA

SEQ ID NO: 5795 - DNA, 552 bp, Homo sapiens
  misc_feature (1)..(1): Wherein n may be a, c, g or t
  misc_feature (2)..(2): Wherein n may be a, c, g or t
  misc_feature (376)..(376): Wherein n may be a, c, g or t
  misc_feature (377)..(377): Wherein n may be a, c, g or t
nnacgcgttccagctgggggagctctagctgtagatagacatgatttcgctggatatatcactgatacgctacgtaaccatccaaatgtaacagtattaaataaggaagttaatcatattcctgagggatatacaattatagctacaggtcctttaactactgaacatttagcacaagaaatcgttgatattacaggcaaagatcaactttacttttatgatgcagcagcgccaattgtagaaaaagatacaatagatatgaataaagtttacttaaaatctcgctatgataaaggtgaagcggcatatcttaattgtcctatgaccgaggaagaatttaatagattttatgatgctgtattagaggggaggtggnnccctgttaatgaatttgaaaaagaaaaatattttgaagggtgtatgcctttcgaagtaatggctgaaagaggtcgtaaaacattattatttggtccaatgaaacctgtaggactcgaagatcctaaaacaggtgaacgcccatatgcggttgtacaattgagacaagatgatgca

SEQ ID NO: 5796 - protein, 184 aa, Homo sapiens
  misc_feature (1)..(1): Wherein Xaa may be any naturally occuring amino acid
  misc_feature (126)..(126): Wherein Xaa may be any naturally occuring amino acid
XRVPAGGALAVDRHDFAGYITDTLRNHPNVTVLNKEVNHIPEGYTIIATGPLTTEHLAQEIVDITGKDQLYFYDAAAPIVEKDTIDMNKVYLKSRYDKGEAAYLNCPMTEEEFNRFYDAVLEGRWXPVNEFEKEKYFEGCMPFEVMAERGRKTLLFGPMKPVGLEDPKTGERPYAVVQLRQDDA

SEQ ID NO: 5797 - DNA, 446 bp, Homo sapiens
  misc_feature (431)..(431): Wherein n may be a, c, g or t
  misc_feature (436)..(436): Wherein n may be a, c, g or t
  misc_feature (437)..(437): Wherein n may be a, c, g or t
  misc_feature (446)..(446): Wherein n may be a, c, g or t
ggtacctgctatacaaatggctctaaggtaggtgctgacagggagggggcatcatggataggtgttgggcaagaaactaaccctcaaaagatcctaaaaatctatgaagctgatgaaacattcccacagataattatacaactgagtggtaattgttaagagccttcagagaagtttagaaaaagtattgagaaaattttaagagagggatgacttagagatggaaggatcaaagaaagcttatggaagaggaggcagttgaccttggcgttaatcaatgggccatatttggatatgtagaaactcaaaacaaagacatttcaggagaagggaatcttaacaaaagcagaagatatttacgtctgggatggtgttatttggttgtgctaaatggaaaaggagcactagaacatatggttgaaaagatagtntgganntctcttacn

SEQ ID NO: 5798 - protein, 68 aa, Homo sapiens
  misc_feature (65)..(65): Wherein Xaa may be any naturally occuring amino acid
MEEEAVDLGVNQWAIFGYVETQNKDISGEGNLNKSRRYLRLGWCYLVVLNGKGALEHMVEKIVWXSLT

SEQ ID NO: 5799 - DNA, 323 bp, Homo sapiens
gcgtccggcgatgtgttcctgttccccagcctgaccgaaaccttcggcaatgtggtactggaagccatggcctcgggcttgggggtggtggcctacgaccaggccgccgcgacccagcatattcgccacggctataacggcgtgctggcgatgcctggggatgaggatgcgttttgcgatgccgccaactggctgctggaggatgccgagagcttgcgccgcatgcgcttgaatgcccgccagcacgccagccgccagggctggccggcaattatcgagcaattcgagcgccacctgcgcggggtgtgcggcgagcaaccggt

SEQ ID NO: 5800 - protein, 107 aa, Homo sapiens
ASGDVFLFPSLTETFGNVVLEAMASGLGVVAYDQAAATQHIRHGYNGVLAMPGDEDAFCDAANWLLEDAESLRRMRLNARQHASRQGWPAIIEQFERHLRGVCGEQP

SEQ ID NO: 5801 - DNA, 455 bp, Homo sapiens
gaattcgctagtgaatacaaagtatatatctgaacctgcaccattatactattttggagtatgtatatatacacatatggatatgtttatatatgtgtttttcaaggtaattgtttagtaaacttgatataaatggattaaattattattaacaggtccttttactgtttagcatcttgatttaaagaaatagctcatgtaggatgactctccaggcagaacaaaacccacctgagtatggaagcaaattatagcacttcttttcctaagcatggaagtccattacaacacttctttcaggatgttgttttaacaaagcacataaacatgtctggatggatcacaagtgttagaaccactgtgattcctctttcaatcagatcctgtcagaattattattatttttgtttgagacaaggtcttgttgtgttgcctggagtacagtggtgagatct

SEQ ID NO: 5802 - protein, 70 aa, Homo sapiens
MEANYSTSFPKHGSPLQHFFQDVVLTKHINMSGWITSVRTTVIPLSIRSCQNYYYFCLRQGLVVLPGVQW

SEQ ID NO: 5803 - DNA, 336 bp, Homo sapiens
  misc_feature (1)..(1): Wherein n may be a, c, g or t
ntggcagccctggaggagccgatggtggacctggacggcgagctgcctttcgtgcggcccctgccccacattgccgtgctccaggacgagctgccgcaactcttccaggatgacgacgtcggggccgatgaggaagaggcagagttgcggggcgaacacacgctcacagagaagtttgtctgcctggatgactcctttggccatgactgcagcttgacctgtgatgactgcaggaacggagggacctgcctcctgggcctggatggctgggattgccccgagggctggactgggctcatctgcaatgagacttggtcctcgggctgcatggatatt

SEQ ID NO: 5804 - protein, 112 aa, Homo sapiens
  misc_feature (1)..(1): Wherein Xaa may be any naturally occuring amino acid
XAALEEPMVDLDGELPFVRPLPHIAVLQDELPQLFQDDDVGADEEEAELRGEHTLTEKFVCLDDSFGHDCSLTCDDCRNGGTCLLGLDGWDCPEGWTGLICNETWSSGCMDI

SEQ ID NO: 5805 - DNA, 426 bp, Homo sapiens
  misc_feature (1)..(1): Wherein n may be a, c, g or t
ntcatgaaaattaaaaaatggcttggtgtagcagcccttgctacagtcgcaggtttggctcttgcagcttgcggaaactcagaaaagaaagcagacaatgcaacaactatcaaaatcgcaactgttaaccgtagcggttctgaagaaaaacgttgggacaaaatccaagaattggttaaaaaagacggtatcactttggaatttacggagttcacaggctactcacaaccaaacaaggcaactgctgatggcgaagtagatttgaacgctttccaacactataacttcttgaacaactggaacaaagaaaacgggaaagaccttgtagcgattgcagatacttacatctctccaatccgtctttactcaggtttgaatggaagtgacaacaagtacactaaagtagaggctggagtgtgctcgcga

SEQ ID NO: 5806 - protein, 142 aa, Homo sapiens
  misc_feature (1)..(1): Wherein Xaa may be any naturally occuring amino acid
XMKIKKWLGVAALATVAGLALAACGNSEKKADNATTIKIATVNRSGSEEKRWDKIQELVKKDGITLEFTEFTGYSQPNKATADGEVDLNAFQHYNFLNNWNKENGKDLVAIADTYISPIRLYSGLNGSDNKYTKVEAGVCSR

SEQ ID NO: 5807 - DNA, 420 bp, Homo sapiens
ctgcagtgttcaatacagtaggcagtttatctttctttctccccttctacccttaactctttccttaattgacaccatcctctcttgggtttccttctatctctctgccaaatcctcctcacactccttgtgaacccctatctccttttgacttctaattgttgcgtttccccaggatttagtcctgagctctcttttcttccttattgccctctttctaggggatctcttcagttcccatgactttaaattccatttatatgcccccgaataccaactttacacccaaaacctctcctcagagttctggtttgcaggttcctgctagctatctgctctcagacatctcccagcatctcacaagcaacaaggcagtcccaaaccacacaatcaaggcaacccaccactcttaactcccaa

SEQ ID NO: 5808 - protein, 57 aa, Homo sapiens
MTLNSIYMPPNTNFTPKTSPQSSGLQVPASYLLSDISQHLTSNKAVPNHTIKATHHS

SEQ ID NO: 5809 - DNA, 635 bp, Homo sapiens
  misc_feature (1)..(1): Wherein n may be a, c, g or t
  misc_feature (2)..(2): Wherein n may be a, c, g or t
nngccggcggctgcgttgggatacgacgtcgctgcgattgggcgtgagtatctttggtacctcatggaggagcgtggcgcgtatgcggaggccgccgcgctcatgccgctgctgctccggaccgaccgaggcgcgtgggacacgtttgtgtgctgctacctcgagcggcaccaaagggatgcgatactcccgcacattccgacgcaggacccccagctgagtgagatggtgtacgatctcgtgctggtgcatctgctgcagcacgatcccacgcagctgttggcgacgctccgcgcatggccgagtcacatctactcgaagcaggcggtggctgcggcgatcggcgatcacgcacgaaccagccgcacgctgctcgagtgcctcgcacagctgtacatggccgcacatcagcccggcaaggctctgacatactacatgcgcctgcgtgatccatgcgtgtttgatctcattcgcgagtacgatctgctgatcgatgtgcagcaccacatcggcacgctcgtcgagctcgatcaggaatgcgccggctccactgagccgcgctccagcgcgcttatgccgctgctcgtgccatatacccactcgattcccatccagcgcgccatggcgcagctcga

SEQ ID NO: 5810 - protein, 211 aa, Homo sapiens
  misc_feature (1)..(1): Wherein Xaa may be any naturally occuring amino acid
XPAAALGYDVAAIGREYLWYLMEERGAYAEAAALMPLLLRTDRGAWDTFVCCYLERHQRDAILPHIPTQDPQLSEMVYDLVLVHLLQHDPTQLLATLRAWPSHIYSKQAVAAAIGDHARTSRTLLECLAQLYMAAHQPGKALTYYMRLRDPCVFDLIREYDLLIDVQHHIGTLVELDQECAGSTEPRSSALMPLLVPYTHSIPIQRAMAQL

SEQ ID NO: 5811 - DNA, 321 bp, Homo sapiens
cgagtttggcagagatcaatttctcttttgagcccacaagcggccaagacggagagtaatgtcgtaactaaggaaaggacatatatcgagaacttaagcaaggatattgcgacttcccgtttcaggctagtagacgaaaatggtaaaattgcatctatcactgttcaaccagatattccaatttgtatcaaaaaggattgcctagtttccattcacaatttgaaccatttatccctttcctataaatggctgaatttttggtcaaacctgattaaatttcgttcattcaaatcttcattgtttcatagaattattggatcc

SEQ ID NO: 5812 - protein, 107 aa, Homo sapiens
RVWQRSISLLSPQAAKTESNVVTKERTYIENLSKDIATSRFRLVDENGKIASITVQPDIPICIKKDCLVSIHNLNHLSLSYKWLNFWSNLIKFRSFKSSLFHRIIGS

SEQ ID NO: 5813 - DNA, 360 bp, Homo sapiens
  misc_feature (1)..(1): Wherein n may be a, c, g or t
nacgcgttatttgcaaggcaactggtcaaagactatgtcgatgcactacaaaaattactggcacaaccatttaaagtacaagaaaaagaaaccgcatttaatttttgttttggcattacattatttcccgcacaagaaacgacagcagaagatattttacgccaatctgcaatggcaatgaaagctgcccaagacaataatattaaccatattaatttcttttctaagtccatagagcaaaaaatacaacgaaacactggtttacaaagtgatattcgtcatgcgttagcgactaatgagttttcattgtttttccagcctcgtgttgatgctcaaggaaacttagctccagcagaagct

SEQ ID NO: 5814 - protein, 120 aa, Homo sapiens
  misc_feature (1)..(1): Wherein Xaa may be any naturally occuring amino acid
XALFARQLVKDYVDALQKLLAQPFKVQEKETAFNFCFGITLFPAQETTAEDILRQSAMAMKAAQDNNINHINFFSKSIEQKIQRNTGLQSDIRHALATNEFSLFFQPRVDAQGNLAPAEA

SEQ ID NO: 5815 - DNA, 340 bp, Homo sapiens
  misc_feature (340)..(340): Wherein n may be a, c, g or t
aagcttagcaaccttggcagatgctctgcttggccttacctggctcatttacctatccccgaacaaactgctgtggccaggtgttgggatgttctgattggcagcctagccctgggatgaatgggggagacgggttaatgactgtcctaccagtagcaagtggaatggaagactcctccaaggaaccctgagagggggtggggaaagagtgctacgtagacggggtgttaagtcataccgtttactccaaagctccacacggactcactgatggtcagaggcaagattcagaggtctggaggggccacccaggtgagcaagatggaggtagaatgactgn

SEQ ID NO: 5816 - protein, 56 aa, Homo sapiens [sequence omitted]

SEQ ID NO: 5817 - DNA, 197 bp, Homo sapiens
acgcgttacacccgcgcaacagtgacacatcagcaaagcatcggccgaaaattgccatgcgggaaaccaattcgaccacgcacgctcccgcgatcgagacgatgtcacgctcgacgtggaatgcagctaaaggtctgacgtatcgtccgcccaacatcgagcgggttcaattccgaccctcccacattggtgtcgac

SEQ ID NO: 5818 - protein, 52 aa, Homo sapiens
MLGGRYVRPLAAFHVERDIVSIAGACVVELVSRMAIFGRCFADVSLLRGCNA

SEQ ID NO: 5819 - DNA, 270 bp, Homo sapiens
  misc_feature (262)..(262): Wherein n may be a, c, g or t
  misc_feature (263)..(263): Wherein n may be a, c, g or t
  misc_feature (264)..(264): Wherein n may be a, c, g or t
  misc_feature (265)..(265): Wherein n may be a, c, g or t
  misc_feature (266)..(266): Wherein n may be a, c, g or t
  misc_feature (267)..(267): Wherein n may be a, c, g or t
  misc_feature (268)..(268): Wherein n may be a, c, g or t
  misc_feature (269)..(269): Wherein n may be a, c, g or t
  misc_feature (270)..(270): Wherein n may be a, c, g or t
acgcgtgggcagcaccaccgtgctttccagggagctggcttggtgagtgggccccactctcccctgctgcatgaagaacggcaccagcctccagcagcagccgcccaggagctctcgtgcatccactctggtcctccggtcccggctgcgcctcttgcaccaggctggggcagggattaccagccgcacgcaggctgcgggaaccccctttgtctggctttcggcggagtcggcagagttccttccttctgggctaatgccnnnnnnnnn

SEQ ID NO: 5820 - protein, 66 aa, Homo sapiens
  misc_feature (65)..(65): Wherein Xaa may be any naturally occuring amino acid
  misc_feature (66)..(66): Wherein Xaa may be any naturally occuring amino acid
MKNGTSLQQQPPRSSRASTLVLRSRLRLLHQAGAGITSRTQAAGTPFVWLSAESAEFLPSGLMPXX

SEQ ID NO: 5821 - DNA, 233 bp, Homo sapiens
  misc_feature (22)..(22): Wherein n may be a, c, g or t
  misc_feature (37)..(37): Wherein n may be a, c, g or t
  misc_feature (233)..(233): Wherein n may be a, c, g or t
tgtacaggtgtatatgaagcanaaatgaattcatgtntagactcgggtaccattcccaaggtatctcatcatgaatatgcaagtattccaaaatctgaaaaaaatctgacatcgaaaacacttttggtcctaagcattttggataatggatattcaacctgtagtattaggaagtgaggcctttaagacatgggtaagtcgtaagatctctttcctcatccgtgggattaagn

SEQ ID NO: 5822 - protein, 50 aa, Homo sapiens
  misc_feature (5)..(5): Wherein Xaa may be any naturally occuring amino acid
MNSCXDSGTIPKVSHHEYASIPKSEKNLTSKTLLVLSILDNGYSTCSIRK

SEQ ID NO: 5823 - DNA, 278 bp, Homo sapiens
  misc_feature (265)..(265): Wherein n may be a, c, g or t
  misc_feature (269)..(269): Wherein n may be a, c, g or t
  misc_feature (270)..(270): Wherein n may be a, c, g or t
  misc_feature (273)..(273): Wherein n may be a, c, g or t
  misc_feature (275)..(275): Wherein n may be a, c, g or t
  misc_feature (276)..(276): Wherein n may be a, c, g or t
  misc_feature (277)..(277): Wherein n may be a, c, g or t
  misc_feature (278)..(278): Wherein n may be a, c, g or t
gcagttggcggcgtagctcttgcagatgcactgtgtgatcgtccttttgacctcacccgtatggtgcaaatttcctccgaatttgaaggtcatccggataattcctcggcagctgtcctaggcggcatggtggtgtcctgggcggatgaaccaggtttcgcgaacacgtcgtatcacgctgttcgtcttgatgtccatcccgatattcgcgctaccgcgctggtgccgtattcgcggtcgtcaacagaggaaacgcgagcggtcncccnnccncnnnn

SEQ ID NO: 5824 - protein, 92 aa, Homo sapiens
  misc_feature (89)..(89): Wherein Xaa may be any naturally occuring amino acid
  misc_feature (90)..(90): Wherein Xaa may be any naturally occuring amino acid
  misc_feature (92)..(92): Wherein Xaa may be any naturally occuring amino acid
AVGGVALADALCDRPFDLTRMVQISSEFEGHPDNSSAAVLGGMVVSWADEPGFANTSYHAVRLDVHPDIRATALVPYSRSSTEETRAVXXPX

SEQ ID NO: 5825 - DNA, 392 bp, Homo sapiens
ggatcctggtgttaatctattgtaactatctctttctcctccagcttctaagggcagctctgtggaacccaagcaatgttcagatcagtttctgcataattcctttttgtggtaaaatataaataacataaaagttaccattttaaccatttgtaaagcagcccagtggccataagtacatttacactgctctgcaaccaacacaccatccatctccagaactttttcatcctctccaaactgaaactttgtgcccgctaaacaacagctccccattcctctggcgcccactccaggcaaccaccattctgctttttgtatctatgaattttactatccctaggtacctcatgtaaatggaattgtataatagttatccttttgtgactagt

SEQ ID NO: 5826 - protein, 63 aa, Homo sapiens
MGSCCLAGTKFQFGEDEKVLEMDGVLVAEQCKCTYGHWAALQMVKMVTFMLFIFYHKKELCRN

SEQ ID NO: 5827 - DNA, 368 bp, Homo sapiens
  misc_feature (360)..(360): Wherein n may be a, c, g or t
cggccgaaaccccagcccccgcagcccccgcagccgatcggtcctcaagctacagctcccctctctgggagtcccgcttttgaattcccggggatgtcccgctgcggtccgatgacctcccagagcagcggaggtcaggggagctagcagaggcggggacgtcccttgggagtgaggggactgacaggggcggcctcgtaaccctgcgtgggatggaaggtcagagtgggttcctcggtggggggcaacagcgggggctctccggcaattgtccccgaccctccgtcctggggagggcaggatcagcgcgcgggctgctttgcatctctttgcattctagtgatgtttggtccagtcctnggcccggc

SEQ ID NO: 5828 - protein, 52 aa, Homo sapiens
  misc_feature (50)..(50): Wherein Xaa may be any naturally occuring amino acid
MEGQSGFLGGGQQRGLSGNCPRPSVLGRAGSARGLLCISLHSSDVWSSPXPG

SEQ ID NO: 5829 - DNA, 195 bp, Homo sapiens
ccggatttcgcactccctttcgtgttggcttgccaatcaaggaatgctaaaatgacgaccctggcaatgcaatgcctacagggactgtcaaccgttccatctattcctcgaagccggctgtctgaaattttggatgccttcattgaggctactcatctcgcgatggagattcaattaaaagttttacaggtggta

SEQ ID NO: 5830 - protein, 65 aa, Homo sapiens
PDFALPFVLACQSRNAKMTTLAMQCLQGLSTVPSIPRSRLSEILDAFIEATHLAMEIQLKVLQVV

SEQ ID NO: 5831 - DNA, 400 bp, Homo sapiens
  misc_feature (212)..(212): Wherein n may be a, c, g or t
  misc_feature (244)..(244): Wherein n may be a, c, g or t
  misc_feature (310)..(310): Wherein n may be a, c, g or t
  misc_feature (366)..(366): Wherein n may be a, c, g or t
  misc_feature (367)..(367): Wherein n may be a, c, g or t
  misc_feature (384)..(384): Wherein n may be a, c, g or t
  misc_feature (387)..(387): Wherein n may be a, c, g or t
  misc_feature (397)..(397): Wherein n may be a, c, g or t
tctagaacttgttggagaggttcttgttgatccttttcacaccccatgaagacttcatgaatgtcgaagggctcctgttcagtcttgttttggatctaggcagaggctgtccctttagtcctgtaatgagaccagagctgtctcaacttgcagagaggtggttcctctgtaagctggaggttcctgggcctgtctcctcacccatgttgtanagtctgcgagccttgtcctgcccatcagtganatggaagcctttttacaggttttagcagctcctttgtccctgtagtcttcagtgaagagcttgtanagtgactaaagtgacaccaaacacttgtgtgtcccactgctggtctgccctttgtnntttgttgggttagcttngtnatgatcgtcngac

SEQ ID NO: 5832 - protein, 70 aa, Homo sapiens
  misc_feature (52)..(52): Wherein Xaa may be any naturally occuring amino acid
  misc_feature (63)..(63): Wherein Xaa may be any naturally occuring amino acid
MNVEGLLFSLVLDLGRGCPFSPVMRPELSQLAERWFLCKLEVPGPVSSPMLXSLRALSCPSVXWKPFYRF

SEQ ID NO: 5833 - DNA, 324 bp, Homo sapiens
  misc_feature (121)..(121): Wherein n may be a, c, g or t
  misc_feature (122)..(122): Wherein n may be a, c, g or t
ggcgccagcctcagtactggccagttgaccgcactggtcaaccaggaccagggcgtggtcatcgacttgcgcccgagcaaagactttgccgccggtcatatcgtcggcgccctgaacattnnccccaaggacaaacggatggctcgcgtcggtgaactggagaagcacaaggccaagaccctgattctggtcgacgcccagggccagcactccgggactcacgcccgcgagctgctcaagtccggtttcactgccgccaagctgtccggcggtatttccagctggaaagccgacaatctgccgctggtgaagtgatatgagcca

SEQ ID NO: 5834 - protein, 104 aa, Homo sapiens
  misc_feature (41)..(41): Wherein Xaa may be any naturally occuring amino acid
GASLSTGQLTALVNQDQGVVIDLRPSKDFAAGHIVGALNIXPKDKRMARVGELEKHKAKTLILVDAQGQHSGTHARELLKSGFTAAKLSGGISSWKADNLPLVK

SEQ ID NO: 5835 - DNA, 376 bp, Homo sapiens
  misc_feature (1)..(1): Wherein n may be a, c, g or t
ncctatctccccctacccctttgggtgattactggaagatatcccccttcacaacctttacccttcaggtcacccccttgcccctgtgggtcattcctggaagataccatctctctataccacccatcttccccccgcacccacccgggtggctcattcctggaagataccatcctgctacacctttctaaaccctctgggtcatttcgggatgagaccacctcctccacaaaacatctacccttctctgtgtccccacagtgcctgtgtcacatccctgagaagtaacatgccctccccctacaaacacagtatccacctgccctgtctccccccttggccttgtgggtcatcctggaagatactatccccaccg

SEQ ID NO: 5836 - protein, 56 aa, Homo sapiens [sequence omitted]

SEQ ID NO: 5837 - DNA, 323 bp, Homo sapiens
  misc_feature (1)..(1): Wherein n may be a, c, g or t
  misc_feature (100)..(100): Wherein n may be a, c, g or t
  misc_feature (323)..(323): Wherein n may be a, c, g or t
nggtacccctccaccccactgctcacccagccctcctcgccgcacccctcaccccactgctcacccagccctcctcgccacactgctgaccccactgctncacccagccctcctcgccgcactcctgaccccactgctcacccagccctcctcgctgcacccctgacccccacacggggcacccccaggtgatgtgttggggcccgtcccaccccacctaggaggcagtggtttgggacacatgtgctgccactgcccccagcatcccctcctgctcccactcccaccctgctctgcctgcccttggcctgggcgtctctacn

SEQ ID NO: 5838 - protein, 63 aa, Homo sapiens
  misc_feature (1)..(1): Wherein Xaa may be any naturally occuring amino acid
  misc_feature (34)..(34): Wherein Xaa may be any naturally occuring amino acid
XYPSTPLLTQPSSPHPSPHCSPSPPRHTADPTAXPSPPRRTPDPTAHPALLAAPLTPTRGTPR

SEQ ID NO: 5839 - DNA, 393 bp, Homo sapiens
  misc_feature (1)..(1): Wherein n may be a, c, g or t
  misc_feature (2)..(2): Wherein n may be a, c, g or t
nnaaattttcaagtgggagataatgctcccatatatggtaaggcctgatttgggccttttgcgtcaatgtgcacaagctggggaatgctgatggcttactcatatactgagaaaaaacgtatccgtaaggatttcggtaaactgccgcccgttttggatgtgccatacttgctggcaatacagcttgagtcctaccgtaattttctgcaagaaggcaaaagccttgcagagcgtggggaattaggtctgcatggggcctttaaatctgtctttccaatggttagcttttctggcagcgcggcgcttgaatacgtcgattaccgcttaggcaaaccagtatttgatgttaaagagtgtcagttgcgtggcgttacttacgcagcacctctacgc

SEQ ID NO: 5840 - protein, 101 aa, Homo sapiens
MAYSYTEKKRIRKDFGKLPPVLDVPYLLAIQLESYRNFLQEGKSLAERGELGLHGAFKSVFPMVSFSGSAALEYVDYRLGKPVFDVKECQLRGVTYAAPLR

SEQ ID NO: 5841 - DNA, 231 bp, Homo sapiens
  misc_feature (1)..(1): Wherein n may be a, c, g or t
nccagctgcagctccacatggcggccggcgaggctccgcgaccctgcggaaagaaggaacaggtggtcagctcgcgtcccgtcccaaagccctggcccagaagtgctgcaggtacaggggtgccttctcctggtgcagtaatcgctgcagaccacagagcgaggctgcctttggtgcatttctgtgaaagtgaagttgagcgttgaaaaatggccgtctcgggtcgggacc

SEQ ID NO: 5842 - protein, 62 aa, Homo sapiens
MAAGEAPRPCGKKEQVVSSRPVPKPWPRSAAGTGVPSPGAVIAADHRARLPLVHFCESEVER

SEQ ID NO: 5843 - DNA, 330 bp, Homo sapiens
gtcgacatccgtcacccggatgccgccgaagatgagccgctggaaatcgctggcatcgacgtgcaaacgctgccgttctacgcattgaacgcgcgtttcaaggaactggataacagccgtcagtacctgctgtattgcgacaaaggcgtgatgagtcgcctgcatgcccaccatttgctcagtgaggggcatgccaatgtgcgcgtttatcgaccgagctaagagcccggggctgtttgcctgtggcctgcgtcaccggccccccgactctgccgtcaagctgtaacggcaaggcctgactctactgttaatcgctgccacgacctgtca

SEQ ID NO: 5844 - protein, 73 aa, Homo sapiens
VDIRHPDAAEDEPLEIAGIDVQTLPFYALNARFKELDNSRQYLLYCDKGVMSRLHAHHLLSEGHANVRVYRPS

SEQ ID NO: 5845 - DNA, 288 bp, Homo sapiens
  misc_feature (1)..(1): Wherein n may be a, c, g or t
ngagactctcttaaaaaaaacccacgagggcttaaggacagcagagcaaattaagctccatttatgggaaactgttttaattttttttttttttttttttttttgggaaaaggggggcccccccctttggccgggggggggaggcaggggggaaaaccgggccccccgcacccccccccccccgggcgccaaagggattttcctctccccccccccccccaaaaggccgggcccccagggggggcccccccccccccccccatccccccttttttatgaaaaacgggg

SEQ ID NO: 5846 - protein, 71 aa, Homo sapiens
MGNCFNFFFFFFFLGKGGPPPLAGGGRQGGKPGPPHPPPPGRQRDFPLPPPPQKAGPPGGAPPPPPIPPFL

SEQ ID NO: 5847 - DNA, 404 bp, Homo sapiens
aaatttctcccttatgcggataacaaaagagctagccatcctgaaaacttgccacatcgtaattttcagagatggtcagtctctcagaagaatccttgcaattagctatcagaacctgtccagttcggcatgtgagaaggtaatccagggcatcatcgagaggaaggggcatcaggattcatggacaacaaaaaaatctctgattcctccaaaaggcgtgtgggtcactgagctccggaagaggctgcctccaccaggtctcatttcacgttgggaggttacagcgtgggtcttgtttccttggctttcccccatctaatcccaaatccaaagtcacaacctcttaacaatggggtgacaatctcatatagagctgcaatcaacagccattcttgccaagctga

SEQ ID NO: 5848 - protein, 101 aa, Homo sapiens
MRITKELAILKTCHIVIFRDGQSLRRILAISYQNLSSSACEKVIQGIIERKGHQDSWTTKKSLIPPKGVWVTELRKRLPPPGLISRWEVTAWVLFPWLSPI

SEQ ID NO: 5849 - DNA, 549 bp, Homo sapiens
  misc_feature (1)..(1): Wherein n may be a, c, g or t
  misc_feature (2)..(2): Wherein n may be a, c, g or t
  misc_feature (397)..(397): Wherein n may be a, c, g or t
nnacctcccccacccaggacccccagcctttggacgtccacgcccatcagacctgtgccagtctgactcacttcactgctgtggtcctcggatccccgaacactcctccttgctgtggtcagctccggctggcttgctgttcccagcacagccctgtcatcattccatcatttgtagcatccccaccttcaaatgctggcttctctgtgtcttgacttccccccctccaagactctgtcctctcccctcaagccactctgcaggctgaccaattctgctgctcattgcttcatttgatcgtttccacttcagccattgcctcccttctgtccactcaccctcctgcagccgctccagcccctacagcctcagcctgtcaccagcacttcccgtcccnttgaacctgcctgtccctaccgcccctccgctcctgcttctcttctctcctcccctagcttggagacactcattgcccctcccccatgtcacacgcacctggtaaaatgccagccctatggaaagttccgaccccttctacccattttgccc

SEQ ID NO: 5850 - protein, 84 aa, Homo sapiens
  misc_feature (34)..(34): Wherein Xaa may be any naturally occuring amino acid
SFPLQPLPPFCPLTLLQPLQPLQPQPVTSTSRPXEPACPYRPSAPASLLSSPSLETLIAPPPCHTHLVKCQPYGKFRPLLPILP

SEQ ID NO: 5851 - DNA, 309 bp, Homo sapiens
ccatggcctcagaggtgggggagatccgcacccgccaagcctcacccatctccatgacgagctcgtcatctacccggcgctggttcgtcgcaccgatcggtacatcgaggtcggcgccgtcaatgcgtagtgaaaccccgtcggcgaggtgttcgatggctagctgggggctagccatcaatgccttatcgcgggcaaggtcgtcggccttgacggctttgcttagcgcggatagtgcctcgctggtcactttctcggtgtcaaggcgttgctgctcggccgttatgcgctgcttgagttcatggatcc

SEQ ID NO: 5852 - protein, 102 aa, Homo sapiens
MASEVGEIRTRQASPISMTSSSSTRRWFVAPIGTSRSAPSMRSETPSARCSMASWGLAINALSRARSSALTALLSADSASLVTFSVSRRCCSAVMRCLSSWI

SEQ ID NO: 5853 - DNA, 400 bp, Homo sapiens
tgatcaaggagggaggcaggggagagagagggtgagagagagagaagagtgtaaaggagctgcaagtccaaaggccgccaaagttttaaaaagtcctaagaggaggccatgagcaactatatgccaaacaaatttgcaattgtagctgaaatgaataaattcatggaaaaagataacacacaaaccaaccaaagaagaaaaagaaaacctaagtataaataccaccttgaataaatgaagccagagtgtgaccataaggaggaaaaagttaaagaacagaaggtccaaccttacacaactcttcaagtcagcataaaaataggcttaggctgttgtgtttttttttccattcatttaggaggctagcataacttcagtacagaaattagataaggacagc

SEQ ID NO: 5854 - protein, 83 aa, Homo sapiens [sequence omitted]

SEQ ID NO: 5855 - DNA, 288 bp, Homo sapiens
  misc_feature (1)..(1): Wherein n may be a, c, g or t
  misc_feature (128)..(128): Wherein n may be a, c, g or t
  misc_feature (219)..(219): Wherein n may be a, c, g or t
  misc_feature (263)..(263): Wherein n may be a, c, g or t
  misc_feature (282)..(282): Wherein n may be a, c, g or t
nggcgcagggactggcacatctgttccgctctgctcccggcatgtcacaggggaggcacacaccagacgaaccaaaccagcaacagagcggagagcctgcagggacgcagctggggactaagcagatnggagaccggcagtcctggggctcgggagacaggggagacagagaaggaagaggggtcccatcagaggactccctgcagtgctccatgaatntctcccgaattccatccgtaagtgcctttcaatccatgccactnagggcatttctgctccttntaacta

SEQ ID NO: 5856 - protein, 82 aa, Homo sapiens
  misc_feature (29)..(29): Wherein Xaa may be any naturally occuring amino acid
  misc_feature (60)..(60): Wherein Xaa may be any naturally occuring amino acid
  misc_feature (81)..(81): Wherein Xaa may be any naturally occuring amino acid
MSQGRHTPDEPNQQQSGEPAGTQLGTKQXGDRQSWGSGDRGDREGRGVPSEDSLQCSMNXSRIPSVSAFQSMPLRAFLLLXT

SEQ ID NO: 5857 - DNA, 357 bp, Homo sapiens
acgcgtagcgatctgggacaccaaggtcgcgttacgccgcgttgaaaccgtgttcgatcgctatttctggggcagctactggcagcccggccgcaccttccaggaggtgatgggcgaactcaccggcacccctctggaaaaaagcctcgaagccctgaaaaaacaatgcgtgctgctcgaccagcaggtcgctgatggcaggcattggctgaataacgcacgggaattgtccgatgtggccaacgccatggcccgcgaacgttaccaattggatttctgtgaccccaaggccgacacccccggcaatgccgtcatacaccgcgagtttgaggtgttggtgtacacctggacggcccg

SEQ ID NO: 5858 - protein, 82 aa, Homo sapiens
MGELTGTPLEKSLEALKKQCVLLDQQVADGRHWLNNARELSDVANAMARERYQLDFCDPKADTPGNAVIHREFEVLVYTWTA

SEQ ID NO: 5859 - DNA, 255 bp, Homo sapiens
  misc_feature (1)..(1): Wherein n may be a, c, g or t
naatccctttatttattcttacaagttacagctgcctatatgcaatgcaaagcgtccctcaacatttcagtgtgtgccaagaagttctcaggctcaaactgagcaatggcagctaagtttgcagcggcaacaggagtcttcctgagccgccttcttgctcttgcagcacttgcaagctgcaacactgaaggtgacatcctgtacaagcaccgggcgacatggaaggacccaaacgatgtgctcgtgagctgggat

SEQ ID NO: 5860 - protein, 50 aa, Homo sapiens
MAAKFAAATGVFLSRLLALAALASCNTEGDILYKHRATWKDPNDVLVSWD

SEQ ID NO: 5861 - DNA, 380 bp, Homo sapiens
  misc_feature (358)..(358): Wherein n may be a, c, g or t
gtgcacccgaatcatctgtagagtttgttaaaaatatagctacatgagtcccatccccaaagattcaaagattctgtttcagtgcatctgatgtggggcccagaaatctgtggggatttaaattatttttcatttttaattgcacaatatgtaaatacatttcccccttgtaaaatattaaaacattaccttatcagttatgattgcattcagctgcaagcaattaaaaaactaacagtcgtttaaacagatgggggtatttttctcagggaacaagaagaaatctagaagcaggcagtatagagctggagtggattatggaatccactcaaggattccataaaggacccaagaaccntttgtcttcttcctctgccatc

SEQ ID NO: 5862 - protein, 51 aa, Homo sapiens
MWGPEICGDLNYFSFLIAQYVNTFPPCKILKHYLISYDCIQLQAIKKLTVV

SEQ ID NO: 5863 - DNA, 403 bp, Homo sapiens
acgcgtacgctcatcgatacaagcgcggggggcgtggcagcggcagctccagggcgtggagggtagcgacttggacgtcctcgacggtgtagtgctcgcctaggcggtgagcagcctccggggcgaaagactccaggcgggcgcgggcagcttgggcagcgggttgaaggccgacgtttacgtgtagacatgatttcatgtgtacacataggcaagctaggttgctactttttattactaccgcgctagctagcttgctatctagcattctttctagcacctcctctttctccaggacgcgggattttcctacgaaagtaaactcgcgtacttcggtaaatcgcctgcataatgaagtgccccgagttttgttcctaggcttttgccttgatttctattattg

SEQ ID NO: 5864 - protein, 85 aa, Homo sapiens
MLDSKLASAVVIKSSNLACLCVHMKSCLHVNVGLQPAAQAARARLESFAPEAAHRLGEHYTVEDVQVATLHALELPLPRPPRLYR

SEQ ID NO: 5865 - DNA, 332 bp, Homo sapiens
ggccgcttcctggcctcctgtggggaccgtgcagtgcggctcttccacaatacccctggccaccgggctgtggtggaggagatgcagagcctcctgaagcgggcatccagcgaaagtatcccccagaggctgcagcaacagctaacccgagcccaagaggccctcaagagcctgggtgccctgaagaagtgactctggctccagatgggtctggctgtctggcccagcagctcctgcttcccaggggcccctgggatggagacctggaggaaactcccagttttcttcctgtgccccctactttttcctattgaaactattcttgcatactc

SEQ ID NO: 5866 - protein, 63 aa, Homo sapiens
GRFLASCGDRAVRLFHNTPGHRAVVEEMQSLLKRASSESIPQRLQQQLTRAQEALKSLGALKK

SEQ ID NO: 5867 - DNA, 345 bp, Homo sapiens
  misc_feature (52)..(52): Wherein n may be a, c, g or t
  misc_feature (57)..(57): Wherein n may be a, c, g or t
  misc_feature (73)..(73): Wherein n may be a, c, g or t
  misc_feature (222)..(222): Wherein n may be a, c, g or t
ctagccaccgggaccactccgcgcgagctgcccgcggcccgctgtgacgggnagcgnatcctaccctggaaanaggtgtactcgatccgggaggtacctgaacacctcatcgtggtgggatctggcgtcactggtgcggagttcgcgtcggcctacgattcgttgggatgcccagtaacgctggtgtcgtcacgcgatcaggttatccccggcgaagacccngacgcggcccaggtgttgcagcaggttttcgagtctcgcggcatggagatcttgtcgcgctcccgcgcagtgtccgcgatccgtgacgcggatggagtcgtggtcgggctggaggacggccgg

SEQ ID NO: 5868 - protein, 115 aa, Homo sapiens
  misc_feature (18)..(18): Wherein Xaa may be any naturally occuring amino acid
  misc_feature (25)..(25): Wherein Xaa may be any naturally occuring amino acid
LATGTTPRELPAARCDGXRILPWKXVYSIREVPEHLIVVGSGVTGAEFASAYDSLGCPVTLVSSRDQVIPGEDPDAAQVLQQVFESRGMEILSRSRAVSAIRDADGVVVGLEDGR

SEQ ID NO: 5869 - DNA, 204 bp, Homo sapiens
  misc_feature (204)..(204): Wherein n may be a, c, g or t
gaattcggacaacgacattgggcaactggacagcgaaaggattaactccttgttttcgtctaagaggaagagaaggccaatggagcagggttgaccacacaaacaacaggtagggagagaaaaaatagaacattctcggtgagggtttcaaaagatttttatttttattttcatttaagactaatttgggtgacataaatccgn

SEQ ID NO: 5870 - protein, 65 aa, Homo sapiens
MSPKLVLNENKNKNLLKPSPRMFYFFSPYLLFVWSTLLHWPSLPLRRKQGVNPFAVQLPNVVVRI

SEQ ID NO: 5871 - DNA, 245 bp, Homo sapiens
gatattccagagaaaaaatggaaagatggtctttggctggctaggagaaaacgctggggcttttttgagagaccagtcaatatttatgaagcccacgctggatcttggaagagaaatccagatggtagtccatacagctttgcacaacttaaggaagaactcattccataccttgttgagatgaattacactcacatcgagtttatgcctttaatggctcacccacttggattaagttggagctc

SEQ ID NO: 5872 - protein, 81 aa, Homo sapiens
DIPEKKWKDGLWLARRKRWGFFERPVNIYEAHAGSWKRNPDGSPYSFAQLKEELIPYLVEMNYTHIEFMPLMAHPLGLSWS

SEQ ID NO: 5873 - DNA, 307 bp, Homo sapiens
cagcccctgccccggggtctcacaggacagtggaggagaggaaggaaggcaggcagatgaacccagaagcagcatgatgggtcgcccaggcagggcaggcaatggaggaagagggtggagacagcccctgccccggagtctcacaggacactggaggagaggagggaaggctgggggaggaactactggaagcagcatgatgggttgcccagatggggcagggcccagcaggagctacccctgcagatgtgggcataggcgagttcaccaggctctaagatccgggcaatcccagcccaactttcag

SEQ ID NO: 5874 - protein, 78 aa, Homo sapiens
MMGRPGRAGNGGRGWRQPLPRSLTGHWRRGGKAGGGTTGSSMMGCPDGAGPSRSYPCRCGHRRVHQALRSGQSQPNFQ

SEQ ID NO: 5875 - DNA, 333 bp, Homo sapiens
  misc_feature (314)..(314): Wherein n may be a, c, g or t
  misc_feature (315)..(315): Wherein n may be a, c, g or t
agatctgtgaggctcagggattcatccctgtttgcactgaggagactgtgacttcaagagctgggccatgactgaggtaagagtcagacccaggtggctccaactccggtacttgagagaggtgcttctgttctcatggtccacagtgacgagttggagagtctcccctgtgacataccacaccgccttcttaacacaggaacacccagtgactcaactgctactgacagggtctttcgggctccccattatgaaagcaacactcctcagagtgattcttaggagttccccagatatcttgtcactcttcctannaaatgtgtttgtaaggct

SEQ ID NO: 5876 - protein, 88 aa, Homo sapiens
  misc_feature (83)..(83): Wherein Xaa may be any naturally occuring amino acid
MTEVRVRPRWLQLRYLREVLLFSWSTVTSWRVSPVTYHTAFLTQEHPVTQLLLTGSFGLPIMKATLLRVILRSSPDILSLFLXNVFVR

SEQ ID NO: 5877 - DNA, 261 bp, Homo sapiens
  misc_feature (250)..(250): Wherein n may be a, c, g or t
  misc_feature (251)..(251): Wherein n may be a, c, g or t
  misc_feature (252)..(252): Wherein n may be a, c, g or t
  misc_feature (255)..(255): Wherein n may be a, c, g or t
  misc_feature (257)..(257): Wherein n may be a, c, g or t
  misc_feature (258)..(258): Wherein n may be a, c, g or t
  misc_feature (259)..(259): Wherein n may be a, c, g or t
  misc_feature (261)..(261): Wherein n may be a, c, g or t
tgatcataatggccctgtaaaaggctcgtactgttattatcatatcttcaattacgtattatttcgggggctgtacctattagtgaaataacgcctctaaaaataaaaagaagaaaaagaatatgaagggggttctgaattgctaaaatatttcggcaaggctcaattagtatcaggatcaagtcgggaatcggaatcagcataacaacctccaaaaccatataataaccttacacaagacaagatatcnnnccncnnncn

SEQ ID NO: 5878 - protein, 57 aa, Homo sapiens
MVLEVVMLIPIPDLILILIEPCRNILAIQNPLHILFLLFIFRGVISLIGTAPEIIRN

SEQ ID NO: 5879 - DNA, 327 bp, Homo sapiens
  misc_feature (324)..(324): Wherein n may be a, c, g or t
  misc_feature (327)..(327): Wherein n may be a, c, g or t
gtcgacgccctcgaaggtcgtcaggtccatctccgccccacccccggacgcggcgagggcgccgtcgctgacgaggagtgcatcgcgcagagtcggcgcatggcggtcggtcgaatcgtcacgcacggtcatggacgcttctccattcaggaaggacaacccttcatagaatctacatatcgggcaaatcgcttgcccgcaagactgaaaatacgaagtcgaaggggttcctcgtcagaaatcccaccatcgctcgtgtttcccgtgccgatggaattcggcaccgtcgccccgacaggacactcccatgaacagcattccccnccn

SEQ ID NO: 5880 - protein, 76 aa, Homo sapiens
MAVGRIVTHGHGRFSIQEGQPFIESTYRANRLPARLKIRSRRGSSSEIPPSLVFPVPMEFGTVAPTGHSHEQHSPP

SEQ ID NO: 5881 - DNA, 368 bp, Homo sapiens
tgatcaatctggctggaagctgatgaatttcattaactgttctccaaaaataagcttttggttgctttgtctatgttgggtttctgtttcctatttcattgttttccactctgatctttattatttccttttctactgactttgggtttaatctacatttttttttttctaatttcttaaagggaaacccaacctttggccttccacgggaactttcccttgaatgaagcctccggctttttcccccctcccttgctcaaatgttaaaaaataagatgttgacaggggggaccaggaaccaacaggctccccaaagccaaccatgcacagagcttaagggaggcctggccccgcctcctggcaaacta

SEQ ID NO: 5882 - protein, 51 aa, Homo sapiens
MVGFGEPVGSWSPLSTSYFLTFEQGRGEKAGGFIQGKVPVEGQRLGFPLRN

SEQ ID NO: 5883 - DNA, 256 bp, Homo sapiens
  misc_feature (1)..(1): Wherein n may be a, c, g or t
ntcccaagaaaaacaataaccccaaatccccccccggggggcgggggggggccccaaagggggccccccggggggggggggggggggtccccccgggggaaaaacccccccccggggggttttttttcccccccccaaaaaagggcccccttttttctctttcaaaaaaaaaaaaaaaaaaaaaaaaaaaacatgataaggacgctgctgctgtccactttgttggctatcagggaccctccgcaggtgtggtacc

SEQ ID NO: 5884 - protein, 85 aa, Homo sapiens
  misc_feature (1)..(1): Wherein Xaa may be any naturally occuring amino acid
XPRKTITPNPPPGGGGGPQRGPPGGGGGGSPRGKNPPPGGFFSPPQKRAPFFLFQKKKKKKKKNMIRTLLLSTLLAIRDPPQVWY

SEQ ID NO: 5885 - DNA, 337 bp, Homo sapiens
aaatttagtggccaaaatgaaggaacaaagttcaggccaacctgttagaaaatctgacctcaaaagaatgtgagatgagagatgatgagttgcttctctttggggtcagagctgatcccagagagaggggctgtgttttaggggcaggcatgcggcaagctgaagtggcccctgcaggagtgaggagggccccaggcacagcaagagttgaggagctgattctgtcacttccaaaacattattaacccgaagaaactttctttcagttttttcaaatttatctcctctgtgtctcattgagcctcatctttccttgcagggtaaagggcctgaaact

SEQ ID NO: 5886 - protein, 63 aa, Homo sapiens [sequence omitted]

SEQ ID NO: 5887 - DNA, 265 bp, Homo sapiens
  misc_feature (92)..(92): Wherein n may be a, c, g or t
gcgcgccaggggggatgcgttgttcctggggtcgccaccctgggcgttgtggcgtcgtggtagtcgaactggtggtgagtgccagaccgtanggggtgtgagtcccgtagacgaaatcatggttgtcgtggcgtgacgttgttcccgagtagcacggggcccgtgaaatctcgtgtgaatctgccatgaccacctggtaagcctgaatacttgctgatgaccgatagcggatcagtaccgtgagggaatggtgaaaataccccag

SEQ ID NO: 5888 - protein, 62 aa, Homo sapiens
MADSHEISRAPCYSGTTSRHDNHDFVYGTHTPYGLALTTSSTTTTPQRPGWRPQEQRIPPGA

SEQ ID NO: 5889 - DNA, 273 bp, Homo sapiens
  misc_feature (1)..(1): Wherein n may be a, c, g or t
  misc_feature (273)..(273): Wherein n may be a, c, g or t
nagatctcctgggaggcccccgtggagaagaagactgagtgtatccagaaagggaagaacaaccaggtgggtgcttggacgctgctcctggtgctgccttcaccccaggacgtctcctcccattctggccctcgcgctctcactaaccggacacctttctgcccccagaccgagtgcttcaacttcatccgcttcctgcagccctacaatgcctcccacctgtacgtctgtggcacctacgccttccagcccaagtgcacctacgtcgtgagn

SEQ ID NO: 5890 - protein, 91 aa, Homo sapiens
  misc_feature (1)..(1): Wherein Xaa may be any naturally occuring amino acid
  misc_feature (91)..(91): Wherein Xaa may be any naturally occuring amino acid
XISWEAPVEKKTECIQKGKNNQVGAWTLLLVLPSPQDVSSHSGPRALTNRTPFCPQTECFNFIRFLQPYNASHLYVCGTYAFQPKCTYVVX

SEQ ID NO: 5891 - DNA, 237 bp, Homo sapiens
acgcgtttgatagatcccacacaaatgcatataatcatattgatgggatttctggcttgttgcccggtactttgcgtgttcgcagagcctgatttttgggttcgcaccatgaggatcatcaatttatggttaattcttcggagcatgagttgctccgcgagggtgagatatcgtcccttggaacagagctgcctcaagccgaaatagaggcattggtgtcggatcgtttcggtcgga

SEQ ID NO: 5892 - protein, 60 aa, Homo sapiens
MHIIILMGFLACCPVLCVFAEPDFWVRTMRIINLWLILRSMSCSARVRYRPLEQSCLKPK

SEQ ID NO: 5893 - DNA, 403 bp, Homo sapiens
acgcgtgaaggggagtaaaagagcagtttcgtcatctcagaaaagaagactctaggcggaaagagtagcagtgccaatgccatggtgaaagcatgcctcagatgtctgaagaacagcagaggctcatttgagcagattaagtaagagagagagagtggctgtaaatggagttggagaggcaacaaatgggtcagatcatggcaagcctcacaggacaatcccaagactgccttttactttgggtggcaacgggaagccactggagagtttggggcagagaagaaattctacttcaggtttttataaaatcactctggctgctgttctgacaatactgtaaggggaaagatagaagcaatccattagaaggccaggacagtttgcaaaaaatggcctccaattg

SEQ ID NO: 5894 - protein, 54 aa, Homo sapiens [sequence omitted]

SEQ ID NO: 5895 - DNA, 287 bp, Homo sapiens
tatggcaatgccagtcctgcgcgaacggctggcacgaattatccaattcgaacctcgcttcatccatgcaggcatcaagcctgagggggcacgtgcgctatgcctgctgattattcagggtgaggtatcgcgcgccgacttcaaggcgtacttcaacctgcacgataagacggcggccaatcaactcagggaactgctactgcttggggtggtagaagcaccgtcacccaaatctcgcgacctttatcctggcttcccattctggttcgctcaactgctcttcccgg

SEQ ID NO: 5896 - protein, 95 aa, Homo sapiens
MAMPVLRERLARIIQFEPRFIHAGIKPEGARALCLLIIQGEVSRADFKAYFNLHDKTAANQLRELLLLGVVEAPSPKSRDLYPGFPFWFAQLLFP

SEQ ID NO: 5897 - DNA, 409 bp, Homo sapiens
acgcgttatcagccgaagaggtgctgcgtgccgaaatggttgcatagaccaatagaccgacatttatgacgcataggtgcgtgctgtgtgggccttggagcctgtgcgggcctaacgtttgagcgcagcgaagcgctgcatcagcatggcccagtcgtgcgagggcgccggggatgacaaaggcactgctggtcggcttgaatggtacggtggcattgtgtcctgaacggacggcgtcgcgtcgccgactatctcggagcgggccttgtcaccgacctcggcgcccggggaccatggcacttggtacgtccgacagactgtgttagtgtacgcatagattgtttcgcactttcagtcagatagctgcatcagcacgtgaaggactacgcacgcatcgacaagatcagtt

SEQ ID NO: 5898 - protein, 53 aa, Homo sapiens
MVRWHCVLNGRRRVADYLGAGLVTDLGARGPWHLVRPTDCVSVRIDCFALSVR

SEQ ID NO: 5899 - DNA, 385 bp, Homo sapiens
  misc_feature (354)..(354): Wherein n may be a, c, g or t
ctgcagacgcttcccttagctaccaacaaagagtagcagtaatcattattaaggaagtacaactggaaagtttatgcatagttgctaatcttccgtgagtatttaaatacacagagaaatgcgcatgaagccctgcaggcaatccacactctctggtatcagcccaagtctggaacagaaaagcaggaaaactggaatgaacaacctcagagacagcataaagtggttgcatgagacacacatagaagtcttcctctgagggatatttttatacgtgagtggactttggcccccatccctaatactgaagtgacttacaatacttttctcttttttttttttttgaaaacgggntctgcctgttacccaaacggaaggcaggggc

SEQ ID NO: 5900 - protein, 70 aa, Homo sapiens
MQPLYAVSEVVHSSFPAFLFQTWADTRECGLPAGLHAHFSVYLNTHGRLATMHKLSSCTSLIMITATLCW

SEQ ID NO: 5901 - DNA, 222 bp, Homo sapiens
gtcgacgatcataaacgggtcttcggccatgcgcttgaagaatttgcgaagcacaaagccgatgagctcgaccaggtctttgctcggcttccccttgggcagcgaagcctggtcctcgagaactttgccaaagagatacattgacgagacctaaatgtcagccgcggtctcatggccctctcaccttgaagtacagtccttctgcttgtgccttgacgactt

SEQ ID NO: 5902 - protein, 54 aa, Homo sapiens
MRPRLTFRSRQCISLAKFSRTRLRCPRGSRAKTWSSSSALCFANSSSAWPKTRL

SEQ ID NO: 5903 - DNA, 340 bp, Homo sapiens
tgatcactgaggcatacataatcttctgggaagtgtttcctcagggtcggcacacagaagccgcagaacagaaaggggcaatactttgcattcaacttgaaaggggtagggaagctcccaaggggggccccggggtgggaaagccaaagaaaacagctgaggcttggaaccaagagaggctttggtgatgttgcatagagaaaaatcgagggttggcactgtgtagcaggattagggttcccaaggagagccagcagaagctattggtgacagcgcagccccactgcagtagagactgtaactgtaagtgcagtgccatgggatgactaccgaaggtggc

SEQ ID NO: 5904 - protein, 75 aa, Homo sapiens
MALHLQLQSLLQWGCAVTNSFCWLSLGTLILLHSANPRFFSMQHHQSLSWFQASAVFFGFPTPGPPLGASLPLSS

SEQ ID NO: 5905 - DNA, 573 bp, Homo sapiens
  misc_feature (1)..(1): Wherein n may be a, c, g or t
  misc_feature (2)..(2): Wherein n may be a, c, g or t
nncgccgacccggacttccaggagatgttacgtgcgctggtggacttcgacgaagacatcccgatggtcgacgaaagcctggaacagttcgcccagttgctcaaaacccgcacctcggaagaaggcatggcgccgttgacctcggacgcggtggcgcggttggccacttacagcgcacggctggcggaccaccaagggcgtgtgtccgcgcgcattggcgacttgttccaactggtcagcgaggcggactttatccgccacctggcgggcgacgagatgactgatgccggccatatcgaacgggcgctcaaggccaaggccacgcgtaccgggcgtgtatcggcgcggattctcgacgacatgctcgctggggtcatcctgatcgacaccgccggtgcggccgtgggcaaatgcaacgggctgacggtgctggaagtcggcgattcggcgttcggcgtgccggcgcggatttccgccacggtgtacccgggcggcagcggcattgtcgacatcgagcgcgaagttaacctcggccagccgatccactccaagggcgtgatgatccttaccggt

SEQ ID NO: 5906 - protein, 191 aa, Homo sapiens
  misc_feature (1)..(1): Wherein Xaa may be any naturally occuring amino acid
XADPDFQEMLRALVDFDEDIPMVDESLEQFAQLLKTRTSEEGMAPLTSDAVARLATYSARLADHQGRVSARIGDLFQLVSEADFIRHLAGDEMTDAGHIERALKAKATRTGRVSARILDDMLAGVILIDTAGAAVGKCNGLTVLEVGDSAFGVPARISATVYPGGSGIVDIEREVNLGQPIHSKGVMILTG

SEQ ID NO: 5907 - DNA, 333 bp, Homo sapiens
  misc_feature (1)..(1): Wherein n may be a, c, g or t
naaaacggcagtcagagatatacaaaaggggcaagataagtgagggaggctatgtggaaatggaatgtgcgcagatgggcgggcgcaagagtaaacattagcaagaaccgattaagtgtaattaacgttggaaggaggatcctaatggcccgcaggagtccactgtctaaggttagaaatataggaattatagcccatatcgatgcaggtaaaactaccacaacagagaggatgctttattatgcaggaatctcaaagcatattggagacgtcgacactggcgatacgataactgattttttagagcaggagagatcccgaggtatcacaatt

SEQ ID NO: 5908 - protein, 94 aa, Homo sapiens
MWKWNVRRWAGARVNISKNRLSVINVGRRILMARRSPLSKVRNIGIIAHIDAGKTTTTERMLYYAGISKHIGDVDTGDTITDFLEQERSRGITI

SEQ ID NO: 5909 - DNA, 385 bp, Homo sapiens
  misc_feature (1)..(1): Wherein n may be a, c, g or t
  misc_feature (6)..(6): Wherein n may be a, c, g or t
  misc_feature (311)..(311): Wherein n may be a, c, g or t
  misc_feature (313)..(313): Wherein n may be a, c, g or t
ngccgnggatgaagacgaagttcagaaatgccacgagggcgttcatgatatccattacttggaaacctcgcaggaacccagatagctggtcgagctgatcgggtcggtcttgtggaaggtaaagcgcgcctcgccattggcaccgatggtcaggatctgctggcccgtcgggtcatccccggtcgagaaggccatggtcacgctgccttcctgctgggcggaaaggggcagcgattccatctcatcatcccattgtgcttcggccataccggcgccgtcgctgatgatggtcagcttgccggcaaagcgantntcggcgcatttggtgtcgacgcattgggtcttgaaatggcaggccatcttggtggcagtcgcgtcgggcgcc

SEQ ID NO: 5910 - protein, 101 aa, Homo sapiens
  misc_feature (16)..(16): Wherein Xaa may be any naturally occuring amino acid
  misc_feature (17)..(17): Wherein Xaa may be any naturally occuring amino acid
MACHFKTQCVDTKCAXXRFAGKLTIISDGAGMAEAQWDDEMESLPLSAQQEGSVTMAFSTGDDPTGQQILTIGANGEARFTFHKTDPISSTSYLGSCEVSK

SEQ ID NO: 5911 - DNA, 374 bp, Homo sapiens
  misc_feature (374)..(374): Wherein n may be a, c, g or t
tctagagttcactccatctaagacaagtactcctgccttgatttcaaaatctttgacctcctctcttctcatgagctagccctcctctttacctcagccactcactcccagagtcattatttattatcacaattcttccataatctcaatttcatgcattctacttgctggcaagacctcctatccttccagttcattccctggtattctcaatccataaacacctacaaccctctaatccttttcattcccttacgggcaccatcaaaacttgcccaatacactctcttctctctttattcagattcaattctgtgtcagctattataattgcttataatcactctcttacatccatctgcaattcccttcan

SEQ ID NO: 5912 - protein, 58 aa, Homo sapiens [sequence omitted]

SEQ ID NO: 5913 - DNA, 438 bp, Homo sapiens
accggtgcctcacactggcaccaaggcctggggctcgcagtgtccgtgggggcgtcctggaagagacagggttcccccaaccgccaccagctgccctgcccagcatcaggcctgcaggtcctgctggagcacatgcctcagggagactcaggagtggggctctcacaggactggggcgctcctttccatccctctcctcacttcccccctcccctgagggtgctgcagggctgggcagggcgggctgggagcagggagatgcaccgtgaaactgaattactgcctttcacatcgtgactcccaagtatgcagaaggaaccctctggggattctcaggtttcagttttactttctatacgcattttactgaatttgacttgtgcacttaagtgtattttctgtgtccgcagatgatttgagacacgccctgggcggctt

SEQ ID NO: 5914 - protein, 54 aa, Homo sapiens [sequence omitted]

SEQ ID NO: 5915 - DNA, 544 bp, Homo sapiens
tcatgaatttaagaaaagctaggcaaacctagtgtgatttttctccagtgacatttagttgcttgatttcaggtatagagaattgcagttagatttttaagctattttgatggcagtagaagcaggccagggagttggagatattttcaaggtaataattgtagtactgaaacatggaatctaagctgttcaaggaatacatgatagagggaaggtggtgaatggtgagaaagtggtgctgtcctgtgaactgataacaacaatgaagtgagcctgaaagatagggggaggtggtcagaggatgggatgtgtgaagtcaagacttcagaggtgatctgatattgatgagaaaaagtcaagaccttggaagtaactgagatagagagggtgaggtattcattaaaatgaggagtcaaggatctatggggcttgccatttcttcgtgtaagtgttgaaatgagaatgccaagcataggagtgagaagaaagatggcaacaaggagaaggtacccggtgactggttggcattagctttacaggatcc

SEQ ID NO: 5916 - protein, 108 aa, Homo sapiens [sequence omitted]

SEQ ID NO: 5917 - DNA, 350 bp, Homo sapiens
ggatccacccaccttgggctccccacaagagttgaagctcctctcagtcttgtttgtttgtcgatggaccctcagcaactaaaacagtgtctggtgtgtggtagctgttcaataaatatctgttgaataaatgaatgaacaaatcctgttagttccagaaccggggtactctggtaagttttccttcctgtgtatcataccgctgtccactgggttgctaaccatggaaacaccttacttgaagtcttatttagcagcccagctgtccaaaacaccatcgaaaaccagatgttaaaaaaaaaaaaaaaccacaaaaccccccattggctgcggggtttttcaacgtgggt

SEQ ID NO: 5918 - protein, 54 aa, Homo sapiens [sequence omitted]

SEQ ID NO: 5919 - DNA, 274 bp, Homo sapiens
tcgcgagcacactccagcctctggagagacgacaacgcgtgaatggtgccgagactgtatggggggactctccagtcccgccactagggagaggagaagacttcccagaggaggaaacatttgtgttcgatctggtagaacaaataggattttgttcctaggggaagtgggaagatggtattctagtcacagaggcaccaaaggagctagtgagacatttggtgtgtctgaactgtgaggaggaggccagacgagactgcagaggacgccaggg

SEQ ID NO: 5920 - protein, 59 aa, Homo sapiens
MGGLSSPATRERRRLPRGGNICVRSGRTNRILFLGEVGRWYSSHRGTKGASETFGVSEL

SEQ ID NO: 5921 - DNA, 236 bp, Homo sapiens
gccggcgttcagtgcggactcggcgtgatgttcttcgtcgatgcgcatctgctcgaggatcgcccgggacttttcgtcttcggccggcaactgctccaagtgttcgttcaggtgcttgcacacctggtcttcggtggcggcgacaaaacccaggctgactttgtcgctgatcaacccggcgggcggcgccgatgccgacgggcaagccataaaacaacgggttgagcacactggga

SEQ ID NO: 5922 - protein, 70 aa, Homo sapiens
MACPSASAPPAGLISDKVSLGFVAATEDQVCKHLNEHLEQLPAEDEKSRAILEQMRIDEEHHAESALNAG

SEQ ID NO: 5923 - DNA, 346 bp, Homo sapiens
  misc_feature (326)..(326): Wherein n may be a, c, g or t
tccggaccccagctgatccacccgcctcggccacccggtgctgggattagaggtgtaagccaccgcgcctggctgaaaaatcaaatctttaaagatcaattctgttactttcattcagctattcaacaaatatttactaagttcctgtgatgttccaaatagatagtatgccagaggcggggcaagtaactgaacagattatacatggtattcgctctgacagtctttacatttccagctctgttctttctcccaaacatccacatcacatgtccagtgtctgctttgcacttcccatgtgacatcagtgtcctttaacaactcanaatatcaccgagacctctgt

SEQ ID NO: 5924 - protein, 60 aa, Homo sapiens
MSHGKCKADTGHVMWMFGRKNRAGNVKTVRANTMYNLFSYLPRLWHTIYLEHHRNLVNIC

SEQ ID NO: 5925 - DNA, 204 bp, Homo sapiens
cgcgttaaacaagactttgtgtacctctacaacacaaacaatggcaacgtaggtagcactaacactttgagtactactacagatactgctagcgttaaaatcagcccgtctttgatgtctccttctaaaacctccaccaccacacctactggcaatgcgattgcatccagaggtttattcgcagcaacagagctggaggaattc

SEQ ID NO: 5926 - protein, 68 aa, Homo sapiens
RVKQDFVYLYNTNNGNVGSTNTLSTTTDTASVKISPSLMSPSKTSTTTPTGNAIASRGLFAATELEEF

SEQ ID NO: 5927 - DNA, 473 bp, Homo sapiens
acgcgtgaaggggaagacggagtgcctgcagaaagggatcagtgaaaattagggaattttgtgtgttgctatatacattttttctggggagatgagcttctcattgagatctgtgactcagaatcgactaagccaccataagtctggatttctccccagctcccaaggcccttttgggtccagaagacctgcatatgggctgttgactcatgcaaatgaggtatctgaactgcagcttcagtattagcagagccacaggccgcctctgtggcatcaccagggtttctctgaagaagagggtctgcattttcctaaacccagtgctgctctcccatctcccatcttcctctcgcagcttgatgagccccggtgtgtcccaggtacacccctgcatccaggcagcagcccaggccaccccctcctcactggcccttggctcctttcttgatgcctctgttgcttgtcccccagga

SEQ ID NO: 5928 - protein, 88 aa, Homo sapiens
MQMRYLNCSFSISRATGRLCGITRVSLKKRVCIFLNPVLLSHLPSSSRSLMSPGVSQVHPCIQAAAQATPSSLALGSFLDASVACPPG

SEQ ID NO: 5929 - DNA, 591 bp, Homo sapiens
  misc_feature (1)..(1): Wherein n may be a, c, g or t
ncttttaatgtatcaaacacatcttactaactctttttcttttcttttcactatttcgacagcaatgaattagacacaaaccaagagtcttctgctacacagcacggcttcggctaccatattgacaaatcttatgacaggatgctgggtttgggccaatctgctcaagcatatgcaagtgatgatgctctcaatatgaaccaggcaaaggataaaacgtacagcgttccagggtgtggcagggcaagcgacctcaaatatcctcatcgtgacggacactcttcgtctcacgaacagcgctctggaattttaccaactgaatgcccaggccctactttaaacaccggtgccggtagcatcggtatcccgggatgtggcaaagtcacaaatagagtggtcagtgactataacaaaaacgctaggtctacgctagccaattttgatagtagtaaaatgaccgaggcaagaatgaacagcaagaacgtgccgattggttgtcaagacacctctgatccgcacttcaatgggcctatcgaccaacatgttcccggtgcaggttcacctcaaagtcaacctcatcacatcgacgcg

SEQ ID NO: 5930 - protein, 150 aa, Homo sapiens
MLGLGQSAQAYASDDALNMNQAKDKTYSVPGCGRASDLKYPHRDGHSSSHEQRSGILPTECPGPTLNTGAGSIGIPGCGKVTNRVVSDYNKNARSTLANFDSSKMTEARMNSKNVPIGCQDTSDPHFNGPIDQHVPGAGSPQSQPHHIDA

SEQ ID NO: 5931 - DNA, 162 bp, Homo sapiens
  misc_feature (31)..(31): Wherein n may be a, c, g or t
ctagaaggtctcaagttcaatctcacagaantcactgaggaagaaatccaccagggctttgggcacctcctacagaggctcagccagccagaggaccaggtagagatcaatacaggtagtgccctgtttattgacaaagagcagccgatactgtcagaattc

SEQ ID NO: 5932 - protein, 54 aa, Homo sapiens
  misc_feature (11)..(11): Wherein Xaa may be any naturally occuring amino acid
LEGLKFNLTEXTEEEIHQGFGHLLQRLSQPEDQVEINTGSALFIDKEQPILSEF

SEQ ID NO: 5933 - DNA, 313 bp, Homo sapiens
  misc_feature (1)..(1): Wherein n may be a, c, g or t
  misc_feature (2)..(2): Wherein n may be a, c, g or t
nncgacgccggccgcatgcaactcaagcgcggcgtgctcgaactgttcgactggctcgacgcccaccacatccgccgcgcgatcgccacgtcgtcgtcgcgcgcgcgcaccgaccaccatctcggcctgatggggattgcccagcgcttcgagcatatcgtcacccgcgacgacgtgacccgcggcaaacccaaccccgacccgttcctgaccgccgcgaagaagctgggcatcgcccccgcccattgcctggtgctcgaagacagcttcaacggcatccgcgccgcccacgccgccggcatgcgcgtgatca

SEQ ID NO: 5934 - protein, 104 aa, Homo sapiens
  misc_feature (1)..(1): Wherein Xaa may be any naturally occuring amino acid
XDAGRMQLKRGVLELFDWLDAHHIRRAIATSSSRARTDHHLGLMGIAQRFEHIVTRDDVTRGKPNPDPFLTAAKKLGIAPAHCLVLEDSFNGIRAAHAAGMRVI

SEQ ID NO: 5935 - DNA, 279 bp, Homo sapiens
  misc_feature (40)..(40): Wherein n may be a, c, g or t
  misc_feature (55)..(55): Wherein n may be a, c, g or t
tggtcctacggcgagaccatcaaggacgccttctacaacncggaaaaagccaagncgctgttcaaggctgccggcgttaaggaaggggccgagatcttcctgtggggagtcgggggtgcgcgccctgcaccccccacccccaagttgatggcagagatgttgcaaagcgattgggccaagatcggcctcaaggtcaagatcgtcagctacgagtggggcgagtacatcaagcgcaccaagaacggtgagcacgatatcagcctgatcggctggaccggt

SEQ ID NO: 5936 - protein, 93 aa, Homo sapiens
  misc_feature (14)..(14): Wherein Xaa may be any naturally occuring amino acid
  misc_feature (19)..(19): Wherein Xaa may be any naturally occuring amino acid
WSYGETIKDAFYNXEKAKXLFKAAGVKEGAEIFLWGVGGARPAPPTPKLMAEMLQSDWAKIGLKVKIVSYEWGEYIKRTKNGEHDISLIGWTG

SEQ ID NO: 5937 - DNA, 324 bp, Homo sapiens
agatctaggatgcacggcagggaggaggaagccagcacagaccttcaccccctgtggctccctagggcaagacgccatttctgctttgactgccacagggccttcagggagaggacgcggtttcaacctacaaataaagggaagggggctgcctggggatgggtatgagtgcagcctcaaggaccacctggcaggcaggtgttggataccagctctgtctctgacttagctgggtgatattgggcgggtttcctctctctggccgtttcccacacctgcaggctgggagtggtgcctgctgcctcctgacagtgctgcactgag

SEQ ID NO: 5938 - protein, 52 aa, Homo sapiens [sequence omitted]

SEQ ID NO: 5939 - DNA, 609 bp, Homo sapiens
  misc_feature (1)..(1): Wherein n may be a, c, g or t
  misc_feature (2)..(2): Wherein n may be a, c, g or t
nnacgcgtaccgatgtccaaggcgggtgccatggcgagggctcggagttcgacacggtgcgcggatgggtgctgcgcgaggcggtaacgaatgtggtgcgtcacgcgcaggcccatacctgctgcgtcgagatcgatgacgagattctggtcatcagcgataatggtcgcggtcgaggaggcgctcccgagggcaacggtttaacgggtatgcgtcgacgggttgaggcagccgggggagagttgtggatcgggccgggggagcgtggccacggtacccggattgtcgtgacaggctgaggccatgatcgacaagaccccgatcagactcgtgctagccgacgaccagacccttgtacgcggagctctggcagccctgctcggcatggaggacgacctggagatcgtcggcacgtgcgggcgaggtgacgaggtggttggcctggtgcaggatacttacgctgacgtgtgtttgctcgacatcgagatgcctggtcttgacgggatcacggtcgccgccgagctgagggaccaggcgccgtggtgtcgaattctcatcgtgacgaccttcgggcgaccgggatatctgcggcgagccatggacgccggc

SEQ ID NO: 5940 - protein, 102 aa, Homo sapiens
MIDKTPIRLVLADDQTLVRGALAALLGMEDDLEIVGTCGRGDEVVGLVQDTYADVCLLDIEMPGLDGITVAAELRDQAPWCRILIVTTFGRPGYLRRAMDAG

SEQ ID NO: 5941 - DNA, 184 bp, Homo sapiens
tgcacggtcaacagctcggccaccgcgttcgtgctgtccacgggcgggttcaccggcaacccgttccacgactacacggacgtgctcatcccggccttcatcacggcgcacccgctccgcggcgaggtccagttcctggtgagcagctacaagtcgtggtggatgaaccgctacatccagatct

SEQ ID NO: 5942 - protein, 61 aa, Homo sapiens
CTVNSSATAFVLSTGGFTGNPFHDYTDVLIPAFITAHPLRGEVQFLVSSYKSWWMNRYIQI

SEQ ID NO: 5943 - DNA, 319 bp, Homo sapiens
  misc_feature (313)..(313): Wherein n may be a, c, g or t
aggcctttcgagtggaatcgtcaacgtgccccaagacattcctcgactcgtccgtatcgcatacgaggagacattcacctggcccgacgcatgggcgagtcgcggggaagacgccgccctcgaatctagatcgcgccacaaggcagccacgtctcgggctatgacatatcgactttccgatcccttcggcgcctcaagcctcatgaagggaatcaccgacatgaagaccgtcgacccggaaaacacacgcgggcacgcctcggtgcgcgattccgaggactccatcgaagtcatcgtcgtacagcagaccacncccccc

SEQ ID NO: 5944 - protein, 98 aa, Homo sapiens
MTSMESSESRTEACPRVFSGSTVFMSVIPFMRLEAPKGSESRYVIARDVAALWRDLDSRAASSPRLAHASGQVNVSSYAIRTSRGMSWGTLTIPLERP

SEQ ID NO: 5945 - DNA, 279 bp, Homo sapiens
  misc_feature (1)..(1): Wherein n may be a, c, g or t
ncgtcctatctcgtctttggattggtgctgttggggattgggacggtcatctcggacgtcgggagctccctatacaacggcatgcttgatgacgttgcagagtctggcaaagtcggacggatttccggtctcggatcgggtatgggctatctgggtgggattattgccttactcgtcatctacatcgcctggattaaaccaaaagtgggttggtttggagtaaccaaccacgaaggcatgaacatccgcgtggcgatgctgttttgtgcggtatggatc

SEQ ID NO: 5946 - protein, 93 aa, Homo sapiens
  misc_feature (1)..(1): Wherein Xaa may be any naturally occuring amino acid
XSYLVFGLVLLGIGTVISDVGSSLYNGMLDDVAESGKVGRISGLGSGMGYLGGIIALLVIYIAWIKPKVGWFGVTNHEGMNIRVAMLFCAVWI

SEQ ID NO: 5947 - DNA, 375 bp, Homo sapiens
  misc_feature (107)..(107): Wherein n may be a, c, g or t
  misc_feature (112)..(112): Wherein n may be a, c, g or t
  misc_feature (116)..(116): Wherein n may be a, c, g or t
  misc_feature (228)..(228): Wherein n may be a, c, g or t
  misc_feature (238)..(238): Wherein n may be a, c, g or t
  misc_feature (319)..(319): Wherein n may be a, c, g or t
  misc_feature (336)..(336): Wherein n may be a, c, g or t
gaattcagggagaggaattgtgatatcattacatagatagatactgtggacttaagtatttattaattcagttcaatcaaatgcagcaggtttaagttgtgtgctanagcanaatntgcagagaccatcttatatcctgttattggcaaagtatttctggcagaagtggtgtagtcatttccacatgtggtccctggtaacagagcatgaaggacttggggagggatntatataaatngctgagtcccatgagcataaacatccattgtgttgtgtctgaggaatctgtcactctaaacagcggtgccagacttctgtntgtgctggcactcttangagaaccgagtaagcaagcacttccttaccctgcatgcc

SEQ ID NO: 5948 - protein, 67 aa, Homo sapiens
  misc_feature (10)..(10): Wherein Xaa may be any naturally occuring amino acid
  misc_feature (13)..(13): Wherein Xaa may be any naturally occuring amino acid
  misc_feature (51)..(51): Wherein Xaa may be any naturally occuring amino acid
  misc_feature (52)..(52): Wherein Xaa may be any naturally occuring amino acid
  misc_feature (54)..(54): Wherein Xaa may be any naturally occuring amino acid
MDVYAHGTQXFIXIPPQVLHALLPGTTCGNDYTTSARNTLPITGYKMVSAXXAXAHNLNLLHLIELN

SEQ ID NO: 5949 - DNA, 189 bp, Homo sapiens
gacatttggtctgctggttgtgttcttgctgagcttatgctagggcagcctttgtttccaggtgaaagtggtgtggcccaactcgtcgaaatcatcaaggtccttggtactccaacaagggaagaaattaaatgcatgaacccgaattacacagagtttaagttcccacaaatcaaagctcacccatgg

SEQ ID NO: 5950 - protein, 63 aa, Homo sapiens
DIWSAGCVLAELMLGQPLFPGESGVAQLVEIIKVLGTPTREEIKCMNPNYTEFKFPQIKAHPW

SEQ ID NO: 5951 - DNA, 418 bp, Homo sapiens
gtcgactccgtggtttccaacacaaacacattctctggatttcaggcgcacctcaatctctccacttgaggggcagaggaggctccaggctctgtggccagccctctgcctcctactcgactccctggctccccatgggatggaggtggtgagatccaaaaaccctcagtgggaaaacaggttctgcaccttcctgccacctccacgcctctccctgggctgtagtcttggcatttgccaaggcccccgtgggcatccacgccctgttttccccagaagggtctcccctcattccctgcaaaccagcagggcatctccaggtggaaagaaggggagggcttgggaggcagatggaggttcaaggtctagttctttgcatttaccagctcagtggccttgagcaaaccgacttagatct

SEQ ID NO: 5952 - protein, 90 aa, Homo sapiens [sequence omitted]

SEQ ID NO: 5953 - DNA, 551 bp, Homo sapiens
ggtaccgagctgcgcgtgtggtatgcggccttctatgccaagaagatggacaagcccatgctgaagcaggccggctctggcgtccacgctgcaggcaccccagaaaacagcgcccccgtggagtcggagcccagccagtgggcgtgtaaagtgtgttctgccaccttcctggagctgcagctcctcaatggtaaggaggacgtgtggggagccccagttgtaaaactcctgtgtcgatttctctctgacttacgctgtcacctgtctgcggctgtcgggggtgtcccagactttgtcctgtctgccccattgccccacaatgtagtcgccagaaccaaggctttctcagggtttaaagcttctgggcagtcccgcttcccacccccgacccctgcaggcctcactcctcactcctcctggttgggaagttgcatttcagctgggcgccttgactctggagcactggcaggggccaggggccaggagccagccgtggcatgtgttgtgcactcttgcctttgttgtctctacttgacagccccctcacgcgt

SEQ ID NO: 5954 - protein, 168 aa, Homo sapiens [sequence omitted]

SEQ ID NO: 5955 - DNA, 345 bp, Homo sapiens
acgcgtaagccatcgcgcccggcctgttacaacaaattctaaatgatgcctccaacaaagagattaactccattattaatcttctggttaatgtgcttggccaggatagagggagttctgtgtaaaatgaagtgatagagagctcacacacaaatgcactgcagggtcttggaactggaaggcatctgaattcagccttctcattttacagctgtggaaactgatgcccagagagggacatgccttagccagggccacacagtgagacacaggtagagctggatttggaagcagcatcctaatgcataaagctgtctttctccccttaccaggctgcctcctggg

SEQ ID NO: 5956 - protein, 69 aa, Homo sapiens
MLLPNPALPVSHCVALAKACPSLGISFHSCKMRRLNSDAFQFQDPAVHLCVSSLSLHFTQNSLYPGQAH

SEQ ID NO: 5957 - DNA, 261 bp, Homo sapiens
  misc_feature (1)..(1): Wherein n may be a, c, g or t
nctcgagcatgaaaaaaagaagagctgctgaactacataaagaaaaacatatgcaatagctaagggcacgtccttctgtctcgcaatatgaaaatacaacttgtaagatggcattgttctcgcaatgctctttggaatcgtgctttctactctacgagaaaggccactaagaacgcttcgtcggcgactccagctactatgacatccatggtatctcagaggcaagatcttttcatgacagatccactatctcctggatcc

SEQ ID NO: 5958 - protein, 58 aa, Homo sapiens
MKIQLVRWHCSRNALWNRAFYSTRKATKNASSATPATMTSMVSQRQDLFMTDPLSPGS

SEQ ID NO: 5959 - DNA, 335 bp, Homo sapiens
  misc_feature (335)..(335): Wherein n may be a, c, g or t
tgtacacacaaatacaccgaacaacattacactcgtttacattcactcatttatttaaaaatactttcccacattccaagtcgaacctgctggctttataagccaccattttcaggcttggtcataaaccagagaaaaggaatgagaacccaggaagggaaaggtgggatggaagaatgagaaaagtagagaaaggaaaggcagaaatgcaaggaaggcaaaggaagagagaaaagaaaaaaagcatccagcatactgacaaaactgactctgggaattctttgaatggtggtgctacaatgtgcctcttttcattatgaaatcatttcctagtn

SEQ ID NO: 5960 - protein, 52 aa, Homo sapiens
MLDAFFLFSLPLPSLHFCLSFLYFSHSSIPPFPSWVLIPFLWFMTKPENGGL

SEQ ID NO: 5961 - DNA, 467 bp, Homo sapiens
gaattcaaaaacattttcccatgaaaaacacacctatctacccagggaacgagtaaatgtccagcactgctgactaaaggagccgcggcaccctccctaccccccaggtcctgtcatggcagtgggcatgtctcctccgcacagcagccctgaggagccgccgccacaggcccacaggtgtgtcctcgtgcagactcttctgctggggctggcttcggggagatcttgctcatttggctcatctggtggcacgacccaagcggtgccctcgtggcccgcctgctttgcagttaattaaaaaaaacccaacgcactagtataagagtcaactctaagaaactgctgtaagttcataaatgttcattgcacaactgagcagatttaaagaaggatttgcacatttacaggtacacatacatgcagttataggtaaataagcacctgcacattcacaggcacacacgcgt

SEQ ID NO: 5962 - protein, 60 aa, Homo sapiens
MAVGMSPPHSSPEEPPPQAHRCVLVQTLLLGLASGRSCSFGSSGGTTQAVPSWPACFAVN

SEQ ID NO: 5963 - DNA, 219 bp, Homo sapiens
agatctacgtcaaccattaattttaatatcccttctatgaaaaatattactaatatgcaaaatgtctctctaaattcgatactttcagagttggaattttcaaatagcctaggaacacaacctaattaccaatcgtctcccgtgttgtcttcggtttcttcttcaccaaaacttttccctcgactttcctcagatagtcttgataatggaatccaacta

SEQ ID NO: 5964 - protein, 73 aa, Homo sapiens
RSTSTINFNIPSMKNITNMQNVSLNSILSELEFSNSLGTQPNYQSSPVLSSVSSSPKLFPRLSSDSLDNGIQL

SEQ ID NO: 5965 - DNA, 657 bp, Homo sapiens
cccccccccccccccccccccccaacaccacccacaaaaaacccccccccaaaagtgcccggcgatttggggcccgcaatggttttttgtcaccccacacacccacacccacccaaaaaacccccccccccccaaatttttccccgtttttttttttttggggaaagggaaggaaaaaaatacaacaaggaaaaagcaaaaaccaaaaaaacccaaagtgggtaccaggttgggttccacttttaaaccccccccttttttggaattttggtttccaaatagaaaaatcaaacaaaaaaagggggggttaaaaaatctgggccccaacggatcccccccactttttttcccccaaaaaaggggaaaaaagtaaaaaaaccctttcccgggggggagcctttaaaaaattcaaaaggcgggggtttcaaggaaccgaaatttcacccccgaaaccacacccgggggaaaaagggaaaaacccttttaaaaaaaaaaaaaaaaaaaaaagagctccagagagaacatttcagtaaacaaaacccacatccagccctgttaattcagtggaaaatgaggacttcccccacttgaatgtcctcatttggacaactagacattgagaaaggccttagcatgggcctggtacttgctgggccc

SEQ ID NO: 5966 - protein, 81 aa, Homo sapiens
PPPPPPPPTPPTKNPPPKVPGDLGPAMVFCHPTHPHPPKKPPPPQIFPRFFFFGEREGKKYNKEKAKTKKTQSGYQVGFHF

SEQ ID NO: 5967 - DNA, 226 bp, Homo sapiens
  misc_feature (76)..(76): Wherein n may be a, c, g or t
tgcctttgcactctttggatggtttccgtccatcttgagggaaccttcgggcgcctccgataccctttcgaaggcngaccgccccagtcaaactccccgtctggcattgtcccaccgccgggtcgcggcggctggttagaaacccaatactgcaagggtggtatcccaacagcggctcctcggcaactggcgttaccgattcatagcctcccacctatcctgtaca

SEQ ID NO: 5968 - protein, 75 aa, Homo sapiens
  misc_feature (26)..(26): Wherein Xaa may be any naturally occuring amino acid
CLCTLWMVSVHLEGTFGRLRYPFEGXPPQSNSPSGIVPPPGRGGWLETQYCKGGIPTAAPRQLALPIHSLPPILY

SEQ ID NO: 5969 - DNA, 328 bp, Homo sapiens
agatcttagcaacctcagcctgtatttttcgttaggttgagaactttcacctgctcacttaaagcttctctttggtatatccgaattactagcatcactacttttatgtctaggagccattattaagtaaaataagggctactaaaatacaagcactgcaataccatgagctgatctgacacctcagatggctactaagtgactgacaggtaagcagcatatacagcatggatctgctggaccaagggatgaggcaggtcctgggtgggatggtgcaagagttcatcatgctactcagaacaggaagcaatttaaaacttaccaattg

SEQ ID NO: 5970 - protein, 59 aa, Homo sapiens
MMNSCTIPPRTCLIPWSSRSMLYMLLTCQSLSSHLRCQISSWYCSACILVALILLNNGS

SEQ ID NO: 5971 - DNA, 234 bp, Homo sapiens
  misc_feature (169)..(169): Wherein n may be a, c, g or t
gccgagaccgttgaaggtgccgttgctatcaagcgcccacagcttaaaggattaattaatggtgtcctgcgtcagttccagcgccagcaagacgtcctacaggctgagtttgaacagagcgaacaacgcttcctgcacccgacctggttgctaaaacgcctgcaaaaanggtatccgccacagtggccacatatagtagaagccaataatctgcgtccaccgatgtggttacgc

SEQ ID NO: 5972 - protein, 78 aa, Homo sapiens
  misc_feature (57)..(57): Wherein Xaa may be any naturally occuring amino acid
AETVEGAVAIKRPQLKGLINGVLRQFQRQQDVLQAEFEQSEQRFLHPTWLLKRLQKXYPPQWPHIVEANNLRPPMWLR

SEQ ID NO: 5973 - DNA, 206 bp, Homo sapiens
acgcgtgcagggagacaatatggaatggcaagcaggaagaggtggacctgcctggaggatcactcacttcccttttacgcaaacattcaccaaaagcagtacattcctgatgggggacggttgataaatgttagcccttcagttgcttcaatttcatgtgttgtctgccttcttagctacttttttccgggtttgttggcttttct

SEQ ID NO: 5974 - protein, 60 aa, Homo sapiens [sequence omitted]

SEQ ID NO: 5975 - DNA, 442 bp, Homo sapiens
cctagggactcagcaagaaaaaggtaatgaggggcttctgggtggcccctgccactatctggggacagaggctgactggtgtctctccttggtggcaggagctgcatcccaagtccctcaggctgcacgtgcccctccaaggtgccttccctagacccctgcgctggacttccaaggtgacacggcgtccatgccctgtgagaatcctttcaaactggtgtgagctcggagatttcctgcagtgcttctgaggatggggcaggggttaacctgcactcagtgcccaccacagaggggccacgtgaccacgtctcagagtggcttcctcgtgagcccatgaagatgcctcacccagccccatttgactgtgaagcagcaggctcttggccctaaaatgctaacaggggcttccgtgctcaggccggcatgacccccagccacc

SEQ ID NO: 5976 - protein, 74 aa, Homo sapiens [sequence omitted]

SEQ ID NO: 5977 - DNA, 501 bp, Homo sapiens
agatcttccgtgtggctctccggtctgaacatacacatccaaccacatgcctgctaaagagaagcagacttcccttgtggttgggggtgggaaaaggaggaggggcagtgagctccagaagaaacccaggcaggtctaagagaaccagcaagacatgtccatgtcccactcaaggattctgctcttggcaaatgtggcctggtggatttgcctggttctccctgatctccccaagcagataagtcactcttcctctggctggagcagcacatgatgggggaagttgggggagagactggaaatgtgtatcctgattctggtcccttttggggcatggcccaaggtggaaatgtaagcagtggagtcataagcatgttcctttaataactgtgatgtttgtgatcatctcctaggtgcctggtagtttgatcaagatagtacagtctatacctgattaatttaaggtagttttgcttgctgatgagggcccagaaaccatgg

SEQ ID NO: 5978 - protein, 106 aa, Homo sapiens [sequence omitted]

SEQ ID NO: 5979 - DNA, 447 bp, Homo sapiens
aagcttcaacaccgctatggtgacgtattcggcctgcagatgggttggaagcccatagtcattgtcaacagactgaaagcggtgcaggaagtgctggtgactcatggagaggacactgctgaccgccctccagtgcccatctttaagtgcctgggtgtgaagcccagatcccaaggtgtggtctttgcatcttacgggcctgagtggcgagagcagaggcgattctctgtgtccaccctgcgcaccttcggcatgggcaagaaatccctggaggagtgggtgaccaaggaggccggccacctctgtgatgccttcactgcccagaatgggcagtccatcaatcccaaggccatgctgaacaaagccttgtgtaatgtgatcgcatccctcatttttgcccgtcgctttgaatatgaagacccttacctcatcaggatggtgaaacta

SEQ ID NO: 5980 - protein, 149 aa, Homo sapiens
KLQHRYGDVFGLQMGWKPIVIVNRLKAVQEVLVTHGEDTADRPPVPIFKCLGVKPRSQGVVFASYGPEWREQRRFSVSTLRTFGMGKKSLEEWVTKEAGHLCDAFTAQNGQSINPKAMLNKALCNVIASLIFARRFEYEDPYLIRMVKL

SEQ ID NO: 5981 - DNA, 300 bp, Homo sapiens
  misc_feature (46)..(46): Wherein n may be a, c, g or t
cgtacccgtcaggataaaatccgtctgattgtccaggcgattattngcgtctggctggtgactgcgctggcgttgcatctggcggaagttggcttgattggtttgtcagtcattattctggcaacatcattgaccggtgtcaccgatgagcatgctatcggtaaagccttcaccgaatctctgccattcaccgcactgttgacggtgtttttctcggtagtcgcggtgattatcgaccaacaactgttttcgccaattattcagtttgtgttgcaggcatcggaacatgctcagctgtcg

SEQ ID NO: 5982 - protein, 100 aa, Homo sapiens
  misc_feature (16)..(16): Wherein Xaa may be any naturally occuring amino acid
RTRQDKIRLIVQAIIXVWLVTALALHLAEVGLIGLSVIILATSLTGVTDEHAIGKAFTESLPFTALLTVFFSVVAVIIDQQLFSPIIQFVLQASEHAQLS

SEQ ID NO: 5983 - DNA, 431 bp, Homo sapiens
  misc_feature (420)..(420): Wherein n may be a, c, g or t
  misc_feature (421)..(421): Wherein n may be a, c, g or t
  misc_feature (422)..(422): Wherein n may be a, c, g or t
  misc_feature (423)..(423): Wherein n may be a, c, g or t
  misc_feature (425)..(425): Wherein n may be a, c, g or t
  misc_feature (426)..(426): Wherein n may be a, c, g or t
  misc_feature (427)..(427): Wherein n may be a, c, g or t
  misc_feature (428)..(428): Wherein n may be a, c, g or t
  misc_feature (429)..(429): Wherein n may be a, c, g or t
  misc_feature (430)..(430): Wherein n may be a, c, g or t
tcatgagtcgcccagaccgcgtcgtccgcgttcccctgcgtgtagctcgatcagcggtgaggcgggaagacagctaccagaccgtgatcctgcgttactgggcggtcgttcaaaggcttcgccgggtcgggcatggctcaggttggaagcggcagctcaagcgcttaatgcgtcacgcctaaacggtagaactcgtcggtaagcgctgaagacgaggaacaccgccacagccgtctcgcccacggcgatacccagtgcgccaccgttagcaccccattcgtgcgccaacccgatggtcgtcggcacaccgacggccacgccaagaatggtggcattgaggccctcacggttcaggccaaacggcaaaagcaagtgagtgttgacgaatgtgtggatcgcaagggacgcgaacgccatgcnnnncnnnnnnc

SEQ ID NO: 5984 - protein, 86 aa, Homo sapiens
MAFASLAIHTFVNTHLLLPFGLNREGLNATILGVAVGVPTTIGLAHEWGANGGALGIAVGETAVAVFLVFSAYRRVLPFRRDALSA

SEQ ID NO: 5985 - DNA, 296 bp, Homo sapiens
  misc_feature (15)..(15): Wherein n may be a, c, g or t
  misc_feature (296)..(296): Wherein n may be a, c, g or t
agatctactcagtgngtccggggaaaatgtgagaggagtaaggaaagtgaagacacagatgtgttggaggctccaggctagcatggtaagagaaaggttcctggattctgattacagaatggacctgtgggggtctcagattgaggcctaacagcatttaaaaggagcaactggtagaacagatttggggaaatatttatgggtagaagagaatgataagtgagctacagaaataggtagaagcccatctaaatatcaggtaagtatcaggggggttatggaaaatgctttggtan

SEQ ID NO: 5986 - protein, 50 aa, Homo sapiens
  misc_feature (48)..(48): Wherein Xaa may be any naturally occuring amino acid
MLLGLNLRPPQVHSVIRIQEPFSYHASLEPPTHLCLHFPYSSHIFPGXTE

SEQ ID NO: 5987 - DNA, 501 bp, Homo sapiens
  misc_feature (1)..(1): Wherein n may be a, c, g or t
  misc_feature (2)..(2): Wherein n may be a, c, g or t
  misc_feature (400)..(400): Wherein n may be a, c, g or t
nnacgcgtggctttttcttgaatttgcagtttgaaaaataactacatggatgataagaaaacatggagtacagtcactttgagaaccttcaatcagctggtaacgtcttcgttaattggatactcaaaaaagatggatagcatgaatcacaagatggaaggaaatgcgggccacgaccacagtgatatgcatatgggagatggagatgatgcctgttcgatgaatatgctattttcgtggtcatacaagaatacgtgtgtcgtctttgaatggtggcatatcaagaccctgcctggactgattttaagttgtttagcaatttttggtctagcctacctctatgagtacttaaagtactgtgtccataagagacaattatcccagagagtattgttaccanatagatctctgaccaagatcaaccaagccgacaaagtgtccaatagtattctatatggtttgcaagtgggattctcattcatgctcatgcttgtattcatg

SEQ ID NO: 5988 - protein, 152 aa, Homo sapiens
  misc_feature (119)..(119): Wherein Xaa may be any naturally occuring amino acid
MDDKKTWSTVTLRTFNQLVTSSLIGYSKKMDSMNHKMEGNAGHDHSDMHMGDGDDACSMNMLFSWSYKNTCVVFEWWHIKTLPGLILSCLAIFGLAYLYEYLKYCVHKRQLSQRVLLPXRSLTKINQADKVSNSILYGLQVGFSFMLMLVFM

SEQ ID NO: 5989 - DNA, 342 bp, Homo sapiens
  misc_feature (1)..(1): Wherein n may be a, c, g or t
  misc_feature (2)..(2): Wherein n may be a, c, g or t
  misc_feature (3)..(3): Wherein n may be a, c, g or t
nnncgtgatgttctagcatttactcaaccacaactactaaggattttaatcaagttcgtcacagactataacagtgagagacaggatgaccattcttctcttcaagggtttgaaaataaccacccacaaaaattacccattgtaagagggtttttgattgcgtttgctatgtttctggtgggctttactcagacatctgtcctgcatcaatatttcctgaatgtcttcaacacaggcatgtatattaagagacgcctaacggctttaatatatcaaaaatccttagtgctatctaatgaggcttctggactttcctctaccggtgacattgtcaatctcatg

SEQ ID NO: 5990 - protein, 114 aa, Homo sapiens
  misc_feature (1)..(1): Wherein Xaa may be any naturally occuring amino acid
XRDVLAFTQPQLLRILIKFVTDYNSERQDDHSSLQGFENNHPQKLPIVRGFLIAFAMFLVGFTQTSVLHQYFLNVFNTGMYIKRRLTALIYQKSLVLSNEASGLSSTGDIVNLM

SEQ ID NO: 5991 - DNA, 387 bp, Homo sapiens
  misc_feature (1)..(1): Wherein n may be a, c, g or t
  misc_feature (387)..(387): Wherein n may be a, c, g or t
nacgggaccgtcccggattcgcaccggtgttccaccgcgattgaggctcattgttccacaggctggtttgatggactcatggacgtcctcattctcggcggtacgacgaaggcccggcagttagccacccgattgttcgatgagggggtagacctgtgcagctcgttagcggggcgtacgaagtcccccccggccagtcctggcccgactcgggtgggtggtttcggcggcgtcgacggtctcaaagaattcctgactgataacgaggtcaaagtcatggtggatgcctcccaccccttcgccgcagctatgcacggccccgccgctcaagcatgccgcgacctcaaccttccgctggcacggctggccccaccaagctggcaatan

SEQ ID NO: 5992 - protein, 129 aa, Homo sapiens
  misc_feature (1)..(1): Wherein Xaa may be any naturally occuring amino acid
  misc_feature (129)..(129): Wherein Xaa may be any naturally occuring amino acid
XGTVPDSHRCSTAIEAHCSTGWFDGLMDVLILGGTTKARQLATRLFDEGVDLCSSLAGRTKSPPASPGPTRVGGFGGVDGLKEFLTDNEVKVMVDASHPFAAAMHGPAAQACRDLNLPLARLAPPSWQX

SEQ ID NO: 5993 - DNA, 399 bp, Homo sapiens
  misc_feature (1)..(1): Wherein n may be a, c, g or t
  misc_feature (2)..(2): Wherein n may be a, c, g or t
nngggcccaggatgcgtcggggtcgtcgacatccccggcgaccaccaagttgatccccgacggctgtgcggcgccattctcgaattccttggtgaccgagtcgtacccacccgagccagtgaggttctcttcaatgaggatcatcgcgcgattggcctgcgtggtgccaacggcaaaagctaccgcgccgatcacgtcgtactcgccgctggggtggacaccggtgcgatcaccggcattccgcaggccctcactgatctactgcgcccggtacgaggtgaggtgttgcgactccgcgtccccgaagccctgcggccattggtaacaagaaccatccgcggcgtcgttcagggaaatgccgtctacatcgtcccgcgcgccgacggcaccatcgtccta

SEQ ID NO: 5994 - protein, 133 aa, Homo sapiens
  misc_feature (1)..(1): Wherein Xaa may be any naturally occuring amino acid
XGPGCVGVVDIPGDHQVDPRRLCGAILEFLGDRVVPTRASEVLFNEDHRAIGLRGANGKSYRADHVVLAAGVDTGAITGIPQALTDLLRPVRGEVLRLRVPEALRPLVTRTIRGVVQGNAVYIVPRADGTIVL

SEQ ID NO: 5995 - DNA, 318 bp, Homo sapiens
aaaaatcggcccacatgttggtgcggtaaagttgttaatcctgatccgaatccgctggatcctaactcatgtggacaaacctgcaatgcttctacttgtatgcatggttgttccaaaatttgtcatctagggccgcatccagagtgtactagaatggtcgagattatgtgccactgtggtaagcattcgaaaagtatcttttgttaccagtctaaagttatgaaaaaaaacttcaactgtcaagaagtatgtggattgcctttatcttgctccatccacacctgtaaaaagaaatgccaccctggcttatgtgggcca

SEQ ID NO: 5996 - protein, 106 aa, Homo sapiens
KNRPTCWCGKVVNPDPNPLDPNSCGQTCNASTCMHGCSKICHLGPHPECTRMVEIMCHCGKHSKSIFCYQSKVMKKNFNCQEVCGLPLSCSIHTCKKKCHPGLCGP

SEQ ID NO: 5997 - DNA, 498 bp, Homo sapiens
  misc_feature (1)..(1): Wherein n may be a, c, g or t
  misc_feature (2)..(2): Wherein n may be a, c, g or t
nnaggtggtagaaaatcaaccttctccgatgaatgtgggatccccccgcctggccaacccgtggacaccttgtggctgccaaagacgttcttgaaagctgttctccaggccggtgttctaaatgtaatactgggtctggataacgccgtcacagacgccattctggagaatccgcgactgcgcaaattgtctttcaccggttctaccggggtgggtgcaaacctgctgagcaaggctgccaggcacgtgttgcgtacctcaatggaacttggtggcaacgctcccttcatcgtctttgatgacgcggacctggaccaggctatcgccggggccaagggtgccaagatgcgcaatatgggcgaggcctgcatcgctgcgaaccgctttatcgtccacgagtcggtggccgaggaattcaccgacaagatgatcgaaatgatgtccgggttggtcgtcggggacgggttggacgaaaaatccgaggtcgggcctatgatc

SEQ ID NO: 5998 - protein, 166 aa, Homo sapiens
  misc_feature (1)..(1): Wherein Xaa may be any naturally occuring amino acid
XGGRKSTFSDECGIPPPGQPVDTLWLPKTFLKAVLQAGVLNVILGLDNAVTDAILENPRLRKLSFTGSTGVGANLLSKAARHVLRTSMELGGNAPFIVFDDADLDQAIAGAKGAKMRNMGEACIAANRFIVHESVAEEFTDKMIEMMSGLVVGDGLDEKSEVGPMI

SEQ ID NO: 5999 - DNA, 375 bp, Homo sapiens
gatccaactactgtttcgtatattttttgtatttcaagaacaattggtatggtagtgaacggaccaataccggatgcaagaaatgtggccctaagagtcaaggctgaggctgcagaattccgttataaatatggttatgatatgccatgcgatgtattggctaagagaatggctaacctttcccaaatctatactcaaagagcatatatgagaccattaggtgttatactcacatttgtttcggtagatgaagaattgggtccctccatttacaaaactgaccctgcaggttattacgttggctacaaagctactgcgacaggaccaaaactacaggagatcacaacaaacttagaaaaccatttcaaaaagagt

SEQ ID NO: 6000 - protein, 125 aa, Homo sapiens
DPTTVSYIFCISRTIGMVVNGPIPDARNVALRVKAEAAEFRYKYGYDMPCDVLAKRMANLSQIYTQRAYMRPLGVILTFVSVDEELGPSIYKTDPAGYYVGYKATATGPKLQEITTNLENHFKKS

SEQ ID NO: 6001 - DNA, 558 bp, Homo sapiens
gttgcagttaattcaagtgtgttatacatggagcttcactctcataatcctagggaggattatgacgtttgatctagatgccatctgccagctgagggatgggggaaagatacagtcacaaaatcacgtgtaaacttttaatgaccgccttaacattatacagaaaaaaagctatatgtccagttaattcactgtcattatatagaaaatctgtagttctttttttcatttctcccagtaaatttgagctttacaagccgaatttttgcttataaacttgataaatgaaattccagagtctggctctaaaaatataaatcttcacaatcaaataaatcatcccaagaaaggagcctaaggaatatcctcctccttttctacggctctcaaagaagagatgtgttctttgcgctgtatatcacatgaaaaaatctaatttgataaagcctttaaattgagaccttccagaggatattaatactgttttcatatgaaatatggaagttcatgtgtattcataacctttggtcccattccttattaatacatatcagatct

SEQ ID NO: 6002 - protein, 58 aa, Homo sapiens [sequence omitted]

SEQ ID NO: 6003 - DNA, 365 bp, Homo sapiens
  misc_feature (1)..(1): Wherein n may be a, c, g or t
natgaacgatgagacgtcgtgcactctgccactgcgcccaccgcctctgcaccttgctcatgaaataattacagggccctctcctctgccaaatgaggttgtaattaaccctaattgctcaaaatgcaactggctaattctgggagattaatcaagggggattcaattgttagtgaatgacttaatatgacaaattgctacattacccgaggaggccctgctgcccccagccatcagcaccatgtcctggtagactctggacccacagtgtcctggggcttcccagctttctgggatctgcctccccaaattctacctaggaaatgggcccctgcatgagtacaaatagcatagatgccccatgg

SEQ ID NO: 6004 - protein, 50 aa, Homo sapiens
MTNCYITRGGPAAPSHQHHVLVDSGPTVSWGFPAFWDLPPQILPRKWAPA

SEQ ID NO: 6005 - DNA, 245 bp, Homo sapiens
  misc_feature (245)..(245): Wherein n may be a, c, g or t
accggttccaaaggcaaacagattgcccaatgggctgggtgggtgtggacccagcagaggcctgggcctgaccagacctggacaaggacccctttgtgtccacactgggtgtgggccggcctccaagcccgctcctcaccctgggtctggctgggcaaagctgcctggcactcaggagctcctgctgactccctgggggaagccaagccaaggccccttgcaggaaggttgatccacctcattgn

SEQ ID NO: 6006 - protein, 80 aa, Homo sapiens
MRWINLPARGLGLASPRESAGAPECQAALPSQTQGEERAWRPAHTQCGHKGVLVQVWSGPGLCWVHTHPAHWAICLPLEP

SEQ ID NO: 6007 - DNA, 374 bp, Homo sapiens
  misc_feature (332)..(332): Wherein n may be a, c, g or t
  misc_feature (363)..(363): Wherein n may be a, c, g or t
agatctcagcagacaagaagaatggagcaaatgcagcaattcagagaacagcatcaagtcccacatgatcaggaaacgcggcccttaggtgtcacgtcctgcgtgggtgagtctctttggacggcaggtcctggaagggccagcagtgaggggcaggatgtgtatacattttttattaacagcatcggtagcagaatggtgtccagccagtagcagctcctctccccctgtgtcacaaacctcactgcacagtcgtgcccatcaacaatggcactccaaggagtgtcgtatgtgaaatggaatatccacagactatcatgtctttttttttntattattatactttaatttttagggtacgtnttcgcattgtg

SEQ ID NO: 6008 - protein, 63 aa, Homo sapiens [sequence omitted]

SEQ ID NO: 6009 - DNA, 373 bp, Homo sapiens
atgacgctcggcatcggcgcggcgctgagcgagaacctggtcgccgatacgcgctcgggcgcgttcatcaaccacgacctgaccgaatacctgatcccggtgcatgccgacatccccgagatcgacgcgatcgtgctcgacggcgtcgacgacaagaccaatccgctgaaatcgaagggcgcgggcgagctcggcgtgtgcggcgcgggggcggcgattgccaacgcgatccacaacgcctgcggggcgcgggtgcgcgactatccgatcacgctcgacaagatcatggaccatctcgggtgagtctcgccacacgcgatgcgctcgctgagctcgacgcggccttgcgcgccgggccgagtgcgacacgcgt

SEQ ID NO: 6010 - protein, 100 aa, Homo sapiens
MTLGIGAALSENLVADTRSGAFINHDLTEYLIPVHADIPEIDAIVLDGVDDKTNPLKSKGAGELGVCGAGAAIANAIHNACGARVRDYPITLDKIMDHLG

SEQ ID NO: 6011 - DNA, 288 bp, Homo sapiens
gcacagattggtggttgcattgctaattcttgttcaggaaccaacgcctaccgttacggtaccatgaaggagaatattataaacatgactatagtgttgccggacgggaccattgtcaagacgaagaaaagacccagaaagtcgagcgctggctataacttaaatgggttatttgtgggaagtgaaggtaccttaggtattgttactgaagctactgtcaagtgtcatgtcaagcccaaagctgaaactgttgcggtggtatcctttgatactatcaaggatgcggcc

SEQ ID NO: 6012 - protein, 96 aa, Homo sapiens
AQIGGCIANSCSGTNAYRYGTMKENIINMTIVLPDGTIVKTKKRPRKSSAGYNLNGLFVGSEGTLGIVTEATVKCHVKPKAETVAVVSFDTIKDAA

SEQ ID NO: 6013 - DNA, 367 bp, Homo sapiens
  misc_feature (1)..(1): Wherein n may be a, c, g or t
nacgcgtgaaaacagggacgcagcgaaggggaaaggaaagctgccagagggcaggagtggaaaggatcctggcgagcaccgggaggagtggcggctgcgggatcagctgccgagcaggcacagggacaggtgcctggagaagtactgggagagcgcccaggagcgctaccggctgagggtggggaagcgcagggccaagcgcgcgaagcaggttgtgggggaccgggtcgagtggaagtacccgccggagaggaaggccggctggctgtggcgcccagagacggtggagtccgaggaggaggagaaggagccctgcagaaggaagagcaggcccttagaagtccagcagcagcaactccggcggcca

SEQ ID NO: 6014 - protein, 119 aa, Homo sapiens [sequence omitted]

SEQ ID NO: 6015 - DNA, 277 bp, Homo sapiens
  misc_feature (1)..(1): Wherein n may be a, c, g or t
  misc_feature (277)..(277): Wherein n may be a, c, g or t
nagatctagaccacacaacaaactctgaactaaacagaaactaaacccaatcgataacaagctgatgaagtgaacagatggttctcagaaggtgtacaaagggccaataaacagaaagaaaacaaacaagcaaaagactgttcaccgtcatcagccaccaaagacatgcacatccaaactccactgaaattccatcctaccccagggagaatggcagtcatcaggaaagcacacacacacacatgcacgcacgcacgcacgcacgcacgcacgcggn

SEQ ID NO: 6016 - protein, 73 aa, Homo sapiens
QADEVNRWFSEGVQRANKQKENKQAKDCSPSSATKDMHIQTPLKFHPTPGRMAVIRKAHTHTCTHARTHARTR

SEQ ID NO: 6017 - DNA, 284 bp, Homo sapiens
gaattcaacaaacacacaggaggagaaagtcacaaaagtctcacctcctcggagaaaggcttataaagaagacaaatctgatcggcagggcaactacgtgaaaaaggataatggtcctgagacaggtcggactgggtataagatacaacaggcaaagcagctgcaacagcagcaaaggccaacatctgcttcagcttcgtcaaggcaatctgaaaaggaaagttcttgtgatgatgtagaaattgatgcaattcttgaggaagaagaggcccctcatgcccctc

SEQ ID NO: 6018 - protein, 51 aa, Homo sapiens
MLAFAAVAAALPVVSYTQSDLSQDHYPFSRSCPADQICLLYKPFSEEVRLL

SEQ ID NO: 6019 - DNA, 403 bp, Homo sapiens
aaattttttcgggcagaatcccagtcctgagagcatgcgcacccgcctgcacgatgagcaaacatcgattgcggccggcctgcacctcatcaaacacgaagcacaccggatacttgaataccttaaacaacccgcgtaaatgaaaatgactgccgtaatagtagaacctgtcagttgccgccgaagtgctgcagaaatactgcattaaaagtggcaaagtgactgtgctgaacacgttcagcagcatcaaggaagctcaaccctttctttgtgaccaggtcgtagatgtgatcttcctcgacgttgaaatgccaggtggatccgggtttgagctgctcgacagccttccctattcgccgcagtgattctgaccacatctaagacagaatacgcggctgcatgg

SEQ ID NO: 6020 - protein, 82 aa, Homo sapiens
MLLNVFSTVTLPLLMQYFCSTSAATDRFYYYGSHFHLRGLFKVFKYPVCFVFDEVQAGRNRCLLIVQAGAHALRTGILPEKI

SEQ ID NO: 6021 - DNA, 271 bp, Homo sapiens
  misc_feature (261)..(261): Wherein n may be a, c, g or t
  misc_feature (266)..(266): Wherein n may be a, c, g or t
  misc_feature (267)..(267): Wherein n may be a, c, g or t
  misc_feature (268)..(268): Wherein n may be a, c, g or t
  misc_feature (269)..(269): Wherein n may be a, c, g or t
ccatggaccatgtctttcctattccccattcagtccaccataccgagcatatggaaagctgtcagtgttgactgattaaatgaaagtttcttttttctcttttatgagtttatttttttctttttgtaaatgagtgttttttaactcatgccttttctcatgctgctgggtctgcctggaatgctcagggaatctgcctgaggaacacctttttgtctttaaagataatttttgtgtcatctcaacgacgacacatccccnccccnnnncc

SEQ ID NO: 6022 - protein, 54 aa, Homo sapiens [sequence omitted]

SEQ ID NO: 6023 - DNA, 338 bp, Homo sapiens
gtcgacgtcatgggcggcgaggagttgtcgggaggatagtggcaaggcgtggtgaacgctagggtgatgttccaggcggatagcttgcttgtactcgacgaactcacctcggaggtggagcgactggtcgtgcagaacgtgctgagtgccaatccggtcacacatcgaatggttgcgctccgcagcacgcagaaggtgctcgtcctgcagaacggtacgatcgctgacctcggaacccatgaagagctccttcggaggccggggatttacgcgaaatttgtcacggcggaacgttcgtagtcgtcacatcaaggggagagatcagcatggccacgcgt

SEQ ID NO: 6024 - protein, 77 aa, Homo sapiens
MFQADSLLVLDELTSEVERLVVQNVLSANPVTHRMVALRSTQKVLVLQNGTIADLGTHEELLRRPGIYAKFVTAERS

SEQ ID NO: 6025 - DNA, 529 bp, Homo sapiens
accggtcatcggaaagaccagcggtgctgctatacctcccacagtacatagaataaccccgtaaagaatgacctggctggggcctgagagcattgctttacctggaggtgcagccagtcagccaggggaacgaagcagtatttgtgggctgagcagagagggccctgggcagatcctgggtgtgtgcacatgagggccccgggcagggcagggcagaggaggttgggacactgagtcagaggtatgctcctgaaggcaacccacaagggggccagttcgtggaactgcaggcctgatcctgagcagcatggtgcggagctgtctggacaggcctgcagagaagggcgcctaccttactgaggccaaaccttcttcacccagcgtgtttctacctagcatttccaccttgccttagctggcctagcacatggaaagcaaacaaaaagcaatgaagttccaattccttgtgtaaaccagaaaaaaaagtttttgcaaatgagatgaaggttatatgtgtttattactgcag

SEQ ID NO: 6026 - protein, 63 aa, Homo sapiens
MLLRIRPAVPRTGPLVGCLQEHTSDSVSQPPLPCPARGPHVHTPRICPGPSLLSPQILLRSPG

SEQ ID NO: 6027 - DNA, 457 bp, Homo sapiens
ctcgagctgtgtgactcaggaggggtggtataccaggcagggatggtgcggtgcctcggggctcgcgtccaaggagactgtcaccacgtgtggtctggagagagaccactagggagggtgcatgtctggggctggttggcctcccggccggatatgtgagaaacagtctgttgtgatggtttggagggaggaaaaaattggggtttctgcaggaacttggggtacagccagacacaggggcagggtctggaccacactcttgctcctgtcagcacccttgaagatgaaatcaggcatcaacaagccccccttccctcctaggggagacccatgaatccgcatccacatggctcctgactcagggaaggagcacctggcggtcgatgcggtagtaatgatgcctgtcgtcacgtggcgtggctggtgctcacgaacaaggcaggccctccacacgcgt

SEQ ID NO: 6028 - protein, 79 aa, Homo sapiens
MWMRIHGSPLGGKGGLLMPDFIFKGADRSKSVVQTLPLCLAVPQVPAETPIFSSLQTITTDCFSHIRPGGQPAPDMHPP

SEQ ID NO: 6029 - DNA, 382 bp, Homo sapiens
  misc_feature (1)..(1): Wherein n may be a, c, g or t
  misc_feature (2)..(2): Wherein n may be a, c, g or t
  misc_feature (382)..(382): Wherein n may be a, c, g or t
nnaagcttatttgttattactaatattttccgtgaccagatgggccgctatggtgagatttacacaacttacaagatgattttggatgctattcgtaaggtgcctactgccactgttctccttaatggagacagtccacttttctacaagccagctattccaaatcctgtacagtattttggttttgacttggagaaaggcccagcccaactggctcactataataccgaaggaattctctgtcccgactgccaaggcatcctcaaatatgagcataatacctatgcaaacttgggcgcctatatctgtgaagactgtggatgtaaacgtcctgatctcgactatcgcttgacagaactggttgagttaaccaacaatcgcn

SEQ ID NO: 6030 - protein, 127 aa, Homo sapiens
  misc_feature (1)..(1): Wherein Xaa may be any naturally occuring amino acid
XSLFVITNIFRDQMGRYGEIYTTYKMILDAIRKVPTATVLLNGDSPLFYKPAIPNPVQYFGFDLEKGPAQLAHYNTEGILCPDCQGILKYEHNTYANLGAYICEDCGCKRPDLDYRLTELVELTNNR

SEQ ID NO: 6031 - DNA, 409 bp, Homo sapiens
  misc_feature (403)..(403): Wherein n may be a, c, g or t
  misc_feature (405)..(405): Wherein n may be a, c, g or t
  misc_feature (408)..(408): Wherein n may be a, c, g or t
  misc_feature (409)..(409): Wherein n may be a, c, g or t
acgcgtagttgttgaactgccccaatcccttcactacccaaggcgtggcatagatcagcgctgcaccacttccgatcataaccagtgcagccatcaccggcacgcgcagcgcgcccgccaggacacccaggcgttggtctacccagcctttgatatcggtgccgaacagcatcagcaggcagcctaccagcgccagggaaatctcagacagattgctgcggctccagcgcgaaaccgtggcgagcagatcaagtaccagatccatgggtcatccttaggtcaagaaatactgcagcaggtcattgaggaacagctggccccgtggtgtggccaccagtcgatccggttcgacctgcaaaaggccctttcgttcggccgcacggcgggcttcgggccccccccncnccnn

SEQ ID NO: 6032 - protein, 88 aa, Homo sapiens
MDLVLDLLATVSRWSRSNLSEISLALVGCLLMLFGTDIKGWVDQRLGVLAGALRVPVMAALVMIGSGAALIYATPWVVKGLGQFNNYA

SEQ ID NO: 6033 - DNA, 324 bp, Homo sapiens
tccggacagccatttctgtgttttaaacattgaactacgctatagtgaatgcgctcaggtttacaaattcctgtacccttgcggccacttcttcttcctttaggtttaggattttctctattccaaatttttctacgcaaaaggaggccagcgctgatccgaaaatgatggcatttttcatgttattgaaattgactgttcctactttggccatataaccaataaaaccactggcaaaagtatcaccggcgccagtaggatcaaatacatcagcaagcggaagggccggtgccgagaagatcttatcctcgccaaacaacagtg

SEQ ID NO: 6034 - protein, 59 aa, Homo sapiens
MAKVGTVNFNNMKNAIIFGSALASFCVEKFGIEKILNLKEEEVAARVQEFVNLSAFTIA

SEQ ID NO: 6035 - DNA, 542 bp, Homo sapiens
tttaatagctttgatataataacttttaaaaaccatgaaaggcttactatgcaatctttaagtttgttaaaccaattgggggctaaaattgacgaattgattgaaaaaatcaaaaaacaagaagaagagttgaacgctttacgccaagcaaacaccacgctgaatgcgcaaaatgaagaaaaagacattcaaatcgctattttatacgatgaattgagcgctaaagataagggcattcaaggtctttatgacaaaatctctgatttattgtcataaaccattaaaaacatgcactccgaaaacgacagcttagaaatcacttatttaggcaaacgctataaaatctctctcaataacacctttagcgatgagatgaaacgcaccctaaaggagcgtttccataaccaagaattaaacgccttagagcttttaaaggattatttgcatgaaagttgtcaaaacgagtatttgcataatgaactccaaaagcttttagaaaaaatctcatcatgttctatcacttaatcgctcctttaaaaaat

SEQ ID NO: 6036 - protein, 78 aa, Homo sapiens
MHSENDSLEITYLGKRYKISLNNTFSDEMKRTLKERFHNQELNALELLKDYLHESCQNEYLHNELQKLLEKISSCSIT

SEQ ID NO: 6037 - DNA, 437 bp, Homo sapiens
ggtaagagtttgaaggaaaagacattaatagtcgtcacgggaccaacaggtgtgggcaagacggaggcaaccttgcgccttgccgaacactttgatgtacctgttatcaatgcagactcacgtcagatcttctctgaaatacccatcggaacagccgcaccaacggctgctcaacaggcacgagtgcgtcattacttcgttgggacccatcacttagaggactactattcggcaagtctgtttgaagaggatgttttgaagattattaatgaggcttcttcgaaggtttccttactatcgggtgggtcaatgatgtacatcgatgcggtttgtaaaggtattgatgacattcccccaatacgcccagaagtacggcaggagatgatgcaactccttgagagtgaaggcttagaaaagatgtgcgagttgcttcatga

SEQ ID NO: 6038 - protein, 145 aa, Homo sapiens
GKSLKEKTLIVVTGPTGVGKTEATLRLAEHFDVPVINADSRQIFSEIPIGTAAPTAAQQARVRHYFVGTHHLEDYYSASLFEEDVLKIINEASSKVSLLSGGSMMYIDAVCKGIDDIPPIRPEVRQEMMQLLESEGLEKMCELLH

SEQ ID NO: 6039 - DNA, 214 bp, Homo sapiens
gacgccttgtttatcatccaactgcgcatcgtcagccgagatatggatcggttgctggctatcgttcggcagagcccaggcgctcacgcttcccagtgctgcgcccagaccgagcaaaatagggagggttttaacgagcctcatactgtcctcttacgttcgatagcaggtgtatcctgctttctttcaaatacgctttcattcccttgccagt

SEQ ID NO: 6040 - protein, 57 aa, Homo sapiens
MDRLLAIVRQSPGAHASQCCAQTEQNREGFNEPHTVLLRSIAGVSCFLSNTLSFPCQ

SEQ ID NO: 6041 - DNA, 237 bp, Homo sapiens
ccatggccatccccttatgagcgggcgctaccaactgcatataccactgggggagtcctgctggtggcagctgtgggcacaggcaccaagggcatcagtgaacgggggggctctaatgccaagtccaatgaccagggccagggtgcccaggggggggaacaaaggggttttcagagcgaacttggacattgctgctgcctactgccctgctaagctgcgagctgcctgatatcctct

SEQ ID NO: 6042 - protein, 70 aa, Homo sapiens
MSGRYQLHIPLGESCWWQLWAQAPRASVNGGALMPSPMTRARVPRGGNKGVFRANLDIAAAYCPAKLRAA

SEQ ID NO: 6043 - DNA, 643 bp, Homo sapiens
tgtacagacattaacaagaaacagagtgtcaacggtcagatctgtcacaaccataatttagaatttgggaaagctttaattgggactgacagagaaaagccttgccccggattgaagttcgatctccatttttaacttctcgttcttttcagtttggagaactcaagctaggattaagatcttttggtcctggtatggtcacacgcaagaggagactgcaaaaggtttcgaaggaaattctagagacggagcagctaatatgtcttcatcaacatggattatgtattgaatgaaaaatcggtcatcaccaacaatcagatcctgcaaaactctcagcaaataactaaataattcgggactgaggaagcgcacccgccacgcagacaccaagacggcgtaaaatccaccaggcatcccttccaagcggcacccctttgtgtcgtgggacttacttccctaccccccaggggcccgcacagcgcgagaaggaggagagctaggctaccatctcccctgctaccgccagggcgacctcagagccaatggggccggccttctctccgcttctggccgggctccagacgaaccccactttactgcaaagccgcgagaccgattgcccgggaagtctaagcctgctagc

SEQ ID NO: 6044 - protein, 71 aa, Homo sapiens [sequence omitted]

SEQ ID NO: 6045 - DNA, 495 bp, Homo sapiens
gcgtcaagaaagatatttaatatgattctaaacaaggttttacactccaagataagattttttgatgctactccaacaggtagaattatgaacaggttttccaaggatatcgaagctattgatcaggaactgacaccttatatacaaggcgccttctattcgcttattgaatgtttatccaccgtcatactgattacatttattactccacagttcttatctgttgctatagttgtttcaatattgtattattttgttgggtatttctacatggcaggttctcgtgaattgaaaagatttgaatctatttctagatcaccgatctatcaacatttttccgagactcttgtcggtgttaccaccattcgtgcgtttggtgatgaagggaggtttatgcaagagaatttacacaaaattgatgaaaataataaaccattcttctacttgtgggttgctaatcgttggttggcctttaggatagatatgattggatcc

SEQ ID NO: 6046 - protein, 165 aa, Homo sapiens
ASRKIFNMILNKVLHSKIRFFDATPTGRIMNRFSKDIEAIDQELTPYIQGAFYSLIECLSTVILITFITPQFLSVAIVVSILYYFVGYFYMAGSRELKRFESISRSPIYQHFSETLVGVTTIRAFGDEGRFMQENLHKIDENNKPFFYLWVANRWLAFRIDMIGS

SEQ ID NO: 6047 - DNA, 307 bp, Homo sapiens
accggtgatccactctgcgaaagcggccgcgagcgaagcgttcttggtcttcttcgagatcgcgatgtattgcccggaaaacagcggcttgatgccgtcattgagaggctctgggccaacaccggtacgggcatatgcctgggcggcattcttttggatgttgcgaagaaaggacgcattcggcgtgccgaaagccagggatccttcaccgtagaccttggaccgatggaggcccccggcaatcgagtccttcgaaattcccccttggcatacatgtcggccatcgtcgtcagccagagtaacgcgt

SEQ ID NO: 6048 - protein, 94 aa, Homo sapiens
MADMYAKGEFRRTRLPGASIGPRSTVKDPWLSARRMRPFFATSKRMPPRHMPVPVLAQSLSMTASSRCFPGNTSRSRRRPRTLRSRPLSQSGSP

SEQ ID NO: 6049 - DNA, 239 bp, Homo sapiens
acgcgtgtccacacacacactgtctcaaataggtaagagtttgcatggaacaaaaccctatgaggaacctgaagaatgaagatcccttgtcaagtgcttcccatgagtggacgctgttctgggtgctctctatggatttgctcatttaatcctcgaaacaaccctaagacaaccctattgattatgcctgtttcaaatgggggaaaccgaaggcacaggggaggcacaagggactttta

SEQ ID NO: 6050 - protein, 54 aa, Homo sapiens [sequence omitted]

SEQ ID NO: 6051 - DNA, 351 bp, Homo sapiens
atgcatcacatgttctcttgacaatgcgtcttggagcctgtcactcctgttatttatctatagaatgttctatctcttgtttcttggttctcacctcctactacctcccacattcactgcttaacacagccacatggagttttgtgccattctccaaacatactgtttggttctaagctctgtttcttcactgttcttcatgagtatcttcaaagtctctgccttgcctgactggcaagctctcacaagaactgggaaatcaagccacaactttatctcttctgtggaagccttttgggaaagttccagggttggcctttctatcttttgtgttatcttaaccttcgtacg

SEQ ID NO: 6052 - protein, 72 aa, Homo sapiens
MEFCAILQTYCLVLSSVSSLFFMSIFKVSALPDWQALTRTGKSSHNFISSVEAFWESSRVGLSIFCVILTFV

SEQ ID NO: 6053 - DNA, 261 bp, Homo sapiens
ggggcggtctccattcttaacatcatagtaattgggggaatcttggaaaggattttctctaaaacagaaacaacacaaggatgccaaatttttccactctcatttaatgtattagggtatgtcctagccagagcaatcaggaaagaaaaataaataaaaggaatccaagtttaaaaagaggaagtttaactatccctgtttgctgatgatattttcatatatctagaaaaacctagactccgccaaagaactctgatttga

SEQ ID NO: 6054 - protein, 50 aa, Homo sapiens [sequence omitted]

SEQ ID NO: 6055 - DNA, 312 bp, Homo sapiens
accggttacatcaccgaactagagaactccaaagacccgcaggatgagacgaggctggaaaacctcatcgagcttgtttcggtggctcaggaattcgttgcccgagtccatgctgtcgatattgacgaggctgagcagggcaacgtcgaagaccttgaattgtccggcgacgactctttgccggccttcctggagcagatcgccttggtggccgattccgatcaggtaccagccgactccgatggagtcgtcaccctcatgaccctgcataccgccaaaggtttggagttcgacacagttttcatcactgga

SEQ ID NO: 6056 - protein, 92 aa, Homo sapiens
PQDETRLENLIELVSVAQEFVARVHAVDIDEAEQGNVEDLELSGDDSLPAFLEQIALVADSDQVPADSDGVVTLMTLHTAKGLEFDTVFITG

SEQ ID NO: 6057 - DNA, 285 bp, Homo sapiens
aagcttgagttcagcaagatcttggaggctattaaggcaaacttcaacgacaagttcgatgaggtcgggaagaagtggggaggtggcatcatgggatccaagtcgcaggccaagaccaaggcccgggaaaagttgctcgccaaggaggccgcccagcggatgacctagattgtctactgctgtgtctgccctgtagtttgacggggaagaactgatgaactcgtattgtggttttccgaatctagtttcatatgtttctgtccaccagaccatgtttagaagctt

SEQ ID NO: 6058 - protein, 55 aa, Homo sapiens
KLEFSKILEAIKANFNDKFDEVGKKWGGGIMGSKSQAKTKAREKLLAKEAAQRMT

SEQ ID NO: 6059 - DNA, 278 bp, Homo sapiens
  misc_feature (1)..(1): Wherein n may be a, c, g or t
ncgcattgtcttctctccgtaggcggtgcaggccagcctctacattcaaggtgtttttcttctgacaacacattctcctgcaactgaagcctgtatttaatttaagcaggaatggcactggaatcaggctcagcagtaagcaatgtgctaggacagcagggacacaagggaagaggctgtggaagtgcatagttaaatgagctttgtgaaggctgaaggcacagccttgctatcccctcccagaccatcagcagctggttctaactggagtcactagt

SEQ ID NO: 6060 - protein, 63 aa, Homo sapiens [sequence omitted]

SEQ ID NO: 6061 - DNA, 293 bp, Homo sapiens
ggatccaagctgcccagagtagggcagaccccaatgcctgacagcctcctcagtggagactcaggatctcctcctctgcttccttcaccacctactgagaactctcttttagacatagcttcaacctgcagactacaccaccagttcataggttattggggaaggggaaaagaaggaaaaaagtgagggcagcagcctatttcaaggtaccaaataaaggcagtgggggacaaggaaggactgaaccttgactaacttgagggcaggcagcaaaaaggcctggtgacacctcc

SEQ ID NO: 6062 - protein, 50 aa, Homo sapiens
MPDSLLSGDSGSPPLLPSPPTENSLLDIASTCRLHHQFIGYWGRGKEGKK

SEQ ID NO: 6063 - DNA, 648 bp, Homo sapiens
ctgcaggtaataatgaaggcaataaaagctcagggtgtatcagtgataattgaagaagaaagccctggtaagacatttatccaaatgttaacctccgtgataactcacgatcttcaggaaacctcatcaattaccactgggttccttctaccttgggtactcttcatgaactttccggataacatcgtcccattattaacgcctttgatgaagacgttcagtaagttatgcaaagatcacttaagcatttcacaaccgaaggacgccatggctctggaagaggcaaggattacgacgaaacttttagagaaagttttatatatattatctttgaaagtctcactcttgggtgactcccgtcgtcctttcctctccactgtggcacttctgattgatcactccatggatcaaaattttttgaggaaaattgtcaatatgtccagaagctggatattcaatactgaaatttttccaactgttaaagaaaaagcggctatattaacgaagatgctggcgtttgagattagaggggaaccttcattgtcaaagctattctacgaaatagtcttgaaactatttgatcaagaacattttaataacacagaaattaccgttagaatggaacaacctttcctcgtaggaacgcgt

SEQ ID NO: 6064 - protein, 216 aa, Homo sapiens
LQVIMKAIKAQGVSVIIEEESPGKTFIQMLTSVITHDLQETSSITTGFLLPWVLFMNFPDNIVPLLTPLMKTFSKLCKDHLSISQPKDAMALEEARITTKLLEKVLYILSLKVSLLGDSRRPFLSTVALLIDHSMDQNFLRKIVNMSRSWIFNTEIFPTVKEKAAILTKMLAFEIRGEPSLSKLFYEIVLKLFDQEHFNNTEITVRMEQPFLVGTR

SEQ ID NO: 6065 - DNA, 368 bp, Homo sapiens
tgatcagtagggaaagacggcattttcctaagagccacctgagttgtgaaacctgatgttgcagtgcccacatgggtgtccagagcggctcctgttaaacagccttggttctacggtaacacattccactgattttgttgttgttctaaatctcatctgcttttggtatatgagtgtagagggcttgggggttgtttgtgcatatgcatgggaaaacagcatgaagtcattggacttcaggcaatttatggacaaaaggcaggttttggtgatcccattttggcttcctccttcaccaaacagtccctgccaagaaactcctgacgtgcctggagcaaccctggcctttgtccctcgtggcaagtcca

SEQ ID NO: 6066 - protein, 104 aa, Homo sapiens [sequence omitted]

SEQ ID NO: 6067 - DNA, 392 bp, Homo sapiens
ggatccattgctagagggctagtgtgatcgtttgaggagtattgcgacactgttttttatagtgtcaggctccttgtgctgattatttctcatctggagaagctgccacttcttatttttgaatttaatttcattggaatggcatttttttcctcattgagggtgtgactgttgtgtatattggttagggtcctttggatttacttctatatgcttttaggagccaaggccctgtatgaactccttggtatagacagccttagtgtagtggttttctcaaatgctagttgtttctggattatagtggtgtactgtttgtatgagcaggcttactgtcacctgccgagattggaggtgatcttggaagccttaccttattcccaagcactagt

SEQ ID NO: 6068 - protein, 60 aa, Homo sapiens [sequence omitted]

SEQ ID NO: 6069 - DNA, 266 bp, Homo sapiens
  misc_feature (1)..(1): Wherein n may be a, c, g or t
  misc_feature (2)..(2): Wherein n may be a, c, g or t
  misc_feature (164)..(164): Wherein n may be a, c, g or t
  misc_feature (195)..(195): Wherein n may be a, c, g or t
nncgccaaacaccgcatgctacctgcggcgcagtttcgccggagtctcgccatgcccaatctcgaccgccgcgctctgctcaccgctctcggcgccctgagcctgccgccggcgctcgcaagggccgcggcaatcgacacggatgtgcggaccggtacgatccnagatgtcgagcacgtggtgatcctgatgcangagaaccgcagcttcgatcactatttcggaacactgaacggcgtgcgcggctttggcgaccggttcccgat

SEQ ID NO: 6070 - protein, 88 aa, Homo sapiens
  misc_feature (1)..(1): Wherein Xaa may be any naturally occuring amino acid
  misc_feature (55)..(55): Wherein Xaa may be any naturally occuring amino acid
  misc_feature (65)..(65): Wherein Xaa may be any naturally occuring amino acid
XAKHRMLPAAQFRRSLAMPNLDRRALLTALGALSLPPALARAAAIDTDVRTGTIXDVEHVVILMXENRSFDHYFGTLNGVRGFGDRFP

SEQ ID NO: 6071 - DNA, 203 bp, Homo sapiens
  misc_feature (203)..(203): Wherein n may be a, c, g or t
ggtacctgggatagatgaagaaacaatcaccaaaaagcttccattagttggtatcatatgagctaacagcaaaaggatgaaaaaagccaaccttgaaaaatctagaggagaccatttcagacagagagaacagcaagggcaaaggccctgagggtagaatgagactagcatggtcaagggccaaagaatagaaatgccagatn

SEQ ID NO: 6072 - protein, 57 aa, Homo sapiens
MLVSFYPQGLCPCCSLCLKWSPLDFSRLAFFILLLLAHMIPTNGSFLVIVSSSIPGT

SEQ ID NO: 6073 - DNA, 305 bp, Homo sapiens
  misc_feature (302)..(302): Wherein n may be a, c, g or t
acgcgtgaagggacacttatacttgccaagatattttactctaaatccctgctactggttcattttttgattatgcagttaaatcccaatgcttccacaggctgctctagttttctatgggtcattttattccaaaactttttttttagtttttactatatgcctagcagtgggctaagacctttatacacattaactgacttaatcttgaccagatctgtgggattcatacattttactcccattctggagcttaggtaaatgaaacactgagaggctgatagtcaccccccccccccccnccc

SEQ ID NO: 6074 - protein, 62 aa, Homo sapiens [sequence omitted]

SEQ ID NO: 6075 - DNA, 269 bp, Homo sapiens
ctttacccgcagacgtcgaaattgcgtacctgggaaatcgcctcagtggagtcgatgctgctcgaatccacgcccgaactcgaggacaccctgcctgaatggttacgtcaagaagctgacctaccgagtttatgggaagcttaccacgccatccatcacccgcattcggtggctgaggctgatcgcggcaccgaacgacttatctgggaagaagcgatagccacccaggcgacgatggcggtgcgacgccgcagtgcagagcgtcatga

SEQ ID NO: 6076 - protein, 89 aa, Homo sapiens
LYPQTSKLRTWEIASVESMLLESTPELEDTLPEWLRQEADLPSLWEAYHAIHHPHSVAEADRGTERLIWEEAIATQATMAVRRRSAERH

SEQ ID NO: 6077 - DNA, 189 bp, Homo sapiens
  misc_feature (1)..(1): Wherein n may be a, c, g or t
ngtccatttcaaggaaaggtcgcttgccaaatgattcaattcggtaaaggtgtttgcggaactgcagcctctacaaaggaaacgcagattgttccagatgtcaacaagtatcccggtcatattgcgtgcgacggtgaaaccaagagcgaaattgttgttccaatcatatccaatgatggtaagacattg

SEQ ID NO: 6078 - protein, 63 aa, Homo sapiens
  misc_feature (1)..(1): Wherein Xaa may be any naturally occuring amino acid
XPFQGKVACQMIQFGKGVCGTAASTKETQIVPDVNKYPGHIACDGETKSEIVVPIISNDGKTL

SEQ ID NO: 6079 - DNA, 358 bp, Homo sapiens
  misc_feature (1)..(1): Wherein n may be a, c, g or t
natcaccatggatggacgccggcaaagcaacatcaatcgatgtcaagccacagacatctcaaatccctgcagaaccgcaaagtttggcagagaagaaggatgaatgggagatcgcatacatcaacacgaagattaacgacgtctacaaccctctcaacaacaatgtggactggttaagcacgagaattgatctgctacagcaagatttggacaccactcgcaagaaggatctaaaaccagccacatcgatcgatatctgcaccatcacatcgatcgatagcaagttcgtagccatggaagataggttacaatcttataaggatatgcacgaccgtttcacctcacctatcaggcgata

SEQ ID NO: 6080 - protein, 115 aa, Homo sapiens
MDAGKATSIDVKPQTSQIPAEPQSLAEKKDEWEIAYINTKINDVYNPLNNNVDWLSTRIDLLQQDLDTTRKKDLKPATSIDICTITSIDSKFVAMEDRLQSYKDMHDRFTSPIRR

SEQ ID NO: 6081 - DNA, 309 bp, Homo sapiens
ctagggttgattggtatttaccatccacccagaaatgagactgccggtgcagtcaagaagtttcaccaagctggtattaacgttcatatgttaactggggactttgtgggtacagcaaaggctatcgctcaggaggttggcatcttacccaccaatttgtaccattactcccaagagattgttgacagtatggtcatgaccggatctcagtttgacggactaagtgaggaggaagtggacgatttgcccgtcttaccttgagttattgcacgttgctctccgcagactaaggtgagaatgatcgaagct

SEQ ID NO: 6082 - protein, 86 aa, Homo sapiens
LGLIGIYHPPRNETAGAVKKFHQAGINVHMLTGDFVGTAKAIAQEVGILPTNLYHYSQEIVDSMVMTGSQFDGLSEEEVDDLPVLP

SEQ ID NO: 6083 - DNA, 387 bp, Homo sapiens
  misc_feature (1)..(1): Wherein n may be a, c, g or t
nacgcgtcgtggggcctcatcaaggaccacaccttgcagttgcgtgacggatacctgaatcgcaccccattcttccaattcattctgctgtcgatatgtttcccgatgtggggaatggcggcgagcatgaacgacatcctcatcacccaatttaaggctgtgtttgctctttcggatcttgctagtgcattcgtgcagtcagccttttacggcggctatttccttatcgccatacctgcgagccgagtaattcgtcgcaccagctacaagacgggcctgctcattggtttgagtgtgtacattctcggatgcctgttgtttttcccggcttcgcgtgtggctacgtatacggtattcttagctgccctgttttccatcgccgttggc

SEQ ID NO: 6084 - protein, 129 aa, Homo sapiens
  misc_feature (1)..(1): Wherein Xaa may be any naturally occuring amino acid
XASWGLIKDHTLQLRDGYLNRTPFFQFILLSICFPMWGMAASMNDILITQFKAVFALSDLASAFVQSAFYGGYFLIAIPASRVIRRTSYKTGLLIGLSVYILGCLLFFPASRVATYTVFLAALFSIAVG

SEQ ID NO: 6085 - DNA, 349 bp, Homo sapiens
acgcgttgccccattttgataccgtccaggcaggtcggaattcttgcctccggcgcgagcccagagctcatcaccatccggaccacttggatagagttcacgggcctcatcttcgaaagctttccacttctcagcagcgcttagctttgtgacaccgaggatccagcgcgtataaaagctgagcaagcctgcgcacaaccttaggccaggcttgatatcaggccggtctacaagccgatccgaaagatacttagccgcgcgttcccaatgtcgggacgcgacgagcatacccaactgctcagaaaccgaatgagacaagttttgagcgggtgtcaagatgttgttaagc

SEQ ID NO: 6086 - protein, 96 aa, Homo sapiens
MLVASRHWERAAKYLSDRLVDRPDIKPGLRLCAGLLSFYTRWILGVTKLSAAEKWKAFEDEARELYPSGPDGDELWARAGGKNSDLPGRYQNGATR

SEQ ID NO: 6087 - DNA, 318 bp, Homo sapiens
  misc_feature (318)..(318): Wherein n may be a, c, g or t
tctagagtctggaggccatcactagggatgaaatggttttacttcctcttgggaagtggctccctccggaatcactccatcgtgtgcgtcatccatttacttggtcgtcaggccaccagccggtgagattctacagagccactaatcatagaaaacactgtgctttgacaccagctttgtgtcacgcatgtataatcagggtctctcactcctgcagcgggccatcaatctaaccatgctcgtctcaaaaaatttttggagaatttttataattaaggtaaaagataaatatctatcctcctctacctgcaattaacn

SEQ ID NO: 6088 - protein, 66 aa, Homo sapiens
MVLLPLGKWLPPESLHRVRHPFTWSSGHQPVRFYRATNHRKHCALTPALCHACIIRVSHSCSGPSI

SEQ ID NO: 6089 - DNA, 320 bp, Homo sapiens
  misc_feature (2)..(2): Wherein n may be a, c, g or t
  misc_feature (7)..(7): Wherein n may be a, c, g or t
  misc_feature (21)..(21): Wherein n may be a, c, g or t
  misc_feature (93)..(93): Wherein n may be a, c, g or t
  misc_feature (112)..(112): Wherein n may be a, c, g or t
  misc_feature (123)..(123): Wherein n may be a, c, g or t
  misc_feature (128)..(128): Wherein n may be a, c, g or t
  misc_feature (313)..(313): Wherein n may be a, c, g or t
tntgggntgagggtctcgggntggggcccaactccatttgctttggaactgtgggaaactgctaacccacctgtcttggcttcatcacccacnccctctatcatcccaccantctactcatcnaccancacatccatccactcatccactcactcacccagtactgactgagtacctactatgcgttacacattattctaggccctggcttctactcagtcaaatggtgtccacaactgttccaccacccttcctcggatttatatgtgatctgtgacaatgtcagtcactagagctgggattcccatgcctntacatgt

SEQ ID NO: 6090 - protein, 56 aa, Homo sapiens
  misc_feature (1)..(1): Wherein Xaa may be any naturally occuring amino acid
  misc_feature (3)..(3): Wherein Xaa may be any naturally occuring amino acid
  misc_feature (38)..(38): Wherein Xaa may be any naturally occuring amino acid
  misc_feature (43)..(43): Wherein Xaa may be any naturally occuring amino acid
XGXRVSGWGPTPFALELWETANPPVLASSPTPSIIPPXYSSTXTSIHSSTHSPSTD

SEQ ID NO: 6091 - DNA, 303 bp, Homo sapiens
  misc_feature (1)..(1): Wherein n may be a, c, g or t
  misc_feature (2)..(2): Wherein n may be a, c, g or t
nngcacccgcccggcatcgccatgaacctctccgtcaagcagctccgcgcctttgccgcgctgcgcgagcacaagaacttcacgcaggcggcagagacgtgtcacctgtcgcaatcggccttcagcgcgctgatccagaacctggaggccgatgccggcgtgcgcctgttcgaccgcaatacgcgccatgttgaactgacccccgagggcgaagcctttgcggaatcggcgctgcgcctgctggccgatttcgaggcgacgttctccgagctgcgcgatcgcgccgcggcacgcaccggacgc

SEQ ID NO: 6092 - protein, 101 aa, Homo sapiens
  misc_feature (1)..(1): Wherein Xaa may be any naturally occuring amino acid
XHPPGIAMNLSVKQLRAFAALREHKNFTQAAETCHLSQSAFSALIQNLEADAGVRLFDRNTRHVELTPEGEAFAESALRLLADFEATFSELRDRAAARTGR

SEQ ID NO: 6093 - DNA, 278 bp, Homo sapiens
cggccggaccggttcaacttctcatctttgttcttcttcatatactataggctgtttgctgtgctttagtcaaaaagccatgtagaatgcctgccttttgaagaccacttttaaggtgtctagtaagacagcagcagtattgaaagtttttaaagaatataaccgtgtgtgttggtaacagacagaagaatggaagcattccaggaacttcgtaaaccatcagcacgtttggagtgtgaccattgcagtttcagaggcacagactatgaaaatgtaca

SEQ ID NO: 6094 - protein, 60 aa, Homo sapiens [sequence omitted]

SEQ ID NO: 6095 - DNA, 405 bp, Homo sapiens
  misc_feature (40)..(40): Wherein n may be a, c, g or t
  misc_feature (103)..(103): Wherein n may be a, c, g or t
  misc_feature (175)..(175): Wherein n may be a, c, g or t
  misc_feature (256)..(256): Wherein n may be a, c, g or t
  misc_feature (280)..(280): Wherein n may be a, c, g or t
  misc_feature (295)..(295): Wherein n may be a, c, g or t
  misc_feature (296)..(296): Wherein n may be a, c, g or t
gatcattggcctctcacaggggcatcttctgtggacctgntggttctgtggcaaaggtggtggtctatgtgcctgtgttatatggacactgaaatcttgtgtnaaagtaagggagctcccagtgtgtctgcaatgggaggaatactgacccaggaagttctgcatgtgcagagtnatatcttccacaaactcccaggtgaagctgtacctagactctccttcagcacagatacagatgagatgggaaagtcccaantttctcctgaaaagatagtgaccntgggtttcagaggannaatgaaccgcccagctcccaaatccattgctgctgaacttgggattgcagattggtctaaaggcccacatatctcatgcaacctgtttagcagtctcttattgaagctt

SEQ ID NO: 6096 - protein, 135 aa, Homo sapiens
  misc_feature (14)..(14): Wherein Xaa may be any naturally occuring amino acid
  misc_feature (35)..(35): Wherein Xaa may be any naturally occuring amino acid
  misc_feature (59)..(59): Wherein Xaa may be any naturally occuring amino acid
  misc_feature (86)..(86): Wherein Xaa may be any naturally occuring amino acid
  misc_feature (94)..(94): Wherein Xaa may be any naturally occuring amino acid
  misc_feature (99)..(99): Wherein Xaa may be any naturally occuring amino acid
DHWPLTGASSVDLXVLWQRWWSMCLCYMDTEILCXSKGAPSVSAMGGILTQEVLHVQSXIFHKLPGEAVPRLSFSTDTDEMGKSQXSPEKIVTXGFRGXMNRPAPKSIAAELGIADWSKGPHISCNLFSSLLLKL

SEQ ID NO: 6097 - DNA, 407 bp, Homo sapiens
  misc_feature (312)..(312): Wherein n may be a, c, g or t
  misc_feature (385)..(385): Wherein n may be a, c, g or t
tccggatggcagctctggaaggaaggatgttctgaggaaccacctaatccataaatagacagaagcctggggtgagtcttggggaaacccagaaaagtccttccttgtgtttctttacaaaaagcagacacaagctcactccttgctgctctctctttctctctctcactcttatccctcaattttggagaggacagcactctgaggatctgttagccgtatgagttcttgtcctgttcttaacctctcaatttccctggatacggtgataagtagatattttcttaacctgagccagaactctcaatctanaatctttagtgtggccagacatcaaggcctctctgcacatgccctcactgaacaaactctgagtaaggcattnccttagaatactgttcctccat

SEQ ID NO: 6098 - protein, 56 aa, Homo sapiens
  misc_feature (31)..(31): Wherein Xaa may be any naturally occuring amino acid
  misc_feature (55)..(55): Wherein Xaa may be any naturally occuring amino acid
MSSCPVLNLSISLDTVISRYFLNLSQNSQSXIFSVARHQGLSAHALTEQTLSKAXP

SEQ ID NO: 6099 - DNA, 415 bp, Homo sapiens
  misc_feature (415)..(415): Wherein n may be a, c, g or t
agatctacagatgaaaggcccatttctctctgctgttggtgatgttattttgtggggatccagtatgactgccctctccctcttttgtcttgtgctttccactttgccccatctgagaaaacagagctggaggggaccttcagaccaagcctttgtctctggtttgccaagggagaggggaagaaggaatggaaaggagattctgggttcaactggtcactgaaattcaaagattacttggaataagcaaagcctcttaaaactgcttgaatgctccagataacgggcacgtttcataatgggctgtatcatcgggatgacttgttgtacctgccatgcaattgttaatgttttaatgaatgtttttgcttcttttattcgcaggcctgggaaatctttcagatgaaaggcctcn

SEQ ID NO: 6100 - protein, 70 aa, Homo sapiens [sequence omitted]

SEQ ID NO: 6101 - DNA, 531 bp, Homo sapiens
  misc_feature (1)..(1): Wherein n may be a, c, g or t
nctacttagagcaaaggtaggaaaagaaggcagctaggcgtggctctcattccttcccacagaatggattataagtcgagcctgatccaggatgggaatcccatggagaacttggagaagcagctgatctgccctatctgcctggagatgtttaccaagccagtggtcatcttgccgtgccagcacaacctgtgccggaagtgtgccaatgacatcttccaggctgcaaatccctactggaccagccggggcagctcagtgtccatgtctggaggccgtttccgctgccctacctgccgccacgaggtgatcatggatcgtcacggagtgtacggcctgcagaggaacctgctggtggagaacatcatcgacatctacaaacaggagtgctccagtcggccgctgcagaagggcagtcaccccatgtacaaggagcacgaagatgagaaaatcaacatctactgtctcacgtgtgaggtgcccacctgctccatgtgcaaggtgtttgggatccacaaggcctgcgaggtg

SEQ ID NO: 6102 - protein, 143 aa, Homo sapiens
MENLEKQLICPICLEMFTKPVVILPCQHNLCRKCANDIFQAANPYWTSRGSSVSMSGGRFRCPTCRHEVIMDRHGVYGLQRNLLVENIIDIYKQECSSRPLQKGSHPMYKEHEDEKINIYCLTCEVPTCSMCKVFGIHKACEV

SEQ ID NO: 6103 - DNA, 278 bp, Homo sapiens
  misc_feature (1)..(1): Wherein n may be a, c, g or t
nggcgagggacttggcccaatggagctggaggaagcctcgaaagccctgtgtcaagcaggaatccccacaggcctcagagatgatgccgtcgcgcgcatgcgtcaggcggcgaccctctgctgcgacgcaggcatatttccaaccgcccgagcgttggtcatgacgctgcacacgcttcgtccagacgatgtcttggccgatatggcatcctcgctcgcctagctgtagctgtccacgagctcatcgggatacagttcccgatagtgacgggacgcgt

SEQ ID NO: 6104 - protein, 67 aa, Homo sapiens
MELEEASKALCQAGIPTGLRDDAVARMRQAATLCCDAGIFPTARALVMTLHTLRPDDVLADMASSLA

SEQ ID NO: 6105 - DNA, 262 bp, Homo sapiens
gaattctgttagtgtagaaacaactccttaatcttcactccccataaaggcattattttcacaagaaagatgaagaactggtatctcctaaagggaaaatcctactgctgtgagggaaatacccacctagctggagattactttcaaaaaagatgctctaccaaatatctgaggctacctataaacaaccaatgtttagtcgtatgtatactgagaacacatttctaccgagaccccggatagcagaggatttactcggccg

SEQ ID NO: 6106 - protein, 57 aa, Homo sapiens
MKNWYLLKGKSYCCEGNTHLAGDYFQKRCSTKYLRLPINNQCLVVCILRTHFYRDPG

SEQ ID NO: 6107 - DNA, 432 bp, Homo sapiens
gcgttgatgaatatatatatcaactccccagaaaacttaaagctcataatgactttaatgactgacaaatctaaaaacttacaacttgaagctttcaacgtattcaaggtgatggtagcaaacccaaggaagtcaaaacctgtttttgacattcttgttaaaaacagagataaactattgacgtattttaaaactttcggtttagattctcaggattctacttttcttgatgaaagagaattcatcgttcaagaaattgattccttgccgcgtataatttcgtccacaacagaagtttctaataataatgcattctcaagtaacgtcgccagtataacttctccatcatcagtaatgaacaatcaatcatccatcttaacacattcaacttcacctgattcaagataactataaaacttggttcactttatg

SEQ ID NO: 6108 - protein, 135 aa, Homo sapiens
ALMNIYINSPENLKLIMTLMTDKSKNLQLEAFNVFKVMVANPRKSKPVFDILVKNRDKLLTYFKTFGLDSQDSTFLDEREFIVQEIDSLPRIISSTTEVSNNNAFSSNVASITSPSSVMNNQSSILTHSTSPDSR

SEQ ID NO: 6109 - DNA, 336 bp, Homo sapiens
gcgtttcgcccgtatttcagccagaccttgagccagggcaccgggcgtttttatgcggggggggtgaccaccggcattccgggttacttcctctccagcgcagtggtcgatgaacacaaacagttccttggcgcgatggtggtgaagctggaatttcccgaactcgaacgcgaatgggcccagggcaatgacctgctgctggtcagcgacgcacgcggcatcgtgtttatcgccaatcagccgggctggcgttaccgcaacctgcgtccgttgtcggccagcgacctcactgagctcaaagccacccgccaatacgacaagaaacaactgcggccg

SEQ ID NO: 6110 - protein, 112 aa, Homo sapiens
AFRPYFSQTLSQGTGRFYAGGVTTGIPGYFLSSAVVDEHKQFLGAMVVKLEFPELEREWAQGNDLLLVSDARGIVFIANQPGWRYRNLRPLSASDLTELKATRQYDKKQLRP

SEQ ID NO: 6111 - DNA, 324 bp, Homo sapiens
acgcgtcgtgagcaccgccagctacgacgtaccatgggagatatgctgcgtcttattccatttattccatttatccttattcctgctgctgaactgctcttgccgctggccctgcgtttctttcccaacatgctgcccagcacatttgaaagcaagtttgcgatggaaagaaaacgtggaaggctgttaaagcttcgactagagatggctaaattcttgcaagaatcgatcaaggctggtggactacaattgagtgagtcggggaaagactctgatgtgttcaaagagttctaccaccaagaacgcatcggcatgcctccgact

SEQ ID NO: 6112 - protein, 108 aa, Homo sapiens
TRREHRQLRRTMGDMLRLIPFIPFILIPAAELLLPLALRFFPNMLPSTFESKFAMERKRGRLLKLRLEMAKFLQESIKAGGLQLSESGKDSDVFKEFYHQERIGMPPT

SEQ ID NO: 6113 - DNA, 295 bp, Homo sapiens
tggaaggatttgtttggcaagaaccctgacatctgaattgataatggcagaacggacacctgtccttcaacaccagtactcagttgaaccgtttgtatttgccccagtccctgcagagagagatgagtgtcggacagatggctcacagcccggggacgatcatagattcttttttcgctcttaccacaccctctgtgggtgttccaccagaagaaaagaaaaagggatcctattttatgtttaaagcttaaatggattgaagacataaaggacttgcattttatttccccccccc

SEQ ID NO: 6114 - protein, 88 aa, Homo sapiens
MSSIHLSFKHKIGSLFLFFWWNTHRGCGKSEKRIYDRPRAVSHLSDTHLSLQGLGQIQTVQLSTGVEGQVSVLPLSIQMSGFLPNKSF

SEQ ID NO: 6115 - DNA, 491 bp, Homo sapiens
  misc_feature (1)..(1): Wherein n may be a, c, g or t
  misc_feature (2)..(2): Wherein n may be a, c, g or t
  misc_feature (367)..(367): Wherein n may be a, c, g or t
nnttcttccaaaaagaggttcccaccccgaatgacttaagtcaaatcagaaaagcctttgcagacacctcagtgttcccctcagggttctgcccatcacaaggaaacctgttcagatagagcagccactcttatctcctttctgcctcaccaaccagttccaagcctatagttcaggctcccagagttccatgggttagagcagaaagcgagtctctaaaagaatgggtcccgttgtgcagggtttacgctgcagatggacagcatgcacgcagagccagatatgatgagcccccacctccatgtcccctgggatctggacatggctagcctctctggacagatacagtcccctaccacggaaggtngctttgcccatgcccttgtactccccagcgacccaggaggtgaacaggaccctgcctgcgaggatccctgccccagtgtgggcccagcattggtggcgactcgatggcgtccccaagtgccgga

SEQ ID NO: 6116 - protein, 90 aa, Homo sapiens
  misc_feature (50)..(50): Wherein Xaa may be any naturally occuring amino acid
KNGSRCAGFTLQMDSMHAEPDMMSPHLHVPWDLDMASLSGQIQSPTTEGXFAHALVLPSDPGGEQDPACEDPCPSVGPALVATRWRPQVP

SEQ ID NO: 6117 - DNA, 498 bp, Homo sapiens
  misc_feature (493)..(493): Wherein n may be a, c, g or t
  misc_feature (494)..(494): Wherein n may be a, c, g or t
  misc_feature (495)..(495): Wherein n may be a, c, g or t
  misc_feature (497)..(497): Wherein n may be a, c, g or t
  misc_feature (498)..(498): Wherein n may be a, c, g or t
tgtacagcatgatggtttgaaatacgtgcacgttgtagaatggctcagtcaagctaattaacatatgcactacttcatatacttttcattttttgtggaaagggtgcttaaaatctctctttgctattttcaaaatataacacattggtattaaatataggcaccacgggtttaccatgccttccttggaacttactcttcctaacagaaatttggtatccttggaccaacatctccctaccacactagcttctggcaaccaacattctactctttacttctatgaattcaacttttttctactctacatgcaagtgatagcatatgtgtatgtgtgtggatgcattacacctggttcatggcattatgctggtatttctgtgcctggcttatttcacctagcataatgccctccaggttcaaacatgttgctgcaaatgacaggatttccttcttttttttttaaggctgaatagtattcaattttcggaannncnn

SEQ ID NO: 6118 - protein, 76 aa, Homo sapiens [sequence omitted]

SEQ ID NO: 6119 - DNA, 377 bp, Homo sapiens
  misc_feature (1)..(1): Wherein n may be a, c, g or t
  misc_feature (2)..(2): Wherein n may be a, c, g or t
nnacgcgtaaaaaaatgctacaaacaaatcccgataaaccactaagcgcactacgcgcattaaccgccactaggagaaaacgtgctcatcatcaaaaacttttcattagcattaggtcaaaaaaccttaatcaaacagctaaatgtgcaaatcgaaaatggacaagtggtttctatcatgggccccagtggcattggcaaatccagcttattaaattttttaagcggcaccttagcaccagggctcaccgcacaaggtgaaatgtttttaaatgacgttgccctgcacactaaaatagcccaagatcgcagagtcggcttattgcagcaaacacctttgctgttccctcacatgagtattttagaaaacctaagctt

SEQ ID NO: 6120 - protein, 104 aa, Homo sapiens
PPLGENVLIIKNFSLALGQKTLIKQLNVQIENGQVVSIMGPSGIGKSSLLNFLSGTLAPGLTAQGEMFLNDVALHTKIAQDRRVGLLQQTPLLFPHMSILENLS

SEQ ID NO: 6121 - DNA, 458 bp, Homo sapiens
  misc_feature (291)..(291): Wherein n may be a, c, g or t
  misc_feature (346)..(346): Wherein n may be a, c, g or t
  misc_feature (411)..(411): Wherein n may be a, c, g or t
atcaacgacggacgtcgggctagggaactcggcctacctcccatgactcgtcttaccgaggctgtgcaggtggcccgcgacgtcatgatcgccgaggagactggtgcccactaccatctgtgccacgcctcgacccggcagtcgattcgtactctgcgtcggggccgtgaggacggcgcgaatgtcaccggtgaggcggctccgcaccatctgctgctggccgacgacgacatccccgacgatgatgggttctacaagatgaatccgccgctgcgcacccgtgacgacctncacgctatggtcgagggtctgtgtgacgggaccttgacctgtatcgccaccgatnacgccccgcacgcggctgaagaaaaggcatgttccttccgcgatgcccgctttggggtcatcacntacgagcacacccttgccctgctgtacaccaaacttgtgcttgaccg

SEQ ID NO: 6122 - protein, 152 aa, Homo sapiens
  misc_feature (116)..(116): Wherein Xaa may be any naturally occuring amino acid
INDGRRARELGLPPMTRLTEAVQVARDVMIAEETGAHYHLCHASTRQSIRTLRRGREDGANVTGEAAPHHLLLADDDIPDDDGFYKMNPPLRTRDDLHAMVEGLCDGTLTCIATDXAPHAAEEKACSFRDARFGVITYEHTLALLYTKLVLD

SEQ ID NO: 6123 - DNA, 417 bp, Homo sapiens
gcgcgccaggggagtgcccaatcaactccgcctcaaacgctctgttccgacaagagactaagaggttgctggtgtcacggtgggatgcagcgcatacttttccttagcaagtgccacagtctgaaggaaaaggtacaggacaggcctgcagctccctgaagccccttcccagcccaggagccagggtctgtgtgagcagagcatgcagaaggagttggagatgttttgagatccagaccaaccctttgaagatgctgtcccatcagtgtttcctgatcactagctacctgccaccctcccgccccaccatgactcctgctgaccctgcccaggtctacgaatgggtcatgaatacctatcccttcctcttttgacccgtcccctccccatcctgctgcacatagtgacagccctgaa

SEQ ID NO: 6124 - protein, 62 aa, Homo sapiens
MGQHLQRVGLDLKTSPTPSACSAHTDPGSWAGKGLQGAAGLSCTFSFRLWHLLRKSMRCIPP

SEQ ID NO: 6125 - DNA, 282 bp, Homo sapiens
cagcatatcctccgtaggtctcaacacgataattattccaatggaagctctccgtggatgaaaactaacttgccacctccatctccacaagctcatatgcatatacaaagcgatctatcgccaacgccaaagaggcgaaagctagcgtcttcaagtgattgcgagaataaacaatttgatttatcatctattaacaagaatttatatccagaagatacaggaagcaggctaatgcaaagtcttccagagttgtctgcctctaatagtgataatgtatcaccg

SEQ ID NO: 6126 - protein, 94 aa, Homo sapiens
QHILRRSQHDNYSNGSSPWMKTNLPPPSPQAHMHIQSDLSPTPKRRKLASSSDCENKQFDLSSINKNLYPEDTGSRLMQSLPELSASNSDNVSP

SEQ ID NO: 6127 - DNA, 514 bp, Homo sapiens
ccgcgccgtggcagcgaggcattcctcacgggctatggctggccgaataccgctgaacaggacgtgctggccgcctacgaggctgacaaagctagttacgaaatcgtctatgaaacccttaaccgaccgacatgggtagacattccactgtcggctattcgagcaatggggcaggattgacgatgctcaagctcacccacggattcccgttggattatctaactgacggccacaccaacgacatgccaggaggacgacatgccaggaggacgacatggctcacgatgagttcggaggactcaccggttgggacctcgaggggttccactctggtggggacacggaggtgtggaagaggctcgggtcccatgtcatcactatcgatgacgatgagcgtggtcccatcaccggcacccgcttcgctgtgtgggccccgaatgcccaggcggttgaggtcatctctgacttcaactggtggactggtgaccgtatgcgcctcatcccggggtccgga

SEQ ID NO: 6128 - protein, 59 aa, Homo sapiens
PRRGSEAFLTGYGWPNTAEQDVLAAYEADKASYEIVYETLNRPTWVDIPLSAIRAMGQD

SEQ ID NO: 6129 - DNA, 193 bp, Homo sapiens
ggatcctctcgacggcggatcggcgaggaagagcggttcggaacgaagatgcttcgcatcgatgagtaccaggtcgcggccgacgggccgtgacgtgggagagcttctactacggcggcacggcgatcttctcgtttcggcccaccaccgaggatattgtcaaacgccatgcgctggtaccgaagcccgcggg

SEQ ID NO: 6130 - protein, 56 aa, Homo sapiens
MAFDNILGGGPKREDRRAAVVEALPRHGPSAATWYSSMRSIFVPNRSSSPIRRRED

SEQ ID NO: 6131 - DNA, 277 bp, Homo sapiens
  misc_feature (100)..(100): Wherein n may be a, c, g or t
tgatcatctgtccagtcgaatctgcgttgcccaccgttgcctggcacgccaatctccacgttttgggtttccttttgagcaactccttttccacatcagncttcgggggacagcatttccttggcctttccaccaacctggaacaatgcagggtcccgcacacgccgccccctgagcagttgagaagaaccttatcgtagggcccgtagaggtcgatgtagccgtcgagcatgatgtccctgagcttctgcccgccgcgcgcccgccggtagtgcac

SEQ ID NO: 6132 - protein, 77 aa, Homo sapiens
  misc_feature (45)..(45): Wherein Xaa may be any naturally occuring amino acid
MLDGYIDLYGPYDKVLLNCSGGGVCGTLHCSRLVERPRKCCPPKXDVEKELLKRKPKTWRLACQATVGNADSTGQMI

SEQ ID NO: 6133 - DNA, 271 bp, Homo sapiens
  misc_feature (1)..(1): Wherein n may be a, c, g or t
nctctggccccaaaaggaccctgacttcgaggagaactttctcctcaaagtgaccacacctgcagcagcaggaactgtgcaatcatagtggctaatgcttcatgactgaatgccatgtgttttcacgtgcttgtcaaatgtcatcctctttagcactcattcagggaggataactgttattttcacttttacagataaggcccagagaggcagaggaactgcccaggtcacacagctagtatattgtggagccaagatttaaacccacatc

SEQ ID NO: 6134 - protein, 50 aa, Homo sapiens [sequence omitted]

SEQ ID NO: 6135 - DNA, 264 bp, Homo sapiens
accggtagcaacgcaaagtaagatgattggctgagaacttggtctgccataatgaggttgaatacacgcccaggaagccgcgattttgacggtttacttcgtgtccctattgtcttcactggcacccctagacttgagtccaatcaacgacgctaacagcttctttaatcgcttcatcacaaactttatcttcccgcacgaatcttcgagtttaatgctcatattggtatgacatattcgatgcataaagcttctctagggaat

SEQ ID NO: 6136 - protein, 50 aa, Homo sapiens
MHRICHTNMSIKLEDSCGKIKFVMKRLKKLLASLIGLKSRGASEDNRDTK

SEQ ID NO: 6137 - DNA, 289 bp, Homo sapiens
ttgttcggccgctacggtgagcaggcgcaggtaatctgagtcatccatattcgcagcttagcgttcaaatgatgaccgcaggaagtcttgctttaaaacggcggtgtagactggcgactcgaccgttatgccgagcagggagagtgtgctgtgaagttctgtgccgcgttgttgttaagtctgctgcccgttttggctcaggccgttgaagtgggtgagcgcctggcgccgtggaccttgctcgaccagttcgatcaagcctacacccggatgaccacgtgcgcattct

SEQ ID NO: 6138 - protein, 73 aa, Homo sapiens
MRTWSSGCRLDRTGRARSTAPGAHPLQRPEPKRAADLTTTRHRTSQHTLPARHNGRVASLHRRFKARLPAVII

SEQ ID NO: 6139 - DNA, 284 bp, Homo sapiens
gtgcaccgtccgagcgggtctgcctcccgcctcgatgttgatggccccgcaccacaaacgggtgggatcgagctcaacacgaaccggctcctcgcggtgggctgatcggtcgcgcagtcgtaccccgagcatggtggcaagcgccttgccacgtgacagcggacgcgcaccagggccctggcgcgccggggagcacctggccgtgaacgggcggtggagccaccgggccgagcacctcaaagccatcggcctcggcctgagccagaagggactccacggcgcgc

SEQ ID NO: 6140 - protein, 83 aa, Homo sapiens
MLMAPHHKRVGSSSTRTGSSRWADRSRSRTPSMVASALPRDSGRAPGPWRAGEHLAVNGRWSHRAEHLKAIGLGLSQKGLHGA

SEQ ID NO: 6141 - DNA, 353 bp, Homo sapiens
tgatcagcgacagttcgccatgacggggcgggcaagccattcgcccgggtaccacccgaagaggtcccacccatgctgtgtcgtgattgccgcccaggaatcgcaccgaccaaaaccgatcccatggagagcacaccaaaggctgccgcgcccaggagcatctgcaccagtggcgcacagccaggttacgccagtcgacaccgggcgtgcgcggacgggaacacgacatccccgccagaatgccattcctcgccacatatcgtcgctcgtggaaccgactccaccaatgaggaccagtcctagcaaagatagcagggtcatcggaccacacaacacggcgagaacgaacgcgt

SEQ ID NO: 6142 - protein, 111 aa, Homo sapiens
MTGRASHSPGYHPKRSHPCCVVIAAQESHRPKPIPWRAHQRLPRPGASAPVAHSQVTPVDTGRARTGTRHPRQNAIPRHISSLVEPTPPMRTSPSKDSRVIGPHNTARTNA

SEQ ID NO: 6143 - DNA, 324 bp, Homo sapiens
acaagtgagggacaagattctaacttagagaaccaacagatatataaatatgatgaaagtgagaaagatagcaataagctaaatattaacggtagcaaacagctatctaccgtcatggacataaatggatcactaatattcaaaaataagtccattgccactactacttctaatttgaagaacgtttttgttcagttagagccaacgtcctatcacatgcattctccaaatcatggcttgaaagataatgcaaatgttaaaccagaaaggaaggtagtcgtcagcaacagctatgaaggcgacgttgacagcatagaacaattg

SEQ ID NO: 6144 - protein, 108 aa, Homo sapiens
TSEGQDSNLENQQIYKYDESEKDSNKLNINGSKQLSTVMDINGSLIFKNKSIATTTSNLKNVFVQLEPTSYHMHSPNHGLKDNANVKPERKVVVSNSYEGDVDSIEQL

SEQ ID NO: 6145 - DNA, 228 bp, Homo sapiens
  misc_feature (1)..(1): Wherein n may be a, c, g or t
nccgcgaaccacacgaacggccagggcagcgcgagcaccgacggcagcggcaacgtcacatatcgcgcacgcttcgccgagttcaacgtcagtgccggcggcagttcgaactaccggcagggttcggtcggcattcgcggcggcggtcgccacggcggcggcatcacgctgtcgcaaccgctgtcggaaacgttcgccatcgtcgaggccaagggcgcggagggtgca

SEQ ID NO: 6146 - protein, 76 aa, Homo sapiens
  misc_feature (1)..(1): Wherein Xaa may be any naturally occuring amino acid
XANHTNGQGSASTDGSGNVTYRARFAEFNVSAGGSSNYRQGSVGIRGGGRHGGGITLSQPLSETFAIVEAKGAEGA

SEQ ID NO: 6147 - DNA, 327 bp, Homo sapiens
  misc_feature (316)..(316): Wherein n may be a, c, g or t
  misc_feature (320)..(320): Wherein n may be a, c, g or t
  misc_feature (322)..(322): Wherein n may be a, c, g or t
ggatcctctattccaacccagcttgcctccctagcagcccatcattccctcagaaaacacaggctttgggtgctgtcttcctgaacccaatccccaaacccacaggggcccctccaaactggactgctcaacaccaccctcacctacttctttaggagtcagagaggcctgcttctggtgcagggccagcggctcacctgtgccctgctgtgtgggctctccctgtgcgacactccctccaccatcctgtctcataggtatcctgttggttttgctttgctgatttttctcccccatctcttgccccttcacgcgncccncnccccc

SEQ ID NO: 6148 - protein, 88 aa, Homo sapiens [sequence omitted]

SEQ ID NO: 6149 - DNA, 279 bp, Homo sapiens
tgtacagaaaaaaatcacaataaagaagcccccaatgcccaaaaccaaggatgcaacctccgaagcacttgggaagtcatccaggaatctgaggacttcaagcaaaccactcccatgacagcccagccacccgcacccaccttctcactgctgcaaaccagacaaagaatcgtgtgcctcgttcttgataagtccgggagcatgcagagcgataaccgtcttaaccgaatgaatcaggcaagccggcttttcctgctgcagaccgtggagcagggatcc

SEQ ID NO: 6150 - protein, 93 aa, Homo sapiens
CTEKNHNKEAPNAQNQGCNLRSTWEVIQESEDFKQTTPMTAQPPAPTFSLLQTRQRIVCLVLDKSGSMQSDNRLNRMNQASRLFLLQTVEQGS

SEQ ID NO: 6151 - DNA, 649 bp, Homo sapiens
accggtgacagcctgctgggcagcgatcacaaggcctggcaatggggcacgctgcaccgttatagctggaagaacggcgccggccaggtgattcgcggaccgatcccagccggcggcgaccacaccacgctgaacacctcggcctatgcctggggcggcgcaagcttcgacgtcacccaggggcccgggggtgcgcatgaatcgtcgacttggccagatcgaaccgatgagcggccaacagagccccggacagtccggcaacccggccagtccgagctatgccagcggtatcgatggctggctgaaggcccagtacgtcagcttcccgatgcagcagcagaacttcgacaaggcctacggcaccacgcgcttgaccctgacgcccggcaagtaacactccacggccgggtccggcctgccagcgatggcctcatcgctggcaagtcggttctaaaagttacggatgtcacccttcccgccgcggaactgccatttttttctccttcgcgaacgcaccaatattgtgcaatttatttcagccgcccaatttcgggcatgattagctggctcggagccatattcctgccttttaaaacacttgttcgtgactctggttcggaaattgctacttttatcaggtcatacgcgt

SEQ ID NO: 6152 - protein, 82 aa, Homo sapiens
MPGAAQASTSPRGPGVRMNRRLGQIEPMSGQQSPGQSGNPASPSYASGIDGWLKAQYVSFPMQQQNFDKAYGTTRLTLTPGK

SEQ ID NO: 6153 - DNA, 309 bp, Homo sapiens
ttccgtagttaccagaagaaactcgaactatcagagaccttccgaaagaattattccctagaagacgaaatgatctattaccaagaccgactagtagtaccaataaaacaacagaacgcagttatgagactgtatcatgaccatacctccatgcagccgggcgtgggagatttagcggggatgagctgtgccgtttgcaggacactgcacagaaactaagcgagagcgatcctttggtacaagaatacgtggggctattgagcggtacccttagcggctactgcttgccgccctcgaagctggacgcgt

SEQ ID NO: 6154 - protein, 72 aa, Homo sapiens
FRSYQKKLELSETFRKNYSLEDEMIYYQDRLVVPIKQQNAVMRLYHDHTSMQPGVGDLAGMSCAVCRTLHRN

SEQ ID NO: 6155 - DNA, 395 bp, Homo sapiens
  misc_feature (1)..(1): Wherein n may be a, c, g or t
  misc_feature (133)..(133): Wherein n may be a, c, g or t
  misc_feature (218)..(218): Wherein n may be a, c, g or t
  misc_feature (265)..(265): Wherein n may be a, c, g or t
  misc_feature (278)..(278): Wherein n may be a, c, g or t
  misc_feature (280)..(280): Wherein n may be a, c, g or t
  misc_feature (297)..(297): Wherein n may be a, c, g or t
  misc_feature (303)..(303): Wherein n may be a, c, g or t
  misc_feature (318)..(318): Wherein n may be a, c, g or t
  misc_feature (340)..(340): Wherein n may be a, c, g or t
  misc_feature (341)..(341): Wherein n may be a, c, g or t
  misc_feature (362)..(362): Wherein n may be a, c, g or t
  misc_feature (366)..(366): Wherein n may be a, c, g or t
ngaatcctgagagttatacataaaaatctcttgtacttcaaacccctttcaacgccagcttctgcagaaccctatctgcgaacttaggtttattcagctaataaaatgtttctattgctacactagaactaanaggctctggctatctagtgatgaacaaaatagtcatggtctctgaactcatgggggttatcacctagtaggggtggcagatgttnaataaaaatgaaaaataatacaaacctatttttactaagtgccattnaggtctgtgtaananaaccaccccctaccccnatactngacagtctatcatcntgcatatattttaaatactgtnntcttaagaatttgagaatatngatnactacttagaagttactctatcagagtaa

SEQ ID NO: 6156 - protein, 58 aa, Homo sapiens
  misc_feature (2)..(2): Wherein Xaa may be any naturally occuring amino acid
  misc_feature (9)..(9): Wherein Xaa may be any naturally occuring amino acid
  misc_feature (15)..(15): Wherein Xaa may be any naturally occuring amino acid
  misc_feature (16)..(16): Wherein Xaa may be any naturally occuring amino acid
  misc_feature (20)..(20): Wherein Xaa may be any naturally occuring amino acid
  misc_feature (36)..(36): Wherein Xaa may be any naturally occuring amino acid
MXDDRLSSXGVGGGXXTQTXMALSKNRFVLFFIFIXHLPPLLGDNPHEFRDHDYFVHH

SEQ ID NO: 6157 - DNA, 243 bp, Homo sapiens
aaatttcaggatgtttggaggagaggacaccagacttgttgacaggttggatgtgcgggcaaaggcaagagaagagtcaaggttggtgcctgagctttcggtctgagcattggatggacagtggggcctggttcaggacacagtcaggaggcagaagcaacaccgatcactccaatggggaaaaatgtaatgaaaaaatcactaacaaggatgactcaggagacagaaaccacacccatcact

SEQ ID NO: 6158 - protein, 64 aa, Homo sapiens
MCGQRQEKSQGWCLSFRSEHWMDSGAWFRTQSGGRSNTDHSNGEKCNEKITNKDDSGDRNHTHH

SEQ ID NO: 6159 - DNA, 457 bp, Homo sapiens
  misc_feature (1)..(1): Wherein n may be a, c, g or t
  misc_feature (2)..(2): Wherein n may be a, c, g or t
nnagtactctgcgagtacaaagatttttacgtcgcccgtgtcatggaggtggtgatgaccgagattcccgatgatgtattgtgcacctcggatcacctgtggattaggcccggcaacggtagccgggtgcgactcggagtcacgtcagtcctcctggaccattttggaccggtggaatcagtgtctcttcccgatggcggtgaggaggtcgtttccggggattcctgtggagacgtggagttttccgcgcgtacctgggagattatttcgccagtagccggagaggttgttgcggtgaacccgtcgattgacgctgaccaggttgaggcggacccgtggggggacggatggctcttcgacgtgagactgtcagaccccgagcagttggacgagttgcttgcccctgacgaatacctcgcgagcgtgggggaggtacccctaaaatgactactccgga

SEQ ID NO: 6160 - protein, 130 aa, Homo sapiens
MTEIPDDVLCTSDHLWIRPGNGSRVRLGVTSVLLDHFGPVESVSLPDGGEEVVSGDSCGDVEFSARTWEIISPVAGEVVAVNPSIDADQVEADPWGDGWLFDVRLSDPEQLDELLAPDEYLASVGEVPLK

SEQ ID NO: 6161 - DNA, 380 bp, Homo sapiens
aagagtgcggcagaaaattcatctgatggcttctttatccactcaatgtattgtaataattatcacagtaaatgttcgttgtatttaatgagacagttatcacaaacgcctctgcatgaaaggcgaggcgtgcatttaactagttacattaatctagagtttgatgatatgtactcggtaagccttttagaagaattagttggaagtgaggtacctatagataccgtcaaatcgctgataacgagtttcaaggatcttgagtttgatgatacctacaagaatgagcctttaccattggatgtgtactttggacagttgactactgatgaggaaacctgtatagaataggaagtataattaaatcgtcttcatcaggatcc

SEQ ID NO: 6162 - protein, 115 aa, Homo sapiens
KSAAENSSDGFFIHSMYCNNYHSKCSLYLMRQLSQTPLHERRGVHLTSYINLEFDDMYSVSLLEELVGSEVPIDTVKSLITSFKDLEFDDTYKNEPLPLDVYFGQLTTDEETCIE

SEQ ID NO: 6163 - DNA, 408 bp, Homo sapiens
accttggactacttcactatcgaccctcggctaggcgacgacgatgacttcgatcacctgcttcaggccgcccacgctcgtggtctgtcagtactgctcgacggggtggtcaaccacgtctcgcgtcgcaaccgcatcgtgcaggatgcgcagagtgctgggccagattcagacgccggccgtatggttcgctggtgtgaggggcgcctcgacgttttcgagggtcatagtgacctggtcgcactcaaccacgacaaccccgcagtgcgggaacatgtcacccggatcatgaactattggtgcggtcgcggtgttgacggctggcggctggacgccgctattccgtcaatcctgagttctgggctgcggtgctgcctccggtgcgagagaagcgccctgacgtgagga

SEQ ID NO: 6164 - protein, 134 aa, Homo sapiens
TLDYFTIDPRLGDDDDFDHLLQAAHARGLSVLLDGVVNHVSRRNRIVQDAQSAGPDSDAGRMVRWCEGRLDVFEGHSDLVALNHDNPAVREHVTRIMNYWCGRGVDGWRLDAAIPSILSSGLRCCLRCERSALT

SEQ ID NO: 6165 - DNA, 337 bp, Homo sapiens
accggtgaaaaacccaagaggaccccagggtgcttgaccagggactccctggagcccgcctgtcagagcaagggggaaaacggtggtctctaagaggagttaaccggaaggcgaagcgaaggcccaaagggcccggcctccagttctccagcagtgaccccagcaagccccaggagacagtcctgcaggcacaagccctggagtgtgctgggcctgctgtggccctgcgttggcatcagtgccaggcatgcccagaagcagggggtgcgacacagcactccgggtggcagggaaggggcctcggcgcccttcatagccgctaggaactgttgcagat

SEQ ID NO: 6166 - protein, 74 aa, Homo sapiens [sequence omitted]

SEQ ID NO: 6167 - DNA, 335 bp, Homo sapiens
  misc_feature (48)..(48): Wherein n may be a, c, g or t
tctagacaagttcaccacaaaatttcaataattgtgttcttggaatanaaaatcacctttacggatggagagagtaggactgggagtgggttgcaggggtggagaagttggagggatgtggaaaatgtaaatgtcatcaaatttgaaatgacaaagtatccacacattgagccagaatctctcttgcaagaatgccatactaacaatactgccataaggtatttattaactctgacttgtctgcttggacttggaatgataatgattgttttctgctattgcctccctgtataaatcaataatctctaaaatttataggatgccatttaagatct

SEQ ID NO: 6168 - protein, 67 aa, Homo sapiens
  misc_feature (56)..(56): Wherein Xaa may be any naturally occuring amino acid
MAVLLVWHSCKRDSGSMCGYFVISNLMTFTFSTSLQLLHPCNPLPVLLSPSVKVIXYSKNTIIEILW

SEQ ID NO: 6169 - DNA, 243 bp, Homo sapiens
  misc_feature (211)..(211): Wherein n may be a, c, g or t
ctccccacccaattaattgctgctgttttggtcattcaatattggatcagcagagaccgtgttaaccctggtgtgtggattactatattcttggttgttattgtcgctatcaatgtcgtcggtgtaaaattctttggtgaatttgaattttggttgtccagtttcaaagtcatggtaatgttgggtctaatcctgttactatttattattnagcttggtggaggtcctaaccatgaccgccta

SEQ ID NO: 6170 - protein, 81 aa, Homo sapiens
  misc_feature (71)..(71): Wherein Xaa may be any naturally occuring amino acid
LPTQLIAAVLVIQYWISRDRVNPGVWITIFLVVIVAINVVGVKFFGEFEFWLSSFKVMVMLGLILLLFIIXLGGGPNHDRL

SEQ ID NO: 6171 - DNA, 306 bp, Homo sapiens
  misc_feature (1)..(1): Wherein n may be a, c, g or t
  misc_feature (2)..(2): Wherein n may be a, c, g or t
nnagcagcccgagttgaccctcagcatctcacgttcatcctcattgactttaagggcggtgccgcatttgccaccctcgaccagctgctccacactatcggtatcctgtcgaaccttgagccctccttggcgttccgagcactgcaggccttgaacgccgagctcaagcgtcgtcagcagtgttttgctgacgcaggtgagggtatcgacaatatcgacgcttacctggccacggatccgaccgaaccaatgccacgtctgcttctggtcattgacgagtttgcccagttggctaaggaatatccg

SEQ ID NO: 6172 - protein, 102 aa, Homo sapiens
  misc_feature (1)..(1): Wherein Xaa may be any naturally occuring amino acid
XAARVDPQHLTFILIDFKGGAAFATLDQLLHTIGILSNLEPSLAFRALQALNAELKRRQQCFADAGEGIDNIDAYLATDPTEPMPRLLLVIDEFAQLAKEYP

SEQ ID NO: 6173 - DNA, 252 bp, Homo sapiens
  misc_feature (46)..(46): Wherein n may be a, c, g or t
  misc_feature (157)..(157): Wherein n may be a, c, g or t
  misc_feature (168)..(168): Wherein n may be a, c, g or t
gcgttcgacaagcaggatgcgtcctaccgtgaatccgtgctgccgngcggggtaagcgcccgtgtggccgtggaagcgggtatcgacgactactggtacaagtatgtgggcctgaacggcgccatcgtgggcatgaccagcttcggcgagtcagccnccggggagagnttgttcaaagagtttggtttcaccgtggacaacgtggtggccaaggcgcaggcactgctgaagtaagccgtaagtaggggcgcc

SEQ ID NO: 6174 - protein, 77 aa, Homo sapiens
  misc_feature (16)..(16): Wherein Xaa may be any naturally occuring amino acid
  misc_feature (53)..(53): Wherein Xaa may be any naturally occuring amino acid
  misc_feature (56)..(56): Wherein Xaa may be any naturally occuring amino acid
AFDKQDASYRESVLPXGVSARVAVEAGIDDYWYKYVGLNGAIVGMTSFGESAXGEXLFKEFGFTVDNVVAKAQALLK

SEQ ID NO: 6175 - DNA, 405 bp, Homo sapiens
  misc_feature (214)..(214): Wherein n may be a, c, g or t
  misc_feature (385)..(385): Wherein n may be a, c, g or t
  misc_feature (404)..(404): Wherein n may be a, c, g or t
gtgcacaatgctgtacaaatgtacattttacatttgctacattctaaagcaatagtcttttctattcgaacctgcctgtgatgctggctttgtggaatgtttttgagagaaagagtgccggtgtctctctaggactatgagggtagtgagtgcaggcctgattgccctgttctgtgtagagcagatcatctgcatgagtagtatcaacgcttgngtcctatagcccatattccagccaggaattagtagggggagatcagttggctgcattactagcagtttctagtggctgtgtgtcagcatccatttggtgaaagtgctattagtcttgactcttctgcctgccatttaatcattagagcacctgcccttcgaggtcagactnttccatgtctgagaccatnt

SEQ ID NO: 6176 - protein, 77 aa, Homo sapiens [sequence omitted]

SEQ ID NO: 6177 - DNA, 297 bp, Homo sapiens
agatctgatggtatcaatattgtctcaaactcctacttgatcccagggaaaatatgctcaagggacaaaatactaagtttcaaacaattttatctttaagattcagtttaagtcagatccaagaggcctacttggacttggaccacaccttggactattctttccctaatcagcacacaatattcaaagaagcaacaagtggaagactttcttatctctcttttgataggtaacagtgggtagcctgagtgtgtgtaagaggaaaggggagaaagagaagctgtagaaaagtgtaca

SEQ ID NO: 6178 - protein, 59 aa, Homo sapiens [sequence omitted]

SEQ ID NO: 6179 - DNA, 267 bp, Homo sapiens
  misc_feature (30)..(30): Wherein n may be a, c, g or t
  misc_feature (102)..(102): Wherein n may be a, c, g or t
  misc_feature (238)..(238): Wherein n may be a, c, g or t
  misc_feature (246)..(246): Wherein n may be a, c, g or t
cctaggcaacagagcgagaacccgcctcanacagacaaacaaacaaacaaacaaacacacacccaaaaccaaaacaaaacagaaagacagaaaatggaaaanacaaaccacaaaaccctctcagcactcccaatcccctttccctgcttttttttctttttgaacaaagcactatctcttaacatattatgtaatttacttattatgtttattgtttattttctgacttctgcagttnatatgtanagtccttgagggcagggatcc

SEQ ID NO: 6180 - protein, 53 aa, Homo sapiens
  misc_feature (3)..(3): Wherein Xaa may be any naturally occuring amino acid
  misc_feature (49)..(49): Wherein Xaa may be any naturally occuring amino acid
  misc_feature (51)..(51): Wherein Xaa may be any naturally occuring amino acid
MEXTNHKTLSALPIPFPCFFFFLNKALSLNILCNLLIMFIVYFLTSAVXMXSP

SEQ ID NO: 6181 - DNA, 391 bp, Homo sapiens
  misc_feature (269)..(269): Wherein n may be a, c, g or t
  misc_feature (376)..(376): Wherein n may be a, c, g or t
  misc_feature (379)..(379): Wherein n may be a, c, g or t
  misc_feature (388)..(388): Wherein n may be a, c, g or t
agatctccatcattagctttcacttggttctattccagttccaaatcgaatccagaaggcaattagcttagtgaggcttccgaaattacaatacatgggtatgaccaaagacccttgaaatatgtgtaaaccattaaagaaagactaaatttaaatggtaagcaccaagagagtagaggctgtatatccagaatttggtaggtgcctaggataaagcacatattcaaaattacttgttgagtggaaaaagaataacttttcaaatattntcttttgagatttagactataaggtagcagtgatgtttagaagagagcacagacttaatcctgaatggtatatcccttgagtcttattgattagtactaactctaangangcttattcncag

SEQ ID NO: 6182 - protein, 52 aa, Homo sapiens
MCFILGTYQILDIQPLLSWCLPFKFSLSLMVYTYFKGLWSYPCIVISEASLS

SEQ ID NO: 6183 - DNA, 392 bp, Homo sapiens
tgtacagggagagccagaccttgggtccctgctggggtcacatatagggcatggagaggcctcctgggttggcctgaaggctggggtaggaaggagctggggccgagcactggggcatccctcagtctccgtggccccttctcagacaccagcactgtcacttggcaggatgacagggcctgggctggggccacaggacgagccataataggcttaaggggagactgtaaatccctttccaggctgagcaatcagctccttcaggcaggcagaggctggagctcccgggggagggccctgtactcctagggatgtgtcatgtggttgctgttcttagactcctgccccatggtccctagtggcccatcagggaccaggccaggcctaacgtg

SEQ ID NO: 6184 - protein, 68 aa, Homo sapiens
MARPVAPAQALSSCQVTVLVSEKGPRRLRDAPVLGPSSFLPQPSGQPRRPLHALYVTPAGTQGLALPV

SEQ ID NO: 6185 - DNA, 304 bp, Homo sapiens
gtgcacaactcccgcataatctcgacagggtacaacggcacgccgcgcaacctgcggaactgcaacgaagggggctgcgcgcgatgcaactcggcgtcgacaggcgggtcggccctctcgacctgcctgtgtctgcacgccgaggagaacgcgctcctggaggccggccgcgaacgcatccgcgaaggctgcatcctgtactgcgacacgtgcccgtgcctgacgtgcagcgtcaagatcgcccaggtcggcgtcaaggaggtcgtctacagccagacgtacaacatggacgaagcgagtcgac

SEQ ID NO: 6186 - protein, 101 aa, Homo sapiens
VHNSRIISTGYNGTPRNLRNCNEGGCARCNSASTGGSALSTCLCLHAEENALLEAGRERIREGCILYCDTCPCLTCSVKIAQVGVKEVVYSQTYNMDEASR

SEQ ID NO: 6187 - DNA, 261 bp, Homo sapiens
  misc_feature (1)..(1): Wherein n may be a, c, g or t
ntgtgttcctggcaccccaagcacccgcccaccaagcgcttcgtgcaagaagccgatcagatcgacgaaagcgagcagcgcgatgacttcgcgcatgtgccgggccgcatcgtgcgcctgactttccagggcgaagcgacctacgcgccgctgctgggcaccgtcgcccgcgaaacgggtgtggactacagcatcctcgccggtcgtatcgaccgcattaaagatattccttacggccaactgaccctcgccgtgaccggt

SEQ ID NO: 6188 - protein, 87 aa, Homo sapiens
  misc_feature (1)..(1): Wherein Xaa may be any naturally occuring amino acid
XCSWHPKHPPTKRFVQEADQIDESEQRDDFAHVPGRIVRLTFQGEATYAPLLGTVARETGVDYSILAGRIDRIKDIPYGQLTLAVTG

SEQ ID NO: 6189 - DNA, 237 bp, Homo sapiens
ctagttgatgggttaggaggtagtggtctagccatgccagtggaagttgtgcagttctgctggaagtacaaccttgtaagattgcaggaactgtttaaggaggaaggagtcgaggcaaagctaaggtttgaaggcgacaagccctatgttacttacaactcaaactacatcgtcgatttatacttcaagacgccaatcaaggatgcgttggcagcaggacaagaaattgcagctctg

SEQ ID NO: 6190 - protein, 79 aa, Homo sapiens
LVDGLGGSGLAMPVEVVQFCWKYNLVRLQELFKEEGVEAKLRFEGDKPYVTYNSNYIVDLYFKTPIKDALAAGQEIAAL

SEQ ID NO: 6191 - DNA, 317 bp, Homo sapiens
atgagaggcagatcccatctgtcccctgtcccctcccctgcttcaaatactcatgaactcccagctgcctgcagatggccctcctgtgcctcacccctgcagaggaccccacaccccagctgtctttgaggatgtctgttccctaaagctgggagcagaggccttgcctctctggatccgacctgcccttccacccccatcctacccacctgctgttccccaccccatgggtgtgggctgcccttgggtctgcccaccctagtgctggggcatttcttacctggcaccctttagatccctttgcatgtaaatcttta

SEQ ID NO: 6192 - protein, 69 aa, Homo sapiens [sequence omitted]

SEQ ID NO: 6193 - DNA, 372 bp, Homo sapiens
agatcttgaaggtctgatgagattaaggtctgaagagatgcagacatcctgaggccaaagccccagcaagctccacaggctccaccttgctcatgggcagttctttgagctgcactcggccactctccactccagctgcactgccttccctgctccttccccaacaggccctggcctttgaacttgctgctccctctgcctgcaacactctttcctcagagagccatatgcctggctccttcacctcctcaccacttctgtcttgcttagatgtaaggcactgagcactttaacacctttcccatgtgtgttagccagggttctctagagaaacagaatgaatgatgtgtgtggtgtgtgtgtgtgtgtgta

SEQ ID NO: 6194 - protein, 63 aa, Homo sapiens
MGSSLSCTRPLSTPAALPSLLLPQQALAFELAAPSACNTLSSESHMPGSFTSSPLLSCLDVRH

SEQ ID NO: 6195 - DNA, 263 bp, Homo sapiens
tgtacaaaaattggtagcagacataaagtttaaatttttaaataaacctggatgattcatttttagggaggaattaccacgtgggatgattgcaatcatgcaatgttcttcccatttcttcccaaaaagtttcttcccaaaacattttctcttacctctttgtagccagttgtcttcttcaataccgagaacttgtcaaccactgatctgttttcggtcactataattttgccttttctaggattttgagtaaatggaatcat

SEQ ID NO: 6196 - protein, 55 aa, Homo sapiens
MIPFTQNPRKGKIIVTENRSVVDKFSVLKKTTGYKEVRENVLGRNFLGRNGKNIA

SEQ ID NO: 6197 - DNA, 409 bp, Homo sapiens
  misc_feature (406)..(406): Wherein n may be a, c, g or t
cgatctcagtctgaggttgcattgtcttatgcggaggtcagggaatggtgcagggagcctgaattaacgatttctttgcccacaccccagtgcctttgtgcttaatcacgtcagcagcactcccccacacgctccagcaggatgccgtgtgaaattccttatcaaacttccgtagtcctgaaagaggacagagagagcaggacctctgctattttcctccaatccccccagcacacagatcacagcagaaagccagcattagggtggaaaataacagccaacatgttgttgagtgacgactgtgcatggaatgctgaattaggcgtcttcagagtaattccatgagataaatattatcccatttagagattagaaaagctgagactcatagaggggtaggagctgncga

SEQ ID NO: 6198 - protein, 67 aa, Homo sapiens [sequence omitted]

SEQ ID NO: 6199 - DNA, 297 bp, Homo sapiens
gggcccttcaaaataaattcctccttaacttccaaggctaccagccagacaccaatgccctcgcataattgcctcagaccaagagcctgtgcagctgtttttaagttaccagcagtacaaacgctcctgtatagatatagaaggtgaaccctctcggcaacatgcaaattcttttctagtccagcagccaccatttccatctctgcagaattgtcctctggaggaaatatgtaatgaattctacaaatcttcgcgagttcatccagtgcttctggccgttttccttgaatctctaga

SEQ ID NO: 6200 - protein, 66 aa, Homo sapiens
MEMVAAGLEKNLHVAERVHLLYLYRSVCTAGNLKTAAQALGLRQLCEGIGVWLVALEVKEEFILKG

SEQ ID NO: 6201 - DNA, 404 bp, Homo sapiens
agatcttccttgcttcttctaaaattagcctctaacactaagtgcccaaaccaaacatggacatcttctttatattgtatttcaacttcatttgttttgggggctcctcaggcccaaagctgagaaacttgtcttgagatgcccatcctatcaccagctcttcatcagtggagaaggaagtgccattctcattttcctaagctgcagcggtgggttgcctctccgtccacaatctgaaaatgttcatgggccttggtgatggtgatggtgatagagagggggagctggagcctgacgtgccttcatccccctttcctcttggggtagagaggcttccttccggccatgaagttgcacagtggcttcctgaggccctctctttactttctcttcctttgataggc

SEQ ID NO: 6202 - protein, 55 aa, Homo sapiens [sequence omitted]

SEQ ID NO: 6203 - DNA, 168 bp, Homo sapiens
  misc_feature (46)..(46): Wherein n may be a, c, g or t
tgtacatgtcctgtgatatgtgttgtgggtggtaggtgtgtggcantgtgtatgtgtgtcctatgtgtggtgtgtatgtgtcatgtgtggtgtgtgtatgtggtgtgtgtatgtggagtgtgtgtgtgtgttgcctgctgtgtgtgtggtgtgatgcatcacgtcgtg

SEQ ID NO: 6204 - protein, 56 aa, Homo sapiens
  misc_feature (16)..(16): Wherein Xaa may be any naturally occuring amino acid
CTCPVICVVGGRCVAXCMCVLCVVCMCHVWCVYVVCVCGVCVCVACCVCGVMHHVV

SEQ ID NO: 6205 - DNA, 258 bp, Homo sapiens
ccagtgctgttcctgctccaatcgcacgacgtggaagtgcagcgtgcgtcgagtgcggcgctcggtaaccttgccgtgaatgcagagaacaagcttttgattgtgaagctcggtggtctggagccccttattcgccagatgctcagcccgaacgttgaagtacagtgcaacgccgtcggttgcatcacgaacctcgctactcatgacgataacaagtccaagattgccaagtccggcgcgctcgtccctctgacgcgt

SEQ ID NO: 6206 - protein, 86 aa, Homo sapiens
PVLFLLQSHDVEVQRASSAALGNLAVNAENKLLIVKLGGLEPLIRQMLSPNVEVQCNAVGCITNLATHDDNKSKIAKSGALVPLTR

SEQ ID NO: 6207 - DNA, 397 bp, Homo sapiens
gtcgacgtcatgtgtgagcaattttttaacgaccgtccctgccgtaccgcagacgaggctgtgcccggatcgaccgtcggcaagaactacctcatcacccaccgtctgggcgagaacgaagagcgtcgtgccgggactggtttggtccgcggtggcgacccgaagaccgtgccgtcatcgaagaagattgacaaccaggtcatctgcgagtgcgagctcatgagccgcaagatgttcaccgatctgctagccgagcagcccgacgccaccttcgacgacctgcgtcgccagctgcgtctgggtatgggtccctgccagggtggcttctgctcgatgcgcgctaccggcattgctgttgaggagggcaccattgacgccgagcgcggccaccgtctgc

SEQ ID NO: 6208 - protein, 132 aa, Homo sapiens
VDVMCEQFFNDRPCRTADEAVPGSTVGKNYLITHRLGENEERRAGTGLVRGGDPKTVPSSKKIDNQVICECELMSRKMFTDLLAEQPDATFDDLRRQLRLGMGPCQGGFCSMRATGIAVEEGTIDAERGHRL

SEQ ID NO: 6209 - DNA, 685 bp, Homo sapiens
tatatagggctatctaccttattcacagcacattccatctacacaaccttgtagcgttcactcttgaaggcggattttcataggcgctgcgcctctcatattcaagcatcaaggcaatccaatctccctgcgttggtaactgggcaaaagaaagacctctgcagtccagcaacctcatcgtgcaaatgccgtggcgtggtcaactctgacggcctggaagctgcagaccttgtcaaaggacctcggccgaaattcacccttgatctctttgtcttgtccaactcttgtccctgagaatgaaactgtcttctgagagtccatcaatgcgacgctgactcgtgagaagtgctgaatcacgtcgccattttggagacctgccaacgcagctctggaacctgccaggacgccttccacaacaccagaacgcagcgactttgcgttaaatccaagctcaaacacctcttgctccacaggcctgagcataaaaaggtattctgcgacgggaaatgtaaagtctgagcttaggtgcagagtaccgccatcgatcagtgtctgatactgcttgtccgcgacttctttgccgagcaatgggtatagcgttttcaaccaagtggaagcagtcgtttgctcaccctggcgattccggcgagttagggacatgaccacgtcatcgatgggattttgc

SEQ ID NO: 6210 - protein, 161 aa, Homo sapiens
MSLTRRNRQGEQTTASTWLKTLYPLLGKEVADKQYQTLIDGGTLHLSSDFTFPVAEYLFMLRPVEQEVFELGFNAKSLRSGVVEGVLAGSRAALAGLQNGDVIQHFSRVSVALMDSQKTVSFSGTRVGQDKEIKGEFRPRSFDKVCSFQAVRVDHATAFAR

SEQ ID NO: 6211 - DNA, 532 bp, Homo sapiens
acgcgtgctgcgtttacagttgcgtctattgatttaggtgcgcatccagaatttttaggaaaaaatgatattcaattaggcaaaaaagaatctgtagaggatactgcgaaagtattaggtagaatgttcgatggtattgaattccgtggtttttcacaacaagctggtgaagatttagcgaagttctctggtgtaccggggtggaatggattaacagacgattggcatcctacacaaatgttagctgattttatgacaataaaagagaattttggatatctagaaggaataaacttaacttacgttggagatggacgtaataatattgcgcattcattaatggtagcaggtgctatgttaggtgttaatgtaagaatttgtacacctaaatcattaaatccaaaagaggcatatgttgatattgcaaaagaaaaagcgagtcaatatggtggttcagtcatgattacggataatattgcagaagcagttgaaaatacagatgctatatatacagatgtttgggtatcgacgg

SEQ ID NO: 6212 - protein, 177 aa, Homo sapiens
TRAAFTVASIDLGAHPEFLGKNDIQLGKKESVEDTAKVLGRMFDGIEFRGFSQQAGEDLAKFSGVPGWNGLTDDWHPTQMLADFMTIKENFGYLEGINLTYVGDGRNNIAHSLMVAGAMLGVNVRICTPKSLNPKEAYVDIAKEKASQYGGSVMITDNIAEAVENTDAIYTDVWVST

SEQ ID NO: 6213 - DNA, 356 bp, Homo sapiens
  misc_feature (1)..(1): Wherein n may be a, c, g or t
ncaaacagaaccagaaaatacttactgtactgttgctgggaatgtgtacacaatgcatctgataagatgtgtggtactgagtacttagcagttgatgagcaaacagtagtatcaactaatgttggtataacactggcatttccagttacatttttacattccttatcaaatattcctgtgaaagctattttacagataaagctcagaggttcagtgatttactcaaggtcataccagagttaggacgcaaatacggatttgtttggctctaaaccctatgctttttataacaccatgacatctttaatatattttgatcttttatgtgtgctaaattaatataaaatagggggcca

SEQ ID NO: 6214 - protein, 58 aa, Homo sapiens [sequence omitted]

SEQ ID NO: 6215 - DNA, 297 bp, Homo sapiens
  misc_feature (1)..(1): Wherein n may be a, c, g or t
ncacagctcagtgagcgctatggtcctgtgttcaccatccaccttgggcctcgccgggttgtggtgctttatggatacgatgcagtcaaagaggctttggtggaccaagctgaggagttcagtggacgaggcgaacaggctacctacaatacactcttcaaaggctatggcgtggcattcagcagtggggagcgggcaaaacaactcaggcgcctctctatagccacattgagagattttggtgtgggcaagcgtggtgtagaggagcgtatcctggaggaggcaggctatttgatc

SEQ ID NO: 6216 - protein, 99 aa, Homo sapiens
  misc_feature (1)..(1): Wherein Xaa may be any naturally occuring amino acid
XQLSERYGPVFTIHLGPRRVVVLYGYDAVKEALVDQAEEFSGRGEQATYNTLFKGYGVAFSSGERAKQLRRLSIATLRDFGVGKRGVEERILEEAGYLI

SEQ ID NO: 6217 - DNA, 502 bp, Homo sapiens
  misc_feature (1)..(1): Wherein n may be a, c, g or t
  misc_feature (2)..(2): Wherein n may be a, c, g or t
nnacgcgtcctcgctggatatgaggctgtgaagagggaacgctgcgtcattgatctggacgatattttgttgtgcgcggtgggattgttggttcagcaccgtgacatcactgaggagattcgggctcggtaccgacatttcgttgtcgacgaataccaggacgtttctccgctgcagcataggttgcttgaactgtggtttggcgatcgaaatgatgtatgcgtcgtgggagatccgcaccaggccattcactcttatgcaggcgcacgagctgactacctcctcgacttcgttgccgatcatcctggcgctaaacgcatcgatttggttcgcaactaccgctccactcccgagatcgttcagttggccaatgaagttcttgtcaaccgtatgactccagaggaggctttggaacatggcaggggagtcacattggtttcgcggggtcgatccggtcccgagcccatctatcaggctctcggggacgatgcctccgaagctt

SEQ ID NO: 6218 - protein, 167 aa, Homo sapiens
  misc_feature (1)..(1): Wherein Xaa may be any naturally occuring amino acid
XRVLAGYEAVKRERCVIDLDDILLCAVGLLVQHRDITEEIRARYRHFVVDEYQDVSPLQHRLLELWFGDRNDVCVVGDPHQAIHSYAGARADYLLDFVADHPGAKRIDLVRNYRSTPEIVQLANEVLVNRMTPEEALEHGRGVTLVSRGRSGPEPIYQALGDDASEA

SEQ ID NO: 6219 - DNA, 288 bp, Homo sapiens
ggggcccccccttttttcccccgggggcccccccagccaggtgtgtggctgtgtgtgtgcacacccacatgtgtatgcatcttgctttctttgtgtctgtctgtgcgtgtgaccatatgtgtttgcacacatacatgtcttaggtgtttggcaccatgtgtggctgcctgtgtgtgcatgtgtatgtgtgggtgcaacacccggggagcagtttgcagcttttgttttcttgaccatactctggttctgagagctcttgagagttgtctggggcagaggttctggcca

SEQ ID NO: 6220 - protein, 96 aa, Homo sapiens
GAPPFFPRGPPQPGVWLCVCTPTCVCILLSLCLSVRVTICVCTHTCLRCLAPCVAACVCMCMCGCNTRGAVCSFCFLDHTLVLRALESCLGQRFWP

SEQ ID NO: 6221 - DNA, 401 bp, Homo sapiens
gggcccatcaaataataagtggtcagtagggtattcggtattccttactatccaaacttcagcatctgattcaggaaccaagtggctttggctcctggaggagacatttatctatgttgaataaaatgcatatgtttgcacgctaaggaaggaagacaaagaatttctatccagagagatgtctagtcactcaccttcactgattgatagatgatgattgtcagcgcaccatgggtgatactaaacagaaagtgacaactctggactggtcattgtcttattttgcatcaagctctctgttcatccatgcgcaagttttcagtgagaacctaccaggagccacacaggatgccaggcagtggggacaaggaggtgaaccagaaagagcccctgcacctagg

SEQ ID NO: 6222 - protein, 57 aa, Homo sapiens
MGDTKQKVTTLDWSLSYFASSSLFIHAQVFSENLPGATQDARQWGQGGEPERAPAPR

SEQ ID NO: 6223 - DNA, 441 bp, Homo sapiens
gggggcatgctttctctcttgccctcatcacaaatagctgagcaaaggggagaatggttttacagggattattctaactgccaggacctgcctgcatgctcacaccagagaaacctaaggggagtatgcaaataatgttatgaaaagaaaatgtccagcgtaggtcctggcagacaagtaaaaggaccactggactttcaggccagtttttagcaccctgcttggatgctgaaccctaggcgggcttacgtgactgatcattaattgccaagattccaaatgacacagatctaggttatgcgagggaatttgctgtaagcaagcacgtgccctccacctgcccatcctgtgctatatcaagcaaattgagactctccctccagtaacttctaagtttccatgacattttcacttggaattattggctaagacatgcgctat

SEQ ID NO: 6224 - protein, 76 aa, Homo sapiens
MGRWRARACLQQIPSHNLDLCHLESWQLMISHVSPPRVQHPSRVLKTGLKVQWSFYLSARTYAGHFLFITLFAYSP

SEQ ID NO: 6225 - DNA, 338 bp, Homo sapiens
  misc_feature (1)..(1): Wherein n may be a, c, g or t
nacgcgtagaaatgaagccccagctggtcagagaccggaaatccggtagtgcacgggacgggttccctcggggatctcggaggggagacccccacccgggaggactggaggcagcgcctctcccgccccggcgcgcgcagcctatttccctctttccaaggggccaatccccaccgcggcccgcagggggcgcgctcaaggcaaggtccgcggcgagaacggtgcccagtgggagcgaagggcgaggccagcccttggtccttggccggcagttcgggtcccgcctccaaattttagtatgcatatgagtcaccaggaaagttttttgaaacaaattt

SEQ ID NO: 6226 - protein, 93 aa, Homo sapiens
SPSWSETGNPVVHGTGSLGDLGGETPTREDWRQRLSRPGARSLFPSFQGANPHRGPQGARSRQGPRRERCPVGAKGEASPWSLAGSSGPASKF

SEQ ID NO: 6227 - DNA, 249 bp, Homo sapiens
  misc_feature (1)..(1): Wherein n may be a, c, g or t
  misc_feature (2)..(2): Wherein n may be a, c, g or t
nngggggggcctgacaacggcaatgacagtaataatcccttttctcaatctgacatagtcgtggatgccgacgacgacaagaataagaaagatgcgggtgttggtgtggacgatgatcatcaatctatggcgatggccgccgtcgctgctgcttacactctatcgaaaaataacaataataataacagtattgcgaacgatagcaattcgcgtaaaagacagcatgataacggaaataatcatgagaat

SEQ ID NO: 6228 - protein, 83 aa, Homo sapiens
  misc_feature (1)..(1): Wherein Xaa may be any naturally occuring amino acid
XGGPDNGNDSNNPFSQSDIVVDADDDKNKKDAGVGVDDDHQSMAMAAVAAAYTLSKNNNNNNSIANDSNSRKRQHDNGNNHEN

SEQ ID NO: 6229 - DNA, 279 bp, Homo sapiens
  misc_feature (1)..(1): Wherein n may be a, c, g or t
ncgaggcatgtctcgtggggaagcacctggagcctcctgggttccagcatgtggggagaagaaacacctgtacctcagtcagggcgaatctccttccaatttggccccatccaggtagtgcgtcccggcacctaccttcggcccagttccactcgggactaccccactaacgcccaggcttctgcagcacgcaggggagtccgagaaaacaagggagaattacagggttctgttggtggacatgcccttacccaacaaggccttttaaagaagaatgct

SEQ ID NO: 6230 - protein, 77 aa, Homo sapiens [sequence omitted]

SEQ ID NO: 6231 - DNA, 426 bp, Homo sapiens
ctagaattggtcactgcatccatgactatcaaatattggacgacatctgtgaacccggatgttttcgttgttatcttctacgtactaatcgttgttatcaacgtttttggagctaagggttatgcagaggcagatttcttcttcaattgttgtaaaattctgatgatagttggatttttcattctcgccattattattgattgtggtggtgcaggtaccgatggttacataggtagcaaatattggcgtgatcccggagccttccgtggtgatacacccatccagaggttcaaaggtgtcgttgccacatttgtcacagcagcgttcgcctttggtatgagtgaacagctggctatgactgccagtgaacaatccaatccaagaaaggctattccatcggcggcaaagaaaatgatttatagaatt

SEQ ID NO: 6232 - protein, 142 aa, Homo sapiens
LELVTASMTIKYWTTSVNPDVFVVIFYVLIVVINVFGAKGYAEADFFFNCCKILMIVGFFILAIIIDCGGAGTDGYIGSKYWRDPGAFRGDTPIQRFKGVVATFVTAAFAFGMSEQLAMTASEQSNPRKAIPSAAKKMIYRI

SEQ ID NO: 6233 - DNA, 273 bp, Homo sapiens
gatctgccgcacgatgccgcgttctttatcgcccagcgcattcgctccaacgtgcgcgaactggaaggcgcgctgaagcgtgtgatcgcccactcgcacttcatgggtcgcgacatcacaatcgaactgatccgcgaatcgctcaaggatctgctggccctgcaggacaagctggtcagcatcgataatattcagcgcaccaccgctgagtactacaagatcaagatcaccgatctgctttccaagcgtcggtcgcgctcgatcgcccggccg

SEQ ID NO: 6234 - protein, 91 aa, Homo sapiens
DLPHDAAFFIAQRIRSNVRELEGALKRVIAHSHFMGRDITIELIRESLKDLLALQDKLVSIDNIQRTTAEYYKIKITDLLSKRRSRSIARP

SEQ ID NO: 6235 - DNA, 352 bp, Homo sapiens
  misc_feature (1)..(1): Wherein n may be a, c, g or t
  misc_feature (2)..(2): Wherein n may be a, c, g or t
  misc_feature (3)..(3): Wherein n may be a, c, g or t
  misc_feature (352)..(352): Wherein n may be a, c, g or t
nnngatgccacgccggtctacggaatctccaccggcttcggcgcgcttgcccgccgccacattccagaagagatgcgcgcgcagctgcagctgtccctggtgcgctcccacgcggccggcaccggccctgaggtggaagaagaagtaattcgcgcgctcatgctgctgcgcctatccaccctgtgtaccggccgtaccggcgtgcgccccgtggtggtagaaacttatgccaaggcgctcaacgccggcatcgtgccgggggtgcgcgaatacgggtcgctgggctgctccggcgacttggccccgctggctcactgcgccctagcgctgttgggtgagggtgaggtacgcn

SEQ ID NO: 6236 - protein, 117 aa, Homo sapiens
  misc_feature (1)..(1): Wherein Xaa may be any naturally occuring amino acid
XDATPVYGISTGFGALARRHIPEEMRAQLQLSLVRSHAAGTGPEVEEEVIRALMLLRLSTLCTGRTGVRPVVVETYAKALNAGIVPGVREYGSLGCSGDLAPLAHCALALLGEGEVR

SEQ ID NO: 6237 - DNA, 406 bp, Homo sapiens
  misc_feature (1)..(1): Wherein n may be a, c, g or t
ntttgccttccgcctccagattaaccggcagagccaaaatattgttcacattaagtgtcatttttcccactccgggtatatccaccgccgtgagcggacgtttaccaagcgcaccacgaacaattgggatattaggcgtgatattcttcacaccattttggggggtaggccaagtggcccgttggcccgttcccgcgccaaaaaacaccacccccggaaaaccctccgggtattccccctcccccatacggggggggaaaataccccggcgcggcatattgcttgccatgcctggacagggaaaaatagggcgcgatgtatagcacggataattctcaaaacacccctgccggagaaatgccgccgggtcgcccgccgcaaacggacttcaatgcggtctttgata

SEQ ID NO: 6238 - protein, 96 aa, Homo sapiens
MASNMPRRGIFPPRMGEGEYPEGFPGVVFFGAGTGQRATWPTPQNGVKNITPNIPIVRGALGKRPLTAVDIPGVGKMTLNVNNILALPVNLEAEGK

SEQ ID NO: 6239 - DNA, 306 bp, Homo sapiens
gctagctaggaaaaatgccagtaaacattagcaggccatataatagggggcgagcctgtggatttctgtgttttaacagttttctgaggcagataaatatcacaggttcagcagttttgcaggatattccttgtttgactgttccttttctgttgtaatgtctgcatgcaactgttaggccattgccttgccccataaatggttgccagtcacctgtcctggggttaacaggcagagccttgtcctcctgcccggtcactctgcaccttccagccctcatcctccaccttctctgttcaactgaca

SEQ ID NO: 6240 - protein, 92 aa, Homo sapiens [sequence omitted]

SEQ ID NO: 6241 - DNA, 288 bp, Homo sapiens
  misc_feature (163)..(163): Wherein n may be a, c, g or t
  misc_feature (217)..(217): Wherein n may be a, c, g or t
atcatggccactctgccattcgcactgactggtggggtatggtttctctatctattgggattcaacctgtcggtcgccactggtgtcggctttatcgctttggccggtgtttctgccgaatttggcgtaattatgctgctttatctgaagaacgccctgggcntgaccgtggaaaaccctggcgataggaccgagcacgggctgatggccgcgattncggaaggcgctgtccaccgcgttcggcccaaagccatgactgtggctgtcatcattgctggcttgttaccc

SEQ ID NO: 6242 - protein, 96 aa, Homo sapiens
  misc_feature (55)..(55): Wherein Xaa may be any naturally occuring amino acid
  misc_feature (73)..(73): Wherein Xaa may be any naturally occuring amino acid
IMATLPFALTGGVWFLYLLGFNLSVATGVGFIALAGVSAEFGVIMLLYLKNALGXTVENPGDRTEHGLMAAIXEGAVHRVRPKAMTVAVIIAGLLP

SEQ ID NO: 6243 - DNA, 156 bp, Homo sapiens
  misc_feature (1)..(1): Wherein n may be a, c, g or t
nagatctcataccaggaaggttttgatgagccgatcattggctccattctcaaggaaactcttaaggctctggattaccttcaccggcagggtcaaatacatcgtgatgtcaaggctggtaatatccttatcgatggtgctggggtagtgaagctt

SEQ ID NO: 6244 - protein, 52 aa, Homo sapiens
  misc_feature (1)..(1): Wherein Xaa may be any naturally occuring amino acid
XISYQEGFDEPIIGSILKETLKALDYLHRQGQIHRDVKAGNILIDGAGVVKL

SEQ ID NO: 6245 - DNA, 270 bp, Homo sapiens
  misc_feature (250)..(250): Wherein n may be a, c, g or t
cgcgtccacaacattgtctttatgggtatgggtgagccgatggccaattaccgttcggtgcttactgccatccggaccctgaccgccgacggtcccgacggggtcgggatgagcgcccgggcccttaccctctcgacagtcggcctggtgccacgtatcaaggccttgacgcaggaggggatcccggtaaccctcgccgtctcattacacgcccctgacgacgagctgcgtgatgagctcatcccggtanaccggcgttggaaagtcgac

SEQ ID NO: 6246 - protein, 90 aa, Homo sapiens
  misc_feature (84)..(84): Wherein Xaa may be any naturally occuring amino acid
RVHNIVFMGMGEPMANYRSVLTAIRTLTADGPDGVGMSARALTLSTVGLVPRIKALTQEGIPVTLAVSLHAPDDELRDELIPVXRRWKVD

SEQ ID NO: 6247 - DNA, 427 bp, Homo sapiens
gctagctatttcatctgtcccccaccttgttctctgagagaggtggaactaaagtattttaaaggaaatcccatatcactcatacttccacatgtatgtctaactgatcaggatattttttacatacgtcataatacctaacagaattaacagtaattccttgtcatacccagtatataatttcccttgattgccaaaatatctttttttcagttgtttatttgaatcaggatccagagagggcccatgcattgtatttgactatatgaggctcttattatttaagtctctgctgtcttttttttttttcctttttcttatgttgtttggttttttggagaagcctgacatctgtcctgtgaagtgtccattttctgggtttgatttactgcttccctatggtgatgttaaacttgttcctccctct

SEQ ID NO: 6248 - protein, 54 aa, Homo sapiens
MRLLLFKSLLSFFFFLFLMLFGFLEKPDICPVKCPFSGFDLLLPYGDVKLVPPS

SEQ ID NO: 6249 - DNA, 314 bp, Homo sapiens
  misc_feature (314)..(314): Wherein n may be a, c, g or t
gccggcgaggaattctgcctggcgcttggccaccgagcgctggatgctgggcggcggcggcacggcactgcgctgaaaatcgtcggcgatcaataaggccgggtcgaatcgcgtgctgaggaacaccgtgcctgggtatgggaacgggcaccggccaggggcattcgatggggggcaacaagcgggtaagggcgtcatgtgcggttttttgccgagttggcacgccagtggatagcccgcaacggttcagggccagttcagagcctgttcaggggagttcagggcgcctgcgtagtctggctcaacagccaacn

SEQ ID NO: 6250 - protein, 66 aa, Homo sapiens
MTPLPACCPPSNAPGRCPFPYPGTVFLSTRFDPALLIADDFQRSAVPPPPSIQRSVAKRQAEFLAG

SEQ ID NO: 6251 - DNA, 341 bp, Homo sapiens
  misc_feature (327)..(327): Wherein n may be a, c, g or t
  misc_feature (328)..(328): Wherein n may be a, c, g or t
  misc_feature (341)..(341): Wherein n may be a, c, g or t
gtgcactctcacactctcctcccatatcgcagcttgcctctcactttccctacagcttagagaaatcctcacacacactgtgtgcgccgtatacaagctcagtgtgtttccaggcaaactatatgacaagggcattactgacatagtcaccatcagctctcatgacagagactgtctacagacctggagtagaggatttacaaagcaactgaattgcacatttactaggatactctgagagagtgacacagttactcaagtaattccatgttctaatccacaaatgagctgatgtggattttcaggtaaacaccataaggaagaacnncataaagaattgn

SEQ ID NO: 6252 - protein, 51 aa, Homo sapiens
MVTMSVMPLSYSLPGNTLSLYTAHTVCVRISLSCRESERQAAIWEESVRVH

SEQ ID NO: 6253 - DNA, 487 bp, Homo sapiens
acgcgtttattggtcccatcagccctctcgaagagctgcgtttggctgtgtgtgtcctctctcatcgttgtcttctgggggttggggatgacagcgaaggagcgtggggtaaaatgttctacaactgactgtggcgatggctgcaaaactctgcaaatgcgttacaagccactgaactgtacacttaatgacagaactgaatggcatgtgaattgcgtctcaacaaaatcattaaaaatcctatggggtcaacagtaatcgttcccgcttacaagcagatgcgctgaagcagtgaggagtcacttttctattcccacctgggtcaactttgataaattacatttctctcggaacgtctattttgcctaagctaccaaatttcctggcaaaagatattcttaacatgccattttccatctccacggtggctgcacgagggctcccttccgtgtgtaaggctcctgctttctgcccgtcggccacgcgt

SEQ ID NO: 6254 - protein, 62 aa, Homo sapiens [sequence omitted]

SEQ ID NO: 6255 - DNA, 391 bp, Homo sapiens
  misc_feature (314)..(314): Wherein n may be a, c, g or t
aagcttactgaattggtgtgatgtgattggtatttaggattaaccaaaagtatattttgctgtatgaaataggtcaatactttaaaaaatatacattcccattctgtttatccatggcggaagtaaatgtgacccccccgagccccaccagtctcctcccagcaggatattgtcctgtcctcttcagaatgggagcctttccagagatggaagcagcagaatgaagagtactcaaagtgactcagaggttttgcatttggcagaatattagacccaatctgatggtgaatggggagcaggttgtaacttttatntcggacgtgtagtataattcttctccagttagtaccagaacattctactggcatcagagccactgggagttacatct

SEQ ID NO: 6256 - protein, 86 aa, Homo sapiens
  misc_feature (19)..(19): Wherein Xaa may be any naturally occuring amino acid
MPVECSGTNWRRIILHVRXKSYNLLPIHHQIGSNILPNAKPLSHFEYSSFCCFHLWKGSHSEEDRTISCWEETGGARGGHIYFRHG

SEQ ID NO: 6257 - DNA, 223 bp, Homo sapiens
ctagagtatgttcaatttgttcccctgctcaacctgaggccttttgcccaggagcttcagctctctgttctttccttgagagctttccagtttctctgcagccagagctgttgtaactggcttcctttggatggttggagccatgtggtcaaactcctctgtagcagtctgaccagtgtcctggatgcagtcaggttgattcagtcagtgggtccctgggccc

SEQ ID NO: 6258 - protein, 74 aa, Homo sapiens
LEYVQFVPLLNLRPFAQELQLSVLSLRAFQFLCSQSCCNWLPLDGWSHVVKLLCSSLTSVLDAVRLIQSVGPWA

SEQ ID NO: 6259 - DNA, 255 bp, Homo sapiens
agatctccgcgattcggtagcctcccgctgacttttaataagtcctatgacgttgcctgcggcatcaacccatgtttcgtcgcaaaaaggggtgatggtttgcatgcatatttcgcgaacttcatcctcctgtccccctggcccacgagccatcaagagctgagctaacaactcggaaatcgtgtcttgctgatttgagaagctggaaatagcatcatgttgtgcatcagacattttcgatctctcacccccccc

SEQ ID NO: 6260 - protein, 78 aa, Homo sapiens
MSDAQHDAISSFSNQQDTISELLAQLLMARGPGGQEDEVREICMQTITPFCDETWVDAAGNVIGLIKSQREATESRRS

SEQ ID NO: 6261 - DNA, 343 bp, Homo sapiens
acgcgttgggggagccagggtcaggtctattgggacacgctgttatctgctgctggtctgccgcccgggacgggctatgcggccccgggcacttgggcgacggaagcgatgggggggcgctcgcgctcctatgcggcgttcgcccatttcgatttcaaggtaggagataagtggaacatcatcgctggtcttcgctgttcgatcgaaaagaacagcggctgcttcttcaatcccttctatcgctcggagccgaatgacgtgttccgtgtgctgggcgcgcagcctgggccagcctataacgcgagcagaacggacaaggcgctcagcggaacattcggaattc

SEQ ID NO: 6262 - protein, 78 aa, Homo sapiens
MGGRSRSYAAFAHFDFKVGDKWNIIAGLRCSIEKNSGCFFNPFYRSEPNDVFRVLGAQPGPAYNASRTDKALSGTFGI

SEQ ID NO: 6263 - DNA, 321 bp, Homo sapiens
  misc_feature (321)..(321): Wherein n may be a, c, g or t
accggtaccgactgacggggtggctgtcgaggtgttcagtgaggtggttctgttgctcgaacccgagcagcccgtcagggccagggcgggtgcgacgaagagggtaatgagggccgagatcctcctcggcatcgttctcggagtactcacgcgggtctccctgcgggcatgccgcaggtttcgctgaggcgcacatagtgtgcccggcagactcctacggcgagagttaacaactgccactcctcagagagtcgaccggactgagccttgcaggcattaccgttgcgcgacagtgtcggatttgcaccgacttcgcccacn

SEQ ID NO: 6264 - protein, 65 aa, Homo sapiens
MCASAKPAACPQGDPREYSENDAEEDLGPHYPLRRTRPGPDGLLGFEQQNHLTEHLDSHPVSRYR

SEQ ID NO: 6265 - DNA, 280 bp, Homo sapiens
tgtacaggatcttggtggttgaggacagctgtgggaaccagactgaacacagtcctttttacatatgattgtcatttttgaaccatgtgcaaacattacttattcaattttttaaaaccaaacatgaaaataaataaatgcaacttaagccatatcatgtcattcctttgccccaaaccagtgctttctgatctcactaaaagtgaaaggcaaagtgcccccatcacctacaacacacctcctagcccactctggcttcactgccgattcctgaacatgg

SEQ ID NO: 6266 - protein, 65 aa, Homo sapiens
MCKHYLFNFLKPNMKINKCNLSHIMSFLCPKPVLSDLTKSERQSAPITYNTPPSPLWLHCRFLNM

SEQ ID NO: 6267 - DNA, 349 bp, Homo sapiens
  misc_feature (1)..(1): Wherein n may be a, c, g or t
  misc_feature (2)..(2): Wherein n may be a, c, g or t
nntgatcacaaagaatattacataaagttagttgataaagcagtggcaaatatggagaagattgattctgattttgaaaaatgttctactgagagcgtgaaaatgctcccaaacagcactgtatgctacactgaaatcttttgtgaaatgaagagccaatcgatgtggccaactttattattgtcttattttaagccatcaacattgaggcaaaacccttctcaggaaaaagattatgactctctgaaagctgagatgattgttagcaatttttagcaataaagtagtgtttttttttttttttccctgaaaagggaaattccccttttgggccccaggcgggaagggc

SEQ ID NO: 6268 - protein, 91 aa, Homo sapiens
  misc_feature (1)..(1): Wherein Xaa may be any naturally occuring amino acid
XDHKEYYIKLVDKAVANMEKIDSDFEKCSTESVKMLPNSTVCYTEIFCEMKSQSMWPTLLLSYFKPSTLRQNPSQEKDYDSLKAEMIVSNF

SEQ ID NO: 6269 - DNA, 192 bp, Homo sapiens
gcgttgcccaatgcactggcgccgatcgtcaacgtggtggcgctgaacctggcgtacctggtggtgggtgtggtggtggtcgaggtggtgtttgtctatccagggctcggccagttgctggtggacttcgtgtccaagcgtgacatcccggtggggcaggcgtgtagcctgatttttggcgccccctacatt

SEQ ID NO: 6270 - protein, 64 aa, Homo sapiens
ALPNALAPIVNVVALNLAYLVVGVVVVEVVFVYPGLGQLLVDFVSKRDIPVGQACSLIFGAPYI

SEQ ID NO: 6271 - DNA, 270 bp, Homo sapiens
aagcttggcggcgcggatgaagcagatcgtgatgctgtcgtggaaaagggcggtctagctgttctgggaacgtcgcgtcaccgttcctcccgcctagacaatcagacgtgcggccgcgcgggccgccaaggagaccctggcatgtcggtattcttcgtgtcccaagaggatgacgtcgtacagcagggtggcgaggatgaatccctgtcggcgcgtcccaatgccgatggactctttgagtccaagcgagtcagcgactttgtggcacat

SEQ ID NO: 6272 - protein, 90 aa, Homo sapiens
KLGGADEADRDAVVEKGGLAVLGTSRHRSSRLDNQTCGRAGRQGDPGMSVFFVSQEDDVVQQGGEDESLSARPNADGLFESKRVSDFVAH

SEQ ID NO: 6273 - DNA, 275 bp, Homo sapiens
acgcgtagcaaaacaatggtaactagtgagatacattaccaaattatccctgtactcttgtgatttcgcatcaatttttccatatgttgaattacagaattccaaaggcaggatctctgatctactgttttctataatttctttgattccatctgatattacgcctaaaaagtataagtctttcaacgacttatacttcataattacataatacggttacacatataggtatcttaaattgatcacaagagtgatccaagtaagtgtggagtact

SEQ ID NO: 6274 - protein, 67 aa, Homo sapiens
MKYKSLKDLYFLGVISDGIKEIIENSRSEILPLEFCNSTYGKIDAKSQEYRDNLVMYLTSYHCFATR

SEQ ID NO: 6275 - DNA, 352 bp, Homo sapiens
agtcataggagtggtgagactgaggacactttcattgctgatctggcagttggtttgtccacgggtcagattaagactggagcaccctgcagatcagagcgtcttgccaaatacaaccagcttcttaggattgaagaagagcttggcgctattgctgtctacgcaggtgccaaattccgtgcacctgtggagccctactaaacgggcgggatgcaagtgcttttatgtctgcacaagtcctgtgaaactgtttactgcgacctgcagattttactcttggagtgccctgagtagattttagcaataatatccaacatgtaacatgttacggacatgtacccaaacgtgatca

SEQ ID NO: 6276 - protein, 66 aa, Homo sapiens
SHRSGETEDTFIADLAVGLSTGQIKTGAPCRSERLAKYNQLLRIEEELGAIAVYAGAKFRAPVEPY

SEQ ID NO: 6277 - DNA, 180 bp, Homo sapiens
aattcctgtagcagcttcatctatggcgggtgcagaggcaacaagaacagttacctctcccaggaagcgtgcatgcagcattgctctgggaagcagatgtatcctttcctgaccccgggcacaaaagcggtgatcctggtggggctgtccatcatggtcctgatcctcctcctgggatcc

SEQ ID NO: 6278 - protein, 60 aa, Homo sapiens
NSCSSFIYGGCRGNKNSYLSQEACMQHCSGKQMYPFLTPGTKAVILVGLSIMVLILLLGS

SEQ ID NO: 6279 - DNA, 395 bp, Homo sapiens
  misc_feature (61)..(61): Wherein n may be a, c, g or t
  misc_feature (305)..(305): Wherein n may be a, c, g or t
  misc_feature (395)..(395): Wherein n may be a, c, g or t
gctagctctggggctccgataagttacagggcctctatgaatctcagttgtcttgtgaganaaatgaggaagtagtgtctgtaccagagggtggttgtgaagaataaatgatattatgtccctgagcaagcaataaatggcaagaattattatcatttaccagtggctggcctgaaaatactggcctcctaatggataaaagaccatctacatacctaattaaggcccttgtgatgggagacaccccatctatccctggcagtctctctttagaatatattcaagagcttagagccccattcgtntagtctccttataggagatgtacaggcacactccaagggaggtaggctgtatccttgccagaagctctgcggggagcatgctcagatcgn

SEQ ID NO: 6280 - protein, 52 aa, Homo sapiens
  misc_feature (32)..(32): Wherein Xaa may be any naturally occuring amino acid
MIIILAIYCLLRDIISFILHNHPLVQTLLPHXSHKTTEIHRGPVTYRSPRAS

SEQ ID NO: 6281 - DNA, 372 bp, Homo sapiens
  misc_feature (1)..(1): Wherein n may be a, c, g or t
nggaagacgttgcagacagcaaagatgctggcccatctcgttcgtccaacaggcaagatgatcgccttttccaggagcattccaacctgcttgaactgcgcccaggagacctagagcatctcttggatcgattccaagacgagtccacgtaatgccctgccaagcataccatgtgtaacgagaacatgtaaacgatccgacctccacgcagttcccttctgccccccccccggccgacccatctcagaacaacaacaccctccctgtccatcgcctcgatttccatagtagtctttctccaccatatgctagttgatccaagttatgaatgtatgcgtgcctttcgcgatcgctgactaaggatcttcctct

SEQ ID NO: 6282 - protein, 95 aa, Homo sapiens
MEIEAMDREGVVVLRWVGRGGGRRELRGGRIVYMFSLHMVCLAGHYVDSSWNRSKRCSRSPGRSSSRLECSWKRRSSCLLDERDGPASLLSATSS

SEQ ID NO: 6283 - DNA, 479 bp, Homo sapiens
actagtgtaaagagttggatgtctaacttttgtcaagttctacttaggcagtatttcacagatgggtgcaacaaattcacatttcatgtcatgaaatataccctatattcatttcctagggacactataataaagtatcacaaactgggtgacttaaaacagcaggaacttattctctcatgtttttgaggctagaaggctgaaatcaaggtgtcagcgccctgttctctctgaagcctgttgggagaatccttccttgtttcttgtagcttctgctggttgccagcaatccttgacgttctgtggcttgcaaacgtgtaatttcaacctctgccttcacctttacatggactgctgtgtgtcagtaacttcacatcatcttccctctgggtgtctctgtgtccaaatttccttgtaaggacactactcattggattagggcccaccctaatgtcatcttaacttgattacatcagcag

SEQ ID NO: 6284 - protein, 56 aa, Homo sapiens
MSNFCQVLLRQYFTDGCNKFTFHVMKYTLYSFPRDTIIKYHKLGDLKQQELILSCF

SEQ ID NO: 6285 - DNA, 318 bp, Homo sapiens
gtgcacactgatgctggctctgaatgcactgattggtgactcatgagataaataacactttgcaccattctctggacttttctaaaagtgcattgactcggcgggggctattttatggtggtatgaggggcacaaagactttttttttcaagttttctgagagtaacttagctttgtttaaaaatggtagtttggcactaagtgcccatattttgctgactctcactgaggcctgtaggtgcaagacccaagccccctgcaatggctcccccaagactatttgggggggttctgcaagggacttatacgtgtgctccc

SEQ ID NO: 6286 - protein, 65 aa, Homo sapiens [sequence omitted]

SEQ ID NO: 6287 - DNA, 281 bp, Homo sapiens
  misc_feature (124)..(124): Wherein n may be a, c, g or t
tccggaacgtgccttcagcttttacggcgatatgaccacaaaccggagagccagcgagctcctttgcttgaggaggatgggccagcatatatccgagttttcctgaatatcctgcggagcatcntccatgaagagactgtggaatacgtgcttgcactcattgatgaaatgcttgcaacaaatcctaagcgtgcagcactgttttatgatcaatctttgtcgggtgaagatatttatgaaccgttcttaaggttgttatggaaaggcaactggtttgtaca

SEQ ID NO: 6288 - protein, 93 aa, Homo sapiens
  misc_feature (42)..(42): Wherein Xaa may be any naturally occuring amino acid
SGTCLQLLRRYDHKPESQRAPLLEEDGPAYIRVFLNILRSIXHEETVEYVLALIDEMLATNPKRAALFYDQSLSGEDIYEPFLRLLWKGNWFV

SEQ ID NO: 6289 - DNA, 364 bp, Homo sapiens
  misc_feature (1)..(1): Wherein n may be a, c, g or t
natatgctggtcgatcatgtgcatcagatcgtccagtggccggagcgcggctggctggcggagattattcacagcgaacgggcgaccggcggtgcgccgcttaacgtcctgctgacgctggttaaaatgcacgtcggcttgccgttgcaggcggtcggtcttatcggcgaagacagcgatggcgattacattatggcgatgctcgaccagtaccacgtcaatcgccagcgggtacagcgcaccacgtttgcccccacgtcgatgtcgcaggtgatgaccgatcccactgggcagcgcacctttttccattcgcctgccgccaatcgcctgctcgatctccccgcctttgatcgactcgacgcgt

SEQ ID NO: 6290 - protein, 121 aa, Homo sapiens
  misc_feature (1)..(1): Wherein Xaa may be any naturally occuring amino acid
XMLVDHVHQIVQWPERGWLAEIIHSERATGGAPLNVLLTLVKMHVGLPLQAVGLIGEDSDGDYIMAMLDQYHVNRQRVQRTTFAPTSMSQVMTDPTGQRTFFHSPAANRLLDLPAFDRLDA

SEQ ID NO: 6291 - DNA, 380 bp, Homo sapiens
  misc_feature (250)..(250): Wherein n may be a, c, g or t
  misc_feature (251)..(251): Wherein n may be a, c, g or t
  misc_feature (297)..(297): Wherein n may be a, c, g or t
  misc_feature (365)..(365): Wherein n may be a, c, g or t
gggcccttgcgccggcatttaacaccattccgtcttggatgcgagactgtcctctctaccaccaagtcttccccatctcctccccctgttcgcggcagcgcggtagacacagagtcagcagtcacgtttgggcaggttactcggtgattctcttccccacaaatcaaatcagtttgcgcaggcccctgtgttcttcaaggtccaggttcagcgccaccgtccccaggggtcttgcaatcccctgcaaccnnaacacctaatcctaagacaccggccacatctccgcgggcgccggtnggcgcagcggccccacctacttctacctggcggctgggacggggcggctccccactcttcgcccctantactgattgatattc

SEQ ID NO: 6292 - protein, 75 aa, Homo sapiens
  misc_feature (35)..(35): Wherein Xaa may be any naturally occuring amino acid
  misc_feature (73)..(73): Wherein Xaa may be any naturally occuring amino acid
FSSPQIKSVCAGPCVLQGPGSAPPSPGVLQSPATXTPNPKTPATSPRAPVGAAAPPTSTWRLGRGGSPLFAPXTD

SEQ ID NO: 6293 - DNA, 345 bp, Homo sapiens
  misc_feature (337)..(337): Wherein n may be a, c, g or t
acccctgttccacctgctgtccctgtccctcaggcgaatacctctaatgaaaagagtagtcctattccaatagctccgataccaccttctgttactcaggagccacccgtcccgttggctccccctttgcctgctgttgatggctttcaagaacctccaattccctcagcacctgcaatagctactgccgtgcaaaaatcgggttcttccaccccagctttagctggaggcgttttgcctccacccccacctttaccaactcaacaagcttccacttcagaacctattatcgctcacgttgataactacaatggtgctgaaaaaggcacgggcgctnatggatcc

SEQ ID NO: 6294 - protein, 115 aa, Homo sapiens
  misc_feature (113)..(113): Wherein Xaa may be any naturally occuring amino acid
TPVPPAVPVPQANTSNEKSSPIPIAPIPPSVTQEPPVPLAPPLPAVDGFQEPPIPSAPAIATAVQKSGSSTPALAGGVLPPPPPLPTQQASTSEPIIAHVDNYNGAEKGTGAXGS

SEQ ID NO: 6295 - DNA, 337 bp, Homo sapiens
  misc_feature (1)..(1): Wherein n may be a, c, g or t
naccttctcgaaatttggaattcatcttatttttggacacggcatatctagtcaaagaggatgttactctcgcagagcaaataatctccttgcgcgagacgctggataggactggaggcagaaaacccctgcacattcgaagtgctagaatgctcgcttgtagcaagtacaatggtaccagcttttgggacatacgatacaagacttccgaatttcattgacctagtgatagaacgcaagaagcgggaaattggaggagcaccttcagtcgccgatggtaagacacttttgcagctatcaagcagaaatgattacgcgaggattcgagactacgcgt

SEQ ID NO: 6296 - protein, 64 aa, Homo sapiens
MSQKLVPLYLLQASILALRMCRGFLPPVLSSVSRKEIICSARVTSSLTRYAVSKNKMNSKFREG

SEQ ID NO: 6297 - DNA, 308 bp, Homo sapiens
tcatgaggcattatccccattttacagatgagggaactgaggccaacagcgttaagtaacttgcacagggctacacagctagcaaatggtggaacttgaataactaaggaggaaattagtctcttcttcctggtctgtcccaaaagagtaagcatgataatagctagtatttattgattacttactgttgttagatacagtatttagtgatttttttagtctttaatcttcacaacaactctataaaataagcactattatctctctagataatggagaaactgaagcctagaaagttcggggtaacc

SEQ ID NO: 6298 - protein, 51 aa, Homo sapiens [sequence omitted]

SEQ ID NO: 6299 - DNA, 231 bp, Homo sapiens
gaattcggctgcgccagggtatacggcacgcccgcatggtcggaggtgttcgaatacgactgcgtcaccaggctcggtgcatgaaaaccgttgctgacagtgccgcgcacggccacggtgggcgtgacgtcataacgggccgacaagcgccccgtcgtcttgctgccgaaatcggattacttttcggcacgcaaggctgtgtcgagcaaccattgcggcgtcaatttggcg

SEQ ID NO: 6300 - protein, 65 aa, Homo sapiens
MVGGVRIRLRHQARCMKTVADSAAHGHGGRDVITGRQAPRRLAAEIGLLFGTQGCVEQPLRRQFG

SEQ ID NO: 6301 - DNA, 423 bp, Homo sapiens
  misc_feature (378)..(378): Wherein n may be a, c, g or t
tgtacaacgcgattgtccgccgcagaggtgtccgcgcctgccaccaagcgtaatgaccatgactgggaaccttcggcgagcatcggcgcgacaccccagagttcgccttgaagtccaccaccctccgcgcgcaattgcccgcaacccacgccgcccggcagcagcacattggtccctgaaggaatcagtgcgccgcgggccagggccagatcaccattgagtgtgagcacattggttgatgactgggaactgccggcgatgctcggcaacgccacgcccttcggccaactgaatgcacgcagggcggtatcggcgcttagtagcgtgccggcatccagttgtgtgccggccgcaggtttttgtgcctgggtcaaccgnctaccggcggcgaacaacaggttgccgttgctgtcgcgtacagcg

SEQ ID NO: 6302 - protein, 56 aa, Homo sapiens
MCCCRAAWVAGNCARRVVDFKANSGVSRRCSPKVPSHGHYAWWQARTPLRRTIALY

SEQ ID NO: 6303 - DNA, 496 bp, Homo sapiens
acgcgttgggttgtgctgtggtgctgcttggttgtcgccggatgtcagtctacccacgaccagttattggccgaaagttatccgcccgcctttgcggatgggtttcaggatggctgtgcaagtggtcggcagtccgtagatatcatgaaggggcaatacaaaaaggacgtgccgcgctatttgcgcgacacgatgtatgcgcagggctggagcgacggattccgccagtgccaggcgcaactggaaaaccgtaatgttcaggatcagggtcgagacagtatctggaacgaccgggatcgggcctgggagcagcagaaaacccaggatgccgccaaagcttatcgctctcactgacgttcacgtcgctgcgggacatttggcgaaacttatcgaatgcgaccatggcccaactttcacgaacgtgaataaaggagcacctcatgagtcgggctttcgtcaatgaagacagtgctgccgcgcaagccagccaaccggt

SEQ ID NO: 6304 - protein, 99 aa, Homo sapiens
MRCSFIHVRESWAMVAFDKFRQMSRSDVNVSESDKLWRHPGFSAAPRPDPGRSRYCLDPDPEHYGFPVAPGTGGIRRSSPAHTSCRANSAARPFCIAPS

SEQ ID NO: 6305 - DNA, 314 bp, Homo sapiens
  misc_feature (1)..(1): Wherein n may be a, c, g or t
nttacctcctttttttccacatctatatctccaacactttcaaaccactcctgacagcagagtgctccagcagagcagccccagtggacacaccagctgacctgtaccatccctcaactgcagactctcccacataccattttgcctccaggtatttgcccatccccaccatccaatcactttgccagcacatgtttgcatgaggtgacctagtctttcctttccttccccaccagttcatgtgtgtgtatgcaccttgccatgccactgctgctggtgtgagtacatttcacccactccccacccctggcgcc

SEQ ID NO: 6306 - protein, 72 aa, Homo sapiens [sequence omitted]

SEQ ID NO: 6307 - DNA, 309 bp, Homo sapiens
agatctggctcccgatatataatcacatgggatcacgttgtggcactatccaatgaatctactgtgacaggctacaagatactctatagaccggatggccaacatgacggcaagctgttctcaacccataaacactccatagaagtccccatccccagagacggagagtatgttgtcgaggttcgagcacacagcgacgggggagacggagtcgtgtctcaagtcaaaatttcaggcgtgtccacgctgtcttcgagtctcctcagcttgctcctgccctcccttggctttcttgtctactcggaattc

SEQ ID NO: 6308 - protein, 103 aa, Homo sapiens
RSGSRYIITWDHVVALSNESTVTGYKILYRPDGQHDGKLFSTHKHSIEVPIPRDGEYVVEVRAHSDGGDGVVSQVKISGVSTLSSSLLSLLLPSLGFLVYSEF

SEQ ID NO: 6309 - DNA, 238 bp, Homo sapiens
acatgaatacttcaacataccatttggaaaatgctcccgccattgactttgagcccttttgagcaatgggtgcagcacaggttgctgctggcagagcggactgtgaagaaggctgcagctgagaggtgcgaggtggagcgaagagagatgtctcgttacagtttgtcctgctcagctttccagcacctctctcctgacctcatcctggagctcagtgacagggacaaagcctgaattc

SEQ ID NO: 6310 - protein, 67 aa, Homo sapiens
MLPPLTLSPFEQWVQHRLLLAERTVKKAAAERCEVERREMSRYSLSCSAFQHLSPDLILELSDRDKA

SEQ ID NO: 6311 - DNA, 272 bp, Homo sapiens
acaccccgccacacgccccacaccccacacactcaccccacacacaccacaggctcacattacacacacacaccacacactcagacacccacactgagtctggtgggggaaacagctccacggtcagcagccctggttaaggctgaaatgaagctggcattcccaggatctgatttagagcgtttggtgatagaaaggcctcttccactttttattatctaagtgtgaccagaaaccctgagtttccatacacaggtgaacagtggggatcc

SEQ ID NO: 6312 - protein, 73 aa, Homo sapiens [sequence omitted]

SEQ ID NO: 6313 - DNA, 294 bp, Homo sapiens
tctagagcttcttccgatgcttctgacttactaagacaaacattgggctcttctcaaaagaagaagaagattgctgtcatgacttctggtggtgattctccaggtatgaatgccgctgttcgtgccgttgttcgtacaggtatacatttcggctgtgatgtttttgctgtttacgaaggttacgaaggtttactaagaggcggtaaatatttaaagaaaatggcttgggaagatgtcagaggttggttaagtgaaggtggtactttgattggtactgctcgttctatggaattc

SEQ ID NO: 6314 - protein, 98 aa, Homo sapiens
SRASSDASDLLRQTLGSSQKKKKIAVMTSGGDSPGMNAAVRAVVRTGIHFGCDVFAVYEGYEGLLRGGKYLKKMAWEDVRGWLSEGGTLIGTARSMEF

SEQ ID NO: 6315 - DNA, 340 bp, Homo sapiens
gccggcaggggggccattgcgcccgcccaggtgagacagggctggagctggtgagagagatggagagaggaggatggattcaagagatactcagaagcagacaggctacaggaaatagcagattgggagaggagtgggaacaggagaagctgtctttggctcggctggaaggtgaagggattccagatgccggttcctggcttgctccccgctctccatttggcttcatcctggggctctcttcctccccacagaggggtggtgggcactctgtgccacacctctcctctctgggatctcaggtctgtccctgaaacctgctggtagaagaacctctaga

SEQ ID NO: 6316 - protein, 84 aa, Homo sapiens
MERGGWIQEILRSRQATGNSRLGEEWEQEKLSLARLEGEGIPDAGSWLAPRSPFGFILGLSSSPQRGGGHSVPHLSSLGSQVCP

SEQ ID NO: 6317 - DNA, 203 bp, Homo sapiens
  misc_feature (203)..(203): Wherein n may be a, c, g or t
cctaggtccgcttctcggggacggggcggcgcggccccgcagctcggcaggcggagggagccggccaggattgatgtctaaatcaatgcggtttctaggcgctcctcccgactcctctccatcttcctcaaaggcaaagcgcctcccgaggatggagttccacgacattcgcgaagtctgcgtgaggatggtgtctgtgggcn

SEQ ID NO: 6318 - protein, 56 aa, Homo sapiens [sequence omitted]

SEQ ID NO: 6319 - DNA, 390 bp, Homo sapiens
gaattcctgctggtcccgcagggcgcacgcctgatcgggcaatacgatagccagatttcgttcggccaatcgcgtgctgctagtgtggagcggatcatcatgccgaacggcaagtcgattgtgctggagcgccagtccggcgccgacagccagggctatgccggcctcgaggatggcgtcgactatcactggggcaatcttctgcgagcggcggcgatctcgacgctgcttgggatcggcagcgaactcgtgctcagcggtgacaactcattggttcgcgcgttgcgccgcggcagccaggacaccatcaaccagagcggccagaccctggtgcgtcgccaactcaacgtgcagccgacgctaacgatcaggccgggcttcccggtacgc

SEQ ID NO: 6320 - protein, 130 aa, Homo sapiens
EFLLVPQGARLIGQYDSQISFGQSRAASVERIIMPNGKSIVLERQSGADSQGYAGLEDGVDYHWGNLLRAAAISTLLGIGSELVLSGDNSLVRALRRGSQDTINQSGQTLVRRQLNVQPTLTIRPGFPVR

SEQ ID NO: 6321 - DNA, 260 bp, Homo sapiens
caattgctgttaacctaactatgactgtacgagtagtgactgacgtaggtggagaataagataactccaaaggaagtaaaacatgaagaggtccatcgaaggaaaggtttacacagatattcacaaaaattattagaggaatactttggtgcatgtgacgttcacctgggggctaatgtcatcagggaataaagggatttgttttgagatcagtaggcacttgcacgaaaaaggagacaaaatggtttagtccccccccc

SEQ ID NO: 6322 - protein, 51 aa, Homo sapiens
MHQSIPLIIFVNICVNLSFDGPLHVLLPLELSYSPPTSVTTRTVIVRLTAI

SEQ ID NO: 6323 - DNA, 429 bp, Homo sapiens
ctgatcagcggcgcgccccgtcaggagagccgcggcgcgcatgcgcaggacgattttccggaccgcgacgacgccaactggatgaagcacagcgtctcctggctgggcgaggagggccaggtcgcgctgagctaccgcccggtgcatctctacaccctgaccgacgaggtcgaggtgtttccgcccaagaagcgtgtctattgaggggattgtccgatggttgaattcaccctcccccgcggcagcaaggtcggcaagggtcgccatttccccgcgccgaaaggtgcgaagcgcaccaaggtgttcgagatctaccgctggagccccgatgacgggcaaaatccggtgctcgacacctatgaggtcgatctcgaccatgtcggaccgatggtgctggacgcgctgatccacatcaagaacgacgtcgac

SEQ ID NO: 6324 - protein, 67 aa, Homo sapiens
LISGAPRQESRGAHAQDDFPDRDDANWMKHSVSWLGEEGQVALSYRPVHLYTLTDEVEVFPPKKRVY

SEQ ID NO: 6325 - DNA, 227 bp, Homo sapiens
tgtacagttccatggcataaatacattcctaatgttgtataaccgtgactaccatctatctccagaacgttttcatcttcccgaactgaaacttcatccccatgaaacactaactccccattttccctcctccagcttccggcagccaccattctagttctgtctctatagttttgactactctaggtacagggaggtagaatttaacaagacaattttagggttaa

SEQ ID NO: 6326 - protein, 50 aa, Homo sapiens
MVAAGSWRRENGELVFHGDEVSVREDENVLEIDGSHGYTTLGMYLCHGTV

SEQ ID NO: 6327 - DNA, 459 bp, Homo sapiens
  misc_feature (1)..(1): Wherein n may be a, c, g or t
  misc_feature (2)..(2): Wherein n may be a, c, g or t
nnacgcgtaagatcgattgtggatcagcaccgatgctggtccccccgacgttgttgttggcgggtgttgttgtaaggagtgtgtgtgatgcgtgttggtgttcctactgaggttaagaatagtgagtttcgtgtggctgtgacgccggcgggtgttcatgcgttggttggtcgtggtcatgaggtgttggttcaggctggtgctggtgtgggttcgggtattccggattcggattttgtgggtgctggtgcgcgggttgtgggtgatgtggagtcggtgtggggtgatgctgatttggtgttgaaggtgaaggagcctgttgcggaggagtatgggcggttgcatgagggtttggttctttttacgtatcttcatttggctgctgatgaggcgttgactcgtgagcttttggggcgtggggtgacgtcgattgcgtatgagacggtggagttggccgat

SEQ ID NO: 6328 - protein, 124 aa, Homo sapiens
MRVGVPTEVKNSEFRVAVTPAGVHALVGRGHEVLVQAGAGVGSGIPDSDFVGAGARVVGDVESVWGDADLVLKVKEPVAEEYGRLHEGLVLFTYLHLAADEALTRELLGRGVTSIAYETVELAD

SEQ ID NO: 6329 - DNA, 463 bp, Homo sapiens
cgcgttgctatcgctcgcgctttcgcctctgaacccaaaatattgtttgcggatgaacccactggtaatttagatgaagaaaacggtaaaacggtgattcagttactgtttgatctgaaccggtctcaaggaaccacactgatcatggtgactcatgataataaattggcgagtatgtgtgaccgtcaactgaccatgtctgctgggcaactgaaggaaggtagctaatgggttttgctttacgctttattctaagagaaatacgaagcagtgaggttattacccttattgtggcattaattattgcgattggtactgtcacctcaatcagtttatttgttgatcgattacaactgtcttttgaacaagaatccgctaatttgttggcggcagatcggttaattcgttcagacgaaccgatattagagcaatggaaacagtacgctacacaaacaagtctaga

SEQ ID NO: 6330 - protein, 75 aa, Homo sapiens
RVAIARAFASEPKILFADEPTGNLDEENGKTVIQLLFDLNRSQGTTLIMVTHDNKLASMCDRQLTMSAGQLKEGS

SEQ ID NO: 6331 - DNA, 321 bp, Homo sapiens
tgatcagaaaggagacaggctgggaaggcagagggccccggaaatccagaaaacttagggaagccgaagaagaggaatttcccaagcagaagggctggttagcgaggctggatgttgctaacaggcccatctgctcaagacgccaaaggggcagtgagggttggcacctgaaggtccgtggagatcttgtctgatcttgttccgcaggagtagtggcaggtggaagcccaggagtgggcagccatgggagatggagacggtgaatgtgtgccacactttcatttccagaagtccttttgcgatgagcaggggaggagagag

SEQ ID NO: 6332 - protein, 54 aa, Homo sapiens [sequence omitted]

SEQ ID NO: 6333 - DNA, 332 bp, Homo sapiens
cctaggcctcagtcttctgagcagtaaaatgggataataatgccttcttgcagagctgccatgtgggttacatgagaagtatgtggaacggtaggtgtcacacttactgcaatttccaggcctcacggactggcatacagctatggccaagtcattcccacccttcaatcctctgtgaagggcttcctgactgttccagcctgcctgacttctggagggatgtaggactgacccgaagtatttggccaaccacggggaggggcagagggggcagacactgggtgaatctgggctttgggctgtgtggggctagtgggctcctccagtgtaca

SEQ ID NO: 6334 - protein, 87 aa, Homo sapiens
MRSMWNGRCHTYCNFQASRTGIQLWPSHSHPSILCEGLPDCSSLPDFWRDVGLTRSIWPTTGRGRGGRHWVNLGFGLCGASGLLQCT

SEQ ID NO: 6335 - DNA, 216 bp, Homo sapiens
  misc_feature (1)..(1): Wherein n may be a, c, g or t
ntccggatcccagtgcaccggcgtccggtgcaagcctgggtcgagtctctccgaggctttgagcaggagcgcatcggcctggcggagctgcaccccgacgtgtttgcaacggcgcctcggctggacattgtgcaccaggtcgccatctggcagaggaacttcaggagaatcagctatgctaacaccaagaccagggctgaggtgagtggtggtggc

SEQ ID NO: 6336 - protein, 72 aa, Homo sapiens
  misc_feature (1)..(1): Wherein Xaa may be any naturally occuring amino acid
XRIPVHRRPVQAWVESLRGFEQERIGLAELHPDVFATAPRLDIVHQVAIWQRNFRRISYANTKTRAEVSGGG

SEQ ID NO: 6337 - DNA, 385 bp, Homo sapiens
aaattttaaactctgaaggaggtactatttttgaaataggaaaaaagtcaactatttattaaagcaagacttccaaattgcagggaagacaactctcatttctgctttcatttttgttacagcaatttggacagaagtatttatctcttggggcacacggtcttcatttgaattaagtttcaaattgggccactgtatcaatgcatacatattaatgaatactcttttagacttcaatatattaaaatataataactcccttggaactcttaatttcaaaaggcaataatataggtttaaacagtcatttacccctcatccaattcctctgctagactacataaatcttatagtcagctaccagcctattgaactactctccgga

SEQ ID NO: 6338 - protein, 52 aa, Homo sapiens [sequence omitted]

SEQ ID NO: 6339 - DNA, 212 bp, Homo sapiens
  misc_feature (1)..(1): Wherein n may be a, c, g or t
nggatcctcgcccatgccgacgagctggccgagaggttcgagaactacgaccccaagcccggcaacgagctcgacccgaacgccgtggccctgttgcgcgctgcggtggccgaacgatccgaggccgaacggcacctcctcgaggccgtgcgcgccgcccgagccgccggcctgtcctggtccgcgatcggcaccttcgtcggcacctcagg

SEQ ID NO: 6340 - protein, 68 aa, Homo sapiens
LAHADELAERFENYDPKPGNELDPNAVALLRAAVAERSEAERHLLEAVRAARAAGLSWSAIGTFVGTS

SEQ ID NO: 6341 - DNA, 259 bp, Homo sapiens
  misc_feature (259)..(259): Wherein n may be a, c, g or t
gtcgaccgcgatgatcttggcgtgcatgatgccacaaggggccgcctatgtgagcatggcattggcgcgccgcaatgcaaatgcggggaagaagccggttgttggcacccccaagggccgacgcgcccgcagccggtcagccgttcgtcgccgacacctccgtgatcagcacccgcgcatggccgagatcggggccggccatggcggtcgtcaaattaccttccagcaactctgcattgaccggcagaagggcgacggn

SEQ ID NO: 6342 - protein, 83 aa, Homo sapiens
MILACMMPQGAAYVSMALARRNANAGKKPVVGTPKGRRARSRSAVRRRHLRDQHPRMAEIGAGHGGRQITFQQLCIDRQKGDG

SEQ ID NO: 6343 - DNA, 294 bp, Homo sapiens
  misc_feature (1)..(1): Wherein n may be a, c, g or t
nagttcatcgccggccttaagatcctcgaccgcggcatcccgcgcgagcggctgaagggcagctgggcaggcgccaccggcaatccgcagttcctgccctcggtctatctgcgcctcgcccgcgacggcgatggcgatgggcgcgcggatatctggaccagcccggcggatacgctggcctcgatcggcaattatttcgagaacgccggttggcggccgggtcagccctggggcatcgcggtgcgcgtccccgccggcttcgaccgcgccgccctgacgacgcgcatggtctcg

SEQ ID NO: 6344 - protein, 98 aa, Homo sapiens
  misc_feature (1)..(1): Wherein Xaa may be any naturally occuring amino acid
XFIAGLKILDRGIPRERLKGSWAGATGNPQFLPSVYLRLARDGDGDGRADIWTSPADTLASIGNYFENAGWRPGQPWGIAVRVPAGFDRAALTTRMVS

SEQ ID NO: 6345 - DNA, 369 bp, Homo sapiens
  misc_feature (1)..(1): Wherein n may be a, c, g or t
ngaaatatctcataaacaccatcgtcacgtagtccatgaggttcaccggatcgtcccaaacgaccgtcgtccatgtcgattcctggccgacaaggcggtgtgtcatgggttccgcggtggctacagacatgtgcttattctgtcacccaggtgagacactcaaacttctccgacgcaaacatcctctagagcgcaccccctcttagactgtggcccatgtcgaccgcactgttcaccgaccactacgagctaaccatggtcgaagccgccatggcatcggggactgccaaccgccgctgcgtctttgaattattcccccgccgtctgcccgaaggccgccgctacggcgtcgtagccggtaccggacgc

SEQ ID NO: 6346 - protein, 51 aa, Homo sapiens
MSTALFTDHYELTMVEAAMASGTANRRCVFELFPRRLPEGRRYGVVAGTGR

SEQ ID NO: 6347 - DNA, 190 bp, Homo sapiens
  misc_feature (1)..(1): Wherein n may be a, c, g or t
nggaacatatagtctcaccatgttaaggttcatatcatatgggaaaaatacagcttttattgccacataataccatattatatcaactaatgccctgtctgtttctcccctactttcttttactttctcccagatttcagctaggctatacttgctccttagaaattgtagaaaaacttggctggaacct

SEQ ID NO: 6348 - protein, 50 aa, Homo sapiens [sequence omitted]

SEQ ID NO: 6349 - DNA, 333 bp, Homo sapiens
  misc_feature (1)..(1): Wherein n may be a, c, g or t
  misc_feature (2)..(2): Wherein n may be a, c, g or t
  misc_feature (3)..(3): Wherein n may be a, c, g or t
  misc_feature (21)..(21): Wherein n may be a, c, g or t
  misc_feature (326)..(326): Wherein n may be a, c, g or t
nnntaggttctgcctttctgntacagactttctcccgtggcgttatgagcttggagatgaccttgtggggggccaatctggaagagagcactcaactcataaagaggagtcgtcatgcctattgatcccagcaagccgtcaacgaacaccaacgggtcgccagcgcctagcgacgaatactccctgaccgtcggcgctgacggcccggtagtgctccacgacgcacatctcatcgacaccctggcccatctcaaccgggaaaacatccccgaacgcaagcctcacgccaagggatcgggggccttcggacatctcgaggtaccgcntgacgtc

SEQ ID NO: 6350 - protein, 73 aa, Homo sapiens
  misc_feature (71)..(71): Wherein Xaa may be any naturally occuring amino acid
MPIDPSKPSTNTNGSPAPSDEYSLTVGADGPVVLHDAHLIDTLAHLNRENIPERKPHAKGSGAFGHLEVPXDV

SEQ ID NO: 6351 - DNA, 262 bp, Homo sapiens
ctgcagcctcattgatgaggccaaccttgcagggccgctaaggtggatcccccgcgagtgttcttcggttcaccctttaggatcgatagaggccagcccgaaggagaccatgtgttctggcagaacctgcgccacctgtggcgacgccgcgacttccggaagattctcggggttcgtgtagctacccaggcggctgacggcacccttcaggtcgggatggcttcctacgttttgctctcccccgagcagcagcctgacgcgt

SEQ ID NO: 6352 - protein, 81 aa, Homo sapiens
GQPCRAAKVDPPRVFFGSPFRIDRGQPEGDHVFWQNLRHLWRRRDFRKILGVRVATQAADGTLQVGMASYVLLSPEQQPDA

SEQ ID NO: 6353 - DNA, 204 bp, Homo sapiens
gatccccaggagctgcagaaggccctaaccactatggggttcaggttgagcccccaaaccgtgaattcagtagcaaagcggtacagcaccagcgggaagatcacctttgatgactacatagcctgctgtgtcaaactgagggctctcacagatgacttccgcagacgggattctggtcaacaaggagttgtgaatttctcgtac

SEQ ID NO: 6354 - protein, 68 aa, Homo sapiens
DPQELQKALTTMGFRLSPQTVNSVAKRYSTSGKITFDDYIACCVKLRALTDDFRRRDSGQQGVVNFSY

SEQ ID NO: 6355 - DNA, 385 bp, Homo sapiens
  misc_feature (1)..(1): Wherein n may be a, c, g or t
  misc_feature (382)..(382): Wherein n may be a, c, g or t
ncgatctgaccccaggtttctgactctaagttcaagactgttttttcacggacacttgacaactcacaagaatattctgtgtgccataagtgaggtcctagtaccgtgcgttaatagcagaggaggagaaatcgcaccatgctgaggggatggtgtgggactgaggaagacttcctgtggggtaagattctgtcaggcagggcttccaggaaagaaattctagttggagggaagacatgagcaaaggcatggaagaataatctggttagactggggagtgcagagcaatagccaagagtcctgggatgaggcatttgaagccacagggtagagcctctgaacatcagctatgatttagacctattaagccaataaggacttnttc

SEQ ID NO: 6356 - protein, 77 aa, Homo sapiens [sequence omitted]

SEQ ID NO: 6357 - DNA, 363 bp, Homo sapiens
gccggcttgcccgacgcgtctatgggtgatgttctgtcctctgtcgtcgggccgtggggctcggtgcttgtcagtgctggtgtcatcatttccctgcttggggctctactggcctggatcctactgtgcggtgagacgatgcaggtgccgggtgaggacggcaccatgccgaaactgttcggacggatcaacaaacatgaggctccagctcccgctttgtggatcaccaacatcgtctcccagatatgccttgtcatgacggtgttgtgggacggtgcttacttggcgatggcgaccctggctgccgccctcatcctggtgccgtacctgctgtcagccgcattcgccctgaagatggtgatc

SEQ ID NO: 6358 - protein, 121 aa, Homo sapiens
AGLPDASMGDVLSSVVGPWGSVLVSAGVIISLLGALLAWILLCGETMQVPGEDGTMPKLFGRINKHEAPAPALWITNIVSQICLVMTVLWDGAYLAMATLAAALILVPYLLSAAFALKMVI

SEQ ID NO: 6359 - DNA, 353 bp, Homo sapiens
tctagaagcctggtccagcgtgccttgggccatgtgtgtctccaagccccgaggcttctctacctcccctcacccccccaaccacgtcttcgggattgaacagggaagcggtgaggttacgtgggccatggagggctctggaagccgcttttctctgtgtgtgcccctgctcacatgtttttgagggagagaacatgcccggggtcctctccccggcccaggtgctggcctcagaagggccccacccgcaccccgtgggacccgtggactcaaggcatgctcggcggagctgtgtccaggtggcctcgctcgacggcagtgccaccgcccagggacgtcccgagctcacagac

SEQ ID NO: 6360 - protein, 64 aa, Homo sapiens [sequence omitted]

SEQ ID NO: 6361 - DNA, 452 bp, Homo sapiens
caattgcaatcactccccaaccctgagccctgcatgtttccacttcgcctcccagctcttgctgcatccaggctatgggcagggagatccagggctccaggacactaagcaatggccctggctactgccctatcatactccctagtgtcccagcaatctagagcagtggggctgggaggaggaggtggtggagagaaggaggtgatggtgatgatgcccaacagggctccaccaggaaccaaacatggagccctagagcaaagcctgttcttctcagcagtgtctcctcccaaatgaaggggtggatggtcagcaggaaacatctctccgactccttttccccaaaggcatggccagacatgtatccttcttgggctcttccaagagggtggcatgggcagaaccaggcaaggctctctcttaggacccagggatcggctcttgacagatct

SEQ ID NO: 6362 - protein, 96 aa, Homo sapiens
MPPSWKSPRRIHVWPCLWGKGVGEMFPADHPPLHLGGDTAEKNRLCSRAPCLVPGGALLGIITITSFSPPPPPPSPTALDCWDTREYDRAVARAIA

SEQ ID NO: 6363 - DNA, 333 bp, Homo sapiens
  misc_feature (178)..(178): Wherein n may be a, c, g or t
  misc_feature (222)..(222): Wherein n may be a, c, g or t
  misc_feature (270)..(270): Wherein n may be a, c, g or t
acgcgtggtatcgccgcatcatgggcaccctaccggtcgccgacgtatagccgcgcgcacctgcgtcagatcaaggcgtgcggggagggcggcggtacaatccgtcgcttctctcccaggtgttccatgccacgcggcctcgttctcgccacgccccagctcacgtcggacggcacgncgttctccgcgcaatacgacgacgtttatcacagcaccgaaggngggctcgcacaggcgcacaccgtcttcctgggcggcaacgggttgcgnggcgcgtggcagggcaagggcgccttcacgatcgttgagaccggcttcggccaaggcctgaat

SEQ ID NO: 6364 - protein, 111 aa, Homo sapiens
  misc_feature (60)..(60): Wherein Xaa may be any naturally occuring amino acid
TRGIAASWAPYRSPTYSRAHLRQIKACGEGGGTIRRFSPRCSMPRGLVLATPQLTSDGTXFSAQYDDVYHSTEGGLAQAHTVFLGGNGLRGAWQGKGAFTIVETGFGQGLN

SEQ ID NO: 6365 - DNA, 395 bp, Homo sapiens
  misc_feature (1)..(1): Wherein n may be a, c, g or t
ntggaacgtgccgacgggatgatcgtcgcgccggcaggatggtcgcccgagcacggcccacgcgaggacggggtagcctacgaccagcagatcgtatgggatctgttcaccaacctgctggagtgttcgcgggccttgggcgtcgaggacgacctctactatcgggtggagcgcatgcgagaccggctggcgcccaaccaggtgggctgctggggccaactgcaggagtggcaggacgaccgggatgatcccaccgagctgcatcgccacacctcgcatcttttcgccgtctatcccgggcgccagataaccacagacacacccgagctgcaggcggctgcgctggtgtcctctgaaggcgcgctgtggggaacctccgccggtggtgggtgcac

SEQ ID NO: 6366 - protein, 131 aa, Homo sapiens
  misc_feature (1)..(1): Wherein Xaa may be any naturally occuring amino acid
XERADGMIVAPAGWSPEHGPREDGVAYDQQIVWDLFTNLLECSRALGVEDDLYYRVERMRDRLAPNQVGCWGQLQEWQDDRDDPTELHRHTSHLFAVYPGRQITTDTPELQAAALVSSEGALWGTSAGGGC

SEQ ID NO: 6367 - DNA, 225 bp, Homo sapiens
aagcttgcatttttatatcctcacccgatcaacgcttgtctttcccactgggatgtcagccccacacaagccagggcctctcagctttgtgtccactgtgtctccagtgcctgtcgggccacctggacgtagttggtgctcaggaaacactggacagaggagagaaacagaaagggcggatatccgggtaaatgtaacaggctagaccaagctgtttttctcctg

SEQ ID NO: 6368 - protein, 50 aa, Homo sapiens
MSAPHKPGPLSFVSTVSPVPVGPPGRSWCSGNTGQRRETERADIRVNVTG

SEQ ID NO: 6369 - DNA, 212 bp, Homo sapiens
acgcgtcggatcggccgtgaccgcaccgaagtcctgggcgaagcccctgtagaagtgggaagacgtggccgtcgccccgtggaccacgagtgaggcgaccggatccgaagccgggagtcgcagcaccccctcgatgtgcacgcccggagagatcgggatccggacctgcacgcatcgggcgtcgcagtaatcccctgcggcctcggcggccg

SEQ ID NO: 6370 - protein, 58 aa, Homo sapiens
MRAGPDPDLSGRAHRGGAATPGFGSGRLTRGPRGDGHVFPLLQGLRPGLRCGHGRSDA

SEQ ID NO: 6371 - DNA, 194 bp, Homo sapiens
  misc_feature (1)..(1): Wherein n may be a, c, g or t
  misc_feature (2)..(2): Wherein n may be a, c, g or t
  misc_feature (3)..(3): Wherein n may be a, c, g or t
  misc_feature (4)..(4): Wherein n may be a, c, g or t
  misc_feature (6)..(6): Wherein n may be a, c, g or t
  misc_feature (10)..(10): Wherein n may be a, c, g or t
  misc_feature (14)..(14): Wherein n may be a, c, g or t
  misc_feature (194)..(194): Wherein n may be a, c, g or t
nnnngngggngggngtggagagacagagacagagagacagacagagagttgggggagacggagagagagacagaggcagatggagagacagagacagagagacagacagagagaggtgggaaggtggagagagacagagacagaggcagatggagagacagagatagagagacagacagagaggtgggggagan

SEQ ID NO: 6372 - protein, 64 aa, Homo sapiens
  misc_feature (1)..(1): Wherein Xaa may be any naturally occuring amino acid
  misc_feature (2)..(2): Wherein Xaa may be any naturally occuring amino acid
  misc_feature (4)..(4): Wherein Xaa may be any naturally occuring amino acid
  misc_feature (5)..(5): Wherein Xaa may be any naturally occuring amino acid
XXGXXWRDRDRETDRELGETERETEADGETETERQTERGGKVERDRDRGRWRDRDRETDREVGE

SEQ ID NO: 6373 - DNA, 345 bp, Homo sapiens
  misc_feature (1)..(1): Wherein n may be a, c, g or t
  misc_feature (2)..(2): Wherein n may be a, c, g or t
nnaaatttcctaagagaaccgagtcacttctagcatttgctttaaacagaaacacttgtaataattgttagagggatatacaagaaaggctatataccaatagcatcacatagacacgttaattatcaatacattgaaagaaaagacgaaaacgataaaatgaataggcagagcggtgtgaatgcgggggtacagaacaacccaccatcccgagtggtgtatctgggttctataccatacgatcaaacagaggagcagatacttgatttatgtagtaatgttgggcccgtgatcaatttgaaaatgatgttcgacccccaaactggtaggtaaaaagggtacgcg

SEQ ID NO: 6374 - protein, 57 aa, Homo sapiens
MNRQSGVNAGVQNNPPSRVVYLGSIPYDQTEEQILDLCSNVGPVINLKMMFDPQTGR

SEQ ID NO: 6375 - DNA, 459 bp, Homo sapiens
agatctggcagccatggatctgcttttctgttttgcagcaaccatcttttatagttggggcatgtcatttccaatttgccctagaccctgccaacagtctgacatgtagccctgacctggacagagtgttagttggtatttactattttatacctttctattacttgtctattttccatcttttattacctgttctggatatatcatagaggtctctgatactcccattcatagtcactttgctgtcttacattatcattgacctttttttttctgtcttggtaccttatatccttcgtttgtttttttttaaaaaaaaaaagattttaggcagcctttgaaagatggagttgaagcaatgcagggggaacccccaaaacactgaattactttgtttccaaactgaagaaaaacagacttttggagagcatagaggcattggtctcaccccctgccggc

SEQ ID NO: 6376 - protein, 50 aa, Homo sapiens [sequence omitted]

SEQ ID NO: 6377 - DNA, 266 bp, Homo sapiens
  misc_feature (1)..(1): Wherein n may be a, c, g or t
  misc_feature (266)..(266): Wherein n may be a, c, g or t
ngccctttactgcaaatcatgtttccattttgcaattccagaatggaatgctcagagcctcatccccagagaggttgacacactctagcatcttgatgacactgggtctggcatagaccaagacaacactggtgactgccactcaagggaccatgccagtaaatggtcatttcaacagtggagagggattggacgcatccctcagtcttccctcgtgtggcatcctttgggatacaatgcttagatcgctgcatggatattcgacn

SEQ ID NO: 6378 - protein, 64 aa, Homo sapiens [sequence omitted]

SEQ ID NO: 6379 - DNA, 317 bp, Homo sapiens
  misc_feature (314)..(314): Wherein n may be a, c, g or t
  misc_feature (316)..(316): Wherein n may be a, c, g or t
  misc_feature (317)..(317): Wherein n may be a, c, g or t
acgcgttaaatggctttctccttatattttgggggacaaaaatcggaaagaatgaattcatgcattcattcccatgacaattatttattctgtgttctaactggggccggaccttcttaggggccggcccaccataggggcgaaaagaacgaaaaaacctcctgcacctgacattattatgtaaaggaacagacagggcacacagactgacagtcagcattctagggtctactcaaatgcttaacgtttgttccctaaagaaaatatctgggtaatcccacagagttctccacacctttaaattaaacaaactncnn

SEQ ID NO: 6380 - protein, 73 aa, Homo sapiens [sequence omitted]

SEQ ID NO: 6381 - DNA, 405 bp, Homo sapiens
  misc_feature (1)..(1): Wherein n may be a, c, g or t
  misc_feature (238)..(238): Wherein n may be a, c, g or t
  misc_feature (243)..(243): Wherein n may be a, c, g or t
  misc_feature (244)..(244): Wherein n may be a, c, g or t
  misc_feature (245)..(245): Wherein n may be a, c, g or t
ngatgccgaccctggatgaatatggccaggcagcgggcagcaggcctggggcggctgctgactgctcccggtcttacgagggcggggagattgtttggcagccacgcccaggcccggtgggcaggccgcccgcgggcgcacctcgcctcattcttgcaatgcgacattctgctggttatctggaggtggacgaaaggtggacttggccgcgggtccagcatgcagcctcggcatcccncccgnnnaaaaattgagggaggttaaggaggttatgattggtgggatagtgcgggttgcggatacgtttgcggggaacttgaccgctgaaaacacggcggccaccgcctgctttgaacactgcttactcgttataatgaatttgactgcaaaccccgatgattgcgg

SEQ ID NO: 6382 - protein, 83 aa, Homo sapiens
  misc_feature (79)..(79): Wherein Xaa may be any naturally occuring amino acid
  misc_feature (81)..(81): Wherein Xaa may be any naturally occuring amino acid
MPTLDEYGQAAGSRPGAAADCSRSYEGGEIVWQPRPGPVGRPPAGAPRLILAMRHSAGYLEVDERWTWPRVQHAASASXPXKN

SEQ ID NO: 6383 - DNA, 352 bp, Homo sapiens
  misc_feature (1)..(1): Wherein n may be a, c, g or t
  misc_feature (352)..(352): Wherein n may be a, c, g or t
ngccgctcccgggcgggagctgggtacccgctcctggggactcaggggaccctgccattttggggtttgagcgggatccagccgagtcagaacggttggcttcgggacttctgctaatttcactccatctcaaggaagtgattttggggttggtggttccccgtcctctcctccctcctttttctctctctgcgggcacaaaaggcccattactcattgagccggttggtcggttggtttggagaagtcggatcgcagaggtttatttagcctcgctccttatttgggagccggaatgtgtgatttcacttccccgagcctcgcgagggcagccgggccgccttgggggcgn

SEQ ID NO: 6384 - protein, 72 aa, Homo sapiens [sequence omitted]

SEQ ID NO: 6385 - DNA, 556 bp, Homo sapiens
aaggccacaaggagcttggattctattctgatgaagcaaggacactttacatagatgatgtcacattgcaagtatgagcagggatgtcatgagcattatccaggactataggagacatacatagtgttcttcaaaggacaatgtaattctttggacatggggcataaacaccatggttcaaagccaagcttttagaagcagaatgcgaagttgaaacttcttctactcaggtacagctctctttgctatgtggtaatgtttactaccactgtggtcatgtttaccaaccactcttgtggttggtatttcctgtaaatctttaagtccaaacaacggcatctgggcacaaaaaaggataagagggaccagtcccctttgagccatcaacaaacagcccaaaagaaagacggtgaagttcaaaaaggcgggctgacctgctcaaagctgctgaggtttcccttgcactacactgccttgcccttggtgccaggacttagtctctgggctaaaggaaactctagacatgttttcagtgcttacgtaagagtcaacgcgt

SEQ ID NO: 6386 - protein, 53 aa, Homo sapiens
MAQRGLVPLILFCAQMPLFGLKDLQEIPTTRVVGKHDHSGSKHYHIAKRAVPE

SEQ ID NO: 6387 - DNA, 348 bp, Homo sapiens
  misc_feature (1)..(1): Wherein n may be a, c, g or t
ntccggaaaaacatctcataaatcatccctggaaaaatgtctagtcaaacagaaagaacttttattgcggtaaaaccagatggtgtccagaggggcttagtatctcaaattctatctcgttttgaaaaaaaaggttacaaactagttgctattaaattagttaaagcggatgataaattactagagcaacattacgcagagcatgttggtaaaccatttttcccaaagatggtatcctttatgaagtctggtcccattttggccacggtctgggagggaaaagatgtggttagacaaggaagaactattcttggtgctactaatcctttgggcagtgcaccaggtacc

SEQ ID NO: 6388 - protein, 104 aa, Homo sapiens
MSSQTERTFIAVKPDGVQRGLVSQILSRFEKKGYKLVAIKLVKADDKLLEQHYAEHVGKPFFPKMVSFMKSGPILATVWEGKDVVRQGRTILGATNPLGSAPGT

SEQ ID NO: 6389 - DNA, 294 bp, Homo sapiens
tccggaatctgcacgcctggccagggcactcctttgtctccctcagttgtggagccaccctggagttcctctcagttcctctgtggcactggtgtgatggttgttacatggccaccatctgtgtcacctgtgtgtcctggtcataccttacaggtggtttggactatttgtagaactcaactagctgattctgtgttttcagtttcagaatcacttggaaaaattagattgtctctcagaatcctgtgtatctaaagcaggaaaagagcgctttagagatcctccctcacgcgt

SEQ ID NO: 6390 - protein, 52 aa, Homo sapiens
MVVTWPPSVSPVCPGHTLQVVWTICRTQLADSVFSVSESLGKIRLSLRILCI

SEQ ID NO: 6391 - DNA, 186 bp, Homo sapiens
aagctttgcacaaagaagtgctggtagatacttttattttggtgggaaaacgaatgctgtctctttctctctcctctctctcccccctcaggcaactgtgccctctaccatcgtgggggctggtggtaccatgcctgcgcccactccaacctcaatggtgtatggtatcacggaggtcattaccgg

SEQ ID NO: 6392 - protein, 53 aa, Homo sapiens
ILLFWWENECCLFLSPLSPPSGNCALYHRGGWWYHACAHSNLNGVWYHGGHYR

SEQ ID NO: 6393 - DNA, 342 bp, Homo sapiens
  misc_feature (1)..(1): Wherein n may be a, c, g or t
nctggaagtgggtttgtgagccagatatctagaactgaaggaggaagacatagcctcttaattggtttggggcattgaaatatgtgtgggccactgataataactccaggtccagaactgtaggacccatcagcagcagtggtggaaaaagggaagagctgaaattttacagaaggacttaccctccctatctcctccactttcctgttagcttccagcatccgtatcaacttcatcacgtgtgcatttgtcacaccaggtgtcatcttcaaaataaattttgttaaatttgttttcattgatacataatagaggtacacattttcagggtacatgtgatca

SEQ ID NO: 6394 - protein, 111 aa, Homo sapiens
MYPENVYLYYVSMKTNLTKFILKMTPGVTNAHVMKLIRMLEANRKVEEIGRVSPSVKFQLFPFSTTAADGSYSSGPGVIISGPHIFQCPKPIKRLCLPPSVLDIWLTNPLP

SEQ ID NO: 6395 - DNA, 320 bp, Homo sapiens
ccccgtcccacatcgggtcgatctgcgtcgagtcgtagtcatgcgccttaaagtccacccagcgcgtgcggcccggctgctcttcgacgttttcccagtacttgttgccgttgctgtgtgagtcgggtggcacggtggcacgtacctgtccatgccgaccatgcggccccacttggcgtcaccaatgtactgcatgtcgcgccagtacttggcgaacggcccttgcggatgtagtcaatcgtgcggtacagcgacatgatagacgacgaacagtcagcggagcttcgaggttggtcgggccctcggacgtgggagtgcac

SEQ ID NO: 6396 - protein, 69 aa, Homo sapiens
MSLYRTIDYIRKGRSPSTGATCSTLVTPSGAAWSAWTGTCHRATRLTQQRQQVLGKRRRAAGPHALGGL

SEQ ID NO: 6397 - DNA, 310 bp, Homo sapiens
aagcttttctgccctcatacatggcatcagcttagccttttagctttggctccatgcgtaagagccaaacacattaccaactctaagccacactcatcaacctttccaagtgtgtctccgaagcccttctcactacacttggggtaaaggtccccgagtctctcccctccgcaatgtctggggttagggggagaaaaagacatcagcttgccaataattttttcaacatgcattcttactcaatctcaacctcttaaccctttggtggatgttaggatggcagaggttgttgatcaccttctttgctagc

SEQ ID NO: 6398 - protein, 68 aa, Homo sapiens [sequence omitted]

SEQ ID NO: 6399 - DNA, 386 bp, Homo sapiens
ggatccgaaaacaactaggcaaagatgtctaatccagcaattccaagagtaactagtttgtttcctcatgtacaagcaaagtgtcttgacacaccccacagacccagatgtatcctcatctgaagatgggagagaggaacagaataaaatctctctggctattggattacagtatcaacgcactgaaggtggatttaaagcaatcacagcttgatacacttcaaaaaagcactattcaagatcaacactatctttatgatgacatgacaaaaacctttaattacaaagaaaaaactctaaaagtccagtatagtggcagtcaaaaccttaaaaacaaaagccttttgccccaaaaggcaaggatagttcacataaagtgggtagag

SEQ ID NO: 6400 - protein, 93 aa, Homo sapiens [sequence omitted]

SEQ ID NO: 6401 - DNA, 283 bp, Homo sapiens
  misc_feature (1)..(1): Wherein n may be a, c, g or t
nattgaatgatgacatcctcaatcattccgacgaataccagattttcttcaccgtcagcgatgtagacgacaagggcgatccttatgatgtgatggactgccgtggcaaatggacttacgaccctaagagcaaagaccccttgaagaaaggcaccgtggaccccacgcccatcaaagcaccagcctttgccaatgccactacgtggaagcagcgcgccgaattgtcttctaagctctttgaatacacctatcgcgacacctggacacacggggtgatggggcg

SEQ ID NO: 6402 - protein, 63 aa, Homo sapiens
MDCRGKWTYDPKSKDPLKKGTVDPTPIKAPAFANATTWKQRAELSSKLFEYTYRDTWTHGVMG

SEQ ID NO: 6403 - DNA, 375 bp, Homo sapiens
gaattccaaggagtcactgaatgttccaagaagggtattatttcatctcaaaattagatgggtgccttattaaaagggaaagcaaatctgaaagcaattggtctagagttctgctttgaacagggtctacagaataaggaacaaacagcagggatggcaggtagacttgcagaggtatcgttccagaaagggagtttaccaagtgggccaagtaacacgcttttttatccacagacttaaaaatgacagttatctactggctgatagagatatccaagatgtattttaagtaaaaatacataatacattttgtaaaagcaaaccaaaaacctcacatgacatacaaaaattaacttaaaaatgtatcaaagatct

SEQ ID NO: 6404 - protein, 60 aa, Homo sapiens [sequence omitted]

SEQ ID NO: 6405 - DNA, 281 bp, Homo sapiens
  misc_feature (1)..(1): Wherein n may be a, c, g or t
  misc_feature (2)..(2): Wherein n may be a, c, g or t
  misc_feature (3)..(3): Wherein n may be a, c, g or t
  misc_feature (281)..(281): Wherein n may be a, c, g or t
nnnctcggagttctcagcttttcgggccctggaccctgcaacatggctgtcaagaagatcgcgatcttcggtgccaccggaaggaccgggctcaccacactggcgcaggcggtgcaagcaggcaggagccggggaaggtgggggaaggcattaacacccggccggacttttggaaaaggtcgttctggggccgggtgaaaaccacacgaggcggtgtgtgccccaacctgtgggccaacaagtggtcaggggggcagaaatagaggactctgagattaagn

SEQ ID NO: 6406 - protein, 51 aa, Homo sapiens
MAVKKIAIFGATGRTGLTTLAQAVQAGRSRGRWGKALTPGRTFGKGRSGAG

SEQ ID NO: 6407 - DNA, 475 bp, Homo sapiens
tgatcagtgataaaaacgtaaaaggttacgctttttttaaagcacaaaacgggacagataaacaacgacctagtacatctggtgttttagatattgaatttatcgacccaatgcgtggtttaattggaatcacagttccacaatggtttttaaaaaacgttgctaacacgacagttttggcgaagattacttatcgcttaatgactttaacacaactggcaaagacgatactgttgtgctaggtacattctcatttagtgttaaagatagtttggttaaccaaatcgaaagtgatatcaaagtatcttatattcgaatgtttgatgagttgcgcactgaattagaattaaaagtacaacaacttaaacaggatataggagatactcagagcttaatagaaagcattaagcaaatagccaatgattctctagctaaaattaataaagctcaatcagaggctggagtgtgctcgcga

SEQ ID NO: 6408 - protein, 53 aa, Homo sapiens
MFDELRTELELKVQQLKQDIGDTQSLIESIKQIANDSLAKINKAQSEAGVCSR

SEQ ID NO: 6409 - DNA, 290 bp, Homo sapiens
catggtagtgattgtggtatagtgaatgtgaacatacctactaatggtgctgaaattggtggagcatttggtggagaaaaagcaactggtggtggacgagaagcagggagtgattcctggaagcagtacatgaggagggcgacttgtacaatcaactatgggagcgagctacctctagcccagggaatcaattttggttaatcctgcagaaatgttgcgcgtggatctcagtgttttctgcagacgtggatgccgtatggaaagaactgatgcaaccgcatttgagatct

SEQ ID NO: 6410 - protein, 66 aa, Homo sapiens
HGSDCGIVNVNIPTNGAEIGGAFGGEKATGGGREAGSDSWKQYMRRATCTINYGSELPLAQGINFG

SEQ ID NO: 6411 - DNA, 240 bp, Homo sapiens
aaatttctagagttaaaagcaagcaccaggcagtcaatagccaaatgtggaatcccctaggagaatgttacataatgacaaataaaaagcttgatccttcagaaaacccaagtgggtacccttgcagctgtgtgcctcttttgcttttgctgcaagggacatcttcaaacatggtgtctaatggggttcctgtttccccagttgatctgatttcttaagaaaaaacatagctgctgcagg

SEQ ID NO: 6412 - protein, 57 aa, Homo sapiens
MWNPLGECYIMTNKKLDPSENPSGYPCSCVPLLLLLQGTSSNMVSNGVPVSPVDLIS

SEQ ID NO: 6413 - DNA, 351 bp, Homo sapiens
  misc_feature (1)..(1): Wherein n may be a, c, g or t
  misc_feature (2)..(2): Wherein n may be a, c, g or t
nncctaggttcctcccccatcctgagccactatatgcttaggatcccagagtcagggagggaaccctgttcccccaagtctgcctagtgaggccccttctttggagaagaggaaatttcccgggcaaaggccaggtgggcccatcaacagtaccctgggtctgcactgccacccagtggctacagtgtagcacatcaggttctgatcctgcccgcacctgactgccttgggaccctctcgcttctcccagacctgcgcaagaacttcgatcaggagcctctgggcaaggaggtgcccctggaccatgaggttctcctgcagtgccgcccgccggaaggggtgcctgtggcc

SEQ ID NO: 6414 - protein, 87 aa, Homo sapiens
GPFFGEEEISRAKARWAHQQYPGSALPPSGYSVAHQVLILPAPDCLGTLSLLPDLRKNFDQEPLGKEVPLDHEVLLQCRPPEGVPVA

SEQ ID NO: 6415 - DNA, 312 bp, Homo sapiens
  misc_feature (38)..(38): Wherein n may be a, c, g or t
accatcgaagacttgctggaagatatcggctgggcaanccgcatggcttatgtggtcgcccgccgcctgctcggcgaaggcgaacaactgccaagccccgaaggcccgctggccattcgcggcaccgaaggcctggtgctcagctacgccaagtgctgtacgccgatcccgggcgacccgattgtcggccacttgtctgcgggcaaaggcatggtggtgcacctggacaactgccgcaatatcagcgagatccgtcacaaccccgaaaaatgcatccagctttcgtgggccaaggatgtcaccggtgaattc

SEQ ID NO: 6416 - protein, 104 aa, Homo sapiens
  misc_feature (13)..(13): Wherein Xaa may be any naturally occuring amino acid
TIEDLLEDIGWAXRMAYVVARRLLGEGEQLPSPEGPLAIRGTEGLVLSYAKCCTPIPGDPIVGHLSAGKGMVVHLDNCRNISEIRHNPEKCIQLSWAKDVTGEF

SEQ ID NO: 6417 - DNA, 279 bp, Homo sapiens
gcgttcaagaacttttttggaagagaatatttcccatccaaagatataacgtacccagaaaaattacaatctatgaaggtgcacccttatattacagtggagcttttacataaggccccgattagatcttatttacaggctagaaacgtcagtatcttttctacaggtattgtgggtaatattttgaactcacgttggaaactggcgggcgttattaccttaattgcccttgtcgttttcccaatcatagtagaaaagttggaccccgaaacagctcga

SEQ ID NO: 6418 - protein, 93 aa, Homo sapiens
AFKNFFGREYFPSKDITYPEKLQSMKVHPYITVELLHKAPIRSYLQARNVSIFSTGIVGNILNSRWKLAGVITLIALVVFPIIVEKLDPETAR

SEQ ID NO: 6419 - DNA, 393 bp, Homo sapiens
  misc_feature (389)..(389): Wherein n may be a, c, g or t
accggtatggtgcatgtgcatgagcaccccactatggggttaatttgcattatcctgttgagtatttttttttacatcctaatgggttatttgtgtttcttcttccatcaagcacttaagtgttttgcttagttttctcttgattgtttgctttctgatgttatttatagccattctttgcatgatatggattcctccatccttttctcgttccagaatccttaccctttatttctttcttctcttcttttatcatgggatctgtcacccttctctatagaaatcatacattttcaagaattttttttttacagtttctccttatgtcttgcaaggtctgtggtcgctggcattgcaaggtaatccacatctcttctcccccacccgtntgat

SEQ ID NO: 6420 - protein, 58 aa, Homo sapiens [sequence omitted]

SEQ ID NO: 6421 - DNA, 213 bp, Homo sapiens
cggaagttacgtcttgacaatcctcaaaagtatacacgcaaatttttggctgcaaaatatggcatttcgccattatttgtatccatggtctcgaaacctagtgaacaacatgtacaaattatggaaagtagattgcaagaaatccaatcacgctggaaggagaagaggcgtatagccagagaggaccgtaagcgtagaaaactcctgtggtac

SEQ ID NO: 6422 - protein, 71 aa, Homo sapiens
RKLRLDNPQKYTRKFLAAKYGISPLFVSMVSKPSEQHVQIMESRLQEIQSRWKEKRRIAREDRKRRKLLWY

SEQ ID NO: 6423 - DNA, 639 bp, Homo sapiens
gccggcctggatgccgccgagcacgcccttggttctcggcgagagcggcgacaccaagacggtcggatctcccaccagactgccggtccagtcgttcttgccccagccatagcccgcatgcagactcgcgtagaagcccgaccaggagaaggtcgacaccgggacggccgaatagggggctttgaccgagagatccgccgccagcgtcgtaccggaggcggctcccatcagaacgggcgccaggcacacaatcctcaaattcattccaaatctccacgccgagaagacaagcttcgtggagttacggggagcgcggctgggagcacatcaacttttcggttgaaatcgtaccggccgcgatcgatggcgggctgttttcatggcgccgttgccatgatgcatcaatctcggacgagggcactccaacagacgaagccagagatgttgggcttgcccggcaaacgggctggtcatggatttggcccatatgctagcaaccgagctggtatgtgacggtgcatgaaggcgtgcatctggttttggaatgcgcaaagctatgatctccgacaccgcggagctctcgcacctgataggggacatctacgatgccgccctgaatccatcgttgtggacacgcgt

SEQ ID NO: 6424 - protein, 131 aa, Homo sapiens
MQTRVEARPGEGRHRDGRIGGFDREIRRQRRTGGGSHQNGRQAHNPQIHSKSPRREDKLRGVTGSAAGSTSTFRLKSYRPRSMAGCFHGAVAMMHQSRTRALQQTKPEMLGLPGKRAGHGFGPYASNRAGM

SEQ ID NO: 6425 - DNA, 153 bp, Homo sapiens
gcgcgcaccctggtgctggtcaacggtcgtcgctgggtgcaggccctggacggcaccgtcgatctgaacaccatcccgaccgccatcgtcgagcgcattgaagtcctgaaggacggcgcctcctcgatctacggttcggatgccatcgccggc

SEQ ID NO: 6426 - protein, 51 aa, Homo sapiens
ARTLVLVNGRRWVQALDGTVDLNTIPTAIVERIEVLKDGASSIYGSDAIAG

SEQ ID NO: 6427 - DNA, 601 bp, Homo sapiens
atgagctacttcaaccccaatgagctgctcgtcaacaaatcgctggcttttggggtctacccctatgtcaacgctgcccagtgccacctatacctggccaagcagatgtgggaggaggccaaccactgtatggccttcgagtatgtcctcgaaaccttcccgattgaccgcgacgaggcctaccgatcccacatccacgtcccctcaatggctcgcaaggaagctttcgaggtggcgttcatcaagcggatgaccgagcagactcttgatatcaccaccgtcgagggtaagcaggacttcgtgcgcaacctgattgcctacaacattatcctcgaggggatttggttctactccggctttatggtcgcattgtcgttccgtcagcggaacctccttcgcaacttcggttccctcatcgactgggtggtccgtgacgaatccttacatctgaaattcgggatgaacctcattctgacggtgctggaggacaaccccgaaatcgccaccgacgagttcgcggccgagatccacgatatgatcgttcagggagtcgagaatgaggagcagtataaccgtgacatgctcccgcgggggatcgctg

SEQ ID NO: 6428 - protein, 200 aa, Homo sapiens
MSYFNPNELLVNKSLAFGVYPYVNAAQCHLYLAKQMWEEANHCMAFEYVLETFPIDRDEAYRSHIHVPSMARKEAFEVAFIKRMTEQTLDITTVEGKQDFVRNLIAYNIILEGIWFYSGFMVALSFRQRNLLRNFGSLIDWVVRDESLHLKFGMNLILTVLEDNPEIATDEFAAEIHDMIVQGVENEEQYNRDMLPRGIA

SEQ ID NO: 6429 - DNA, 249 bp, Homo sapiens
  misc_feature (249)..(249): Wherein n may be a, c, g or t
tgtacagctgatgaacctttatttaagtagcgacaagtcgcataaagaacttcattggccatcatagataacgctgcttgatgtgcattgtcgcggattgttttagacatggttcagactccaaatacttaattaataggggatacacagaccgaagcgaaactgattgggaaacctttttcgattcgaatgtcgagaacccgatgggtttcaacacctttgaaaataaaattcacatcaagaatcttn

SEQ ID NO: 6430 - protein, 56 aa, Homo sapiens
MCIVADCFRHGSDSKYLINRGYTDRSETDWETFFDSNVENPMGFNTFENKIHIKNL

SEQ ID NO: 6431 - DNA, 262 bp, Homo sapiens
gtcgactgctgctgttcttccttggaaactggctccactgcatttcggggctgggatgttgttaaagcattcacagccctcagagcacatgacgagggagttgggaaatgaagcaagcaggaccttccactttgtagcagacttatttctggagaaactgatggttggggccacaaaacgctttcagtgtaggctcatcatgactcatttggacatcctattttctctccttatgtatgagattgtggtgggtatctgtaca

SEQ ID NO: 6432 - protein, 69 aa, Homo sapiens
MLLKHSQPSEHMTRELGNEASRTFHFVADLFLEKLMVGATKRFQCRLIMTHLDILFSLLMYEIVVGICT

SEQ ID NO: 6433 - DNA, 300 bp, Homo sapiens
  misc_feature (1)..(1): Wherein n may be a, c, g or t
nacgcgttggggacccggagagacttggtatacctggtcgatttgggcatcgcccacgacgcaaaggccggcaagctgacccagaccggttcaatcatcggcttcttgccctacatgtcccccgagcggatgcaatccggggcggccgatgcccgtgccgatgtctacgcactggcgtgtgtgctccatgaatgcttgacgggggcccaacctttcggcggggacaggatggaacaacaggtcggtgcgcacctgaccttggatacccctaagcccagcgatctcaacccgaacctccgg

SEQ ID NO: 6434 - protein, 100 aa, Homo sapiens
  misc_feature (1)..(1): Wherein Xaa may be any naturally occuring amino acid
XALGTRRDLVYLVDLGIAHDAKAGKLTQTGSIIGFLPYMSPERMQSGAADARADVYALACVLHECLTGAQPFGGDRMEQQVGAHLTLDTPKPSDLNPNLR

SEQ ID NO: 6435 - DNA, 353 bp, Homo sapiens
  misc_feature (341)..(341): Wherein n may be a, c, g or t
  misc_feature (353)..(353): Wherein n may be a, c, g or t
ctcgagcctgcaggagacatctagcccgctgtccagggcaccttttttttctccctatatttcggttgctcgcgtctcttggtgtggtttgcccacgtctgcagcgccaggttcgtggagagcaggaaccatgctgtttattttcgtcgccgcagccttcagctcagcgaggagccacccctcctccgtctgttcactgcgcgcgcctttgctgagctgtgatgcgggttggcgctcagtgcaaggggcagaggccgcagtgaggaatcctccttttttaaaagctccatccagggagcgggagcagagagagaatcccggcaccccggggctttgctctnagcgagagaatn

SEQ ID NO: 6436 - protein, 74 aa, Homo sapiens
  misc_feature (71)..(71): Wherein Xaa may be any naturally occuring amino acid
MLFIFVAAAFSSARSHPSSVCSLRAPLLSCDAGWRSVQGAEAAVRNPPFLKAPSREREQRENPGTPGLCSXREN

SEQ ID NO: 6437 - DNA, 294 bp, Homo sapiens
gatcctagggtgagaaactataacaatcaaaagccaattgatttggttcatggtgatgaactggatgaattaattgaccttttgcagggtgccgagttagcgattgatagtaccaatggatcaggtgataacaatgaggatggagaaatgatagatgatggtccatctgacgatgacgaagaagatgataaaaaatgataaaatatgtgatgataataccacagagagggaaagatagaatgaactctggatatatagatatttctactgtgtatatatttctttaaggtgcac

SEQ ID NO: 6438 - protein, 65 aa, Homo sapiens
DPRVRNYNNQKPIDLVHGDELDELIDLLQGAELAIDSTNGSGDNNEDGEMIDDGPSDDDEEDDKK

SEQ ID NO: 6439 - DNA, 311 bp, Homo sapiens
agatcttgcagatataaatggcagaaatttgtgtgcaacaagctaaattctcctgaaacaaatttcgtacccattcgcacctcagtgaataagaactctaaaatgattgttgaaaagcagataagcattcatatttctttaaagtgtattgtttacaaagaatactaagggattgagtagaatatttttcacgcactagaagaaggacctgccgaaaaggagaccttctcgagaaacaagcatttttgtccttaaacttacaaagagaacaattttgttacaaatcctgctccaaaatagtctcaacgcgt

SEQ ID NO: 6440 - protein, 55 aa, Homo sapiens
RSCRYKWQKFVCNKLNSPETNFVPIRTSVNKNSKMIVEKQISIHISLKCIVYKEY

SEQ ID NO: 6441 - DNA, 612 bp, Homo sapiens
cattttaacgatgtagacacacctaatgatctgatgcgctttgcatatctcatattccttcactagcataaaaatccaaaaaaaaagaatatttaggccgaatggaattattcgaaacgtcatacgaaaaaagtttcaattcgtacaatgcctggcatgttcattcgaatataaggccgccgccttccagtcagggtggccaaaagtataatcccgggtggaaactaaactaaaaaccgcactcacaactttccgcggacgctaacagacaaatagacacactatcaggtcaggaactgccgacacatacgacactgcccctcacgtaagggcatgatagaattggattatgtaaaagatgaagataccattgtagaagcaaccagcacgtcgccgtggctgatgaggtctcctcttgcccgggccgcagaaaagaggggcagtggcctgtttttcgacataaatgaggggcatggccagcaccgagacgtcattgttgcatatggcgtatccaagccgaaacggcgcttgcctcatccccacgggaataaggcagccgacaaaagaaaaacgaccgaaaaggaaccagaaagaaaaaagagggtgggcgcg

SEQ ID NO: 6442 - protein, 93 aa, Homo sapiens
MIELDYVKDEDTIVEATSTSPWLMRSPLARAAEKRGSGLFFDINEGHGQHRDVIVAYGVSKPKRRLPHPHGNKAADKRKTTEKEPERKKRVGA

SEQ ID NO: 6443 - DNA, 187 bp, Homo sapiens
gccggcttggtgccaagctgaggggcaccggtggagcgcgcgtccggaaccccccaagcccgctggcctgcgcggtcatgaagatgatcttggtgcgtaggtttcgcgtgctcatcttggtggtattcctactggcttgcgctttgcacattgctgttgacctgctacccaagctggaccggcgcgc

SEQ ID NO: 6444 - protein, 50 aa, Homo sapiens
MCKAQASRNTTKMSTRNLRTKIIFMTAQASGLGGFRTRAPPVPLSLAPSR

SEQ ID NO: 6445 - DNA, 242 bp, Homo sapiens
ctcgagccctactggagtcctacagccttcacaatgagacagccagtctcagaactgaaagggatcttcaccatcttcttggcccattctctcatcttgcaggtgggaaataaaaatccaaagaggcaaatgagatttgcccaaggttacccagtgagttatctcttctgtaagtctttagactgccctagagaatcaggtggctcagcttttctgagtagctataccactccctgggatcc

SEQ ID NO: 6446 - protein, 69 aa, Homo sapiens
MRQPVSELKGIFTIFLAHSLILQVGNKNPKRQMRFAQGYPVSYLFCKSLDCPRESGGSAFLSSYTTPWD

SEQ ID NO: 6447 - DNA, 174 bp, Homo sapiens
  misc_feature (1)..(1): Wherein n may be a, c, g or t
  misc_feature (2)..(2): Wherein n may be a, c, g or t
nngctagccatggcagcgtcaggcccggaaccccggcttttgctcctgctcctgctgctgctgccgccgctgcccccggtaacttctgcctccgatcgacccgggggcgccaatcctgtcaaccctgacaaactgctggtgatcaccgtggatacagcagagacagaggggtac

SEQ ID NO: 6448 - protein, 58 aa, Homo sapiens
  misc_feature (1)..(1): Wherein Xaa may be any naturally occuring amino acid
XLAMAASGPEPRLLLLLLLLLPPLPPVTSASDRPGGANPVNPDKLLVITVDTAETEGY

SEQ ID NO: 6449 - DNA, 459 bp, Homo sapiens
  misc_feature (1)..(1): Wherein n may be a, c, g or t
  misc_feature (2)..(2): Wherein n may be a, c, g or t
nnacgcgtgacttatacaccgggacgcaatgcgacggcaacggcagagcacactatcgccatgattatggcggcagtgcgacagatccccgcccaccatgagttactcgcttcaggggtttgggagggggacgcatatcggtacgaccaggttggtatggaaatcaaagggaatgacgtcggtatcgtcggatgcggagcggtcgggtgccgggttgcggctgtgatggcggccatgggtgcgaccgtgcgtgtcttcgacccgtgggccactcctgattcttttccagctggcgtgatggcatgtgatgatctcgatgaggttctgaggctcagccgcatcctcactctccacgctcgtgccaacgaggacaaccgtcacatgattggcgttgaacaattagctgagatgcctgatggctccgtcctcgtcaactgtgcccgtggctcgctggtcgac

SEQ ID NO: 6450 - protein, 153 aa, Homo sapiens
  misc_feature (1)..(1): Wherein Xaa may be any naturally occuring amino acid
XRVTYTPGRNATATAEHTIAMIMAAVRQIPAHHELLASGVWEGDAYRYDQVGMEIKGNDVGIVGCGAVGCRVAAVMAAMGATVRVFDPWATPDSFPAGVMACDDLDEVLRLSRILTLHARANEDNRHMIGVEQLAEMPDGSVLVNCARGSLVD

SEQ ID NO: 6451 - DNA, 431 bp, Homo sapiens
tctagacctgggaagaatgtccccatttccagatcccagcaccttggccaagaactcctcgacgatgggaagggccggccatatttagtcacaggctcatggggcgcttgggtcctcctaagaggggagccgggtgggacactcaggaaggcaggggaagaagcgaaggaaaggagaattgaaacatctccagctatgcatgtggctcccgcgctgtgcctcccacgggctccgcttctcaatccgggttctccacgctcccaggaccctcaacggggcacgtggcaggacctccctttccatattcacattgtgtccctctttccagttaaatacagacgctgggacgcccctccccagaactggctcactttctgacagatgtccctacaccctgcaccagccagtctactgttcaccaggaggcagcg

SEQ ID NO: 6452 - protein, 77 aa, Homo sapiens
MWLPRCASHGLRFSIRVLHAPRTLNGARGRTSLSIFTLCPSFQLNTDAGTPLPRTGSLSDRCPYTLHQPVYCSPGGS

SEQ ID NO: 6453 - DNA, 157 bp, Homo sapiens
gtgcactttatccttggtgagtttgatgcggcactgagcgactatgaaaagtccacttcgctcgatgacacattcatcttctcacaggtgcagcatgctgtagcaagctacaagctgggcaacatcgctcgtagcactgctgccttctgccggatcc

SEQ ID NO: 6454 - protein, 52 aa, Homo sapiens
VHFILGEFDAALSDYEKSTSLDDTFIFSQVQHAVASYKLGNIARSTAAFCRI

SEQ ID NO: 6455 - DNA, 236 bp, Homo sapiens
gtcgaccgtgcggataaggtttcgctggttcctatcgacggtacgccgcccaacctcttgaacgaggtgcacggatgctcgttccgccctcgttgccctatcgctaagtctggcggtcagtgctgcaaggacgtggctgaagagcccgaattgcgcttgattgagggcgctggcgaaggtcactacgctgctgcagatattgcggagcagcttgtggacgctcgccccgaagatct

SEQ ID NO: 6456 - protein, 78 aa, Homo sapiens
VDRADKVSLVPIDGTPPNLLNEVHGCSFRPRCPIAKSGGQCCKDVAEEPELRLIEGAGEGHYAAADIAEQLVDARPED

SEQ ID NO: 6457 - DNA, 303 bp, Homo sapiens
ggccaagcagctgaaagcatcaaggcaagggttgtcagtctttatggcggtgcatttcctgattacaaaatccttttcgaagacttcaaagacccagcaaaatgtgcagaaatcgcaaaatgtggattgagtaaaaggaaaatgatatatctagagtctcttgctgtctattttactgaaaaatataaggatatcgaaaagctcttcggtcaaaaagataatgatgaggaagtgattgaaagtttagttacgaatgtaaaaggtataggcccatggagtgccaaaatgttcttgatatccgga

SEQ ID NO: 6458 - protein, 101 aa, Homo sapiens
GQAAESIKARVVSLYGGAFPDYKILFEDFKDPAKCAEIAKCGLSKRKMIYLESLAVYFTEKYKDIEKLFGQKDNDEEVIESLVTNVKGIGPWSAKMFLISG

SEQ ID NO: 6459 - DNA, 306 bp, Homo sapiens
  misc_feature (1)..(1): Wherein n may be a, c, g or t
  misc_feature (2)..(2): Wherein n may be a, c, g or t
nnggatcccaagacaaagtatggacatgttttgtccgggcccgcagcgtacgacacacccatgcttcctgaagacgagctcgatgccttcattgcgggcagcacaacgccctcccaacacgtcgcttcgacggagcatcaagtcttgcgcctcggacaggaacgcttccagctcttcgagtcgtttttccggcctaagcgcataggactcgatcaaggctcgctgccagaactgattgccacctgcatctcacacgtacacgaggaggcgcgcgatatgctatggacccagatcgtgctggtaggt

SEQ ID NO: 6460 - protein, 102 aa, Homo sapiens
  misc_feature (1)..(1): Wherein Xaa may be any naturally occuring amino acid
XDPKTKYGHVLSGPAAYDTPMLPEDELDAFIAGSTTPSQHVASTEHQVLRLGQERFQLFESFFRPKRIGLDQGSLPELIATCISHVHEEARDMLWTQIVLVG

SEQ ID NO: 6461 - DNA, 213 bp, Homo sapiens
gcgttaatactcatggacttgaaacttttggaatgtatgaacaaccgatttaaaaccaagattgttaataaacctaaggacgttcttattgttattgatcaattgatagatgttgttcaggaaaaagatgaaacaatacaggaagtagaagcagattctgacgacgaagttgaagaaggagaagaaacagaagaattggatccaaatgaaaat

SEQ ID NO: 6462 - protein, 71 aa, Homo sapiens
ALILMDLKLLECMNNRFKTKIVNKPKDVLIVIDQLIDVVQEKDETIQEVEADSDDEVEEGEETEELDPNEN

SEQ ID NO: 6463 - DNA, 465 bp, Homo sapiens
agatctcccaccagagttctgcccttaccacttctcttcttcccctctggagaagctgcctgggcctcaccccaacttggttctatctccctgtctattctccctgatctcacccctcacatagcctgctccccagtcctcactgtatcctctgctccagcctcaccatcctacccactgtctccagtacatgctttgttcatttccacctctggggcttttctcatgctgtctctccctccaagaatatacttttctgctcgctatgcagtcaactcctactcagccgtctagctccatgccagtgtctcctcctccaggcagtcttccaggacttctctcttctccaaattctctcagtgctgactccaggtcagataggctcagccacttttttcgaatgttgccatcatctctcccactgttgctaagagcctgctctgggctgggagctgtactgatcag

SEQ ID NO: 6464 - protein, 91 aa, Homo sapiens
MLCSFPPLGLFSCCLSLQEYTFLLAMQSTPTQPSSSMPVSPPPGSLPGLLSSPNSLSADSRSDRLSHFFRMLPSSLPLLLRACSGLGAVLI

SEQ ID NO: 6465 - DNA, 292 bp, Homo sapiens
  misc_feature (1)..(1): Wherein n may be a, c, g or t
  misc_feature (292)..(292): Wherein n may be a, c, g or t
nacgcgtccctgcagacccgcgccgatccgctgcaactgacccaggtgctgaacaacctgctggaaaacggcctgcgctacagcaccaagttgcatgaactggcgcaggtctggctgaccttggaagtggacccgaacaacgagctgccgaacctggaagtcctggataacggacccggcgtaggcccgaagcaacgccagcacctgttcgaaccgttcttcaccaccgagagccagggcaccggccttggcctctacctgtcccgcgagctatgagaaagaaccaggagan

SEQ ID NO: 6466 - protein, 91 aa, Homo sapiens
  misc_feature (1)..(1): Wherein Xaa may be any naturally occuring amino acid
XASLQTRADPLQLTQVLNNLLENGLRYSTKLHELAQVWLTLEVDPNNELPNLEVLDNGPGVGPKQRQHLFEPFFTTESQGTGLGLYLSREL

SEQ ID NO: 6467 - DNA, 334 bp, Homo sapiens
  misc_feature (1)..(1): Wherein n may be a, c, g or t
ngaccacagagaatggcagttttacccaaccactggcacgcctgactggttcagatcttcctccaacaatcaatgctggtctctatggaaatttcagggctcacattgcgtttcatttcagatttttcaatatcatatgaaggatttaacataacattctctgaatataaccttgaaccttgtgaagatcctggcattcctcaatatggtagtcgaatcgggttcaactttgggattggtgacactctgaccttctcatgctcttcgggttatcgactggaaggaacatcagagatcatctgtcttggtggtggccgacgagtgtggagtgcac

SEQ ID NO: 6468 - protein, 87 aa, Homo sapiens
MLVSMEISGLTLRFISDFSISYEGFNITFSEYNLEPCEDPGIPQYGSRIGFNFGIGDTLTFSCSSGYRLEGTSEIICLGGGRRVWSA

SEQ ID NO: 6469 - DNA, 278 bp, Homo sapiens
  misc_feature (261)..(261): Wherein n may be a, c, g or t
tgatcatgtttatttgctttgtatgtcattcttgttcttggctttgaacatttaatttttagtttttgtcttacatggatgcttgtcatcatgctaaactgaatacaagggacattaactcatttccaccaccaccccagctccttaaatgcgttctacctttcagctgtccagtcactctagtgtgtgtaatttgtctcccaagcaatgcacttggcgttctctttcaatcttacccccttgccccgaattcaagagtcntatattttatttctttt

SEQ ID NO: 6470 - protein, 68 aa, Homo sapiens
  misc_feature (63)..(63): Wherein Xaa may be any naturally occuring amino acid
MDACHHAKLNTRDINSFPPPPQLLKCVLPFSCPVTLVCVICLPSNALGVLFQSYPLAPNSRVXYFISF

SEQ ID NO: 6471 - DNA, 355 bp, Homo sapiens
  misc_feature (1)..(1): Wherein n may be a, c, g or t
nacgcgtgggttcccttccaggttttactctcttcgcgaccatcggacacccgagcattggccacggggttgagtgacacactttgttaggcgcagaatggatgcccttggggttttacctcgcctgtttagaaaggaaactcgatgacccgtcttcgtgccatctgtaccgcggttgctctggtatgcgccagcggccaggttttcgccgataccgccagccacaacgccagtgccgaggctttcctgacgttggcccacgccgacaagctgggcaccccggtctacgcgcaagtacagcaaatgtttgcccagcgcttcgagcagacccaagcaccggcctcgaaaaagccgt

SEQ ID NO: 6472 - protein, 70 aa, Homo sapiens
MTRLRAICTAVALVCASGQVFADTASHNASAEAFLTLAHADKLGTPVYAQVQQMFAQRFEQTQAPASKKP

SEQ ID NO: 6473 - DNA, 326 bp, Homo sapiens
  misc_feature (1)..(1): Wherein n may be a, c, g or t
naggtggaaatggcattaaatatcttttctgacaatggcatgagtgtagaaataaataacaataggaattttagaaaattcataaatacatggaaattacacagcatgcccctgaacccccaatggagaaccagagaaattataaatcaaattttaaaatgtcttgagataaatttcgcctctgccacttactagttttgagacatgaggaattaatataatttctctgagttcactgtcatcatctgtaaaatgggtataacaatagcaccacattttatgttgctgtgaggcagaaatgaggtaattcatataaatgacttaag

SEQ ID NO: 6474 - protein, 64 aa, Homo sapiens
  misc_feature (1)..(1): Wherein Xaa may be any naturally occuring amino acid
XVEMALNIFSDNGMSVEINNNRNFRKFINTWKLHSMPLNPQWRTREIINQILKCLEINFASATY

SEQ ID NO: 6475 - DNA, 395 bp, Homo sapiens
  misc_feature (184)..(184): Wherein n may be a, c, g or t
  misc_feature (213)..(213): Wherein n may be a, c, g or t
  misc_feature (351)..(351): Wherein n may be a, c, g or t
  misc_feature (372)..(372): Wherein n may be a, c, g or t
accggtgatgctggcagatgccagtaccggggcgattcgcatcggcggcatctacaacatcaacgaggtcaacaacctcgtgccttccctgcccaaggtactgccggtctacctgacccagaaccaggacggcaacacggtcctcaattccataccgcgtatagcccccaagggctgagtctgncagccggcaacggcgagtttgctcgcgcncaagtgtccatttttgaaacacctccctcgcttgaatcgcccgcccggtgcgcattcatggctttgtcacgtgcagtgttacatcgctgagacacccttgaggcggggccgggcatgccccttgacggcgacactgtntcaaccctgaaacagcaccgncatcactttgcctcgttttatct

SEQ ID NO: 6476 - protein, 89 aa, Homo sapiens
  misc_feature (19)..(19): Wherein Xaa may be any naturally occuring amino acid
  misc_feature (29)..(29): Wherein Xaa may be any naturally occuring amino acid
MRTGRAIQAREVFQKWTLXREQTRRCRLXDSALGGYTRYGIEDRVAVLVLGQVDRQYLGQGRHEVVDLVDVVDAADANRPGTGICQHHR

SEQ ID NO: 6477 - DNA, 364 bp, Homo sapiens
  misc_feature (262)..(262): Wherein n may be a, c, g or t
  misc_feature (357)..(357): Wherein n may be a, c, g or t
ggtacctgtctccagtgcaggggttggggacccctgatagagaatgactccctctacaggtgtcacggctaaagacaggtctacagtggctgagaggaaaggggagtttagtaaggcaatctgctctgttttcttttagcctttcctttggaaagttattcttttaaatcaagagcctctgacttgaagagcgcttttagcatatgaaactgttgcttaagtttgatttcttggtgagagatataagattcctgaaatgtanattcactttcacagtgtctttgatcttatcaacattaatcttccaggttagtatacatttttgtgtcctgatgcttctattttgttgtctcccanacacaca

SEQ ID NO: 6478 - protein, 53 aa, Homo sapiens
  misc_feature (20)..(20): Wherein Xaa may be any naturally occuring amino acid
  misc_feature (52)..(52): Wherein Xaa may be any naturally occuring amino acid
MKLLLKFDFLVRDIRFLKCXFTFTVSLILSTLIFQVSIHFCVLMLLFCCLPXT

SEQ ID NO: 6479 - DNA, 348 bp, Homo sapiens
  misc_feature (1)..(1): Wherein n may be a, c, g or t
  misc_feature (2)..(2): Wherein n may be a, c, g or t
nnccggcgatgcagggattcgcccgcgatgcgctcgaacccggcgcggggggcgttcctcgccagcttcctgccgttcgccagacgcatcgccgaggcgggggtgcgcaattcgctcgcccagctggtcgccaagctgaccctgcccggcatgcccgacatctaccagggctgcgagatgtgggacctcagcctggtcgaccgggacaatcgccgccccgtcgactacgagacacgcgacgcggccctggccggctgggtcgcgaccccgccggaggaacgcgccgcggcgctgcgcaccctgctgacggattggcgcagcggcgcggtcaagctggccgtgacgcgt

SEQ ID NO: 6480 - protein, 116 aa, Homo sapiens
  misc_feature (1)..(1): Wherein Xaa may be any naturally occuring amino acid
XRRCRDSPAMRSNPARGAFLASFLPFARRIAEAGVRNSLAQLVAKLTLPGMPDIYQGCEMWDLSLVDRDNRRPVDYETRDAALAGWVATPPEERAAALRTLLTDWRSGAVKLAVTR

SEQ ID NO: 6481 - DNA, 306 bp, Homo sapiens
  misc_feature (1)..(1): Wherein n may be a, c, g or t
  misc_feature (2)..(2): Wherein n may be a, c, g or t
nnactagttttcgcatcgctggaagttctcgatattgaataccacttccaagaacgcaaacttagaatggtccggattcttcccataattttgagcgccctatcttcgaaattagtggcgagtacaatattgcattcatccatacactcagtgccatctggaggcgaaatcatatctgcagaagatcttaaagaacttgaaatttcagggaattcgatctgcgttgataatcgttgctatcctaagatatttgaaccaagacacgattggcagcccatactgccaggtcaagaactccccggtggt

SEQ ID NO: 6482 - protein, 80 aa, Homo sapiens
MVRILPIILSALSSKLVASTILHSSIHSVPSGGEIISAEDLKELEISGNSICVDNRCYPKIFEPRHDWQPILPGQELPGG

SEQ ID NO: 6483 - DNA, 252 bp, Homo sapiens
cctaggaaccctgagggtattttaaggtgcaggcacttggttcccacccacccagatccagtggatttggggctggacccaggcaactgcattttaacaagctccccagcagagagtgagagatgacgtggccactgaagatgcccctgctgcatgaaaacaagagagatgggctatgaccagtggctcacaagaattggtcttgggaatgcacaacaagcaaaaaacaaaccaagcgggtgtctcccatgg

SEQ ID NO: 6484 - protein, 51 aa, Homo sapiens [sequence omitted]

SEQ ID NO: 6485 - DNA, 255 bp, Homo sapiens
  misc_feature (1)..(1): Wherein n may be a, c, g or t
  misc_feature (2)..(2): Wherein n may be a, c, g or t
nntccggagcccgggtgcaacgattaatgtggtgagtctctcatgacgccgaggcgcgtctcactccgtgaagtggccaggctcgccggagtctccccgggcaccgcgtctcgcgtcttgagcgggtcggcgtatccggtgagcgagccgacaagtgctcgcttcagggaggcggcggaggctctcggctacttaaccgacttcgccgctcgcgcccttttcaccgggcgcagcgcgctcttcggacccttcgtc

SEQ ID NO: 6486 - protein, 71 aa, Homo sapiens
MTPRRVSLREVARLAGVSPGTASRVLSGSAYPVSEPTSARFREAAEALGYLTDFAARALFTGRSALFGPFV

SEQ ID NO: 6487 - DNA, 335 bp, Homo sapiens
tgtgacgaccatcactgtccacggcccctggcagacctgtctgggcgtttctcagtacttgacacccaggagtgaagagttgtaggccatttttctacctacaaagaagcccacgctactacccagaatgactgccctggtctgtattcctcaccagcaggccaccagggccccgcaggctgcagcccaccgccactcaacatcatccacctttaactgctgctcgtgtaagaagagtatcaagtcctatattgttatcgtttacaattctctgatgagttttgagcatttttgtttgtttgtttgttttagcttttaaggcttgtctataaact

SEQ ID NO: 6488 - protein, 63 aa, Homo sapiens
MTALVCIPHQQATRAPQAAAHRHSTSSTFNCCSCKKSIKSYIVIVYNSLMSFEHFCLFVCFSF

SEQ ID NO: 6489 - DNA, 295 bp, Homo sapiens
agtacttggtacaaattgattataaatgtgacttttcagtatttgatcagaacgggggataataagggagtcatgcagatgacactaaccagcatttcttctgctatctgcattctgtccctaagggatgtcatctggtgtcctggctttaaaaaacattcatttgctgacaactctctaatttatatctatggcgtgtattgctcccctgaacttcagatttgggtatctaactgcctaatagacatctcggcttagatttctaaatcttacaggttacaagtcccaaacaaat

SEQ ID NO: 6490 - protein, 61 aa, Homo sapiens [sequence omitted]

SEQ ID NO: 6491 - DNA, 171 bp, Homo sapiens
aagcttctgagactcctaagacatccagatattgttgagatcaaacatattatgttgcctccatcaagacgggaattcaaagatatttatgttgtttttgaacttatggagtctgatcttcaccaggttatcaaggctaatgatgacctgacaaaggaacattatcagttc

SEQ ID NO: 6492 - protein, 57 aa, Homo sapiens
KLLRLLRHPDIVEIKHIMLPPSRREFKDIYVVFELMESDLHQVIKANDDLTKEHYQF

SEQ ID NO: 6493 - DNA, 225 bp, Homo sapiens
tgatcactgatgatcaggcacagttggctggcatgggagctataatgcaagcccccaaaaggcacctgggcattctagatagcactgcaagcaggcatggccaggctgggtcccaggaaaggcaagcagacaggggtcgctcaagtcagactggccctgtctcatgggcaaaattgccctgctctgttcaagtacaacagttcctctaaggtaaagtttcctagg

SEQ ID NO: 6494 - protein, 58 aa, Homo sapiens
MGAIMQAPKRHLGILDSTASRHGQAGSQERQADRGRSSQTGPVSWAKLPCSVQVQQFL

SEQ ID NO: 6495 - DNA, 307 bp, Homo sapiens
tctagaatagattctcaccgtgagtatatagagcttcttccaactgaagactctgagaatcctcagaattgtccaaccaaataatgcagaagtggaggcattgatctattggggagtgtttgcctctgagggttgctttaggggagctatctactctgtatttcctggtcatgactgcccaggctggaccaagctccaatgaagctagcttctgtgaatacaagagctactcaagcctgagcaaactatacatcagcattccagaagctgagctatgcagttgaagtcatgtgggattaaaagatct

SEQ ID NO: 6496 - protein, 56 aa, Homo sapiens
MTRKYRVDSSPKATLRGKHSPIDQCLHFCIIWLDNSEDSQSLQLEEALYTHGENLF

SEQ ID NO: 6497 - DNA, 326 bp, Homo sapiens
gccggctaacaagagcagtgacacggcgagggtctcggtagctgccttcttcaaccccgacgagaagagaaccgagaggctgtatggccccattccagaccccagcaagcctccgctgtacaggagcgtcacgttcccggacttcatcgccaagttcaacagcatcggactggacggtcgcgtgctcgaccacttccggttggaggacgacggccctactccttctcctgctgctgctgcacaccacgtctagtcgtcttgttttcgttcgatcgaacaaacagttctcgtcgtcggcccttttatttttcctgcaatctgaattc

SEQ ID NO: 6498 - protein, 81 aa, Homo sapiens
MAPFQTPASLRCTGASRSRTSSPSSTASDWTVACSTTSGWRTTALLLLLLLLHTTSSRLVFVRSNKQFSSSALLFFLQSEF

SEQ ID NO: 6499 - DNA, 342 bp, Homo sapiens
  misc_feature (142)..(142): Wherein n may be a, c, g or t
gaattcacaaaggagataaagaggatcggcactatcaggcatccaaatatagttccatggagagccttctattggggccctaaggagcaagagaggttaattatttctgattatgtcagtggtgatagcttggcactctacnctaacgagtcgactccaagaagatactcccgcctgtcggtttcgcagcgtctcaggatcgccatcgacctagctcgctgcctccagttcctacaccacgagaagggcctgcctcacggcaacctgaagccgactaacatattcctgactggtcctgatctcactccaaagctggtggattacggcctgcacaggttcatg

SEQ ID NO: 6500 - protein, 114 aa, Homo sapiens
  misc_feature (48)..(48): Wherein Xaa may be any naturally occuring amino acid
EFTKEIKRIGTIRHPNIVPWRAFYWGPKEQERLIISDYVSGDSLALYXNESTPRRYSRLSVSQRLRIAIDLARCLQFLHHEKGLPHGNLKPTNIFLTGPDLTPKLVDYGLHRFM

SEQ ID NO: 6501 - DNA, 312 bp, Homo sapiens
  misc_feature (1)..(1): Wherein n may be a, c, g or t
  misc_feature (2)..(2): Wherein n may be a, c, g or t
nntaattaagcaccagcaaaatcaagtaaagcacctgaatcatattctgtttctgttgatggccagttatttacagtgcaggttggtcctgaaggaagcatcgatggcattacacctgtaaaagctaatgcacagcaagttgcaacaagtaccacttctactacacctatcgcaactgttgaaggtgaagacgttcctgctccattagcgggtaatatttttaaagtactggttaatgctaatgaacatgttgatgaaggtgatgttttagtgattatggaagcgatgaaaatggaaactgaaattcgtgca

SEQ ID NO: 6502 - protein, 101 aa, Homo sapiens
APAKSSKAPESYSVSVDGQLFTVQVGPEGSIDGITPVKANAQQVATSTTSTTPIATVEGEDVPAPLAGNIFKVLVNANEHVDEGDVLVIMEAMKMETEIRA

SEQ ID NO: 6503 - DNA, 339 bp, Homo sapiens
gtgcacctgctcaatgaccagcacttggtaagcacccttggctttggttctccccgctcccccaggtgacctttgggatggccgttgtgaagacaccatggtgcgccttctcgggatgcccaggagaggctgtcacaggggctgctgtggctgcgtgcctgagccacgggggccctttcctggggctggatgagtaagactccgcctctgctcatcctgtggccaggcattggctgaagccctcgggtagcacagaggctctgcagacacccccagctgagacacgtgtctcctggaaacacctatctagtatggggagctcctgcctggtgtcccggc

SEQ ID NO: 6504 - protein, 76 aa, Homo sapiens [sequence omitted]

SEQ ID NO: 6505 - DNA, 195 bp, Homo sapiens
gccggcgcgccggccgagttgatcctcaatgtgcgcaacgggaacaccatgccggcactggagccggacgcagtgctcgaagtgcccagccgggtcgatgcctcgggcgcccgggccctgccgctgctttcgacgccgtcgatgcaccaactcggcctgatcgcccagctcaaagccgtggaaaccgcagtcgtc

SEQ ID NO: 6506 - protein, 65 aa, Homo sapiens
AGAPAELILNVRNGNTMPALEPDAVLEVPSRVDASGARALPLLSTPSMHQLGLIAQLKAVETAVV

SEQ ID NO: 6507 - DNA, 171 bp, Homo sapiens
actagttataaacgaatttatggtgaataccctcccaccaaattactggtttctgaagtagccaaaataatgcaagaggctacacagtccggtggtgtcagaccctttggtgtttcactgttgattgctggccacgacgaatttaatgggtttagtttatatcaagtggat

SEQ ID NO: 6508 - protein, 57 aa, Homo sapiens
TSYKRIYGEYPPTKLLVSEVAKIMQEATQSGGVRPFGVSLLIAGHDEFNGFSLYQVD

SEQ ID NO: 6509 - DNA, 275 bp, Homo sapiens
gagctcacgcgggacacattctggccggcgctcaccaacatcatcgccggaatgaccgccgctgccacccgccccgacctcaccgcggtgggcaccatgtttcacctggctgacaaaccccactcccccaacctcaccgaattcgaacacaccatcgacaattgggacggcgcgcatggtcgaccgggggctacggctcgggctgctcgaccccaccattcccccacgcctccatgttgaccttgcctacgcggttgccaccaggctcgacgcgt

SEQ ID NO: 6510 - protein, 73 aa, Homo sapiens
MVGSSSPSRSPRSTMRAVPIVDGVFEFGEVGGVGFVSQVKHGAHRGEVGAGGSGGHSGDDVGERRPECVPREL

SEQ ID NO: 6511 - DNA, 257 bp, Homo sapiens
  misc_feature (1)..(1): Wherein n may be a, c, g or t
ngaattcgcgacatcgaaacacgatttaatattaaagctaactatgtagaactagactctcttgatcctacttatcgcttagttcctaataaagcgacaatcgcctttgatgcaggccgcaaaggcaaacttcgtcctggtgatattttgggtgcgctcacggcaggtattggcttagataaatcgcaagttggtaaaattgatatttttgacttccaagcttatgtttccgtagatgacaaagaagccaaacgcgt

SEQ ID NO: 6512 - protein, 85 aa, Homo sapiens
  misc_feature (1)..(1): Wherein Xaa may be any naturally occuring amino acid
XIRDIETRFNIKANYVELDSLDPTYRLVPNKATIAFDAGRKGKLRPGDILGALTAGIGLDKSQVGKIDIFDFQAYVSVDDKEAKR

SEQ ID NO: 6513 - DNA, 303 bp, Homo sapiens
  misc_feature (1)..(1): Wherein n may be a, c, g or t
nagggcgatctgctgctggcgcgcgacttggccgagcaggccaaccgtgccaagagcgcgttcctggccaccatgagccacgaaatccgcaccccgatgaatggtgtgctgggcctgctggagctgctggcgctgacgcgcttggagaccgagcagcaggaaacagtggaagccatccaggagtcggcacgcacgctgctgcggctgatcgacgatatcctggacttttccaagatcgaagccggcaagctggacatcatgccggaaacctcgtccattcccgacgtgctgcacaaggtgcac

SEQ ID NO: 6514 - protein, 101 aa, Homo sapiens
  misc_feature (1)..(1): Wherein Xaa may be any naturally occuring amino acid
XGDLLLARDLAEQANRAKSAFLATMSHEIRTPMNGVLGLLELLALTRLETEQQETVEAIQESARTLLRLIDDILDFSKIEAGKLDIMPETSSIPDVLHKVH

SEQ ID NO: 6515 - DNA, 378 bp, Homo sapiens
acgcgtcggcagaagcgtcagctgaccgtcggagccgatctgtccccaggcgtcgtcagcggaaccgcgcagaaggaaatccacgcgctgccgatcatgaaggcgctccccatgggcgtcaaagaactcgttctgggcgaatcgaagtggcaggacgagttgatcaacaacttcatcgtcgcgctgtttgcaggcgtggtgttgctgttcgcggtgctggtgctgctgtaccggcgcttgctgccgccgttcatcaacgtgatgtcgctggcggtggcaccgctgggcgggttgatcggcctgtggctgaccaacacgccgatctcgatgccggtctatatcggcttgatcatgctgctcggcatcgtcgccaagaat

SEQ ID NO: 6516 - protein, 126 aa, Homo sapiens
TRRQKRQLTVGADLSPGVVSGTAQKEIHALPIMKALPMGVKELVLGESKWQDELINNFIVALFAGVVLLFAVLVLLYRRLLPPFINVMSLAVAPLGGLIGLWLTNTPISMPVYIGLIMLLGIVAKN

SEQ ID NO: 6517 - DNA, 285 bp, Homo sapiens
cgcgcctactacaaggaggtccgcgagccggtggtggaggatcgcctgcgcatccgcttcgatttccgtcatgccggcaaccgcgagctgccgctggtgctggcccagctctacgtgctgcccaggcattggtggcagggacgcgacttcaaccgcagcagcatgcagccgccgctgggcagcggaccttaccggctggagaaggccgaggcggggcgttcggtgagctaccggcgcaaccccgactggtgggctcgcgacctgccggtcgggcgtggcctgtac

SEQ ID NO: 6518 - protein, 95 aa, Homo sapiens
RAYYKEVREPVVEDRLRIRFDFRHAGNRELPLVLAQLYVLPRHWWQGRDFNRSSMQPPLGSGPYRLEKAEAGRSVSYRRNPDWWARDLPVGRGLY

SEQ ID NO: 6519 - DNA, 267 bp, Homo sapiens
  misc_feature (1)..(1): Wherein n may be a, c, g or t
  misc_feature (2)..(2): Wherein n may be a, c, g or t
  misc_feature (25)..(25): Wherein n may be a, c, g or t
nntgggatgtgcgtggattatagancccttaatgaggtcacaatcaagaataagtaccctcttccccggattgacatcctatttgatcaacttaccggagcctgggtattttccaagattgacctcaggtcgggttatcatcagatccgtatcagacccgaagataaaccccaggccgccttcactacgtggtatggattatttgaatatctggttatgtctttcggactaacaaatgctcttgcccacttcacatatcttatcaat

SEQ ID NO: 6520 - protein, 89 aa, Homo sapiens
  misc_feature (1)..(1): Wherein Xaa may be any naturally occuring amino acid
  misc_feature (9)..(9): Wherein Xaa may be any naturally occuring amino acid
XGMCVDYRXLNEVTIKNKYPLPRIDILFDQLTGAWVFSKIDLRSGYHQIRIRPEDKPQAAFTTWYGLFEYLVMSFGLTNALAHFTYLIN

SEQ ID NO: 6521 - DNA, 331 bp, Homo sapiens
  misc_feature (1)..(1): Wherein n may be a, c, g or t
ngtccggactatccctttggaggcccggatttgcacgttcatgcttacgtctggatcatcaccatcctcgtgatgggggctctgctcttcttcgacgttctcgtcctggggcgaaacccccatatcccctccgccaaggagtgtgccaccttcgtcggcgtcttcgtcggcttggcggtactcttcggcttaggcgtctggatcctacagggccatgccgcagggggacagttcttcgcagtgtggttgaccgagtacagcttgtcgatcgacaacctgtttatcttcctcatcctcatggaaaagttcaacgtcccacggaaaattgcaa

SEQ ID NO: 6522 - protein, 100 aa, Homo sapiens
LHVHAYVWIITILVMGALLFFDVLVLGRNPHIPSAKECATFVGVFVGLAVLFGLGVWILQGHAAGGQFFAVWLTEYSLSIDNLFIFLILMEKFNVPRKIA

SEQ ID NO: 6523 - DNA, 307 bp, Homo sapiens
tcatgaacgtgtccccaagtaaatgttccatatgttaaatcctgactgcagtggaagcagcttgtcattaagtatgctacctgggaaatctccagtcaaacactccatacctgccattttatattctttgattggaaagccacacattaaatatggggtctcacctttaaaagcagccctttctaatgcagacattaagtgcttgtggtaaaaatggaaatacaaacaaacctctttcatgttggctgaatcatcatcgttcttattatcatcaatagcaataggaaaaatttatatctcaccagtg

SEQ ID NO: 6524 - protein, 79 aa, Homo sapiens [sequence omitted]

SEQ ID NO: 6525 - DNA, 351 bp, Homo sapiens
ccatggggactttgtaagcaacctgtaagggaagtacagactgtgagatttagaccccttttttttagttgccttttttttctctaataagatcgtggtggaggtaaaagaaactgttatttcacagtgactggaaatgtaatgaagtacttgatatctatgcatgaagtgttagagttgaatttttaaggagagagatagcatattccctccagtctataaattcctgattcagaacatgatctcaagagttgtactttacatttctcttcccaccaccaaacaataacaaaaagaagaaacaaatgaaaactatcagtgcccagtgggaattccagttggggcagatct

SEQ ID NO: 6526 - protein, 55 aa, Homo sapiens [sequence omitted]

SEQ ID NO: 6527 - DNA, 208 bp, Homo sapiens
  misc_feature (1)..(1): Wherein n may be a, c, g or t
nacgacagcttcgtgcgcacggcgaccggcatccgcttccacgacgacgtgcgcgggtccggccccgagccggtcaagggtcagaccgtggacgtgctctacaccggctggctgctgaccccgcagcacaccaagggcaagatgttcgaccactccaccaaccccgccaagccgttcagcttcacgctgggcgccgaccaggtgatca

SEQ ID NO: 6528 - protein, 69 aa, Homo sapiens
  misc_feature (1)..(1): Wherein Xaa may be any naturally occuring amino acid
XDSFVRTATGIRFHDDVRGSGPEPVKGQTVDVLYTGWLLTPQHTKGKMFDHSTNPAKPFSFTLGADQVI

SEQ ID NO: 6529 - DNA, 514 bp, Homo sapiens
  misc_feature (1)..(1): Wherein n may be a, c, g or t
  misc_feature (166)..(166): Wherein n may be a, c, g or t
  misc_feature (167)..(167): Wherein n may be a, c, g or t
ngaattcgggggagtcgaactggcccacgaccaccagcacacggcaggtggggtccaccggctgtgcctgggccaccttcagctgggggctattcctctgagcgtcctccagggtcagctggagagcaacgttctgtgaagtatacacgatgggctccaggtcaannagaccccactcaccaggaaaaagccggtgaaggtacagaattgtcacagggccaggctccaggcggagcaaggcagggccagccaccccctccgcctgaggggcaggaccaggggaaggggcacagaggaggcagagaaggccttgctcagagggctcgaagccctgcgggtcagccactcatggccgggaggatttcaagcagttggcccacaccccaaggctcatggggagaataaagttggccagccaggctgtagctcccatgggaacctctgaggttggcgtgacccctgctggttcatcggccaggacatcatggcgccagtggggctcggaaaagggtgg

SEQ ID NO: 6530 - protein, 134 aa, Homo sapiens
  misc_feature (1)..(1): Wherein Xaa may be any naturally occuring amino acid
  misc_feature (56)..(56): Wherein Xaa may be any naturally occuring amino acid
XIRGSRTGPRPPAHGRWGPPAVPGPPSAGGYSSERPPGSAGEQRSVKYTRWAPGQXDPTHQEKAGEGTELSQGQAPGGARQGQPPPPPEGQDQGKGHRGGREGLAQRARSPAGQPLMAGRISSSWPTPQGSWGE

SEQ ID NO: 6531 - DNA, 471 bp, Homo sapiens
ctagccgatgtaggattagtaggttttccgagcgtgggtaaatctaccttactctcaatagtatctaaagccaaaccgaaaattggtgcatatcatttcactacaattaaacctaacttaggtgttgtttccacaaaagatcaacgtagttttgttatggcagatttaccaggtttaattgaaggtgcatctgatggcgttggattaggacatcaatttttaagacatgtagagagaacaaaagttattgttcacatgattgatatgagcggttctgaaggtagagaacctattgaagattataaagtcattaatcaagaattagctgcgtacgagcaacgtttagaagatagacctcaaatcgtagtagctaacaagatggatttacctgaatcacaagataatttaaacttgtttaaagaagaaattggcgaagatgtgccagttattccagtttcaacaataacgcgt

SEQ ID NO: 6532 - protein, 157 aa, Homo sapiens
LADVGLVGFPSVGKSTLLSIVSKAKPKIGAYHFTTIKPNLGVVSTKDQRSFVMADLPGLIEGASDGVGLGHQFLRHVERTKVIVHMIDMSGSEGREPIEDYKVINQELAAYEQRLEDRPQIVVANKMDLPESQDNLNLFKEEIGEDVPVIPVSTITR

SEQ ID NO: 6533 - DNA, 392 bp, Homo sapiens
agatcttgctcaggttctgtggtatttatgtaaagcacaattttgttacttgggaatgcatgttgaaattatcatgtgcactattttgctgtaggcccgttggcactgccacaaaggtaacacactgctagtaggccatttccttgtcgactgcatttacaatttaatagaaatattacatgactttttaaacaagtgttttggcagggaggaaatggcagattccatacaaacaagcatagcttcctttcctaaaccacactccagctactcaagaaattgtagttggtttcaagtttgggagtttaggggtagaatgggaagtcaggttgaaacaggaatgacattgatatttactgtaaaatagttatatatttttagctgctgaattc

SEQ ID NO: 6534 - protein, 50 aa, Homo sapiens [sequence omitted]

SEQ ID NO: 6535 - DNA, 392 bp, Homo sapiens
  misc_feature (340)..(340): Wherein n may be a, c, g or t
  misc_feature (352)..(352): Wherein n may be a, c, g or t
ggtaactggaagtcattcatggcgctctttttcaaaccgcttgcttacactaacagaaacaacaaccatgcttctttcgatctgagatcaaaagacaacgtagccaaactttacgaaaaaatgaattttgatacttcaggcaaatggatcgacacgtacaccttgaagaataatcttctcactgtgaaaatggggcccaaaaaaggccaggttctggattcgggaaatgaattgagatattacgataacgacccaaggctggtatggtcagttttactagatcacttattagaatcagattccaatgaatacgcattttcgtggtacgattgggctaatnttgactctacanacaaactcatgcactgaacacacgacatatctcgccagtc

SEQ ID NO: 6536 - protein, 122 aa, Homo sapiens
  misc_feature (114)..(114): Wherein Xaa may be any naturally occuring amino acid
  misc_feature (118)..(118): Wherein Xaa may be any naturally occuring amino acid
GNWKSFMALFFKPLAYTNRNNNHASFDLRSKDNVAKLYEKMNFDTSGKWIDTYTLKNNLLTVKMGPKKGQVLDSGNELRYYDNDPRLVWSVLLDHLLESDSNEYAFSWYDWANXDSTXKLMH

SEQ ID NO: 6537 - DNA, 516 bp, Homo sapiens
cgcgtcgcttacggtgcgctgaataccagcctgctggcgctggcggtcagcttcgcgtcgctgttcctcgggatagtgttcgggctgatgccacgtctgatgtgcggggtgattgaactggccaacgctcccccgccaatcgccctgggcctgttagtagtcgccattagcggcccttcagcctacggtgccgcctgtgcggtgatgttggtcagttgggctccgctggccgcccattgtgcttcgttgttggcggaagcccgcacgcagccctatatccgcatgttgccggtattgggcgtcggccgatggcgcacgctgacccactacctgctgccggcgctctctgctcccctgctgcgccacgccatgttgcgtctgccgggcattgcgctggcgctggcggccttgggtttttttggtcttgggccgcagccacccagtgcagaatgggggctggtgctggcggaaggcatgccttatctcgaacgggcgccctggggagtcctggcaccg

SEQ ID NO: 6538 - protein, 172 aa, Homo sapiens
RVAYGALNTSLLALAVSFASLFLGIVFGLMPRLMCGVIELANAPPPIALGLLVVAISGPSAYGAACAVMLVSWAPLAAHCASLLAEARTQPYIRMLPVLGVGRWRTLTHYLLPALSAPLLRHAMLRLPGIALALAALGFFGLGPQPPSAEWGLVLAEGMPYLERAPWGVLAP

SEQ ID NO: 6539 - DNA, 302 bp, Homo sapiens
acgcgtttagagattggctgatcgaccagtcacagcgctataaccccagcatttaaagggcaaggtcattttattgaccttgtagtcaaataaattaagcgcctacagatgtaactatatgtcgtgttttggaagactgtacctctcagcgtaaaaatgagcttagcgccatgactgacaaggcttgtagcgactatcagctgccaatgcccgaccattcacggcaaagataggaaaaccggctacaaccctctaaaaccctttaaacacctgtatttaaagaagttattttgccatgttgc

SEQ ID NO: 6540 - protein, 50 aa, Homo sapiens
MVGHWQLIVATSLVSHGAKLIFTLRGTVFQNTTYSYICRRLIYLTTRSIK

SEQ ID NO: 6541 - DNA, 369 bp, Homo sapiens
  misc_feature (1)..(1): Wherein n may be a, c, g or t
ntctagattctcgcagtaggatgagataaatttcaaagaagcaggaagcaaaggatgtttagtagaatttgtagcgctcaattaaagaggacggcatggacccttcctaagcaggctcacttgcaatcacagacgattaaaacatttgccacagcacctattctgtgcaaacaattcaaacaaagtgatcaaccaagactaagaataaactctgatgctcctaactttgatgctgacacaacggttggtaaaatcaatttttacgactacttgggcgactcttggggggtcttgttttctcacccagcagatttcacccctgtctgcaccaccgaagtcagcgcattcgccaaattgaagccggaattc

SEQ ID NO: 6542 - protein, 105 aa, Homo sapiens
MFSRICSAQLKRTAWTLPKQAHLQSQTIKTFATAPILCKQFKQSDQPRLRINSDAPNFDADTTVGKINFYDYLGDSWGVLFSHPADFTPVCTTEVSAFAKLKPEF

SEQ ID NO: 6543 - DNA, 349 bp, Homo sapiens
  misc_feature (271)..(271): Wherein n may be a, c, g or t
gcgtctacaatggctggtagtgccttcgccaatgccttccttggtatgaaccactcaatggcccacaagattggtggtgttcaccacactgttcacggacgtacaaatgctatcttgcttccatatgttatccgttacaacggaactcgtccatctaagacaactacatggcctaagtacaactattggaaagctgatgagaaattccaagacatcgcgaaaatgcttggcttgcctcactcaactccagaagaagcagttgaagcatacnctaaagctgtttacgaactcggtgttgcagtaggtattaagatgaacttcaaggatcaaggaattgatgaaaaagctt

SEQ ID NO: 6544 - protein, 116 aa, Homo sapiens
  misc_feature (91)..(91): Wherein Xaa may be any naturally occuring amino acid
ASTMAGSAFANAFLGMNHSMAHKIGGVHHTVHGRTNAILLPYVIRYNGTRPSKTTTWPKYNYWKADEKFQDIAKMLGLPHSTPEEAVEAYXKAVYELGVAVGIKMNFKDQGIDEKA

SEQ ID NO: 6545 - DNA, 318 bp, Homo sapiens
gggccctcaataccgttgtttggggtttgcatgggtttacagtgcattggagaggcatttggagggaaggttgttcgatccccttacggcgttgtgcacggaaagggctcccttgttcattatgatgagaaacttgatggaactctgttttatgatattcctaacccattccaggctggaaggtatcacagccttgtaatcgagaaggatagtttcccgcatgataccctggaaattgttgcgtggacagatgatgggttgatcatggctgctcgccacaggatatacaaacatattcagggcgtgcagttccatccg

SEQ ID NO: 6546 - protein, 106 aa, Homo sapiens
GPSIPLFGVCMGLQCIGEAFGGKVVRSPYGVVHGKGSLVHYDEKLDGTLFYDIPNPFQAGRYHSLVIEKDSFPHDTLEIVAWTDDGLIMAARHRIYKHIQGVQFHP

SEQ ID NO: 6547 - DNA, 204 bp, Homo sapiens
  misc_feature (204)..(204): Wherein n may be a, c, g or t
acgcgtgggcttagtcgtgatgattacgacgtggtcatcgcaattggtggcgacggcaccgtcaacgaggtggtcaacggtctgttgggcaaggtcggcgatgggcgtcgtaaagcctctgaggttccggccctggctgtgattcctacgggctcggccaacgtatttgtgcgtgcgctgggctacccactggaccccgcgcan

SEQ ID NO: 6548 - protein, 68 aa, Homo sapiens
  misc_feature (68)..(68): Wherein Xaa may be any naturally occuring amino acid
TRGLSRDDYDVVIAIGGDGTVNEVVNGLLGKVGDGRRKASEVPALAVIPTGSANVFVRALGYPLDPAX

SEQ ID NO: 6549 - DNA, 576 bp, Homo sapiens
accggtgggtaccctcatttcccctgggcaattttactgtaaaaatagaccaaggatctcaaggcccagtggcttttgccttctgggatacttttttacctccctgtttagtagtaagggtcacattttaaattgcagctatcacactggagggatcagatcatttagaactttgactgcttaaatattactcttgctaagatcttgagcttgtctcatgttgacagactagtgaagttggttacgttgtctgtctcctcactggagggagagattcagagttgccctgtccaacccagtgctatctctggaaagggttggattgaaatctagtctgccttcattctgaggtataatcatgagggttaggtgaaagggtcccgagtgagaagatggcatgggtcctagggtggggagcccgatgccaagtcagacttcactcggtatgtttattcaaagccccactttcactcgtagcatatcataggtggtctctgcaagttgctgaccctgattcagactgttccataaaagtcagacacttggttttagttcccaaactgattttgatgacat

SEQ ID NO: 6550 - protein, 61 aa, Homo sapiens
MAWVLGWGARCQVRLHSVCLFKAPLSLVAYHRWSLQVADPDSDCSIKVRHLVLVPKLILMT

SEQ ID NO: 6551 - DNA, 308 bp, Homo sapiens
  misc_feature (1)..(1): Wherein n may be a, c, g or t
  misc_feature (2)..(2): Wherein n may be a, c, g or t
nngcgcgcccacctcctcgacctccagctcgaagggatccgcgaggcccccgtcggcatcgttgtcgcatgtgaccgtcgagtaccggcctcaggggtactgggacgcaacacgttcaccgacgccgacatgtggagttgcgcctgcgccatcgagaatatgtggctcactgcccgagctcacggcctggggatggggtgggtgaccctcttccagcccgaagaactggccgagctacttcaccttccgaacgacgttgagaccctgggttggctatgcctagggtggcccgacgaacgtccgccggc

SEQ ID NO: 6552 - protein, 102 aa, Homo sapiens
  misc_feature (1)..(1): Wherein Xaa may be any naturally occuring amino acid
XRAHLLDLQLEGIREAPVGIVVACDRRVPASGVLGRNTFTDADMWSCACAIENMWLTARAHGLGMGWVTLFQPEELAELLHLPNDVETLGWLCLGWPDERPP

SEQ ID NO: 6553 - DNA, 333 bp, Homo sapiens
acgcgtaaggcgcgtcgccagggtgatggttcatcaccccactgtgccgtggtggatgaatatcacgagcacgccacagatgcgctttacaccacgatgcttaccgggatgggggcgcgacgccagccactgatgtgggccattaccaccgccgggtacaacattgaggggccgtgctacgacaaacggcgggaagtcatcgagatgctcaacggctcggtgccaaacgatgaactgttcgggatcatctataccgttgatgaaggtgacgactggaccgacccgcaggtgctggaaaaagccaatccaaatattggcgtgtcggtttatcgc

SEQ ID NO: 6554 - protein, 111 aa, Homo sapiens
TRKARRQGDGSSPHCAVVDEYHEHATDALYTTMLTGMGARRQPLMWAITTAGYNIEGPCYDKRREVIEMLNGSVPNDELFGIIYTVDEGDDWTDPQVLEKANPNIGVSVYR

SEQ ID NO: 6555 - DNA, 325 bp, Homo sapiens
  misc_feature (1)..(1): Wherein n may be a, c, g or t
  misc_feature (325)..(325): Wherein n may be a, c, g or t
ngggtgggacccctgtgcggcgaggatgcaggctcatgccccagacatgacatcacattaccactctgcccgctcagaatcactgacttaggaggccaaaaacgattaagcgagtcaatggctaaggtcacagacagccatagagaaaagggcctcgggaaaacagcatctacaaatcccatatggatcactgcggctgattttattagaatactgaaacacataaagtaatctgcagggatatttaaccacattccactctagactactcaaacttatgtactttcagtcccataattaaatatgaaacaaaactgaattgagn

SEQ ID NO: 6556 - protein, 84 aa, Homo sapiens
MWLNIPADYFMCFSILIKSAAVIHMGFVDAVFPRPFSLWLSVTLAIDSLNRFWPPKSVILSGQSGNVMSCLGHEPASSPHRGPT

SEQ ID NO: 6557 - DNA, 359 bp, Homo sapiens
gcgttcctcggcgacttcgatctgtacttcgccaaactcttcgacggcctgcgccacgactccggcgacccggtgcagtgggcagaaaaagccatcacccactatcacaagctgggcatcgagccgatgagcaagaccctggtgttttccgacagcctatcgctgcccaaggccctggagattttccgcgcattgcggggtcgcattaatgtgagcttcggtatcggcaccaacctgacctgtgacattccgggggtggagcccatgagcattgtgcttaaaatgaccgcctgcaatggccaaccggtcgcgaagatttccgatgaaccgggcaagacccaatgcaccgacccgaattc

SEQ ID NO: 6558 - protein, 119 aa, Homo sapiens
AFLGDFDLYFAKLFDGLRHDSGDPVQWAEKAITHYHKLGIEPMSKTLVFSDSLSLPKALEIFRALRGRINVSFGIGTNLTCDIPGVEPMSIVLKMTACNGQPVAKISDEPGKTQCTDPN

SEQ ID NO: 6559 - DNA, 368 bp, Homo sapiens
  misc_feature (1)..(1): Wherein n may be a, c, g or t
  misc_feature (368)..(368): Wherein n may be a, c, g or t
nggcaataacgccgtcgtcgaaatccgttcccttgatctcgaacatgccgatgaagcggttgtcggtgatggggtcggagatgtcgccctcccacaacttgaacttgatcggaccaaccctttccaccctggagagactcgcctgccttgaaagtcttcttgcccttcttgggcaactgatcgccctcccgaacgagataatccaagctcaagcgaccgcccaccttgtcgcgcgcctccacaccgacggaatgcgatgccgggatcgcatcgatgctagcggcggtgcgtgcaatgacaatcttgtcttcacgcagcgatacgggcccgccgttggaatcgaacacaaacaccttgaaggcgttgtn

SEQ ID NO: 6560 - protein, 108 aa, Homo sapiens
MPMKRLSVMGSEMSPSHNLNLIGPTLSTLERLACLESLLALLGQLIALPNEIIQAQATAHLVARLHTDGMRCRDRIDASGGACNDNLVFTQRYGPAVGIEHKHLEGVV

SEQ ID NO: 6561 - DNA, 222 bp, Homo sapiens
  misc_feature (222)..(222): Wherein n may be a, c, g or t
gaattcgcaactaacatccacggatccatcatgtccacgaagtttgcggcgtccgggtccaaccatccgtcgcccctgcagagagtgcagcaggaattgcaatccgaagtctccgccggcacgattgcatcgtcggaccagtcggcgctctcgacggcactgaccggcatcgacacggcgctgcagcaaggccggtcgagcgaccagtcgagcggcaccgcn

SEQ ID NO: 6562 - protein, 64 aa, Homo sapiens
MSTKFAASGSNHPSPLQRVQQELQSEVSAGTIASSDQSALSTALTGIDTALQQGRSSDQSSGTA

SEQ ID NO: 6563 - DNA, 201 bp, Homo sapiens
gtcgacaagagcgatctgaaggaggcttggcagtcccacgtggaagacctgacggagttgaacgggaccaccaaatgggaagctttacaagaagacactgttcagcaaggaaccaagttcaccggactcgttatggaagtagcaaataagtggggaaaaccagatctggcacagaccgttgtcatcggcgtagcgttgatc

SEQ ID NO: 6564 - protein, 67 aa, Homo sapiens
VDKSDLKEAWQSHVEDLTELNGTTKWEALQEDTVQQGTKFTGLVMEVANKWGKPDLAQTVVIGVALI

SEQ ID NO: 6565 - DNA, 314 bp, Homo sapiens
gggccccggctctgcttgtgtagctcagattgtcttgttgcatcatcttgctgcctcacctccctgctaaaatgtcagctcctcaagagtggggacccagtagttcccacctgctgtctgctgctcctttctcatgccaaacacagctggtgcttaacgtgtatctgcgacacacgggagacagatgcgggcagacataccccttccttggggctcgcacatgtgcagggaaagcagttgccacacgttggccacgttgcatggttgtccattggtgattcagttgttgctgggagacctgccccttcacgcgt

SEQ ID NO: 6566 - protein, 68 aa, Homo sapiens
MSAPQEWGPSSSHLLSAAPFSCQTQLVLNVYLRHTGDRCGQTYPFLGARTCAGKAVATRWPRCMVVHW

SEQ ID NO: 6567 - DNA, 447 bp, Homo sapiens
gctagctgctctcatgaaggccattgttataggatggattcacccatgacttggtggcttgggctatgggtacacatccccctctctatcaacaattgatggtgtcataacccttcctttgtcataagagaggaccaagtaagggggtcactggctcaggaaagagccataagtaacgtgaaacgtgtgctctgtggtcaaggagggtgtcatatttaaactccattgctgatggtgcccaaacttctaaatgagcccctgaatcccctgagtttagggttgctcaagacagaaggcctcagcctttgttctttgcctgtccctgtcatgaggagcaacacaaaatgctggagaacttccctactgccccattccacaggcctcagagggagagtcccacctgccaataagtttaccaggctcgactaaggccatggcatgtgatca

SEQ ID NO: 6568 - protein, 65 aa, Homo sapiens
MVPKLLNEPLNPLSLGLLKTEGLSLCSLPVPVMRSNTKCWRTSLLPHSTGLRGRVPPANKFTRLD

SEQ ID NO: 6569 - DNA, 189 bp, Homo sapiens
attcttcatcctttcacatctgcaaaaaattctggtccagaggccatttttacatgttctcaacaatacccctggaacttcaaagctgccaatgatttggcgtgtctaacgttcggtatatcaaagaatgttatcaaggcacttactttactagaccttattcatacggatagcagaaattttgttcta

SEQ ID NO: 6570 - protein, 63 aa, Homo sapiens
ILHPFTSAKNSGPEAIFTCSQQYPWNFKAANDLACLTFGISKNVIKALTLLDLIHTDSRNFVL

SEQ ID NO: 6571 - DNA, 375 bp, Homo sapiens
  misc_feature (1)..(1): Wherein n may be a, c, g or t
ngagctcaatgtgctcgcacaagaattgatgatggaaattggccagaattcttcgtgactgcaaccagcttcggcagaaagtcctatcctcctaatgaaggtcagcctgcccgttcatggtggcctaatgatcaggtgggacacaatcgcgaagctaagtcagaaataaaggctctcttttccggtgcgacgcctttctctacccccaagcctgaacgtctcctcgaacgcatcattcatatcgggtcgaacccgggcgacattgtgctggatgtgttcgctgggtcggggacgacggcagccgtcgcgcagaagatggggcggcgttgggtgacgtgcgaattgctggagtcgacgttcacaacgtttacgcgt

SEQ ID NO: 6572 - protein, 125 aa, Homo sapiens
  misc_feature (1)..(1): Wherein Xaa may be any naturally occuring amino acid
XAQCARTRIDDGNWPEFFVTATSFGRKSYPPNEGQPARSWWPNDQVGHNREAKSEIKALFSGATPFSTPKPERLLERIIHIGSNPGDIVLDVFAGSGTTAAVAQKMGRRWVTCELLESTFTTFTR

SEQ ID NO: 6573 - DNA, 237 bp, Homo sapiens
  misc_feature (1)..(1): Wherein n may be a, c, g or t
  misc_feature (2)..(2): Wherein n may be a, c, g or t
nngaattcattgaagttatatcatcggtattcatatattattgacttaacagccatgtctcctatgaaagttgcggttgtcggtgccagtggtaaagttggacgtttattgataaaccaattgaaggccaacgatagtttctcaacaccattagcgattgttagaacacaggatcaagtcaattatttcaagaatgaagtgggtgttgatgctagtttgacagatatagaaaacgcg

SEQ ID NO: 6574 - protein, 61 aa, Homo sapiens
MSPMKVAVVGASGKVGRLLINQLKANDSFSTPLAIVRTQDQVNYFKNEVGVDASLTDIENA

SEQ ID NO: 6575 - DNA, 222 bp, Homo sapiens
gcacagttttcacctgtagcaatcagtggattttgtgcagccgtgacgacaggtttccttctaagccatacacccccaagcacagttatgctttttgcgatgacagctttcacagtcggaactatattgattgctacggcccccgttcaccaaacgtattgggctcaaacgtttgtgtcaatcattgttatgccttggggaatggacatgtcctttccggcc

SEQ ID NO: 6576 - protein, 74 aa, Homo sapiens
AQFSPVAISGFCAAVTTGFLLSHTPPSTVMLFAMTAFTVGTILIATAPVHQTYWAQTFVSIIVMPWGMDMSFPA

SEQ ID NO: 6577 - DNA, 230 bp, Homo sapiens
  misc_feature (55)..(55): Wherein n may be a, c, g or t
  misc_feature (79)..(79): Wherein n may be a, c, g or t
gcagattggcatgcagagacaacatatgctggacaccacacacatgaacatcatngtattacatatcacacacatcacnatactgcacacactatacacactacacatacacaccacacatatatatcacacacacatttataccaccacgcagcacacatactacaagcacatgcataccacatattacataccacacacaccaaacacaccacacaccatatgtgcac

SEQ ID NO: 6578 - protein, 76 aa, Homo sapiens
  misc_feature (19)..(19): Wherein Xaa may be any naturally occuring amino acid
  misc_feature (27)..(27): Wherein Xaa may be any naturally occuring amino acid
ADWHAETTYAGHHTHEHHXITYHTHHXTAHTIHTTHTHHTYISHTHLYHHAAHILQAHAYHILHTTHTKHTTHHMC

SEQ ID NO: 6579 - DNA, 187 bp, Homo sapiens
tccggacattgccatcaaagaggaacatctgtcatgacgtgtaccccgcttattgacaagctgttagatcggcgacttgccgatccggtgcgttttgccgatcgcgtccgacagcgtccccgagcgacgtggagccccactgaaccgctgatggtcgtcgcggctgatcatcctgctcgcggtgcac

SEQ ID NO: 6580 - protein, 51 aa, Homo sapiens
MTCTPLIDKLLDRRLADPVRFADRVRQRPRATWSPTEPLMVVAADHPARGA

SEQ ID NO: 6581 - DNA, 379 bp, Homo sapiens
accaggcatcagtgacgtcgcttacaaagagtcagaagcgccaactctgccatccaaagattccgtgtggttagttgattccccatcttcacagcctgagcgttcgtcgataccgacgcccctttgtcacagacgcagcagcctcagggatacacgcctgtgcttgcgagccatggtttgcaaactccatcgcgaagatcgtcaccgacaacggtaactgcaccacaagtgccgtctcaccacgccacagatgccgggcctgggcatcccatcgcgcgaacaatgtcagatcgcacaatcccccaacatgcgccaaagatgccgtctcatatctcgacaaacgatgtgctagcgaccccacctaggccgacacacgcgt

SEQ ID NO: 6582 - protein, 93 aa, Homo sapiens
AFVDTDAPLSQTQQPQGYTPVLASHGLQTPSRRSSPTTVTAPQVPSHHATDAGPGHPIARTMSDRTIPQHAPKMPSHISTNDVLATPPRPTHA

SEQ ID NO: 6583 - DNA, 507 bp, Homo sapiens
  misc_feature (1)..(1): Wherein n may be a, c, g or t
  misc_feature (2)..(2): Wherein n may be a, c, g or t
nnacgcgttccaggcccggtacgtggtggccacggcgcctgatatcccgagaacggccagggcgtccaggtcgccgggattgagctcggcagcgcgagggtccgcatggtctacgagcccgagtacccgctcgccgtagccgagggctacgtgaagtaccccgacatcgacatgtcgagccagatgacccagatgatcatggcgcagcggggctaccaggccaacgccgccgtggtcgaccgcgcgaaggccacctacgaggccgcactccagatcggacggaactgatgagcatccctgcactcgagagcgtgagcgccctgagctcgctcgggacggtcgccccgaccggctacatcgaccccaccgagggcggggggaggcaccagcgcctccggcgcgttcggcaacatcctaaccgacgcggtcaccaacctccagggcctccagcagacgtccacacgacttgcggtgaaggctgtcaccggtgacctcgacgacgtgcac

SEQ ID NO: 6584 - protein, 81 aa, Homo sapiens
YPENGQGVQVAGIELGSARVRMVYEPEYPLAVAEGYVKYPDIDMSSQMTQMIMAQRGYQANAAVVDRAKATYEAALQIGRN

SEQ ID NO: 6585 - DNA, 303 bp, Homo sapiens
  misc_feature (75)..(75): Wherein n may be a, c, g or t
  misc_feature (303)..(303): Wherein n may be a, c, g or t
cggttccgaatcatccacgagacggcggtgggcatgaacttcctgcactgcatggccccgccactcctgcacctngacctcaagcccgcgaacatcctgctggatgcccactaccacgtcaaggtggggggccgcaaggtgcccgagagagctgggcagggagggcctgtgtcttggggagcagggtatcaaggggtcaagccctgaggtcaggacaagggcagaagaggaggtggttcttcttggaggaaagagcttgaaaccgaggccttttgcagcatgaggactccaggagccctagcn

SEQ ID NO: 6586 - protein, 68 aa, Homo sapiens
RFRIIHETAVGMNFLHCMAPPLLHLDLKPANILLDAHYHVKVGGRKVPERAGQGGPVSWGAGYQGVKP

SEQ ID NO: 6587 - DNA, 367 bp, Homo sapiens
ggatccaaactactggtggtgtgacttaagcttgtgttaacatgagggcatctatgaaacacctttatgaactgactcaaccagctacatggtctctctctctctctctctctttcttgaactggagaggagagttcccactttctgaggaaacccaatgctccgagtcacacccccagccccccagaaacctctgttttaatgccagtgttgccactttatggacagatcaccccagtccatctctgggcctgtttcctcaccagttctgtctgatgtaaaggtcagctacagtcctgcctgcgaagggctcaggactatagttgacatacagcatgctaaaagtgaactgtgagtgcacacgcgt

SEQ ID NO: 6588 - protein, 79 aa, Homo sapiens
MRASMKHLYELTQPATWSLSLSLSFLNWRGEFPLSEETQCSESHPQPPRNLCFNASVATLWTDHPSPSLGLFPHQFCLM

SEQ ID NO: 6589 - DNA, 404 bp, Homo sapiens
agatctgagcaggttcttcagcgagtgaaggggtgtgttggggagatgggtatgtggcagtgatgaagaagagtaggaagtggtatggctggatggtgtggaactcagagagtgggagctcttacacaaaggtagaggagagatgatctggaagtctcaccagagagtgagaaggatggctacccacaacccagtcctgagttatgagggtatgggagaatgtgcagctataagggctctagcacaatgctgcttagattttctgtggcaaagaaccaaggcacttttaaaatttccaatctataatgggccgatccttttatgatataaaaaaagaattactagaaaaaaatggtatgaaccggccgggcgcagtggctcatgcctgtggtcccagcactgtg

SEQ ID NO: 6590 - protein, 60 aa, Homo sapiens [sequence omitted]

SEQ ID NO: 6591 - DNA, 354 bp, Homo sapiens
  misc_feature (1)..(1): Wherein n may be a, c, g or t
nggggccggggcgggggggtataaccccctaatttttacaccctttggggggccaaggagggcagttaacggaggttaggggtttagagccctcccgggttaccgggaaacccctttttttttaaaaaaacaaaaaaaaaaccgggggttgggggcggggcccaaattcccctttttttgggggggggggggggggaagggggggaccccggggggggggggttccaaggggccccgtttggcccctcgccactttcccgcccgcaggggagagacaaagagggagaggatccctcttttgggagaaaaaaaaaaaaaaaaaaaaaacaactgtcacccctgcggctgtgatca

SEQ ID NO: 6592 - protein, 87 aa, Homo sapiens
SPPGLPGNPFFFKKTKKKPGVGGGAQIPLFLGGGGGEGGDPGGGGFQGAPFGPSPLSRPQGRDKEGEDPSFGRKKKKKKKQLSPLRL

SEQ ID NO: 6593 - DNA, 310 bp, Homo sapiens
gcttgagtccctgctttcaattcttttgggtatatacccagaagcgaaattgttgatcatatggtaatttgtgtttaatttttttaggacctgcagtactgtttttccacagcatgtatatgtttttatgtgaacatgttttcagttcttctgggtttatatgtaggagtggaattgcttggtcatatggcatatgctgaaagtttctgaggaactacctgttttccaccatgacttcaccattttacatttctatcaccatcttttaaaaattatatccaacaaggagtgaattaaacacattttcaaa

SEQ ID NO: 6594 - protein, 58 aa, Homo sapiens
MPYDQAIPLLHINPEELKTCSHKNIYMLWKNSTAGPKKIKHKLPYDQQFRFWVYTQKN

SEQ ID NO: 6595 - DNA, 511 bp, Homo sapiens
  misc_feature (1)..(1): Wherein n may be a, c, g or t
ngccggcgtctacccgcaagcctccccgggcggctggcagattattggcaccactgacgcaatcttgtgggatgagaaggctgacccgccagctctactactcccgggagccgtcatcagattcgaggtggtggactcatgacccacttcgtagtggagacagccgggccgagaaccctcattgaggacgctggccgtcgaggctgggcggatctaggaatcagtggctgcggagcatgggatcgccgggcctatctggacggtgctcggctcgtcggtaatggtgctggattggggtgtctggagattctgctcggaccggtgcggctgagatgtgtcgggggtcctgtcctcgttgcggtgacaggggcggatgcccaaatcgatttggatggagcgccgcgccctagtggctggggatttctcgttacagatggtcagacggtgagcatcgccatgccagcaaccggtttgcggagctacttttctgtgaccggagggattaacgcgt

SEQ ID NO: 6596 - protein, 124 aa, Homo sapiens
MTHFVVETAGPRTLIEDAGRRGWADLGISGCGAWDRRAYLDGARLVGNGAGLGCLEILLGPVRLRCVGGPVLVAVTGADAQIDLDGAPRPSGWGFLVTDGQTVSIAMPATGLRSYFSVTGGINA

SEQ ID NO: 6597 - DNA, 433 bp, Homo sapiens
  misc_feature (424)..(424): Wherein n may be a, c, g or t
cctagggtctaccctacatccagcttcccccatgttaccatcttatacaaccttaacacagtgatcaaaacaggaaattcacacaacccagtacgattaactcaatgacagacattaatcacatttcaccagtttttctgcggatgtcctttttttcttccaagagtctattcttgatcccacattgcatttggttttcttgtctccttaacctcctccgatctggaacaattcctccgtctttcctagcctttcatgacccagacactttggaagaggactgctctgctattttgttgggtgtttcaacttgggtttttctgatgttttctcatgacctgattgaggttattcattatttggaacaatgccacacaggcagcatgcccttctcagtgcgtcattgtgggggtctgtgacatcnatgcatcat

SEQ ID NO: 6598 - protein, 104 aa, Homo sapiens
MTDINHISPVFLRMSFFSSKSLFLIPHCIWFSCLLNLLRSGTIPPSFLAFHDPDTLEEDCSAILLGVSTWVFLMFSHDLIEVIHYLEQCHTGSMPFSVRHCGGL

SEQ ID NO: 6599 - DNA, 324 bp, Homo sapiens
  misc_feature (324)..(324): Wherein n may be a, c, g or t
acgcgtggctgagcagccagaatcgcatctcatgctgatctggaccctgcagtcaccgctgctggactctgggcaccacagctcacccggctgctgctactgccctgaggccgtatggcgctgcttctgccgccacctccaccaggatgaatccccagggcccttcctctctcaggcagtagctctggtgtcagaatcccacatgggtgcgccatctaaggagactgagaaaacaggtttagggtcttttaatcttctctcttgagggatgagccctgcctcccaccaagatgcatggaataaacaattccccaaacctagatn

SEQ ID NO: 6600 - protein, 77 aa, Homo sapiens
MLIWTLQSPLLDSGHHSSPGCCYCPEAVWRCFCRHLHQDESPGPFLSQAVALVSESHMGAPSKETEKTGLGSFNLLS

SEQ ID NO: 6601 - DNA, 291 bp, Homo sapiens
aagctttcagcggtccgcccgggcacaaaggcggtcaacgtgccgtaatggttgtcgccgatatagaacacgaacgtcgcggtgcggttgatcgccttggacgcgatgatgcgtccgccagaaccgaaactctcgatacggttgtcgcccgtgccagtcttgccgcccatcgccagcgtcgtgccgtccagagtcttgaagctgcccgagacgcgccttgcggtacccgcgtcaaccacctgcgacagcgcctcgcgcatggcggtcgccacttccgattgcagcacgcgt

SEQ ID NO: 6602 - protein, 86 aa, Homo sapiens
MREALSQVVDAGTARRVSGSFKTLDGTTLAMGGKTGTGDNRIESFGSGGRIIASKAINRTATFVFYIGDNHYGTLTAFVPGRTAES

SEQ ID NO: 6603 - DNA, 241 bp, Homo sapiens
tccggaccgtgccagtcctcagcccagaagctggaaggctgggcctgcaatcctcggagcgatactggcacgggcctgggagcgtcaccgggtcttctcggggaggctcttgagagcctagtggggaggtctttgccgtgtttggggccacagggacctggagcagggacctgactgactgaccttttgacattaaacacaggaaggactgagggggagaaacaggtcagagactgcagga

SEQ ID NO: 6604 - protein, 64 aa, Homo sapiens
MSKGQSVRSLLQVPVAPNTAKTSPLGSQEPPREDPVTLPGPCQYRSEDCRPSLPASGLRTGTVR

SEQ ID NO: 6605 - DNA, 217 bp, Homo sapiens
  misc_feature (1)..(1): Wherein n may be a, c, g or t
  misc_feature (2)..(2): Wherein n may be a, c, g or t
nntgtacagcgtggggtgaaacggatttttgatccctgtatccgctatgagcaggtcagcgtggccgacgccgacgcgcacttcaactgcccggtggttgcctcgtaccctgaggtcatcagggccaacgtcgaaagtctacaagacaaggacgtcgagcttatctcgcccttcctctcgctggccgatcctgacaagcttgctggagcgggctggg

SEQ ID NO: 6606 - protein, 72 aa, Homo sapiens
  misc_feature (1)..(1): Wherein Xaa may be any naturally occuring amino acid
XVQRGVKRIFDPCIRYEQVSVADADAHFNCPVVASYPEVIRANVESLQDKDVELISPFLSLADPDKLAGAGW

SEQ ID NO: 6607 - DNA, 330 bp, Homo sapiens
  misc_feature (1)..(1): Wherein n may be a, c, g or t
  misc_feature (330)..(330): Wherein n may be a, c, g or t
ntcgcgagcacgctccagcctctgcgggttcacaaccgaaatctcctatctctggactttgatcgcgtaacacgcacagagaagatctatgatgcccaccgcaagttcacccttcggattctgtacgaccaggcggggcggcccagcctctggtcacccagcagcaggctgaatggtgtcaacgtgacatactcccctgggggttacattgctggcatccagaggggcatcatgtctgaaagaatggaatacgcccaggcgggccgcatcacatccaggatcttcgctgatgggaagacatggagctacacatacttagagaagtccatn

SEQ ID NO: 6608 - protein, 110 aa, Homo sapiens
  misc_feature (1)..(1): Wherein Xaa may be any naturally occuring amino acid
  misc_feature (110)..(110): Wherein Xaa may be any naturally occuring amino acid
XASTLQPLRVHNRNLLSLDFDRVTRTEKIYDAHRKFTLRILYDQAGRPSLWSPSSRLNGVNVTYSPGGYIAGIQRGIMSERMEYAQAGRITSRIFADGKTWSYTYLEKSX

SEQ ID NO: 6609 - DNA, 252 bp, Homo sapiens
gctttgtgcaacatctacggagccataaccatcgcacaggctatgatcttctgccataccaggaaaactgccgggtggttggcaggagagctgtccagagaaggacaccaggtggcgctgctaagtggagagatgcaggtggagcagagagcagcggtcattgaacgcttccgagacggcaaagagaaagtcctggttaccactaacgtctgtgtcataggtatcgatgtggagcaagtctcagtggtgatc

SEQ ID NO: 6610 - protein, 84 aa, Homo sapiens
ALCNIYGAITIAQAMIFCHTRKTAGWLAGELSREGHQVALLSGEMQVEQRAAVIERFRDGKEKVLVTTNVCVIGIDVEQVSVVI

SEQ ID NO: 6611 - DNA, 238 bp, Homo sapiens
tccggagtgagcacaaaagcctgattcaagtaataactcaggtcggcatagaaaccatcatcgacaccgcttcccaaatgcccagcaccagacatgcctgtgaggtccccgatgcaactggcaatcgcaactggaaccgtagtctccaggttcatcccaaagggggcccggggtaaaaaaaaccacaggatccgactcctcctcttccagctccaggtcatcccaccacagcgaattc

SEQ ID NO: 6612 - protein, 73 aa, Homo sapiens
MTWSWKRRSRILWFFLPRAPFGMNLETTVPVAIASCIGDLTGMSGAGHLGSGVDDGFYADLSYYLNQAFVLTP

SEQ ID NO: 6613 - DNA, 279 bp, Homo sapiens
gatcaattgaaacaggttatacataaactaaagacaaatccctacgatagaagaatcattatgagtgcctggaacccagctgattttgacaaaatggctttgccgccatgccattttttttcacagttctatgtcagtttccccaaagaaggagaaggatccggtaagccccgcctttcatgcttattgtaccaacgttcttgtgatatggggttgggagtaccatttaacattgcatcatatgctttgttgactagaatgattgctaaagttgtcgac

SEQ ID NO: 6614 - protein, 93 aa, Homo sapiens
DQLKQVIHKLKTNPYDRRIIMSAWNPADFDKMALPPCHFFSQFYVSFPKEGEGSGKPRLSCLLYQRSCDMGLGVPFNIASYALLTRMIAKVVD

SEQ ID NO: 6615 - DNA, 234 bp, Homo sapiens
gccatcactggtgaatccttagccgctgaaaagcattacggtgatgaggtgttctcctcatccactgtgaaaaccggcgaggcttttatggttgttactgccactggtgacaataccttcgtcggtaaggctgccgccttagtggggcaggcttccggtgtataaggccatttcactgaagtattgaatggaattggtattatcttacttgttctagttatcgctactttgttg

SEQ ID NO: 6616 - protein, 54 aa, Homo sapiens
AITGESLAAEKHYGDEVFSSSTVKTGEAFMVVTATGDNTFVGKAAALVGQASGV

SEQ ID NO: 6617 - DNA, 309 bp, Homo sapiens
gaattcccagttcctgcaccagagtgacccaatgtgtggctgctcaagaataaataagctttgtttcgaagaagtgtacgctttagttcaggattgaacggagcataggcaatgcggacagatgctagcactgcccttggtcgccgagacgagtgtcacccgccccagtgcttcctgaggtgctctttcaggctgcgggctggaaggcagcagctgctgacactcatggcaacggagagggcagcttcaagagctcacaagtgccatctttaacagtcactctgccggcttcctgaaccatcttgatca

SEQ ID NO: 6618 - protein, 53 aa, Homo sapiens
MRTDASTALGRRDECHPPQCFLRCSFRLRAGRQQLLTLMATERAASRAHKCHL

SEQ ID NO: 6619 - DNA, 315 bp, Homo sapiens
acgcgtcgtaggactttcagaataccgcggaaggtgcccgaacgccggcattgtgtgacagatgagctgactgatctgacgcggactttcaatgaaatgtcggacgagctggttatgcattatgagcgcctggaggaaagggtaaaacagcgtactgcagagctcgagaagagcaagaaggccgcggaggcagcaaatcagagcaaaactttgttcatcgcgaacatttcgcatgaattgaagactccattgaatggcatcctcggactgaccaccgtctgtatgaatgaagacgacctaggaagaatgcggtcg

SEQ ID NO: 6620 - protein, 105 aa, Homo sapiens
TRRRTFRIPRKVPERRHCVTDELTDLTRTFNEMSDELVMHYERLEERVKQRTAELEKSKKAAEAANQSKTLFIANISHELKTPLNGILGLTTVCMNEDDLGRMRS

SEQ ID NO: 6621 - DNA, 263 bp, Homo sapiens
accggtggggagaactcgtcacctaacggcatcgcctttctcttctgtcttggcattgagccctagagcaggagcaacgcgacctgtcgcgatgcgatgtgcagcaacgctgcacgagccgtccgctttgcgcttttgatcttccgggccccgtatgaggcggcgggcgggtggagagaaggcccgcaggggaatcggcatggatgccgattccttttcgccggggcaggagccccgtcgaaaagcccggaacccgcacgcgt

SEQ ID NO: 6622 - protein, 60 aa, Homo sapiens
MPIPLRAFSPPARRLIRGPEDQKRKADGSCSVAAHRIATGRVAPALGLNAKTEEKGDAVR

SEQ ID NO: 6623 - DNA, 319 bp, Homo sapiens
  misc_feature (215)..(215): Wherein n may be a, c, g or t
  misc_feature (319)..(319): Wherein n may be a, c, g or t
accggtctgggcgagacggccgtgagcactgggtgagcaaggccaagggtcaggttggacttgaaggaaacctggccgtgggtggtggaagcctgggtggtatgtggtatgtgtgtcctctgcggctaaatctgacggcactgaagcagacaggaagggtgagctatcagccagagcgtctgcactgcaggctagctctggaccaggacacatangccagcctgctgcagtagctctcggcaaaaacggggtgtcaggctgggaggtggaaggcggtgacattgtggcacactcaccactgaaaggatcgtggtttctn

SEQ ID NO: 6624 - protein, 94 aa, Homo sapiens
  misc_feature (23)..(23): Wherein Xaa may be any naturally occuring amino acid
MSPPSTSQPDTPFLPRATAAGWXMCPGPELACSADALADSSPFLSASVPSDLAAEDTHTTYHPGFHHPRPGFLQVQPDPWPCSPSAHGRLAQTG

SEQ ID NO: 6625 - DNA, 400 bp, Homo sapiens
acgcgtctgggcctcccagagtgttcggatgacaggcgtgagccaccacgcccggcccggcgacggttttaaacaaggcagctcggaacagagcagcttcgggaatcgcacctgcagaatgagatcacgtagcctccggtctcggctcacgcaggtgtgctctgagcccgtcacggcccggcctgaggccccgtgaaccgggcggttgccccatgctgttgaaacccgggtccggggctcccagctttgtgcctctgttcccggcgacgcccgcacggtgccacctctcagagaccctccctgctggctctcaaccacccgtgacaactgcgagccggaaacagggtgggataataccttggacccaataaaggtgctggcccagggtgccctctctgct

SEQ ID NO: 6626 - protein, 55 aa, Homo sapiens
MTGVSHHARPGDGFKQGSSEQSSFGNRTCRMRSRSLRSRLTQVCSEPVTARPEAP

SEQ ID NO: 6627 - DNA, 426 bp, Homo sapiens
  misc_feature (1)..(1): Wherein n may be a, c, g or t
ngccggcggcattgtaaaaagttctcctttcgcggaaggatgagtcaaaaagcatgtgacaatgaaataatcaaattgtgacatctgctgacgcgggatcgttccttcgtattgtctagattgtaatctatataacatactacgaatataaaagagggactacaagatatttctagcgcaaactactgctttactgtctcacaatgtctctgattggaagatacctaagaaaattatttaactacatatctacaaaatcaaagcatcatgccttcgcaagtcattcctgaaaaacaaaaggctattgtcttttatgagacagatggaaaattggaatataaagacgtcacagttccggaacctaagcctaacgaaattttagtccacgttaaatattctggtgtttgtcatagtgacttgcacgcg

SEQ ID NO: 6628 - protein, 53 aa, Homo sapiens
MPSQVIPEKQKAIVFYETDGKLEYKDVTVPEPKPNEILVHVKYSGVCHSDLHA

SEQ ID NO: 6629 - DNA, 318 bp, Homo sapiens
  misc_feature (1)..(1): Wherein n may be a, c, g or t
ncgctccacagagaggctgcagggagagccagataaaatactggatgcccaggtgaacgtgaatttcagataaacaacaaatactttaaaaataaaagtccgttttaaataccacacggggcatactatactcaaaaagtgctcgttcatctgagattcacattgcactgggtgtcctgtttttatgtgttcattctgggggcccccgcccatcattccctgcctcctatgcgcagtgctgggcccttccctccctccctccctccctccctggcagacagtgcccacctctcaactcctgcgccctgccctgctagc

SEQ ID NO: 6630 - protein, 72 aa, Homo sapiens [sequence omitted]

SEQ ID NO: 6631 - DNA, 182 bp, Homo sapiens
tgatcaattaagactagatactccaggcccagggtctagggggcttggtagatggctcactgaaaaagcacttgtttcctgagcatgatgacccgagttcaaatccccaacctctggaggggaaagcccaggcccggttacacatgcctgtgacaggtagatgccaagaacccatgggcggg

SEQ ID NO: 6632 - protein, 53 aa, Homo sapiens
MGSWHLPVTGMCNRAWAFPSRGWGFELGSSCSGNKCFFSEPSTKPPRPWAWSI

SEQ ID NO: 6633 - DNA, 293 bp, Homo sapiens
gaattcagtgtcctggccccgtcctcactgcctcctgaagccagccttttccactctcggatgtcacacccagccgcttttctcctctcacagcctctgaaccctcctcacaatcacctctttgtggtcttcatgctgcccagcctcaggaaacccctcagccacctctgcagaccctcccatgagccctggctattggcaactgtcaagcctggctcttaagagagaacctagctcaaggcctgacccttttccctgccatctttgtgacctctggcttagaagggggtacc

SEQ ID NO: 6634 - protein, 53 aa, Homo sapiens
MSHPAAFLLSQPLNPPHNHLFVVFMLPSLRKPLSHLCRPSHEPWLLATVKPGS

SEQ ID NO: 6635 - DNA, 259 bp, Homo sapiens
  misc_feature (259)..(259): Wherein n may be a, c, g or t
gatctgggcggtattgcagcagccctagaagcagccaagaaagaagcggatttctctgctgaggaattctttaccaactttgcccgcatttggcgaatgaagggacgcgaagagtatatgaagcttttggcaagcgtcgatgtccatgctccagccaagcttcggaccaatgtgcagctgcctaactttgacgacttctttacgacctttgatgtccaagagggagacggcatgtggcggagtccagaagagcgggcgn

SEQ ID NO: 6636 - protein, 86 aa, Homo sapiens
DLGGIAAALEAAKKEADFSAEEFFTNFARIWRMKGREEYMKLLASVDVHAPAKLRTNVQLPNFDDFFTTFDVQEGDGMWRSPEERA

SEQ ID NO: 6637 - DNA, 324 bp, Homo sapiens
cggatcgaacgcggcaacaatctgctgatcatcggtcccaacggttgcggtaaaagcagcatgttccgtattctgggtggcctgtggcctgtatacggcggccgtgtgtacaagccttccaacaaagagttcacgtacattccccaacgcccctacctgtcccttggtacgctgcgtgaccaaatcatctaccctgatacggttgacgagatgcatgctagcggcaagacggacgaagacctgattgaaatcctcaagctgctccaaatcgacaacattgttgagcgtgaaggtggatgggatgttgagcgtgaatggcgtgac

SEQ ID NO: 6638 - protein, 108 aa, Homo sapiens
RIERGNNLLIIGPNGCGKSSMFRILGGLWPVYGGRVYKPSNKEFTYIPQRPYLSLGTLRDQIIYPDTVDEMHASGKTDEDLIEILKLLQIDNIVEREGGWDVEREWRD

SEQ ID NO: 6639 - DNA, 353 bp, Homo sapiens
acgcgttgcacatcccccaggaccatcaaccgcggcattgccgcatagacctggagatcccatgcaacgtgaaatgaagttcgaatcgatcaaggcaaaggccaaggcgatgctcatcggcgcagccgacgacacagcaagcgcaggcgcgaccaaccgagggtggctcaacagcgccgcattcgaaatcctggcccacgtggccgtcaatgcccaacactacgcgctctccgagagaccggcgctggaggagttcgccaagagcttccagccgcgcaacaaccaggactacgtggccgcgatcgccaagaaggccgcgaaccacaccatgcatcccggcaggcagtcgattt

SEQ ID NO: 6640 - protein, 102 aa, Homo sapiens
MHGVVRGLLGDRGHVVLVVARLEALGELLQRRSLGERVVLGIDGHVGQDFECGAVEPPSVGRACACCVVGCADEHRLGLCLDRFELHFTLHGISRSMRQCRG

SEQ ID NO: 6641 - DNA, 297 bp, Homo sapiens
gaattctctccctcctgcttgcctcatccgcttctgggttaagtccaggactggcaaaaacactgcctgttcccgagggagcccctgtaaccaacctcttcccccaaatgtctaatcccttgcttgtgattccagcagaggtctcggcatctcgtccacagtgagctggtgtcctgccagtctcgggaggcactcggcagtgtgagtacatccttcacctctgtgtctacagacccggccttcccgcccagcatgggttgaagccaggctaaagcggttgatcccaaggggctgtct

SEQ ID NO: 6642 - protein, 71 aa, Homo sapiens [sequence omitted]

SEQ ID NO: 6643 - DNA, 268 bp, Homo sapiens
gctagccagataggattccggttgctctacacttgttacagtccgtcttttctctttagccatttgagtggatgtgtaactgtcgctcattgtcgttttaatgttttcctaatgggtaaagatgcttgtctacattcttttatgaggtgctttttcaaatattttgccgaatttttaactgggttgtcttaccaagttgcaagagtttttagaaatgtatgtatttgggaatcaagggccttgtcagatgtatgtatcatgaagatct

SEQ ID NO: 6644 - protein, 52 aa, Homo sapiens [sequence omitted]

SEQ ID NO: 6645 - DNA, 232 bp, Homo sapiens
  misc_feature (119)..(119): Wherein n may be a, c, g or t
gtgcacccacctggtctgatgggctcccagtcttgtgggcacggtggcctctggggactgcgatgacagcgatggggcaggataagctgggaacgtctgtctgtccagagcgcgagcgnctgggggcagagggaggggcagggcgcgagctcagcttagactttggttccaaatgcggtaagaggcgaggcagtggcatggaggtgcctggtcatcctgtgttgggtccccg

SEQ ID NO: 6646 - protein, 66 aa, Homo sapiens
  misc_feature (27)..(27): Wherein Xaa may be any naturally occuring amino acid
MPLPRLLPHLEPKSKLSSRPAPPSAPXRSRSGQTDVPSLSCPIAVIAVPRGHRAHKTGSPSDQVGA

SEQ ID NO: 6647 - DNA, 384 bp, Homo sapiens
aattgggacaagctgggttttgactacatcaagaccgacaagcggtttctccaggtctggaaaaacggcgaatggcaagctggcaccctgaccgacgacaatgtgctgcacatcagcgagggctccactgccctgcattatggccagcaatgcttcgagggcctgaaggcctaccgttgcaaggacggttcgatcaacctgttccgcccggaccagaacgccgcccgcatgcagcgcagctgtggccgcctgctgatgccgcaagtgccgaccgacgcgttcatcgacgcctgcaaacaagtggtcaaggccaacgagcgcttcatcccgccgtacggcagtggcggcgcgctgtacctgcgcccgttcgtgatcggcaccggt

SEQ ID NO: 6648 - protein, 128 aa, Homo sapiens
NWDKLGFDYIKTDKRFLQVWKNGEWQAGTLTDDNVLHISEGSTALHYGQQCFEGLKAYRCKDGSINLFRPDQNAARMQRSCGRLLMPQVPTDAFIDACKQVVKANERFIPPYGSGGALYLRPFVIGTG

SEQ ID NO: 6649 - DNA, 430 bp, Homo sapiens
  misc_feature (352)..(352): Wherein n may be a, c, g or t
agatctggaagccgggaaatccaatattaaggaagagtcatgtatgatgaggacctgctctctgtctcaaagaaggtgacttattgctgcatcctcacatggtagaagaggaaagtggtctctctgagttttgttttatgaggactccagtgacctctcaaaggtctcacctccagataccatcactttggggagttaagatttcaacatttgaatttggaaggaacataaacattcaaacaatagcagaagagaatgaatgaaccttaccgggatgctacctatatgttacgcaggttactttggtcggggtgatggttttgaacatatatcttcttaatctttacagtangccaatgaggtcaatggcacaatcccattttacagatgataaaactgaggttcaaggaaatttaagaacatgtctggg

SEQ ID NO: 6650 - protein, 54 aa, Homo sapiens [sequence omitted]

SEQ ID NO: 6651 - DNA, 393 bp, Homo sapiens
  misc_feature (1)..(1): Wherein n may be a, c, g or t
ntgatcatggaacgtgacatgagtgcctggaaaattggtttcgactcaaggctcctcgctgctgcttactcggtgagtgagtgctttagaaatcaataagaacttgaccgagctgggcatattgattaatttaatctaaatttgcagggagtggtctgctcaggcattgcatattatgtgcaaggttttgtcagtaaacaaaaagggccagtttttgtcacatcttttagccctttatgcatgattattacatcagctttgggagtcattattttggctgagctagtccatcttggaaggtaacttttaaactcgctaaatttgtttcaaattttacccaatgcttcaattttaaatttttaatttgctcccagaggctggagtgtggaattc

SEQ ID NO: 6652 - protein, 57 aa, Homo sapiens
FNLNLQGVVCSGIAYYVQGFVSKQKGPVFVTSFSPLCMIITSALGVIILAELVHLGR

SEQ ID NO: 6653 - DNA, 405 bp, Homo sapiens
ggtttacctgagcggatgctagcgctgtatcccaccccgccacaggagctggcccaggtaaaggcatttctcgacgacctggccacccagcttgagtgatgactcaatgccccatgcgagacgattagacgacattgtcagcatgggattcacgagccactctcggtgcccgaaccccaattgcggtatgacgaaaggtcccctttcatcgtgcatatgctcctactggcgatcatctacttggctttcatcagcctgggtctgcccgactccctggtcggcgcaggatggccagccatgcatgaaagcctcggcgtaccgctgtcatgtgcagggttcataaccttcatcatcgccaccgggaccatcatctcgagcctgatgtccgaccggcttacaacgcgt

SEQ ID NO: 6654 - protein, 78 aa, Homo sapiens
MPHARRLDDIVSMGFTSHSRCPNPNCGMTKGPLSSCICSYWRSSTWLSSAWVCPTPWSAQDGQPCMKASAYRCHVQGS

SEQ ID NO: 6655 - DNA, 316 bp, Homo sapiens
tccggaatcttggttcacagaaatatgggaacaaattatcacgaggaacaaaattagcaacatcatattatgacctgaaaaatcttcaacttcaaatctgaaaaggcaaaaatataaacaaattgttgtggatattatttgggaattaagactcacatacaagagcatacaaaattatataataaattgggtgtaacaggggacaaggaatttctgaggttcactgaccttctaatatgtgaaatgccttagagaaaacaatccatcaatatttacaaagtcggaagagtttttcttgtccccaaacctaatacaa

SEQ ID NO: 6656 - protein, 56 aa, Homo sapiens
MLLYVSLNSQIISTTICLYFCLFRFEVEDFSGHNMMLLILFLVIICSHISVNQDSG

SEQ ID NO: 6657 - DNA, 420 bp, Homo sapiens
  misc_feature (1)..(1): Wherein n may be a, c, g or t
  misc_feature (420)..(420): Wherein n may be a, c, g or t
nccccgtcgatcgactaccttggggcccatccgctcccggccgacgcgcgcgtctacctgctgatgggagaccgggagggtggcccgatggtgagcgacgtgcagcgcatggccggcctgatgcgcacgtcgggcctgccagaaaagaacatgaccctggatatggttcgagggggcgaacataacgaagccatgtggtccgcctcgttgcgccgcgcgtgattgtggatgttcgtcgcgccggacgcaccactgcggcgaatgagccagacctctgatcaccattttcacttcacacaggagagcgccatgccgtatgtcgatggtttcgtggtcccggtcagcaaagacaagctcgagctctacaaggaaatgtccaggcaatgcggagcaatgtggcgcgacacggcgcgctggaan

SEQ ID NO: 6658 - protein, 95 aa, Homo sapiens
MVIRGLAHSPQWCVRRDEHPQSRAAQRGGPHGFVMFAPSNHIQGHVLFWQARRAHQAGHALHVAHHRATLPVSHQQVDARVGRERMGPKVVDRRG

SEQ ID NO: 6659 - DNA, 279 bp, Homo sapiens
gcgtttgaccactgccgggctcacgtccactggttcaccaacatcagacatctggcgtgctcggagattcgagccgcaagcctcagcggggactgctcccttgtgaacgaactcttcaggctgcgttttggattaaagcaacatcatcagacttgcgtgcgggacagggctgttctctctatcttggctgtccggaacgtcagcagagaggaggcccagaaggctgtggatgaagtcttccagacctgtttcaatgaccgggagcccttcggcaggatc

SEQ ID NO: 6660 - protein, 93 aa, Homo sapiens
AFDHCRAHVHWFTNIRHLACSEIRAASLSGDCSLVNELFRLRFGLKQHHQTCVRDRAVLSILAVRNVSREEAQKAVDEVFQTCFNDREPFGRI

SEQ ID NO: 6661 - DNA, 321 bp, Homo sapiens
gctagctgaaacttctctcatcaatattgccaactacttttaaatccaatgttacaaaatccagtggtagcttttctgttcttttcttatttgaattttcaatggcactcaacacaacttaccctttttttccttgaaccacttcttttctttggcttttgggatacaaaaattttatgattttcctccttgttcaatggctgctgtgcctcagtttctcttggtggatcatcctcagcttgaactagaaatgctggcatgctgcaggtcttctttccaggatttgttttctgttctatatctaatgtagcagcaagccct

SEQ ID NO: 6662 - protein, 53 aa, Homo sapiens [sequence omitted]

SEQ ID NO: 6663 - DNA, 346 bp, Homo sapiens
  misc_feature (1)..(1): Wherein n may be a, c, g or t
nacgcgtcgatcctggaggtgttgctcgcggcaactgtcggcggtgagctctactaccgagccgccgatgtcgtcgggggacgtgcactggccgacctcatcgggaccgcagagatcaacgccacgttcctcactccggcggtgctcgagacactcgatcccgctaccgtgcccggcctgggcgtcgtactcgtcggcggcgaggcgataccgcgtgcgctggtcgaacggtgggctgaccacacgcgcctggtgacggtgtacgggcctgccgagacgacgatcgcggtgatgctgggtcagctggaggcaggagaacccggtgtcccgctgggcaatggcccat

SEQ ID NO: 6664 - protein, 115 aa, Homo sapiens
  misc_feature (1)..(1): Wherein Xaa may be any naturally occuring amino acid
XASILEVLLAATVGGELYYRAADVVGGRALADLIGTAEINATFLTPAVLETLDPATVPGLGVVLVGGEAIPRALVERWADHTRLVTVYGPAETTIAVMLGQLEAGEPGVPLGNGP

SEQ ID NO: 6665 - DNA, 279 bp, Homo sapiens
acgcgttcgagtgtaaccactattatagcgtgtagccgattgattggagagttacagttatggctgatgaagaattgcacacgactgcagctgacgacgctgcaaagaagagcgatacgtcaaatgagaatacttatggcgttcctatggacgaagttgaagcagtgttgaatgctactgcggataaagcagcgctttctccacagattcagcaaatgatgcagagacaagctgaaaataggcgacgtgtcgaagaaagcatttaaggcacaaaagcta

SEQ ID NO: 6666 - protein, 68 aa, Homo sapiens
MADEELHTTAADDAAKKSDTSNENTYGVPMDEVEAVLNATADKAALSPQIQQMMQRQAENRRRVEESI

SEQ ID NO: 6667 - DNA, 658 bp, Homo sapiens
gaattctagacactaagaagttgtagcacgccaggtgagtgcaaggacagagacacatcaaaatggtagaaaatttttgacattttacccaccctagccactcccactgcctagcgtggcaaggtgtgatcaggaaaaaaacactcagctgccagtttttccctcaggagggaagaagagtgggctgtgcatccagtgttttagcttttcatggtgctttccaagggcatggtttgtctcatgagactcagagtactgactggaattagtagtttggatgctagattgggggctgctgagaacaaaggtgagcactggagcttgttacatcaccagagagactgtaatactgcagacagcaaggggaacaagaggttacaatctctaaagaagaagcaggcaaaaacctcattctgtgcacaagcccagagaagtagcatccccagaaaaagtttgagacaatcccagaatctctagttgtgctaaatgatgacggtcttcttttacacaaagccaatccttagagactgctggaggggactgtttttttcaagtggtcaagtctcaacaaaagatcacaaggctgtaaagaaagagtgaaacacatcccaataaaaagaaactaacctcccgaaaccaaccctaaagaaatggagat

SEQ ID NO: 6668 - protein, 88 aa, Homo sapiens
MVLSKGMVCLMRLRVLTGISSLDARLGAAENKGEHWSLLHHQRDCNTADSKGNKRLQSLKKKQAKTSFCAQAQRSSIPRKSLRQSQNL

SEQ ID NO: 6669 - DNA, 333 bp, Homo sapiens
  misc_feature (270)..(270): Wherein n may be a, c, g or t
acgcgtacactcaacggaaagccaggcaaaagaggcattggctgtcaacgactggacgaatacgacggagaacgggtcacaggcagcaactcctcgccggtctacctggtcttgcatggccagctgcgctggatccccaacccgaccacgtacaccaacctgttcgcctcgtgggacggcatcatcgtgagcgactacctggtcgacaacatcccgcgcgggccggcgctgaccaacggcgccgtgctggccaagggcagcagcgcacanacctaccttgtcaccaacggacagaagctgtggatccccaaccccgagaccttcaacaaattt

SEQ ID NO: 6670 - protein, 111 aa, Homo sapiens
  misc_feature (90)..(90): Wherein Xaa may be any naturally occuring amino acid
TRTLNGKPGKRGIGCQRLDEYDGERVTGSNSSPVYLVLHGQLRWIPNPTTYTNLFASWDGIIVSDYLVDNIPRGPALTNGAVLAKGSSAXTYLVTNGQKLWIPNPETFNKF

SEQ ID NO: 6671 - DNA, 365 bp, Homo sapiens
tgatcatgcaagccaattcaccctagtaaactccctttcatatagacatagatcccattagttctgtacctctgggaaccctctaatacatgatgttaagccaagttttctgtatccctgttcttccacgtgatatactagacaacctcctgcgggtccgaagcccacttttaatcttctgcctcatgaacctccccgatttctttaaagtcctgattttcagacctgtcattccgtgtgggccccctttggaaatagaccccatttttttgggttacacctcatgcataatgtccacaaccaactgcacttggtattttctaaccatgacagattccttgtccctgtggcaaggaatcactagt

SEQ ID NO: 6672 - protein, 92 aa, Homo sapiens [sequence omitted]

SEQ ID NO: 6673 - DNA, 447 bp, Homo sapiens
  misc_feature (175)..(175): Wherein n may be a, c, g or t
  misc_feature (302)..(302): Wherein n may be a, c, g or t
  misc_feature (310)..(310): Wherein n may be a, c, g or t
  misc_feature (331)..(331): Wherein n may be a, c, g or t
  misc_feature (350)..(350): Wherein n may be a, c, g or t
  misc_feature (351)..(351): Wherein n may be a, c, g or t
  misc_feature (365)..(365): Wherein n may be a, c, g or t
  misc_feature (377)..(377): Wherein n may be a, c, g or t
  misc_feature (378)..(378): Wherein n may be a, c, g or t
  misc_feature (420)..(420): Wherein n may be a, c, g or t
  misc_feature (424)..(424): Wherein n may be a, c, g or t
  misc_feature (429)..(429): Wherein n may be a, c, g or t
  misc_feature (430)..(430): Wherein n may be a, c, g or t
  misc_feature (436)..(436): Wherein n may be a, c, g or t
  misc_feature (440)..(440): Wherein n may be a, c, g or t
  misc_feature (444)..(444): Wherein n may be a, c, g or t
ggtaccctgcttcctctcagccctctgatttccacctggctgtcaaaatcccaggccccaggacatcttcccggagcccccagttctccgagcatggccatggtggtgctgggtctgtcccccattccgtggcaggcacttgtctcttgcccccttcgctgcctgttcctctctnagcaggtcagaagtggctctgcaagttctgtgttgtcctgctcgttcttcggttccccaggcctatcccagtgctcagcatggagcaggtgacgaagaaaacgctgtagcacaggcagctggtggtntatgaagnccctgtctcccacctgctctntggggaccctccctctccnnagctgtaaaggaanggctttacctcnnagtctttatcgtcagaatctctctcactttgcttacgctgtntgtnttgtnntttgtntgtntgtntgt

SEQ ID NO: 6674 - protein, 57 aa, Homo sapiens
  misc_feature (28)..(28): Wherein Xaa may be any naturally occuring amino acid
MAMVVLGLSPIPWQALVSCPLRCLFLSXQVRSGSASSVLSCSFFGSPGLSQCSAWSR

SEQ ID NO: 6675 - DNA, 324 bp, Homo sapiens
  misc_feature (1)..(1): Wherein n may be a, c, g or t
  misc_feature (2)..(2): Wherein n may be a, c, g or t
nnacgcgttgatagaaaggttgacaataaattcattatataggggtcctgtgaggtagtttctgaatcccagtgaaaaaagtcataagtgaaagaagtcgaagtttttcacaaaataaattagtttctttttttgatcatgaatactgaaggtgcttctttaagtgaacaattgctggatgcagctagaagaaacaatctggatcttttggagaccgtatttgatagcttagataatgatcctgagaagattgcaaagctaattaacgaatccaaagaaccactggggaatacagcgttacatttatgttgtaagtatggatcc

SEQ ID NO: 6676 - protein, 62 aa, Homo sapiens
MNTEGASLSEQLLDAARRNNLDLLETVFDSLDNDPEKIAKLINESKEPLGNTALHLCCKYGS

SEQ ID NO: 6677 - DNA, 424 bp, Homo sapiens
  misc_feature (1)..(1): Wherein n may be a, c, g or t
ngccgcatcgaaggctggctacccacggcgcccagcgctctggccgaggccaccgccaccggcgccttctacaccggcttcacctcgggcagcaccgggctgcccaagggcttcatgcgccaccaccgttcgtggacagagagctttcgcgtctgcctcaaggacttcggccccgtggccgcgcagcgcaccatggcgcccgggcgcatctcgcattcgctgttcctgttcggcgtgatgcagggcctgtggtgcggcgaaggcgccgtggtgcaggagcggttctcggcagcgcgctgcctggcctcgctggcgcgcggcgaggcgccctgcctggtcgccgtgccgagccagttgctgctgatgctgcaatgggcggcacaccgcgcgctggcgcccatccccgaggtggagctgatcatga

SEQ ID NO: 6678 - protein, 141 aa, Homo sapiens
  misc_feature (1)..(1): Wherein Xaa may be any naturally occuring amino acid
XRIEGWLPTAPSALAEATATGAFYTGFTSGSTGLPKGFMRHHRSWTESFRVCLKDFGPVAAQRTMAPGRISHSLFLFGVMQGLWCGEGAVVQERFSAARCLASLARGEAPCLVAVPSQLLLMLQWAAHRALAPIPEVELIM

SEQ ID NO: 6679 - DNA, 441 bp, Homo sapiens
tctagatgacgatgctgcaatgtactcagcctcctttggacaggagccctgctggggcatacacaatccaggcatggtccagcaggattctggtcacccccctcacatcatcacacacactgtgaggcgcagctattggaagaccaagcccagaacacggaattggctgaacagcaagcaggcactccctgccacctccactcgggcccgccagcctcctgtttaaaccacaccggcctacgtgactcctggggctgggacctgctgctctctccaggcagctcacaagccaattggagcaagtgacacatgcttcaagttcaatgcaggaggagtagcatcacagaatcccaaaatgacacctaagtatgtgattatacacgcatgtgtctctctaggagtgagagtatgctcatgatgtcggtatatttatgtacgcgt

SEQ ID NO: 6680 - protein, 68 aa, Homo sapiens [sequence omitted]

SEQ ID NO: 6681 - DNA, 304 bp, Homo sapiens
acgcgtgaaggggaatacttgggaccaagacaagtagagctttatgaaccacataatgactttggattttgttcttagtgtgatgagaagccattagagggttgagtgaagggaaaggatatccaacgagaacctcctgccctgtgtctcatgaagaggcagtatttcaagaagaggcttaaagctgagagtgttttgctaatcagtgaagatgtgactaatgagctgctggggaggtcaagccttctgtaagtgaaagtgtttgcattcattgtactcataagtaccttccctaatggtgatt

SEQ ID NO: 6682 - protein, 68 aa, Homo sapiens [sequence omitted]

SEQ ID NO: 6683 - DNA, 510 bp, Homo sapiens
  misc_feature (412)..(412): Wherein n may be a, c, g or t
  misc_feature (413)..(413): Wherein n may be a, c, g or t
cccgggacgtctactcccagaccgccactcacatcaccaagcgcgtggatgagcagggcaacatctacaacgcggacaccgacgatgccgcttacgccatcttcaacgtcgtcacaccctccgggggacccagtcatcgggcagatgaactcctcgggggcgcccgcgtcttccgcgacgaactgctcgagttccagatcgacggcacccacggctccgccgtcgcaggcctgttcggatgcgtctgccagccccgtggggtcaccccccgcccgacctggaatcccgatatccctgacactaatgactacatgtcgatgtggcaggaggttcccgacaacgccgccactgccaccggcagcctcgccaacggtttcaaggcccagtgggaggaatacctccccgacgtcgnncgatggatcgtcggccccgcttcgacctgctgtcgggagcacgcgaagtccaacttgccgaactcggattgcggtcggccgccgagggacgacgcgt

SEQ ID NO: 6684 - protein, 170 aa, Homo sapiens
  misc_feature (138)..(138): Wherein Xaa may be any naturally occuring amino acid
PGTSTPRPPLTSPSAWMSRATSTTRTPTMPLTPSSTSSHPPGDPVIGQMNSSGAPASSATNCSSSRSTAPTAPPSQACSDASASPVGSPPARPGIPISLTLMTTCRCGRRFPTTPPLPPAASPTVSRPSGRNTSPTSXDGSSAPLRPAVGSTRSPTCRTRIAVGRRGTTR

SEQ ID NO: 6685 - DNA, 207 bp, Homo sapiens
accggtcgggcgaagaagaccactgcgacgaaggcaagccagtcgtcggctcacaagtccgctggtggggccaagaatcccacggctaagtcatctggggccaaaaccacgacgaagcccaccagcactaagacggccgcgaagtccaccaagacagcggcgagtaagacgacgaagtcttcgggtacgaagactgttggaaacgcg

SEQ ID NO: 6686 - protein, 69 aa, Homo sapiens
TGRAKKTTATKASQSSAHKSAGGAKNPTAKSSGAKTTTKPTSTKTAAKSTKTAASKTTKSSGTKTVGNA

SEQ ID NO: 6687 - DNA, 355 bp, Homo sapiens
  misc_feature (1)..(1): Wherein n may be a, c, g or t
  misc_feature (2)..(2): Wherein n may be a, c, g or t
nnacgcgttgttgccaagcactacaacgtaaacatcgctctgcacaccgaccactgccagaaggagaagctggacacttacgtgaacccgctgatcgctatctcgcaggagcgcgttgaccgcggcgaggacccgctattcaactcccacatgtgggacggctccgccattccgctaaaggagaacctggaaatcgcccgtgagctgctggcccgcacctccaaggccaagcaaatcctcgagatcgaggttggcgctgttggcggcgaggaagacggcgttgttggcgagatcaacgacaagctgtacacctctccgcaggacggcttcgacaccatcgacgccctgggattga

SEQ ID NO: 6688 - protein, 118 aa, Homo sapiens
  misc_feature (1)..(1): Wherein Xaa may be any naturally occuring amino acid
XRVVAKHYNVNIALHTDHCQKEKLDTYVNPLIAISQERVDRGEDPLFNSHMWDGSAIPLKENLEIARELLARTSKAKQILEIEVGAVGGEEDGVVGEINDKLYTSPQDGFDTIDALGL

SEQ ID NO: 6689 - DNA, 486 bp, Homo sapiens
gcgtgtgacttccccggatgtgtgaaaaggttcagtagaagcgatgaactgacgagacacagaagaattcatacaaactcccaccctcgaggtaaaagaggcagaaagaagaaggttgtgggctctccaataaatagtgctagttctagtgctaccagtataccagatttaaatacggcaaatttttcaccgccattaccacagcaacacctatcgcctttaattcctattgctattgctccgaaagaaaattcaagtcgatcttctacaagaaaaggtagaaaaaccaaattcgaaatcggcgaaagtggtgggaatgacccatatatggtttcttctcccaaaacgatggctaagattcccgtctcggtgaagcctccaccttctttagcactgaataatatgaactaccaaacttcatccgcttccactgctttgtcttcgttgagcaatagccatagtggcagtagactgaaactgaacgcg

SEQ ID NO: 6690 - protein, 162 aa, Homo sapiens
ACDFPGCVKRFSRSDELTRHRRIHTNSHPRGKRGRKKKVVGSPINSASSSATSIPDLNTANFSPPLPQQHLSPLIPIAIAPKENSSRSSTRKGRKTKFEIGESGGNDPYMVSSPKTMAKIPVSVKPPPSLALNNMNYQTSSASTALSSLSNSHSGSRLKLNA

SEQ ID NO: 6691 - DNA, 345 bp, Homo sapiens
gtgcactggagcaaaatctgaatattggggtgaggaaagggaagacaggcagtgtcagagacaaacttggagggcaccacggagacccagggcatgggtcccccccttcgccagccaacatcgggcaccctgtgcttcagcatccagctcttgggggtgccgttgttcctccgtctgaatttctgacttgtttttacaattagggctcacagctccacatccactctgggattccactgctctgaatttggtgaacttgggctttggcttccttatcctttccttaagagataatccttctccctcccccacttttctcttaggattcataaacctggagctagc

SEQ ID NO: 6692 - protein, 91 aa, Homo sapiens [sequence omitted]

SEQ ID NO: 6693 - DNA, 327 bp, Homo sapiens
  misc_feature (1)..(1): Wherein n may be a, c, g or t
nctgaacagctgtttggcagtgaggaaacgcgggctggcgcacgaaatcgcgttatcaatgcaaaagcgctgcgccctgaagccgatttttgggtggcgattgaagcgggaattgacgaaggcgcaacgtttagctgggtagtgattgaaaaccgcgagcagcgcggaaaagcccgttccgcaccgctgccgttgcccgccatcattttggaaaaagtacgggctggagaagccctcggcccggtgatgtcacgctacaccggcattgatgaaattggccgcaaagaaggagccatcggcgtgtttaccgctggcgcactgacgcgt

SEQ ID NO: 6694 - protein, 109 aa, Homo sapiens
  misc_feature (1)..(1): Wherein Xaa may be any naturally occuring amino acid
XEQLFGSEETRAGARNRVINAKALRPEADFWVAIEAGIDEGATFSWVVIENREQRGKARSAPLPLPAIILEKVRAGEALGPVMSRYTGIDEIGRKEGAIGVFTAGALTR

SEQ ID NO: 6695 - DNA, 249 bp, Homo sapiens
ccggaaactatgaagagttatggggatttatctgtcttctattatcgccttcaacacattgaaatggctctaaagtatgtcaaccgtgcactatatctgcttcagttctcgtgtgggctttcacacccgaattcagctgccacctacataaatgtggctatgatggaagaaggcatgggaaatgttcatgttgctcttcgatacttgcatgaagccctgaagtgcaacaagaggttgctaggagctgat

SEQ ID NO: 6696 - protein, 83 aa, Homo sapiens
PETMKSYGDLSVFYYRLQHIEMALKYVNRALYLLQFSCGLSHPNSAATYINVAMMEEGMGNVHVALRYLHEALKCNKRLLGAD

SEQ ID NO: 6697 - DNA, 150 bp, Homo sapiens
ccggacactttagatgactttggtggattttatggcttggaagagtttgacggagtggacgttaaagtcgtggatggtaaagtaactttcgtcaccaaaaaagattcaaaagtgttaaaagatagcaataaggaaaaagtcggagatgat

SEQ ID NO: 6698 - protein, 50 aa, Homo sapiens
PDTLDDFGGFYGLEEFDGVDVKVVDGKVTFVTKKDSKVLKDSNKEKVGDD

SEQ ID NO: 6699 - DNA, 390 bp, Homo sapiens
  misc_feature (390)..(390): Wherein n may be a, c, g or t
gtgcgcacaaaagagcacgttcgcaaggggaggaagagcgtgccaccggttctgccgagctagacgcggtgcctatggttgcggaggaccatggagtgaagcgagtaagactagatgatgcaacaaatgtgcctgagggtgaaatggcacgagccagtgccaatgagggcatgacacctgttaaccacgacaaatacccttctgtccttttaaatgaagcggcccaggcttcattactggatacaatgactgcttgcactgatgggttcacaattgagcaattggagcttacacgatctctatgttatgaaagagtattagcacatcgatcctcatgggatcgttcagccctggctcaagaattaaagcaagttgtccaaggcatccatn

SEQ ID NO: 6700 - protein, 105 aa, Homo sapiens
MVAEDHGVKRVRLDDATNVPEGEMARASANEGMTPVNHDKYPSVLLNEAAQASLLDTMTACTDGFTIEQLELTRSLCYERVLAHRSSWDRSALAQELKQVVQGIH

SEQ ID NO: 6701 - DNA, 396 bp, Homo sapiens
  misc_feature (1)..(1): Wherein n may be a, c, g or t
  misc_feature (262)..(262): Wherein n may be a, c, g or t
  misc_feature (263)..(263): Wherein n may be a, c, g or t
ngtattcctcatcctatacttatgaatggattcccacaatttccagccccagagtcctaaatgaggaatgtaattaacatagaaagcaggaggtttaaagaaaaaaaaagagagaagattcaaataaatgcaatcagatatgacaaagataacatttcagccaatcccatagaaatacaaacaatcttcagagactattataaacacttttatgcacacaaattagaaaatctagaggacatgcatacattcttagaaacanncaacctcctaagattgaatcaggaagaaactgaaaacgtgaacaggccaatagcaagttcagaaattgaatcagtattaaaaaacctaccaatcagaaagagccctggactagatggatttacagctgaattc

SEQ ID NO: 6702 - protein, 112 aa, Homo sapiens
  misc_feature (68)..(68): Wherein Xaa may be any naturally occuring amino acid
MRNVINIESRRFKEKKREKIQINAIRYDKDNISANPIEIQTIFRDYYKHFYAHKLENLEDMHTFLETXNLLRLNQEETENVNRPIASSEIESVLKNLPIRKSPGLDGFTAEF

SEQ ID NO: 6703 - DNA, 345 bp, Homo sapiens
  misc_feature (1)..(1): Wherein n may be a, c, g or t
  misc_feature (345)..(345): Wherein n may be a, c, g or t
ntggagctgaggcccacagggagcaagtatgaggcacgagtacttgcactctaaaatggagaatcctgcagatataccttcttactactggaactactactggccattccggaaaagccttggacctggtattccgaagattcagagagtaattgcttgtcatcaatgaactcaagttaaatgatgctcgtcctttacccaaagacagtcagccacattcttactcagaccatgggaccatttgaacttgcttttgaggttctagaaatgcaagggggaaaggcaggtaggctgcagagggtttaagcaggtagactcaaggaagactgcctgtgtttacatacn

SEQ ID NO: 6704 - protein, 54 aa, Homo sapiens [sequence omitted]

SEQ ID NO: 6705 - DNA, 317 bp, Homo sapiens
cccgggatgccactttccaagaataatcatttctggaagtaatggttttctctgactaatatggatggtggtaagccttgactcctaattcctactgcaaaaaaaaaaacagtctgtagcctggagtcttgcaaacattgagatgaaaaacctttgaaattgtagaaagagagataattagaaaaaatccccaagtacatatgttatgcacatgaggtatgtgaacattttttaacccaaagtttactactcacaagggaaaaagaaagtcccctagtttctggctacatccactaccctgccaaacatatccatgg

SEQ ID NO: 6706 - protein, 57 aa, Homo sapiens [sequence omitted]

SEQ ID NO: 6707 - DNA, 389 bp, Homo sapiens
ctcttaagatttttgtgtcttttgacttatatggaaagttattatacttgattgtgaaataggttttactatgataatttgctgacctacacttattttgtttttttcctctaaaacaatgttttcctaatgtttatttactttgctcttatggctacccagtctgattccacatgccctcttttggccaaaccatccgcaatttgtgctctccctgtcttctatctttgccttccttcttctttcttaaatatttaatcctggatgcctgtatttctattcactgtactatggcatcagcttatagtcccttaattgcaatgaactctatgaagctcacatgtctagaatataatcactttggcttctttcatgtatgaattgttttt

SEQ ID NO: 6708 - protein, 68 aa, Homo sapiens [sequence omitted]

SEQ ID NO: 6709 - DNA, 430 bp, Homo sapiens
caattgatttttgtgcaggaaagacgaaaaaaaggcagtcagggacaggttgactgaggagatatgtgtaaaagagagaaagcggcatggtactggaggcagcaccatgagcagaggccaggcgtggaggggtctgatgtcaatggggaatgattctcagggggtcaggctgcatgggaggagtgctgggaggtgaaggtaaaggtggaagatgagcaggagacagtgaaggaagggtgccctgggccccctgttctttaaaagccccttcacatgtttccatgtgattgccccagcagtgctgtgagagagaacttgcaggtgtccctttttcctttgcattttgtctccggtctgtcttcttccttttgtaatctctactctaataacttgtgaagaaagggttgattatcattatctctcttttgtg

SEQ ID NO: 6710 - protein, 61 aa, Homo sapiens
MQRKKGHLQVLSHSTAGAITWKHVKGLLKNRGPRAPFLHCLLLIFHLYLHLPALLPCSLTP

SEQ ID NO: 6711 - DNA, 833 bp, Homo sapiens
  misc_feature (1)..(1): Wherein n may be a, c, g or t
nccgcagtggtgtgggacaagaacaccggtgagccggtttataacgccatcgtgtggcaggacacgcgcactcaaaagatctgtaacgaactagctggtgacaagggcgccgaccgctacaaggagatctgtggtctgggcctgtcgacctatttctctggcccgaaggtcaaatggattctcgacaacgttgagggagcccgtgcgagggccgaggccggcgatctgctcttcggtaacatggacacttgggtgctgtggaacctgactggcggtactaacggtggcgtgcacatcaccgatccgaccaacgcgtcccgaaccatgctcatggacgtccgaaagctgcagtgggacgactcgatgtgcgaggtcatgggaattccaaagtccatgcttcctgagatcaagtcctcctccgagatctacggctatggtcgcaagaacggcctgctgatcgataccccgatctccggcattcttggcgatcagcaggccgccacctttggccaggcttgcttccaaaagggcatggcgaagaacacgtacggcaccggctgcttcatgctcatgaacacaggtgaggaggccatcttctccgagaacggtctgctgaccaccgtctgctacaagattggtgaccagcccaccgtctatgccctggaaggttcgatcgccgtcgctggatcgctggtacagtggctgcgcgacaacctcaagatgttcgagaccgccccgcaaatcgaagccctcgccaacaccgtcgaggacaatggtggcgcctactttgtgccggccttctctggcctgttcgcgccgtactggcgtccgga

SEQ ID NO: 6712 - protein, 277 aa, Homo sapiens
  misc_feature (1)..(1): Wherein Xaa may be any naturally occuring amino acid
XAVVWDKNTGEPVYNAIVWQDTRTQKICNELAGDKGADRYKEICGLGLSTYFSGPKVKWILDNVEGARARAEAGDLLFGNMDTWVLWNLTGGTNGGVHITDPTNASRTMLMDVRKLQWDDSMCEVMGIPKSMLPEIKSSSEIYGYGRKNGLLIDTPISGILGDQQAATFGQACFQKGMAKNTYGTGCFMLMNTGEEAIFSENGLLTTVCYKIGDQPTVYALEGSIAVAGSLVQWLRDNLKMFETAPQIEALANTVEDNGGAYFVPAFSGLFAPYWRP

SEQ ID NO: 6713 - DNA, 987 bp, Homo sapiens
gagctcggtacccccgtcgtcgccgtcaaggcgcaggtcaaagtgggtggccgtggcaaggctggcggtgtaaagatcgctaagtccccggccgaggcggctgaacgcgccgaggccatcctcggtatggacatcaagggtcacaccgttcacaaggtgatggtcgctgaaggtgctgacattgccgaggaatactacttctcgatcttgctcgaccgtggagagcgtcgctaccttgcgatgtgctcgcgtgagggtggcatggacatcgagacccttgctaaggagcgccccgaggctctcgccaaggtgccggtcgacccgattgacggcgttgacgatgctaaagcccgcgaaatccttagcgaggcagggttccccgactctgagcaggacgctatcgtcccggctgttctcaagctgtgggagacctaccgtgacgaggatgccaccctcgtcgaggtcaacccgatgatcaagaccggcgatggacgcatcctggctatcgacggcaagatgactgttgacaacaacgcatccttccgccagcctgaccgcgccggcttggtggatcgcgccaccaccgacccgctcgagttgcgtgccggcgagctcggtctcaactacgtcaagcttgacggcaacgtcggcgtcatcggaaacggtgctggtctggtcatgagcacccttgactgcgttgcgtacgccggtgagaacttcccgggatctccagctcccgctaacttcctcgacatcggtggcggcgcctcggccgagatcatggccaacggccttgacctcatcatgagtgacgagcaggtgcgttccgtgttcgtcaacgtctttggcggtatcaccgcctgtgaccaggtggcgcttggtatcaagggcgctctcgagaagttgggcgacaaggccgtgaagccgctcgtcgtccgtctggacggcaacgctgtggccgagggcagaaagattctcgaggaattc

SEQ ID NO: 6714 - protein, 329 aa, Homo sapiens
ELGTPVVAVKAQVKVGGRGKAGGVKIAKSPAEAAERAEAILGMDIKGHTVHKVMVAEGADIAEEYYFSILLDRGERRYLAMCSREGGMDIETLAKERPEALAKVPVDPIDGVDDAKAREILSEAGFPDSEQDAIVPAVLKLWETYRDEDATLVEVNPMIKTGDGRILAIDGKMTVDNNASFRQPDRAGLVDRATTDPLELRAGELGLNYVKLDGNVGVIGNGAGLVMSTLDCVAYAGENFPGSPAPANFLDIGGGASAEIMANGLDLIMSDEQVRSVFVNVFGGITACDQVALGIKGALEKLGDKAVKPLVVRLDGNAVAEGRKILEEF

SEQ ID NO: 6715 - DNA, 256 bp, Homo sapiens
  misc_feature (1)..(1): Wherein n may be a, c, g or t
  misc_feature (2)..(2): Wherein n may be a, c, g or t
  misc_feature (3)..(3): Wherein n may be a, c, g or t
  misc_feature (22)..(22): Wherein n may be a, c, g or t
  misc_feature (88)..(88): Wherein n may be a, c, g or t
nnnccccctcccccgggagcgntgacacccggaaccgatagcctgggagacatgacgaccggcacgctcgctcccgccccgttcgggnggttgctcacggcgatggtgaccgccctccacgacgacggctcggtcgacctcgagggaacggcccgggtcgccgagcacctggccgaccacggcaccgacggcgtggtcgtctccggtacgacgggggagtcgccgaccaccagcaccgcggaggacggccggatcc

SEQ ID NO: 6716 - protein, 85 aa, Homo sapiens
  misc_feature (1)..(1): Wherein Xaa may be any naturally occuring amino acid
  misc_feature (8)..(8): Wherein Xaa may be any naturally occuring amino acid
  misc_feature (30)..(30): Wherein Xaa may be any naturally occuring amino acid
XPPPPGAXTPGTDSLGDMTTGTLAPAPFGXLLTAMVTALHDDGSVDLEGTARVAEHLADHGTDGVVVSGTTGESPTTSTAEDGRI

SEQ ID NO: 6717 - DNA, 366 bp, Homo sapiens
gatccagaagtagcagcattccctttacttccgccaaattcaaatgagaggaacagaaattcctcaaacgggtcttccgctgaaactaacctaaatggacacagcagcagcggtaccatctctacttcggtgctgttgaatatgggttcggcagaaaagcacgctgggacgaccagaggagatcatatggaatcatcttcaatgaaatccttcgagaaactgggaaccagaccttcttctttattctatccaccacccgaaggaactgcgccgtaccagggaccaagggctaccgtctccggaaataagtctacaaggcaaacacaaggtacatactcatttccttctatgcggtatggtgtagat

SEQ ID NO: 6718 - protein, 122 aa, Homo sapiens
DPEVAAFPLLPPNSNERNRNSSNGSSAETNLNGHSSSGTISTSVLLNMGSAEKHAGTTRGDHMESSSMKSFEKLGTRPSSLFYPPPEGTAPYQGPRATVSGNKSTRQTQGTYSFPSMRYGVD

SEQ ID NO: 6719 - DNA, 288 bp, Homo sapiens
gaaattcccattgaagaagaatttccaagaccaggccaaccaacctttgaaaaaatgttttctggttactacttaggtgaaattttacgtttggccttgatggacatgtacaaacaaggtttcatcttcaagaaccaagacttgtctaagttcgacaagcctttcgtcatggacacttcttacccagccagaatcgaggaagatccattcgagaacctagaagataccgatgacttgttccaaaatgagttcggtatcaacactactgttcaagaacgtaaattgatc

SEQ ID NO: 6720 - protein, 96 aa, Homo sapiens
EIPIEEEFPRPGQPTFEKMFSGYYLGEILRLALMDMYKQGFIFKNQDLSKFDKPFVMDTSYPARIEEDPFENLEDTDDLFQNEFGINTTVQERKLI

SEQ ID NO: 6721 - DNA, 158 bp, Homo sapiens
ccggctcagacgctcaacgtgctgccggatacgggatcgaccaacctgtgggtcattgactcgacatgcacagatgagaagaactgcccatcttcgtcgcccaaatttactgcatccatgagcaagacgcatcaaagtagcggcttgtcatttcatga

SEQ ID NO: 6722 - protein, 52 aa, Homo sapiens
PAQTLNVLPDTGSTNLWVIDSTCTDEKNCPSSSPKFTASMSKTHQSSGLSFH

SEQ ID NO: 6723 - DNA, 197 bp, Homo sapiens
aagcttgaagtgtgatggaagttggaaatgagcagggaatttaagaggcagcacgcacacaggcatgcggcacccttgggaggcagaggcagggggattgtgagtctggagtgagctgggtctccatactgaaaaccaaaatataaaagtaaccatataaaagctgttcaaggcgtcattctgggtttctgtgatca

SEQ ID NO: 6724 - protein, 52 aa, Homo sapiens
MVTFIFWFSVWRPSSLQTHNPPASASQGCRMPVCVLPLKFPAHFQLPSHFKL

SEQ ID NO: 6725 - DNA, 359 bp, Homo sapiens
  misc_feature (359)..(359): Wherein n may be a, c, g or t
ctcgagcagtgcttccttgaggccgcagctgcttgggccgggagggagagccgcggagtataggaatgggcgtaggggtggccacacgagggcccttctcggagaacttctcccggggaaccctcgatgggggtgggggcattcctccctctatggaccaggctgccattggcaagcgatttacagaacgcgggtctgggtaaggcacgggccccctagcagcgaggccggcctgtcccctgccccgccttccagcccagagccaggatctgcatcatacctttccgtgcccttcaccctccgctgcccctgccctgtttcagttccctcccaggacacagaagctgagtgcccggatn

SEQ ID NO: 6726 - protein, 56 aa, Homo sapiens [sequence omitted]

SEQ ID NO: 6727 - DNA, 450 bp, Homo sapiens
gccgaattcggatattgggtactaagaatagattttagaggccaaggtgattcctcagataactgcgaccctggccttggtaggacgctcgctcaggatcttgaagatttgagtacagtataccaaacagtatctgacaggtctcttagggtgcaattgtacaaaactagtacaatatcactggacgtggttgtggcacattctagaggatctcttgccatgttcaaattctgtctaaaattacatgcagctgaatctccattaccgtctcacctgatcaattgcgctggaagatatgatgggagaggacttattgaacgctgcacacgactgcacccgcattggcaagcagaaggtgggttttgggcgaatggtccacgaaatggcgaatacaaagacttttggataccattaagtgagacttatagtatcgctggcgtttgcgttccg

SEQ ID NO: 6728 - protein, 150 aa, Homo sapiens
AEFGYWVLRIDFRGQGDSSDNCDPGLGRTLAQDLEDLSTVYQTVSDRSLRVQLYKTSTISLDVVVAHSRGSLAMFKFCLKLHAAESPLPSHLINCAGRYDGRGLIERCTRLHPHWQAEGGFWANGPRNGEYKDFWIPLSETYSIAGVCVP

SEQ ID NO: 6729 - DNA, 150 bp, Homo sapiens
  misc_feature (70)..(70): Wherein n may be a, c, g or t
  misc_feature (71)..(71): Wherein n may be a, c, g or t
  misc_feature (106)..(106): Wherein n may be a, c, g or t
cgggccgaagccaaagaggagcagcagcagcagcagctgaggcgcaagatcagcagccgcgagcgaaggnncatgcaggacctgaacttggccatggacgcgctgnaacaagttatcctaccctactccgcggcgcactgccagggcgcg

SEQ ID NO: 6730 - protein, 50 aa, Homo sapiens
  misc_feature (24)..(24): Wherein Xaa may be any naturally occuring amino acid
  misc_feature (36)..(36): Wherein Xaa may be any naturally occuring amino acid
RAEAKEEQQQQQLRRKISSRERRXMQDLNLAMDALXQVILPYSAAHCQGA

SEQ ID NO: 6731 - DNA, 449 bp, Homo sapiens
  misc_feature (40)..(40): Wherein n may be a, c, g or t
  misc_feature (115)..(115): Wherein n may be a, c, g or t
  misc_feature (116)..(116): Wherein n may be a, c, g or t
  misc_feature (205)..(205): Wherein n may be a, c, g or t
  misc_feature (206)..(206): Wherein n may be a, c, g or t
atcatctcagtagctgcagaaaaagcatttgacaaaattnaacaccctttcataataaacatactcaacaaactaggaacagaagtcatctttctcaacctgataaagagaatcnntgaaaaatccacagctaacatcctacctgacgattaaaaaactggatatttttccctaagatcagtaacaagacgagaatgtccactcnnttggcccctatttaacatttaccttgaaattatgtttaattgggaggtgcctaaacggggccaattaagccagaaaattaattaaaaggtttccaattggaattggagaaccaactggccctccttgccgaaaacaccatcctgtgttttgaaaatccctagggatccccaccccccccccccccaaaaaaattttttttttagccaaacccattacattgaatattctccatttttaccgga

SEQ ID NO: 6732 - protein, 50 aa, Homo sapiens
  misc_feature (14)..(14): Wherein Xaa may be any naturally occuring amino acid
  misc_feature (39)..(39): Wherein Xaa may be any naturally occuring amino acid
IISVAAEKAFDKIXHPFIINILNKLGTEVIFLNLIKRIXEKSTANILPDD

SEQ ID NO: 6733 - DNA, 255 bp, Homo sapiens
ggatccccagtgtactctaacaagtgccaggactgtgtatgcaccgacagcatggacaacagcacccagctcaatgtcatctcctgtacccatgtgccctgcaacatctcctgcagctctggctttgagcttgtggaggttcctggggaatgttgcaagaagtgccagcagacccattgcatcatcaagaggcccgagcagcagtacatcattctgaagcctggggagatacagaaaaaccccaacgacaggtgc

SEQ ID NO: 6734 - protein, 85 aa, Homo sapiens
GSPVYSNKCQDCVCTDSMDNSTQLNVISCTHVPCNISCSSGFELVEVPGECCKKCQQTHCIIKRPEQQYIILKPGEIQKNPNDRC

SEQ ID NO: 6735 - DNA, 433 bp, Homo sapiens
gtgcacattgtgacacaggaaggaggggagataaagtgggaagagcctcagatggcaacacagttctaagaaagttcagccaggacaaaaggtcatcctcaagccaaagctgcagcctgttagaggagtcccgggttttgcaggggtggccctgcatgagtgtaggtctttggcggggagcagcctgcctggcatcagtaggtccagagcccagcagctgcagcagtcagccctctgctcctcacaacagcagatcggaacagcacctttctatgattgccacagtgggcctggaagaactggttaaatttcagggtgggaatgatatttaatgcagcatacttttttagtctctcaagatccttctgtaaaaaactggagccatactgcattctctcagagactcatcctgcacaaaagtggggctctgaga

SEQ ID NO: 6736 - protein, 65 aa, Homo sapiens [sequence omitted]

SEQ ID NO: 6737 - DNA, 258 bp, Homo sapiens
gatctcgtgagggttaggttagcatatgaaacagaacataagagagtaaagctaggaagaataatcaagaaaatatataaggaaccagcttcagccacgctaatcaaaaatgattatattcctaactggttttgtcattggtggaatttttataggggttatgttccaactgtacttggcatgataccatatgcaggtgtttccttttttgctcacgatttacttcatgatgggctgaagaggcctttctttggcccc

SEQ ID NO: 6738 - protein, 86 aa, Homo sapiens
DLVRVRLAYETEHKRVKLGRIIKKIYKEPASATLIKNDYIPNWFCHWWNFYRGYVPTVLGMIPYAGVSFFAHDLLHDGLKRPFFGP

SEQ ID NO: 6739 - DNA, 548 bp, Homo sapiens
acgcgtgttggatgacaactgggcctggcacacgaagtgggaaattctcaactgtgagagtctgagagcggggaccttgctgccctcagccttgtccctgcggagcctgatgtaatccgtggcatgtggaggccccttgctaagtgctgtggactccgaccctgtccacatccctctgccggtaccagccccggaggcattgtgcaaagggtctcacacatctggagaaaccctcccactgatgtagcctctgttctttgcaaggcccagtgtgcacccagcagtctcgcttgagcccccgtccactatgagggaggcagggccagaattcatatgccccttttaaggacaagatacttgaggcccagaaagcagaagaggggtgtgcctgtgacgagagcaggagcacgggcgtgggggtctctcacctctcagttcggcacctcacccaggtgcctgctgctcccccgatgcttggcactgtcctaccaggatgtgctgctgacaacttctcagcctccctttaaaaataaaggtgtcttagatct

SEQ ID NO: 6740 - protein, 71 aa, Homo sapiens
MPLLRTRYLRPRKQKRGVPVTRAGARAWGSLTSQFGTSPRCLLLPRCLALSYQDVLLTTSQPPFKNKGVLD

SEQ ID NO: 6741 - DNA, 882 bp, Homo sapiens
ttgcaagacttccatctgctggaaaatattgcaagtttcgatagagaaagagttccggagcgtgtagtccatgccaaaggtggtggttgtagactggagttcgaactaacagattctttgagtgatattacatacgccgctccataccaaattgggggttacaaatgtcccggttttgttcgttttttcaccgttggtggtgaaagtggtacaccagacactgcaagagacccaagaggtgtttcttttaaattctataccgagtgggggaaccatgactgggtcttcaacaatactcccgtcttcttcctcagagacgctattaagtttcccgtatttattcattcgcaaaagagagaccctcagtctcatctgaatcagtttcaggacactaccatatactgggattatctaacattgaatccggaatcaatccatcaaataacttacatgtttggtgatagaggtactcctgcttcgtgggctagtatgaacgcgtactctggtcattccttcatcatggtcaacaaagaaggtaaggacacatatgtgcaattccacgtcttgtcggatactggttttgaaaccttgactggagataaggctgctgaactgtcaggctcccaccctgattataatcaggcaaagctgttcactcaattgcaaaatggcgaaaagccaaaatttaactgttatgtgcaaacaatgacacccgaacaagcaactaagttcaggtattcggtaaatgacctaacgaaaatatggccacacaaggaattccctttgagaaaatttggtaccatcaccctaacggagaatgttgacaattatttccaagaaattgaacaagttgcattcagtccaacgaacacttgtatcccg

SEQ ID NO: 6742 - protein, 294 aa, Homo sapiens
LQDFHLLENIASFDRERVPERVVHAKGGGCRLEFELTDSLSDITYAAPYQIGGYKCPGFVRFFTVGGESGTPDTARDPRGVSFKFYTEWGNHDWVFNNTPVFFLRDAIKFPVFIHSQKRDPQSHLNQFQDTTIYWDYLTLNPESIHQITYMFGDRGTPASWASMNAYSGHSFIMVNKEGKDTYVQFHVLSDTGFETLTGDKAAELSGSHPDYNQAKLFTQLQNGEKPKFNCYVQTMTPEQATKFRYSVNDLTKIWPHKEFPLRKFGTITLTENVDNYFQEIEQVAFSPTNTCIP

SEQ ID NO: 6743 - DNA, 220 bp, Homo sapiens
acgcgtgcatctgacatgccatttgctgtgtcttctgaaatcctgtatgggccaggggtggcgtctgttgtggggagatctgtaggtctcaggcctgcctcccacacacacacagagcacgtgcctcatggccctgacggcagcaccaggcgccttctgaatgtgtgtccccaattagcgcacaccacgggtccctgcactgcacggggcccaaaacagt

SEQ ID NO: 6744 - protein, 68 aa, Homo sapiens [sequence omitted]

SEQ ID NO: 6745 - DNA, 320 bp, Homo sapiens
  misc_feature (313)..(313): Wherein n may be a, c, g or t
  misc_feature (320)..(320): Wherein n may be a, c, g or t
ggatcctagagaaggtgccatgggcaggaacatgaaggtgcaggcttctttactctcttaagccagcggccacaggggaagcaactttgcctgccaggggccttcagcactgtctgaagaaagttttgagtatcacaactaggggcaggggtgctgccaacatctaccatgcagagaacgcaccactacaaatggcactagtgccgagtggagaaatcctgtccggaaccacgtagcactttttggttcagggttggcttccccagtgaccatcccgggcttctaaggactggctttcttccctttgcccttntgtaccn

SEQ ID NO: 6746 - protein, 54 aa, Homo sapiens
MVDVGSTPAPSCDTQNFLQTVLKAPGRQSCFPCGRWLKRVKKPAPSCSCPWHLL

SEQ ID NO: 6747 - DNA, 413 bp, Homo sapiens
atcgatacgctgattggcagtgttatctcttggttagcggtattctttattttgccagattgggtgtatcgaaattacccatcacatttgccgaaggaaaaattgcgtcgcagtgcggattatttgcgtgaattgatgcgtttttatcgagaagaagatgtgagtgaacaagtctatcgccacagtcgccgtcgagcttataacgctgatgcgttattaacatcgactctcgttaatatgcagcaggcgccagatcactaccgtagcgacacagagttatggcagcgtctggttattcgtagccatactttgtttaattatattgctgcgtttagtgcccaccgaggcaccttgatagagcaatctagtaaccaagtattagcggatgctggtaactatattgtagaaagctt

SEQ ID NO: 6748 - protein, 137 aa, Homo sapiens
IDTLIGSVISWLAVFFILPDWVYRNYPSHLPKEKLRRSADYLRELMRFYREEDVSEQVYRHSRRRAYNADALLTSTLVNMQQAPDHYRSDTELWQRLVIRSHTLFNYIAAFSAHRGTLIEQSSNQVLADAGNYIVES

SEQ ID NO: 6749 - DNA, 217 bp, Homo sapiens
ggatccatcacactggagaggattaggactgggtggcaggaatgcagagaggaagaaagagctgatgttcagatttcaactcctgaaataggcactcgaagcccatttccgagaattcaataggcatgaaaggcagggcttctgatgtacaaaactggggtttgggaaaggaaaacatttaatagctttattgaaatgggttttttcttcctccata

SEQ ID NO: 6750 - protein, 51 aa, Homo sapiens [sequence omitted]

SEQ ID NO: 6751 - DNA, 300 bp, Homo sapiens
  misc_feature (286)..(286): Wherein n may be a, c, g or t
  misc_feature (287)..(287): Wherein n may be a, c, g or t
  misc_feature (288)..(288): Wherein n may be a, c, g or t
  misc_feature (290)..(290): Wherein n may be a, c, g or t
  misc_feature (295)..(295): Wherein n may be a, c, g or t
  misc_feature (298)..(298): Wherein n may be a, c, g or t
tgatcattaagttgttgcccttcccctagagaatccttggccactacatccacaagagcaatgtttggtttttcagctttcactggtgattccttggttacatttggagattccgaatctttctgaacctcattcaccaaatttatttccagaaaactcattttgattagccagttgcttgcatggtaccgaggcaggacaaacaaattttattggcactgcagaaactgatgattgtgggatcacaagttcagcatcctgcctggccgaagttctcatttcaggnnncnccccnccncc

SEQ ID NO: 6752 - protein, 53 aa, Homo sapiens
MSFLEINLVNEVQKDSESPNVTKESPVKAEKPNIALVDVVAKDSLGEGQQLND

SEQ ID NO: 6753 - DNA, 351 bp, Homo sapiens
agatctctgaattccaggccagcctggtctacagagtgaggaggccctgtctcaaagttttgaaccagaaactttgaaagagaaattggactcccagcctgtgtgtgttgttggaaagcacatttcatggcaccagagacagtttgcagccttcctcttgccgtggtgaagcaacaggagccttttctcccttgaaatgtctcgtctgtgattgagtttttggtagtgggtatgtggttgagccatgtatgagcacatgccagtgtgtgctgacaagtgttccagtatgggcttgctgtgctggtacaggcttgacactgccgctctctgaggttcctgtagttcactagt

SEQ ID NO: 6754 - protein, 68 aa, Homo sapiens
MCSYMAQPHTHYQKLNHRRDISREKRLLLLHHGKRKAANCLWCHEMCFPTTHTGWESNFSFKVSGSKL

SEQ ID NO: 6755 - DNA, 356 bp, Homo sapiens
ctgcagaagaacttgaggctgggcaggtgacttgtgcaaggtctcaggaggagtgggactggaacccgggcactggaacaccttactgcagggctgccctgagcctctttgtgcggttatcagggctaccagggctgtgaccttcagtgacaccgttcaggcccctgtcggtgtcgtgtgattctattatgtcacatgtgggctttaggagtgggccagggcctttggctctgggcctagaggttccctgcaggccatggcccctgagtgacataggagacttcttccccaaggctgcctctgggtcttctcccacctggggaggcatttactggaaccacaggggatgggatggc

SEQ ID NO: 6756 - protein, 81 aa, Homo sapiens
MPPQVGEDPEAALGKKSPMSLRGHGLQGTSRPRAKGPGPLLKPTCDIIESHDTDRGLNGVTEGHSPGSPDNRTKRLRAALQ

SEQ ID NO: 6757 - DNA, 444 bp, Homo sapiens
agatctttacctggacactggctaatgtgctgtgtagacacagaagtgagaacagaaaggaccaagtgcctgccccaacatggcccagcccaatctctgggcaaagcctcttatgtgtctgaagttggactgctgtgtgctgtcaaaggtaaacaaagctggaccctggtcaaaggggtcagggcagattttattcagcagtagcttttgccgtagaaaaaaaaaagcctggcttgaactggactcaactctgatttgtgcagacatgactggttgttttaaaaggagaatgagtgagtgggggtgagtggggactcagtagagtcaaagaagtgtgaaaattgcaaaaagcagtagggagaggtttggcttatgtggagccatctgggtttgctaagatgcttatcgaagtttgaagtttggtttctaccttcccacagagat

SEQ ID NO: 6758 - protein, 81 aa, Homo sapiens [sequence omitted]

SEQ ID NO: 6759 - DNA, 161 bp, Homo sapiens
atctacggcatcccctacgccaccgagaacatcgccctagttcgcaacaccaaattcgtcaaggacgccccaaagaccttcgacgacatgatcgagatgggcaaggaagtccggggccaagtaccccttcctcgtccggtttgggatcccaagcaggccag

SEQ ID NO: 6760 - protein, 53 aa, Homo sapiens
IYGIPYATENIALVRNTKFVKDAPKTFDDMIEMGKEVRGQVPLPRPVWDPKQA

SEQ ID NO: 6761 - DNA, 195 bp, Homo sapiens
actagtaaaaacgaacaagaaaaaatttcgaacgataaacttgaagttatggttatcaagactgtttcaacattatgtgagacatgccgtgaggagttgactccatatttgatgcattttataagctttttaaacacagtcattatgccagactccaatgtttcacatttcactagaactaaattggttagatct

SEQ ID NO: 6762 - protein, 65 aa, Homo sapiens
TSKNEQEKISNDKLEVMVIKTVSTLCETCREELTPYLMHFISFLNTVIMPDSNVSHFTRTKLVRS

SEQ ID NO: 6763 - DNA, 185 bp, Homo sapiens
gaattctcagcaacgctggggagtcaacagacatttaaatacaagaaccaatgctgcaccactgacaaatgcaacaaagaaaacatagcactgtctcgatcatcagaaatcaatggtgttgaatgtactgcctgctacagtgagcaaaacaagacatgcagcacaataactaccctgaagtgcac

SEQ ID NO: 6764 - protein, 61 aa, Homo sapiens
EFSATLGSQQTFKYKNQCCTTDKCNKENIALSRSSEINGVECTACYSEQNKTCSTITTLKC

SEQ ID NO: 6765 - DNA, 303 bp, Homo sapiens
  misc_feature (19)..(19): Wherein n may be a, c, g or t
accgatggacacctggccnccctcaaagcggccgatggccaaggagactcgcattatgagagcgtcatccattatggtcccgaggtgatgaacaaaatgaacgagtggtgtattgagcaccacggtaatagcggtctcaccgccaaagttttggcaagtgagaaggctttggcccaggtaaaaaataagctgttcgagtccatccagcgctacatcccagacaagaacgttggcgtcttggcaggcaatagtgtacatatggaccgcttgttcatggtccgcgagtttcccaaggtcattgat

SEQ ID NO: 6766 - protein, 101 aa, Homo sapiens
  misc_feature (7)..(7): Wherein Xaa may be any naturally occuring amino acid
TDGHLAXLKAADGQGDSHYESVIHYGPEVMNKMNEWCIEHHGNSGLTAKVLASEKALAQVKNKLFESIQRYIPDKNVGVLAGNSVHMDRLFMVREFPKVID

SEQ ID NO: 6767 - DNA, 357 bp, Homo sapiens
  misc_feature (196)..(196): Wherein n may be a, c, g or t
ctcgagtgcctgtaaagtacaagctccagatcaaaaaagcttctagatggatcctttccaaacttggtgtcttttctacaaactctgtgcctcaacaaccatttctaagtgcttcagcgccagtcagcaaagtaaataagttctgtgctgccgccgcttccaccttccactccactccgggaagaaagagcgccantcatgtcaaacattacgattgacccagatgtcaagcccggtgaatatgtcatcaagagcctctttgcagaatttgctgttcaagctgaaaagaaaattgaagttgtaatggctgaacccttggagaagctattgtccagatctcttcagaggggtgaagat

SEQ ID NO: 6768 - protein, 74 aa, Homo sapiens
  misc_feature (21)..(21): Wherein Xaa may be any naturally occuring amino acid
ISSVLPPLPPSTPLREERAPXMSNITIDPDVKPGEYVIKSLFAEFAVQAEKKIEVVMAEPLEKLLSRSLQRGED

SEQ ID NO: 6769 - DNA, 320 bp, Homo sapiens
  misc_feature (1)..(1): Wherein n may be a, c, g or t
  misc_feature (238)..(238): Wherein n may be a, c, g or t
  misc_feature (264)..(264): Wherein n may be a, c, g or t
  misc_feature (282)..(282): Wherein n may be a, c, g or t
  misc_feature (300)..(300): Wherein n may be a, c, g or t
  misc_feature (302)..(302): Wherein n may be a, c, g or t
  misc_feature (307)..(307): Wherein n may be a, c, g or t
  misc_feature (314)..(314): Wherein n may be a, c, g or t
ngtgttgatgacgtctggcggaggccctgaccgcagggtgctgtgcctattcctggcaggggcgggtgccatcctagctgcagcagagccccttccggaatcatgcggaccctcccgagaggcacagaaggccgaggacgcccggctgggttgagcttcctgtctaatcagccactgaatcgggcgcggaaattcggctcagttatcacccggggaaaagccacaacagccggcgctnactccgggagactcagagactccttnaggggaaagagtcagatncctcatgccacctccatnanagccnacgcctnaaaaca

SEQ ID NO: 6770 - protein, 72 aa, Homo sapiens
  misc_feature (46)..(46): Wherein Xaa may be any naturally occuring amino acid
  misc_feature (54)..(54): Wherein Xaa may be any naturally occuring amino acid
  misc_feature (60)..(60): Wherein Xaa may be any naturally occuring amino acid
  misc_feature (66)..(66): Wherein Xaa may be any naturally occuring amino acid
  misc_feature (67)..(67): Wherein Xaa may be any naturally occuring amino acid
  misc_feature (69)..(69): Wherein Xaa may be any naturally occuring amino acid
  misc_feature (71)..(71): Wherein Xaa may be any naturally occuring amino acid
MRTLPRGTEGRGRPAGLSFLSNQPLNRARKFGSVITRGKATTAGAXSGRLRDSXRGKSQXPHATSXXAXAXK

SEQ ID NO: 6771 - DNA, 307 bp, Homo sapiens
  misc_feature (1)..(1): Wherein n may be a, c, g or t
nccaaactcctccatttcccaacggctcaactcaccccagcaagttatgagaaagtcctaacagttgagaggtggaagagaaacaaataaaggacatgcggcaccccaacctgcagcttactccacacgtctgatggcctggaacgaccccctgcttttcagcggggatactccgcgccgtcgtgggacaagacggcaggacaggagcctgaaacaacagcacctcaaaggagcagctctgcgcagtaagcagcgatggacccccaagctcctccgtaactacggaaagcttcggtgagggaccggt

SEQ ID NO: 6772 - protein, 54 aa, Homo sapiens
MAWNDPLLFSGDTPRRRGTRRQDRSLKQQHLKGAALRSKQRWTPKLLRNYGKLR

SEQ ID NO: 6773 - DNA, 315 bp, Homo sapiens
  misc_feature (1)..(1): Wherein n may be a, c, g or t
  misc_feature (315)..(315): Wherein n may be a, c, g or t
nataaggtaacatttataaatgccaacgattagggaacttaatatgtttggagttggctgttatttcaaacataccactgaaaaaatcatgggacaccaagccgggtaacttcattttttcttcccgggggaaaaaaggataaggagagagacaagaagtgagggctgtaataacttgctgatctagtcgtagtcctgggaatatgaggagcaggcagtgaatgctcccccaaatgtctcccacaaaccactggtgcaccaaaagttttctgtttatttatatccatttggagaactcctaacctgatgcctctn

SEQ ID NO: 6774 - protein, 66 aa, Homo sapiens
MDINKQKTFGAPVVCGRHLGEHSLPAPHIPRTTTRSASYYSPHFLSLSLSFFPPGRKNEVTRLGVP

SEQ ID NO: 6775 - DNA, 216 bp, Homo sapiens
tccggaccggtaacttcaggcgcaagtctgaatttcagggatgaacctgctttggattctgtttgagccgactcagtgcagaggcagtgacaggggctgtgggtttaggggtgatggatccatgaaggctgccacttggagcgagcagacagttggcgataccctcccactaacttgctccgctgctccgggctgttcacagacagacccacgcgt

SEQ ID NO: 6776 - protein, 58 aa, Homo sapiens
MNLLWILFEPTQCRGSDRGCGFRGDGSMKAATWSEQTVGDTLPLTCSAAPGCSQTDPR

SEQ ID NO: 6777 - DNA, 328 bp, Homo sapiens
  misc_feature (1)..(1): Wherein n may be a, c, g or t
ngctggttaaatgagaagctccttgtcttgagaatcacataaactaagactcctataatcaaacacagcaggtagaagaatgactctcccggcaggtccaggccaacccaggccaactcaggcaacagagaactgggctgtcagggccccgggtctctatcaccacattttcagcctacaaacaattcaagcaggtgtagcccaacatctccttcagccgttacctaaaattctggtaaagacccctggaatctgagtgatgccacttcctggcgcactctccaagatacacaggccgttaaacacaggcctaggtaacagaacgcgt

SEQ ID NO: 6778 - protein, 58 aa, Homo sapiens [sequence omitted]

SEQ ID NO: 6779 - DNA, 237 bp, Homo sapiens
tgatcacacattttgcttgatgacaaattaatcaaacttgatttcttggatgagataggtactaaagagctacaactccccacgggccgaaagtcaatacggcccttctggctccgattagagaaacaaaaggatatctgagagccatcttcctccctgcctgggccgagggaggaggctgaaaggcagaggggcttgtaaaggagaggagccttattaaaacacatttcagctgtg

SEQ ID NO: 6780 - protein, 75 aa, Homo sapiens
MCFNKAPLLYKPLCLSASSLGPGREEDGSQISFCFSNRSQKGRIDFRPVGSCSSLVPISSKKSSLINLSSSKMCD

SEQ ID NO: 6781 - DNA, 288 bp, Homo sapiens
  misc_feature (274)..(274): Wherein n may be a, c, g or t
  misc_feature (275)..(275): Wherein n may be a, c, g or t
  misc_feature (276)..(276): Wherein n may be a, c, g or t
  misc_feature (277)..(277): Wherein n may be a, c, g or t
  misc_feature (278)..(278): Wherein n may be a, c, g or t
  misc_feature (280)..(280): Wherein n may be a, c, g or t
  misc_feature (281)..(281): Wherein n may be a, c, g or t
  misc_feature (282)..(282): Wherein n may be a, c, g or t
  misc_feature (286)..(286): Wherein n may be a, c, g or t
  misc_feature (287)..(287): Wherein n may be a, c, g or t
tgtacagattgagaatcccaatttcgaaaatctgaaattgtaaatgctctagtatctaaaactttttcagcaccagcgtgagaatcaaagaaaatgctcattggagcattttggatttcagattttcgggattggggtttaaggcaaatattccaaaatgtgaaaaaaaatcttaactccataacatttccagtcacaagcattttggataagggatactcaatctgtatttgatttcagtatgttcttgggtttgtttctggaatttattctnnnnncnnncccnnc

SEQ ID NO: 6782 - protein, 67 aa, Homo sapiens [sequence omitted]

SEQ ID NO: 6783 - DNA, 219 bp, Homo sapiens
  misc_feature (49)..(49): Wherein n may be a, c, g or t
aagcttcttgatggcaaggctggtccctggacgatccatgttcctacgngggagaagctctatgtttacgacgcggcaatgaagtacaagtcggaaggtcatgacatggtcatcattgctggctccgagtacggcagtggcagctctcgtgactctgctgccaagggaccaatgctactgggtgtcaagtcggtgattgcaaagagcttcgagcggatc

SEQ ID NO: 6784 - protein, 73 aa, Homo sapiens
  misc_feature (17)..(17): Wherein Xaa may be any naturally occuring amino acid
KLLDGKAGPWTIHVPTXEKLYVYDAAMKYKSEGHDMVIIAGSEYGSGSSRDSAAKGPMLLGVKSVIAKSFERI

SEQ ID NO: 6785 - DNA, 301 bp, Homo sapiens
  misc_feature (301)..(301): Wherein n may be a, c, g or t
cctaggctcatgcagcaaggagcccatggtcacatctaattgaatcaattagaaaccgatggctggaaactagaccaaggtgaaaggagaagttgccttctcctgtatgagaagccttgcaaagcaaagcggtggaatggagaatgggggaagccctggggctacaatagtagccacaacgggggctggaaagatggttgagtggttaagagcactgactgctctttcagaggacctgagtaaccactcagttactcccagtaaccacatggtggctcacaaccatctgtaatgggattcn

SEQ ID NO: 6786 - protein, 66 aa, Homo sapiens
MWLLGVTEWLLRSSERAVSALNHSTIFPAPVVATIVAPGLPPFSIPPLCFARLLIQEKATSPFTLV

SEQ ID NO: 6787 - DNA, 323 bp, Homo sapiens
gcgcgccggggagggcccagggagtaggaatcccaccttgcatggtggctcagggtggtcagggagggcgtggctgtcacatggtttctggactgtcagcctttgggctgagtgaggcgttactgccatcaggggtccctggaggggctctctccatcctcttcctggcgtcaggtgttctcggcggcctctcggtaacagcctggcctttgcttctgtccggggcgcgtggcccaagctgaacagtgcactccgctgccaggcaggtggggcagaggcgggccactcccttccggttatattcaccacggcagctgggaccg

SEQ ID NO: 6788 - protein, 66 aa, Homo sapiens [sequence omitted]

SEQ ID NO: 6789 - DNA, 225 bp, Homo sapiens
gctatggtttctgtattaagcaaaatcatcactggtgacctacccgcccgctttgtctaccgcgataagacttgcgtggctttcttatccatcgagccgctgcgctacggccacaccctggtcgttcccatcgaggaagtagataagtggaccgacctggatccgcagacctggacgcacctgaacgaggtggccctggaaatcggtgaggccatcaagaacgcg

SEQ ID NO: 6790 - protein, 75 aa, Homo sapiens
AMVSVLSKIITGDLPARFVYRDKTCVAFLSIEPLRYGHTLVVPIEEVDKWTDLDPQTWTHLNEVALEIGEAIKNA

SEQ ID NO: 6791 - DNA, 343 bp, Homo sapiens
tccggatctcaacttactttttttaaaaaggagggctatggaaaatagaattacagcctgggacctgcctagcatacatactggaatagaaacatctgtttatcctgagggaagaataggagacatgagctggggaaggggaatctgtctaggggtgcagaggggcttgagtaggtgtcacagaataatttggggggtttgcctgggcagacggcctgcatgctttcaacaggttgtgtgtgagtagagctgctacaaatctcattggcagtggctcacatctcagtgaactgtctctctggttttcaggttctacgagggcaacagcacttgggatgtgcac

SEQ ID NO: 6792 - protein, 69 aa, Homo sapiens [sequence omitted]

SEQ ID NO: 6793 - DNA, 222 bp, Homo sapiens
agatcttcttcatcatcttcctctataatgaaccccactccagtactcgcggttactaaggacgacaaaagcacttctggtgaagatcatgcacatcctactttgctgggggcagtatccgctgttccatcatctcccatttcaaatgcttcaggtacagcagtttcttctgatgtagaaaatggtaatagtaataataacaatatgaatattaatactagt

SEQ ID NO: 6794 - protein, 74 aa, Homo sapiens
RSSSSSSSIMNPTPVLAVTKDDKSTSGEDHAHPTLLGAVSAVPSSPISNASGTAVSSDVENGNSNNNNMNINTS

SEQ ID NO: 6795 - DNA, 360 bp, Homo sapiens
gcgttggtggtcggtgagggcaaacccttcatcggcctgctggtcaccctcgacgaagaggagctcaagcgctggaaggccaaccgcaacatccccgccaaccgcaaaaccgctgatctggcccaggacccggcgttgcgggtggaagtgcaagacgcggtcaatatggccaacgccaccgtctcgcgcgccgaggcaatcaagaaattccgcatccttgaccgtgacctctcagagcacaacgacgagatgaccccaaccatgaaggtcaaacgcaatgtggtgttccagcgctttcaggatgacatcgacaaactctatcaacgctaactgtcgtcttccggcgcgccttcagtgcac

SEQ ID NO: 6796 - protein, 109 aa, Homo sapiens
ALVVGEGKPFIGLLVTLDEEELKRWKANRNIPANRKTADLAQDPALRVEVQDAVNMANATVSRAEAIKKFRILDRDLSEHNDEMTPTMKVKRNVVFQRFQDDIDKLYQR

SEQ ID NO: 6797 - DNA, 336 bp, Homo sapiens
gacccggcctggcatcaagtcgatctggagatactgccgggcgtctcggcctcgctggccaccgccgctcaggcgggggcgccgctggggcatgacttctgcgtgatgtcgctgtcggacaacctcaagccctggtcgattattgaaaagcgcctggacctggcatcccaggccgacctggccctggcgttctacaacccaatctcgcgctcgcgcccgtggcaattggggcgcgcgctggaaatcgtcgcagttcaccgcacgccacagacgccggttgtgctggggcgtgacatcggtcgaccgggccagaccttgcgtgtcaccacgctgggg

SEQ ID NO: 6798 - protein, 112 aa, Homo sapiens
DPAWHQVDLEILPGVSASLATAAQAGAPLGHDFCVMSLSDNLKPWSIIEKRLDLASQADLALAFYNPISRSRPWQLGRALEIVAVHRTPQTPVVLGRDIGRPGQTLRVTTLG

SEQ ID NO: 6799 - DNA, 292 bp, Homo sapiens
agatctaaagtgcgtgtcacctttctaggttctgggtcacatcttctgggctggccaaggcctgggcaagagaaccctgtatcctggaactgcctgggcattggaggaggtgatgggttaattacaattcgtttggcaggcaggggaggcgagggggcaagaggaagtggaaacatgacgtgactagggacgctgccccaggctgctcgctgcccgctcctgacttctcccatctggtttccatctgacccaagcagctggccagatggttttcatttgcagatgaaacccg

SEQ ID NO: 6800 - protein, 77 aa, Homo sapiens
MGEVRSGQRAAWGSVPSHVMFPLPLAPSPPLPAKRIVINPSPPPMPRQFQDTGFSCPGLGQPRRCDPEPRKVTRTLD

SEQ ID NO: 6801 - DNA, 390 bp, Homo sapiens
  misc_feature (1)..(1): Wherein n may be a, c, g or t
ntcgcgagcacactccagcctctagagttatacaaccggtacaatgagcttttcttcaaaaagcatgattggatatcaaataataataaatttgtgatgatgagatcattgttggtattactagctcaaattgaacaatggaaagatttcgaaacacttttcgctaaatacatggatcgtattgaaaacattgaaaacttgccatcatctacaacgccaaatattaaactaagaagcatattcagcggattgttcccttataaagtaagtcagttgattgcaatgaataaaatcgatgagctgccattactgtggaagaaattgcgagaaaaaggttttattttagataatatatcgtggaacagcgctgtagaagcgttatttaaggat

SEQ ID NO: 6802 - protein, 130 aa, Homo sapiens
  misc_feature (1)..(1): Wherein Xaa may be any naturally occuring amino acid
XASTLQPLELYNRYNELFFKKHDWISNNNKFVMMRSLLVLLAQIEQWKDFETLFAKYMDRIENIENLPSSTTPNIKLRSIFSGLFPYKVSQLIAMNKIDELPLLWKKLREKGFILDNISWNSAVEALFKD

SEQ ID NO: 6803 - DNA, 344 bp, Homo sapiens
  misc_feature (1)..(1): Wherein n may be a, c, g or t
ngcgtggtgggcctgcagaacgtgtttgccggtggcgacattgcagcttacccttgggacaatggcgttgtgcgtattgagcattggaatgtggcttgcaaccatggacgcgacattgggcggaccattgcctctggtcgattgcatccttatcgccatattcctgtgttctggtcaggtctaacttcgccgctgcgatatgctggtgtaggtctaggctacaaccagatgcacgtggatggtgagcctgatgaagctgagtttattgcctattatgctaaggatgatcgagttatcggggtagcaacgtgcgtatgaatgcaggatgcttgactaactttcag

SEQ ID NO: 6804 - protein, 105 aa, Homo sapiens
  misc_feature (1)..(1): Wherein Xaa may be any naturally occuring amino acid
XVVGLQNVFAGGDIAAYPWDNGVVRIEHWNVACNHGRDIGRTIASGRLHPYRHIPVFWSGLTSPLRYAGVGLGYNQMHVDGEPDEAEFIAYYAKDDRVIGVATCV

SEQ ID NO: 6805 - DNA, 183 bp, Homo sapiens
gagttgattttagcggatattgccactttagacaaaaggatcgatcgcttgcaaaaagccctgaaaagctcaaaagacgctaaaaatcttttagaatgcgctttgagtttaaaaacgcatttagaagaattaaagccggcgaaaacttttcccttgaatgcaagcgaggcttttttagaatta

SEQ ID NO: 6806 - protein, 61 aa, Homo sapiens
ELILADIATLDKRIDRLQKALKSSKDAKNLLECALSLKTHLEELKPAKTFPLNASEAFLEL

SEQ ID NO: 6807 - DNA, 277 bp, Homo sapiens
cctaggttctcaaccgacgtgcaacccttaccgtgtcgacgttcaggccagacacgaaagggattgcacgtccttaactgcgcgattttggcagatggcgtcgaatgaggacgaccacatcgacaagtgacgaagcgaacactggaggtacctcagatcgcttggcaactggatcggtcccgccggtcgtgtcacacagtctgtgtaggtggtcgaggatgactgggagaaagtctagctgcacgggaatccatcaatggccaggtctatccgatcg

SEQ ID NO: 6808 - protein, 57 aa, Homo sapiens
MRTTTSTSDEANTGGTSDRLATGSVPPVVSHSLCRWSRMTGRKSSCTGIHQWPGLSD

SEQ ID NO: 6809 - DNA, 387 bp, Homo sapiens
gtgcacgattttcttgccgataatctgtcggcatcaggttttacagtgacgggaaatgccgacggatccttgactttcatctcaaatcgcggcgacaccaaggggtggagtggaggcttcactagttccgacgaggcggcggggctgactttgcgtcacggctgaagctgtggaaggtacagggggcgtgagacatattgataatccatgcagttcgtcttgcgtggcccggaaccatcggtgtaataattgctgtcgcctcctattctggggatgatcgaatatttcctttttggggtgtggtgggatgatgtcaagcatccacccaatgaagggaaacaatcgttcggattgtgtagaaagagatcgagatgagtatatagccgt

SEQ ID NO: 6810 - protein, 79 aa, Homo sapiens
MLDIIPPHPKKEIFDHPQNRRRQQLLHRWFRATQDELHGLSICLTPPVPSTASAVTQSQPRRLVGTSEASTPPLGVAAI

SEQ ID NO: 6811 - DNA, 438 bp, Homo sapiens
  misc_feature (430)..(430): Wherein n may be a, c, g or t
tctagaatctcgagcattcatttttgtttagtccagaactggtctattactgtggttcatgacggtggttagtactgtcggcagcattggaggacagatgataatctgtgcggagctgggcttggctgtcaggggacactagtatgtcctgttggtgacaggcccaaacctgaaaagtcaagatactgagttcatcctttaggggaatgtctaggtaagcctcccacggaggggttgcagggaaaatgaatacaggcttttccctggctttttttctttggtttatcctcatatcttttgttccccaaaagtctgtctggtctcaggattacattcatataagatatggggcaggagatgatttgtaacttgtatttcacttacagtcacagtactttctgtctgactgcttccccttagttgaaggatnctcttaga

SEQ ID NO: 6812 - protein, 81 aa, Homo sapiens [sequence omitted]

SEQ ID NO: 6813 - DNA, 337 bp, Homo sapiens
  misc_feature (331)..(331): Wherein n may be a, c, g or t
  misc_feature (332)..(332): Wherein n may be a, c, g or t
  misc_feature (333)..(333): Wherein n may be a, c, g or t
  misc_feature (334)..(334): Wherein n may be a, c, g or t
  misc_feature (335)..(335): Wherein n may be a, c, g or t
  misc_feature (336)..(336): Wherein n may be a, c, g or t
  misc_feature (337)..(337): Wherein n may be a, c, g or t
tcgcgaggcctcactatggagccttctgaggtgctcaaccttattaaagactccggactacgcggtcgtggtggtgcaggcttccccactggggtgaaatggtcctttgttccccaaaacaatcccaaccccaaatacctggttgttaacggagacgaatccgaacccggcacgtgcaaggacatgccgctcattatggcaagcccgcacacgcttgtcgaaggtgctcttatctcccgctacgctttcggatccgagcaggctttcatctacctccgtggagaagttgttcaggtagcccggcgccttgaagaaaaaaaaaaaatgcgannnnnnn

SEQ ID NO: 6814 - protein, 112 aa, Homo sapiens
  misc_feature (111)..(111): Wherein Xaa may be any naturally occuring amino acid
  misc_feature (112)..(112): Wherein Xaa may be any naturally occuring amino acid
SRGLTMEPSEVLNLIKDSGLRGRGGAGFPTGVKWSFVPQNNPNPKYLVVNGDESEPGTCKDMPLIMASPHTLVEGALISRYAFGSEQAFIYLRGEVVQVARRLEEKKKMRXX

SEQ ID NO: 6815 - DNA, 381 bp, Homo sapiens
atcacggacgcagaggagaaagggctgattactccaggcgtgagtgttctgattgaaccaactagcggcaacacaggcattggactggcctttatggctgctgccaagggctacaaacttacactcacaatgcctgcctccatgagcatggagaggaggatcatattgaaggcttttggtgctgaacttgtccttactgacccactcttgggaatgaaaggagctgtcaagaaagcggaagagatacaagcaaagacacccaactcgtacatccttcaacaatttgaaaatccagctaacccaaagattcactatgagactactgggcctgaaatctggaaagctacagcaggaaaaattgatggccttgtatctggtatc

SEQ ID NO: 6816 - protein, 127 aa, Homo sapiens
ITDAEEKGLITPGVSVLIEPTSGNTGIGLAFMAAAKGYKLTLTMPASMSMERRIILKAFGAELVLTDPLLGMKGAVKKAEEIQAKTPNSYILQQFENPANPKIHYETTGPEIWKATAGKIDGLVSGI

SEQ ID NO: 6817 - DNA, 285 bp, Homo sapiens
  misc_feature (16)..(16): Wherein n may be a, c, g or t
gcgcgccaggaagacntgctggaaccctaccgcaaggcgatcctcaccgcctttgcagacaccgaacgctcgctgaacagcatcgacggcttcgaccgccagctgcactggcagcagcaggagctggagcaggcgcagcgcgccttcgatctatccgacagccgctaccaggccggcgcggaaaccctgctgacggtcctcgaaacgcaacgcacgctgtacgcggcgcaggatgccgccgtgcaactgcgactggcccgcctgcaggcctcggtcggcctgtac

SEQ ID NO: 6818 - protein, 95 aa, Homo sapiens
  misc_feature (6)..(6): Wherein Xaa may be any naturally occuring amino acid
ARQEDXLEPYRKAILTAFADTERSLNSIDGFDRQLHWQQQELEQAQRAFDLSDSRYQAGAETLLTVLETQRTLYAAQDAAVQLRLARLQASVGLY

SEQ ID NO: 6819 - DNA, 219 bp, Homo sapiens
gcgcacgcacaaaaggacatggacaccttttttcagttggtgaggagcattgtgcctgctctgacgtcgaagaaacacaaggggcaagatggaaggataggcatagtcgggggctgtcaagagtacacaggagcaccgtattttgcaggaatctcagctctgaaagtgggtgcagatttgacccacgtattctgtgccagggaggccgcgccagtgatc

SEQ ID NO: 6820 - protein, 73 aa, Homo sapiens
AHAQKDMDTFFQLVRSIVPALTSKKHKGQDGRIGIVGGCQEYTGAPYFAGISALKVGADLTHVFCAREAAPVI

SEQ ID NO: 6821 - DNA, 158 bp, Homo sapiens
  misc_feature (1)..(1): Wherein n may be a, c, g or t
ngccggccgggcgcatgggaccgcaccatcgtctacgagacccatgtcaagggctacacgaagcaacatcccaaggtgcccgagcatctgcggggcacctatgcaggattcgcgacgccagaggtgctcgaccatatccgcaagctcggcgtcccctg

SEQ ID NO: 6822 - protein, 52 aa, Homo sapiens
  misc_feature (1)..(1): Wherein Xaa may be any naturally occuring amino acid
XRPGAWDRTIVYETHVKGYTKQHPKVPEHLRGTYAGFATPEVLDHIRKLGVP

SEQ ID NO: 6823 - DNA, 250 bp, Homo sapiens
  misc_feature (1)..(1): Wherein n may be a, c, g or t
  misc_feature (2)..(2): Wherein n may be a, c, g or t
  misc_feature (3)..(3): Wherein n may be a, c, g or t
  misc_feature (86)..(86): Wherein n may be a, c, g or t
  misc_feature (213)..(213): Wherein n may be a, c, g or t
  misc_feature (250)..(250): Wherein n may be a, c, g or t
nnncccgccctgggcttgcctgatgcgacacggtacgtgttcctgctggttgatggaatgggccaggagaacctcgagcagtttcnccatcttgcccaacttctgtcggagatggagaactgccacgacctgacttgttatgtcccctcgacgacgcctacttcgctgagctgtatcggtaccggaccggttcccgggcgccatggcgttgtnggctacaccttccgcgccccctctgctcgcgtaatgn

SEQ ID NO: 6824 - protein, 83 aa, Homo sapiens
  misc_feature (1)..(1): Wherein Xaa may be any naturally occuring amino acid
  misc_feature (29)..(29): Wherein Xaa may be any naturally occuring amino acid
XPALGLPDATRYVFLLVDGMGQENLEQFXHLAQLLSEMENCHDLTCYVPSTTPTSLSCIGTGPVPGRHGVVGYTFRAPSARVM

SEQ ID NO: 6825 - DNA, 290 bp, Homo sapiens
  misc_feature (177)..(177): Wherein n may be a, c, g or t
  misc_feature (247)..(247): Wherein n may be a, c, g or t
  misc_feature (270)..(270): Wherein n may be a, c, g or t
  misc_feature (290)..(290): Wherein n may be a, c, g or t
accggtttggtcttgtgggtatacgcctcgcgaaacagcgcctgcatctcactgaacccgctgaagccgaaacgctgggaaaaccacacgatggccgaggggtgcacttcgcattcccgggcgatgtcgctgatgcggtcgaccataatccggtcgctctgctggctcatgtagctngcgatgcgcttgagctggcgcggcaggctctcgtattcgtcggtgatcagctgcaacaggcgttcggcanttaccggagggctggcgactgtntcttccaggggtgtctcggn

SEQ ID NO: 6826 - protein, 56 aa, Homo sapiens
MSQQSDRIMVDRISDIARECEVHPSAIVWFSQRFGFSGFSEMQALFREAYTHKTKP

SEQ ID NO: 6827 - DNA, 165 bp, Homo sapiens
gagctcatcaagggcgccgccagcaccggcgaggaagccttcttccggcgcttccccgaggaagtcagctaccacgtgatgggcgagggcttcacctgggaggcccaggaccgccagcgcgacatcgccaaggccgaggcagcctggaaggtcgccgcgcaattg

SEQ ID NO: 6828 - protein, 55 aa, Homo sapiens
ELIKGAASTGEEAFFRRFPEEVSYHVMGEGFTWEAQDRQRDIAKAEAAWKVAAQL

SEQ ID NO: 6829 - DNA, 282 bp, Homo sapiens
gccggcgagttgtttcaagtctccaccaatacgtcgccaactgcatcctcgtactttgggaagccgacttatttgactgtgtccactcaattgcacttggaaattttagcgttatcactgtcaaggtgttggacgttatctccttgctttagagccgaaaagagtgatactccaagacacctttcggagttttggatgcttgaagtggaaatgtgctttgttaatagcgtcaacgagctaacatcgtttgttgagactacaataaaacacataattaaagct

SEQ ID NO: 6830 - protein, 94 aa, Homo sapiens
AGELFQVSTNTSPTASSYFGKPTYLTVSTQLHLEILALSLSRCWTLSPCFRAEKSDTPRHLSEFWMLEVEMCFVNSVNELTSFVETTIKHIIKA

SEQ ID NO: 6831 - DNA, 302 bp, Homo sapiens
aagcttccatggtacaatcccgtctgtgactcgccgcggctgttagcgctcctggaatcttcgattgtctgttgctttccgcatgacaggctacaaagcacacaaacccacaactacagcccactgaaggggacacaaagacaggtatgcaccatcagtcgcctgctgtgacacactggaccagtttttcaatatcaactgcagaaaccctaatacagcaatataagacttttttttccttttttttctttttatttttttttttttggccacccactagggcggaaaaaggctggaggggg

SEQ ID NO: 6832 - protein, 52 aa, Homo sapiens
MHHQSPAVTHWTSFSISTAETLIQQYKTFFSFFFFLFFFFWPPTRAEKGWRG

SEQ ID NO: 6833 - DNA, 333 bp, Homo sapiens
atctcaacggatgcatccatcaaggagatgatccccccaggtgctcttgttatgctcacaccactgatcgttgggattctatttggggttgagaccctctctggagtccttgctggtgcccttgtctctggtgttcagattgccatttctgcatccaacactggtggtgcctgggacaacgccaagaagtacattgaggctggagtttcagagcatgccaggacccttggcccaaaaggttctgaccctcacaaggcggctgtcattggtgacaccattggagatcctctcaaggacacgtctggcccttccctcaacatcctcatcaagctt

SEQ ID NO: 6834 - protein, 111 aa, Homo sapiens
ISTDASIKEMIPPGALVMLTPLIVGILFGVETLSGVLAGALVSGVQIAISASNTGGAWDNAKKYIEAGVSEHARTLGPKGSDPHKAAVIGDTIGDPLKDTSGPSLNILIKL

SEQ ID NO: 6835 - DNA, 444 bp, Homo sapiens
  misc_feature (76)..(76): Wherein n may be a, c, g or t
  misc_feature (77)..(77): Wherein n may be a, c, g or t
gcgcgccatcgtgccccgctgctgcgctttgcattaacgctctttgccgcctccatcatcatcttcgcccccatgnnggcggtgccaggcaacccggcgcgggtggccgtgggagtgaatgcgaccgaagaggccgtcggcaagctcagctctgagctgggcctggatcgcccgctgctcacgcaatattgggagtggataaaaggcctgtttaccggcagttttgggcagtcattgtcctcgcaacaagatattacgccgctggtgctggaccgcgcccaagtcacgctcatcctgattggtttagcgatgctgctcgcactggccggggccatcccggtgggaatgtggttggcactgcgcaaccgtacccgcagcgcggatgtggtttctgccggtacgcagctaggcattgcggtgcccagctgctgcatggatattcga

SEQ ID NO: 6836 - protein, 148 aa, Homo sapiens
  misc_feature (26)..(26): Wherein Xaa may be any naturally occuring amino acid
ARHRAPLLRFALTLFAASIIIFAPMXAVPGNPARVAVGVNATEEAVGKLSSELGLDRPLLTQYWEWIKGLFTGSFGQSLSSQQDITPLVLDRAQVTLILIGLAMLLALAGAIPVGMWLALRNRTRSADVVSAGTQLGIAVPSCCMDIR

SEQ ID NO: 6837 - DNA, 276 bp, Homo sapiens
ccggagagtgcagcggagttgggtggcaagatctatgagatgatggcgattgccctcggcgggagatggggaaggtccgacatggaggaggccgaagcgtcgacgggtgaggccagcgcagaggcagactcatctgaaggcaccgtagcagaggtgattgagccctaggaagttagacccgagagcgatccgtggagggaccagtgagttctcccacgggcatcctttgttagaactccatatttagcagtgccggggaaaaaaactaagccatgg

SEQ ID NO: 6838 - protein, 55 aa, Homo sapiens
PESAAELGGKIYEMMAIALGGRWGRSDMEEAEASTGEASAEADSSEGTVAEVIEP

SEQ ID NO: 6839 - DNA, 245 bp, Homo sapiens
actagtccagcgaaattcgacgaatggcgtcgcacggccctcgctgcaaatgcccgcgtggggccgggacagggcaagaacgtggtcaccgtcttgtatcggcttcagggaaatcccccagagattggccactgcgatcagcggcccgcaggcgttggagctgcagccgtaaggaaggcgggacgttcgccgccgccatcgatcacgaggttggcgcccgacacataagccgcctgcggcgaggc

SEQ ID NO: 6840 - protein, 74 aa, Homo sapiens
MASHGPRCKCPRGAGTGQERGHRLVSASGKSPRDWPLRSAARRRWSCSRKEGGTFAAAIDHEVGARHISRLRRG

SEQ ID NO: 6841 - DNA, 336 bp, Homo sapiens
  misc_feature (1)..(1): Wherein n may be a, c, g or t
  misc_feature (13)..(13): Wherein n may be a, c, g or t
  misc_feature (18)..(18): Wherein n may be a, c, g or t
  misc_feature (124)..(124): Wherein n may be a, c, g or t
naggactaaccantgganccgggggtgacctggatcttccttgtggctatttttacaggtgtcgagtgcgaggtgaaattggttgagtctgggggaggcgtggagcagcctggtgggtcactangattgtcctgcgaaggctctggattcaatttcgacgacttctccatatactgggtccgccaaggtccaggaaggggcctggagtgggtcgcaggtattagttggaacggtgatgacacaggatatgcggagtctgtgaagggccgatttatcgtgtccagagataatggcaagaacctcgtctttttggaaatggccagtctgagagtcgac

SEQ ID NO: 6842 - protein, 109 aa, Homo sapiens
  misc_feature (2)..(2): Wherein Xaa may be any naturally occuring amino acid
  misc_feature (3)..(3): Wherein Xaa may be any naturally occuring amino acid
  misc_feature (39)..(39): Wherein Xaa may be any naturally occuring amino acid
PXXPGVTWIFLVAIFTGVECEVKLVESGGGVEQPGGSLXLSCEGSGFNFDDFSIYWVRQGPGRGLEWVAGISWNGDDTGYAESVKGRFIVSRDNGKNLVFLEMASLRVD

SEQ ID NO: 6843 - DNA, 298 bp, Homo sapiens
aaatttctatatttcactctcttctgtcaagaaaagatttcttttaaaagactaattatttatagttgaaataagactgattagtgttgcttgttccaatgactaattaatgaggaaatggcatgtccttaccctttgatttcttgctgattaataaatcaataaagtattactggaaggaaaaaaaaagcacagaaccacactcatataatgagataatggttgccctttttcactttctgaaaactcatagtctgaaaaaaaaaagtccacttcataaatgaaattagctgggccc

SEQ ID NO: 6844 - protein, 53 aa, Homo sapiens [sequence omitted]

SEQ ID NO: 6845 - DNA, 361 bp, Homo sapiens
gtgcactggtgatttgtctgcatgtatgtctgtgtgagggcatcagatcccccagaacttgagttacacactgtcatgcagttgctgggaattgaacctgtgtccactggaagaacagccagtaaccttaaccaccgagccacctctctaaccccaatgccttcatttcaagtttctcattcatcataaaatcagcatagaagtcaaacttttaatcatcttgttctaagcagcttgctgtgtctctccctccccatcagaactttattcttctgtaagtgaggagtgggttcaaagattttctaagcacttattacagtgctcccctcaatactgtggaccctggactaggtcggggaag

SEQ ID NO: 6846 - protein, 55 aa, Homo sapiens
MYVCVRASDPPELELHTVMQLLGIEPVSTGRTASNLNHRATSLTPMPSFQVSHSS

SEQ ID NO: 6847 - DNA, 256 bp, Homo sapiens
  misc_feature (181)..(181): Wherein n may be a, c, g or t
gtcgacaataacgctgaaaaatctggatttggtgacgaaagatacgaaactgtcaagtttcaagaaaaagtgaagcaaacttttatgaagctattggataaagagataaggaaaggcgatgagtcaatcacgattgtagacgttactaataaggacattcaggaagttgaagcgcttattnggcaaatcgttgagcctgttttgagtacgcatattgatcatgataaattttcgttcttctaggaggatctgtaca

SEQ ID NO: 6848 - protein, 80 aa, Homo sapiens
  misc_feature (61)..(61): Wherein Xaa may be any naturally occuring amino acid
VDNNAEKSGFGDERYETVKFQEKVKQTFMKLLDKEIRKGDESITIVDVTNKDIQEVEALIXQIVEPVLSTHIDHDKFSFF

SEQ ID NO: 6849 - DNA, 228 bp, Homo sapiens
gctagctctgggctgaatgctatggtacccagtcagtttagactattggagggcaggcctgttaggggactgaggtcagaaatcccctcctgcttccatataggcagccaagagctggcctgggacaccagctgggtgcttttcccagccgtttgcattccagcctgtatacaatgaagaaagagtgacagtgtggtgacatgatttaggttaatgagctactgatca

SEQ ID NO: 6850 - protein, 51 aa, Homo sapiens [sequence omitted]

SEQ ID NO: 6851 - DNA, 622 bp, Homo sapiens
accggtgcaaagtccattatcgacgggagagataacagatgcaggctccaagaaaagtggtcatggcttttatcaccaggacaaactagcaaggacaaacattttattcggatgattggatttaacggctgggcgagtgggtgataccgcggtgttaccatcctcttggttacaacgtcacgtctttttctgtttaacccttttgtactaacaaggaataaattatattcaatgaattatgaacagtcaaatgcgtatatattggcgctccacctttattgtatatcagatgaggtaacattacttgtaccgcgctcgctttcaacaaataagtgggttgtttggcccgagcggttttaaagggggcctgaattccaaaaaaaatttttgggccccccggtttaccggggggaaaactccgggtttggaaaaaggcaagggttggaattttttagccaccaataatttttttttcaataattaagtaccaatttcctgctaatgggcaggcccacctttatttttttttttttccattagaacgagcatttcaggcaagaaagggaaccggcgaagacgggaaagtgtacttttcacgaaacaaagaaaatgaagtacgcgt

SEQ ID NO: 6852 - protein, 53 aa, Homo sapiens
MVTPRYHPLAQPLNPIIRIKCLSLLVCPGDKSHDHFSWSLHLLSLPSIMDFAP

SEQ ID NO: 6853 - DNA, 258 bp, Homo sapiens
  misc_feature (258)..(258): Wherein n may be a, c, g or t
aaatttcatgttctatttgtagaatgggaggacaagaagagatgatgagataccatgggattttaaaaaaggaaagaaagccagcacaaagagaatgaaagaaaaaaatgaaaagaatcaggtggatcaaggtagatatggtggaataaaaacaaatgtgaggataatgtcagggggaaagagaggtcaacactccctagctatctcaaacctaatgcttaaaagtttccacttcaccaaactccatcccatcagatn

SEQ ID NO: 6854 - protein, 54 aa, Homo sapiens
MKEKNEKNQVDQGRYGGIKTNVRIMSGGKRGQHSLAISNLMLKSFHFTKLHPIR

SEQ ID NO: 6855 - DNA, 310 bp, Homo sapiens
tgatcagagtcttcttctgactcaacctcacaagaggagtcaggttagatgaacagttcccaactatttactctcctctctctctcattctctctctcgcattctttttccttctgttttttattagcagcacaaaagattttgaagtgcttaagggcagaaagcttgccttgttcatctatgctgctcttgctgggaccaagtatggttctaaacacacggtaaacattcagtaagtatttgtggaatgaatgaatgagcaaatgaaggacagtgtggcttcatggcatgggtcagtgtgaactccgga

SEQ ID NO: 6856 - protein, 58 aa, Homo sapiens [sequence omitted]

SEQ ID NO: 6857 - DNA, 373 bp, Homo sapiens
  misc_feature (1)..(1): Wherein n may be a, c, g or t
  misc_feature (2)..(2): Wherein n may be a, c, g or t
  misc_feature (97)..(97): Wherein n may be a, c, g or t
nnccaaggtgtggtgtgggtctctcccttcgggagcggctgcctttttccccaagagtagccgttctctctctctctgtgtctctgctcccccctcntcctgtgtgtgtgcatatgcgtgcatgtgcatgtgtgtgcatgtgtgtgtgcgcgtgtatgtgtgtgcgtgtatgtgtgtgcgcgcatgtgcgtgtgcatgtgtgtgtgcgtgtgtgtgtgcgcacgtgtgtgtgtcttaattagttgcattgtttgggttgccctagaacattcttaaatcatagcctgagcaacttccaaacaagcaaacacggtgccgccctctttcacactcccccgacctggatccccgatcctgaatccaaacttcatga

SEQ ID NO: 6858 - protein, 71 aa, Homo sapiens
  misc_feature (13)..(13): Wherein Xaa may be any naturally occuring amino acid
PFSLSLCLCSPLXLCVCICVHVHVCACVCARVCVCVYVCARMCVCMCVCVCVCARVCVLISCIVWVALEHS

SEQ ID NO: 6859 - DNA, 473 bp, Homo sapiens
aagcttctcggtgcctcgctagtcggccatgacgtctccgagttgctccccgaactaaccttggcacagctgtgggacatcacagctgaggagatcggccgcaacatccacgcgcacccgtcgctgtcggaagctctcaaggatgctgcggaaggcgtcgagggacacatgatcaacttctgatctttccgtgacatgatttctgtgacatgtgttgaagctcagtaatcatgcaagatcatggggtcctagcctccgagctgggaccccttcgcgtcacatcgtttgattttcggtgccggcgtgccggggtggttctagctgtagcgtcgaatggtcgaggtcgaagtggcccgacaagcactgctggatctgtgccaagaggatgggggcatgaccatcggcgaagcaggagtcctcgacgacgatatgggcgctgagcgctggtagatcgctcgacaccgtccacgcgt

SEQ ID NO: 6860 - protein, 60 aa, Homo sapiens
KLLGASLVGHDVSELLPELTLAQLWDITAEEIGRNIHAHPSLSEALKDAAEGVEGHMINF

SEQ ID NO: 6861 - DNA, 237 bp, Homo sapiens
gctttgttttttcctcatttgataggaacggcaatggatggtacgaaacaacagaatatcgaggatatgttaaggggtaaaaccagtatagtgaggttatttagtacagcatctggcgataagttgagtagttcatacttccaaggaatcgtagacgataacaaaaaaactgactacttgactgaagctgatgcgcgtttaagtttaaattacaataacgtccaaatcatcgggggg

SEQ ID NO: 6862 - protein, 79 aa, Homo sapiens
ALFFPHLIGTAMDGTKQQNIEDMLRGKTSIVRLFSTASGDKLSSSYFQGIVDDNKKTDYLTEADARLSLNYNNVQIIGG

SEQ ID NO: 6863 - DNA, 390 bp, Homo sapiens
  misc_feature (390)..(390): Wherein n may be a, c, g or t
cctaggacccaaatttctttaacttgaagccaggcaaggagatgcacccagcacatatgaggtgctggagctccatgattggcagcctctgggccacccccggcagggccctgtctccagcaggcagcctcctgtctgtggtgaggactcctccacaaaggacatgtgctctccagtcctcaacccacgcctgcgtcacccagggtacccagccaggactcagaccaaccgttttatgacccacagaaacgttgaaaacagtgtttctccagagcagctttaaatgcaaacaaaagactcttctagaaaccattgcctcaagctgtatgaggcaagaggaaaaaaaaaaaaaaaacagctctcaaattaaaatccatgatacatttggtn

SEQ ID NO: 6864 - protein, 103 aa, Homo sapiens [sequence omitted]

SEQ ID NO: 6865 - DNA, 379 bp, Homo sapiens
tccggaaagttattgaaagcttttaagtatacttaaatgatttctcttttccatttctacgttgcccttttatcaatcttattgtggcatcgatccttgtacgtctacttattccattatttgatgaaaattgaatcccgtctctccggtcatattattttcttcaccttttactgccgtatacaaatattccctctcgacgtgtaccatcattttgatccgtgacatagtaggaatagatggattatggtcgattgagcttccaatactttgcgtattgagcaagctatgcaaattaaaatatctataaactgataggaaatgtatatactgaagaaaatgtttattacttgttacattgttttgattacctgtgcac

SEQ ID NO: 6866 - protein, 62 aa, Homo sapiens
MISLFHFYVALLSILLWHRSLYVYLFHYLMKIESRLSGHIIFFTFYCRIQIFPLDVYHHFDP

SEQ ID NO: 6867 - DNA, 357 bp, Homo sapiens
acgcgtcgctggaacccgaagatgaagcgcttcatcttcaccgagcgcaacggtatctacatcattgacctgcaccagtcgctgacctacattgataaggcgtacgccttcgtcaaggagactgtcgccaagggcggccagattcttttcgtcggcacgaagaagcaggcccaggagtccatcgttgagcaggccactcgcgttggcatgccctatgtcaaccagcgttggcttgggggaatgctcactaatttccagaccatctcgaagcgcattgcccggctcaaggagctcgaggccatggactttgacaaggtttccggctccggtctcaccaagaaggagctgcttatgctc

SEQ ID NO: 6868 - protein, 119 aa, Homo sapiens
TRRWNPKMKRFIFTERNGIYIIDLHQSLTYIDKAYAFVKETVAKGGQILFVGTKKQAQESIVEQATRVGMPYVNQRWLGGMLTNFQTISKRIARLKELEAMDFDKVSGSGLTKKELLML

SEQ ID NO: 6869 - DNA, 339 bp, Homo sapiens
  misc_feature (1)..(1): Wherein n may be a, c, g or t
  misc_feature (2)..(2): Wherein n may be a, c, g or t
nnggcgccgcccacagtcgacggagaacttcccgacgagcggttgcagctgttcttcacctgctcgcacccagcgctggccgaggacgaccgaatcgcactcaccttgcgttgcctcggcgggttgacgacgcccgaagtcgctcgggccttcctcgttccttcggcgacgatggcgcagcggatcgtgcgcgcgaagaagaaaatccgtcaggctcggattcccttccgcactcccagcgccgaagaactcccggaacgtttgcccggtgttctgcaggtgatctactcggtgttcaccgaggggtacgcagcgagttcgggtccggatctgcaacgc

SEQ ID NO: 6870 - protein, 113 aa, Homo sapiens
  misc_feature (1)..(1): Wherein Xaa may be any naturally occuring amino acid
XAPPTVDGELPDERLQLFFTCSHPALAEDDRIALTLRCLGGLTTPEVARAFLVPSATMAQRIVRAKKKIRQARIPFRTPSAEELPERLPGVLQVIYSVFTEGYAASSGPDLQR

SEQ ID NO: 6871 - DNA, 489 bp, Homo sapiens
gttgccagcgatgggccgcatttgtacatcccggtatttcgtgttcggtgtggtgtaaaagatgccccatgtgtgacattctgtggatagttattgttagcattatttgacaagttctagaaatcgatccacccaggcgtgtagctgcggtatttcatcagagttgatcgttgcgatgagttgatcatggcctgtcatggcgtagtcttctacgtcgtaaagtatgagacaatccacggtaatatggtgttttttggccaactcggaagccggggtgtcggggaagtcggtccctgtaaggtatgggcctgtcccaatgacgacgtgtgctgggtccatgaggagttcgtccaaggttcgaactcattaccgtcgaatacgacgctgtcgccatcggcggtgtcgaatcgaatcctcaaagtgtatccgtactcggtgtcgcgcaacaggtgcctaacctcagcgctagtgggctgtgcactgacgcgt

SEQ ID NO: 6872 - protein, 101 aa, Homo sapiens
MACHGVVFYVVKYETIHGNMVFFGQLGSRGVGEVGPCKVWACPNDDVCWVHEEFVQGSNSLPSNTTLSPSAVSNRILKVYPYSVSRNRCLTSALVGCALTR

SEQ ID NO: 6873 - DNA, 339 bp, Homo sapiens
gatccgtcgcgcgggagcatcgacgcggccgcgctcgatggtgccgacgcgatcgtcaacctctgtggtgtcggaatcggcgacaagaggtggtccggtgcgtacaagcagctggtgcgagacagtcgcatcgctcccaccgaggttctcgccggggctgccgccgacgcgggtgtacccaccctgatcaatgccagcggcgtcaacttctacggcgacacgggcgatcgagtggtcgacgagacggctcccgtcggtgacggatttctggccgaggtctgtcgcgattgggagaatgccacgacagcggcgtgggatgccggtgtccgcacgatcatg

SEQ ID NO: 6874 - protein, 113 aa, Homo sapiens
DPSRGSIDAAALDGADAIVNLCGVGIGDKRWSGAYKQLVRDSRIAPTEVLAGAAADAGVPTLINASGVNFYGDTGDRVVDETAPVGDGFLAEVCRDWENATTAAWDAGVRTIM

SEQ ID NO: 6875 - DNA, 414 bp, Homo sapiens
cctaggaatgagattgccgggtcagatggtaattctatgtttaattaattgaggagctaccaaaatgtttttgtgggtaagttgtcagtaactcctttcttgcttaatccactccatagaatcccccttccctttgaagactcaagggcaggacctggaaattggcgaaaaaaaaaactaagatttgccctgattttttgggaggaacccttggattttgccctattatttctgcttttgggtgggaaagagccagattatgtcaatctgtatgtggttcaggttccccattgcaggggcagagagagttggagggttgtgcaggttttacaagccaagactagaagggctacttgacttcttcccaaatcctcctgggccagaactcagtcacgtgatctcaaccctacagca

SEQ ID NO: 6876 - protein, 51 aa, Homo sapiens [sequence omitted]

SEQ ID NO: 6877 - DNA, 284 bp, Homo sapiens
gaattcctcatgagattaaagattattatctttgaaaaatctcttttcttaccttaccctctagtattgttgagtattttgccaagtaagggtattcagtggacgtattttggatggatctgtaatgaactcagagaagagttaatactatatagtcagtaataatagagtaacagctaccattgttggatgccagacattcattgatggggatagggccttgcatgccttcactcaccaatcctaagaatcaggtactgctgttcttctgatttttcaagccc

SEQ ID NO: 6878 - protein, 50 aa, Homo sapiens [sequence omitted]

SEQ ID NO: 6879 - DNA, 273 bp, Homo sapiens
  misc_feature (1)..(1): Wherein n may be a, c, g or t
nagctgccgaaactaacgacgcccgcattccccgcccgtgccctggaagggtttacccgctcccttgcgaaggaaatgcgcaagggcggaaccgtgaaccttgtctgggcggacccagccgccaccgctgaggtggagtccacccttcgtttcttcctctccggtaagtccgccttcgtagacggtcaggttgttcgcgtcaccgcgcagggcggttcagggtccccacaatgggagaagccgctggagggccgacttcccgtggtcaccggt

SEQ ID NO: 6880 - protein, 91 aa, Homo sapiens
  misc_feature (1)..(1): Wherein Xaa may be any naturally occuring amino acid
XLPKLTTPAFPARALEGFTRSLAKEMRKGGTVNLVWADPAATAEVESTLRFFLSGKSAFVDGQVVRVTAQGGSGSPQWEKPLEGRLPVVTG

SEQ ID NO: 6881 - DNA, 435 bp, Homo sapiens
caagtgggagcgattaaagaaaaattaaaactattagggctagaaaactccagcattgaaaaaatcatcagcagccacaaggttcaaaatgaaatgactatttactctcacttcaacggcgttatttttaaaaaaagcccggatctcaatgaggggagcttcattaaaaaagggcaagagttgtttcaaatcatagatttaagccaattgtgggcgcttgttaaagtcaatcaagaggatttagaatttttaaaaaacacgcataaagcgatcttgttcgtagaagggattaaaggcaagcaagaaatcacgcttgaaaacatcaaccccatcataaatgcgcaagataaaatgctagaagcgcgcttcaatgtgcctaatgtcaaacagctttattaccctaacatgttcgctcaagtagaaatctttcaaaaa

SEQ ID NO: 6882 - protein, 145 aa, Homo sapiens
QVGAIKEKLKLLGLENSSIEKIISSHKVQNEMTIYSHFNGVIFKKSPDLNEGSFIKKGQELFQIIDLSQLWALVKVNQEDLEFLKNTHKAILFVEGIKGKQEITLENINPIINAQDKMLEARFNVPNVKQLYYPNMFAQVEIFQK

SEQ ID NO: 6883 - DNA, 345 bp, Homo sapiens
gatctagagaaagtaacacttgaagatttaggccaagctaaacgagttgttatcagtaaagatgaaacgacaattattgatggcgctggtgagcaagaagctattcttgcgcgtgttggccaaatcaaacaacaaattgaagcttcttcttcagaatacgatagagaaaaacttcaagaacgttctgctaaattagcgggcggtgttgctgtgattaaagttggcgcttcaactgaagttgaaatgaaagagaaaaaagatcgtgttgacgatgcattgcatgcaactcgcgctgcggttgaagaaggtgtagttgctggtggtggtgttgcactaggtcgcgga

SEQ ID NO: 6884 - protein, 115 aa, Homo sapiens
DLEKVTLEDLGQAKRVVISKDETTIIDGAGEQEAILARVGQIKQQIEASSSEYDREKLQERSAKLAGGVAVIKVGASTEVEMKEKKDRVDDALHATRAAVEEGVVAGGGVALGRG

SEQ ID NO: 6885 - DNA, 206 bp, Homo sapiens
acgcgtagtcgttacttgtacttgtcgggctggatggtagcagcgatgcgttctgaatttgggccgctacctgaccaatcgatgcatgagaaaacctcagtacctgcgttgattgaagagctttacaccttcttgaaacaagcagatgcaagagagctacagcatatatttaaagaaatggatgacgctcgtgaagcaggtgatca

SEQ ID NO: 6886 - protein, 68 aa, Homo sapiens
TRSRYLYLSGWMVAAMRSEFGPLPDQSMHEKTSVPALIEELYTFLKQADARELQHIFKEMDDAREAGD

SEQ ID NO: 6887 - DNA, 275 bp, Homo sapiens
agatctggcaggagaagcagcccccactcatgttgtgccaggggcctggggaagggagatggcagttctgtgacctccagactccctttccttattgcaggggatgggccagcgtttcgccctgaacatctgcacgtgtccagccagaaaaggtgccccaagcccttctccatggctcttctctgttcctggcaccttaacagcctgaaacgcaaggcccccaaggtggggtgtgcatttttggaaaacctcttttctgagactccccctggggc

SEQ ID NO: 6888 - protein, 57 aa, Homo sapiens [sequence omitted]

SEQ ID NO: 6889 - DNA, 278 bp, Homo sapiens
catggaatgcttttcgtcccaattggctacacctttggttcaggcatgttcgacatggatggtatcagaggaggcagcccctatggcgcgggggtatttgctggcgatggcagcagacaacccagtgagactgaactcgcccttgcagatcaccagggcaagtacatggcctccatagtgaaaaagctagctctccatgcttgagacagccacccctgtgcaggggaagtcacatggtcaccttcctccggtgctcggcttctcctattgtttccgga

SEQ ID NO: 6890 - protein, 67 aa, Homo sapiens
HGMLFVPIGYTFGSGMFDMDGIRGGSPYGAGVFAGDGSRQPSETELALADHQGKYMASIVKKLALHA

SEQ ID NO: 6891 - DNA, 189 bp, Homo sapiens
cggaagcacatgatgggaaagcgagttgactacgcagcccgctcggtcatctgcccagacatgtacatcaacaccaatgagatcggaatccccatggtatttgccacaaaactgacttaccctcagccagttaccccctggaacgtgcaggaactgagacaggcagtcatcaatggacccaatgtgcac

SEQ ID NO: 6892 - protein, 63 aa, Homo sapiens
RKHMMGKRVDYAARSVICPDMYINTNEIGIPMVFATKLTYPQPVTPWNVQELRQAVINGPNVH

SEQ ID NO: 6893 - DNA, 228 bp, Homo sapiens
cggacttttggggatactaagatgtctaatgccaccctctctagctacattgtgaaaatcctgagtcgctatgacattgctgtggtccaagaggtcagaggcactcacctggttgctgttgggaagctactggataaactcaatcgggacatccctgacaactatcgctatataatcagtgagccgctgggccgcaaaagctacaaggaacagtacctttttgtgtac

SEQ ID NO: 6894 - protein, 76 aa, Homo sapiens
RTFGDTKMSNATLSSYIVKILSRYDIAVVQEVRGTHLVAVGKLLDKLNRDIPDNYRYIISEPLGRKSYKEQYLFVY

SEQ ID NO: 6895 - DNA, 603 bp, Homo sapiens
  misc_feature (1)..(1): Wherein n may be a, c, g or t
nacgcgtgtaccacagcgtccgaggtctcgagggccgaccgaggtcgtccaaccatccacagcggagcaggagtctaacgaatgactgatcctgacaacctcgcatccaagtccgtcgaggacaggatgcctgaggagttgagcctggccggggacttcccgaaggtcacccacgagcagtgggaggaggcggtccttaaggttctgaaccggggtcgtcccgagggcaaggaactcaacatcgagcagggaatgaagcgcctcgagccgactacggtcgacggcatccagatcgagccgatgtaccggcgtcaggatgcccccgagaagctcggtgttccgggcgtgccgccgttcactcgtggtaccacgatccgtgaaggcggcatggatgcatgggatgtccgggcccttcatgaggatcccgatgtcgcgttcactaaaaaggccgttatcgccgaccttgagcgtggcgtgacgtccctgtggctgcgggtcggggctgacgccattaagcccgaggacattgcgggtgacctcaaggatgtgttgctcgacctggccaaggttgaggtctctagccgtgatgaccaggaggccgcg

SEQ ID NO: 6896 - protein, 174 aa, Homo sapiens
MTDPDNLASKSVEDRMPEELSLAGDFPKVTHEQWEEAVLKVLNRGRPEGKELNIEQGMKRLEPTTVDGIQIEPMYRRQDAPEKLGVPGVPPFTRGTTIREGGMDAWDVRALHEDPDVAFTKKAVIADLERGVTSLWLRVGADAIKPEDIAGDLKDVLLDLAKVEVSSRDDQEAA

SEQ ID NO: 6897 - DNA, 225 bp, Homo sapiens
  misc_feature (225)..(225): Wherein n may be a, c, g or t
atgaagctgccaaagggaacgagtgacgaagagttgaaactttatggggctggtttattacaagttctcactgctttatcatttacaaacgaagcgtatcacgtcaaaaagggcgactatgtattactttttgccgcagcgggtggtgtgggattgattttaaatcagctactcaagatgaaaggtgcacatacgattgcagttgcctcaactgatgaaaagcgn

SEQ ID NO: 6898 - protein, 75 aa, Homo sapiens
MKLPKGTSDEELKLYGAGLLQVLTALSFTNEAYHVKKGDYVLLFAAAGGVGLILNQLLKMKGAHTIAVASTDEKR

SEQ ID NO: 6899 - DNA, 322 bp, Homo sapiens
  misc_feature (322)..(322): Wherein n may be a, c, g or t
caattgtctgacgcagccggctgaaatccctgggaagggaatgaatgaaactgccgtgaagcaacgcctggtggggccgggcttctggcagctcctggggccagcacgtcccttccagagcgtctgaagccctgggcggctgctggagcatctcgagtctttccagagtcatgtgtgttgtttccttctgtctcttggaagggtccgtttggtctgatccaggttgcctcagcaggaggaagtcttgctgggtgctgagcgggtgggaggtttcaccttgggcttggcagagctgcatgcagaggccgggcgcctgctgtan

SEQ ID NO: 6900 - protein, 99 aa, Homo sapiens [sequence omitted]

SEQ ID NO: 6901 - DNA, 540 bp, Homo sapiens
acgcgttgctccaaggcagaagcgatatgttcaaccgttaaaccaatactcgttgaaacgagccctagccatttctccgcctgtttaatcaatagtccaaactctggtcacagttatgcccattcaatcattgccaaggagtcttaaatgtctagcattccaatggtagagatcaaagatttaaacgtgtgttttcatcaaaaaaaaaccaacattaatgctgtaaatggcgtcaatcttacggtcaacaaaggcgaagtagtcgctttacttggcgaatcaggttctggtaaaagcgtgacattacgagccttgatgagactgcactcagaaaaaacaacaacattaagcggttcaatttgcattgatggtcaagaaattatagcaatgaataatcgccagctacaaaagctacgtggctctaaagttgccatgatatttcaagagccacttctcgcttttgacccagtttatacgatagggcaacaaatcaccgaagccatacgaaaacatcagggactttctcgaaagcagtctaga

SEQ ID NO: 6902 - protein, 131 aa, Homo sapiens
MSSIPMVEIKDLNVCFHQKKTNINAVNGVNLTVNKGEVVALLGESGSGKSVTLRALMRLHSEKTTTLSGSICIDGQEIIAMNNRQLQKLRGSKVAMIFQEPLLAFDPVYTIGQQITEAIRKHQGLSRKQSR

SEQ ID NO: 6903 - DNA, 306 bp, Homo sapiens
accggtacacaaggtattacattgtctgaaggtaatgaaattttaaagaagattaaaaagggtaagctattgattgttgacgacaatggtaacttagtttctatgctttccagaactgatttaatgaaaaatcagaactatccattggcttctaaatctgccaccaccaagcaactgttatgtggtgctgctatcggtactatcgatgctgataaggaaaggttaagactattagtcgaagcaggtttggatgttgttatcttagattcctctcaaggtaactctattttccaattgaacatgatc

SEQ ID NO: 6904 - protein, 102 aa, Homo sapiens
TGTQGITLSEGNEILKKIKKGKLLIVDDNGNLVSMLSRTDLMKNQNYPLASKSATTKQLLCGAAIGTIDADKERLRLLVEAGLDVVILDSSQGNSIFQLNMI

SEQ ID NO: 6905 - DNA, 246 bp, Homo sapiens
acgcgttctgttgatcgacaaggccaacgtcaagcgcagcggcgccatcagcatgggcatggatgggctgaacaacgcgattattccaggccactccacgccggagcagtacaccaaggaaatcacgatcgccaacgacggcatcgtcaaccaggcggcggtgtatgcctacgcgacccacagctttgaaaccatcgagcagttggatcgctggggcgtgaagttcgagaaagacgaaaccggcga

SEQ ID NO: 6906 - protein, 64 aa, Homo sapiens
MGMDGLNNAIIPGHSTPEQYTKEITIANDGIVNQAAVYAYATHSFETIEQLDRWGVKFEKDETG

SEQ ID NO: 6907 - DNA, 260 bp, Homo sapiens
ggatccaggcaggaccacatggtgttgagaagcgcactctggacccgtctgcctcggttcagatcccagcgcctccctcaccatgtatggctgcagatcactttgcattttgtgcctcagtttctcctctggacaagtggagtaatgaagccactacctcatagggatttgtgagggctaaatgaggtactgggtatcaagtgtgggaccacttaggttctaggtatttgtaaacgttttcccctatgaccctcatcatc

SEQ ID NO: 6908 - protein, 51 aa, Homo sapiens
MVLRSALWTRLPRFRSQRLPHHVWLQITLHFVPQFLLWTSGVMKPLPHRDL

SEQ ID NO: 6909 - DNA, 283 bp, Homo sapiens
  misc_feature (283)..(283): Wherein n may be a, c, g or t
atcagcagcattgccggcgtggtcacccacatcccggccgggctcggcgtcatcgaggcggtattcgtggcaatgctcgccgaaaagatgagcaaaggcgccatcgttggcggtctgatcggctaccgggtcatctacttcctgatccccctgctgttcgccaccctcgtctatgtggtgctcgaagcccgggcgaagaagctgcgcagcagcaaccaggccggcgaccagcagacggtctctcaggaaacgagctgaaggtcagcgagagcaatctccaggn

SEQ ID NO: 6910 - protein, 85 aa, Homo sapiens
ISSIAGVVTHIPAGLGVIEAVFVAMLAEKMSKGAIVGGLIGYRVIYFLIPLLFATLVYVVLEARAKKLRSSNQAGDQQTVSQETS

SEQ ID NO: 6911 - DNA, 315 bp, Homo sapiens
ctgatgatcaggaacattttaaacgtcagtggaggcacttgggaggaaaacaaatcatctccttcaaattctattttggaccgtatctatgctcggcgtaaaatagacgtcaatgagcagtctaaaatcccaggtttcacctttcaagacttacaatctaactatgatttaggtcttgccccaccgttacaggatttctacacggtgttgtcatcatcccataaaagagccgttgttcttgctgaagtcaagcgtgcctctccatcgaagggacccatttgtttaaaagctgttgctgctgaacaggctctcaaa

SEQ ID NO: 6912 - protein, 105 aa, Homo sapiens
LMIRNILNVSGGTWEENKSSPSNSILDRIYARRKIDVNEQSKIPGFTFQDLQSNYDLGLAPPLQDFYTVLSSSHKRAVVLAEVKRASPSKGPICLKAVAAEQALK

SEQ ID NO: 6913 - DNA, 371 bp, Homo sapiens
acgcgtttgaagctggatgcatggatatccagcgccgccatcgggtcaaatgggttgacgctgcccttgatggtcaccggggcgtagcgatctaccttaccgttgatgtcgacgctcgccggtttggcctggcggctgtcaatggtgccaatcttcccgttgagttgttgaatggcagtggcaaagttgggcgtgaggctgaagtcggcgaagttggccgagccatcattgatcgcaacctgcccaatgtgaatgcccagtggcttctctttgctggccgccggctgtcttgttgccagtgtcggccgggtgcgggatcagcaagtcatcgatgttggtggggcggtcatcggtgatcgctgcattcaata

SEQ ID NO: 6914 - protein, 111 aa, Homo sapiens
MDIQRRHRVKWVDAALDGHRGVAIYLTVDVDARRFGLAAVNGANLPVELLNGSGKVGREAEVGEVGRAIIDRNLPNVNAQWLLFAGRRLSCCQCRPGAGSASHRCWWGGHR

SEQ ID NO: 6915 - DNA, 396 bp, Homo sapiens
  misc_feature (376)..(376): Wherein n may be a, c, g or t
cctaggtgaccagtgggtgattcagtccgatgtacgtaacttgcgcgggttgggccccaagcggtccctgtcctcgcggatcacgtacctgtcgtcaatgaccttcgcgatggtgctgtatgccatgaggtcctcggaagtccttagccgagcgatggattcccgcggattcgcgacggcgacccgccggacctatgcgctggagtcgcgctggcatgctcgtgatctgtggggagtggtgcttgcagcgtttgttgtcgcggttccagccctggcggcggtgttgttcggctgaactgacgcgcgctcagcgatatagtgctttctcgagcaccctcgccagcttgtcgacggatgcctgcagggagtacttgtntgccatgagttcacgggccc

SEQ ID NO: 6916 - protein, 67 aa, Homo sapiens
  misc_feature (61)..(61): Wherein Xaa may be any naturally occuring amino acid
MRWSRAGMLVICGEWCLQRLLSRFQPWRRCCSAELTRAQRYSAFSSTLASLSTDACREYLXAMSSRA

SEQ ID NO: 6917 - DNA, 405 bp, Homo sapiens
  misc_feature (1)..(1): Wherein n may be a, c, g or t
  misc_feature (2)..(2): Wherein n may be a, c, g or t
nntattaagcactatttaacgtgaatttgattatttatatgaacacgaaagcttaaacgtgcaaaagtagtgctaaaatgagaaaattaagctattcagattattaaggaggtttacattatgagtcaacaattaacaagagaagaacaggaacgtaaatatcctgaatatacatgggatttaacaactatttttaaaagtgatgaagcatttgaagaagcttttaaaagtattgaagctaaaataggtgaagaagaaaaatttaaaggtcatcttggtgaaagtgctgaaacattatatgaagcgctaagtcttgaagacgagttaggtacaaaattagaaaaggtatatgtatacgcacatttaaaacaagatcaagatactgcaaatgataaatataccggt

SEQ ID NO: 6918 - protein, 95 aa, Homo sapiens
MSQQLTREEQERKYPEYTWDLTTIFKSDEAFEEAFKSIEAKIGEEEKFKGHLGESAETLYEALSLEDELGTKLEKVYVYAHLKQDQDTANDKYTG

SEQ ID NO: 6919 - DNA, 237 bp, Homo sapiens
  misc_feature (1)..(1): Wherein n may be a, c, g or t
ntgctgggagaaatcaaatctccgttaataaggaattatcatatggattacgtggaagaacaaaaaactggcgaggactggatgagtgtaatttttctatataagttaaaaaagggattgacttataatagttatgggatgaatgtggcgaaattggcacgcctggacaaagatattataaatcgggcattcagtatttcagaagaattgcggaaggaatccattaacgaagacgcg

SEQ ID NO: 6920 - protein, 79 aa, Homo sapiens
  misc_feature (1)..(1): Wherein Xaa may be any naturally occuring amino acid
XLGEIKSPLIRNYHMDYVEEQKTGEDWMSVIFLYKLKKGLTYNSYGMNVAKLARLDKDIINRAFSISEELRKESINEDA

SEQ ID NO: 6921 - DNA, 285 bp, Homo sapiens
gatggcgtgattcgcgtcgcccagaaaaccgtcgatcactgccgctcaattggcatcggcctcaccccgtgcaccattgcggcggtgggcaagccaaacttccagatccccgacggccagatggaactgggcatcggccatcacggcgaaccgggcattgaagttgtgcccatcgagcccgccgccgccatggccgaacgcatgctcgcaccgatcctggctgaccgtgatttcagccacgatgacagcgtggtggtgctggtctcgggcctgggcgccacaccg

SEQ ID NO: 6922 - protein, 95 aa, Homo sapiens
DGVIRVAQKTVDHCRSIGIGLTPCTIAAVGKPNFQIPDGQMELGIGHHGEPGIEVVPIEPAAAMAERMLAPILADRDFSHDDSVVVLVSGLGATP

SEQ ID NO: 6923 - DNA, 318 bp, Homo sapiens
  misc_feature (318)..(318): Wherein n may be a, c, g or t
agatctaggaataaccgtgttttctaatcctgtgcctataagtgatggttgctaatgggaggttgtcatatgacttaactatgagccaacactgataactcatgttcctagacagttcatcaagagacaagctaatctgtaataaatacattcttagaaagaagtggaaagttattggcataaaaatggcctagacattttaacactgactacatgaaagctaagtcatggctttatctatggggaaagggcagaatgagagaagcctcaaggatttagttatttggatagcatagaccagtctacacaagtctgtgn

SEQ ID NO: 6924 - protein, 58 aa, Homo sapiens
MPITFHFFLRMYLLQISLSLDELSRNMSYQCWLIVKSYDNLPLATITYRHRIRKHGYS

SEQ ID NO: 6925 - DNA, 290 bp, Homo sapiens
  misc_feature (1)..(1): Wherein n may be a, c, g or t
nccctggcatcactcagcacggcggcaggccgacggtgcttccacagcactgctccaatggagagcgcctgcagcacccaacagcctgcttgctgcctgcaccctcgggtcctgccagtgcccctccaaagccagctgctctccggctttgtctcttctaccatgctccctggctcaccggccccctccaggtcttgtttccttgtgatgatgtacatgccctggccatcagatgtcacacagtctcagagccaaaggccctggtcctcggtcagggcagtggcaggagg

SEQ ID NO: 6926 - protein, 77 aa, Homo sapiens [sequence omitted]

SEQ ID NO: 6927 - DNA, 328 bp, Homo sapiens
  misc_feature (309)..(309): Wherein n may be a, c, g or t
  misc_feature (310)..(310): Wherein n may be a, c, g or t
tgatcagtacctatattcagagactagtgaaaagaagaagggagtcaggtttgagaaatatttacttgaaagttgatgattggatatggaaggaaggaagactagataatgatggtaccatcaatgaatataagagaatacaagagcaaaaacaagttttgatgagaaagtgatgtttataatcagctgttacacacattcttttaaatattaccatttcttacctgattaggaagatctgcagtgttggcagttattattttttcaaaggtttctttcttctgaataagttactaaaattaaaacaanntaaattaaactcaattag

SEQ ID NO: 6928 - protein, 51 aa, Homo sapiens
MVIFKRMCVTADYKHHFLIKTCFCSCILLYSLMVPSLSSLPSFHIQSSTFK

SEQ ID NO: 6929 - DNA, 198 bp, Homo sapiens
  misc_feature (198)..(198): Wherein n may be a, c, g or t
atcaatttcgacctgcccaacatccccgaaagctatgttcaccgcatcggccgcaccgcgcgcgccggcgccgacggcatggcaatcagcttctgcgacgcctccgagcgcgccttcctgcgcagcatcgagaagctgatccgggcccgggtgccggtgctcgaacccgatcagctggccgcctgagccaccctcgtn

SEQ ID NO: 6930 - protein, 61 aa, Homo sapiens
INFDLPNIPESYVHRIGRTARAGADGMAISFCDASERAFLRSIEKLIRARVPVLEPDQLAA

SEQ ID NO: 6931 - DNA, 381 bp, Homo sapiens
  misc_feature (1)..(1): Wherein n may be a, c, g or t
  misc_feature (2)..(2): Wherein n may be a, c, g or t
  misc_feature (207)..(207): Wherein n may be a, c, g or t
nnttccagatgaaaaaaatgaacgaagtagatataaatgaagaagaagggagagaaaaaggtaaagttaaaaattgtattggttggtgatggtggtactggaaaaagaaaattagtgcaaagtcaattgaatggtgcaatcccacaaccctcagtcaccaaattgggtgttgcagttccaccaatagtgttcaacaaaaaaagcagnaatattaaccccaatgtatgggaaaaagaaggaaaggagaaattaggtggaatgagagatggatattatataaaagaaaagtgtgaaataataatgtctgatctaaaatagagagctcaccaaaagaacgtgaataaatggaatagagatagatgaatggatattcgaagtagg

SEQ ID NO: 6932 - protein, 93 aa, Homo sapiens
  misc_feature (57)..(57): Wherein Xaa may be any naturally occuring amino acid
MKKKGEKKVKLKIVLVGDGGTGKRKLVQSQLNGAIPQPSVTKLGVAVPPIVFNKKSXNINPNVWEKEGKEKLGGMRDGYYIKEKCEIIMSDLK

SEQ ID NO: 6933 - DNA, 390 bp, Homo sapiens
ctgttgaccatcagcggcggccagcgcccggcggtgcgtgtggaggcgaatacctcggcgctcaacagcctgggcctgtccatcgatgacctgcgtacttccctcggcaccgcaaacgtcaaccaggccaagggcaatatcgacggcaagttccaggcgtattccattggtgccaacgaccagttgcagtcggccgaggaataccgcgacctggtgattgcctataaaaacggcgcaccgattcgcctgtcgcagatcgccacttccacccagggcccggagaacccgcgccaggccgcgtggaccaacagcacgccgtcgattgtgctgaatatccagcgccaacccggcgccaacgtgattcaagtggtcgaccgcgtgcagcaattg

SEQ ID NO: 6934 - protein, 130 aa, Homo sapiens
LLTISGGQRPAVRVEANTSALNSLGLSIDDLRTSLGTANVNQAKGNIDGKFQAYSIGANDQLQSAEEYRDLVIAYKNGAPIRLSQIATSTQGPENPRQAAWTNSTPSIVLNIQRQPGANVIQVVDRVQQL

SEQ ID NO: 6935 - DNA, 302 bp, Homo sapiens
  misc_feature (302)..(302): Wherein n may be a, c, g or t
acgcgtgcgtaatgagcttctctgaatccaggcacctgggatagtgtcacgataatgccagtacacagggggaatagtttatctgagctagaggcaggcacatttgcatgtgtaaacttggagggaggctcaggctctgtcctcatggcctgcattgtctcgaggaatctgaggcttagagtggttgggcccccacccaaggtcaggaccaggatgtcaagccaggcttgggcaattccagaggtcaaactcttaacttctgggacccatctgagaggttagagccagggaggccagggtcn

SEQ ID NO: 6936 - protein, 75 aa, Homo sapiens [sequence omitted]

SEQ ID NO: 6937 - DNA, 450 bp, Homo sapiens
  misc_feature (52)..(52): Wherein n may be a, c, g or t
  misc_feature (64)..(64): Wherein n may be a, c, g or t
  misc_feature (65)..(65): Wherein n may be a, c, g or t
  misc_feature (91)..(91): Wherein n may be a, c, g or t
  misc_feature (242)..(242): Wherein n may be a, c, g or t
  misc_feature (262)..(262): Wherein n may be a, c, g or t
cttgcactttctgatttcaagactgattttaaagctaaagtcatcaagacangtgtgatgtggnnaagagctagacaagtgaatcaatggnacagagtagaggatttggaaactgacccacacatatatggtcaactgatttttgaaaaagaatcaaagggtaatcagtggaagaaagaattgtctttccaccaatggcactgaaacaaccagaaagctttatgccgaaagttgaactcccncctttttttcataccttatnaaaaatataactcagaatggatattagaactaaatgtgaaacttaaacctattaaatttctagaaggaaatgtaagagaaaaatctttgcgactgtgagttaggcaagatttcttagattaaacaaaagccttaaaatatttattaattggactttatccaaattaaggacttctgaccttccaaaaa

SEQ ID NO: 6938 - protein, 67 aa, Homo sapiens
  misc_feature (18)..(18): Wherein Xaa may be any naturally occuring amino acid
  misc_feature (22)..(22): Wherein Xaa may be any naturally occuring amino acid
  misc_feature (31)..(31): Wherein Xaa may be any naturally occuring amino acid
LALSDFKTDFKAKVIKTXVMWXRARQVNQWXRVEDLETDPHIYGQLIFEKESKGNQWKKELSFHQWH

SEQ ID NO: 6939 - DNA, 422 bp, Homo sapiens
caattggatgccaaagttcaacatctttctattctcaatcaaaaatacgagcatgaactggcgctgtttaaaaagcacaaattcggcagtaaaaacgaacatctcaccgcaaaacaaatccatctctgggatgaagcggttgaagaagatattgccgcggttgatctagaactggaacggctaaatacagataaaaccaatgcagcgacacagaaagccaaaaccaataaacctaaacgtcgaccactgccagatcatctacacaccatccgtattgagcatgaacctgcatcaacccaatgtgcttgtggctgccaactccgtcgtatcggcgaagatgtcagtgaaaaactgcatttcagacggcacagtctataaggaacagcatgtgcgtggtaaatgggtctgtgatcagtgtgaca

SEQ ID NO: 6940 - protein, 125 aa, Homo sapiens
QLDAKVQHLSILNQKYEHELALFKKHKFGSKNEHLTAKQIHLWDEAVEEDIAAVDLELERLNTDKTNAATQKAKTNKPKRRPLPDHLHTIRIEHEPASTQCACGCQLRRIGEDVSEKLHFRRHSL

SEQ ID NO: 6941 - DNA, 328 bp, Homo sapiens
  misc_feature (1)..(1): Wherein n may be a, c, g or t
ngaattcctagccttggcgcactatcaagggatatatggacacatgaaggtcctcgagcattctacagaggccttgttccatcattgcttggcatggtcccttatgctggaattgatcttactgtttatgaaacactgaaagaaatgtccaggacatatgccctcgtggacaaagttcctggccctttagtacagctgggctgcggaacagtctctggagcgctaggagcgacatgcgtttatcctttacaagtcatcagaacaagaatgcaagctcagccagccaattcagaggatccatatagggggatgaccgattgtttccgga

SEQ ID NO: 6942 - protein, 109 aa, Homo sapiens
  misc_feature (1)..(1): Wherein Xaa may be any naturally occuring amino acid
XIPSLGALSRDIWTHEGPRAFYRGLVPSLLGMVPYAGIDLTVYETLKEMSRTYALVDKVPGPLVQLGCGTVSGALGATCVYPLQVIRTRMQAQPANSEDPYRGMTDCFR

SEQ ID NO: 6943 - DNA, 313 bp, Homo sapiens
cgggatctgattccccggattcggacaatgcttgccggcggcggggacgacgatccagtgctcgccgacgagcagaccgtgttccgtccgtactcgctatgccgcatcgggggaacgccgttcagcgtggaagccaccctgggcgccctgggagtcacggacggggagctgctggcgctggtgatgttgccaccggggccgacggccccgcctgtggtcgaggacctggccgacgcggcagccattcacgctgcagagcagtcgtccgagtttcggcacgccctgctggccccgatagcacaggtctacgcgt

SEQ ID NO: 6944 - protein, 104 aa, Homo sapiens
RDLIPRIRTMLAGGGDDDPVLADEQTVFRPYSLCRIGGTPFSVEATLGALGVTDGELLALVMLPPGPTAPPVVEDLADAAAIHAAEQSSEFRHALLAPIAQVYA

SEQ ID NO: 6945 - DNA, 381 bp, Homo sapiens
agcttaaaacaaaggggcaatgtaccgcaatatgtcatcgataatagccctctgctccatttatatagtgaagaaaagtactggccagctgatgttaaggattttgtaaaaagattccagttgagagaccacagtggggagaaaattatcaatgaacaccttcctgacttaagtgacttacaagagtattattcggtagagttagagaacggaacgtggggccgagtatccagtgaaggtacatatatgacaagtttagatgattttgataagggccctgactggttgttgggtgaacaaccagaatatggtacaggtcacataaagaaagcaccagcagttctttttgtcgttgacaaaggaaatggttgggtagacgcg

SEQ ID NO: 6946 - protein, 127 aa, Homo sapiens
SLKQRGNVPQYVIDNSPLLHLYSEEKYWPADVKDFVKRFQLRDHSGEKIINEHLPDLSDLQEYYSVELENGTWGRVSSEGTYMTSLDDFDKGPDWLLGEQPEYGTGHIKKAPAVLFVVDKGNGWVDA

SEQ ID NO: 6947 - DNA, 268 bp, Homo sapiens
tgatcattttaactgaataaaatacgtcctttttccagtttatctcctgtatatgcatccgttgtcttggctgttgtttatcattatttcagcatttacctcaatccatactcatgctcaccctgtgtctcaacatctggatgaggcggaagatgatgattcgcctctacactatcgtattgcagaccttgatcctcgcttaaacattagtaagcaaaaaatgattgaaattagtcaagaggccgctgctatttgggaacgaggtacc

SEQ ID NO: 6948 - protein, 72 aa, Homo sapiens
MHPLSWLLFIIISAFTSIHTHAHPVSQHLDEAEDDDSPLHYRIADLDPRLNISKQKMIEISQEAAAIWERGT

SEQ ID NO: 6949 - DNA, 443 bp, Homo sapiens
gtcgacaggctccagggttctgttttgtagtgcacccgctgtggtgcaacatgcgtctgggcacaccagcgtcgcccgtttcctgttgtagtctttcctctctgactccaggggtattgggtctttctgccagcgcccatgcaactttggcagcctggcctgtctgctggtaagtggggcagaatccctgcactccaccattcttgggcaacactccctctaggattttggtctcccttttctctctggtctttgaccaccgctacccagcaaactcctccatctagaccagccagcattggtttcttccactcccccagctgccgcgtgggaggcgccactgcaaacttccctggggtctcccagctgctcagagatccccatgcccttccctgatcagctccctgcccggttctcatcccgacgcggctgcatggatattc

SEQ ID NO: 6950 - protein, 139 aa, Homo sapiens [sequence omitted]

SEQ ID NO: 6951 - DNA, 378 bp, Homo sapiens
caggcgcccggcgggcacaatgtcatctgcggcatctttgatcaccttcaggagcgtgcaaaaggtagcaccttgcttggattcaagggaggccctgctgggatcatgaagtgcaaatatgtggaactcacttcagactttgtgtatccctacagaaaccagggcggattcgatatgatctgcagtggaagggacaagattgaaacaccggagcagttcaagcaagctgaagacacagccaacaagcttgatttggatggacttgttgtcattggtggtgatgattcaaacaccaatgcctgccttcttggtgaatactttaggtcaaggaacctgaagattcgtgttattggttgcccaaagactatcgatggagat

SEQ ID NO: 6952 - protein, 126 aa, Homo sapiens
QAPGGHNVICGIFDHLQERAKGSTLLGFKGGPAGIMKCKYVELTSDFVYPYRNQGGFDMICSGRDKIETPEQFKQAEDTANKLDLDGLVVIGGDDSNTNACLLGEYFRSRNLKIRVIGCPKTIDGD

SEQ ID NO: 6953 - DNA, 271 bp, Homo sapiens
  misc_feature (271)..(271): Wherein n may be a, c, g or t
tccggaaacctgcgcacctggtcacaatgagcctcgctggatgcccctcaccggtatccctcccctactttcttacggcagttgtcaccgttcttatggcatcattcctgttgggcacggcagaaacggtgctccccccagctgggcacccagtcatcgttctcgtcgagggaaaaccagcccgaaacgtctcggcggtcggctcgtggatgtccacgtattcgcaacgacaacatgtggcagtcgggcgctggcgggccgatcgctgcan

SEQ ID NO: 6954 - protein, 81 aa, Homo sapiens
MSLAGCPSPVSLPYFLTAVVTVLMASFLLGTAETVLPPAGHPVIVLVEGKPARNVSAVGSWMSTYSQRQHVAVGRWRADRC

SEQ ID NO: 6955 - DNA, 306 bp, Homo sapiens
ggatcctcactgctccccagaccactttgctcacatggcattccactacagagatgctgtctcatgcccatatcccttggaaagtctcccatctccttctagaagcctagagtttccaatgcctccctggagcccctgctcattagatctgccttccagacagactgtacactcccatgctgacctccttgcccccacctctcctgcagctgctagtccaggtgagaccctgcatgaggctctaatgatgtttagtgatggaaaggagggtcagccagatggagggggaaagccagcacctcatga

SEQ ID NO: 6956 - protein, 90 aa, Homo sapiens
MAFHYRDAVSCPYPLESLPSPSRSLEFPMPPWSPCSLDLPSRQTVHSHADLLAPTSPAAASPGETLHEALMMFSDGKEGQPDGGGKPAPH

SEQ ID NO: 6957 - DNA, 282 bp, Homo sapiens
gtgcacagttaactttctagcaggagtataatgccatttgctccccatcttgagatgggaagggcttaactaatctcggttcggagtgatccgccccgatactgccttctgccttaatatcgtccaaggcacatggacccctgaacggcgcagatatctccgcacggacgaaagaccgccggtgccttcctgaggcaaccgcccctttcgaatatagatcacgtgacccatttttagctactaatagaaaaagaaattgcaacctacttaagccattccgga

SEQ ID NO: 6958 - protein, 53 aa, Homo sapiens
MGHVIYIRKGRLPQEGTGGLSSVRRYLRRSGVHVPWTILRQKAVSGRITPNRD

SEQ ID NO: 6959 - DNA, 162 bp, Homo sapiens
actagtgtcgccttccgcgtggagatccacacggtgcccaccatccggtcaggaccacctgcagtgaacgtctcagtgaaccagacagccctgctgccttgccaggccgacggcgtgcccgcacccctcgtgagctggcggaaggacagggtccccctggat

SEQ ID NO: 6960 - protein, 54 aa, Homo sapiens
TSVAFRVEIHTVPTIRSGPPAVNVSVNQTALLPCQADGVPAPLVSWRKDRVPLD

SEQ ID NO: 6961 - DNA, 303 bp, Homo sapiens
acgcgttgccaattctattggtcagaaaagcatccagatgagcttagggtgatagtatctcttccggacgaagtttcctttcctgtaacaagcgagccgtcaactacgcgctttgaacttgccatttgtgaagatggtgaggaagtctctggccttgggccagcctatgcttctctggaaaacagacaggcaacagttcgattacgtaaaagcgaagtgagatttggcaggcaaaatccatcggcaggtttgtcgttagtggctcgtgctggagggatgattgttgggagcattaaacttgat

SEQ ID NO: 6962 - protein, 101 aa, Homo sapiens
TRCQFYWSEKHPDELRVIVSLPDEVSFPVTSEPSTTRFELAICEDGEEVSGLGPAYASLENRQATVRLRKSEVRFGRQNPSAGLSLVARAGGMIVGSIKLD

SEQ ID NO: 6963 - DNA, 276 bp, Homo sapiens
  misc_feature (221)..(221): Wherein n may be a, c, g or t
gggcccagctcccttggggatctaccaatgctttctgagtggcattcacagctctggagagggggctggattggagttggggacttggaacccttcgctgtgcaggtggcagctggaactgtggggcacaaactcaaaggcccaagtgtcttacggacggatgtgcccagatatcatacgggcaccttgcctgcctcctgggcaaaaccaggctccacctnttttgccagagccccatcctcttaactgcctatcgcagaaccccaaggcagaaac

SEQ ID NO: 6964 - protein, 72 aa, Homo sapiens
  misc_feature (65)..(65): Wherein Xaa may be any naturally occuring amino acid
MLSEWHSQLWRGGWIGVGDLEPFAVQVAAGTVGHKLKGPSVLRTDVPRYHTGTLPASWAKPGSTXFARAPSS

SEQ ID NO: 6965 - DNA, 484 bp, Homo sapiens
gcgttcactaacgcttcaacaaactcttacaagcgtcttgttcctggtttcgaagcacctgttatgttggcttactcagctcgtaaccgttctgcttctatccgtatcccatacgttgcaagccctaaaggcaagcgtattgaagctcgtttccctgatccaaccgctaacccatacctagcattttcagctatgttgatggctggtatcgatggtatcaaaaacaagattcaccctggcgatgcagcagacaaagatttgtacgaccttccagctgaagaagcagccgctatccctcaagttgctagcagcttagaagaagcgcttaagtgcctagatcaagaccgtgagttcttgactcaaggtggcgttttctctgacgacatgatcgatgcttacatcgctcttaaagcagaagaagcacagcgtgttgcaatgacaacaacaccacttgagttcgaactttactacagcctataagctt

SEQ ID NO: 6966 - protein, 159 aa, Homo sapiens
AFTNASTNSYKRLVPGFEAPVMLAYSARNRSASIRIPYVASPKGKRIEARFPDPTANPYLAFSAMLMAGIDGIKNKIHPGDAADKDLYDLPAEEAAAIPQVASSLEEALKCLDQDREFLTQGGVFSDDMIDAYIALKAEEAQRVAMTTTPLEFELYYSL

SEQ ID NO: 6967 - DNA, 342 bp, Homo sapiens
gattgctttgatcttgcaggccgggattacaaaatagatgctgatttactgagagcaatatcatggaaagaatcccgttaccgggttaatgccatcggtattaatccggtaacgggatatggcagcggactgatgcaggtagattcccagcattttaacgaactggcccgctatggaattaagccggaacatctgacaacagatccctgcatgaacatttataccggggcttattatctggcaatagcctttaaaaaatggggcgtctcctgggaggccggtggggcatacaatgctggattcaagaagaccgaacgccaaaaccggagacgtcttgcctac

SEQ ID NO: 6968 - protein, 114 aa, Homo sapiens
DCFDLAGRDYKIDADLLRAISWKESRYRVNAIGINPVTGYGSGLMQVDSQHFNELARYGIKPEHLTTDPCMNIYTGAYYLAIAFKKWGVSWEAGGAYNAGFKKTERQNRRRLAY

SEQ ID NO: 6969 - DNA, 346 bp, Homo sapiens
gctagcggtgtacaaaaacgaatcaatagcaccaacccgaaatacgagtcgtggcggtacgcatgactccagtacgcaaaggtgtaaccatggctgaacagcaaaacgccgacgtgaataaagggaatcctgatgcttgagatgacctttcggccaaatggacctccaaacgctgctgatcagcagcgggcttctcctcctgtactactgggacaatcgcaagcgcttcaagagccgcgatccgtctctgttgtctgggtggatgatgacctttgagatcatcgctgtctttcgtctactctttacgatcatcttgacagcacacgttggactcaaggctctggag

SEQ ID NO: 6970 - protein, 63 aa, Homo sapiens
MDLQTLLISSGLLLLYYWDNRKRFKSRDPSLLSGWMMTFEIIAVFRLLFTIILTAHVGLKALE

SEQ ID NO: 6971 - DNA, 327 bp, Homo sapiens
  misc_feature (285)..(285): Wherein n may be a, c, g or t
ccatgggcaattaagtaatccagagaggtagaaggacaagagatggtggttcacaaataacatatgggaatttgagatttcagcagttgagtgcttctgagtgagaatctcgttgctattcctttaagcagacacacccactccacaatagacgttcttttctgtggatgaaggcctgaccctgacccttggcttataccgcaccctttcctgtttttgactctcttcctcaccagctccattattcattctcccattttgtcctcaccttgtctttcatatctnatgcacattgttgtcttcctggcccagacttcctcttgatca

SEQ ID NO: 6972 - protein, 63 aa, Homo sapiens
MELVRKRVKNRKGCGISQGSGSGLHPQKRTSIVEWVCLLKGIATRFSLRSTQLLKSQIPICYL

SEQ ID NO: 6973 - DNA, 398 bp, Homo sapiens
  misc_feature (1)..(1): Wherein n may be a, c, g or t
  misc_feature (2)..(2): Wherein n may be a, c, g or t
  misc_feature (117)..(117): Wherein n may be a, c, g or t
  misc_feature (184)..(184): Wherein n may be a, c, g or t
nnaccgcggatcacgatgacctctcccgcaatcgtttccgccacctacatcgggcgcaccagcaaggcgtgttcttccgcctgcaggacctgcccgaagccgctcaggtgccggcgnccgcgcgatcgctgctgatgcgcgtgatcgctcgcccgatccgtatgcaagcagaccgacggcatgngcggtgccacctccagcaccagcaagtgcgtgatcatctccaccgcctcggtgccggcccacgatgtggactacctgtacggccaggtctcgatcgacaccgccttcgtcgattggagcggcaactgcggcaacctcagtacggcagtgggtccgttcgcgatcgccaatgggctgatcgatccggcccgggtgccgcgcgatggcctgtgcac

SEQ ID NO: 6974 - protein, 84 aa, Homo sapiens
  misc_feature (14)..(14): Wherein Xaa may be any naturally occuring amino acid
SLARSVCKQTDGMXGATSSTSKCVIISTASVPAHDVDYLYGQVSIDTAFVDWSGNCGNLSTAVGPFAIANGLIDPARVPRDGLC

SEQ ID NO: 6975 - DNA, 437 bp, Homo sapiens
taattatgctacagacaatgtggggacatagaaaggcaagtctgatgaatgcaaagaaattggaaaaaagtatgcagcagtgtttttcaagtaggcacctcagaacactaatccctctgcatcaagggctgctgcaagaagacaggtttcatgtgactgggagatgagccacaccacaccactcccagggactcaaagcacgtcagcacaaccaagtctctgaaaagtcctgcagtaaagaaacctgcttaacttggtttcgcatttcctaaacttattcacccatggaaccattttttcccctaaacttctctacccatggaacttgtggaactcacataactttgaagaaatcctgcaacagaaaagagaaaagatgaaaaatgcagcccaggggaaactgagccagagtcagcatgcttaggtgcagcccatgc

SEQ ID NO: 6976 - protein, 53 aa, Homo sapiens [sequence omitted]

SEQ ID NO: 6977 - DNA, 331 bp, Homo sapiens
  misc_feature (328)..(328): Wherein n may be a, c, g or t
  misc_feature (329)..(329): Wherein n may be a, c, g or t
  misc_feature (331)..(331): Wherein n may be a, c, g or t
tgatcacagctgagtctgaatgctctctagaactcagatgtagagaaaggaggaaatacaagatggggctgtgggcaggtcttacctgggctgggggagcagcgtggtgtggatggtcttccttctaaatgaggggagctggtgcacattccagtgtaaagaacatcctatgcaccagagttgtctgcactgactcaggacggcatcatctccagacttgaggacccctgagctcaccattcttctgtccatgagtggccacccaaccacccaagggtgaaaggtcgtgctctatgctctcacctcaggtcatgatgaaagtaggaanncn

SEQ ID NO: 6978 - protein, 56 aa, Homo sapiens
MDRRMVSSGVLKSGDDAVLSQCRQLWCIGCSLHWNVHQLPSFRRKTIHTTLLPQPR

SEQ ID NO: 6979 - DNA, 261 bp, Homo sapiens
  misc_feature (206)..(206): Wherein n may be a, c, g or t
ggatcccccctcatccccttgctcagagatttaggaacctgtgctgccactgctgctgctgctattgcagccacaggcttgcctaggggctggatgggagagatcagaaaaaggaaggaggaggaggaaaaaaccccaggggaatccccttcctctctgtcctgtagaagtcccatttcctgctctttaaccagaaaaaggctttntttttttttttggaaatggggtctcatcctgccacccaggttggagtgcagggcc

SEQ ID NO: 6980 - protein, 77 aa, Homo sapiens
  misc_feature (10)..(10): Wherein Xaa may be any naturally occuring amino acid
MRPHFQKKKXSLFLVKEQEMGLLQDREEGDSPGVFSSSSFLFLISPIQPLGKPVAAIAAAAVAAQVPKSLSKGMRGD

SEQ ID NO: 6981 - DNA, 287 bp, Homo sapiens
ggatcctgagtccgtttgaaagactgggcagaggaggttatgcagccggtacagcagctaaagtaagtgggagatgttccttctcccaacttccaggaacccgttcctctcagttcgaggggcactgcctgcctttcaaaggggtgctcacctccctggagggaaggcagcagagctgtgttaactgcatagatagggacggctctgaacccctgctcccagcccacaagcagactgaattccagatatgcccggaggagcatagcaaagcgaaaggaaagaggagg

SEQ ID NO: 6982 - protein, 87 aa, Homo sapiens
MLLRAYLEFSLLVGWEQGFRAVPIYAVNTALLPSLQGGEHPFERQAVPLELRGTGSWKLGEGTSPTYFSCCTGCITSSAQSFKRTQD

SEQ ID NO: 6983 - DNA, 326 bp, Homo sapiens
tccggatccgtctctatcacttttcgttttgtagtgaaagtcccaggcatgtttctgggtacgtccacccacttgactgtgtgcatgcggtcatcccagtcggggacctggtctgcagggagctgaaacattattctggagaagcttgcccccgatccgcatttttttaggttgatgggtacatctgacttcatggtcaccactatgtccttggcacacccagggtggaggtggcccatctgtggggagaaagcaattgtagctgaaacaggccattcaaaccgtatcaagttcactgggctgtgatttgtgactgtgaagcttgc

SEQ ID NO: 6984 - protein, 79 aa, Homo sapiens
MGHLHPGCAKDIVVTMKSDVPINLKKCGSGASFSRIMFQLPADQVPDWDDRMHTVKWVDVPRNMPGTFTTKRKVIETDP

SEQ ID NO: 6985 - DNA, 283 bp, Homo sapiens
tgtacataatggacagccacactgtccagctactagagcaaggggacttgggaggctcactgtgaccacagctaggtcatccatctggaacagaagaagcctgtgccatggcaggcgtgggtcacaacatgacaggcagaccaagggctttgtggaatgcactgatcagcacacaggtgttggttgttctgactaactgcctgggctggacagagtggggctacgggagcctgagtaggctggagccctgctgcagccctcaaacccaccatgacaggctagc

SEQ ID NO: 6986 - protein, 66 aa, Homo sapiens
MVGLRAAAGLQPTQAPVAPLCPAQAVSQNNQHLCADQCIPQSPWSACHVVTHACHGTGFFCSRWMT

SEQ ID NO: 6987 - DNA, 359 bp, Homo sapiens
gccaccagccaggcgtccatgtcaccgactgccagcgccgcatccattagcgtcccgtactcgcgcgaagcgccgatctcggagcgcagcatccgtccaccgtccggcgcgcgcctaaggactccagctgaagccggacaccgtagagctggtcgacctcttctacgtccgggtgatacaccgtcgctcggcgatggtatcggcctcgtttgagcctttcttcccgcagcaagcgaaacgcctcgtgcaaatgacctccccgtcgatccaggtctttcaactttccatcctgcgtgaggcggcaggggcggtgacgctccactgctcggaagagcactatttcgcgctattgatccgga

SEQ ID NO: 6988 - protein, 64 aa, Homo sapiens
MSPTASAASISVPYSREAPISERSIRPPSGARLRTPAEAGHRRAGRPLLRPGDTPSLGDGIGLV

SEQ ID NO: 6989 - DNA, 171 bp, Homo sapiens
  misc_feature (1)..(1): Wherein n may be a, c, g or t
natctgcgcgagaccctcgactactcctaccagcgtcagctcgatatgctgcagaaggtgcgcaggggcgtcgccgacgtcgccacgagccgtaagcgcgtcgagctgcagatgaatcaattacagaccgatgtcgacaagatacagaacgctgccagtcgcgcactcgag

SEQ ID NO: 6990 - protein, 57 aa, Homo sapiens
  misc_feature (1)..(1): Wherein Xaa may be any naturally occuring amino acid
XLRETLDYSYQRQLDMLQKVRRGVADVATSRKRVELQMNQLQTDVDKIQNAASRALE

SEQ ID NO: 6991 - DNA, 421 bp, Homo sapiens
  misc_feature (1)..(1): Wherein n may be a, c, g or t
  misc_feature (332)..(332): Wherein n may be a, c, g or t
  misc_feature (340)..(340): Wherein n may be a, c, g or t
  misc_feature (406)..(406): Wherein n may be a, c, g or t
  misc_feature (407)..(407): Wherein n may be a, c, g or t
ngggccacacagccaagtggccacggagctgggggtggtcaggagccatgctttctggtaaggcggaagtgtctggggcccgggtgggatgaaggactcgggtcccagagaccagcctttggtgctgttcttgggctaggaatggcagtaacaggaagggcatggccaccgagacgcactgagttatgggcacctgccgtctgccaggaactgtggtccacgcccgactgtctttaacagctctgtgcctgctgctgtgtgccgggccctgcgctcagcccttctcgtgtgtggtctccaaccctgcgtgttcccacggccgtggccccatntccagatnataatactgcggcccacataagcagcactgtgtgctgcggtccttggccacgacgtggtgtgggtnntttgtgaccagatc

SEQ ID NO: 6992 - protein, 54 aa, Homo sapiens [sequence omitted]

SEQ ID NO: 6993 - DNA, 395 bp, Homo sapiens
catgggaaagtcttgaaggccttgcaactattggctcaaaattatctttacaaccgctattcaagaaccttctacatcacaatcaatgtcaatgattatgtcgaacaccgtgcagaagtcttgcagacctatgcccaaaaattggcgactcgtgttctagaagaaggacgtagtcatcaaacagatccaatgtcgaatagtgaacgcaagattatccaccgtattatttcacgtatggatggtgtgaccagttactctgaaggtgacgagccaaatcgctatgtcgttgtagatacagaataagtaaaatcagggttctcctgattttttgctagctagaggagattaaacggatgttgaataagataagagactatctagattttgctggtttg

SEQ ID NO: 6994 - protein, 100 aa, Homo sapiens
HGKVLKALQLLAQNYLYNRYSRTFYITINVNDYVEHRAEVLQTYAQKLATRVLEEGRSHQTDPMSNSERKIIHRIISRMDGVTSYSEGDEPNRYVVVDTE

SEQ ID NO: 6995 - DNA, 406 bp, Homo sapiens
  misc_feature (1)..(1): Wherein n may be a, c, g or t
ngaggcctggaccgcatcctgaagaatgcaggtgtcggcttttccatcaccagcagcaccttcagctcctccaccaagaaactcaaggagaagctgtgggtgctgagtaaggcaggcatgtcgggcgcgcgttctcgcaacatcgtctacttctccctttctgacgaggaggagatgtggcaggcagggtgtctgggggatgacagccctatcactctcctgtccactgtggtcaagtacaacagccagtacctgaacatgcggacgctgcaggagcatgcggatctgatgtatggtgacatcgagctgctcaaagacccccaaaaccagccctactttgcccggacggacagcgtcaagcgggagagtcggagcggctccaccagagtgtgtcacgggaagatct

SEQ ID NO: 6996 - protein, 135 aa, Homo sapiens
  misc_feature (1)..(1): Wherein Xaa may be any naturally occuring amino acid
XGLDRILKNAGVGFSITSSTFSSSTKKLKEKLWVLSKAGMSGARSRNIVYFSLSDEEEMWQAGCLGDDSPITLLSTVVKYNSQYLNMRTLQEHADLMYGDIELLKDPQNQPYFARTDSVKRESRSGSTRVCHGKI

SEQ ID NO: 6997 - DNA, 351 bp, Homo sapiens
gcgtgggggcatgtattggccactgtggctccgatcgcctccttcgtcatcgggttggtcctctttgtcgacctgctcggacgtgacggcgcgtctcgtgccgtcgacgtgggtgtctaccgatttatcgacgtcggggcgtgggatctgcgagtggggctgcttattgaccagctctcgatcctgtttgtgctgctcatcaccttcgtgggctcactgatccacatctacgcgatcgggtatatggcccatgacaccgatcgtcgtcggttcttcgcccatctcaacctcttcattgccgcgatgctgacgttggtgttggccgataactacctcatcctgtttgtcggc

SEQ ID NO: 6998 - protein, 117 aa, Homo sapiens
AWGHVLATVAPIASFVIGLVLFVDLLGRDGASRAVDVGVYRFIDVGAWDLRVGLLIDQLSILFVLLITFVGSLIHIYAIGYMAHDTDRRRFFAHLNLFIAAMLTLVLADNYLILFVG

SEQ ID NO: 6999 - DNA, 315 bp, Homo sapiens
tcgcgtacattctacaaaaatatgcttactgaacacaccgaattacttaatatttttaacagaactaatcaaaaggttggcgcacaaccaaatgccttggccactactgttttggcagcggctaagaacattgacgatttgtctgtgcttatggaccatgtcaagcaaattggccacaagcatcgtgccttgcaaattaaacctgagcattatccaatcgttggtgagtacttgttaaaagcaatcaaggaagttttaggcgatgctgcgactccagagataattaatgcatggggcgaggcttaccaagcaatt

SEQ ID NO: 7000 - protein, 105 aa, Homo sapiens
SRTFYKNMLTEHTELLNIFNRTNQKVGAQPNALATTVLAAAKNIDDLSVLMDHVKQIGHKHRALQIKPEHYPIVGEYLLKAIKEVLGDAATPEIINAWGEAYQAI

SEQ ID NO: 7001 - DNA, 243 bp, Homo sapiens
acgcgtcgaactgttggaatgattatggttcttattgctgtgatatttttagcttatgcgctttttggtgatgctttaccaaactcagtggcaagcaaaggtttttctattgaagaaattattcgcttccatatattttcaaccaatggtatctatggcgctccacttgctattgctgctggcgtggtatttatatttgtcttatttggggcttttttacaggtcactggcgcaggtaaattt

SEQ ID NO: 7002 - protein, 81 aa, Homo sapiens
TRRTVGMIMVLIAVIFLAYALFGDALPNSVASKGFSIEEIIRFHIFSTNGIYGAPLAIAAGVVFIFVLFGAFLQVTGAGKF

SEQ ID NO: 7003 - DNA, 264 bp, Homo sapiens
accggttcagtgctcaagtggttcaaggacaattttgcagccgactacaccgctgctgccgagaaaatcggcctcaatccgtacgacgtccttaacgagcagtcgcgaaacatcagaccgggttccgacggtcttattattaatgagtatttccagggcaaccgcactccgtacactgactcgaaagctcgcggcattatctggggtctatcccttatgcacactccggcgcatttctaccacgctattcaggatcgggctgct

SEQ ID NO: 7004 - protein, 88 aa, Homo sapiens
TGSVLKWFKDNFAADYTAAAEKIGLNPYDVLNEQSRNIRPGSDGLIINEYFQGNRTPYTDSKARGIIWGLSLMHTPAHFYHAIQDRAA

SEQ ID NO: 7005 - DNA, 363 bp, Homo sapiens
  misc_feature (363)..(363): Wherein n may be a, c, g or t
attttcggtggtttcctgatgcaccgagcatttgagcttgccttctcgactgcgtatgcttttgttgggcagagaccttgtttccttgaagttgatcatgttgacttcttgaaaccagtggacgtaggggacttccttcgattcaaatcatgtgtcttgtacacccagcttgacaatccagagcagcctctggtcaacgtcgaagttgttgctcatgtaacaagacctgagctccggaaaagtgaggtctccaacaccttccatttcaccttcaccgtctgtagtgacacgctgaagaacgggttgaagattcgcaacgttgtcccctcaaccgaagaagaggcgcggcggatattgggagcn

SEQ ID NO: 7006 - protein, 121 aa, Homo sapiens
IFGGFLMHRAFELAFSTAYAFVGQRPCFLEVDHVDFLKPVDVGDFLRFKSCVLYTQLDNPEQPLVNVEVVAHVTRPELRKSEVSNTFHFTFTVCSDTLKNGLKIRNVVPSTEEEARRILGA

SEQ ID NO: 7007 - DNA, 292 bp, Homo sapiens
gctagctgatactcaatcacaaaccgatctcgatgccgcgatctctgtattccctctttgatttctcgtaactcttcatccaggcgtagctgatcggtccccctcggatttgccgacaggatgaggatggttttcttcaggagttggtcgctcatggaggttaatagaaagattggaaaatctgtcaggattgaatggacttcttgcatgaatcaggtcagagcaagtagagagcactcaaagttgtaaagggcggcaatcaggttgaagtgcaaagcaaaccgtcgccgtc

SEQ ID NO: 7008 - protein, 69 aa, Homo sapiens
MQEVHSILTDFPIFLLTSMSDQLLKKTILILSANPRGTDQLRLDEELREIKEGIQRSRHRDRFVIEYQL

SEQ ID NO: 7009 - DNA, 189 bp, Homo sapiens
ccggaacgtgatattactgatttgctttccataattgataaatatattggaaagtacagtgtcagcgatgaatgggtaggaaatgacatcgctgaactttaccttgaagccaaaaaactgtccgataacaatactatagttgatggctcaaaccaaaaaccacactttagtatccgtaccctgacgcgt

SEQ ID NO: 7010 - protein, 63 aa, Homo sapiens
PERDITDLLSIIDKYIGKYSVSDEWVGNDIAELYLEAKKLSDNNTIVDGSNQKPHFSIRTLTR

SEQ ID NO: 7011 - DNA, 944 bp, Homo sapiens
  misc_feature (1)..(1): Wherein n may be a, c, g or t
nacgcgtcatctgagccaactcagctctatgcaaaatcttggaggccaattcttgctctttttcaggggacatctggggttgagacatttcttgtatgcacaatgggaacactgattgaaaatagtaacgctctacgtactccttctttcgatgatatttttggttccttctgcacttcataattgtaatttttttttcttgcattttcgcgtgatatcaaaattatgagaggaaaggtgaaagagcgtcatgttggcttcaagggatcagcgatactaaagcagcaccggtgcaactggaatatcaagagactgaacatgattccgaggactagaacactactgcaaagtaaaataccaattaccaggtactttgccagatgttgggcgcctcgcgtacgctacaacgtgtgccgtactctacccgcagcagcgttgcataccaatatcatcgcacataatgaagtgaaaaaggacgataagaaggttcatttggggtcttttaaggtagacaagcctaagatgatgatagctttcacctgcaagaaatgtaacacccgatcttcacacacaatgtccaagcaggcgtacgagaaaggtactgtcttgatctcttgtccgcactgcaaagtgggacatttgatagcaggccatctgaaaatattccatgatcatcatgttaccgtggaacagttaatgaaagctaacggagaacaagttagccaagacgtgggcgacttggagtttgaagacatcccagattcgctaaaggacgtcctgggaaaatatgccaagaacaactcagaaaatgcatcacagctccctcacccttcccagaaatgaatgaagagctcatgcacaggcatgtacatagatagatatataaccgttaaatagcgcgtttttccagagactgagtcatgattactgccaaaaacccgcgg

SEQ ID NO: 7012 - protein, 205 aa, Homo sapiens
MRGKVKERHVGFKGSAILKQHRCNWNIKRLNMIPRTRTLLQSKIPITRYFARCWAPRVRYNVCRTLPAAALHTNIIAHNEVKKDDKKVHLGSFKVDKPKMMIAFTCKKCNTRSSHTMSKQAYEKGTVLISCPHCKVGHLIAGHLKIFHDHHVTVEQLMKANGEQVSQDVGDLEFEDIPDSLKDVLGKYAKNNSENASQLPHPSQK

SEQ ID NO: 7013 - DNA, 307 bp, Homo sapiens
  misc_feature (1)..(1): Wherein n may be a, c, g or t
  misc_feature (2)..(2): Wherein n may be a, c, g or t
nnacgcgtcgtcctactgggtccccaatcgcgggaccgtatcgctgaggagctcgccggggctgacgcctttgctttggcttcccatgctgagaccttcggtgtcgcttgcgccgaggccctggcagccggcttgcctgtcctgacgacggcttgcggtggacctcaagagttcattgatggttccaacggcgtggtagtcccaatcggtgacgttgacgccctgacggaagggctgcgtcaggtattggctaggtcatgggatcacgaacagatcgctgggtacgcccgctcccgattcgcggccg

SEQ ID NO: 7014 - protein, 102 aa, Homo sapiens
  misc_feature (1)..(1): Wherein Xaa may be any naturally occuring amino acid
XRVVLLGPQSRDRIAEELAGADAFALASHAETFGVACAEALAAGLPVLTTACGGPQEFIDGSNGVVVPIGDVDALTEGLRQVLARSWDHEQIAGYARSRFAA

SEQ ID NO: 7015 - DNA, 297 bp, Homo sapiens
  misc_feature (1)..(1): Wherein n may be a, c, g or t
nctcaaatgtgtccttaaaaagagaggcagagggagagttcacatagacagacgaggagaagtcaaacatagaagaagagaaggcaatgtgaccattgaggcagagattggagagagagggccacaactcaaggtataccagcagccaccagaaggtggaagagggaaggaatgcactttcttcagatcctccagaaggagcttgacccagcaacatctcaattttcagctcagtgaaactgatttcagacttctggcctctgaaaggcagagaaccattgctgtggtaaagccacc

SEQ ID NO: 7016 - protein, 72 aa, Homo sapiens
MLLGQAPSGGSEESAFLPSSTFWWLLVYLELWPSLSNLCLNGHIAFSSSMFDFSSSVYVNSPSASLFKDTFE

SEQ ID NO: 7017 - DNA, 348 bp, Homo sapiens
  misc_feature (1)..(1): Wherein n may be a, c, g or t
ncgtaccgttccgacccggcgaccgcggttcgccgcaggcaagcgtgccgaacacgttcatcggccagctcgccgacccgtcgatcgagaccgcgggaacctgcgcggactcgccggtcacaccgagcccggcaccgaacacggtcatcgactgcgacagcgcggcgatgcagatcaccaacacccagacccgcaccgtgacggccgcgaagagcttcgccccggacagccagcagtacgagaacgagtccgacacgttcacgatgaacatcgccggcacgccgggcggaaccgcgcgcagcaaccaggtgcagctgaccgaccagtcgcccgcgttcttcaacgcgt

SEQ ID NO: 7018 - protein, 66 aa, Homo sapiens
  misc_feature (1)..(1): Wherein Xaa may be any naturally occuring amino acid
XYRSDPATAVRRRQACRTRSSASSPTRRSRPREPARTRRSHRARHRTRSSTATARRCRSPTPRPAP

SEQ ID NO: 7019 - DNA, 312 bp, Homo sapiens
ctagccgtgatgtccatgaccggttatatattggggttaggtgaccgccaccctagtaatttgatgttggatagaatcactgggaaagtcattcatattgattttggtgattgtttcgaggctgctatattaagagaaaaattccccgaaaaagtaccttttagattaactagaatgttaacatatgcaatggaagtgagtggaattgaaggtagcttccgtattacttgtgagaatgttatgaaggtacttagagattacaagggttcattaatggcaatccttgaagcttttgctttcgatcctttgatc

SEQ ID NO: 7020 - protein, 104 aa, Homo sapiens
LAVMSMTGYILGLGDRHPSNLMLDRITGKVIHIDFGDCFEAAILREKFPEKVPFRLTRMLTYAMEVSGIEGSFRITCENVMKVLRDYKGSLMAILEAFAFDPLI

SEQ ID NO: 7021 - DNA, 213 bp, Homo sapiens
cggtactccgctctgatcatcggcatggcatacggcgccaagcgctacagttacctaaaaccccgggcagaggaggagaggagaatagcagcggaggaaaagaagagactagatgagttgaaacggattgagagagaactggcggaagctcaagatgacagcattctcaagtgaggcgtcagcgagcttgcttttctctagtcgttgagatct

SEQ ID NO: 7022 - protein, 57 aa, Homo sapiens
RYSALIIGMAYGAKRYSYLKPRAEEERRIAAEEKKRLDELKRIERELAEAQDDSILK

SEQ ID NO: 7023 - DNA, 323 bp, Homo sapiens
aagctttgggtcaaggcagaatagattttcctgaatgatagacatacaaagtgctttaaagatgggtcctacgatactgaaaagggtggagcaagtatgtatatgtgtgcccgtactatgtggggtcctagcatcctgcagaggtaacatgcttagtcctagcctttccctcagactagtcatttcttactcagtgtggcaataccggggattgaatccagggcctcactcttgccaggtaagtactctaccactgagctatgccactagcccttcttttaaactttatactgaggtcttgctggttgcccaggctagcctag

SEQ ID NO: 7024 - protein, 96 aa, Homo sapiens
MIDIQSALKMGPTILKRVEQVCICVPVLCGVLASCRGNMLSPSLSLRLVISYSVWQYRGLNPGPHSCQVSTLPLSYATSPSFKLYTEVLLVAQASL

SEQ ID NO: 7025 - DNA, 225 bp, Homo sapiens
  misc_feature (1)..(1): Wherein n may be a, c, g or t
ncggccgaattgatgcccgtgggagacaaccacttctcagaaagtgaagaagaaggcctggaagagtcggctgacctcaaagggctggaaaacatggaactgggaagtttggagctaagtgctgtagaaccccagcccgtatttgaagcctcagctgccccagaaatatacagcgccaataaagatcccgctccagaaacacccggggcggaagacaaatgcagg

SEQ ID NO: 7026 - protein, 75 aa, Homo sapiens
  misc_feature (1)..(1): Wherein Xaa may be any naturally occuring amino acid
XAELMPVGDNHFSESEEEGLEESADLKGLENMELGSLELSAVEPQPVFEASAAPEIYSANKDPAPETPGAEDKCR

SEQ ID NO: 7027 - DNA, 291 bp, Homo sapiens
gatcacatattgtatttggaaatcttcaaccaatggagaaactctaaattttccagaagttggtgtcaagaccacaaaattcaattcaaaacgatgttgagggtaagaaatattagaaaccaattattcaggtgcagtgaaaaggttggattagttgaaaagaacgaccaagccaggatgaagataggcaatatagcgggctacataaatgctagaataactcggtgcttcatcagcgggtttccgaagaatattgtacaattaggccccaccggctatcaaaccatgggt

SEQ ID NO: 7028 - protein, 97 aa, Homo sapiens
DHILYLEIFNQWRNSKFSRSWCQDHKIQFKTMLRVRNIRNQLFRCSEKVGLVEKNDQARMKIGNIAGYINARITRCFISGFPKNIVQLGPTGYQTMG

SEQ ID NO: 7029 - DNA, 495 bp, Homo sapiens
  misc_feature (365)..(365): Wherein n may be a, c, g or t
  misc_feature (406)..(406): Wherein n may be a, c, g or t
  misc_feature (472)..(472): Wherein n may be a, c, g or t
  misc_feature (480)..(480): Wherein n may be a, c, g or t
gaattcaaagaaaaaaatacaagaatgacagggtgagaggagaagataaaaagaactggacaagtagaacgttggccaaataatagttaatagggaactcaatagtgttctagaagtatttagaagaaaaacaatggcctaaaaacgtcactagggcggttggaaagaggcaaagaggaaggtctaagagaaaaataaattaagagaacagtgttagattttgtcattgtctcgcaagacccactgtgtaagttatattttcttggaatgctgaagtccaagccagggatttcacaggaaaagaacattttattcctttctttgtgtaggttgaagcagaaagataggcttaaaaaatatagttnaaaatgctttacataataataatgtgtggaatgtccccctnaaagtaataacctttatatttaccatctcatttaatcctcataaataattacaaggtatatacttntctctgtnttacagatggagaaa

SEQ ID NO: 7030 - protein, 62 aa, Homo sapiens
MFFSCEIPGLDFSIPRKYNLHSGSCETMTKSNTVLLIYFSLRPSSLPLSNRPSDVFRPLFFF

SEQ ID NO: 7031 - DNA, 417 bp, Homo sapiens
agatcttcctccacactccacctacaggttgggcactctgttggctccagacttcctgtcaaccctcattgacacccctcttctctttgggatctgtacataataaactgcttctgacatttcatgggtttgtgctggggtgcctcctctgtcttacctaattgacacacccacatctaactttccttctagtcaaagctctcctggagagtgggtattttggggttataaactgggcccccaggtaagccaaaacccataggggtatttgccagcataggcaaatttcctgtgagagggaccccaagttatatgttgtacacttagggattaagccatttgccagaattaaaaaaaaaaaaagcatctgtatcccatgaaaggcatattgtaaacatcctggatcaaatcccatgg

SEQ ID NO: 7032 - protein, 85 aa, Homo sapiens
MGFDPGCLQYAFHGIQMLFFFLILANGLIPKCTTYNLGSLSQEICLCWQIPLWVLAYLGAQFITPKYPLSRRALTRRKVRCGCVN

SEQ ID NO: 7033 - DNA, 444 bp, Homo sapiens
  misc_feature (211)..(211): Wherein n may be a, c, g or t
  misc_feature (212)..(212): Wherein n may be a, c, g or t
atcaagcccgttatcccagctcagtaccttgacgagaaaaccatcttccacttgaacccgtcaggtcggttcgggatcggtggtccacatggggatgcaggtctcactgggaggaagattatcatcgacacttacggaggatggggagctcatggtgggggtgctttctccgggaaagacccaactaaagtggacaggagtggtgcgtatnncgttaggcaagccgccaagagtattgtggcgtcgggacttgcacgaaggtgcattgttcaggtgtcttacgctattggtgtggctgagccgctttctgttttcgtggacacatacacgactggaacaatcccggataaggacatccttgcgcttatcaaggagaatttcgactctaggcccgggatgatggcgattaacctcgacttgaagaggggtgggaacaaaaggtac

SEQ ID NO: 7034 - protein, 148 aa, Homo sapiens
  misc_feature (71)..(71): Wherein Xaa may be any naturally occuring amino acid
IKPVIPAQYLDEKTIFHLNPSGRFGIGGPHGDAGLTGRKIIIDTYGGWGAHGGGAFSGKDPTKVDRSGAYXVRQAAKSIVASGLARRCIVQVSYAIGVAEPLSVFVDTYTTGTIPDKDILALIKENFDSRPGMMAINLDLKRGGNKRY

SEQ ID NO: 7035 - DNA, 273 bp, Homo sapiens
  misc_feature (1)..(1): Wherein n may be a, c, g or t
nacgcgttggactggatcttggaaaggcgtacgaacatgcctaatgttgtcatgcaagaccatgacaccttgttagtgaatggctgtcccatacggaagccgtacgtggaaaaacctgtgagtggcgaagaccacaacattcacatttacttcaatgctcaatccgggggtggtggtcgtcgcctattccgcaaagttgggaacaagtcgtcggagtttgatccggaactcgttgaacctcgtatggatggctcctacttgtatgaagaattc

SEQ ID NO: 7036 - protein, 91 aa, Homo sapiens
  misc_feature (1)..(1): Wherein Xaa may be any naturally occuring amino acid
XALDWILERRTNMPNVVMQDHDTLLVNGCPIRKPYVEKPVSGEDHNIHIYFNAQSGGGGRRLFRKVGNKSSEFDPELVEPRMDGSYLYEEF

SEQ ID NO: 7037 - DNA, 288 bp, Homo sapiens
agtaacgtcaatagtatcatagggcctgctttaatcaagtccgaattatgtgtaaccaatcagaagggcatagacgagctcatgatatcgttagccggaacttctaacaagtcaaggttgggcgccaatgctatccttggtgtttccttgtgcgttgctcgagctgctgccgcacaaaagggaattactctctacaagtatatagccgagttagcggatgctagacaggacccctttgttattcctgttccttttttcaatgttttgaatggtggagcccacgccggc

SEQ ID NO: 7038 - protein, 96 aa, Homo sapiens
SNVNSIIGPALIKSELCVTNQKGIDELMISLAGTSNKSRLGANAILGVSLCVARAAAAQKGITLYKYIAELADARQDPFVIPVPFFNVLNGGAHAG

SEQ ID NO: 7039 - DNA, 192 bp, Homo sapiens
  misc_feature (1)..(1): Wherein n may be a, c, g or t
  misc_feature (2)..(2): Wherein n may be a, c, g or t
nnactagttgccgagtcttttgggcttgttgctgctgaagcaatgagtgcccgcgtgcctcttattgtctccgattcgggggcactgcccgagatcgtgggtgaaaactatccgtatatcgtccccaagggggatgaggccgagctggcgcgtacgatcagcatcgtcgcgggacagctgagctcaaactct

SEQ ID NO: 7040 - protein, 64 aa, Homo sapiens
  misc_feature (1)..(1): Wherein Xaa may be any naturally occuring amino acid
XLVAESFGLVAAEAMSARVPLIVSDSGALPEIVGENYPYIVPKGDEAELARTISIVAGQLSSNS

SEQ ID NO: 7041 - DNA, 393 bp, Homo sapiens
gaattcagcaaaggactggtgccaggtcattttgtccattaggctcagaaacaaggacataggagctttgtaagggaggactggaaattttggtgtgtatgctgttggtgagcatgtatatagctatgtttgtatatctgtctatatgtatatatatgtatgcctcagtacttaactgcagaattatagttgatacatgtttaattaaatatttacaaagtggtattattataacagtaaaccacatgtaagttcaactcatgcagtttaatgtgagatatgtatactttttaatcttttgactaaaagctgggatggacattacaaaagtaagagtacctggtatctgtgaagtcttcccttctgtttggtgtggacttcagaagtttataa

SEQ ID NO: 7042 - protein, 80 aa, Homo sapiens [sequence omitted]

SEQ ID NO: 7043 - DNA, 183 bp, Homo sapiens
tacacgagagaaagatttgaaggttttctggagtattctgtacctgaaatcctgcgtgtgcctctggaggagctatgtcttcacattatgaaatgtgatctgggctctcctgaagactttctctccaaagccttagaccctcctcagcctcaagtcatcaacaatgcaatgaatttaattccg

SEQ ID NO: 7044 - protein, 61 aa, Homo sapiens
YTRERFEGFLEYSVPEILRVPLEELCLHIMKCDLGSPEDFLSKALDPPQPQVINNAMNLIP

SEQ ID NO: 7045 - DNA, 336 bp, Homo sapiens
acgcgtctgccgagctggtgtgtacaaaacagagtagaggccacctttcggtggcctctacccaatgtttgtccggcggcgtcctactctcccacaggctctcggctgcagtaccatcggcgctggcaggcttaacttccgggttcggtatgggaccgggtgtttccctgtcgctatggccgccgtaactctatgtgcgcgtggacccttgcccgagtcgatctgctcgatcatgctgatcgggttgatctggtggtggggtcgacacacgcaagtcgtgtgttgatcagtggacgcgaaacatgctgcaggtcttgttcatgtgcacacaccggt

SEQ ID NO: 7046 - protein, 73 aa, Homo sapiens
MFVRRRPTLPQALGCSTIGAGRLNFRVRYGTGCFPVAMAAVTLCARGPLPESICSIMLIGLIWWWGRHTQVVC

SEQ ID NO: 7047 - DNA, 363 bp, Homo sapiens
ctagagtttgatgaaaacactacagtgagtgtattgagtttccagtcatgtttacaaggctatcgattttgggaccacagcactgactttactagcaatagttataataacttgggttccaattccagtactaacgaaaatgatagtaatgatcatgattcaaataatgatttcacaacgaagagccaacaaatcaaagaaaaacagttatttcagggcattgacaaaaagcaacaagacacattatctaaaatcaaaaattataggcggatagattctagtgaatctaaactagttcaggatgcattggattggctcttgttcaattgggatacgtttcgactgacattttttggtaagctt

SEQ ID NO: 7048 - protein, 121 aa, Homo sapiens
LEFDENTTVSVLSFQSCLQGYRFWDHSTDFTSNSYNNLGSNSSTNENDSNDHDSNNDFTTKSQQIKEKQLFQGIDKKQQDTLSKIKNYRRIDSSESKLVQDALDWLLFNWDTFRLTFFGKL

SEQ ID NO: 7049 - DNA, 191 bp, Homo sapiens
ccgcggcaacaggcgttcgcgagcagggcgaaggcgcccggcccgaccccgcgcgccggcatcgccgcgcatgatttcgccgtgcccgatccggcaatcccgggcaccaatttggtgcccgcctccaagttgtgcttgcagaaaacgggggggaccgtggacgatctcgatttgatgggatcaatgcagcc

SEQ ID NO: 7050 - protein, 63 aa, Homo sapiens
PRQQAFASRAKAPGPTPRAGIAAHDFAVPDPAIPGTNLVPASKLCLQKTGGTVDDLDLMGSMQ

SEQ ID NO: 7051 - DNA, 343 bp, Homo sapiens
  misc_feature (343)..(343): Wherein n may be a, c, g or t
gtgcactctgggatgttcacaaaattacctaacaagaatgcatgggtcacacacaccctatgcatgacggcactgtaaattgaggatcttcctattgataggaacatcacaatgacagccatcaaggcacttcagacaaggagtcaaaaaacctcccaaagatactgcctttcccttcaattaaatcactctgagaagtggcttaatggcccaggggctttgctctgggtacctgctctggccttgcagactggccttgcttttctaatccttgcaactgcagcctgacctgatgatgataaagatgaagcaaagagtaggggcaatggaagggaaaaagcgn

SEQ ID NO: 7052 - protein, 58 aa, Homo sapiens [sequence omitted]

SEQ ID NO: 7053 - DNA, 388 bp, Homo sapiens
tgtacacatacacacacacgcactagagccatgacaaatgcatcacaaaatcatggtgggccagtgctctgagaggcagcaacaccctggagcagtggtgtttgcctggcttttctgtagggggctgaggaggaggctgagccaagagaccctcagcctcccacctcccttagttcaccaacaatggacaacagtgctgatttcatgttctatattattacaaccccctggacgggaggagaagaggaaaggggaaagaaagctgcatgaccacagatagagtgccaagcccatgaattctcgtggaatgggcaaagccgagtaactcactgtcgctgatagggagatgatgatgatgactatgatgattatgccatttttcctcctc

SEQ ID NO: 7054 - protein, 80 aa, Homo sapiens [sequence omitted]

SEQ ID NO: 7055 - DNA, 343 bp, Homo sapiens
gtgcacatccgagaagtgcatgtgaaatgctggaactgggatttcagcaactgaatgcacgtgtgtgactacccacgagaagcatgacacttagcacctgctgagaagcccccacgcccatgttcccttctaggcactgcacaagcatgctggccggcctgacctcagtttccctcttgctgtggccgcttctgctccactctctgtgaggctcatccaccttgttgcctgtgggtggggattggtcattctcagtgctctgtatgccaagtactccattgggtgaaaatcccacagcacgttcattctattatcaatgggcatttgggtagtttccacaatt

SEQ ID NO: 7056 - protein, 64 aa, Homo sapiens [sequence omitted]

SEQ ID NO: 7057 - DNA, 377 bp, Homo sapiens
  misc_feature (1)..(1): Wherein n may be a, c, g or t
  misc_feature (2)..(2): Wherein n may be a, c, g or t
nngatattagccaggttgtaaaaggcctcacaccaaggtgaacaattgaactttccaaggtaatgggctaagaatactttgaagctgatgaataaaaggataaatgaggattaattttctcagaaaaatgaattaggtggtagtacagtacaaagaaaaaaacagtaataataaaaattcaggtgcctatgacatttccttctttttttttttttatgaaagggattttcaaatgttttacccaggtttgaattgcagtggcacaattttagttcattgaaaccttttgctccgggtttcaagcattttttttgccttaccttttttaattgttggtatttaaaacgcccgccaccacgcccagttatttttttttt

SEQ ID NO: 7058 - protein, 52 aa, Homo sapiens
KGFSNVLPRFELQWHNFSSLKPFAPGFKHFFCLTFFNCWYLKRPPPRPVIFF

SEQ ID NO: 7059 - DNA, 265 bp, Homo sapiens
  misc_feature (1)..(1): Wherein n may be a, c, g or t
  misc_feature (2)..(2): Wherein n may be a, c, g or t
nngatgccggacatcgacttcgcttccatccacctctaccccgacacctggctgctgcagcagcacgccacggtggacgagaagctcaagttcgtgaagcggtgggtggcgtcccacatcgaggacgggggacaagggagcctggggcaaggccgggtcccttcggccaccgagattcggggctgttcgcaccgcggccaaggggcttccaccactcccaccgcgacgtcttctacaaggccgtctacgacaccgtataccgggc

SEQ ID NO: 7060 - protein, 88 aa, Homo sapiens
  misc_feature (1)..(1): Wherein Xaa may be any naturally occuring amino acid
XMPDIDFASIHLYPDTWLLQQHATVDEKLKFVKRWVASHIEDGGQGSLGQGRVPSATEIRGCSHRGQGASTTPTATSSTRPSTTPYTG

SEQ ID NO: 7061 - DNA, 210 bp, Homo sapiens
tccggatttatgctcgtcatttatgttggtatttattggttgaggttgaacttctctccatacgcacaagtggctgttttggagttacttgtcaagtttgaaaaatacgtccccaaaaaatatagagacaaatggcaggttgtaaagaactttatttatatgaaaatgaaggagcacgaaaagagaacagaagaagttgccagatacgcg

SEQ ID NO: 7062 - protein, 70 aa, Homo sapiens
SGFMLVIYVGIYWLRLNFSPYAQVAVLELLVKFEKYVPKKYRDKWQVVKNFIYMKMKEHEKRTEEVARYA

SEQ ID NO: 7063 - DNA, 224 bp, Homo sapiens
actagtagtatatgggacagcgtacatgtctacagtctgactagctgcttgcttgtcacgctatatgcaccgaagaagaccagagaagtcgcatgacctacacacagctcggacggaggggaccatagctcgccggcgacgaagctcagctcggcagccggggaggagggatcggatctacagcctgagccactgctcgccgttgacgaagctcgggccgagga

SEQ ID NO: 7064 - protein, 53 aa, Homo sapiens
MHRRRPEKSHDLHTARTEGTIARRRRSSARQPGRRDRIYSLSHCSPLTKLGPR

SEQ ID NO: 7065 - DNA, 332 bp, Homo sapiens
  misc_feature (1)..(1): Wherein n may be a, c, g or t
ncgatcgtcgcactcggcgtcaacagcgacgacgtgctcatggagcccaagagcatgaacacgtggcagaacgcgcagttctcgcgcgcggcgctggccgactacgcgccagatcgcacgctgctggtgtcttccgccatccacctgcggcgcagcctgctgtatttcgcgcacttcggcatgacgccgattcccgtgcgcgccgatgatctgcaggccaccgcatcgccgttgccgatggcgtacaactttgcgctgatggactacgcgctgcacgagtggatcggcatcgcgcgctatcacgtgtacaacgcgctcggctggaatccgga

SEQ ID NO: 7066 - protein, 110 aa, Homo sapiens
  misc_feature (1)..(1): Wherein Xaa may be any naturally occuring amino acid
XIVALGVNSDDVLMEPKSMNTWQNAQFSRAALADYAPDRTLLVSSAIHLRRSLLYFAHFGMTPIPVRADDLQATASPLPMAYNFALMDYALHEWIGIARYHVYNALGWNP

SEQ ID NO: 7067 - DNA, 363 bp, Homo sapiens
tctagaatgcaagctccctacaataggaaagccatgtctcacctctcttgttaccatctttactgctttgcacagggtctgacagaaagaaggcaccaaaaatatttgactagaaaataaactgagaaaacactgggataccatttcacatccatcagataggcaaaatgttagaaagctggataaatgatggtgtggatatgaataaacaggaactctcatatgttgctgatgggaatgtgagtttggtaaaattactttgaagagtgatatttttcatctctcgccagctgaaatgagcactgtcaagcagcattctgcttcagttacatacattagactattatttgtgcaatattggcc

SEQ ID NO: 7068 - protein, 74 aa, Homo sapiens [sequence omitted]

SEQ ID NO: 7069 - DNA, 467 bp, Homo sapiens
  misc_feature (464)..(464): Wherein n may be a, c, g or t
gtgcacactattccttccagctgcctgggggccctcacacagctcctgagctgggcagctggtcacttcctgagggcacatcctggccacttccggagggcagcctctgtcctccaattttcagctcagacccccatgctgtgggtgtcctcacagcactcaggctgatgctcgtcaagcaccacagatcctggactctctgggtctctgtttcctcatctataaaatgggcagaacgatacccacatcacggcatcactgggaggatgaagtgagttccctcaggttaagggttagattagaacatggcccacagtaagtgcctggtaaggccatctaccgacaggagcaaaggccaaaggagcaggaggaagttccacagccccacctctcacccaccggccccacctgcctctccaccttggggtctacctgccctttaccccagccctctcagccctctngca

SEQ ID NO: 7070 - protein, 54 aa, Homo sapiens [sequence omitted]

SEQ ID NO: 7071 - DNA, 387 bp, Homo sapiens
tacaatgaagataaatattcattggcaagaaccatccactccattatgaagaatgttgctcatctttgtaagcgtgaaaaatctcatgtttggggccccaatggctggaagaaagtctctgtaattctgattagtgacggtagagcaaaagtcaaccaagggtctctcgactatttagctgctttgggtgtttatcaagaagatatggccaaggcgtctgtgaatggtgatccggtaaaagcgcacatttttgaattgacaactcaggtctctatcaacgccgatctggattatgtttcaaaggacattgttcctgtgcaattggttttttgtctaaaagaagaaaataagaaaaagatcaattcccatcgttggctattcaacgcg

SEQ ID NO: 7072 - protein, 129 aa, Homo sapiens
YNEDKYSLARTIHSIMKNVAHLCKREKSHVWGPNGWKKVSVILISDGRAKVNQGSLDYLAALGVYQEDMAKASVNGDPVKAHIFELTTQVSINADLDYVSKDIVPVQLVFCLKEENKKKINSHRWLFNA

SEQ ID NO: 7073 - DNA, 226 bp, Homo sapiens
gaattcgcggcgtagatcgcgaatggagaactcagtcgtcgtactgctcgttagccagggactcgatctcatcgtcatcgatgtccgcgatcaggcgagtccgtccgacgtacatactcatgagcaatgcatcgaaagacccgatcacatttggcaggctggctggagtgatcactttctcgttaagcttcagcgaatacacttcaccttccttgttgaaggcgat

SEQ ID NO: 7074 - protein, 68 aa, Homo sapiens
MENSVVVLLVSQGLDLIVIDVRDQASPSDVHTHEQCIERPDHIWQAGWSDHFLVKLQRIHFTFLVEGD

SEQ ID NO: 7075 - DNA, 255 bp, Homo sapiens
  misc_feature (1)..(1): Wherein n may be a, c, g or t
ngctagctagacatggtaaaaagaaaaaccatttgctaacagtaacagcaaagcaagcacatagggggactgaagcaggaacctggtggtgggcatggcaggtacgggagcctgttccggacgcacatcctgggctgccccacggtggtgtgcatggagccggagctgaaccggcgggcgctggccagcgagggcgccggcttcgtcccgggctacccgcactccatgctcgacatcctggggcccaacaacatc

SEQ ID NO: 7076 - protein, 70 aa, Homo sapiens
QQSKHIGGLKQEPGGGHGRYGSLFRTHILGCPTVVCMEPELNRRALASEGAGFVPGYPHSMLDILGPNNI

SEQ ID NO: 7077 - DNA, 314 bp, Homo sapiens
  misc_feature (1)..(1): Wherein n may be a, c, g or t
  misc_feature (2)..(2): Wherein n may be a, c, g or t
nnccagacttttcttttttttttcccacagaactctttcataacgaatgatgagctcaagaaagtacatgactttgaagagcaatgcatagaagaatacttcagagaaaaggatgatcggttcaactcatctaatgatgagaggatacgggtgacttcagaaagttgtggactcttgggctgagaaaacccaattcttgaagcctgttctatcaaatgttgtgctcactatctttttatgagttcagttctgtttcaacatgtgaataccaggctttcaccattgccaggcagtaagccacgcactcaggatcc

SEQ ID NO: 7078 - protein, 60 aa, Homo sapiens
  misc_feature (1)..(1): Wherein Xaa may be any naturally occuring amino acid
XQTFLFFFPQNSFITNDELKKVHDFEEQCIEEYFREKDDRFNSSNDERIRVTSESCGLLG

SEQ ID NO: 7079 - DNA, 402 bp, Homo sapiens
  misc_feature (1)..(1): Wherein n may be a, c, g or t
  misc_feature (2)..(2): Wherein n may be a, c, g or t
nntgatcatgaagcaccaccctctttctgccccgtccctttttccgagtagtctaaattcatgtctcgaaaccgccaccgttcccaaccacgcggacctttacccgaagacgtccgtcaccgtcggaatgctctctattcccgactaggaactggtgaaaaagtcacactccgagattatgaccagctgcgtcgtcgtatccagcatgttcgttccatatcctcatgcgaagcaattgagcaggacttagaaacagcggaactaaaactacagctccgacaagagactctcccccacatctcatatcctcaagaattacccatcagtgcacgaataaacgatattcgtgacgcactcctccaccaccaagtagttattgtggcgggagaaaccggctccgga

SEQ ID NO: 7080 - protein, 114 aa, Homo sapiens
MSRNRHRSQPRGPLPEDVRHRRNALYSRLGTGEKVTLRDYDQLRRRIQHVRSISSCEAIEQDLETAELKLQLRQETLPHISYPQELPISARINDIRDALLHHQVVIVAGETGSG

SEQ ID NO: 7081 - DNA, 210 bp, Homo sapiens
aaattttctagctcttgagacatctcaaatcacaaaaacagaaaaatgtgtgtttctttttgttgttttgtttttagaaataatgacttgagtgtgagagaaatggaatttccaaggcaggatgggaacagtggggaaaatatcacttcgaaattctcattgaaaacaattgagaaggggggaagaatacttttcttcacaagcccattc

SEQ ID NO: 7082 - protein, 55 aa, Homo sapiens [sequence omitted]

SEQ ID NO: 7083 - DNA, 329 bp, Homo sapiens
  misc_feature (329)..(329): Wherein n may be a, c, g or t
actagtggggtaatccagggactctggttctaaaacttgtgctcctaagcattgtgttagaatggctccaagtattcaagaaaaacaaatataatttgtgaattgagcttatctcactaaaaaccttcatatttttaaacattaataaacttccttgagtaattttaaggattaagaagaaatttgttgctgggcttggtggcatgcacctgtagtctcaattacttgggagactgaaaatcacttgagctcaggagttccaggctgtatcatatgatgatcgctcctctgcatagctactgcactccagactgggcaatacagtgagn

SEQ ID NO: 7084 - protein, 67 aa, Homo sapiens
MPPSPATNFFLILKITQGSLLMFKNMKVFSEISSIHKLYLFFLNTWSHSNTMLRSTSFRTRVPGLPH

SEQ ID NO: 7085 - DNA, 198 bp, Homo sapiens
atggaactcgagaaggacggcaagccgcacggcaccggacgctacgagaaactcgaagccgacaccgtcatccttgccgtcggtcaggacgccgacaccagcttcctacacaagatgcccggtatgaggttccgcaacgacgtcgtcgacgtcaacccctcaaccctcatgaccgatgtccccggtatcttcgccggc

SEQ ID NO: 7086 - protein, 66 aa, Homo sapiens
MELEKDGKPHGTGRYEKLEADTVILAVGQDADTSFLHKMPGMRFRNDVVDVNPSTLMTDVPGIFAG

SEQ ID NO: 7087 - DNA, 354 bp, Homo sapiens
tgtacatcagggcaactgtaaaggtgtcataatctcttttctccatctttaaaggacaggaaggtcacagtacacccacatcaagcttagggtcaaccaaaagtcaagaggtgaatgagacatcacctcgcatcgagaaccagagtgatattcacaatctgcaaggcatgaattaagaaacaaaatgaagaaattatctgggagctcactcatgagactgagtcaacttcctcctgagttagaagcaaccaggaattacaggaagatgaagcaagtgatcttttcaaagggaagttatgaagtaaccctgcaaggttccccagcttccaagccccttttcaaagcagcagaatg

SEQ ID NO: 7088 - protein, 56 aa, Homo sapiens [sequence omitted]

SEQ ID NO: 7089 - DNA, 426 bp, Homo sapiens
cgatctgggttcaggactctgacctcctgggatgaggccatttggggtcactgcctcccatggattattaggagatcaagtggacttaacttcagctcctaaagtctccaaggcacagccatggaatgactgcagctatttaaggaaatggcgtagaagccattatccaaagagctggattccagtcctgactctgctgctgaccagcttcactggccttgagtagttgctttgcctacctatgcctcagactcaccctctataaaacaaaggtaacctctcaagtccctttagaccccccattgtattaaatataattctgtgactttggactccttctctggaaccccttgggtagccaatgaattatatgacagggaacatgggtatatatataacccattaggggactttaattgggagggt

SEQ ID NO: 7090 - protein, 64 aa, Homo sapiens [sequence omitted]

SEQ ID NO: 7091 - DNA, 210 bp, Homo sapiens
  misc_feature (1)..(1): Wherein n may be a, c, g or t
  misc_feature (2)..(2): Wherein n may be a, c, g or t
nntctgaggagagaagccacaagtcttcccgtccccttaacagtattgacatttcgcttaaattatttgttaagtgaactaaaaccaatgtcatatcatctcctgaatatgatttttcatgctgtggttagtgtgatatttctcaaagtatgcaaactttttctggacaacaagagtagtgtgattgcttctttactttttgcagtgcac

SEQ ID NO: 7092 - protein, 70 aa, Homo sapiens
  misc_feature (1)..(1): Wherein Xaa may be any naturally occuring amino acid
XLRREATSLPVPLTVLTFRLNYLLSELKPMSYHLLNMIFHAVVSVIFLKVCKLFLDNKSSVIASLLFAVH

SEQ ID NO: 7093 - DNA, 225 bp, Homo sapiens
gaattcagtaacgtgctgccattgaaaagggaaactaaagaacacgtggaggttgaaaactttgatttttctgcattttatttttttttctcatcaatactaataatgacagatggatacacacgtagtatatctttggtcaaagatgcggctttccgtaagcaaatcgtccttaaactacttgatgttgctcaaaccagggaatttgaatcactaaccaattct

SEQ ID NO: 7094 - protein, 75 aa, Homo sapiens
EFSNVLPLKRETKEHVEVENFDFSAFYFFFSSILIMTDGYTRSISLVKDAAFRKQIVLKLLDVAQTREFESLTNS

SEQ ID NO: 7095 - DNA, 359 bp, Homo sapiens
cctaggagtgaagaactgaagactgtagccaaaaacgatgctacccaacctgggtgcatcagcagctcctcctccacgtcctccctggaccacaagcagagccacccaaagaagctgagcacaagcagcagcagtggcaagaagaccttgagaaaaagcccctctctcccgtccagagccagtgctggtttgaaatcttcaacaacatctgcagcaaataacactcaccgtgaaggagcactccgccttggagaaagggtgctggtggtaggccagagagtggggaccattaagttctttgggacaacaaaatttgctccagggtattggtacggcatagagctggagaagccccatgg

SEQ ID NO: 7096 - protein, 119 aa, Homo sapiens
PRSEELKTVAKNDATQPGCISSSSSTSSLDHKQSHPKKLSTSSSSGKKTLRKSPSLPSRASAGLKSSTTSAANNTHREGALRLGERVLVVGQRVGTIKFFGTTKFAPGYWYGIELEKPH

SEQ ID NO: 7097 - DNA, 334 bp, Homo sapiens
atgcattttggcgggattaaggcgctaaacgatgtgaatctggacgtccagcgcggctcaataaccgctttaatcggcccgaatggtgccggaaaaaccacggtgtttaactgtctgaccggtttctataaagcctccggcggcacgattttgttcaatacgctcagcaaaaccaccaacgtgattcaggttcttgggcaaaaatttcagcccggagactggatcaatccggctcagcttgggggacgtattttctacaaaatgtttggcgggacgcatctggtcaaccgcgcaggactggctcgcacattccagaatatcccgcctttttcgg

SEQ ID NO: 7098 - protein, 111 aa, Homo sapiens
MHFGGIKALNDVNLDVQRGSITALIGPNGAGKTTVFNCLTGFYKASGGTILFNTLSKTTNVIQVLGQKFQPGDWINPAQLGGRIFYKMFGGTHLVNRAGLARTFQNIPPFS

SEQ ID NO: 7099 - DNA, 165 bp, Homo sapiens
tccggaaaatatacaccaaggaataatttcaactggtggaaagacatcaaaatgttggatttcttagctgattttggtaggcacattcgggtacaatctatgttggcgagggattcaatttcttcgaggcatcaaaccaaaaatggtctgggatttaacgaattc

SEQ ID NO: 7100 - protein, 55 aa, Homo sapiens
SGKYTPRNNFNWWKDIKMLDFLADFGRHIRVQSMLARDSISSRHQTKNGLGFNEF

SEQ ID NO: 7101 - DNA, 342 bp, Homo sapiens
gtcgacaaacgacttcgtcagaaatcagtttcggttggtcttatttgtgcggtatgcttcctagacgtagtcgtgattttcatatggcttcaaatagttatcttggtcggtccaggtacccaaccgcacgtagcaccttttttgatccttcctatagcctctgaagagaagactagcaacacttctcaaaacacttcagtggaatacgatgctgtggttccgcctaagtgttatcagtctgatcctcacggatacccaatatggtgcagtgaatgtcaaagtctgaaaatggaacgaacgcatcattcttcagaactaggccactgcattcctcgctttgat

SEQ ID NO: 7102 - protein, 114 aa, Homo sapiens
VDKRLRQKSVSVGLICAVCFLDVVVIFIWLQIVILVGPGTQPHVAPFLILPIASEEKTSNTSQNTSVEYDAVVPPKCYQSDPHGYPIWCSECQSLKMERTHHSSELGHCIPRFD

SEQ ID NO: 7103 - DNA, 360 bp, Homo sapiens
ttaattaatgcaagaacagaaaaccaaatactgcatgttctctgggagctagacattgaatacacatagacataaaaataggagtaatggacactggggaccactcgactgggaaggaagggtgggagtcatgggctgaaaattccacctattgggtactgggctcactacctggggatggggtcatttgtacccccaaacttcagcatcatgcaatatatctgtgtaacaaacctgcagtggaccccttaatctataataaaagttgatttttttttttttttttggggatggattttccctttttccccccgggttgatttcagtgtttttatcccggttcacttttaaccccggccc

SEQ ID NO: 7104 - protein, 60 aa, Homo sapiens [sequence omitted]

SEQ ID NO: 7105 - DNA, 597 bp, Homo sapiens
tcatgaagagtccccgaaaacaattataagctctttcataaaccagtgatcaccttgttcaactacactgccacgttcagcaggcattcccacttgccactaactacccaatacttggagagcattgaagtcctgaagtcactccgatacctagttcctttgcagtccaaaaacaagcttagaaaaagacttgctccgctggtgtatgtacagtcagactgtgacccaccatcagacagggacagctatgttcgcgagctgatgacttacatcgaggtcgattcctatggtgaatgtttacgaaacaaagacctccctcagcagctgaaaaatccagcctctatggatgccgatggcttttataggatcattgcacagtataagtttatcctagcttttgagaatgcagtttgtgatgactgcatcactgagaagttctggaggccactgaaactgggggtagtccctgtatattacggatcccccagcatcacagactggcttccaagtaacaaaagtgctattcttgtatcagaattttctcaccccagggaactggcaagttatatcagacgactggattctgatgacagattg

SEQ ID NO: 7106 - protein, 197 aa, Homo sapiens
RVPENNYKLFHKPVITLFNYTATFSRHSHLPLTTQYLESIEVLKSLRYLVPLQSKNKLRKRLAPLVYVQSDCDPPSDRDSYVRELMTYIEVDSYGECLRNKDLPQQLKNPASMDADGFYRIIAQYKFILAFENAVCDDCITEKFWRPLKLGVVPVYYGSPSITDWLPSNKSAILVSEFSHPRELASYIRRLDSDDRL

SEQ ID NO: 7107 - DNA, 257 bp, Homo sapiens
  misc_feature (1)..(1): Wherein n may be a, c, g or t
ngcatgccgccatcccctccaccggcatcgacgcgctgcagggcgcggggaagatcctcgaggcgctctacgcgcagaacacgctctaccagcaggtcagttcgcaggtcgagggcatcacgcacccctacctcaacgtcggccgcatcgagggcggcaccaacaccaacgtcgtgcccggcaaggtcgtgttcaagctcgaccgccgcatgatccccgaggagaacccggtcgaggtcgaggcctcgatccgccag

SEQ ID NO: 7108 - protein, 70 aa, Homo sapiens
  misc_feature (1)..(1): Wherein Xaa may be any naturally occuring amino acid
XMPPSPPPASTRCRARGRSSRRSTRRTRSTSRSVRRSRASRTPTSTSAASRAAPTPTSCPARSCSSSTAA

SEQ ID NO: 7109 - DNA, 415 bp, Homo sapiens
  misc_feature (415)..(415): Wherein n may be a, c, g or t
tcatgattaaaagtctcacttctggggtccaggacaacttcctaaattcatcaccgggaactgcattgcaacattgctgattctggccctatgattaattctacagcttttgaagaaacccaaactggacagacagttactgaatttttgtaatgtccgaggcttccaggaggagtgacacatatctctgctggatgagctcacagttccaatgagaagatacaagctgaaagattgcagcagaactgggaagtgaaagcacggagaggctgtgggacatggaggaggggcggttagattgagaaagaggtaacagttggggtgactttggacctgagacctgggcaggcataagaagtctcactctctattccattcttggcaggggatgtttctttgtacccagtagctttgn

SEQ ID NO: 7110 - protein, 71 aa, Homo sapiens [sequence omitted]

SEQ ID NO: 7111 - DNA, 260 bp, Homo sapiens
  misc_feature (1)..(1): Wherein n may be a, c, g or t
  misc_feature (260)..(260): Wherein n may be a, c, g or t
ntcgacaatcacgtcgccttcgtgccgggcgcgccgttcttcgcggacaacgcgcagcagaacacgctgcgcctgtcgttcgtgacggtgccgcccgagaagatcgaggaagggcgtcgctcgccttgggaaggctgctgggcgagcgcctctgattcccctttttcctgtcacgactctctacgaggaatcgaatccatggctaacgtctacgacaagctgaagtcgctcggcatcgagctcccgaccgccggcgcacn

SEQ ID NO: 7112 - protein, 86 aa, Homo sapiens
  misc_feature (1)..(1): Wherein Xaa may be any naturally occuring amino acid
XDNHVAFVPGAPFFADNAQQNTLRLSFVTVPPEKIEEGRRSPWEGCWASASDSPFSCHDSLRGIESMANVYDKLKSLGIELPTAGA

SEQ ID NO: 7113 - DNA, 374 bp, Homo sapiens
cctaggcctttaatcccgctgggtcctggcagaagtgaaatgctcttttcactatgtggctattacaactgtgctgtcctgaacatttttgtatgtctttgtgcatatgttagagtttttttggagtatatactaggagaagaattggtgggttgtagggatgttgtccttcaaatatttctgcctgtggtatatgtgagttccagctgttccatatccttgttttattttgacagaatttaatttttttagcccatctgataagtatgaagtggtatcctgttgtttaatttgcatctccctgatttgtgatgagattgagaatattttcatatgctcttctacaaattacttgttaatgtcttttgccaggt

SEQ ID NO: 7114 - protein, 67 aa, Homo sapiens
MLFSLCGYYNCAVLNIFVCLCAYVRVFLEYILGEELVGCRDVVLQIFLPVVYVSSSCSISLFYFDRI

SEQ ID NO: 7115 - DNA, 204 bp, Homo sapiens
atccctctgtctaacaaccaagtcatcgaggagggcttgggcaagcacaacatcatttgcattgaggatcttgttcatgagatcatgactgtcggcccacacttcaaggaggcgaacaacttcctttggccatttaagctgaaggcaccgctgggaggtctgaagaagaagaggaaccactatgtggagggtggtgatgccggc

SEQ ID NO: 7116 - protein, 68 aa, Homo sapiens
IPLSNNQVIEEGLGKHNIICIEDLVHEIMTVGPHFKEANNFLWPFKLKAPLGGLKKKRNHYVEGGDAG

SEQ ID NO: 7117 - DNA, 411 bp, Homo sapiens
gtgcactgcccttgatcagccttcaaaatccagggtccttggggtcaccgggctctggaagggagcccacaggttgatctttccagttccacttacctctccccctcgtatcgtagtatttgctgcctctccctttcccacaaaacctgcaagtttcttaagactgggggtgggctttttttcatcattgtatcccattccccctgcatgggcattccccggtatggtgtccccattaatctcaaatgaaaagcattcttcttctttccccacagaggccagtttaggaaacaggagcactggcattgtcatgcccttgggggaattgtggataaggactgggttaaggatgaaatgacttttttcacttttgtgatctctgtaggcttcccaggggtgctgagcactagt

SEQ ID NO: 7118 - protein, 98 aa, Homo sapiens [sequence omitted]

SEQ ID NO: 7119 - DNA, 267 bp, Homo sapiens
agatcttgtcatacccttggaaaagaaggctcgtggcgcctcagatgtgttgagtaccgcacgtcttcttttgacgtcggtgttgatgatccgtacgacaccagacgtggcgcatacagacattgaaaagctatgcgagacaattcactcgttttcgaagaagcacgggcaatctaagttcgccatcgttcgcatgatccagcttactatgctcttcctgcaggcatcagacacgtcggatatgcgtgcgcctacgtcgttgtacgg

SEQ ID NO: 7120 - protein, 60 aa, Homo sapiens
MIRTTPDVAHTDIEKLCETIHSFSKKHGQSKFAIVRMIQLTMLFLQASDTSDMRAPTSLY

SEQ ID NO: 7121 - DNA, 457 bp, Homo sapiens
  misc_feature (444)..(444): Wherein n may be a, c, g or t
  misc_feature (454)..(454): Wherein n may be a, c, g or t
ctagacaacacagtttatttctttatcgctggtagatatgaatacaaaaacaaaggtgctgacatgttcattgaatcattggctcgtctcaattacagattgaaggtttctggatccaagaagacggtggtagcgtttttgatcatgcctgccaaaaccaattccttcactgtggaggcactgaaaagccaagccattgtaaaatctttggaaaatactgttaatgaggtcaccgcatccattgggaagagaattttcgagcatacgatgagataccctcataatggcctagaatcagagttgcccactaatttagatgagctgttgaagagttctgaaaaggttttgctgaagaaaagggtattggcgctgagaagaccttacggggaattgcctccggtagtcacacataacatgtgcgatgatgctaacgatccaattttnaaccaaattnaca

SEQ ID NO: 7122 - protein, 152 aa, Homo sapiens
  misc_feature (148)..(148): Wherein Xaa may be any naturally occuring amino acid
  misc_feature (152)..(152): Wherein Xaa may be any naturally occuring amino acid
LDNTVYFFIAGRYEYKNKGADMFIESLARLNYRLKVSGSKKTVVAFLIMPAKTNSFTVEALKSQAIVKSLENTVNEVTASIGKRIFEHTMRYPHNGLESELPTNLDELLKSSEKVLLKKRVLALRRPYGELPPVVTHNMCDDANDPIXNQIX

SEQ ID NO: 7123 - DNA, 340 bp, Homo sapiens
cgatctttgtatgttatgctatgttaattaaaatatgtatatttttacggaagtcttgtcatgtgacgcctccacttaaaaccctttaaatgattatttgtcaccctaaaataaagtccaaattccttagcatcactcaaaagtctgttacaatcttatcattctctctccctaaaccactctcctccttaaagtgccagcctagcagttctaaaggtacggttcaggaactccccagggtccccaagacctttcagggggtctaggaagtcaaaattatttttaaaatactactaagatactgtttacctttttgctctttttctctcacaattgtact

SEQ ID NO: 7124 - protein, 58 aa, Homo sapiens
MIICHPKIKSKFLSITQKSVTILSFSLPKPLSSLKCQPSSSKGTVQELPRVPKTFQGV

SEQ ID NO: 7125 - DNA, 303 bp, Homo sapiens
atggttcagaaaggtacagtgtttggatccgacactagcatggtgctagagacacagaccgtcggagcagggagcgtggcatccaatctagcacaatgtggcacttgcagcgccgtgttcggtggtgatgataaagaaatggcaaactgcaaggttgagcatgcgagctctggcgcttctcgcacagtcgttgcaagtggtgagaatgggcacactgagactgctggctgtggaggcggctgtggtagcaattgtggacccatgatggctgaagaccccaaggccggcaatgccaagtccgga

SEQ ID NO: 7126 - protein, 101 aa, Homo sapiens
MVQKGTVFGSDTSMVLETQTVGAGSVASNLAQCGTCSAVFGGDDKEMANCKVEHASSGASRTVVASGENGHTETAGCGGGCGSNCGPMMAEDPKAGNAKSG

SEQ ID NO: 7127 - DNA, 501 bp, Homo sapiens
cggactgcgtcagctcctaattcagggaaccctcctaaagtttcattggtttctggaggtggcagtggtcatgagccaacgcatgccggttttgttggtgaaggtgccttagatgcgattgcagcaggtgccatttttgcttctccttcaactaaacagatctattctgctattaaagctgttgaatctcctaagggtaccttgatcattgtaaaaaattacaccggtgatattatacattttggtctcgctgctgaaagagctaaagctgctggaatgaaagtcgaactggttgctgtaggagatgatgtctctgtcggtaagaagaaaggttctttagtcgggcgtcgaggtctcggagccaccgtattggtgcataaaattgctggggcagccgcttctcatggactggagttggcagaagttgccgaagttgctcagtcagtagttgacaatagtgtcacaattgcggcatctcttgatcactgcacggttcctggc

SEQ ID NO: 7128 - protein, 167 aa, Homo sapiens
RTASAPNSGNPPKVSLVSGGGSGHEPTHAGFVGEGALDAIAAGAIFASPSTKQIYSAIKAVESPKGTLIIVKNYTGDIIHFGLAAERAKAAGMKVELVAVGDDVSVGKKKGSLVGRRGLGATVLVHKIAGAAASHGLELAEVAEVAQSVVDNSVTIAASLDHCTVPG

SEQ ID NO: 7129 - DNA, 336 bp, Homo sapiens
accggtggttataacccgccgattgtggtgattcacggtaatcaggtgaaagacctgcctgattcctacaagcgctacttgatgaactacttccgcaaatcgctggacgtaatgggatcgccgattcgtattcagttcaaaaaaggggaaaacccgtatgcgaataagcgtaacaccctgacgccaacccagatgcgtaaacgtaagcgtctgatgaagcacatcaagaaaaataaataattatccgtaagtattttatctgccattccctctatgaatgtagagggaatggctaccggaggaattcatatggaactgcattgtccacaatgtcag

SEQ ID NO: 7130 - protein, 79 aa, Homo sapiens
TGGYNPPIVVIHGNQVKDLPDSYKRYLMNYFRKSLDVMGSPIRIQFKKGENPYANKRNTLTPTQMRKRKRLMKHIKKNK

SEQ ID NO: 7131 - DNA, 327 bp, Homo sapiens
ccatgggagaagccccagctgtgtttgcagttgtgtatcggagggaacaaagactccttctccaaaactctttatgatcacaaggcgcctgcttattggggtggaagtgcaaactttctctactgcacccagcactgtaattgtgtttctgctgaaagaaacttcccatcactggaaaaatctgagacttatgatttgccattcagatttttttgtcccacaggatgtccctttgatatagtgtcctcctccttcccttaggaatagaacttcctgaaagctagactgcagtgattgttatggctcttctgggtctagccaccccag

SEQ ID NO: 7132 - protein, 67 aa, Homo sapiens [sequence omitted]

SEQ ID NO: 7133 - DNA, 351 bp, Homo sapiens
ccatgcagcccaaccgttggcgataaagtccgtttaggcgataccaatttatgggcaaccattgaacaagatttattaaccaaaggtgatgagtgtaaatttggtggcggtaaaagtgtgcgtgatggtatggcgcaaagcggcaccgcaactcgcgacaatccaaatgtattggattttgtgattaccaatgtgatgatcattgatgccaaattaggcattatcaaagccgatattggtattcgcgatggtcgtattgtcggtatcggacaagcaggtaaccctgacaccatggatgacgtcacgccaaacatgattatcggtgctagcacagaagtacataacggtgca

SEQ ID NO: 7134 - protein, 117 aa, Homo sapiens
PCSPTVGDKVRLGDTNLWATIEQDLLTKGDECKFGGGKSVRDGMAQSGTATRDNPNVLDFVITNVMIIDAKLGIIKADIGIRDGRIVGIGQAGNPDTMDDVTPNMIIGASTEVHNGA

SEQ ID NO: 7135 - DNA, 279 bp, Homo sapiens
gcgtttatatgtcctttatgccaaacattttcgaattgtactttacctctttgtcaaacctcaaaggcaaatactggtttgtcgctagatatgtttttggaatcagaactttctttggatacattgtcaaggctcttcaaaccttttactgaggaaaattatcgtacaataaactctatattttcgttgatgatatctcagtgtcaaggttttgataaagcggtaagaaagcgggccaacttttcgcataaggacgtttctttaatattaagtgtgcac

SEQ ID NO: 7136 - protein, 93 aa, Homo sapiens
AFICPLCQTFSNCTLPLCQTSKANTGLSLDMFLESELSLDTLSRLFKPFTEENYRTINSIFSLMISQCQGFDKAVRKRANFSHKDVSLILSVH

SEQ ID NO: 7137 - DNA, 593 bp, Homo sapiens
cgccgcttgttgatacggatcgagcgtcgaccgatgctattgagttagcatggatcgatgcttccttaagcaagcattatcgatctgatcgatgtgttcagtagtcttaactacatcaattgtcgcttgtttctagcaatcgtagctcaatagaatctattttggtgcaaaacctaccgctgtagttggccacatcctaatatcaagattctagttagccactctagaacaaaagcagtaaaatcagttctaatgaatgatatttaattagtaccttagcaattttatagttatgggtaatccttcaaaactctaattaatccctaaacctagcaggttgatctactcaaacatgttagttgtcacaaaaataatagaaaggatagatgaaatagaaataaatataaaaccaatggagttataagaagactctaaaggagttcctctcttctctactaacctaagagaaaacctaagcaatagaatagaaagtgtagcagtcaacaatggcttagaaaacatataaataggatttaagttgtgcacgggcattctagtaaaattggtgatttctattcttaagtgggtcatga

SEQ ID NO: 7138 - protein, 82 aa, Homo sapiens
MTHLRIEITNFTRMPVHNLNPIYMFSKPLLTATLSILLLRFSLRLVEKRGTPLESSYNSIGFIFISISSILSIIFVTTNMFE

SEQ ID NO: 7139 - DNA, 567 bp, Homo sapiens
accggtgcgcttttccaaagacctcctttaatctctgctgttaagagacaattacgtgttcgtactatctatgagtcaaacttgattgagttcgataacaagagaaacttaggtgttttctgggcttcctgtgaagctggtacttatatgcgtactttgtgtgttcatttaggtatgctattaggtgttggtggtcacatgcaagaattgcgtcgtgttagatccggtgctctgtctgaaaatgacaacatggtcactttacatgatgttatggatgcccaatgggtttacgacaatacaagagatgaatcttacttgagatccattattcaacctttagaaactctattggttggttacaagagaattgtagtgaaggattctgctgtcaatgcagtatgttatggtgcaaagttgatgatccctggtttattgcgttacgaagaaggtattgagttatatgacgaaattgtcttgataactaccaagggtgaagccattgccgttgccatcgcacaaatgtcaaccgttgacttagcttcctgtgatcatggtgttgttgctagt

SEQ ID NO: 7140 - protein, 189 aa, Homo sapiens
TGALFQRPPLISAVKRQLRVRTIYESNLIEFDNKRNLGVFWASCEAGTYMRTLCVHLGMLLGVGGHMQELRRVRSGALSENDNMVTLHDVMDAQWVYDNTRDESYLRSIIQPLETLLVGYKRIVVKDSAVNAVCYGAKLMIPGLLRYEEGIELYDEIVLITTKGEAIAVAIAQMSTVDLASCDHGVVAS

SEQ ID NO: 7141 - DNA, 333 bp, Homo sapiens
  misc_feature (1)..(1): Wherein n may be a, c, g or t
nctatctttaacattttaacagtaatattgggctgtactcagttctcagggtaatgctgctgtgagtggaaatggattgcaggaatttggtcagtagtgaaagtattggcctggaaattggggaatctgaactcctgccttggcttcttgctaggcaagttattagcatctctgatcctcatctgtgatgaaataagaggtccttcttagctacagtttttttatttgcctcttattacaaaatattacctttaaaacttagttttcatcactctatacttttttaggaactgttgattgacattttctttttgacggactttatacttgtgt

SEQ ID NO: 7142 - protein, 53 aa, Homo sapiens [sequence omitted]

SEQ ID NO: 7143 - DNA, 352 bp, Homo sapiens
gctagctgacattgatgcggcgatttccacggcctcaggtggtcacattcgggtggaacaggatggtgccggcatcgccgactaatgtgcgctgcgcagcacctataagcgtgccgggtgtcggaactgacatcgggagggtgcctgcggaagaatagctcttgtcaacgcgagttcatataggaaaggcctaacatgcccatcgcaacacctgaggtctacggcgagatgattgaccgcgcgaaggaacagggcttcgcgtacccggccatcaacgtgacctcctcccagaccctcaacgctgctctgcaggggttcactgaggccggttccgacggcatcgtccagatct

SEQ ID NO: 7144 - protein, 52 aa, Homo sapiens
MPIATPEVYGEMIDRAKEQGFAYPAINVTSSQTLNAALQGFTEAGSDGIVQI

SEQ ID NO: 7145 - DNA, 297 bp, Homo sapiens
  misc_feature (1)..(1): Wherein n may be a, c, g or t
  misc_feature (2)..(2): Wherein n may be a, c, g or t
  misc_feature (229)..(229): Wherein n may be a, c, g or t
nnggatccgctcggttcgtacgccgccgataaggctcggatctaccaccaggtgaccaactcctgcgtctacaacgttgccgatcccgccaccgaacacatggtggaggatgccgacgtcgttgagggggctcgcgctatcgggttcacgaccgggaccccggggccgtccatgatcggaattgtggacgacttcatcgtcgatcgcgccttcgttgagcagccgcgancctcggcgatggagctggctcgccttgaggacgtgcaccctttcgctccgcacaatgtcgaaaacgcg

SEQ ID NO: 7146 - protein, 99 aa, Homo sapiens
  misc_feature (1)..(1): Wherein Xaa may be any naturally occuring amino acid
  misc_feature (77)..(77): Wherein Xaa may be any naturally occuring amino acid
XDPLGSYAADKARIYHQVTNSCVYNVADPATEHMVEDADVVEGARAIGFTTGTPGPSMIGIVDDFIVDRAFVEQPRXSAMELARLEDVHPFAPHNVENA

SEQ ID NO: 7147 - DNA, 659 bp, Homo sapiens
ctagaaacgtctgcgaaacaagccatcaacgtagacgaggccttttatagccttattcgtttggtaggggacgacggtgggaaatacaatagcatgaatcgtcaactggataatacgaatgaaataagagattcggagctaacctcatctgcaacagcggatagagaaaaaaagaacaacgggtcttatgtactcgataattctttgaccaatgctggcactggctccagttcaaagtcagccgttaaccataacggtgaaactactaaacgaactgatgaaaagaattacgttaatcaaaacaataacaatgaaggaaataccaagtactccagtaacggcaacggaaatcgaagtgatattagtcgtggtaatcaaaataatgccttaaattcgagaagtaaacagtctgctgagccacaaaaaaattcaagcgccaacgctagaaaagaatttagtggtggttgttgtataatttgttgaaaatgatcctgctctcttgatatgacatggttttgattgcaagtctattcttacttgttcaattggtttcaccagcatctttttgtatccattttcctatgctgtgtatccagtaaaagagttgcttgccaccaaacattaatactaatggttaatctgccaccttttgtaagctt

SEQ ID NO: 7148 - protein, 160 aa, Homo sapiens
LETSAKQAINVDEAFYSLIRLVGDDGGKYNSMNRQLDNTNEIRDSELTSSATADREKKNNGSYVLDNSLTNAGTGSSSKSAVNHNGETTKRTDEKNYVNQNNNNEGNTKYSSNGNGNRSDISRGNQNNALNSRSKQSAEPQKNSSANARKEFSGGCCIIC

SEQ ID NO: 7149 - DNA, 283 bp, Homo sapiens
  misc_feature (281)..(281): Wherein n may be a, c, g or t
ctagaaagagtgaggacggcaaacgctttgacgtcagcggacttccaggagaagccagtcatcattgccagctgccttcgtaaagagtacaagggaaagaagaaatgcttcgttcttaagggcaagaagaagatagccacaaggaacatctctctttgcgttcgcaaaggcgaggtggtcggattactgggacacaatggagctgggaaaagtacatccattaagatgataactggggaaatcaagccaagtgctggacaggtgcagctgaaaggcccccncc

SEQ ID NO: 7150 - protein, 94 aa, Homo sapiens
  misc_feature (94)..(94): Wherein Xaa may be any naturally occuring amino acid
LERVRTANALTSADFQEKPVIIASCLRKEYKGKKKCFVLKGKKKIATRNISLCVRKGEVVGLLGHNGAGKSTSIKMITGEIKPSAGQVQLKGPX

SEQ ID NO: 7151 - DNA, 302 bp, Homo sapiens
  misc_feature (302)..(302): Wherein n may be a, c, g or t
gtcaacgaaggcgaccagatcgtcgtcatggaggccatgaagatggaacagcctatcgctgcccatcgcagcggcattgttcgcaacctcaacgccatggtcggctcaacggtctcctcaggtgaggtcgtgtgtgaaattgttgatgagtgagggtcagaacatggtttcgcttgtgagtgtcgcttcgaggcggcattctggtcatcatgtccggtaacctcctgctgttcctcctcttctttgtggggctcgtggcgacgacaacatcacttatgcgtgcccagcgtcagtcccgcgan

SEQ ID NO: 7152 - protein, 50 aa, Homo sapiens
VNEGDQIVVMEAMKMEQPIAAHRSGIVRNLNAMVGSTVSSGEVVCEIVDE

SEQ ID NO: 7153 - DNA, 327 bp, Homo sapiens
tgtacacccgccgacctgccggccctggccgcagcgatcagcgccctgccgcgcctgaagctgcgtggcttgatggcgatccccgaaccgactgaagaccgcgccgagcaggatgcagccttcgcgacagtacgcgacctgcaggcgagcctgaacctgggcctggacacactttccatgggcatgagccacgaccttgagtcggccatcgcccaaggcgccacctgggtgcggatcggtaccgctctgtttggcgcccgcgactacggccagccatcaaatggctgactttcctttgaataaggatctgtcatgagcaacacgcgt

SEQ ID NO: 7154 - protein, 95 aa, Homo sapiens
CTPADLPALAAAISALPRLKLRGLMAIPEPTEDRAEQDAAFATVRDLQASLNLGLDTLSMGMSHDLESAIAQGATWVRIGTALFGARDYGQPSNG

SEQ ID NO: 7155 - DNA, 367 bp, Homo sapiens
tcatgaactgatggggaaggctaagggagaagtaggtctggtgggggatgatagagaactcagtttggaacatgctaattatgagatatgtattaaatatccaagcgaaggtactcatcaggaggtggatatacgaggtaagggctcagggaaaagctgtggccagaaaaatacatttagaagtcaccaatattatcagtgttataaaaagtatgagtctggctacagctgcctactaccagtgagtgaagacagaaaagagaagtggtccctgtcacacactaccattcggatttcaaaggagtgtggaaaaacttgcaaaggaggccaagaagaaatgagaaaaactaggagagcgtgatatccg

SEQ ID NO: 7156 - protein, 116 aa, Homo sapiens [sequence omitted]

SEQ ID NO: 7157 - DNA, 390 bp, Homo sapiens
tgatcacctggcgccagttacgcccacggccgttcgacgaggtgcaaggtatcgaactgggcgcgctgattctgctggccagcgaagacggtcatgagcagtggctgtttctcggtccgcaaggcgccagcatgaagctgcaacatggccgggcagaacattcaggtattgagcaatgctgcaccgctgggacgcctgctactcggcaagcaccccggcgacgaaattaccctgccgatgggccagcggctgcaggcctttcaggtattgacggtcgattgagcggaactatctgcgcctgggtgggtaattaacgatgaacctcacgtttggagagcccatcatggaaaagcccatccacagcctgccagccctgttcaaacactcggc

SEQ ID NO: 7158 - protein, 60 aa, Homo sapiens
MKLQHGRAEHSGIEQCCTAGTPATRQAPRRRNYPADGPAAAGLSGIDGRLSGTICAWVGN

SEQ ID NO: 7159 - DNA, 294 bp, Homo sapiens
  misc_feature (1)..(1): Wherein n may be a, c, g or t
  misc_feature (199)..(199): Wherein n may be a, c, g or t
naccggttcaccggggaggccttcgatgggggcaaggtcagcatggttggcccgattcccatgtacctgtatggcaccttcgtcgttccggacttcgacgcattcatctccggcaagcagactccctaccgggagacggtctccaagcggaccactacttggttctttcgagccggctcagaggtttatgagctggccntcccccgaggagtcgtgttcgccatgcaaagcgcctcgttgagggtggaccccgacaacaccgtcgacaagctgccaacactcggcgagcgcctg

SEQ ID NO: 7160 - protein, 98 aa, Homo sapiens
  misc_feature (1)..(1): Wherein Xaa may be any naturally occuring amino acid
  misc_feature (67)..(67): Wherein Xaa may be any naturally occuring amino acid
XRFTGEAFDGGKVSMVGPIPMYLYGTFVVPDFDAFISGKQTPYRETVSKRTTTWFFRAGSEVYELAXPRGVVFAMQSASLRVDPDNTVDKLPTLGERL

SEQ ID NO: 7161 - DNA, 351 bp, Homo sapiens
  misc_feature (1)..(1): Wherein n may be a, c, g or t
  misc_feature (2)..(2): Wherein n may be a, c, g or t
  misc_feature (3)..(3): Wherein n may be a, c, g or t
nnncgagcataaagtaacaggtgtagcgaaacattacgccaagagaaacagggtttcctagacaaagctcttcagagggtgaagggcatagcactgcgacgaaacaatagtaacaaagatcatacaacagatgatatgacaggtagcatacgaacccctacgagcttgcagcggcaaaattctgacaggcaatctaatatgacatccgtgtttacggatgacatttctaccatagacgacaactcaattttattttcagagcctcctcagaaacaatctatgatgatgtctatatgcgtaggtgtttttgttgcagttggcggattttaatttggttatgatacaggtctg

SEQ ID NO: 7162 - protein, 105 aa, Homo sapiens
SNRCSETLRQEKQGFLDKALQRVKGIALRRNNSNKDHTTDDMTGSIRTPTSLQRQNSDRQSNMTSVFTDDISTIDDNSILFSEPPQKQSMMMSICVGVFVAVGGF

SEQ ID NO: 7163 - DNA, 354 bp, Homo sapiens
  misc_feature (24)..(24): Wherein n may be a, c, g or t
cccactccgtcaaagttccattanatcttcaaccttcgagatctctcacgggtttttaatggtcttgtcctcactaacccggagcgattccagacggtggcccagatggtgagagtctggaggaatgagtgtctgagagtcttccacgaccggctgatcagtgaaacagacaagcagctggtacaacagcacataggcagcttggttgtggaacattttaaagatgacgtggaggtggtgatgagggatcccatattgtttggagacttccagatggctctgcacgaaggagaaccacgcatttatgaagacatccaggactacgaggcggccaaggctctgttccaggaaatt

SEQ ID NO: 7164 - protein, 118 aa, Homo sapiens
  misc_feature (8)..(8): Wherein Xaa may be any naturally occuring amino acid
PTPSKFHXIFNLRDLSRVFNGLVLTNPERFQTVAQMVRVWRNECLRVFHDRLISETDKQLVQQHIGSLVVEHFKDDVEVVMRDPILFGDFQMALHEGEPRIYEDIQDYEAAKALFQEI

SEQ ID NO: 7165 - DNA, 311 bp, Homo sapiens
  misc_feature (302)..(302): Wherein n may be a, c, g or t
  misc_feature (305)..(305): Wherein n may be a, c, g or t
  misc_feature (309)..(309): Wherein n may be a, c, g or t
gctagcgatgctactttaaggtatgcgaagttggatgctgacgttgcctcctatcggttggagtcaaacggacgaacaagcgttcgaggtagctttaaatgcgggcgacgccagaaagttaccaaagtcggtgccgcgccttatgtttctcgaatggctcacgcgccgaggctacttgctccacggctcgagccgagccgacctcgtttgttttgaacctcgagcacccaaagacttcagccctgacgagttcagcaaacgcaccgccgttttcgcctcttcagatggggtgtggccccccnccncccncc

SEQ ID NO: 7166 - protein, 96 aa, Homo sapiens
  misc_feature (94)..(94): Wherein Xaa may be any naturally occuring amino acid
  misc_feature (95)..(95): Wherein Xaa may be any naturally occuring amino acid
  misc_feature (96)..(96): Wherein Xaa may be any naturally occuring amino acid
MRSWMLTLPPIGWSQTDEQAFEVALNAGDARKLPKSVPRLMFLEWLTRRGYLLHGSSRADLVCFEPRAPKDFSPDEFSKRTAVFASSDGVWPPXXX

SEQ ID NO: 7167 - DNA, 284 bp, Homo sapiens
  misc_feature (1)..(1): Wherein n may be a, c, g or t
  misc_feature (2)..(2): Wherein n may be a, c, g or t
nnttgtatgggttccccccggtggccccggcccccccccccccctttttccccccgggtggggaaaaaaaaaagggtaccacggggccccccacccccccaaagggcgggtccccaaaaaaccggcccacccccccccccccttccggggaaggggggttgggggcctttccttgggggggggggaaagttgggacgtcatgcccccaggggggcccccccccccggcccccccccctttttttttttttttaggtcccgggcgttgagctctactcagtgcac

SEQ ID NO: 7168 - protein, 94 aa, Homo sapiens
  misc_feature (1)..(1): Wherein Xaa may be any naturally occuring amino acid
XCMGSPRWPRPPPPPFSPRVGKKKRVPRGPPPPQRAGPQKTGPPPPPLPGKGGWGPFLGGGGKLGRHAPRGAPPPGPPPFFFFFRSRALSSTQC

SEQ ID NO: 7169 - DNA, 232 bp, Homo sapiens
acgcgtgaaggggaaatgaaggttgaaacttctgtgtgagaagtgaaggaggagaaataggagtgaccactatgggcaggaaaggagtgggggtagctcctgggcagggcagagctggattgttttgcagtggcctttcatgccctaaatctcctcccttacaactcctggtagatttcatttctcttggttgtgctgcctgaaatctcataccactttagaaggggggttt

SEQ ID NO: 7170 - protein, 70 aa, Homo sapiens [sequence omitted]

SEQ ID NO: 7171 - DNA, 295 bp, Homo sapiens
  misc_feature (1)..(1): Wherein n may be a, c, g or t
  misc_feature (19)..(19): Wherein n may be a, c, g or t
  misc_feature (98)..(98): Wherein n may be a, c, g or t
  misc_feature (132)..(132): Wherein n may be a, c, g or t
ngttgaggtaccagcattntctctttgtgaaacctgttctggcagagcccttctgcatgccactgagagctgcaacaagtcaacctgtaaagtgctgnaagcccacacccagaaaatgcatggataatgtcntcaaattgtagcttgagatgttgtgagcacatgattctgatataattagttctccaccccacgcacattctctccaatactggcaaagggtggcaaagaatagtcgcatagtttttggttggttgttttgcagactgattccatctacatttgatgaaggcca

SEQ ID NO: 7172 - protein, 66 aa, Homo sapiens
  misc_feature (23)..(23): Wherein Xaa may be any naturally occuring amino acid
  misc_feature (35)..(35): Wherein Xaa may be any naturally occuring amino acid
  misc_feature (61)..(61): Wherein Xaa may be any naturally occuring amino acid
MCVGWRTNYIRIMCSQHLKLQFXDIIHAFSGCGLXALYRLTCCSSQWHAEGLCQNRFHKEXMLVPQ

SEQ ID NO: 7173 - DNA, 337 bp, Homo sapiens
  misc_feature (31)..(31): Wherein n may be a, c, g or t
  misc_feature (49)..(49): Wherein n may be a, c, g or t
  misc_feature (181)..(181): Wherein n may be a, c, g or t
  misc_feature (198)..(198): Wherein n may be a, c, g or t
  misc_feature (271)..(271): Wherein n may be a, c, g or t
  misc_feature (306)..(306): Wherein n may be a, c, g or t
  misc_feature (314)..(314): Wherein n may be a, c, g or t
  misc_feature (317)..(317): Wherein n may be a, c, g or t
  misc_feature (324)..(324): Wherein n may be a, c, g or t
agatctttcaccgtcccctcactccagcacnttttcatcaattccttanactccgaaggcgattccgtcctcacaccctaacgcatgaacacgccttcttgctacccctctatctcctttggatgattcgattcgcccccctggctcatctccttgaatcactctctgccatgcctaaaanagagcaacgattcctcncaaaacagaggcgattccctagaatcatccgcgattcgtttcttgtgcgactctcacttctctatccgctcanagagtggctggctcttcacgatcccatccttcttncaagagcntanaatttangaatctttgaccc

SEQ ID NO: 7174 - protein, 71 aa, Homo sapiens
  misc_feature (20)..(20): Wherein Xaa may be any naturally occuring amino acid
  misc_feature (26)..(26): Wherein Xaa may be any naturally occuring amino acid
  misc_feature (50)..(50): Wherein Xaa may be any naturally occuring amino acid
  misc_feature (62)..(62): Wherein Xaa may be any naturally occuring amino acid
  misc_feature (65)..(65): Wherein Xaa may be any naturally occuring amino acid
  misc_feature (68)..(68): Wherein Xaa may be any naturally occuring amino acid
MIRFAPLAHLLESLSAMPKXEQRFLXKQRRFPRIIRDSFLVRLSLLYPLXEWLALHDPILLXRAXNLXIFD

SEQ ID NO: 7175 - DNA, 381 bp, Homo sapiens
  misc_feature (118)..(118): Wherein n may be a, c, g or t
  misc_feature (119)..(119): Wherein n may be a, c, g or t
  misc_feature (163)..(163): Wherein n may be a, c, g or t
  misc_feature (164)..(164): Wherein n may be a, c, g or t
  misc_feature (199)..(199): Wherein n may be a, c, g or t
  misc_feature (200)..(200): Wherein n may be a, c, g or t
  misc_feature (226)..(226): Wherein n may be a, c, g or t
  misc_feature (227)..(227): Wherein n may be a, c, g or t
  misc_feature (271)..(271): Wherein n may be a, c, g or t
  misc_feature (272)..(272): Wherein n may be a, c, g or t
  misc_feature (307)..(307): Wherein n may be a, c, g or t
  misc_feature (308)..(308): Wherein n may be a, c, g or t
  misc_feature (334)..(334): Wherein n may be a, c, g or t
  misc_feature (335)..(335): Wherein n may be a, c, g or t
ctatgatccgctaacctagcctcaacatagtgtcccagtgtgcgctcacctagcctcatcatagtgtcacagtgtgccctcagccggcctcatcatagtgtcccagtgtgcgctcacnnccggcctcataacagtgccccagtgtgcactcacctggcctcgnntcatagtgccccactgtgcattcacctggcctcanntcatagtgtcccagtgtgcactcacnnccggcctcatcatagtttcccagtgtgcgctcacctagcctcanntcatagtgtcccactgtgcactcacctggcctcanntcatagtgtcccagtgtgcactcacnncgagcctcatcatagcgccccagtgtgcactcaccgagcctgatca

SEQ ID NO: 7176 - protein, 115 aa, Homo sapiens
  misc_feature (30)..(30): Wherein Xaa may be any naturally occuring amino acid
  misc_feature (45)..(45): Wherein Xaa may be any naturally occuring amino acid
  misc_feature (57)..(57): Wherein Xaa may be any naturally occuring amino acid
  misc_feature (66)..(66): Wherein Xaa may be any naturally occuring amino acid
  misc_feature (81)..(81): Wherein Xaa may be any naturally occuring amino acid
  misc_feature (93)..(93): Wherein Xaa may be any naturally occuring amino acid
  misc_feature (102)..(102): Wherein Xaa may be any naturally occuring amino acid
CPSVRSPSLIIVSQCALSRPHHSVPVCAHXRPHNSAPVCTHLASXHSAPLCIHLASXHSVPVCTHXRPHHSFPVCAHLASXHSVPLCTHLASXHSVPVCTHXEPHHSAPVCTHRA

SEQ ID NO: 7177 - DNA, 403 bp, Homo sapiens
tggccaaaaatgcaaaataattacatcttttaggtgtacaccttcccttttatttagggtaaaaagttaagataaactaatacatgtatatgatttcgagttacacactcatcgctcataatcattaagggtggccaatgaatgggccattctttgaaaccctttttttaaaatttaaaaacacaaaagcttttttttgggaaaactacaccttacagaaaacacaaacccaaaagtctttatcctcatgcccttgctcgtacttaaaagttctactttaaatacttgtttgaaaaactcagtatacaggtcatccagtactatagtaatataggaataaagatgttcactttcattggacattgaactaatctacttagagagaactggtatagggactctc

SEQ ID NO: 7178 - protein, 62 aa, Homo sapiens
MSNESEHLYSYITIVLDDLYTEFFKQVFKVELLSTSKGMRIKTFGFVFSVRCSFPKKKLLCF

SEQ ID NO: 7179 - DNA, 268 bp, Homo sapiens
  misc_feature (268)..(268): Wherein n may be a, c, g or t
aaatttaaagtagggagggctatcatgacctgcctcctagaggttgggttacgtccttactccctgaagaagagctttactctggaccgaagtgactgtcgcctcgaaaggaacctccacattttcagccactgtggtcggcccatccccaggagagcaaggaccaagtcttagatctgttgctttgtgattgttactatacgtataatgtgccaggatgcttgtctcagaatccctgctcatgctctgactgccatgggcctttgan

SEQ ID NO: 7180 - protein, 64 aa, Homo sapiens
MSRDSETSILAHYTYSNNHKATDLRLGPCSPGDGPTTVAENVEVPFEATVTSVQSKALLQGVRT

SEQ ID NO: 7181 - DNA, 353 bp, Homo sapiens
gatcttttcccgcagggggcttccaatgctggaggtggtgctggtggtggaccacttgattttcttagaaacaatccacagcttcaagcagttagggaaatggtccatacaaatccacaaattttgcagcctatgctcgttgagttgagcaagcagaatcctcaaattctaaggttgattgaggagaatcatgatgagtttcttcagttactaaatgagccctttgaaggcggagagggggatttcttagaccgacctgaggaggatgaaatgcctcatgccattagtgttacaccagaggagcaggaggccattggacggcttgagtccatggggttcgacagagcacgcgt

SEQ ID NO: 7182 - protein, 117 aa, Homo sapiens
DLFPQGASNAGGGAGGGPLDFLRNNPQLQAVREMVHTNPQILQPMLVELSKQNPQILRLIEENHDEFLQLLNEPFEGGEGDFLDRPEEDEMPHAISVTPEEQEAIGRLESMGFDRAR

SEQ ID NO: 7183 - DNA, 230 bp, Homo sapiens
gctagcgtccgtcgcgtggcagatggagcgggcctgctggccggggggaagcctactaaaggccgggcggagcgatgccgcgctgagcgactcagggcgcaggctgcttactcagcccagagtcaccttggcggggatttcgctcgactcgttggcggaacgcggaggcgtgctggacggcctcgtcgcggcaggggtcgatgtacgtgggcctaaatggcggccggaag

SEQ ID NO: 7184 - protein, 69 aa, Homo sapiens
MERACWPGGSLLKAGRSDAALSDSGRRLLTQPRVTLAGISLDSLAERGGVLDGLVAAGVDVRGPKWRPE

SEQ ID NO: 7185 - DNA, 281 bp, Homo sapiens
  misc_feature (1)..(1): Wherein n may be a, c, g or t
ntggcgctgcgggcaggacagatcatcagaaaagcccttacgagaggtttccttcacacaggttcattgcagaagaggccgacctgcaattttgtgcacagattcccgactgtggcggttagatttgctgttcgacaagagcttgaattcggagtgatttaccgggtctccggggagacagatctctcaaaggccttggttctgcatgccaaggcgcatggggtccgagtgattggaagctcatcgtgatagacacttcgggtggacccctcgacctcatg

SEQ ID NO: 7186 - protein, 82 aa, Homo sapiens
  misc_feature (1)..(1): Wherein Xaa may be any naturally occuring amino acid
XALRAGQIIRKALTRGFLHTGSLQKRPTCNFVHRFPTVAVRFAVRQELEFGVIYRVSGETDLSKALVLHAKAHGVRVIGSSS

SEQ ID NO: 7187 - DNA, 376 bp, Homo sapiens
  misc_feature (376)..(376): Wherein n may be a, c, g or t
gccggcacattttcatttccagaagatactgctcattaatacatcagcataactaatagttgctgaatagtagcatggttttctggaagggaggatgtgagagatgtctccgtagctcagagaaacacaagtctccctttgtgcaccctacccaccatattcttatactaacaaaaactattaatagctctgtcactactggtatctgttgtccacctatgaagtcaccagaaggaaaactcagattctcacatttcgtttatattaacctattgtatgctttttattttagggagctaaaaagaaagttattgactggtaaatattcattagctgtgctattatgtggtttgtcccttcccaaactcatgaaatn

SEQ ID NO: 7188 - protein, 100 aa, Homo sapiens [sequence omitted]

SEQ ID NO: 7189 - DNA, 231 bp, Homo sapiens
ccgctgggtgagggcggcttcagcatggtgtatctcgtgcgcgatccgagcccgggcagtgcgtatgcgctcaaaaagatccggtgccagcacggcgacgagtctctgcgcatggcgctgggcgagattcagtcgatgcagcgctttcgcggcccgcatgtgctccgcctgatcgactcggccgtcgtgcaggaccaggagggccgtggcaccgggagctttctcgccggc

SEQ ID NO: 7190 - protein, 77 aa, Homo sapiens
PLGEGGFSMVYLVRDPSPGSAYALKKIRCQHGDESLRMALGEIQSMQRFRGPHVLRLIDSAVVQDQEGRGTGSFLAG

SEQ ID NO: 7191 - DNA, 420 bp, Homo sapiens
tgatcactgttcctatctctaaatgaagtttgcctagactgagccacagaagcctcctactacatgatgtatataccctgtacaagataatagtcatttgcagaaaataagttttacatttggccttctggccatctgatatttgagtgccttgaaaggggaaacaattcttccctgaggaagaagtgctcccatactcttgcattcttagcagtagggtcaatgtcttacaggaatataaaagtccttgaagagacatctgttaagtgtgaaatagagctacatggcaataaaagaagacacagcacgaagtaatggcctgattgaggtcaacttcgaacatgaggtttgaggtgtcctatagcaataaagtatcttcaaagttgtttatgatagtaaaaacattttgcagtttaattc

SEQ ID NO: 7192 - protein, 86 aa, Homo sapiens [sequence omitted]

SEQ ID NO: 7193 - DNA, 279 bp, Homo sapiens
  misc_feature (250)..(250): Wherein n may be a, c, g or t
gggccctgtgaggggcaaaggacggcacatgcactgctgagggagcaggagggtgagctgtggcagggcccacagtcggttcttccgaaaagctctctctggctttccttgatacaagacacacagggtgccaagtattagaagaagggccaggaacagcctgaaaaggtctccattctccaaagcagctctgagtccgttgctcatttagctctttcatggagtggggcaagtgagtaggaggaagaanaaaccacagcggcagcccacatttctaga

SEQ ID NO: 7194 - protein, 73 aa, Homo sapiens [sequence omitted]

SEQ ID NO: 7195 - DNA, 375 bp, Homo sapiens
gccgcgcttaagggatgtcctcagcgtcgaggaacatgtgctagggtgtatactatcaaccccaaaaaacccaactctgccttacgtaaagttgccagagtacgattaacctctggatttgaaatcactgcttatatacctggtattggccataatttacaagaacattctgtagtattagtaagaggaggaagggttaaggatttacccggcgtgagatatcgcattattcgaggaaccctagatgctgtcgcagtaaagaatcgtcaacaagggcgttctagtgcgttgtagattcttatccaagacttgtatcattcgatgatgccgtgtgaatcgctagaaacatgtgaagtgtatggctaacccaataac

SEQ ID NO: 7196 - protein, 97 aa, Homo sapiens
AALKGCPQRRGTCARVYTINPKKPNSALRKVARVRLTSGFEITAYIPGIGHNLQEHSVVLVRGGRVKDLPGVRYRIIRGTLDAVAVKNRQQGRSSAL

SEQ ID NO: 7197 - DNA, 255 bp, Homo sapiens
tctagaccctgcttaatcattatgtcaagcgaggaacgctcgagacaaccaagtactgtttcaactttcgatttagaacccaatccttttgaacaaagcttcgcctcttccaagaaggctttgtcacttccaggcacgatctcccatccgtctctaccaaaagagctttcacgaaacaattctacctcaacgataacacaacattcccaacgttccactcatagtttgaacagtattccagaagaaaatgggaat

SEQ ID NO: 7198 - protein, 78 aa, Homo sapiens
MSSEERSRQPSTVSTFDLEPNPFEQSFASSKKALSLPGTISHPSLPKELSRNNSTSTITQHSQRSTHSLNSIPEENGN

SEQ ID NO: 7199 - DNA, 459 bp, Homo sapiens
tttaatggcatcgctaaggggcgtattttagagcctgctaaagaaaacgagcagggctttttagaagctcaaataagccctattgaatatttagaatacgataaagaaaacattcaagcgatcgtggaagtgttaaaagaaaaggtgatcactctagccaatgtcagctcactctttcctccggatttgatcaaggctttagaagacaatgacgatcctaaccgcatcgctgatttaatcgcggcagccttgcatttaaaaaaagatcaagcgtattctctttttgccaacaacaacaccgaacagcgcttgttggatttgattgatattgtgatagaagagactaaaacccaaaagctccaaaaagaaatcaaatccaaagtccatcaaaaaatggagcaaaccaataaggaatatttcttaaaagagcagctcaaacaaatccaaaaagagcttggc

SEQ ID NO: 7200 - protein, 153 aa, Homo sapiens
FNGIAKGRILEPAKENEQGFLEAQISPIEYLEYDKENIQAIVEVLKEKVITLANVSSLFPPDLIKALEDNDDPNRIADLIAAALHLKKDQAYSLFANNNTEQRLLDLIDIVIEETKTQKLQKEIKSKVHQKMEQTNKEYFLKEQLKQIQKELG

SEQ ID NO: 7201 - DNA, 437 bp, Homo sapiens
gactgcacaccagttgcacatatcagaggtctgtgtaagctctaccaaatgaggaaaactttgagtaaatccttttgtaaagttaggatgtcatttatgcatggagcagatatttattgagcagcctcttcatgccaggagcggtgctgtggtatgtttccttatggaccttcctgtttgatggaggtgctgggaatcgtggtggtgaggtgggctgggcagaggaaaaccctttttatgatgagaataatctcacatggattcaattggtctatagcttttgatattcatgagttcaattactttttaaagagggaatacaacttgtaacttttgatagcctaggagagacataaggcaggtctgttccagagtgggttcaaaaaccttaatgtggatgagtcagggtccaaattctcacaacaaactctgctagc

SEQ ID NO: 7202 - protein, 58 aa, Homo sapiens
MFPYGPSCLMEVLGIVVVRWAGQRKTLFMMRIISHGFNWSIAFDIHEFNYFLKREYNL

SEQ ID NO: 7203 - DNA, 156 bp, Homo sapiens
ccggatcaggaaatgccagtctacccgcctgccatagtcactccacttcaggacacagttacttctgaggggcgcccagcgcgtttccagtgccaagtttcagggacagatttgaaggtgtcttggtactgcaaagacaagaaaatcaaaccttct

SEQ ID NO: 7204 - protein, 52 aa, Homo sapiens
PDQEMPVYPPAIVTPLQDTVTSEGRPARFQCQVSGTDLKVSWYCKDKKIKPS

SEQ ID NO: 7205 - DNA, 215 bp, Homo sapiens
  misc_feature (1)..(1): Wherein n may be a, c, g or t
nacgcgtttcccgtcgaggtccgcaccaaggaagaggtcatcgaactgtcgctcgcggagaacttccagcgcgaggacatgcacccggcagacagcatccgcgcctttgcggcgctacgcgataccggcatggacgccgaggaaatcgctgcccggttcggtcaggcggtcagcttcgtctataagatgcttcgcctttccgcgctggcaccggt

SEQ ID NO: 7206 - protein, 71 aa, Homo sapiens
  misc_feature (1)..(1): Wherein Xaa may be any naturally occuring amino acid
XAFPVEVRTKEEVIELSLAENFQREDMHPADSIRAFAALRDTGMDAEEIAARFGQAVSFVYKMLRLSALAP

SEQ ID NO: 7207 - DNA, 296 bp, Homo sapiens
  misc_feature (1)..(1): Wherein n may be a, c, g or t
ngaatggctactccatagagcagggtggggagtggttgccgtatgtgcaaaggacagggtattatgggagaactgcaagccacagattatcattattatggtttgttattaataagcttggtagggaagggagtggtgatagtgagaaaggattctaaatgtaggctcaggccagaccaaaaagcaccttgtataacatgttaagcactgtgcccttaatctaaaagtaacagggagctattatagggatttacatagaggagtgataagaagagctctccattttaaagtgatca

SEQ ID NO: 7208 - protein, 53 aa, Homo sapiens [sequence omitted]

SEQ ID NO: 7209 - DNA, 393 bp, Homo sapiens
  misc_feature (393)..(393): Wherein n may be a, c, g or t
atccagtggatggaggtctacgccggcgaaaagtccacccgcgtctatggccccgatgtctggctgcccgatgagaccctggaggccgtgcgcgactatgtcgtgtccatcaagggccctctcaccacgcctgtgggcggtggcattcgctcgctgaacgtggcgctgcgccagcagctcgacctgtacgtgtgcctgcgccctatccgctatttccgcggcgtgccctcgcccgtgaaatcgccggagaagacggacatggtgatcttccgcgagaactctgaggatatctacgcgggcatcgagttcgaggcccagtccgcaaaggccaagaagctcatccagttcctgcaggacgagttcggcgtgaacaagatccgcttcccggaaacn

SEQ ID NO: 7210 - protein, 131 aa, Homo sapiens
IQWMEVYAGEKSTRVYGPDVWLPDETLEAVRDYVVSIKGPLTTPVGGGIRSLNVALRQQLDLYVCLRPIRYFRGVPSPVKSPEKTDMVIFRENSEDIYAGIEFEAQSAKAKKLIQFLQDEFGVNKIRFPET

SEQ ID NO: 7211 - DNA, 317 bp, Homo sapiens
gccggcgggaccattaccggggtttcccgttatatcaagctgaccaaacacaagccgatcctttcggtggcggtggagccggccacctcgccagtgatccaccagaccctggccgggggcccagggcaaacccagcccgcaaaaaatccgggcatcggcgccggtttcgtgccgaaaaacctcgatctggcgatggtcgaccgggtggagctggtcaccgatgaggagtccaaggccatggccctgcggctgatgcgggaagaggggattctgggcgggatttcctgcggcgcggccatggccgatgccgagcagct

SEQ ID NO: 7212 - protein, 105 aa, Homo sapiens
AGGTITGVSRYIKLTKHKPILSVAVEPATSPVIHQTLAGGPGQTQPAKNPGIGAGFVPKNLDLAMVDRVELVTDEESKAMALRLMREEGILGGISCGAAMADAEQ

SEQ ID NO: 7213 - DNA, 367 bp, Homo sapiens
  misc_feature (1)..(1): Wherein n may be a, c, g or t
  misc_feature (2)..(2): Wherein n may be a, c, g or t
  misc_feature (73)..(73): Wherein n may be a, c, g or t
nncttggcccgcagcctgctggccgaaaccgaagtcgaggccatcggcctcggcgcccgcgattccctgcgcntggaagccggcctgtgcctgtacgggcacgatatgaacagcgagaccacaccggtcgaggccagcctgctctgggcgatctccaaggtccgccgcgtcgacggtgcacgggccggtggtttccccggtgccgagacggtttttgcccagcagcaacagggtgtgtcacgcaaacgtgtaggcctgttaccgcaggaacgcacaccggtgcgcgaaggcgcggaaatcgtcgaccaggacggccaggtgatcggcaatgtctgcagcggcggcttcggtccgaccctcggcgcgc

SEQ ID NO: 7214 - protein, 122 aa, Homo sapiens
  misc_feature (1)..(1): Wherein Xaa may be any naturally occuring amino acid
  misc_feature (25)..(25): Wherein Xaa may be any naturally occuring amino acid
XLARSLLAETEVEAIGLGARDSLRXEAGLCLYGHDMNSETTPVEASLLWAISKVRRVDGARAGGFPGAETVFAQQQQGVSRKRVGLLPQERTPVREGAEIVDQDGQVIGNVCSGGFGPTLGA

SEQ ID NO: 7215 - DNA, 324 bp, Homo sapiens
  misc_feature (175)..(175): Wherein n may be a, c, g or t
  misc_feature (176)..(176): Wherein n may be a, c, g or t
  misc_feature (178)..(178): Wherein n may be a, c, g or t
  misc_feature (324)..(324): Wherein n may be a, c, g or t
gtgcactggtcggcgcagaggtcgtgttctaccgggtactgcccgtcacctgcgccgacctggccgacatccagaccaggctggccgaacacccgggcatcaaggccatcatggtcacgcattttttcggcatcccgcaggatctggcgccgctgcgcgctcgtggacgcggganntncggcctgctggaagactgcgcccattgcttcttcggcgagcgtgacggtgtcgccgtcggcagcagcggcgactacgcgatcggcagcagcatgaagttcttcccgatccacgaaggcggttgcctggtatcgcggcggcacgggn

SEQ ID NO: 7216 - protein, 71 aa, Homo sapiens
  misc_feature (22)..(22): Wherein Xaa may be any naturally occuring amino acid
  misc_feature (23)..(23): Wherein Xaa may be any naturally occuring amino acid
MVTHFFGIPQDLAPLRARGRGXXGLLEDCAHCFFGERDGVAVGSSGDYAIGSSMKFFPIHEGGCLVSRRHG

SEQ ID NO: 7217 - DNA, 296 bp, Homo sapiens
tcatgaattacacaagtgtaagaattaaagtagtggttgatatgtaacgtcacttggagtttggaggcagttatggaagaatagtagggcttgctttgagatatctgggggtttatctaatcacttaaaacccacaaaccttccatgttcacactagcactaatcacaatagctgacaggtggaagccatccaaatatctgctggtagacaaatggataaacaaaatgtggtccgtacatacaatggactattactcagccttaaaaaggaaggaagttttgacacatgctacata

SEQ ID NO: 7218 - protein, 58 aa, Homo sapiens
SLKTHKPSMFTLALITIADRWKPSKYLLVDKWINKMWSVHTMDYYSALKRKEVLTHAT

SEQ ID NO: 7219 - DNA, 308 bp, Homo sapiens
gaattcctgcatgccccaccctaccctctccacccttgcctgttcaatgcacccattcagcctccagcaaggcccctgcaccagctctcctgggtgtgccctttccttctactgggactcaggactgtgccttccccaggaagcccaggatgctttttacaagggatgttcaatgcacctcatgggttctcagacacacaagaacaagctgtagaacataaagtgattgcaaacccttaggctacactgagccctcctcctgctttttgataaccagacacttagctcaggatggggataaaagatct

SEQ ID NO: 7220 - protein, 67 aa, Homo sapiens [sequence omitted]

SEQ ID NO: 7221 - DNA, 318 bp, Homo sapiens
gcgctgaactgcgccctggacctgtggaagcacggcgtgctggacaagtaccaggtggagctgatcggcgccaagcccgaagccatcgacaaggccgaagaccgtctgaagttcaaggacgccatgaccaagatcggtctgggctccgcgcgctccggcatcgcccactccatggacgaagcctgggccgtgcaaaagcagatgggcttccccactgtcatccgccccagcttcacgctgggcggcaccggcggcggcattgcctacaacgccgaagaattcgagaccatctgcaagcgcggcctggaagcctcgccc

SEQ ID NO: 7222 - protein, 106 aa, Homo sapiens
ALNCALDLWKHGVLDKYQVELIGAKPEAIDKAEDRLKFKDAMTKIGLGSARSGIAHSMDEAWAVQKQMGFPTVIRPSFTLGGTGGGIAYNAEEFETICKRGLEASP

SEQ ID NO: 7223 - DNA, 407 bp, Homo sapiens
  misc_feature (1)..(1): Wherein n may be a, c, g or t
nccctccagaactgtgcagttcggtctcagcgcagtcggtatccttgtggtgttaccagacaggtgccttcactgagttcttggctgaagcagcgtcccgcgtcggtgtccacaacgcacggggacgacttcacgcttggcggtacgagggcgacatggcctccgatgcggccattctcacgcgagcgttgcacgatgtcgcgaactggacggtgctgctagtcatccacgaaggaggacacgactgggcatggtggcaacaggccattctggacgacgtcaccggatttctgaacggtaaggcttatggcgatctagacgggtaacgctttcacacattcctccactccctccgctactgccaaccattgcttttcgatattcgggtataggcgctttagtcaaaa

SEQ ID NO: 7224 - protein, 56 aa, Homo sapiens
MASDAAILTRALHDVANWTVLLVIHEGGHDWAWWQQAILDDVTGFLNGKAYGDLDG

SEQ ID NO: 7225 - DNA, 237 bp, Homo sapiens
tcagatctttacattgttcagaatataaattctgacgaaagcacaactgtacagaaatggatatcaggtatattgaatcaggattttgtattcaatgaggacaatatcacttcgaccctgcctattcttcccattataaagaacttttcaaaagatgttggtaatggtaggcacgagacgagtacctttctaggtttaatcaatcctaacaaagttgttgaagttggaaatgtgcac

SEQ ID NO: 7226 - protein, 79 aa, Homo sapiens
SDLYIVQNINSDESTTVQKWISGILNQDFVFNEDNITSTLPILPIIKNFSKDVGNGRHETSTFLGLINPNKVVEVGNVH

SEQ ID NO: 7227 - DNA, 273 bp, Homo sapiens
  misc_feature (1)..(1): Wherein n may be a, c, g or t
nccgcgtaggtaggtagatgaatagatgggtgcatggatgagatggatggttgggtgaatagatggtagatgatgggtacgtagatagatgaatggatggatagatggatggatgggtgaacagatggtagatgatgggtacgtagatagatgagtggatggatagatggatgtgatggatggcctgaatagatcgcacatgatggatccccaggtcgatggatccatggcggcatggatgagatggacggatgggtcaatacgtaggcaggt

SEQ ID NO: 7228 - protein, 78 aa, Homo sapiens
MPPWIHRPGDPSCAIYSGHPSHPSIHPLIYLRTHHLPSVHPSIHLSIHSSIYVPIIYHLFTQPSISSMHPSIHLPTYA

SEQ ID NO: 7229 - DNA, 255 bp, Homo sapiens
acgcgtgctgcagacgcttttcagagacaagtcttggtctttgtgctggacggaggcaatgctgctaatgggaggcggagcccacctgctcctcagccaggccgcagggagaggcaggcagcggtgaaagccgctgagcgggaagcagggccgggatgtaaggcagaagccgcagggacgtgcgctgggcctctgctgagagcaggggaaccaggaacggggctcccattcgggcctctatctaacgacagagct

SEQ ID NO: 7230 - protein, 54 aa, Homo sapiens [sequence omitted]

SEQ ID NO: 7231 - DNA, 428 bp, Homo sapiens
  misc_feature (1)..(1): Wherein n may be a, c, g or t
  misc_feature (370)..(370): Wherein n may be a, c, g or t
nctcctcactctcggcatgtcttcttcacgcactcgtcagggcttctatgttcactgcttacatactctcctccagaatgcaagctctgcgcacagacctcatcactcctgtcctctgccctgttcactggtaaataaatgcccaagtatttcttgctaagagaatgaataatttctgttcccttagggccatcctgaaaaggcaacgtaggtcccggggtcctcattcaattctaaaccaaagggtaaaaaagtagtgactttttttctaaactataaaagcaattctttgttctcttatgcacagcctaaggggcacattatacactgcagatacaaccaattcaacacactagaacccttgctgaanatcatgaacactgtctctacttggcacacgcgtcatacccctgcacctgccacaagca

SEQ ID NO: 7232 - protein, 73 aa, Homo sapiens [sequence omitted]

SEQ ID NO: 7233 - DNA, 366 bp, Homo sapiens
  misc_feature (366)..(366): Wherein n may be a, c, g or t
agatcttaccattgcactccagcctcagcaacagagtgagactgtgtctcacaaaaaagaaaagataaaagaacttataagttagtttaggggaggactgacgacttcacttttccattggggaacaggatggttttgcatttacttgtctttaacttttattcagcatttactacaattcaagcccaccccgccactccgtctctccttctgaggctcttatatcctgcctcttggcttggcccttgctgccagaccattgctcttcccttaggcagatcccacagccttcggtgtctgctatctcccctctgccatggaatctttacaactattccagtgggcagcaatccccgctgtgggtan

SEQ ID NO: 7234 - protein, 79 aa, Homo sapiens
  misc_feature (79)..(79): Wherein Xaa may be any naturally occuring amino acid
MVLHLLVFNFYSAFTTIQAHPATPSLLLRLLYPASWLGPCCQTIALPLGRSHSLRCLLSPLCHGIFTTIPVGSNPRCGX

SEQ ID NO: 7235 - DNA, 371 bp, Homo sapiens
aggccttgaagatggggagattgcatcagcagaggctagagatggaaggacttccaggcagtagaaccctgcaaaccaacaagtttctggcctggaaaatgcaagatgtctttagagaactggggagcagtccagttaggcagcagaggtgggtgcaagatactaataacatcccatatttggggagtgtcattcccatttgcacactgacttcctgtatcttagaccatactcaggcctcacatacctgcttgatgcctgtctgggctgtgcctacagagattggaagattctgtaagagaaacctggatttctggcttttcttgaaagtccgggggttcaccccagattcacaatttctgtggatgggg

SEQ ID NO: 7236 - protein, 120 aa, Homo sapiens [sequence omitted]

SEQ ID NO: 7237 - DNA, 153 bp, Homo sapiens
acgcgtgagcgcggcgagctcgaggtgctgccctgggatcacctcgactccggtctcgacaaggactggctgtggcaggactggcaggatgccctctccgaggaagaagtcgacgactgcccctggacgccgtgcttcgactgccgcgtgtgc

SEQ ID NO: 7238 - protein, 51 aa, Homo sapiens
TRERGELEVLPWDHLDSGLDKDWLWQDWQDALSEEEVDDCPWTPCFDCRVC

SEQ ID NO: 7239 - DNA, 366 bp, Homo sapiens
attgtttcttcaaccaaatcaactcaagtgaccaatgactcaccatggcaggaccccacttacttcagttcctttgggaaagaattaatgttcatagcgacatgcatgttggcacagttattgaatcaagcgggccaaacacacgctctctgtataatgaacgttctttcgaaatcctttaattcagaagcaaacaatcaggcatggttgatggcatcttttcccttggctgctgggtcgttcatccttattagtgggaggttaggagatatttatggattgaagaaaatgttgatcgttggttatgtcatcgtaatcgtttggtctataatttctggtctctccaaatactctaatagcgacgcg

SEQ ID NO: 7240 - protein, 122 aa, Homo sapiens
IVSSTKSTQVTNDSPWQDPTYFSSFGKELMFIATCMLAQLLNQAGQTHALCIMNVLSKSFNSEANNQAWLMASFPLAAGSFILISGRLGDIYGLKKMLIVGYVIVIVWSIISGLSKYSNSDA

SEQ ID NO: 7241 - DNA, 327 bp, Homo sapiens
  misc_feature (1)..(1): Wherein n may be a, c, g or t
  misc_feature (2)..(2): Wherein n may be a, c, g or t
nncaatatcgctcccggtggttattgcgtggcgcgtctcgatggcagggtagtcttcgtccgcggcgcgttgccgggggaggaggtccgggttcggctgcccgacatatcgaaggcttcgcactggtttggacaggctgtcgacgtcatctcggccgattcgcatcgcgttgttccgccatgtccagtggcgggagagtgtgggggttgcgacttccagcacgtcgatgttgagtttcagcgcgagctcaagcggcgtgtcgtcgctgagcaactcagtcgcctcgctgggattaagtgggcggggactgtggaggctgctaccggt

SEQ ID NO: 7242 - protein, 109 aa, Homo sapiens
  misc_feature (1)..(1): Wherein Xaa may be any naturally occuring amino acid
XNIAPGGYCVARLDGRVVFVRGALPGEEVRVRLPDISKASHWFGQAVDVISADSHRVVPPCPVAGECGGCDFQHVDVEFQRELKRRVVAEQLSRLAGIKWAGTVEAATG

SEQ ID NO: 7243 - DNA, 396 bp, Homo sapiens
caattctgagaacccctgactattagattatgagttgcctctagctcccttgatcaaagagaaacaggctttcatgtgcatacttggcataatccctggagagaagtatattaagaaaatgttttgaaatgcttctttttaattaaaaaaacacatgctataataaaaaagattatggtgttatgcctggcacataaaagattaaatgtttgttgaacttctaggaaagaatattttgtagttcttaaaatccatattttgcatttgaaaatatatttaatgatatggaaaatattcatgatttccatgaaaagaataaaaattacatgtatcacataattttttttttttttttggaaacgaagcccccttcctcttgggcccctcccggggttg

SEQ ID NO: 7244 - protein, 65 aa, Homo sapiens [sequence omitted]

SEQ ID NO: 7245 - DNA, 371 bp, Homo sapiens
  misc_feature (37)..(37): Wherein n may be a, c, g or t
  misc_feature (46)..(46): Wherein n may be a, c, g or t
  misc_feature (130)..(130): Wherein n may be a, c, g or t
  misc_feature (140)..(140): Wherein n may be a, c, g or t
  misc_feature (141)..(141): Wherein n may be a, c, g or t
tgtacagattaagattggtaaactttgaatcccaacnctatttaantctccctttgtcttgcttttctcatctgtaaatgggaatataatagattcttccttataggattatttagaagatttaagtacncttgcaaagnntacttaaagcagtccctggaacagagcacacagtgaataaatgtttgttattatcattcctctgatcaacatcattattgagattatcaaggagtacagaagtgaagaacctgtgattgctatccttacactgcccacaagttagaagaaaaaagggtactgaaacagtaatcatgattcagaatagattatagctcagtgttataacagaagttcaacactggcctagg

SEQ ID NO: 7246 - protein, 64 aa, Homo sapiens
  misc_feature (59)..(59): Wherein Xaa may be any naturally occuring amino acid
  misc_feature (63)..(63): Wherein Xaa may be any naturally occuring amino acid
MITVSVPFFLLTCGQCKDSNHRFFTSVLLDNLNNDVDQRNDNNKHLFTVCSVPGTALSXLCKXT

SEQ ID NO: 7247 - DNA, 266 bp, Homo sapiens
tggatctccttcgctctggtgggtgccaaccttggttggcactgatggcatggatctcctttgctctggtgggtgccaaccttggttggcactgatggcatggatctacaccaccaccggcagcgttaccatggccgcatgaccaccccgttctccgtcctcgaccacctgcacatggccaacgcgctgcgcctggccgagcgcgctgcctataccacccgcccgaacccgatggtcggctgcgtgatcgcccatggcgaacgcgt

SEQ ID NO: 7248 - protein, 55 aa, Homo sapiens
MDLHHHRQRYHGRMTTPFSVLDHLHMANALRLAERAAYTTRPNPMVGCVIAHGER

SEQ ID NO: 7249 - DNA, 311 bp, Homo sapiens
  misc_feature (7)..(7): Wherein n may be a, c, g or t
  misc_feature (18)..(18): Wherein n may be a, c, g or t
tgatcanagtagcatttntcctgctatcagaggtgttacaaaaaaaggtagcatttgatgaaattcacttggccactttgcacttatcagattgaaaagagagaagtctggaaatgataatctgagatttataagaagaggtcgctattatagactttatttaatatataatggctagaacttgatgattgaaggcctggtttcaggtacttgaaatatagaggttggtagtaatcttctatgatatctacttgtatttcagtctgaacgaatttatcaaataccatgatcagaggactatgctctgtaca

SEQ ID NO: 7250 - protein, 52 aa, Homo sapiens
MVFDKFVQTEIQVDIIEDYYQPLYFKYLKPGLQSSSSSHYILNKVYNSDLFL

SEQ ID NO: 7251 - DNA, 336 bp, Homo sapiens
ccggatgatgacgcctctttctcctctccaccccaccggatcaaccttttgcaggataacttctcacacgatctgactgtgacttttcaagaatggaagactatccaagacaccacagacgaaatttggtttttgacattttcgcccaatggcaagtatttggcttctgcgacttccgagtcttcaagaggctacttcattactgtttatgatggggaacaagacttcaaaatttataagacttgcgtgagcttgtcacaatccgtattgtacctcatgttttctcctgatagccggtatctggttgcttgccctttcagcgaagatgttaccatt

SEQ ID NO: 7252 - protein, 112 aa, Homo sapiens
PDDDASFSSPPHRINLLQDNFSHDLTVTFQEWKTIQDTTDEIWFLTFSPNGKYLASATSESSRGYFITVYDGEQDFKIYKTCVSLSQSVLYLMFSPDSRYLVACPFSEDVTI

SEQ ID NO: 7253 - DNA, 606 bp, Homo sapiens
  misc_feature (1)..(1): Wherein n may be a, c, g or t
  misc_feature (408)..(408): Wherein n may be a, c, g or t
nttttagtagagacggggttcaccatgttggccaggctccacaagttcctgcttttttttctgtcagcacagccaagactatatatattaataaagtacctgccagaattactttctattacttgaatatgtgcacagcatttgctgactatatgtgtttaccaaaaagaaattatctacatgtaccctagtacatggtaggtgtccaatttcctaaatattgactttgagaacttacttgagattccagtcgctgaacacagatgcttatatgtccttagctttggacaggctcaaagctaattttgtaaagaaaggtatccttcttgccaacaaaacagcttttcagaactctatacactagataggatacccatcttgctagtcaaattggtctgttcaccccgngctatcaatggggattgtgctactatcagactgatcctcctatttttaaatataaatgtgtgctgattttggactaagatagcagcaagcaccctattaaccaagaatagctgagaagctggcaaagtaaatctactctttccaagcactcctgagtctgatgttttccccatacgtctcagtattgactttactcca

SEQ ID NO: 7254 - protein, 75 aa, Homo sapiens [sequence omitted]

SEQ ID NO: 7255 - DNA, 225 bp, Homo sapiens
gccggcccatttgccaacatctctatcggtgcctcttctgttattgctgatcgcgtggctttgaaattggttggtaccgagccagaggcaaaaacagaagctggttatgtggttactgaagcagggttcgatttcactatgggtggtgaaagattcttcaacattaagggccgttcctctggattgacacctaatgcctgggtcttggttgctactgttagggca

SEQ ID NO: 7256 - protein, 75 aa, Homo sapiens
AGPFANISIGASSVIADRVALKLVGTEPEAKTEAGYVVTEAGFDFTMGGERFFNIKGRSSGLTPNAWVLVATVRA

SEQ ID NO: 7257 - DNA, 339 bp, Homo sapiens
gaattccactcattccaattgaaggctctcaagggaatcaagtcattttttccagctcctttattgttattaaaattacaagaactacacccacatacatttaaaaaattccaatattgtaccataatatcctcctcgacaggaaatatttggttttgcgtccccgaacgatcgacaatagtaaatggtaatttaaaattttacgagctaactaggttcaaaggattgaaatccatttcaccactaccttcaaatccgataaatttagactccagatcctcaagttatgtactggtggtcataagttttagtagaacattagagctaacattatctcta

SEQ ID NO: 7258 - protein, 113 aa, Homo sapiens
EFHSFQLKALKGIKSFFPAPLLLLKLQELHPHTFKKFQYCTIISSSTGNIWFCVPERSTIVNGNLKFYELTRFKGLKSISPLPSNPINLDSRSSSYVLVVISFSRTLELTLSL

SEQ ID NO: 7259 - DNA, 219 bp, Homo sapiens
aagcttggctgacctggggcccagctcaggctgtagccaggatcggatgctgttttaaatttgggattggattcagaaggatcgggaacctgaaagtcaacgtcctttcggttgatctgaaaacacaaaactcactggctttgccaaaaaggcagttctcaaattcgcagccaaagaacgcatcgaacagaaatagcattagagggagtgcggggatcc

SEQ ID NO: 7260 - protein, 57 aa, Homo sapiens
MLFLFDAFFGCEFENCLFGKASEFCVFRSTERTLTFRFPILLNPIPNLKQHPILATA

SEQ ID NO: 7261 - DNA, 435 bp, Homo sapiens
ccggaaaatgtcaaaagccaagacaaattaaatatagatgtggcgtggaccattatatgtgatcttttcctaatatgcttgcaatcctccacctatgattcgaggtcaaggactttgttgataaattttgccaaagtcttgaatatgactagcttggaaatttgtgaatttgaaagacgagtaacagattccttagacatggaacaatctacagaagatcaagtatgggatgaacaagatcacatgagaaatagacggagaagcaaaagaagaaagaaaatggcatatgtcgcacttgccatggtaggtggttctttggtccttggactaagtggtggtttactagcccccgtcattggcggggggattgctgctggtttgtcaacaataggtattactggtgctacaagtttcttgaccggagtgggtggtacc

SEQ ID NO: 7262 - protein, 145 aa, Homo sapiens
PENVKSQDKLNIDVAWTIICDLFLICLQSSTYDSRSRTLLINFAKVLNMTSLEICEFERRVTDSLDMEQSTEDQVWDEQDHMRNRRRSKRRKKMAYVALAMVGGSLVLGLSGGLLAPVIGGGIAAGLSTIGITGATSFLTGVGGT

SEQ ID NO: 7263 - DNA, 550 bp, Homo sapiens
  misc_feature (1)..(1): Wherein n may be a, c, g or t
  misc_feature (2)..(2): Wherein n may be a, c, g or t
nngctagcagcggagttcgacaaagctgtcggcatcgcattggcagcagctcgtgaagcggggatcgagccagaccgcatcggcgtcggcgcgccgggcattgttcgcgggccgagtggaaccatactccgttccggccccacggttcctggttggcaaggaaccatcatcgaagacattatcgctcgtcacacgaatgtgcccgtagcatgtcacaacgacgtgcgcatttgggcgttcggtgagcacaacttcggtgccgggcgcggtattactggccgcgtgatctatctttcgctgggcacaggcgtcggcggagccatcgtcgacaacggagaattacaaaccggaacctccggttccaccggtgaattttcggagttgctcgtggcagatctgcggggcatggccgaaagggtagaaaacacttgctccggaaactccctagcgcgctattacaacgtgctcgcggctgatgcagactatgccgggcgtatcgcttgggaccaccctgctgggcccgatgacctgagccttccagagatcatga

SEQ ID NO: 7264 - protein, 183 aa, Homo sapiens
  misc_feature (1)..(1): Wherein Xaa may be any naturally occuring amino acid
XLAAEFDKAVGIALAAAREAGIEPDRIGVGAPGIVRGPSGTILRSGPTVPGWQGTIIEDIIARHTNVPVACHNDVRIWAFGEHNFGAGRGITGRVIYLSLGTGVGGAIVDNGELQTGTSGSTGEFSELLVADLRGMAERVENTCSGNSLARYYNVLAADADYAGRIAWDHPAGPDDLSLPEIM

SEQ ID NO: 7265 - DNA, 225 bp, Homo sapiens
  misc_feature (76)..(76): Wherein n may be a, c, g or t
  misc_feature (77)..(77): Wherein n may be a, c, g or t
  misc_feature (145)..(145): Wherein n may be a, c, g or t
accggtggcactgcctcggggctgcatgtacatgtgtgtgcatgtgtgtgcatgtgcgtgtgcacgtgtgcgtgtnngcccgtgtgcatgtgcccgtgtgcgtgtctgtgcgtgtgtgtgtgcatgtgtgcgtgtctgtgcgtgnctgtgtgtgtgcgtgcatgtgtgtgcacgtgtgtgcatgtgcacgtgtgcgcacccgtgtgcgtgtccgtgtgcacgcgt

SEQ ID NO: 7266 - protein, 75 aa, Homo sapiens
  misc_feature (26)..(26): Wherein Xaa may be any naturally occuring amino acid
  misc_feature (49)..(49): Wherein Xaa may be any naturally occuring amino acid
TGGTASGLHVHVCACVCMCVCTCACXPVCMCPCACLCVCVCMCACLCVXVCVRACVCTCVHVHVCAPVCVSVCTR

SEQ ID NO: 7267 - DNA, 222 bp, Homo sapiens
tgatcaaaagggatgtgggagctaccatgagcccacagtcccctcacccagttgcttgcccttgggactgggtccgccaaggactccttctttacctactctgtccatctgagaagacctgtgtgggcggaattcagatgcaccggttgcatgtctgcctctgcagccctggtaggacacctccaatccagtatgcatggatattcgaactacctaacccca

SEQ ID NO: 7268 - protein, 65 aa, Homo sapiens
MSPQSPHPVACPWDWVRQGLLLYLLCPSEKTCVGGIQMHRLHVCLCSPGRTPPIQYAWIFELPNP

SEQ ID NO: 7269 - DNA, 168 bp, Homo sapiens
  misc_feature (1)..(1): Wherein n may be a, c, g or t
  misc_feature (2)..(2): Wherein n may be a, c, g or t
  misc_feature (168)..(168): Wherein n may be a, c, g or t
nntccccggtcctccaagttgctgtaccagactctggcagcccacctggtgcacgtgcgacagtcttacgtggcacctttcaccacccaaatcgaccggattggacgcggggtcttcggccaggagcttcacgtcgagatcgactccaccttgtcggtcgtggcacgn

SEQ ID NO: 7270 - protein, 56 aa, Homo sapiens
  misc_feature (1)..(1): Wherein Xaa may be any naturally occuring amino acid
XPRSSKLLYQTLAAHLVHVRQSYVAPFTTQIDRIGRGVFGQELHVEIDSTLSVVAR

SEQ ID NO: 7271 - DNA, 429 bp, Homo sapiens
  misc_feature (1)..(1): Wherein n may be a, c, g or t
  misc_feature (283)..(283): Wherein n may be a, c, g or t
  misc_feature (336)..(336): Wherein n may be a, c, g or t
ngatttaaccagaacaaggcttgctcagaattacagaccagagttgaccagtggttcccaaatgttagcatatattagcatcacctagagagcttgctaaacgaagtgatcaccaatcccaaagtttctgagttagcaggtctgatgtgtggtctgaggcctgtcacttctaacatgatactaatggtttgggaaccacactttgaaaaccacagggctagacatttacctgtagacaaattatcccaaacaggcattaaacttgaaaaacaaaaggctgaanatgtagatttgcaaatccagatttatagaatgatggcaaatatcacacagatnagagaagtatgaaagggtccagagactatctagctctatctttagatgagtagcttcttttttttttaagttcaaagtactaaaagctaactc

SEQ ID NO: 7272 - protein, 67 aa, Homo sapiens
  misc_feature (47)..(47): Wherein Xaa may be any naturally occuring amino acid
  misc_feature (64)..(64): Wherein Xaa may be any naturally occuring amino acid
MCGLRPVTSNMILMVWEPHFENHRARHLPVDKLSQTGIKLEKQKAEXVDLQIQIYRMMANITQXREV

SEQ ID NO: 7273 - DNA, 150 bp, Homo sapiens
tttaaagagtttgcccgggtgctgggcggcggcgtcgtaccggggagcgccattctgattgggggtagcccgggcgcggggaaatcgaccctgctgctgcaaaccctgtgtaagctcgcgtcgcagatgaaaaccctgtacgtcaccggt

SEQ ID NO: 7274 - protein, 50 aa, Homo sapiens
FKEFARVLGGGVVPGSAILIGGSPGAGKSTLLLQTLCKLASQMKTLYVTG

SEQ ID NO: 7275 - DNA, 381 bp, Homo sapiens
gtgcacgagcgtcacttcatggctccaggggtgcggcgcgtgcccgtgcgcgagggccgggtgcgcgccacgctcttcctgcctccaggaactggaccctttcctggaatcatagacctttttggaattggaggtggacttctggaatatagggcgagtctgctggctgcaaagggctttgccgtcatggctctggcttattttaagtatgatgacctccctaaggctacagacatccttcgtctggagtactttgaagaagctgtgaactacctgcttggtcaccctcaggtcaagggtccaggaattggcctgctggggatttccaaaggggctgaactctgcctctccatggcctctttcctgaacggcatcacggcc

SEQ ID NO: 7276 - protein, 127 aa, Homo sapiens
VHERHFMAPGVRRVPVREGRVRATLFLPPGTGPFPGIIDLFGIGGGLLEYRASLLAAKGFAVMALAYFKYDDLPKATDILRLEYFEEAVNYLLGHPQVKGPGIGLLGISKGAELCLSMASFLNGITA

SEQ ID NO: 7277 - DNA, 394 bp, Homo sapiens
  misc_feature (247)..(247): Wherein n may be a, c, g or t
  misc_feature (355)..(355): Wherein n may be a, c, g or t
  misc_feature (356)..(356): Wherein n may be a, c, g or t
gaattccttcagcagatgaagacataactattttgttctttatagtttctaaacatttcttagaatctgtgtttaagatgctacaatggtcccagatgactctggctactgttaagactacctttattgggctaaatgaatttatttgtagccctagtacattaccctctggaaaaaaaatggcttgatttaaggcttttctttatggaaaatgaaaaggaaacatgcaatcagatgttattaattnactctgctctgctaaaatctgtaaaaattctggcaatccaaagtttttgttataaataagttccttctggttcctaaattataatttaatagttaactgaagctattnnatttaggtctggtccaaacctacataccatgtcagttt

SEQ ID NO: 7278 - protein, 56 aa, Homo sapiens
  misc_feature (38)..(38): Wherein Xaa may be any naturally occuring amino acid
MNLFVALVHYPLEKKWLDLRLFFMENEKETCNQMLLIXSALLKSVKILAIQSFCYK

SEQ ID NO: 7279 - DNA, 263 bp, Homo sapiens
  misc_feature (1)..(1): Wherein n may be a, c, g or t
  misc_feature (238)..(238): Wherein n may be a, c, g or t
nctaagctgccagcaggtatctgggggctttgggccaggtgtggaatgcgggcagagacccatgacattcacattccaatccaagggggagcgtggctcccactcctgaggttttcaggcctggccagttctctgtcagggaggtgggaggtggtgaaaggtcacctcccaaagagggtggtgaatttcagcaaggttggccttcgggcctgtccagaacctctggggttagacggtntgtgcattttatttttgatcgcccc

SEQ ID NO: 7280 - protein, 72 aa, Homo sapiens
  misc_feature (65)..(65): Wherein Xaa may be any naturally occuring amino acid
MRAETHDIHIPIQGGAWLPLLRFSGLASSLSGRWEVVKGHLPKRVVNFSKVGLRACPEPLGLDGXCILFLIA

SEQ ID NO: 7281 - DNA, 328 bp, Homo sapiens
tccggacgcagcctcccgagaccctgggcagagggctgagcttcacgtgcacagaattctgacctacagaagctgaggtggtagctggatgttgctctccactctaagcttgcactaaactgtgcagcagtagcgtttcccagacttgccatttcctttctccttctccttcctccagcctgtggccaggtgcctgctctctgcaccccacataccctggtagtccaggccttggtcctcccccaccccaggatcaccacagtgacctgctatttttaaccatatgtttaaaatggggtaggaagacagaagcatgtcaagttcatga

SEQ ID NO: 7282 - protein, 66 aa, Homo sapiens [sequence omitted]

SEQ ID NO: 7283 - DNA, 243 bp, Homo sapiens
atggatgctattaatgtactctccaaatacttaagagtcaagccaaatatattctcctacatgggaaccaaagataaaagggctataacagttcaagaaattgctgttctcaaaataactgcacaaagacttgcccacctgaataagtgcttgatgaactttaagctagggaatttcagctatcaaaaaaacccactgaaattgggagagcttcaaggaaaccacttcactgttgttctcaga

SEQ ID NO: 7284 - protein, 81 aa, Homo sapiens
MDAINVLSKYLRVKPNIFSYMGTKDKRAITVQEIAVLKITAQRLAHLNKCLMNFKLGNFSYQKNPLKLGELQGNHFTVVLR

SEQ ID NO: 7285 - DNA, 210 bp, Homo sapiens
  misc_feature (1)..(1): Wherein n may be a, c, g or t
  misc_feature (2)..(2): Wherein n may be a, c, g or t
nntccggatatgggggagccgctgcgagtgaaggtggatcgcgaggctcgccgtctggcgggataccgctatggccgccagattgctgatgactatatgacgcagttagggcagggcgagcatcaggtggcgcgctggctggaggcggaaaacgatccgcgtctgaccgagatcgtcacgcaccttaaccatgttgtcgaagaggcgcgt

SEQ ID NO: 7286 - protein, 70 aa, Homo sapiens
  misc_feature (1)..(1): Wherein Xaa may be any naturally occuring amino acid
XPDMGEPLRVKVDREARRLAGYRYGRQIADDYMTQLGQGEHQVARWLEAENDPRLTEIVTHLNHVVEEAR

SEQ ID NO: 7287 - DNA, 255 bp, Homo sapiens
tcccatcccaggagccacgtatgactcgacagggtgtatcttggccacgacgtgcgcgctcgtgcagccagtccgcgtccgatcttacctggtcgtacaccatgcacccaagcagcaaggcggcagatccttgcatggtgtgtgaagcagcgatggtgcccacttccagcagcacagcctggcacatggagccgcgctcgcctctcacctacttggcagcggaccctgcatgtcaacgatctgatacccacgcgt

SEQ ID NO: 7288 - protein, 78 aa, Homo sapiens
MTRQGVSWPRRARSCSQSASDLTWSYTMHPSSKAADPCMVCEAAMVPTSSSTAWHMEPRSPLTYLAADPACQRSDTHA

SEQ ID NO: 7289 - DNA, 270 bp, Homo sapiens
  misc_feature (1)..(1): Wherein n may be a, c, g or t
  misc_feature (2)..(2): Wherein n may be a, c, g or t
nnccgcggcttgccgggcattccgctggcgatcgtgcgcccggacgcgcatttcacgctgctcgacagcctgggcaagcgcgtgcgtttcctgcgtcaggtgcagcatgagctgggcctgaacaatatcgagccggtgcagagccgcgttgaggagtttccggccgagcccccgttcgacggcgtgatcagccgcgcgttcgcttcgctgcaggatatgctgtcctggtgccatcacctgccggcgaaagggcaggggcgtttccacgcg

SEQ ID NO: 7290 - protein, 90 aa, Homo sapiens
  misc_feature (1)..(1): Wherein Xaa may be any naturally occuring amino acid
XRGLPGIPLAIVRPDAHFTLLDSLGKRVRFLRQVQHELGLNNIEPVQSRVEEFPAEPPFDGVISRAFASLQDMLSWCHHLPAKGQGRFHA

SEQ ID NO: 7291 - DNA, 398 bp, Homo sapiens
gtgcacagtgcgccatcaccccgaagaaccgctgctgtttacaaggacagtcctcagacttagggggattaaagaaagacccgaatggaataaatttagataatcaattattatgaaagtgtaaacagaacttaaattggatgaaaaagaagtttttaaaaatataatagctaacattcataaatgctaaatattttcaagggggacctaggtatttgaaaaaatttaattagattttactatatacaaattttacttttattaatcctgttttaggtcatgcctggtttacttctcagcagcaggcctctgctcatttgaaaagctggcctagttttagggggacagctaaatgctccagtaagacagtacgtctgaaaatcatctagccaggatcc

SEQ ID NO: 7292 - protein, 53 aa, Homo sapiens
MLAIIFLKTSFSSNLSSVYTFIIIDYLNLFHSGLSLIPLSLRTVLVNSSGSSG

SEQ ID NO: 7293 - DNA, 457 bp, Homo sapiens
ttgcaaaaaattacatagaaatataactactctgatgtgtaataatgagtatcagcaataatcacttcttcataaacaaactccatctgcttaaaatataagcataagttttgtgattcaaaaagcaaataaatacataagaacataagaattgccttgaaagtttgtaataacagagcctgtatatctatgtatctaagtacctgaagacgcttttaaccttcacgtgaactaggatagatgccatctatccttgattttgcctcttttaggaacttggccagactttcttgcagacacaatcttctcagaacagaatccaggcaggtgaattttagggatgccaactgtggcttttgacaaattccagatgtcactactgtggctatagtgtggcatctgctaaaagtattccatttctttacaagatatcatcttactggcataatcaacgcgt

SEQ ID NO: 7294 - protein, 55 aa, Homo sapiens
MPHYSHSSDIWNLSKATVGIPKIHLPGFCSEKIVSARKSGQVPKRGKIKDRWHLS

SEQ ID NO: 7295 - DNA, 183 bp, Homo sapiens
  misc_feature (1)..(1): Wherein n may be a, c, g or t
  misc_feature (2)..(2): Wherein n may be a, c, g or t
nncgcaggggaagtatatggaatgtaaaaaggtagcactggggaaaaaagaaaagaaaagaaaaaaaggccaggcatgatgtctcatgcctgtaatcccagtactttggccaaagtaggaccaacctttttgaggccagaagttcgagaccagcctgggcaacgtaacgagaactcattgcta

SEQ ID NO: 7296 - protein, 52 aa, Homo sapiens [sequence omitted]

SEQ ID NO: 7297 - DNA, 297 bp, Homo sapiens
  misc_feature (1)..(1): Wherein n may be a, c, g or t
ntcatgaccaacgctgccggagaagtcacccgtacgccgtggacggccgacgacctggcgcgcttcacccgtctggtgcaggacgccgtgggcttcgacgccagccgtggcgacagcgtcagcgtgatcaacaccgccttcgtcgcggattccttcgacgatgcggtgatcgatatcccgttctactcgcagccgtggttctgggatgtggtcaagcaagtgctgggcgtgctgtttatcctggtgctggtgttcggcgtgctgcgtccggtgctgaacaacctgacccatgccggc

SEQ ID NO: 7298 - protein, 99 aa, Homo sapiens
  misc_feature (1)..(1): Wherein Xaa may be any naturally occuring amino acid
XMTNAAGEVTRTPWTADDLARFTRLVQDAVGFDASRGDSVSVINTAFVADSFDDAVIDIPFYSQPWFWDVVKQVLGVLFILVLVFGVLRPVLNNLTHAG

SEQ ID NO: 7299 - DNA, 150 bp, Homo sapiens
aattctatggaatttatctgtcttacaaagatcagcttgtctgaaatcgtttctgtagaagcccacagatcatcaaagaagaccttaaaactttacgatgccagcggtctacaaatgaaagcaatcgttttattttctgactataagctt

SEQ ID NO: 7300 - protein, 50 aa, Homo sapiens
NSMEFICLTKISLSEIVSVEAHRSSKKTLKLYDASGLQMKAIVLFSDYKL

SEQ ID NO: 7301 - DNA, 375 bp, Homo sapiens
ccgcggttgcttcaatagtatttcaaacacattatgtggaaaaaaaaccaagaacagacaaacaactaaggaagttcgttattagcttttgaacttatcaccaaatattttagtgatggatgatgccttgcatgctttgtcctcgttgactgcaaagaagagaactaccacctacaaaaaagttgctgttcccatactagatgaggacgataatactaatggaaatgggcccaatggcatagacaatccgccagagttgactgggaacgggtttttatttgccaatgccacattaaatcgtgttaagaacagattagaaggcaagaaagcacccgaacagaagcacaataatggaaaagataggagtgagaattc

SEQ ID NO: 7302 - protein, 86 aa, Homo sapiens
MDDALHALSSLTAKKRTTTYKKVAVPILDEDDNTNGNGPNGIDNPPELTGNGFLFANATLNRVKNRLEGKKAPEQKHNNGKDRSEN

SEQ ID NO: 7303 - DNA, 240 bp, Homo sapiens
  misc_feature (1)..(1): Wherein n may be a, c, g or t
nacgcgttcttccttggcgccggcctgcacaagctctgggaagccatgcaggaatgcgtcaacaacgggcttaaatacgaaggcacgctgcccggcgggctgaacgtgcgccgccgcgctgccaagctgcaccgcagcctgcaggagatcggcaagcccaacgtgatcggctcgaccatgagcgccatggaatgggtcaacctgttcgccctggccgtcaacgaagagaacgccgccggc

SEQ ID NO: 7304 - protein, 80 aa, Homo sapiens
  misc_feature (1)..(1): Wherein Xaa may be any naturally occuring amino acid
XAFFLGAGLHKLWEAMQECVNNGLKYEGTLPGGLNVRRRAAKLHRSLQEIGKPNVIGSTMSAMEWVNLFALAVNEENAAG

SEQ ID NO: 7305 - DNA, 264 bp, Homo sapiens
  misc_feature (264)..(264): Wherein n may be a, c, g or t
tgtacagacagagtttgctattctacaacagttatcaagattattttaagtatgaactgcagtattgggctctgtaattggattcaactttgccacctctcaacaacacccgctgccttttcaacaatcctggaagcaaacacatcaccttatgaagaactttgccagtatttgggaccaggacttaggaaatatggcaagaggtgagaatacacattataacacaaaaatactatttctctgacactaaaaagcataatgatn

SEQ ID NO: 7306 - protein, 51 aa, Homo sapiens
MNCSIGLCNWIQLCHLSTTPAAFSTILEANTSPYEELCQYLGPGLRKYGKR

SEQ ID NO: 7307 - DNA, 540 bp, Homo sapiens
tccggattttctcgtgatcgcaccactgtgtataggatgacttcagaaacaccctccacaaatgaacaaacaactttgattactgtaagttcttgtgaatcaaatagctgctcaaacacagtctcaagtgctgtagtttccacggccaccactaccatcaatgggattaccactgaatatactacatggtgccctctttctgctacggaattaacaacggtaagtaaattagagtcagaagaaaaaaccaccctaattacggttacttcttgtgagtctggtgtctgttccgaaactgcttcacctgctatcgtttcgacagccactgctaccgtcaatgatgtcgttacagtttattccacatggagcccacaggctacaaataaactagcggttagttctgacatcgaaaatagtgccagtaaggcttcattcgtttcagaggctgctgagacaaaatccataagcagaaacaacaattttgttccaacttctgggactacttctattgaaacacatacaaccactacaagcaacgcg

SEQ ID NO: 7308 - protein, 180 aa, Homo sapiens
SGFSRDRTTVYRMTSETPSTNEQTTLITVSSCESNSCSNTVSSAVVSTATTTINGITTEYTTWCPLSATELTTVSKLESEEKTTLITVTSCESGVCSETASPAIVSTATATVNDVVTVYSTWSPQATNKLAVSSDIENSASKASFVSEAAETKSISRNNNFVPTSGTTSIETHTTTTSNA

SEQ ID NO: 7309 - DNA, 345 bp, Homo sapiens
tttcactgtaagtatttattagaacaataaaaaaggtaaaacctttttgatctcctttttttggagccagatatctaagaaaatctttgtcaggtcaccagctagccacagagacaacagaacaaaaacttgtgaccatacacaatatggaatacatactttgtgaaaatagcttgtaaagtcacaaacatgtggcttcagccctcaacaagcaaaaaaacagcaatcactgaagaatgggagaaacagatttatagttaccatactataatactcagaatatccagttgtcaacaacaaaaaattacaaaacataccaagaaacagcaaagtatagcccattcc

SEQ ID NO: 7310 - protein, 52 aa, Homo sapiens [sequence omitted]

SEQ ID NO: 7311 - DNA, 255 bp, Homo sapiens
cacgtggaatatgttgatcggcatcaaggcggtgaacgcccaattttagtgagtgtttctgtacaattattagatgatctggatgcgaagaagtttgctctacttgcacagtctgctggtgcagatatccttgaacatgttaaggttcagcgtaataagcctaatcctaaattttttattggctcaggcaaagtcgaagaaattgcagagcaagttcaggagctagaagcgagtctggttatttttgaccacgcg

SEQ ID NO: 7312 - protein, 85 aa, Homo sapiens
HVEYVDRHQGGERPILVSVSVQLLDDLDAKKFALLAQSAGADILEHVKVQRNKPNPKFFIGSGKVEEIAEQVQELEASLVIFDHA

SEQ ID NO: 7313 - DNA, 277 bp, Homo sapiens
accggtaggccttcttaattatgggaagaaagatgtgtgttgatctgaatagatatctaataggtggtatatcagccaatgtgtaaggcataggagatggtgtttagagttgaagagggatctgtcatacgtctggtgcagtgctggtattgggattagatgactaacagctccgtcttcaaggagcttatggcccagtagcagaggcacatgtgtcgcatacatttcaatgggaaaaaaatgcatttatggaagtataaggctcagaagtagcgct

SEQ ID NO: 7314 - protein, 75 aa, Homo sapiens [sequence omitted]

SEQ ID NO: 7315 - DNA, 348 bp, Homo sapiens
atcttctggtcggcggtgatcacgctggtgaccatcggcctgctgtttgccggcaacttcgaagccatgcaaaccatggtcgtgctggccgggctgccgttctcggtggtgctgattttcttcatgttcggtttgcacaaggcgatgcgccaggacgtggccatggagcaggagcaggcacaattggctgaacgtggtcgccgtggtttcagcgagcgcctgaccgcgctggacctgcaaccgagccagggcaccgtgcaacgctttatggacaaacatgtgacgccggcgttggaacaagcggcgactgcgttgcgtgatcaagggctggaagtgcagaccctgctt

SEQ ID NO: 7316 - protein, 116 aa, Homo sapiens
IFWSAVITLVTIGLLFAGNFEAMQTMVVLAGLPFSVVLIFFMFGLHKAMRQDVAMEQEQAQLAERGRRGFSERLTALDLQPSQGTVQRFMDKHVTPALEQAATALRDQGLEVQTLL

SEQ ID NO: 7317 - DNA, 319 bp, Homo sapiens
  misc_feature (1)..(1): Wherein n may be a, c, g or t
ncacgaggggaacaggcggcgtgagctattgggtgtccttcgggggctaggggaactgggccccttcagcaccgatactgccgaacttgacggtgtaaaagaccatgctgcgctcttcaaaggactgcttggtggcaggctcgtccagctgttgcttgagggtggccaacgttaccttgccggaatccaactccaccaccaccaacggacgggacttgcccaaatcctgtctgagcgggttgatatcatccgcggccaacagcggacccgtaaaacccatcaaggtagccaggggcagcgaccggatgagcatgcgcac

SEQ ID NO: 7318 - protein, 88 aa, Homo sapiens
MLIRSLPLATLMGFTGPLLAADDINPLRQDLGKSRPLVVVELDSGKVTLATLKQQLDEPATKQSFEERSMVFYTVKFGSIGAEGAQFP

SEQ ID NO: 7319 - DNA, 241 bp, Homo sapiens
acgcgtaggatcttgcccgttctgccccgcttttctgtgcgatggaccatttctgcgcgcttcgcgttatgatgggaaggatgatccttcgctgccgagtacttcgtgacgactccagaaaagctacccgtgcctgacactgtcgaacgcccgaccgatcgggcaccgcggttggccgccgatgccgagcgcatcgcggcggagttgatcgggcaggatctggggaccgacccgttcgggc

SEQ ID NO: 7320 - protein, 64 aa, Homo sapiens
MRSASAANRGARSVGRSTVSGTGSFSGVVTKYSAAKDHPSHHNAKRAEMVHRTEKRGRTGKILR

SEQ ID NO: 7321 - DNA, 381 bp, Homo sapiens
  misc_feature (1)..(1): Wherein n may be a, c, g or t
  misc_feature (2)..(2): Wherein n may be a, c, g or t
nncctaggcttcctccagttccccgtgggcgttgaatgggacgggaacgtctgcactgtcgtcattcctatcgcgtcgtccagcgacgagcacctcgagattatggcagccctcgcaagaatcttgtctaatcccgaaaccgcccggcaacttcgtgaggcgacatgcaccgacgaggtcctcaacctcctcggttcccagcaggcataatcagcggatctatagaaaggcacacatcatgaaggcattgaggttccacgcacccgaggacgttcgtctcgaagacgtccccgaaccggaatgcaagtccgacgagatcaagatcaaggttcgcaactgctccacctgtggtaccgacggtcaaatccttcacaacggccg

SEQ ID NO: 7322 - protein, 69 aa, Homo sapiens
  misc_feature (1)..(1): Wherein Xaa may be any naturally occuring amino acid
XLGFLQFPVGVEWDGNVCTVVIPIASSSDEHLEIMAALARILSNPETARQLREATCTDEVLNLLGSQQA

SEQ ID NO: 7323 - DNA, 303 bp, Homo sapiens
tgatcagcgtcacagtcaggcagactgtccgcctcgtgggggagctgtgcgtgtgggatctcgcttcccttgagtcatagctattgcgggcccaggcacaccgctggaagcagggcatgctttgctggtccccggtctcaccatcaccctgcaaagtcaccttgacatctggaggcaggactggctatgtaatttgcagaaccctgggcataataaacacgtggggtctcttgttaaaaaaattattgagaatttcaggatggcaacagcagaagagttaaccaagttccttgggcctggccc

SEQ ID NO: 7324 - protein, 54 aa, Homo sapiens
MLCWSPVSPSPCKVTLTSGGRTGYVICRTLGIINTWGLLLKKLLRISGWQQQKS

SEQ ID NO: 7325 - DNA, 332 bp, Homo sapiens
  misc_feature (18)..(18): Wherein n may be a, c, g or t
  misc_feature (75)..(75): Wherein n may be a, c, g or t
  misc_feature (332)..(332): Wherein n may be a, c, g or t
cagctggcgttgctggtngatgttgcacggttggacatagatcgcgccgaagaggcgttgcaacgctgtgcgcanaatgacccgcaggtgacagtggacccactgaacctcgcctatgtgatttacacatccggctccaccggcaaacccaagggcgtggcgatcaatcatgcggcgctgactgagttttccagcatcgccgccgattattcccgtctggtgcctgatgatcgcgtgctgcaattctcgaccctgaacttcgatggcttcgtcgagcagctttacccggcattgacccatggggccaccgtcgtcttgcgtggtgcccaatn

SEQ ID NO: 7326 - protein, 72 aa, Homo sapiens
YVIYTSGSTGKPKGVAINHAALTEFSSIAADYSRLVPDDRVLQFSTLNFDGFVEQLYPALTHGATVVLRGAQ

SEQ ID NO: 7327 - DNA, 231 bp, Homo sapiens
  misc_feature (1)..(1): Wherein n may be a, c, g or t
  misc_feature (2)..(2): Wherein n may be a, c, g or t
  misc_feature (3)..(3): Wherein n may be a, c, g or t
nnncaagtctctgtggtgtgtggttgcatatgtttctgtgaggggatgtgtgtgcatctatgtggatatatgtgtgcatgtctgtgtatgtgcgtctctgtgtgcgtctgtgtctgcatttgtgtgatgctgtgtgctggtaggtgtgtgtgtgtatgtgactgctgtgggtgtgggcccctgtgtgcatgtgtatgggtgtacgtttgcctctgggtgtatgctgtgggc

SEQ ID NO: 7328 - protein, 77 aa, Homo sapiens
  misc_feature (1)..(1): Wherein Xaa may be any naturally occuring amino acid
XQVSVVCGCICFCEGMCVHLCGYMCACLCMCVSVCVCVCICVMLCAGRCVCVCDCCGCGPLCACVWVYVCLWVYAVG

SEQ ID NO: 7329 - DNA, 348 bp, Homo sapiens
  misc_feature (1)..(1): Wherein n may be a, c, g or t
nagggtggagacttattagacgatgatatcgctgatgtcggcaatgtacaatttgttcaagccaacgcagaagctctgccttttccggacaatacctttgattgcattactattgctttcggcttacgtaatgttactgataaatcaaaagcattggcttccatgtaccgcgtgctaaaacctggcggtcgcttgctcgtccttgaattttccaagccagaatccgagatgttgtcgcaggtttacgatcattattctttccgcttgctacccttcatgggtaaagtgattgccaatgatgcagagagctatcgttatttggcagaatcgattcgcatgcaccctgat

SEQ ID NO: 7330 - protein, 116 aa, Homo sapiens
  misc_feature (1)..(1): Wherein Xaa may be any naturally occuring amino acid
XGGDLLDDDIADVGNVQFVQANAEALPFPDNTFDCITIAFGLRNVTDKSKALASMYRVLKPGGRLLVLEFSKPESEMLSQVYDHYSFRLLPFMGKVIANDAESYRYLAESIRMHPD

SEQ ID NO: 7331 - DNA, 405 bp, Homo sapiens
acgcgtacacacaggctcacgtcagcatgactcatgacagccaaaacgtggaaaatgtccatggatggatatgcacaaaccgtagcccatgcacaccatgaaatattgctcagccctaaacaggaatggcgctctgacgccggctgtgatgggatgagccttgaggatgttgtgccccatgcaaggatcagacacagggctgtggcaatgtggctaccccattcgcaggaaatgtccggactaggcacagccacagaagcagagagcgcatcagtgctcacccggggcaggaggacagggcactggggagcggctgctcacatatgtggagcttttgctgattggaaccttctagaactggacagtgctgatggctggcttcacaactctgtgaatgtacttaag

SEQ ID NO: 7332 - protein, 124 aa, Homo sapiens [sequence omitted]

SEQ ID NO: 7333 - DNA, 442 bp, Homo sapiens
  misc_feature (1)..(1): Wherein n may be a, c, g or t
nacgcgttccttaaggatcatcctgaggttctgtacgtagaccttctaattgcggatatgaatggtgtggtgcgcggcaagcgcatcgaacgcaccagcctccacaaggtttacgagaagggcattaacctgcctgcctctctatttgccctggatatcaatggctcaacggtggaaagcaccggcctgggtctggacatcggtgatgctgaccgaatctgttatccaatccccgacaccctgtgcaatgaaccctggcaaaagcgcccaaccgcgcaactgctgatgaccatgcacgaacttgaaggggaaccttttttcgccgatcctcgcgaagtactccgccaagttgtaagcaaatttgacgacctcggtctgaccatctgcgccgcattcgagctggagttctacctgattgaccaggagaacgtgaatggccggc

SEQ ID NO: 7334 - protein, 147 aa, Homo sapiens
  misc_feature (1)..(1): Wherein Xaa may be any naturally occuring amino acid
XAFLKDHPEVLYVDLLIADMNGVVRGKRIERTSLHKVYEKGINLPASLFALDINGSTVESTGLGLDIGDADRICYPIPDTLCNEPWQKRPTAQLLMTMHELEGEPFFADPREVLRQVVSKFDDLGLTICAAFELEFYLIDQENVNGR

SEQ ID NO: 7335 - DNA, 303 bp, Homo sapiens
gctagcagcctagtactgagaggcagtaccttgaagaaaaggatccaagggccagtgtgctaggcccatggagaaggcaggtgtcacacaacagggcagctttgtgtgcttgtgtttaactgttggcctgcagtatgcaaaactaactatacaacgaactccaggaggaggacacatgttagctttttggatgatagaatttgaaagaggattcatcttatcctagtgttttgtgtcttttaaaaatgcttgatgggtatataacagttttaataggtgacaatttttgtgggtgtttcatga

SEQ ID NO: 7336 - protein, 68 aa, Homo sapiens [sequence omitted]

SEQ ID NO: 7337 - DNA, 225 bp, Homo sapiens
  misc_feature (1)..(1): Wherein n may be a, c, g or t
  misc_feature (2)..(2): Wherein n may be a, c, g or t
nncttaagaaattctaatagaatagaaagaggaaataaaagaatgacaaattcagtattccaaggacgtagcttccttgcagaaaaagactttacccgtgcagagttagaataccttattggtctttcagctcacttgaaagatttgaaaaaacgtaacattgagcaccgttaccttgctggtaaaaatattgctctcttgtttgaaaaaacatctactcgtacg

SEQ ID NO: 7338 - protein, 75 aa, Homo sapiens
  misc_feature (1)..(1): Wherein Xaa may be any naturally occuring amino acid
XLRNSNRIERGNKRMTNSVFQGRSFLAEKDFTRAELEYLIGLSAHLKDLKKRNIEHRYLAGKNIALLFEKTSTRT

SEQ ID NO: 7339 - DNA, 417 bp, Homo sapiens
ttgaacaaatttatcgctatgatagggcgtttgagggaggcttttgaaatttcagtagaggagtttgcgcccggttttttagaagagactaaccttttaaaaagctatgaaaaagaagacaattacgaagaaagagagggctttgttaaagagcttttaagtttagtgaaagagcattttaaaactaaccccacgcattctttactggattttttgaatgaaagcgttctggatgcccataatacagaaaacgcgcaaaaagtgagttgcatgagcgtgcatatgagtaaggggttagagtttaagcatgtgtttgtgatcgggttagaagaggggtttttcccacatagggggttcaatcaagaaagcgatttagaagacgacaggcgcttggcttacgtagcgatcactagggct

SEQ ID NO: 7340 - protein, 139 aa, Homo sapiens
LNKFIAMIGRLREAFEISVEEFAPGFLEETNLLKSYEKEDNYEEREGFVKELLSLVKEHFKTNPTHSLLDFLNESVLDAHNTENAQKVSCMSVHMSKGLEFKHVFVIGLEEGFFPHRGFNQESDLEDDRRLAYVAITRA

SEQ ID NO: 7341 - DNA, 461 bp, Homo sapiens
gtgcaccccttcccccggggctggcggctggtcccgagcccactcgactaagccctttggagcctgtgacccactcagccctcctaaaatggggtacatcagcaggtgtcacatccagctcacagcacaaggatgctaagatgtggggaagcagagccaaggggctgagctggaacattccagctgccacccaggctgcccccctggttccaccgcaggcgaagtcaagatccaaagcaaagtcgaggacacagtgaccgtgtttttaaaaccgccatgaaccagggcggaccacgacacccagatgagagccgtgaggacagcactgagaataatcacttagggctttatttactgacacaagaggactccacggtgtagtgttacatttgtaaaaatcaaattaccaaacaatatgagaaccctatctccagttcattctccagggaaagtgggcggct

SEQ ID NO: 7342 - protein, 59 aa, Homo sapiens
MFQLSPLALLPHILASLCCELDVTPADVPHFRRAEWVTGSKGLSRVGSGPAASPGGRGA

SEQ ID NO: 7343 - DNA, 270 bp, Homo sapiens
cggccgccggccgacgatgagcaggtcgaaggtgaagatcacgatcgtgacggcgaaggtcgcgatccagacccaggtgggaacgtccacgctgttgcttcttgggaataaggcgagatcggggtccgcgcagcgcacggacgccagaggtctcttccgctcgccctgaatcgacgaaccagtggcaccgggccccgctcacgcggacgccgtactgacgacaccactgtcagggaatactcccctccaccgcgtcagtgtgtcacgcgt

SEQ ID NO: 7344 - protein, 50 aa, Homo sapiens
MSRSKVKITIVTAKVAIQTQVGTSTLLLLGNKARSGSAQRTDARGLFRSP

SEQ ID NO: 7345 - DNA, 327 bp, Homo sapiens
gaattcaaatctttctaattaaagccccaaatgaactctgtatcattcaggataataacattaacagtctctgaattttcttctgtattgggggaaaaattcattcccaggcatgagccaatgtgggcttctgaaagcctactactaaagaatttgagaacccaacaataatctgatggtgacttcaaggtcagggaggcactgatcttgctttgcagggacacaggctgggctggcaacatcaacagtcactgaaggagggctgtggcatactgtccagagggatcagacaggctatggaaaaatgataacctgccgaataagctt

SEQ ID NO: 7346 - protein, 75 aa, Homo sapiens [sequence omitted]

SEQ ID NO: 7347 - DNA, 298 bp, Homo sapiens
  misc_feature (1)..(1): Wherein n may be a, c, g or t
  misc_feature (2)..(2): Wherein n may be a, c, g or t
nnaccggtgcggcgatgattgcgatgcgcccgaatggagccaaccctgcgacagcggccggcagccagaagccggtcgtgtcgaagatcacatcggcgccgcccttgaacactgcgttcacctgcgcacccaatgcgtccggctggcccagtgcaattgcgtcaaacccttgcgcctgcaacgcctcagcctggtcgggtttacgcaccgccgccaacacctgggcaccccgaattttgcccagggccagcgctgcactgcccacggcaccattggcaccgatcactaacaaacgcgt

SEQ ID NO: 7348 - protein, 55 aa, Homo sapiens
MRPAGPVQLRQTLAPATPQPGRVYAPPPTPGHPEFCPGPALHCPRHHWHRSLTNA

SEQ ID NO: 7349 - DNA, 371 bp, Homo sapiens
  misc_feature (1)..(1): Wherein n may be a, c, g or t
  misc_feature (2)..(2): Wherein n may be a, c, g or t
nnaccggtaccgctgctgcccaaattacgcccggacaccgggcagcccctggacctgagcttcgccaccctgcgcagcgtgtcgccgattcactgccagtacatgcagaacatgggcgtgttgtcgtccatgagtatttcgctgatgaagggcgacaaactctgggggctgatcagctgcggcaaccgcgagccactgctggtacctaacgatttgcgcatggcctgccagaccatcggccaggtgctgtcattgcagatcagtgccatggagaccctggagctgacccgccagcgcgaagaaaaagtcgaagcgctggcgctgctggacctggcgatgaaagcctctgccaatacgtattcgacgggctg

SEQ ID NO: 7350 - protein, 123 aa, Homo sapiens
  misc_feature (1)..(1): Wherein Xaa may be any naturally occuring amino acid
XPVPLLPKLRPDTGQPLDLSFATLRSVSPIHCQYMQNMGVLSSMSISLMKGDKLWGLISCGNREPLLVPNDLRMACQTIGQVLSLQISAMETLELTRQREEKVEALALLDLAMKASANTYSTG

SEQ ID NO: 7351 - DNA, 386 bp, Homo sapiens
atcatcgtcaaggatggggtgcgcatcggtgtcgtcggcgctgtcacccacgacctgccctccttggtctcccccgccggcatttccaacctcaccattggtgatccggttaaggctgtgaatgccgaggccaagcgtctcaagagcgagggcctggccgacgtcgtcgttgccgaataccacgaaggcgctgccgacggttccggggatgccgccagccagggcggcaacttcgcaccggtctacgctgacacgtccaccgatgttgacgtcgtcttcaacggccacactcaccaggtgtactcgtggaaggacaaggcccgccccgtcctgcaggccggctcctacggccagcacctggccaaggtgaacgtggcgtggaattc

SEQ ID NO: 7352 - protein, 128 aa, Homo sapiens
IIVKDGVRIGVVGAVTHDLPSLVSPAGISNLTIGDPVKAVNAEAKRLKSEGLADVVVAEYHEGAADGSGDAASQGGNFAPVYADTSTDVDVVFNGHTHQVYSWKDKARPVLQAGSYGQHLAKVNVAWN

SEQ ID NO: 7353 - DNA, 341 bp, Homo sapiens
actagttagcaaagatattctgagctcagtggctcgttctgtagctaatattgagttgtgcaagagaatcgtgttccctgcaggaagcctgggaacaattcatagttgggccaccaatggttctttgccaatgtcctggctgttgctatgctgaaagcagaaggaagggtgcatgctggtagcaacgcagtgagagtacagtcttcctgcttagacaggttgtctttagagagacccttgcttagctctgctgccatggggtggaaggagggcttatctgtctgacagaggaatggattggctgtactcatgaactccagcctacggtgcttatccatgct

SEQ ID NO: 7354 - protein, 97 aa, Homo sapiens [sequence omitted]

SEQ ID NO: 7355 - DNA, 365 bp, Homo sapiens
gccggctcctgctccacctgcccctggaggcttatccagtgtgggggggggggcttggttttaactgtcctggtgatgcttctctgagtgaaatcttatttttgtaggtctgtactttgttctcaaggcttggagaaatgtgtgtgtccctccctgccactcaacttcaggcaggaatgtggcctggggcctggctgggctggcagggctgccatcccagctggccggaaagagactgcggtttggaatatgcagatggccttgggggctgaagacaggtgcctgagctggctgcagacggggcggctgaggggaggagcaagctagccccaagtccttggcttagcatggcatccttttctaga

SEQ ID NO: 7356 - protein, 60 aa, Homo sapiens
MLSQGLGASLLLPSAAPSAASSGTCLQPPRPSAYSKPQSLSGQLGWQPCQPSQAPGHIPA

SEQ ID NO: 7357 - DNA, 261 bp, Homo sapiens
accggtgagcacggccagtacctgctggccgccaccttcggcaatgtccacggcgtctacaagcccggcaacgtcaagctgcgcccggaggtgctcgccgagggccagaaggtggccgccgcgaagctcggattacgcgagggcgcaaagccgttcgacttcgtcttccacggtggttcgggctcgctgaaatccgagatcgaggacgcgctgcggtacggcgtggtgaagatgaacgtcgacaccgacacccagtacgcg

SEQ ID NO: 7358 - protein, 87 aa, Homo sapiens
TGEHGQYLLAATFGNVHGVYKPGNVKLRPEVLAEGQKVAAAKLGLREGAKPFDFVFHGGSGSLKSEIEDALRYGVVKMNVDTDTQYA

SEQ ID NO: 7359 - DNA, 360 bp, Homo sapiens
cggctgaatccgttcgccgaccgcaccaccgtcgagacgcgcgcacagacgctgatcgcgcggatggcgaagcagtcgcaatcgctgctgggcgcgatggtggtgccgttcaacctgccgccggtgatcggtctgtcggcctcgggcggcttcgaatacgagctggaggcgcttgaggggcaggatttcggcgagctcggacgctatacctacggcgtggtgggggcgggccccaacgccgatcccttcctcgcccgggtgttcaccacctacgacaacaccaacccgtcgatctatctcgacctcgatcgcgccaaggcgcaggagctcggggtcaatatcggcgacgtgttcacgcgt

SEQ ID NO: 7360 - protein, 120 aa, Homo sapiens
RLNPFADRTTVETRAQTLIARMAKQSQSLLGAMVVPFNLPPVIGLSASGGFEYELEALEGQDFGELGRYTYGVVGAGPNADPFLARVFTTYDNTNPSIYLDLDRAKAQELGVNIGDVFTR

SEQ ID NO: 7361 - DNA, 263 bp, Homo sapiens
tcatcgaccgggccggctttctttttcaggtacgtgctggattatctgcgggacaagcaactcgcgctgccggagcacttccccgagaaggagcggctgctgcgcgaggccgagtatttccagctcaccgacttggtcaagctgctgtcgcccaagggtccccaagcagaactctctcaacgacgagggctgccagagcgacctggaggacaacgtctcgcagggtagcagcgacgcgctgctgctgcgcggggcggcggccg

SEQ ID NO: 7362 - protein, 75 aa, Homo sapiens
SSTGPAFFFRYVLDYLRDKQLALPEHFPEKERLLREAEYFQLTDLVKLLSPKGPQAELSQRRGLPERPGGQRLAG

SEQ ID NO: 7363 - DNA, 362 bp, Homo sapiens
agatctacttaatttgtgagggacaagacacatctgtcttaatttatgttgtatctccagggctgccatagagtagatgctcaaaaatactattgaataggaaaagaaatgctttctctttgataactaggggatgacttacaactccctcaaatgcctccagaggcttattcccctttccttcaccaagatcagccctgaatgtggcaaaactttaggaatctgcagggacactgactttgctgacttaagacccttctttactgtcttaggtctgtggagtcacctgtgttctggatttgtcttctggaaacactcagaacatagaaccacgtatttagggctgaggaggattttcatga

SEQ ID NO: 7364 - protein, 76 aa, Homo sapiens
MTYNSLKCLQRLIPLSFTKISPECGKTLGICRDTDFADLRPFFTVLGLWSHLCSGFVFWKHSEHRTTYLGLRRIFM

SEQ ID NO: 7365 - DNA, 566 bp, Homo sapiens
cgccccccaccccacctctttttttctttttttccggtccgtatactgctcggtgagttaggcgtctaaggttcggcctactgctaagagcagtcatcaaggaaagtgcacaacatcgtaccacttattttacgcgagattttaatgtgccgtgtcaccatgcacacctcttcgtgtcgttttttggctttttccaaggcgtctcggcggtttggcggacaccacatgggtagcggcactggcaggaggcaaaagcggccatcaattaggttaaagcaacaatacaacgtaagtaaacgcattgcgtggggccgcaaatgtgttgccgtttggcattgtcgcacagcttaaggacagaaggtgtcaaaacggttacgtcccgtgtgcccgatataccgctaggcttatatattcgttatgtgtcgaatcctaaggccatcacacgttcttcctggacgatgttagcctatcgcttgaccaatcggttctgaagcagttgcagatcgtgggccgtgtgtaaaggtggagcctcgcacaaggccacacaacagactatcctaattcat

SEQ ID NO: 7366 - protein, 72 aa, Homo sapiens
MRLLTLYCCFNLIDGRFCLLPVPLPMWCPPNRRDALEKAKKRHEEVCMVTRHIKISRKISGTMLCTFLDDCS

SEQ ID NO: 7367 - DNA, 347 bp, Homo sapiens
acgcgtgttctcctgcctcggcccggcacttcctggctcagcagagccgccttcctgctgcagaagctgatgtcgccccacctctgcccctcacctgtgtcccttcaagagtcgggacgtttgctaatgtgatgttcagattcacattaaagtgactgattagggctttacttgagcaagcagcatctgtgtgaaaagcaccacaagatgtccccgaagtgggttccatctgtccgcagagctcccggcggccagatcttggggagctgccctgcatgtgctggttggctcatttggctgttgctccatgaaaattccacagagaggcgttttcactgtagattttt

SEQ ID NO: 7368 - protein, 79 aa, Homo sapiens
MQGSSPRSGRRELCGQMEPTSGTSCGAFHTDAACSSKALISHFNVNLNITLANVPTLEGTQVRGRGGATSASAAGRRLC

SEQ ID NO: 7369 - DNA, 549 bp, Homo sapiens
aaattttaataccgtggatatgccgtgcatacattgtggctcctagagggctgcagatccatgttaattatcacctctgttaggaatgtgtggtctagactaatcagggattggcatcatagtgaagcctaaccaactgttgttatatttcttgggcagttaaaatcactaaaggctaatcatacttacgatgagtattattcagaacttcagaactgagaaagtttttggagttttggaagtttataaaatgctcagtcatcctgtttttcttcatatgtgacattcttaaagcatcaacttgttttagtaatggatagtacttgtacaaagatacagacatttaaagaaataaaaggagcctaatccagccagaggtaggcaaccaagaagttaaggcatctagaagccatgttgcttgcagaagagttgagagaaccagagatgtacagttttggtgattgatagactgggtgtctcaaataataagggatatcacacgggaaaaggattagattggtactttgctgcctcacagaacaaggcagg

SEQ ID NO: 7370 - protein, 55 aa, Homo sapiens
MSVSLYKYYPLLKQVDALRMSHMKKNRMTEHFINFQNSKNFLSSEVLNNTHRKYD

SEQ ID NO: 7371 - DNA, 208 bp, Homo sapiens
tgatcatcaactgatgcacatttcggtttatgtcactttttgtctattgtgaatggatgctgctgtgaatatccatgtgcaaatatttgtgtgggcattgtttccagtattttgcggtgcatacctaggagtccagttgctgggtcatacacgaactttttgtttaacactttggggaaccgtcacccttttccaaggcagatgtaca

SEQ ID NO: 7372 - protein, 52 aa, Homo sapiens
MDAAVNIHVQIFVWALFPVFCGAYLGVQLLGHTRTFCLTLWGTVTLFQGRCT

SEQ ID NO: 7373 - DNA, 421 bp, Homo sapiens
gaattccatgcagcgcaggttcacgatgacccccacaagaccggcggcaataccgaggaaaacaagcatgatgaagggccggaacatgtagggtgcggaggcgacagtccggaacccgggcacgtcttggagggcgatccgcaagttttccacgcccgtcatgatggtggagacggcactatccattgctaaccgcctctgcactggtcttttttggcttagcgctgtcggcgaaggcgtggtattcctcgggtacgtgcccaccgtaggcttcggcgatgagctcgggcaccagaatctcctcttttggcccgaagccgatttgtcggtggccagcaggagaactttctcgcacgtttcttgagccagcacaatgttcggggtggagacgacgacggctaccccttctgctttcacggag

SEQ ID NO: 7374 - protein, 67 aa, Homo sapiens
MMVETALSIANRLCTGLFWLSAVGEGVVFLGYVPTVGFGDELGHQNLLFWPEADLSVASRRTFSHVS

SEQ ID NO: 7375 - DNA, 326 bp, Homo sapiens
  misc_feature (302)..(302): Wherein n may be a, c, g or t
  misc_feature (313)..(313): Wherein n may be a, c, g or t
  misc_feature (317)..(317): Wherein n may be a, c, g or t
aaatttgtggtttactcgggaagacagaaagcattttgagagggcatggactacagttaggtgtggtggtggtagagaaatagcttctgcccacaatctgattgcagggcagatcctggtcacctctgcagaactgaaggaacagagataaatgtagcttctcaagaagatgtttttgaggctctgcgtcaatctctgctgctttgaaaccagtgtggccctgaactgggaagaaaccttccttcctctgagtgtggcccttttcaggtctgtgtctctgaagcctaaagcacaaggattcncagacactgtngctngctctgtgt

SEQ ID NO: 7376 - protein, 52 aa, Homo sapiens
  misc_feature (45)..(45): Wherein Xaa may be any naturally occuring amino acid
  misc_feature (50)..(50): Wherein Xaa may be any naturally occuring amino acid
MFLRLCVNLCCFETSVALNWEETFLPLSVALFRSVSLKPKAQGFXDTVAXSV

SEQ ID NO: 7377 - DNA, 660 bp, Homo sapiens
  misc_feature (1)..(1): Wherein n may be a, c, g or t
ngctagctgctgctcctgaggatcggccgcagaatattgctgccgatctgtccgggttgcttgagcccaagcgcgaggtcgatgtgtccggcgaccgcgcgcgttgcggtgggagcatagtgtcggtgcacgctgaccgagaggtccgtgcggagagtactcccgatgatatttgcgggcagctcgatgccgtggccgccatgatggcccttgtctatgggtcgaatgtgactattcccgacgatgccgggaggctcttcgacaagcttcactgaacggtgttcaattggtcccaacggctgcccatgtgggcagccgctctatctcgtcatgggaaggaacccgatgtcgtcacgcaatggtttccaggccaccgacctggctcttatcgcggtctttgcagccctcattgctgtgctagccgtcatcccgccgatgttcatggtgggggcggtcccttttgcccttcagatggttgccgtcatgctggcgccgatggtgctgggaagtatccgtggcggatgcgcggtaggcttgtatatccttgtcggcgcgctggggctgcccgtcttcagcggtgggtctagcgggattggcgtcctggtgggtcccactggtgggtatctatggggatggctgatcggcgctttcgtggcgggt

SEQ ID NO: 7378 - protein, 139 aa, Homo sapiens
MPGGSSTSFTERCSIGPNGCPCGQPLYLVMGRNPMSSRNGFQATDLALIAVFAALIAVLAVIPPMFMVGAVPFALQMVAVMLAPMVLGSIRGGCAVGLYILVGALGLPVFSGGSSGIGVLVGPTGGYLWGWLIGAFVAG

SEQ ID NO: 7379 - DNA, 587 bp, Homo sapiens
  misc_feature (1)..(1): Wherein n may be a, c, g or t
  misc_feature (2)..(2): Wherein n may be a, c, g or t
nnacgcgtgcgtcgcagtattcagtggtacgtcgatcgggctaattcgcggcttgaacgctgggagaccgtcaagaaatttgccattcttgaccacgacctgaccgaggattctcactcagtgacgaccagtctcaaggtgcgtcgtggggtggtggctgaaaaatacgcttacctccttgacgagatgttcgctgacgaaaacgatcaaccgggcgcttcaaagggaagcgacgcttcatgactggagctgtcgtcgtcgatattccactgcgctggtccgatatggatgcgcagggacatgttaataatgttcgtattagcgagcttgtacaggagtcacgaacccaggcgttctacaccaatggcgcccaggagatgcttgacacggggatcgtcgtcgtcagtcaggatgtggagtttttggccccctttggaagttaatggtagccccgttgcgcgtggccgtggggtgctcccagctcggcgcggcccggaccgtccttaattatcgggcctggcaccacgacgttgaggtcgctcgtgcccggggaactatctgccccttcgacttcgcgaccggtcgac

SEQ ID NO: 7380 - protein, 80 aa, Homo sapiens
  misc_feature (1)..(1): Wherein Xaa may be any naturally occuring amino acid
XRVRRSIQWYVDRANSRLERWETVKKFAILDHDLTEDSHSVTTSLKVRRGVVAEKYAYLLDEMFADENDQPGASKGSDAS

SEQ ID NO: 7381 - DNA, 277 bp, Homo sapiens
gctagcttgttggcgcgggccgttttgtcggctcgacccgaccatgacgataccgacaaccgaccgttttgagacttttgaagaagaggggctcgagcttcgccccgcccgcctgcaaaggtgggcgctgactctcgcgccgctcactatcttgggtacgttcgccgcagtgttctggttcggcgtcgacgagacgtggagccgcctgctcgcgcccgtttttgctgcgttcggcgtgtggacagcggtcgcggggaaccgggagatgctgcgcttg

SEQ ID NO: 7382 - protein, 78 aa, Homo sapiens
MTIPTTDRFETFEEEGLELRPARLQRWALTLAPLTILGTFAAVFWFGVDETWSRLLAPVFAAFGVWTAVAGNREMLRL

SEQ ID NO: 7383 - DNA, 303 bp, Homo sapiens
  misc_feature (1)..(1): Wherein n may be a, c, g or t
nacgcgtcaccgggaggtgagcgtgcgccgttcgttgacaccaatgctagcgcctcgtggatggggatgtctctcaccacgactcccgaggacgtgttgcgaagcgtctacgagggggtggcactgtcgttggccgactgcgttgcacacttggcgatgaccggtgatctcgtcgtatcaggcggcggattcaggtccgatctcgtctgtgagattctggccgatgtcaccgggcagtgtgtagtgcgtcagagtgctccggaggctggggcccgcggcgcggcggttcttgcgttggtttcg

SEQ ID NO: 7384 - protein, 101 aa, Homo sapiens
  misc_feature (1)..(1): Wherein Xaa may be any naturally occuring amino acid
XASPGGERAPFVDTNASASWMGMSLTTTPEDVLRSVYEGVALSLADCVAHLAMTGDLVVSGGGFRSDLVCEILADVTGQCVVRQSAPEAGARGAAVLALVS

SEQ ID NO: 7385 - DNA, 327 bp, Homo sapiens
gccggcgtcgacatcccgcgcttctgctaccatagccgactctccatcgctggaaactgccgcatgtgtctcgtcgaggtcgagaagtcgcccaagcccgtcgcttcctgtgccatgcccgcgctcccagggatgaagattaagacaaacaccccagtggcaaagaaggcaagggagggtgtcatggagttcttgctgatgaaccatccactcgactgcccaatctgtgatcagggcggcgagtgcgacctccaggatcagtctatggcatttggtgctgaccgcggccggttcactgagatgaagcgttcagttgtggacaagaat

SEQ ID NO: 7386 - protein, 109 aa, Homo sapiens
AGVDIPRFCYHSRLSIAGNCRMCLVEVEKSPKPVASCAMPALPGMKIKTNTPVAKKAREGVMEFLLMNHPLDCPICDQGGECDLQDQSMAFGADRGRFTEMKRSVVDKN

SEQ ID NO: 7387 - DNA, 156 bp, Homo sapiens
  misc_feature (1)..(1): Wherein n may be a, c, g or t
  misc_feature (82)..(82): Wherein n may be a, c, g or t
  misc_feature (83)..(83): Wherein n may be a, c, g or t
  misc_feature (112)..(112): Wherein n may be a, c, g or t
ncctagggaattgaactttatgtcacgggattggacctgggaataaaattaatctccagaagaatctcctcctctccgagtnntcctagttcttttctgcccattccaagcnccctgactaactttctccattcagagcatgtaaccacaaatgaa

SEQ ID NO: 7388 - protein, 50 aa, Homo sapiens
  misc_feature (26)..(26): Wherein Xaa may be any naturally occuring amino acid
  misc_feature (36)..(36): Wherein Xaa may be any naturally occuring amino acid
GIELYVTGLDLGIKLISRRISSSPSXPSSFLPIPSXLTNFLHSEHVTTNE

SEQ ID NO: 7389 - DNA, 358 bp, Homo sapiens
  misc_feature (316)..(316): Wherein n may be a, c, g or t
tcatgagaaagttattattattttatctttttatgcccgttacaaagaagctcattaactgtttggtggagttgaaacaactgttgattcaaattctcatgctcatgcttgtgtggcacttaaaagtggtgatcacagaggcaactcagggtcactaaatacggggcaagttcagcttttctagttgaagtagattaggaagatgcatttttttttaaacctctgcatttggggaaaaaaaataactttcacaaatgtttttgagtgttgtctatgtgccaagtattgtgccaagtgctggaattaaaaagaaaangatttgtcacagtgaagaatggaattagggatcaaagtatta

SEQ ID NO: 7390 - protein, 51 aa, Homo sapiens
MRKLLLFYLFMPVTKKLINCLVELKQLLIQILMLMLVWHLKVVITEATQGH

SEQ ID NO: 7391 - DNA, 282 bp, Homo sapiens
  misc_feature (1)..(1): Wherein n may be a, c, g or t
  misc_feature (274)..(274): Wherein n may be a, c, g or t
  misc_feature (280)..(280): Wherein n may be a, c, g or t
  misc_feature (282)..(282): Wherein n may be a, c, g or t
nggttaaaagggggttagtctcagagtaaagcttctaagtgacctaacagatccatcaggagaggagggacccgatatggaagcactaatggagaagcaccttagagaaggggctcaggtggaacaaggggaagcagcgggagatgggcagggtagaccatggggcagagagagcaagggaaaggcaggcaggctgaaggtcagggaggaggcttcgatggggctgtggagcagtaacccctgtccctccgcttgcccaggtctctttcttggncccccncn

SEQ ID NO: 7392 - protein, 68 aa, Homo sapiens [sequence omitted]

SEQ ID NO: 7393 - DNA, 477 bp, Homo sapiens
  misc_feature (1)..(1): Wherein n may be a, c, g or t
nccgcggcctcggcgctgtcttcgctcgactcccgcggctcgggcctcggtaccggctcccgacgcgatcctaccggccccgcgcaggctccgcccaaccccgcagcagccatgggcatcaaatttttagaagttatcaaaccattctgtgcagttctaccagaaattcagaaaccggaaaggaaaatccagtttagagagaaggttctgtggactgctataacgctcttcattttcttagtgtgttgtcagatcccactgtttggaatcatgtcatcagattctgcagatcctttctactggatgagagttattctggcttccaatagaggaactttaatggaattgggtatctccccaattgtaacatctggtttgattatgcagttgttagctggagccaaaatcattgaagttggagatacaccgaaagatagagctttattcaatggagcccagaaactgtttggtatgatc

SEQ ID NO: 7394 - protein, 122 aa, Homo sapiens
MGIKFLEVIKPFCAVLPEIQKPERKIQFREKVLWTAITLFIFLVCCQIPLFGIMSSDSADPFYWMRVILASNRGTLMELGISPIVTSGLIMQLLAGAKIIEVGDTPKDRALFNGAQKLFGMI

SEQ ID NO: 7395 - DNA, 198 bp, Homo sapiens
gtaccacggtcgatacgatgggcttcaactgctctagctgtagtgtgtctcacatatggcgctgcatacactgatatgtcgtggagaactgctcgagaagtgtacggaaacgctactgaggaagaaaaacacagcccgtggttcaagtgcaaaacttttgggcctgtggctttaggggttttgcctgtgatcctcgcg

SEQ ID NO: 7396 - protein, 66 aa, Homo sapiens
VPRSIRWASTALAVVCLTYGAAYTDMSWRTAREVYGNATEEEKHSPWFKCKTFGPVALGVLPVILA

SEQ ID NO: 7397 - DNA, 273 bp, Homo sapiens
acgcgtaccatggctgagcagaaagctttcttgctctggtggcgtaaaacaatcaaaacagaaagcctttataattcctgtcctcctcccctgcaaatatttgcatgggttcatttagttttccctctgcaacattcctttttgtagtccatctatccagccaaacccatcaggggtggtcagtgggaaggcacagctccccccatcccatcttgatgcggggctcaggtattgtctacctgagaagagtctcaaacaaaccccagacaattg

SEQ ID NO: 7398 - protein, 56 aa, Homo sapiens [sequence omitted]

SEQ ID NO: 7399 - DNA, 159 bp, Homo sapiens
accacgaatatgaccgttataacaaaaatcaactggacaagtaaatcatttttgaaaggtgcaattgagaaaggatctgttgagggtcagaaggtttctgtcgattacatgctatccgagttaagagacattattagcaaggcaaaaagcaaaaaaccg

SEQ ID NO: 7400 - protein, 53 aa, Homo sapiens
TTNMTVITKINWTSKSFLKGAIEKGSVEGQKVSVDYMLSELRDIISKAKSKKP

SEQ ID NO: 7401 - DNA, 270 bp, Homo sapiens
  misc_feature (55)..(55): Wherein n may be a, c, g or t
  misc_feature (73)..(73): Wherein n may be a, c, g or t
  misc_feature (163)..(163): Wherein n may be a, c, g or t
tacacactgatgagcaacaagcaatactatgatgctatctacagcggagagatcntgcacaccgaagcattangcagtgtagtgcagcctgacaagtataagccagtaccagatgaacccccaaaccccaccaacattgaggagatgctaaagagggtgcggnaaactgacaaagagctggaggaggtgaacctcaataacatccaggacatcccgatacccgtgctaagcgacttgttgtgaagaatgaagactaatacctatgtccgg

SEQ ID NO: 7402 - protein, 80 aa, Homo sapiens
  misc_feature (19)..(19): Wherein Xaa may be any naturally occuring amino acid
  misc_feature (25)..(25): Wherein Xaa may be any naturally occuring amino acid
  misc_feature (55)..(55): Wherein Xaa may be any naturally occuring amino acid
YTLMSNKQYYDAIYSGEIXHTEALXSVVQPDKYKPVPDEPPNPTNIEEMLKRVRXTDKELEEVNLNNIQDIPIPVLSDLL

SEQ ID NO: 7403 - DNA, 355 bp, Homo sapiens
  misc_feature (1)..(1): Wherein n may be a, c, g or t
nggcagtacctgctgcgccgagggcgtcttgtgatcccgaagaccgcccccaactgccgcccccgctgcttctgacatcattcggccatggttccccatctgatcaccgccctgaacggccccatcaacgagctggaggcccgcatcctggagtccatgccggcgaccgagcgctgtttcaggctggaatggatggagcacacgcttttgttctacgcgtcggtggacctgcgcaatgccggcttcaagctggcgccggtggacaccaacctcttccccagcggcttcaaccacctgaccgacgagatgctgccgcaggcggtgcaggcggccatggcagcgatcgagaagatct

SEQ ID NO: 7404 - protein, 89 aa, Homo sapiens
MVPHLITALNGPINELEARILESMPATERCFRLEWMEHTLLFYASVDLRNAGFKLAPVDTNLFPSGFNHLTDEMLPQAVQAAMAAIEKI

SEQ ID NO: 7405 - DNA, 254 bp, Homo sapiens
tcgacgttgtctgtgaagatggcgacggcaggaaaacagtttccaatggtgagcgtctttgttgacccatcaagaaagaaggacaaagtggtggcagaagatggcagaaactgcgaaaactcgctacccatcgaccacagtgtaatggtgggcatccgtgcggtaggcgaaagactcagggagggtgtagacgaagacgcaaactcttatctgtgtcttgattacgacgtctatttgacccatgagccgggctc

SEQ ID NO: 7406 - protein, 84 aa, Homo sapiens
STLSVKMATAGKQFPMVSVFVDPSRKKDKVVAEDGRNCENSLPIDHSVMVGIRAVGERLREGVDEDANSYLCLDYDVYLTHEPG

SEQ ID NO: 7407 - DNA, 425 bp, Homo sapiens
  misc_feature (1)..(1): Wherein n may be a, c, g or t
  misc_feature (199)..(199): Wherein n may be a, c, g or t
nctcactcgggacatcattgcgcagcttcattgattcttcgcttctgtcgaacgccccagccgacgtgactcactcgtctgctcagctctctaagcacacaaggccccatagtgccactactgtcatcccccgacgatgacgacgtggggcactcatggcccgatactgcgaagcacttcggaacttctgaggactgcngcagacggtgcgcctataaggctcgcaaggagcgggagggggaacgatcgagcgcatgaacctcctcggtttgacgacgtcgacaacgccagtggtgacgacgcagcccgaaatcgacggccgctgtcctcgctgcgggcgtccggtccccattcacaagagaggcgggcgacgtcgtgtttggtattctgatgctcgccgagcggtccggctcgggattgctagc

SEQ ID NO: 7408 - protein, 62 aa, Homo sapiens
  misc_feature (44)..(44): Wherein Xaa may be any naturally occuring amino acid
LTRLLSSLSTQGPIVPLLSSPDDDDVGHSWPDTAKHFGTSEDCXRRCAYKARKEREGERSSA

SEQ ID NO: 7409 - DNA, 342 bp, Homo sapiens
gctagcgcctcgccgcgcattcacggattcttcgccgtcgaaatcggcttctggccacgtaaacccagcctcaggcgcaacaaccttcaggcccaggccaaaggggccggcgaaggatcttttaacgtgggcgaacatatccacccactcagacgaggagatgaactcttctacctcccgctcatccacctcgtggaaacgccgcgcggacatacgcatccagtgattctcgccatgggcagagtagcaataagcagcaaaggttttaccctgcgcatggcctgcgcccgcagatccatcagccagcgccagaagcccgcaaaattttccgcctcggcgcgc

SEQ ID NO: 7410 - protein, 73 aa, Homo sapiens
MRMSARRFHEVDEREVEEFISSSEWVDMFAHVKRSFAGPFGLGLKVVAPEAGFTWPEADFDGEESVNARRGAS

SEQ ID NO: 7411 - DNA, 594 bp, Homo sapiens
  misc_feature (1)..(1): Wherein n may be a, c, g or t
ntgagtacgcttcgacgtacaccactggcggccgtacacgagagcctcggagcatccttcaccgatttcgcgggctggaacatgcccgtgcggtactcctccgacctggccgaacaccacgccgtccgcaagaatgccggcatcttcgacctatcccatatgggagagatcaggatctctggccctgattctggagctgccctcgattacgccttggccggcaagctctccgctgtggcggaaggccgcgcgaagtattccctcctactcacagacgaggggggtgtcgttgatgacctcgtgacctaccacctgcctgacggtgactacctcgtcgttgccaatgctgccaatgccgaaactgatctcgcagagttcaccaagcgctgtgcacggttcgacgtcaccgtcacagacgagtcagcccagaccgccctcgtcgccgtgcaaggccccaaagctgtgacgatcgtgctggcggccctccagaaggctaataccaccctcgactccgacgaggtccgcgacgtcaagtactaccgttgcctcaccggagaactggatggtttccccgtgctcgtcgctcgcaccggt

SEQ ID NO: 7412 - protein, 198 aa, Homo sapiens
  misc_feature (1)..(1): Wherein Xaa may be any naturally occuring amino acid
XSTLRRTPLAAVHESLGASFTDFAGWNMPVRYSSDLAEHHAVRKNAGIFDLSHMGEIRISGPDSGAALDYALAGKLSAVAEGRAKYSLLLTDEGGVVDDLVTYHLPDGDYLVVANAANAETDLAEFTKRCARFDVTVTDESAQTALVAVQGPKAVTIVLAALQKANTTLDSDEVRDVKYYRCLTGELDGFPVLVARTG

SEQ ID NO: 7413 - DNA, 257 bp, Homo sapiens
  misc_feature (243)..(243): Wherein n may be a, c, g or t
  misc_feature (244)..(244): Wherein n may be a, c, g or t
  misc_feature (246)..(246): Wherein n may be a, c, g or t
  misc_feature (247)..(247): Wherein n may be a, c, g or t
  misc_feature (248)..(248): Wherein n may be a, c, g or t
  misc_feature (249)..(249): Wherein n may be a, c, g or t
  misc_feature (250)..(250): Wherein n may be a, c, g or t
  misc_feature (252)..(252): Wherein n may be a, c, g or t
  misc_feature (253)..(253): Wherein n may be a, c, g or t
  misc_feature (254)..(254): Wherein n may be a, c, g or t
  misc_feature (255)..(255): Wherein n may be a, c, g or t
  misc_feature (256)..(256): Wherein n may be a, c, g or t
acgcgtcatactcaacgttcttctgtattttatttttcctaattacatcttttctaggaaggacttgtaaacttttcataaaatcgtcaagtgccacttccaacaccaaagccactgcctggaaccttagcagggaggttgccttcccttccccctcgccttccaggttaaaccagggactgggcgatgtttcaggagaggaaaacatccaaaaggcaggtcaaaccacacatgacaatgcanncnnnnncnnnnnc

SEQ ID NO: 7414 - protein, 69 aa, Homo sapiens
MFSSPETSPSPWFNLEGEGEGKATSLLRFQAVALVLEVALDDFMKSLQVLPRKDVIRKNKIQKNVEYDA

SEQ ID NO: 7415 - DNA, 339 bp, Homo sapiens
atccacaagttagtcatagccaatgctctcattgaagacgaaggtgaatatgtgtttacaccagatgcctacaatgttcctttgtctgccaaagttcacgtcatcgaccctcccaagatcatccttgacggtctggatgctgataacaccgtgacagtgattgccggaagcaagcttcgtctggagattcccgtcacaggggaaccacctcccaaagccatctggagcagagcagataaggctatcatggagggcagtggccggataagggcagaatcctaccccgacaacagcacgctggtaattgaagtggcagagagagatgattgtggtgtgtac

SEQ ID NO: 7416 - protein, 113 aa, Homo sapiens
IHKLVIANALIEDEGEYVFTPDAYNVPLSAKVHVIDPPKIILDGLDADNTVTVIAGSKLRLEIPVTGEPPPKAIWSRADKAIMEGSGRIRAESYPDNSTLVIEVAERDDCGVY

SEQ ID NO: 7417 - DNA, 300 bp, Homo sapiens
  misc_feature (1)..(1): Wherein n may be a, c, g or t
nattgaaaccctaggctgcattttgtttggagtgttctgctcccgttgtttggtaatggaaaattagagaacactagtcatatttcgaagaaagggaagaaaaccaacaataaaaaggttcagaattcaattcaatttccagagttttggaaaatggccgtggacgaatcatttttcaatgagaaagcttctagtgaaagaaaatatttaggctttctaataatcgacgcggctttcaaggcagttcctggctcgtacatcgggttttgcttcagccaaaacgttatgagaacattgatc

SEQ ID NO: 7418 - protein, 98 aa, Homo sapiens
NPRLHFVWSVLLPLFGNGKLENTSHISKKGKKTNNKKVQNSIQFPEFWKMAVDESFFNEKASSERKYLGFLIIDAAFKAVPGSYIGFCFSQNVMRTLI

SEQ ID NO: 7419 - DNA, 609 bp, Homo sapiens
  misc_feature (1)..(1): Wherein n may be a, c, g or t
  misc_feature (2)..(2): Wherein n may be a, c, g or t
nnacgcgttacccaatatagcaaagtttcgcgcaaaaaaaaaaataaaaaacaattacaaacaaaaagaaaaaaaaggaaataatagaagatctaactgaagcgaaggccaaaactcttctcacttgacgtaatagccgatacaaaatctagagcagcaacttttctctttcttcactaaagctgctacgaaagtatagaaaaatcaaacgctcagaacttagctctatttcaaggtaccatatatatttccttataactgatggcaagacgcagattaccagacagaccaccaaatggaataggagccggtgaacggccgagactggtacctaggcctattaacgtacaagactcggtgaaccgactaacgaaaccgttcagggtcccgtacaagaacacgcccatcccgcccgctgctggtagaatcgcccccgggtctgataatatcgtaggaggaaggagcttgaggaaaagatcagcgactgtatgttattccggcttggatataaatgcggacgaagcagagtacaacagccaagacataagtttttctcagttgactaaacgacggaaggatgctcttagtgctcaaaggttggccaaggat

SEQ ID NO: 7420 - protein, 116 aa, Homo sapiens
MARRRLPDRPPNGIGAGERPRLVPRPINVQDSVNRLTKPFRVPYKNTPIPPAAGRIAPGSDNIVGGRSLRKRSATVCYSGLDINADEAEYNSQDISFSQLTKRRKDALSAQRLAKD

SEQ ID NO: 7421 - DNA, 355 bp, Homo sapiens
  misc_feature (1)..(1): Wherein n may be a, c, g or t
  misc_feature (91)..(91): Wherein n may be a, c, g or t
nggacgactcagagcccggtacctacctcggcacggatcccgaggggtcagcccacgccggagccgccgtcaccctcaaaatatcgaaggngcccgaagccggcccctaaaccgacctacgcccctccgcagccgccacaaaaccagccaaacaaccccggcaatgagcagcccggtggccagcagaacaacccacccggcgataataccgcgggtaataatggcggcaccgagggtaataatggcggcgattacgggggtaacaccggaggtggtcaacagaacccgcccggaacgacgggacctcgctgacatgagagccgccatgaagacgggcttcacagcggtcgctagc

SEQ ID NO: 7422 - protein, 103 aa, Homo sapiens
  misc_feature (1)..(1): Wherein Xaa may be any naturally occuring amino acid
  misc_feature (31)..(31): Wherein Xaa may be any naturally occuring amino acid
XTTQSPVPTSARIPRGQPTPEPPSPSKYRRXPKPAPKPTYAPPQPPQNQPNNPGNEQPGGQQNNPPGDNTAGNNGGTEGNNGGDYGGNTGGGQQNPPGTTGPR

SEQ ID NO: 7423 - DNA, 300 bp, Homo sapiens
  misc_feature (1)..(1): Wherein n may be a, c, g or t
ngaattcgaccaacacataacaaataaaaaatatacagtattatgggtaaaataattggaatagatttaggaacgaccaactcatgcgtttcagtaatggaaggtaacgagccggttgtgattacaaatgcagaaggaagacgtaccacgccatctgtcattgcttttgtagatggtggtgaaataaaagttggtgatcctgcaaaacgtcaggctgtaaccaacccaactaaaaccgtttattctatcaaacgttttatgggtaacaaatattctgaatcaaaaaatgaagcagaacgc

SEQ ID NO: 7424 - protein, 86 aa, Homo sapiens
MGKIIGIDLGTTNSCVSVMEGNEPVVITNAEGRRTTPSVIAFVDGGEIKVGDPAKRQAVTNPTKTVYSIKRFMGNKYSESKNEAER

SEQ ID NO: 7425 - DNA, 303 bp, Homo sapiens
tctagaaaagccagttatattattcctgaaatctcagcagtcatggcaaactttcacggcagatgcctttgttatttagggtcaaaccacagccagagttaattctcattctgtcctcctggtcacagtgggggtgctgtggcaaacctgaggccccatctcccccacctgtctgtccattggaatattcctggtctcccatgtcaaatgccaagctccaggtgggatttgacctaacatctctttcatgtcaatgctccccctgcagaatctgcaggctgaccttgcaggaggtaggggccc

SEQ ID NO: 7426 - protein, 80 aa, Homo sapiens [sequence omitted]

SEQ ID NO: 7427 - DNA, 588 bp, Homo sapiens
  misc_feature (1)..(1): Wherein n may be a, c, g or t
  misc_feature (2)..(2): Wherein n may be a, c, g or t
nngtgcacccccgtcattgctggtcaggaggcggaagctgctccggtgttgttagctcagtgtgccgatgccggcgtcaagcctttgttggagggtccagactggggtttattggatcgacgtagcgccatcggaggtcaggtccttcgcatccagacggcatctgggcctctaggagagttgttcttgccggtttttggcgagcatatggcccacaatgctgctcaggcggtggcagctgtggaagctctcactgggccgcttaagcccgcaattattgagcaggggctggcagctgtgcaggctccggctcgccttgaagtagtgcgacgttctccgctagttatcctcgataccttccacaatccgcacggcgccgcctccgctatagcgggagtgcgcgagtcgttcgaggttgagcccttaatcgccgttgtggcagcgatggctgacaaagacgtcgacggtgtgctggcggtgctttcggatacggtgagctacctcgtcgtcacctcaatgccagatcttccgcgcgctctgagcgttgacgagctagctgacagggcgtcagcccattgggattatgat

SEQ ID NO: 7428 - protein, 196 aa, Homo sapiens
  misc_feature (1)..(1): Wherein Xaa may be any naturally occuring amino acid
XCTPVIAGQEAEAAPVLLAQCADAGVKPLLEGPDWGLLDRRSAIGGQVLRIQTASGPLGELFLPVFGEHMAHNAAQAVAAVEALTGPLKPAIIEQGLAAVQAPARLEVVRRSPLVILDTFHNPHGAASAIAGVRESFEVEPLIAVVAAMADKDVDGVLAVLSDTVSYLVVTSMPDLPRALSVDELADRASAHWDYD

SEQ ID NO: 7429 - DNA, 319 bp, Homo sapiens
  misc_feature (1)..(1): Wherein n may be a, c, g or t
  misc_feature (319)..(319): Wherein n may be a, c, g or t
ntgctcaactcgatctcagccaccacctcgtcgaactgactggttgcatactggagagactgctccgttacaggaacaacccggagtgcgcgcctaaagcggaattctgcagacaattggtctgtatcctgccccggcttccagtttctaatgatcaaatcatccatagagccaggcacaggcatcacgtcagtgtcgcccgtctcaatctgcttgcggatgttgggcatgtcgttgctacccggggcaagctcattgatatagatcagcaagccagcgatgatgggtacgcccttggcttgatggcgccttagccagn

SEQ ID NO: 7430 - protein, 76 aa, Homo sapiens
MPNIRKQIETGDTDVMPVPGSMDDLIIRNWKPGQDTDQLSAEFRFRRALRVVPVTEQSLQYATSQFDEVVAEIELS

SEQ ID NO: 7431 - DNA, 312 bp, Homo sapiens
  misc_feature (1)..(1): Wherein n may be a, c, g or t
  misc_feature (2)..(2): Wherein n may be a, c, g or t
  misc_feature (3)..(3): Wherein n may be a, c, g or t
  misc_feature (4)..(4): Wherein n may be a, c, g or t
  misc_feature (5)..(5): Wherein n may be a, c, g or t
  misc_feature (6)..(6): Wherein n may be a, c, g or t
  misc_feature (9)..(9): Wherein n may be a, c, g or t
  misc_feature (12)..(12): Wherein n may be a, c, g or t
  misc_feature (13)..(13): Wherein n may be a, c, g or t
nnnnnnggnggnngggaatcttggagaaagcccaagggtatcgattgtaacatgcgtagacgtttcaagggtcaagttcctatgcccaagatcggttacggttctgccaagaagacccgtgatctcttgcccaatggtttccgcaagttcgtcgtctccaacgtccgtgaactcaaccttttgttgatgcacaaccgttcttatgctgctgagatcgcccacaacgtttcctccaagaagcgtgttgctctcctcgaacgtgctgctcaactcaacgtcaaggttatcaacgctggtgctcgtcttagatct

SEQ ID NO: 7432 - protein, 104 aa, Homo sapiens
  misc_feature (1)..(1): Wherein Xaa may be any naturally occuring amino acid
  misc_feature (2)..(2): Wherein Xaa may be any naturally occuring amino acid
  misc_feature (5)..(5): Wherein Xaa may be any naturally occuring amino acid
XXGGXESWRKPKGIDCNMRRRFKGQVPMPKIGYGSAKKTRDLLPNGFRKFVVSNVRELNLLLMHNRSYAAEIAHNVSSKKRVALLERAAQLNVKVINAGARLRS

SEQ ID NO: 7433 - DNA, 446 bp, Homo sapiens
tgatcataaaccacgcgtcaccgaggggatgtggcacacctacctgcgcgtcgcagatgccgcacaggcacgggtcaggggcgttcgcggcgccagctggcacaacttcgcgaccggtgacaaggggtccttcgacgccaacgagcttgccgtaactcctgatactgacaccgtcatccagggagtcgggcccgccctagccctcctcgattcagcgtggggacgccagatccacgtggagacaacagggtgtcccagtgccgtggtctggaatccacgctcctcgtcgacacatgccgataacccgacagcccaggcatggcgcgatttcgtatgcgtcgagaccggggcctgcaaggacaatgcggtcattgttgccccacacagcgacctcaccatgtccacacggattagcgtcgaaacgttgtgatcgctgcatggatatt

SEQ ID NO: 7434 - protein, 133 aa, Homo sapiens
MWHTYLRVADAAQARVRGVRGASWHNFATGDKGSFDANELAVTPDTDTVIQGVGPALALLDSAWGRQIHVETTGCPSAVVWNPRSSSTHADNPTAQAWRDFVCVETGACKDNAVIVAPHSDLTMSTRISVETL

SEQ ID NO: 7435 - DNA, 303 bp, Homo sapiens
gaattcaggaaggtaatacaagctgagtatagagaaaggttgccgcgcaattatgaattaaagcattggaaaaagccttctaaaataatgataggatccatacttcgtttattagagactaacactgtaagcgctcttgattctgtctttgagaagtacgaaaaggaaatgaaccaaatgacgcatggcgataataatgaggttaaaagaatatattctaagaaggaacgtttgcttgaaataatcctcacaaagataaagaagaagctaagacaggccaaatttccctctaggatatcggaa

SEQ ID NO: 7436 - protein, 101 aa, Homo sapiens
EFRKVIQAEYRERLPRNYELKHWKKPSKIMIGSILRLLETNTVSALDSVFEKYEKEMNQMTHGDNNEVKRIYSKKERLLEIILTKIKKKLRQAKFPSRISE

SEQ ID NO: 7437 - DNA, 272 bp, Homo sapiens
gcgtttaggcaaaaagtgcaaaagaagatattatcgttcactcaagagagtggtgagtttttgtatattctaagatcgaaagccaacctgcaatttcaggaacgtgaaagaaaggaacgtgaaagaaaagagcgtgaaaaagctgctgcagaagagttccaaaggcagcaggagctattactacaacaggaagaagaagacgaagaagacgtatcctacacctctacttcgaccatcaccacaaccactaccatgacattgggatgaaattt

SEQ ID NO: 7438 - protein, 88 aa, Homo sapiens
AFRQKVQKKILSFTQESGEFLYILRSKANLQFQERERKERERKEREKAAAEEFQRQQELLLQQEEEDEEDVSYTSTSTITTTTTMTLG

SEQ ID NO: 7439 - DNA, 267 bp, Homo sapiens
acgcgttgcagcaactgcgccgcgagtgcacgcagttgttcggggttcagttggtcgaggtcggggatcgaagtcatgtcgccgatcttgccagatcagcgtaaacaggacgacaggctgatcggacaattgcgctgccggatgggggcatggctcggttcaaaggatggaaatggcgtttgcggggccaactctctgccatggcaagcccagtatcaaggcgtgtagctggtcggggctcaactccatttgtgaaccggggcgcgt

SEQ ID NO: 7440 - protein, 50 aa, Homo sapiens
MSPILPDQRKQDDRLIGQLRCRMGAWLGSKDGNGVCGANSLPWQAQYQGV

SEQ ID NO: 7441 - DNA, 325 bp, Homo sapiens
acgcgtgaaggatttatcagtccttctacccaactttcattattcaaacaatgttgaacttgccactatgagtttccaaactgtctgacttgtggagagccctgtcttaattagaaggtcctcatcccacttttccttgctgcctgcagagattttccttctgagagtgtttgtagacatgaaattgtgggtgtgcttatttctcccctcacttggatgatcgcccatgctggttcatttgagtcccaacacatttgcacctgctcatagatttttgcattttcaatttgcaggagcagagaaacagggaccctaaaggagtttg

SEQ ID NO: 7442 - protein, 62 aa, Homo sapiens [sequence omitted]

SEQ ID NO: 7443 - DNA, 292 bp, Homo sapiens
ggatcctctatctcagccattggagtagtagatgctacctatatctgctatttctatagagttctgtttactttttattagccaatcttatcattgctccaatcctttgttataactataattctttttttttttttttttcaaaaaatgggtctccccctatcacccaggttggattgcagtgttttaatcctatctcattggagccttttccccttgggtttaaaaaaaactcccacctcagccccccagggagttggggttacgggcttgcttcaccacacctattctg

SEQ ID NO: 7444 - protein, 70 aa, Homo sapiens
PILSLLQSFVITIILFFFFFQKMGLPLSPRLDCSVLILSHWSLFPLGLKKTPTSAPQGVGVTGLLHHTYS

SEQ ID NO: 7445 - DNA, 530 bp, Homo sapiens
  misc_feature (254)..(254): Wherein n may be a, c, g or t
  misc_feature (264)..(264): Wherein n may be a, c, g or t
  misc_feature (335)..(335): Wherein n may be a, c, g or t
  misc_feature (505)..(505): Wherein n may be a, c, g or t
tgatcatttgtttttccaagaagttgttcagagtcagttagaaagcaaagaaaaaatgggagagccataaacacgaaaaaaatggaagagccataaacatgaaaaaaaaaaggaagaacctcaccaacctgcttcgtggacagcctgtcacactagagtgggctttggcagcagagaggagtgaataaagaaaggacattgcttcccgtgcaggacacagccagccagaggtctctgagcatgcagcccccctntccagtctgnccagtgatttcctcctgctcgttttgtccagtgcccccttgtttcttattaatgcacatggacacatgttntattctgccatttctgagcaagtggtgtggcctcgatcaccctctgagagcagagtggaagaggacgcatgggcagggaggcagaagtgttgattacagcttcaatcgcatcccagcctggcttcacttgttcctgggtaggacagagacattaagccaggaaggagttntaggagtgtcttgcagtagtggcta

SEQ ID NO: 7446 - protein, 102 aa, Homo sapiens
  misc_feature (4)..(4): Wherein Xaa may be any naturally occuring amino acid
  misc_feature (28)..(28): Wherein Xaa may be any naturally occuring amino acid
  misc_feature (31)..(31): Wherein Xaa may be any naturally occuring amino acid
MAEXNMCPCALIRNKGALDKTSRRKSLXRLXRGAACSETSGWLCPAREAMSFLYSLLSAAKAHSSVTGCPRSRLVRFFLFFFMFMALPFFSCLWLSHFFFAF

SEQ ID NO: 7447 - DNA, 450 bp, Homo sapiens
atcattaaggccgcctttggtggtggtggtagaggtatgagagtcgttagagaaggtgacgacgtggcagatgcctttcaacgtgctacctccgaagcccgtactgccttcggtaatggtacctgctttgtggaaagattcttggacaagccaaagcatattgaagttcaattgttggctgataaccacggaaacgtggttcatcttttcgaaagagactgttctgtgcaaagaagacaccaaaaagttgtcgaagtcgctccagcaaagactttgccccgtgaagttcgtgacgctattttgacagatgctgttaaattagctaaggtatgtggttacagaaacgcaggtaccgccgaattcttggttgacaaccaaaacagacactatttcattgaaattaatccaagaattcaagtggagcataccatcactgaagaaatccccggt

SEQ ID NO: 7448 - protein, 150 aa, Homo sapiens
IIKAAFGGGGRGMRVVREGDDVADAFQRATSEARTAFGNGTCFVERFLDKPKHIEVQLLADNHGNVVHLFERDCSVQRRHQKVVEVAPAKTLPREVRDAILTDAVKLAKVCGYRNAGTAEFLVDNQNRHYFIEINPRIQVEHTITEEIPG

SEQ ID NO: 7449 - DNA, 234 bp, Homo sapiens
tacattggcgagattgctccaaccacactcaggggtgccctgggcactcttcaccaactggctcttgtcacaggcattcttattagtcagattgctggcctcagcttcattctgggcaatcaggattactggcacatcctacttggcctatctgctgtaccagctctcttgcgaggtctgctactgctcttctggccagaaagccccaagtacctttacctaaagggggaagaa

SEQ ID NO: 7450 - protein, 78 aa, Homo sapiens
YIGEIAPTTLRGALGTLHQLALVTGILISQIAGLSFILGNQDYWHILLGLSAVPALLRGLLLLFWPESPKYLYLKGEE

SEQ ID NO: 7451 - DNA, 252 bp, Homo sapiens
  misc_feature (1)..(1): Wherein n may be a, c, g or t
  misc_feature (2)..(2): Wherein n may be a, c, g or t
  misc_feature (3)..(3): Wherein n may be a, c, g or t
nnnctggaatcgcgagtctcgatcctgggctatgtgcagcgcggtggtatcccgtgcgcccacgaccgtctgctcgcgacccggctgggaaccatgggtgccaagctcgttgacgacggtgagttcggcatcatggtcgccgctcagggcggagacgccacgaccgttgcgttgaaagacgtcgctggcaaggttaaatacgtacctgccgaccacccatgggttaaggcggcccgtcaggtcggaaccggt

SEQ ID NO: 7452 - protein, 84 aa, Homo sapiens
  misc_feature (1)..(1): Wherein Xaa may be any naturally occuring amino acid
XLESRVSILGYVQRGGIPCAHDRLLATRLGTMGAKLVDDGEFGIMVAAQGGDATTVALKDVAGKVKYVPADHPWVKAARQVGTG

SEQ ID NO: 7453 - DNA, 685 bp, Homo sapiens
cggccggtacctggagtagcgaccgcgatctacgcctcgggcggtaaacccaatgacgtctcaggcgccctactgtgtgtcggcctgaccctacttatttgcggcatcatcatccaggccgccggatctcgggtagtccataaggttttgccaccgacggtgaccggcgcggtcgttatgctcatcgggttcaacctcgccccggtcgtcgccaaaacgtactggcttaccgatcagtggacggcgctcatcgtcatgttgctcgtcattgcgttgtcggtaggaccgcgtggcttcgtgtcccggatcgctatcttcctggctctggttatcggctatctgctgtcgtggaccgaagatctcgtatttggcccactgcaccactccgatggcagcgctgccccgcgggtgggctggtcggcggtccacagctccgcgtggatcggcctacctccggcgacgaacctggacaactggcaatacctgccccaggttcacaacggatctcactacgcatcaaccaatgtcgtcggattccacctgccggccttccacgtggccttcatcttgctcgcttcgccggtggtcatcgccctcatcgctgagaacaccggccacgtcaaagcggtcgctgaaataaccggtaagaaccttgaccaccaggtcggacgggcggtggcggccg

SEQ ID NO: 7454 - protein, 228 aa, Homo sapiens
RPVPGVATAIYASGGKPNDVSGALLCVGLTLLICGIIIQAAGSRVVHKVLPPTVTGAVVMLIGFNLAPVVAKTYWLTDQWTALIVMLLVIALSVGPRGFVSRIAIFLALVIGYLLSWTEDLVFGPLHHSDGSAAPRVGWSAVHSSAWIGLPPATNLDNWQYLPQVHNGSHYASTNVVGFHLPAFHVAFILLASPVVIALIAENTGHVKAVAEITGKNLDHQVGRAVAA

SEQ ID NO: 7455 - DNA, 317 bp, Homo sapiens
  misc_feature (226)..(226): Wherein n may be a, c, g or t
cctagggcagcaacgaccaccagcgtaccgacgatgagggacccgatcaccggaacggtccttacgatgatcccggctgctgtcagaccggccatgccaagaccgacggccagaacaataccgttgctccacgcgccggggcgtcgatcgaccaaccaggcatagaatgcgagaggaaccacgcacagggcaagtccaatcatcatctcgccccgccccaccgcgnttacaactcgcctatcatcccgagatcctgccacgcaccgactgcgaaggaaccgagctagcaaccgaggtgacatctggttgcctggcca

SEQ ID NO: 7456 - protein, 100 aa, Homo sapiens
  misc_feature (26)..(26): Wherein Xaa may be any naturally occuring amino acid
MSPRLLARFLRSRCVAGSRDDRRVVXAVGRGEMMIGLALCVVPLAFYAWLVDRRPGAWSNGIVLAVGLGMAGLTAAGIIVRTVPVIGSLIVGTLVVVAAL

SEQ ID NO: 7457 - DNA, 373 bp, Homo sapiens
  misc_feature (349)..(349): Wherein n may be a, c, g or t
  misc_feature (373)..(373): Wherein n may be a, c, g or t
gtgcacgacattttccgcagctggcgcgcgatcgctgatgaatacaccgcgtcccgggcgttctgcggcgagatctgggtcggtcgtgcgcaccggctggctgcctacctgcgcccggacgagctgcacaccgccttcaacttcgactttctgatggctccgtggcagcccggcaagctgcgcccggtgatcgactccacgattgcctcacacgccgcagtgggcgccccgccacactgggtgctcggcaatcatgacgtggcccgccccgtgtcgaggtacgcccgcgagcaggtcggcctcgaccccatggcccgcaaccttcaccacttcgagggccggaagggancttcgacctcagccgtcgacgccn

SEQ ID NO: 7458 - protein, 124 aa, Homo sapiens
  misc_feature (117)..(117): Wherein Xaa may be any naturally occuring amino acid
VHDIFRSWRAIADEYTASRAFCGEIWVGRAHRLAAYLRPDELHTAFNFDFLMAPWQPGKLRPVIDSTIASHAAVGAPPHWVLGNHDVARPVSRYAREQVGLDPMARNLHHFEGRKGXSTSAVDA

SEQ ID NO: 7459 - DNA, 320 bp, Homo sapiens
  misc_feature (320)..(320): Wherein n may be a, c, g or t
atctacggcgagaagtttcgggactcttatatgaaagcaatggagtcactggtgaacatgtgctcaggggacctgtctctggtaaccgactgcatggagcacgccctgacttcctgtcaccctcgcacccggtactcagctggttgggatgccaagttcttctacctccccatgagctaccttcccacctttctttcggatgccgtaatctactggggctctgtaaagcctgcccgagccctgtgaatctgcacatgtgtgcagacttggggaagtaaggcgggtggagggagataacaatgtggggtccattgttcacn

SEQ ID NO: 7460 - protein, 81 aa, Homo sapiens
IYGEKFRDSYMKAMESLVNMCSGDLSLVTDCMEHALTSCHPRTRYSAGWDAKFFYLPMSYLPTFLSDAVIYWGSVKPARAL

SEQ ID NO: 7461 - DNA, 380 bp, Homo sapiens
atgcatggagaggcaaggttaaccttcctgtttgtccctgactactggctcaggctcgctgagaaatcacctgttggaagcacctggaacaagtcaacctgctgtgtgtggagaacagccactctcccttccaagccctgtgtggttgctgcttgcaggttcctggagaacagagccaacactggaaggttaaaggactagtccagggttacctagcagaggtggtagcaggattagaacctggatttaggactcttttcattttacagcaaaaccttctgttttacatctttgactatattgtattaaaaagtcatcttctcttgtaagctctccctggcccatttttacctcattgagatcacttctccattctcact

SEQ ID NO: 7462 - protein, 66 aa, Homo sapiens [sequence omitted]

SEQ ID NO: 7463 - DNA, 249 bp, Homo sapiens
cgtaacggcgtcgagttcggcttgcgggtcagcggcctgccggggcaatggtttaccggcccggcgcagcaggtgatcggcccgatgtttgccggttataagccggaagattcggggctggatatcggcgacagcgccatcaccgaaacctacggtattggcggatttgctatggcgaccgcgcccgctatcgtcgcgctggtgggcggcacggtggaagaagctattgatttctcccgtcagatgcgc

SEQ ID NO: 7464 - protein, 83 aa, Homo sapiens
RNGVEFGLRVSGLPGQWFTGPAQQVIGPMFAGYKPEDSGLDIGDSAITETYGIGGFAMATAPAIVALVGGTVEEAIDFSRQMR

SEQ ID NO: 7465 - DNA, 318 bp, Homo sapiens
tgtacagcaagctgcctgcaaattcaccagaacatccaacccacagaaaatgaaactcacgtgtccaaaactgtgctcaccatcacctttcccactcctcaaaaccagctcctcacctggtttcataaatggaaaggaacaccccatttatcattacctcagttatgacaattcagcttcactgtcttcctcaccaagcacctctagttgcaggaagttgcatggctccttgcaattgtgattgggaaaatatcttgatactgactcttttccatgtttataaccggtgtctttattgaagccctcctaacctccaac

SEQ ID NO: 7466 - protein, 63 aa, Homo sapiens [sequence omitted]

SEQ ID NO: 7467 - DNA, 251 bp, Homo sapiens
  misc_feature (1)..(1): Wherein n may be a, c, g or t
  misc_feature (2)..(2): Wherein n may be a, c, g or t
nnagatctcgccgatagccgcaaggatgtcgctaaggctcgagcggagctcgagtccagccgcacccgggcctccgatgaagctcgccgtgccgaccatgctgatcaagcccggcgtagcgccgaggccctcttagagattaatcgtcactccgttgaagaactgaccgaacgcgatcaccggctgcaagaagctcgccgccatctcgaagaggggctcgacaagatcgagcaggaccggttggagctagc

SEQ ID NO: 7468 - protein, 83 aa, Homo sapiens
  misc_feature (1)..(1): Wherein Xaa may be any naturally occuring amino acid
XDLADSRKDVAKARAELESSRTRASDEARRADHADQARRSAEALLEINRHSVEELTERDHRLQEARRHLEEGLDKIEQDRLEL

SEQ ID NO: 7469 - DNA, 373 bp, Homo sapiens
gcgttaacacaggggttgaagagcaataaaaatttcgaactttatgaaacgtttatgagcttactgtttaaggcacacggtgatgttattcatgctaacaacaagaatcaagatattgcctctgctcttcaaaattgggaggatgtacataagaaggaagacagattagatgatcttgtgaagttttgcatgggagtggcagcttttgtgaccaccgcgtgagcattatatagaacaagtatattagtaacaaaggcagattgtatatttttctttttcctatgatgttttttgagagggtaaccaagaattatttattgggtttgttgcagtgttcttaaagggtccctcccacatttaataaatgatcgat

SEQ ID NO: 7470 - protein, 73 aa, Homo sapiens
ALTQGLKSNKNFELYETFMSLLFKAHGDVIHANNKNQDIASALQNWEDVHKKEDRLDDLVKFCMGVAAFVTTA

SEQ ID NO: 7471 - DNA, 439 bp, Homo sapiens
attgtgtgtttttcctctgaagcttttgtaatggaaattcttttaaaaagagggggacatggaatatagttttcataatatccgcacattccattccaagtcacacctccacacagttgtatttgaggacgtgggcttgaaatctggctccactacttaataattacatgactcaaccattttggccccacctttcttaaatattaaatgagagtgataatactctgctttagaaatattgtattcaatgagaacaagtgatagtgttttcttaactgtaatgtagcttccaatttttatacggtctctagtaaaaccttttaattgaaagggtccactttttaacatttcattttgaaatgctggaagtattaataattagtacctgttacttgatattcattcattcaaaaaatatttattaagacaataccttgtg

SEQ ID NO: 7472 - protein, 63 aa, Homo sapiens [sequence omitted]

SEQ ID NO: 7473 - DNA, 240 bp, Homo sapiens
ccatatgtgcctccagagaagagaaatacaggcgcaaacccaaattcccaaaacaagcctggtgctttgagacaagagattgatgacccggtgggaaaaatgagacaaaatatcaacagggttgctgaacgtggtgaaaggctaacatccattgaggacaaagctgataacttggctatctccgcacaaggattcaagagaggcgccaacagggtcagaaagcaaatgtggtggaaagat

SEQ ID NO: 7474 - protein, 80 aa, Homo sapiens
PYVPPEKRNTGANPNSQNKPGALRQEIDDPVGKMRQNINRVAERGERLTSIEDKADNLAISAQGFKRGANRVRKQMWWKD

SEQ ID NO: 7475 - DNA, 342 bp, Homo sapiens
  misc_feature (257)..(257): Wherein n may be a, c, g or t
  misc_feature (336)..(336): Wherein n may be a, c, g or t
  misc_feature (342)..(342): Wherein n may be a, c, g or t
ccatggacgtgccacgaagggttattcttcttttgactttttctgatggtttaaaactgtaagaacacacagctcacagtccacacggaagcaggcatgtggctcctgcctcactgtgggaggaaagatgttctcaaaagaaatggctgggtttgcggaggggtttgtggagggccgggcagtctgaacacagcccagctggccttggtggaggtgggcctggcacaggggggtgggagcagttcttcctgacgcanatcctaacgccttcaacactgaccttccaaagaaacagctgctggacgccgcccgacagcaacgagagccccactcctnaggcgn

SEQ ID NO: 7476 - protein, 51 aa, Homo sapiens
MWLLPHCGRKDVLKRNGWVCGGVCGGPGSLNTAQLALVEVGLAQGGGSSSS

SEQ ID NO: 7477 - DNA, 741 bp, Homo sapiens
  misc_feature (1)..(1): Wherein n may be a, c, g or t
nctcgaggacttctcccaggagccggagggactcagaggctgccccgctgcctgggcgtggccctagcgaaggagctcatcttcacaggccggagactgaatggggtacaagcccatgagttgggcctggtaaatcatgctgtggctcagaatgaggagggtgatgctgcctaccacagggcactggcactggcacaggagatcctgccccaggctcccattgctgtgcgcctgggcaaagttgccatcgacagaggaatggaggtggacatcgcatcagggatggccattgaacatatgtgctatgcccagaacatcccaacccaggaccggctggaagggatggcagccttcagggagaaacgacctcccaaatttgtgggcaagtaacccagctacctttaagcacacaccataaaggatctagaggagaagtttgcagcaggctcttcagtttcttcacaagaacactgtgattggcatggtacctagaaccaaggtgctgaccatgataaccactgccactttccatattgctcaccttggctagtcactgggatccagggctgcctggttctctacactcaagcaaattttgggtctgtgtcattggctctgatcactgtggatggaacagtgaaggtcgccttcattccctctcacagaataaatccagccaggtttatctgacttagtgtccggagccggattccagctctctgtagatgactcagggaattc

SEQ ID NO: 7478 - protein, 129 aa, Homo sapiens
  misc_feature (1)..(1): Wherein Xaa may be any naturally occuring amino acid
XRGLLPGAGGTQRLPRCLGVALAKELIFTGRRLNGVQAHELGLVNHAVAQNEEGDAAYHRALALAQEILPQAPIAVRLGKVAIDRGMEVDIASGMAIEHMCYAQNIPTQDRLEGMAAFREKRPPKFVGK

SEQ ID NO: 7479 - DNA, 270 bp, Homo sapiens
gtgcacacaggaggattgggaggtttcacagtaatctgtttggtttattcttttttaaatatgcatccgcgaataaaatcaaacgatatcgacgttctagataacctgggtgttctactgattgacttcttcgaactttacggaaaaaattttggttatgatgacgttgctataagcatatctgatggttacgcctcttatattcctaaatcgtgttggagaactttggaaccttcaaggagtaaattctcgctagctattcaggatccg

SEQ ID NO: 7480 - protein, 90 aa, Homo sapiens
VHTGGLGGFTVICLVYSFLNMHPRIKSNDIDVLDNLGVLLIDFFELYGKNFGYDDVAISISDGYASYIPKSCWRTLEPSRSKFSLAIQDP

SEQ ID NO: 7481 - DNA, 382 bp, Homo sapiens
gtgcactttctgattccgtcttgtcgaggctgtcggagaaaagagtagcacacacgacgataacaatagatacggtagattggatggggcacagatgtgcaaggcaatgcgcgaatcctgtctacgatgtctgtaccgtccatcctttttcctttgcatcggaaacatccgcgctgtctaccttaggaggacctcatgggacgggcgctggggactcgtgcccatccgggactgggggtgagatttcacaacggggccgctgctggtctcaccctctggccgggccggtccgtttttgtggcgtcgctgcaggtaaacgcgcagtttctgcgcgtttacccctgaggtgaataccatcttcaagcgtcaaactgcatccgga

SEQ ID NO: 7482 - protein, 88 aa, Homo sapiens
MGHRCARQCANPVYDVCTVHPFSFASETSALSTLGGPHGTGAGDSCPSGTGGEISQRGRCWSHPLAGPVRFCGVAAGKRAVSARLPLR

SEQ ID NO: 7483 - DNA, 411 bp, Homo sapiens
gaattccataacgatcagcaaaaataaagtaaatccttgctccccttgttctagttatattaatagagctcaagctcaagatgaaattagttttagaatttatttcacactgatgacttacattgcctaaatccctttagtctttttcatgtacactgctgctaagcctatttcctccatactgtacttgggcagttttgctatttttttaaatgtaagtacaatttttgtcttatgcattatctacagtccttttaggattcagggattatcttcaactacagaaatcttcttcatactgcagcaaaagcctataacaaatcgctactgtccagtcttaattccttaaatattatagttattatcctgcttacagctaatgtacttgttaaaataaacataagatcgtcc

SEQ ID NO: 7484 - protein, 66 aa, Homo sapiens [sequence omitted]

SEQ ID NO: 7485 - DNA, 411 bp, Homo sapiens
  misc_feature (411)..(411): Wherein n may be a, c, g or t
gggcccgcagtgtacatgattctcagttggagtaattgaaaatgttcagaaatgattgaaaacgagaagagaaagaaagtaccttggcaaatgcatgcttttaggaagcagacagaagactcaagttgggagggagaggaaggatcagagaaaagggaaaaccaaaagaaagtggagaagagaagaaggaatggaggctttcaagagggtgaaaggggattccattcaaaataggaggaggcggggatggtacctaaagagaaggttattgaactgaagattagtacatagacagtgaaggtccattctgtagaatggtggggaccaaggagtgaatgaagggtgaggagagagggcaatgggatatagttgtactctttacaacagtttctagtctgcatggattcgacn

SEQ ID NO: 7486 - protein, 66 aa, Homo sapiens [sequence omitted]

SEQ ID NO: 7487 - DNA, 249 bp, Homo sapiens
  misc_feature (52)..(52): Wherein n may be a, c, g or t
cggccgcgccgtcgatcaaggccggtaaaggcaccgcgagtaacgatggcanatctgattcgggtcgatgccgccaagctggatcaactgatcaacctggtcggtgagctgatcatcgccggtgccggcgccaatctggtggcggtgcgtagcggcataggcgagatgatcgaggccaccagtctgttgtctcggttggttgaagaggtccgtgattcggcgttgaccctgcgcatggtgcagattgga

SEQ ID NO: 7488 - protein, 83 aa, Homo sapiens
  misc_feature (18)..(18): Wherein Xaa may be any naturally occuring amino acid
RPRRRSRPVKAPRVTMAXLIRVDAAKLDQLINLVGELIIAGAGANLVAVRSGIGEMIEATSLLSRLVEEVRDSALTLRMVQIG

SEQ ID NO: 7489 - DNA, 270 bp, Homo sapiens
  misc_feature (1)..(1): Wherein n may be a, c, g or t
  misc_feature (2)..(2): Wherein n may be a, c, g or t
nnacgcgtgaatacaggtgattatcttattttagatgcggtaaacaatcgtgtttacgtgaatccgactcaagctgaaattgatgaattaaaaaccttagaagcaaaactcgctgaagaaaaagcagagttagcaaaattaaaagatttaccagcggtgacccttgatggtcataaagtcgacgtggtagccaatattggtacgattcgcgattgcgaaggggctcatcgtaatggtgcagcaggggtaggtttatcccgtacagaattc

SEQ ID NO: 7490 - protein, 90 aa, Homo sapiens
  misc_feature (1)..(1): Wherein Xaa may be any naturally occuring amino acid
XRVNTGDYLILDAVNNRVYVNPTQAEIDELKTLEAKLAEEKAELAKLKDLPAVTLDGHKVDVVANIGTIRDCEGAHRNGAAGVGLSRTEF

SEQ ID NO: 7491 - DNA, 270 bp, Homo sapiens
  misc_feature (258)..(258): Wherein n may be a, c, g or t
  misc_feature (266)..(266): Wherein n may be a, c, g or t
accggtgagagggatcagaggctgacggcacacccctcttagcactggcagccatgccatgcagggccaccccactatcctgcagggtcacacacgcacgtccctctggaccagggaagctacgcatatgggtgcagctgggggtaattacagactgtaggagtggtggggtctgtgggagcgcaagctcgtctcgaaggtattcatatccaaaattgcttaagacgctgtgctgctggcccggcacgatggcccgtntccccccncccc

SEQ ID NO: 7492 - protein, 72 aa, Homo sapiens
  misc_feature (69)..(69): Wherein Xaa may be any naturally occuring amino acid
MPCRATPLSCRVTHARPSGPGKLRIWVQLGVITDCRSGGVCGSASSSRRYSYPKLLKTLCCWPGTMARXPPP

SEQ ID NO: 7493 - DNA, 350 bp, Homo sapiens
acgcgtgactaatgtgcagttattacttcgagtggggatttcaattgcagatggctgatggtcactgatgtgtgagtgcggcccatgccctcggggcaggctggccttggccatctgcctgggaagcactttcgtgcctccagtggtggctacagcatcacacagagagggaggtggagatggaaggtgccccaagtcaaactgccacagaccctgcctgctcttactgagattcagaagtttttcttgaataaatgcttttagtgtgcatgcctttgtttctagaattccgactattttttcaaaacaattcttccagttctttccttgttttgggagtggagatttcc

SEQ ID NO: 7494 - protein, 60 aa, Homo sapiens
MCECGPCPRGRLALAICLGSTFVPPVVATASHREGGGDGRCPKSNCHRPCLLLLRFRSFS

SEQ ID NO: 7495 - DNA, 326 bp, Homo sapiens
accggtacctgtctaaccccacgccgcctgtgtcaccgtaggacagagcacaaaggagcacccaggatgcacacctgacacacttcgcggccgagccgcaagcctgaggagcgggagaccctcgcggttcagcggcgtgagggcagagcgacggagcccctccgcttctgtctgcgtgagcacattcgcatagaacaagagttctgacctggtcaaacacttgacacgcacataatggaggaaacttttggcatgctatcaaatgctttctcacatgcacacaacatctcctccccagcatgaaggaaaggcagctgaccctggcg

SEQ ID NO: 7496 - protein, 100 aa, Homo sapiens
MLGRRCCVHVRKHLIACQKFPPLCACQVFDQVRTLVLCECAHADRSGGAPSLCPHAAEPRGSPAPQACGSAAKCVRCASWVLLCALSYGDTGGVGLDRYR

SEQ ID NO: 7497 - DNA, 365 bp, Homo sapiens
gtccacagacaagctggagactgtgccacccctcaatgagctcacagaagtcccaggagaggataagaagaagaagaagaagaagaaggacagtgtggacacagtggccatcaaagtagaggaggatgagaagaatgaggccaagaagaagaaaggagagaaatgaagacatcctgggcagcttgggctggcgggccctggagctcaagccgtggccggggtccaggcatgttggactctgagctcatttggggaccacagaggctgtggtcagagagggaagctgaggcccatggccacatcctcatggcccatcaggggcaggaaccagacaatctcgtaggtgtcctgccccccagcctagg

SEQ ID NO: 7498 - protein, 67 aa, Homo sapiens
MKTSWAAWAGGPWSSSRGRGPGMLDSELIWGPQRLWSEREAEAHGHILMAHQGQEPDNLVGVLPPSL

SEQ ID NO: 7499 - DNA, 278 bp, Homo sapiens
gtcgacggcgacggctatgcgtcgcgcgcggaattccccggtgccgattattcgggagacgcactctatcgacgtatcttcacgcgctacaaagtgccgatgacgttgtcggtcatcgaaggcgaagtggggccgacaggcctgtatccgaaactgtcgccgcgcctcgaggcgctcgcgcggcagatgttcgcgctgccgtgggtgcagatcggttcgcacacctactcgcatccgttccagatggccgacctcgatgcgacgacgggcgcacgcgt

SEQ ID NO: 7500 - protein, 78 aa, Homo sapiens
MRVGVRTDLHPRQREHLPRERLEARRQFRIQACRPHFAFDDRQRHRHFVAREDTSIECVSRIIGTGEFRARRIAVAVD

SEQ ID NO: 7501 - DNA, 229 bp, Homo sapiens
atcaaggtcaaaactctcactggaaaagagatcgagatcgacattgaacccactgactcgattgacaggatcaaggagcgtgttgaagagaaagaaggcattcctcccgtgcagcaaaggctcatctatgctggtaagcagcttgctgatgacaagaccgcaaaggactacaacatcgagggtggatctgtcctccatcttgtccttcctctgaggggtggttactagt

SEQ ID NO: 7502 - protein, 75 aa, Homo sapiens
IKVKTLTGKEIEIDIEPTDSIDRIKERVEEKEGIPPVQQRLIYAGKQLADDKTAKDYNIEGGSVLHLVLPLRGGY

SEQ ID NO: 7503 - DNA, 450 bp, Homo sapiens
tccggataaagcagcaaccgggatcagtggcagaggtaaccacaatacacccacgttattctaactcctagaagctcagtttgatgaaaacatgaaatggcttcttggaatttttgaatgaagggtgaacattagaaaagatgccatgaagaagcacgaggcccaggactgcaaggctggggtcagagagaggaggataccaaatgcatagctttctctagggcggtcctgtggctggtgtcccctgaccttcaagaaaaggcaaggcagaataagcatgggtccctatgggaataactgaatgaatcatttaatcttatagtagagtaaaaatgaaaggagcttatcaaaattcagaataaaacatgaaacttgccaatgcctccaattgcgacccttaaaatgcatgcattgggccggacgcggtggctcacgcctgtaataccagca

SEQ ID NO: 7504 - protein, 67 aa, Homo sapiens [sequence omitted]

SEQ ID NO: 7505 - DNA, 163 bp, Homo sapiens
acgcgtgaagggaaagaagagccttctggaaggcatcaaaaagttcctcaggaagaactgaaactgaacattgtgcagagatagcactgggtaaatccagaggccaatgagagtaaaggtctacccaggcagggggatgatggccaagaatcatttgggtggg

SEQ ID NO: 7506 - protein, 51 aa, Homo sapiens [sequence omitted]

SEQ ID NO: 7507 - DNA, 266 bp, Homo sapiens
  misc_feature (1)..(1): Wherein n may be a, c, g or t
  misc_feature (2)..(2): Wherein n may be a, c, g or t
nngggcggatcaggtcaacaaactggccgtcctcttcacgccgagtatcgcgacctgccggcgacggtggagcgaattgctggacgcgacggctgcggcgatcatctcgtcgcccgctcgtcctgggggcaggccgcgccgggcatcctggtgctgagccatctcgatacagttcatccgatgggattcatcgaacggttaccattttggatcgaaggcgacagcgcgttcggcccgggcatctacgacatgaagggcggcgccta

SEQ ID NO: 7508 - protein, 88 aa, Homo sapiens
  misc_feature (1)..(1): Wherein Xaa may be any naturally occuring amino acid
XGGSGQQTGRPLHAEYRDLPATVERIAGRDGCGDHLVARSSWGQAAPGILVLSHLDTVHPMGFIERLPFWIEGDSAFGPGIYDMKGGA

SEQ ID NO: 7509 - DNA, 268 bp, Homo sapiens
cgctcaatggaaggtcaagttcactttatgtgggtgggcttaggcaatgttatcggttcaacctatttagcctacgcctgggacgatcttgcccctgtgcttgcgttagattacgaaaaacttaacttattgaaatcctttggcccagttgccggtttattagtaaattacggcttgcttattctctgcttaatcgctgttgtttggtgggaacaccacttcttgaaaaaagccaaagcaaaaatcgctgcagcaaatccacaagctt

SEQ ID NO: 7510 - protein, 89 aa, Homo sapiens
RSMEGQVHFMWVGLGNVIGSTYLAYAWDDLAPVLALDYEKLNLLKSFGPVAGLLVNYGLLILCLIAVVWWEHHFLKKAKAKIAAANPQA

SEQ ID NO: 7511 - DNA, 300 bp, Homo sapiens
  misc_feature (300)..(300): Wherein n may be a, c, g or t
ggatcctctgtgggactgtgcgttccctaaggacagggaccgaaaggctcagtttgtgtctgtgcccgcacagcctagggccccacccggctcagagcctgctctcacaacacttcatttgggtggctgcgcgagactacactccccaggtagtctggtcccagggcgccctctgatggcagaaagaggcctaacatctgaacccgaaagctggggcctggagggaagaagccagcctgagcgtttgggaagaaggcaagtgaacaaatccccaccccaccccaaaatatcatggggcan

SEQ ID NO: 7512 - protein, 62 aa, Homo sapiens [sequence omitted]

SEQ ID NO: 7513 - DNA, 279 bp, Homo sapiens
  misc_feature (1)..(1): Wherein n may be a, c, g or t
  misc_feature (2)..(2): Wherein n may be a, c, g or t
  misc_feature (211)..(211): Wherein n may be a, c, g or t
nncgccccgcatcatgcacgacagtttccgcgatgcgttaatgcattcacccacggcggcacaaattgaagcgctgctgaaacaagagcttgaactctgacaggagatggcatggaactctatctggataccgctgatatcagcgcggttaaacgtttatcgcggattttaccgttgcagggcgtgaccaccaatccgagcattgtggcgnaaacccgaacctcattgtgggaagtcttaccggcgctgcgcgatgcactcgacggcgaaggaaagctt

SEQ ID NO: 7514 - protein, 56 aa, Homo sapiens
  misc_feature (34)..(34): Wherein Xaa may be any naturally occuring amino acid
MELYLDTADISAVKRLSRILPLQGVTTNPSIVAXTRTSLWEVLPALRDALDGEGKL

SEQ ID NO: 7515 - DNA, 353 bp, Homo sapiens
gtgcacgaggtttggctcccaggtgtcctgcctgccagactcgcggtagctcggctcggccagttttgctagggctgcctggcgagccacaccaattcccatcctttggtatcgccaggattcggcggctgtgaaactgatttccggtcgctaaggtctccatggagacagcactttaaccactttctcccactgtcattcctcgactccacgtggttcagaaatcgcccagagaatgtttgtgggagtcagccaggaaggtgtagagtgaagcagcgttctaaagggaagcagtaagtgggacctaggaggagtgtaatttactgggcaccttctggccttgcgtagacacc

SEQ ID NO: 7516 - protein, 54 aa, Homo sapiens
METLATGNQFHSRRILAIPKDGNWCGSPGSPSKTGRAELPRVWQAGHLGAKPRA

SEQ ID NO: 7517 - DNA, 353 bp, Homo sapiens
  misc_feature (318)..(318): Wherein n may be a, c, g or t
taatgcatggaaaacttccaaagtggctgtcatcttgagtgacacaattatagcctgtgtacaaacccttgataagaaaatggaaaagaaaaaaaaatcatcaagataaaaaaattgcctgaagataatgaaggtgagcaatgaatagtgaagggcacagaactgcttttttttccagggatgggaaaaagaggcagagagggaaaagttccattttgatcccaggggacaattccttaccttccttgttcgcctgatagtcaagtgagaaatggcttgcatgacaagatactgcatggaaaaagcctgggctttagnaggataggaaggaagaccatgtactggttctacca

SEQ ID NO: 7518 - protein, 99 aa, Homo sapiens [sequence omitted]

SEQ ID NO: 7519 - DNA, 220 bp, Homo sapiens
tgtacagagaatcaagacttacacgtatttacagggaagtagaaaagacatggtaagacgtagcaaatcgaatgtgaaccctgggaagatagagcactcccttttcctgacctttctttactccactaccatggcccgtgctattctgaggccactccccagttgctcagacaaacctatacccaagaatagaggtgtgaatcagtcagaggatgctagc

SEQ ID NO: 7520 - protein, 57 aa, Homo sapiens
MVRRSKSNVNPGKIEHSLFLTFLYSTTMARAILRPLPSCSDKPIPKNRGVNQSEDAS

SEQ ID NO: 7521 - DNA, 336 bp, Homo sapiens
  misc_feature (1)..(1): Wherein n may be a, c, g or t
nacgcgtccctcaaccgtcatcccatcatctcccgctactgtcaggccctggtgtgggaggtcgtggccgacgggagagtcctgcagaccttccgccctacggaagatggatcgctcaccgacgtacacgacgacgctgtgacgctgactgaagaagccacgattcggatcgcgcactcgtgcactacaccgctcgacgacgtgaccgcatggaagcaacacttcatcgattacgaagtcgctcccctgctggaacagttccgcaccgagcgctacgagccgccctctgacgaagccctggccagcgttcacgatttcgaagggtgggtggtcgac

SEQ ID NO: 7522 - protein, 112 aa, Homo sapiens
  misc_feature (1)..(1): Wherein Xaa may be any naturally occuring amino acid
XASLNRHPIISRYCQALVWEVVADGRVLQTFRPTEDGSLTDVHDDAVTLTEEATIRIAHSCTTPLDDVTAWKQHFIDYEVAPLLEQFRTERYEPPSDEALASVHDFEGWVVD

SEQ ID NO: 7523 - DNA, 401 bp, Homo sapiens
  misc_feature (401)..(401): Wherein n may be a, c, g or t
cggccgtacttctgcatgctgggtgccatatatctgctgtacatcatctgcttcaccatgtgctgcatctaccgccccctcaagcccaggaccaataaccgcacgagcccccgggacaacaccctcttacagcagaagctacttcaggaagcctacatgacccctaaggacgatatccggctggtcggggagctggtgactgtcattggggctatcatcatcctgctggtagaggttccagacatcttcagaatgggggtcactcgcttctttggacagaccatccttgggggcccattccatgtcctcatcatcacctatgccttcatggtgctggtgaccatggtgatgcggctcatcagtgccagcggggaggtggtactctgcatggatattcgacn

SEQ ID NO: 7524 - protein, 133 aa, Homo sapiens
RPYFCMLGAIYLLYIICFTMCCIYRPLKPRTNNRTSPRDNTLLQQKLLQEAYMTPKDDIRLVGELVTVIGAIIILLVEVPDIFRMGVTRFFGQTILGGPFHVLIITYAFMVLVTMVMRLISASGEVVLCMDIR

SEQ ID NO: 7525 - DNA, 405 bp, Homo sapiens
  misc_feature (1)..(1): Wherein n may be a, c, g or t
ngggggggggtgcgcaccgcgggagtcatgaagggtgtgttgctggcccctgacgctgatctcgacgttgagctggggaagttgcgaaacatccacttgcctaccgaccagatcgcccaggtgtccacccgcactgcctacccgtcacccttgggcgggcgcagtgtggtgctcttcgacttcggtcttaagcactccatcttgcgggagctgagcaggcgaggttgtgccgtgaccgttgtgccgtggaacatctcagccgatcgggtgcgggccctggcgcccgacggcatcatgctttctaacggccccggggacccgaaatccatcccgggggtacaggatgtggtgcgagaactgcaggaggagtacccggtcttcggtatttgcatgggccaccagatc

SEQ ID NO: 7526 - protein, 135 aa, Homo sapiens
  misc_feature (1)..(1): Wherein Xaa may be any naturally occuring amino acid
XGGVRTAGVMKGVLLAPDADLDVELGKLRNIHLPTDQIAQVSTRTAYPSPLGGRSVVLFDFGLKHSILRELSRRGCAVTVVPWNISADRVRALAPDGIMLSNGPGDPKSIPGVQDVVRELQEEYPVFGICMGHQI

SEQ ID NO: 7527 - DNA, 294 bp, Homo sapiens
gatctaataaacggaataaaacaactaaaagaaaaggaatcgcctagaatagtgaaaactcacctgccagctaagctccttccagcatcattttgggaaaagaattgcaagataatctatctttgccgaaatgccaaagatgtcgtcgtttcttattactactttttcctgatcatgaaaagttatccaaatcctaaatctttttctgaatttgtggagaaatttatggaagggcaagttccgtatggttcctggtatgatcatgtaaaatcttggtgggagaagagtaagaat

SEQ ID NO: 7528 - protein, 98 aa, Homo sapiens
DLINGIKQLKEKESPRIVKTHLPAKLLPASFWEKNCKIIYLCRNAKDVVVSYYYFFLIMKSYPNPKSFSEFVEKFMEGQVPYGSWYDHVKSWWEKSKN

SEQ ID NO: 7529 - DNA, 249 bp, Homo sapiens
  misc_feature (1)..(1): Wherein n may be a, c, g or t
  misc_feature (2)..(2): Wherein n may be a, c, g or t
nngtgcacatttgtagcactgggtggtggtgtcattggggacatgtgtggttttgcagctgctgcattcctccggggcgtcaatttcatacagataccaactactctgatggcccaggtggattcatctgttggtgggaaaaccgggattaaccacccactaggaaagaacttgattggggcattttaccagccacaatgtgttctaattgacacaaatacactgaacacattgcctgacagggagcta

SEQ ID NO: 7530 - protein, 83 aa, Homo sapiens
  misc_feature (1)..(1): Wherein Xaa may be any naturally occuring amino acid
XCTFVALGGGVIGDMCGFAAAAFLRGVNFIQIPTTLMAQVDSSVGGKTGINHPLGKNLIGAFYQPQCVLIDTNTLNTLPDREL

SEQ ID NO: 7531 - DNA, 369 bp, Homo sapiens
  misc_feature (361)..(361): Wherein n may be a, c, g or t
  misc_feature (363)..(363): Wherein n may be a, c, g or t
  misc_feature (365)..(365): Wherein n may be a, c, g or t
  misc_feature (367)..(367): Wherein n may be a, c, g or t
  misc_feature (368)..(368): Wherein n may be a, c, g or t
  misc_feature (369)..(369): Wherein n may be a, c, g or t
cggccggatatgctccaatagcggcctcatttgccctccaggaacccgatcatggccgacgccaccgaccaagccttctacgaccgtgcagacgcccatatcgagctggcgaacgaacagcttaaaaccttgcgaaaaacctgggcgaggtcagcgcttcaatgatgttcggcaccacgcgcttcaacgcctgggccagcgcgcgcaatttcaaatccggcgctgaaatggcccaagcacgggaagcgatgctgaagtatttctgtgatcagtaccggatgatgctggaggataacctggacgatcacattaataatttcagccagtacatgctcgttaaagcaacggactgaaccccccncncncnnn

SEQ ID NO: 7532 - protein, 63 aa, Homo sapiens
MMFGTTRFNAWASARNFKSGAEMAQAREAMLKYFCDQYRMMLEDNLDDHINNFSQYMLVKATD

SEQ ID NO: 7533 - DNA, 372 bp, Homo sapiens
  misc_feature (1)..(1): Wherein n may be a, c, g or t
  misc_feature (2)..(2): Wherein n may be a, c, g or t
  misc_feature (61)..(61): Wherein n may be a, c, g or t
nngaccgtcagccagtaccgcgaggacaacgagttgatcgaaatcctcatgcgcggcactngtcaggaacgcaaccggttgtcggcattgccgagcctggcggtaccgacggacaacggcaccagcgtggcgctgtcgcagatcgcgaccctggagtacggtttcgaggaaggcattatctggcaccgcaaccgcttgccgaccgtgacgatccgcgccgatatctacggccaggagcagcccctgagcctggtcaagcaaatcaagccgaccctggatccggttcgcgccgagttgccggacggctacctgctggaggtcggtggtaccgtggaggattcggagcgcggccaggcctcggtgaatgccggc

SEQ ID NO: 7534 - protein, 124 aa, Homo sapiens
  misc_feature (1)..(1): Wherein Xaa may be any naturally occuring amino acid
  misc_feature (21)..(21): Wherein Xaa may be any naturally occuring amino acid
XTVSQYREDNELIEILMRGTXQERNRLSALPSLAVPTDNGTSVALSQIATLEYGFEEGIIWHRNRLPTVTIRADIYGQEQPLSLVKQIKPTLDPVRAELPDGYLLEVGGTVEDSERGQASVNAG

SEQ ID NO: 7535 - DNA, 348 bp, Homo sapiens
  misc_feature (348)..(348): Wherein n may be a, c, g or t
tgatcaccgacccaggatgtaccacagttcactcagattcaacacaagccaaagggagcccgctatgggcccccatctagcggaagggctgcttcccttagccagagtgtacctcactcctcagctagaaatctgggctttgtcctccattttgaacttctccatcacctacctcatcaatgggccaccaagtcattcacactggaggtggtagagaaagccaactgtgtgccaacagcttttttttttggaaatccttcctgttctacccccaaaatgtctcatgcacacagcccctcccttattccctctctcccaggtcactgacaggttccagcccctcactan

SEQ ID NO: 7536 - protein, 65 aa, Homo sapiens [sequence omitted]

SEQ ID NO: 7537 - DNA, 366 bp, Homo sapiens
gtaattcatccggtctggagatttgaatctcaccaggcaagtgttgtattgactgtcaagatgtcaccaagcttacccgatgaaatatcacaaatcgtaatagaagacctcgttgtcttagtgaatatcgatggtgctaatgcaacaagcgctttatcaaaacctcagggctccttcagtaaagaaaagaagagaataacgtggagatttaaagaaccagttgttttgacaagaaatggtgaaggtcaaagattaatcgccagatttattacagacggcctggcacatgaatccgctaaaggcgtgattaccaaattcactatcagtgagacggataacgtggctctaccccatagcggagccggc

SEQ ID NO: 7538 - protein, 122 aa, Homo sapiens
VIHPVWRFESHQASVVLTVKMSPSLPDEISQIVIEDLVVLVNIDGANATSALSKPQGSFSKEKKRITWRFKEPVVLTRNGEGQRLIARFITDGLAHESAKGVITKFTISETDNVALPHSGAG

SEQ ID NO: 7539 - DNA, 309 bp, Homo sapiens
ctagagcaacatcgaatgtctccacagcttgcgaccagcagaccagcatcaccaacattctctactggttccaaagtggtgttaaacgatacgaaaaatgacatgaaagaatctaatataaatggcgagcgtactagtgcatcatgcaggtacacacgtgattcgaagggcaacggccagacccaaatagaacaagtatcagctagacactcatccagaggcaataagcacacatcggtcgcgggactcgtaacaatccctggctcccccacaactgcaagaacaaggaatgcaccatcatcaaagctt

SEQ ID NO: 7540 - protein, 103 aa, Homo sapiens
LEQHRMSPQLATSRPASPTFSTGSKVVLNDTKNDMKESNINGERTSASCRYTRDSKGNGQTQIEQVSARHSSRGNKHTSVAGLVTIPGSPTTARTRNAPSSKL

SEQ ID NO: 7541 - DNA, 345 bp, Homo sapiens
  misc_feature (52)..(52): Wherein n may be a, c, g or t
  misc_feature (53)..(53): Wherein n may be a, c, g or t
  misc_feature (283)..(283): Wherein n may be a, c, g or t
ccatgtgtgtgtatatgctcgtgtgtgatggtatgtatatgtgtatatgtgnntatatgtatacacgtgtgttatggtgtgtatatatgtatatacgtgtgtgtatatatatgtatatgggtatgtgtgtgcatgtgcgtatgggtgtgtatatgtgtatatatgtaggtgtgtatatctgggaatatatgggtgtgtatatgtgtgtataggtttttatatgtggggaaatatttaaacctgtgtatattggaatgtgtgtgtatatgtgtgtatatatggnggtgtgtatgtacatgtatgtgtgtatatatgtgtgtatatacgtaggtgtgcatatgtgtg

SEQ ID NO: 7542 - protein, 55 aa, Homo sapiens
  misc_feature (18)..(18): Wherein Xaa may be any naturally occuring amino acid
PCVCICSCVMVCICVYVXICIHVCYGVYICIYVCVYICIWVCVCMCVWVCICVYM

SEQ ID NO: 7543 - DNA, 343 bp, Homo sapiens
agatctggcattattactacttatgtaaaagaagaagatcaatttaaaaaaggaaaaggaaggggtttgcgtattggtacattgcaagcaactaaacgtctaatcgactcatcctacgaagctctgtttttaagcatttattgtctatcctcatcaaagcaaagtttcgtaacgaaaaaaaaagcagcctgctaccgataggagagtaaattaaggtcagctagacgattagcatacaagttagatagttgtgctttatccagcacagcatgaagtaaagctcgtacttatcctgcctagaacttattctgttactctcatctctgacggcaacgcgacgcgt

SEQ ID NO: 7544 - protein, 66 aa, Homo sapiens
RSGIITTYVKEEDQFKKGKGRGLRIGTLQATKRLIDSSYEALFLSIYCLSSSKQSFVTKKKAACYR

SEQ ID NO: 7545 - DNA, 352 bp, Homo sapiens
tggccagagggcaaggacgcactccagcaagccagccactccttggctgggcaggtgccctggggaaggccgggagccctgcaggacaacagcctctcacctgggtcactcacttccctttgctgtcttaattttcctcccactccctcaccgcgtcctccgcctgctggggccctggctgggttgggagatgtgggtacaaggtgtctccttctcctctagctgcagccgcaggctgggctcctctcggggccgttggttttgatcatcagagatacacagcggcggcgggtcgggggctggctggactgctgctgcccttggagtgctctccctgccctccggcatggct

SEQ ID NO: 7546 - protein, 66 aa, Homo sapiens [sequence omitted]

SEQ ID NO: 7547 - DNA, 312 bp, Homo sapiens
  misc_feature (312)..(312): Wherein n may be a, c, g or t
gccggccttggactgcgagacacagaagttcaccacatactcccgatcatccgggtgcatgcgtgacacccagtcatcgatcccgacccaactgtccggtgtccagccgagcagggtctcgatctgcgggccgatgtagctgaaggtcatggtttgccagtcgattcgccagggaatggccttggtcgattcgagcagggttttgtagacgtcgctatcggtttcggtagaaggcgtggcgctcatgatcgatcaggcttcgctggcggaggtgggcgctagaatgttgcgcgcacggcggctaatcaagtn

SEQ ID NO: 7548 - protein, 82 aa, Homo sapiens
MSATPSTETDSDVYKTLLESTKAIPWRIDWQTMTFSYIGPQIETLLGWTPDSWVGIDDWVSRMHPDDREYVVNFCVSQSKAG

SEQ ID NO: 7549 - DNA, 228 bp, Homo sapiens
gtccgcgcaggggtctcggtggtgatcgccgggccgccgaatgccggcaagtcgagcctgctgaacgccttgtcgggcgaggacagcgcgatcgtgtcaccgatcgccggcaccacgcgcgacgcggtgtccgtgcgtctgcagatcggcggcgtgctggtgacgctgaccgacacggcgggattgcacgagacctcggacccgatcgaggccgagggcatgcggcgc

SEQ ID NO: 7550 - protein, 76 aa, Homo sapiens
VRAGVSVVIAGPPNAGKSSLLNALSGEDSAIVSPIAGTTRDAVSVRLQIGGVLVTLTDTAGLHETSDPIEAEGMRR

SEQ ID NO: 7551 - DNA, 204 bp, Homo sapiens
  misc_feature (204)..(204): Wherein n may be a, c, g or t
gcgcgcgggaggcatctgtctaaaggcacgtgaccagcatttatggggagaggaggcttcacgtcgagtgctgtgggcttgcactggaagagaagaagggacagccaaaggagggccccttcctgtggcggggcccttgaggactgacaagagctgggtccctggacggcaattagccactgaatgggacaggggaggaccatn

SEQ ID NO: 7552 - protein, 67 aa, Homo sapiens [sequence omitted]

SEQ ID NO: 7553 - DNA, 230 bp, Homo sapiens
gggggcccggggtgggatcccccaggaacgggcccccagggggggggaattgggcttaccccccccccccctttttccaaaggccgggggggggaaaaaggcccgggttcctcccaaccccgttttaaccaggaaccccccccccctcccggggaaaaaggtttttttttttttttttttttttttttttcttaggtagctcgtctggttacggagagaagacaacgcgt

SEQ ID NO: 7554 - protein, 64 aa, Homo sapiens
GGPGWDPPGTGPQGGGIGLTPPPPFSKGRGGEKGPGSSQPRFNQEPPPPPGEKGFFFFFFFFFS

SEQ ID NO: 7555 - DNA, 361 bp, Homo sapiens
ggatccgtgatgggtattttagccaagtgagactttatgtatgtgtacatgtctatgtggatgttggccacatgtgcaggtgcctcagaacacctatggccccttggagctggagttacaggtgagtgagccctcccacataggagctgggaatcgaacttaaagtcctggaagagcagcagggtactcttaggcatgagtctctgttcagacctattggaagtaagtaaccagaccttgaccagacctttcatttgctttccttgtgaggtggcactcctgtgctctgcagtctcagctgctgctttggaacagggacagtgacagttggagagctgcaatcagggcctgtggcacacgc

SEQ ID NO: 7556 - protein, 84 aa, Homo sapiens
MKGLVKVWLLTSNRSEQRLMPKSTLLLFQDFKFDSQLLCGRAHSPVTPAPRGHRCSEAPAHVANIHIDMYTYIKSHLAKIPITD

(The sequence listing continues in the following parts.)
